United States Patent Application Publication US 2006/0150283 A1 - sequence listing, part 13

SEQ ID NO: 49459 - protein, 245 aa, Arabidopsis thaliana
  peptide (1)..(245): Ceres Seq. ID no. 15221230
MSEDPEYRCFIGGLAWTTSDRGLRDAFEKYGHLVEAKVVLDKFSGRSRGFGFITFDEKKAMDEAIAAMNGMDLDGRTITVDKAQPHQGGAGRDNDGDRGRDRGYDRDRSRPSGGRGGGDCFKCGKPGHFARECPSESSRDGGGRFSSKDDRYSSKDDRYGAKDDRYGAKEDRYGAKDDRYSSKDDRYSSKDDRYGSRDGGGSRYGPDRSGERAGGRSRDGGSRGAPGGERHSRAPYDRPRAGGFH

SEQ ID NO: 49460 - protein, 223 aa, Arabidopsis thaliana
  peptide (1)..(223): Ceres Seq. ID no. 15221231
MEWIWMGELSLLIKLSLIRVVQAEIMMVTVVETVDMIVIAVVPLVGEVVEIALNVASLDILQESVLLKVVEMVVEGSAQRMIGTVRRTIGMVQKMIGMVQRRIGMVQRMIGTAPRMIGTAPRMIGMVVGMVEVVAMDLIAVVNALEDAAGMVAAVELQEVRGTVVLHMTAPELVVSTRILLQRLKKLKVSAFSSCQVKVTLDGLFSSMYLDSSRKKMCSLFWP

SEQ ID NO: 49461 - DNA, 1488 bp, Arabidopsis thaliana
  misc_feature (1)..(1488): Ceres Seq. ID no. 13592593
  misc_feature (1)..(1488): Ortholog of  Ceres SEQ ID NO 14308389 as cited in SEQ ID NO 55226
  misc_feature (1)..(1488): Ortholog of  Ceres SEQ ID NO 14308049 as cited in SEQ ID NO 66203
  misc_feature (1)..(1488): Ortholog of  Ceres SEQ ID NO 14313567 as cited in SEQ ID NO 68074
gaaagagaaaaagaaagggggtttgtgttatggctcccataacttttagaaaatcttacactatagtaccggccgaaccaacgtggagcggtaggtttcccttagccgagtgggatcaagttggtacaattactcacattcccaccctttacttttacgacaagccatctgaatctttccaaggcaatgtagtcgaaatcctaaaaacctcgttgagccgtgtgctagtccatttttaccctatggctggccgtctcagatggctccctcggggacggttcgagctcaattgtaacgccgagggagtggaattcattgaagcggaatctgaggggaagctttcggatttcaaagacttctctcctacgccggaattcgagaatcttatgccgcaagtaaactataaaaaccctatcgaaacgattcctctatttttagctcaggtaaccaaattcaaatgcggtggaataagccttagcgtcaacgtttcccacgcgatcgtagatggccaaagcgcgcttcacttaatatcggaatggggaagactcgcgcgcggtgaaccgttagaaaccgttccatttctagaccggaaaatcctctgggctggtgaaccgctcccaccgtttgtgtcgcccccaaagttcgaccacaaagagtttgatcagccaccgtttttgatcggagaaacggacaatgtagaagagagaaagaagaaaacgattgtggtgatgctaccactgagcacatctcagctgcagaagctacgaagtaaagccaacggaagcaaacactctgacccggcgaaagggtttacaaggtacgagaccgtcaccggacacgtgtggaggtgcgcgtgtaaagcacgtggccactctccggagcaaccaacggctctaggaatctgtatagatactcgtagtcggatggagccacctctgccacgcggctacttcggcaatgctactcttgacgtggtcgcagcaagcacctcaggtgaactgatatcgaatgaattgggtttcgcggcgagtttaatcagtaaagccataaagaatgtaacaaacgaatacgtgatgattgggatagagtatcttaagaaccaaaaagatctgaagaagtttcaagatctacatgccttgggaagcacggaaggtccattctacggaaacccaaatcttggagtggtgagctggttaactttgccaatgtacggccttgatttcggatggggcaaagagttctacacgggaccaggcacgcatgactttgacggcgactcgctgatcttgccggatcaaaacgaagatggctcggtgattctcgcgacgtgtctacaggtggctcacatggaggccttcaagaaacacttttatgaagatatctaggccttatatgttttttatatacatgacgtatacaaatatttatgcactttcatttgaattctacttatattgtagtgattattgaattgtaataacagattct

SEQ ID NO: 49462 - protein, 460 aa, Arabidopsis thaliana
  peptide (1)..(460): Ceres Seq. ID no. 13592594
KRKRKGVCVMAPITFRKSYTIVPAEPTWSGRFPLAEWDQVGTITHIPTLYFYDKPSESFQGNVVEILKTSLSRVLVHFYPMAGRLRWLPRGRFELNCNAEGVEFIEAESEGKLSDFKDFSPTPEFENLMPQVNYKNPIETIPLFLAQVTKFKCGGISLSVNVSHAIVDGQSALHLISEWGRLARGEPLETVPFLDRKILWAGEPLPPFVSPPKFDHKEFDQPPFLIGETDNVEERKKKTIVVMLPLSTSQLQKLRSKANGSKHSDPAKGFTRYETVTGHVWRCACKARGHSPEQPTALGICIDTRSRMEPPLPRGYFGNATLDVVAASTSGELISNELGFAASLISKAIKNVTNEYVMIGIEYLKNQKDLKKFQDLHALGSTEGPFYGNPNLGVVSWLTLPMYGLDFGWGKEFYTGPGTHDFDGDSLILPDQNEDGSVILATCLQVAHMEAFKKHFYEDI

SEQ ID NO: 49463 - protein, 451 aa, Arabidopsis thaliana
  peptide (1)..(451): Ceres Seq. ID no. 13592595
MAPITFRKSYTIVPAEPTWSGRFPLAEWDQVGTITHIPTLYFYDKPSESFQGNVVEILKTSLSRVLVHFYPMAGRLRWLPRGRFELNCNAEGVEFIEAESEGKLSDFKDFSPTPEFENLMPQVNYKNPIETIPLFLAQVTKFKCGGISLSVNVSHAIVDGQSALHLISEWGRLARGEPLETVPFLDRKILWAGEPLPPFVSPPKFDHKEFDQPPFLIGETDNVEERKKKTIVVMLPLSTSQLQKLRSKANGSKHSDPAKGFTRYETVTGHVWRCACKARGHSPEQPTALGICIDTRSRMEPPLPRGYFGNATLDVVAASTSGELISNELGFAASLISKAIKNVTNEYVMIGIEYLKNQKDLKKFQDLHALGSTEGPFYGNPNLGVVSWLTLPMYGLDFGWGKEFYTGPGTHDFDGDSLILPDQNEDGSVILATCLQVAHMEAFKKHFYEDI

SEQ ID NO: 49464 - protein, 380 aa, Arabidopsis thaliana
  peptide (1)..(380): Ceres Seq. ID no. 13592596
MAGRLRWLPRGRFELNCNAEGVEFIEAESEGKLSDFKDFSPTPEFENLMPQVNYKNPIETIPLFLAQVTKFKCGGISLSVNVSHAIVDGQSALHLISEWGRLARGEPLETVPFLDRKILWAGEPLPPFVSPPKFDHKEFDQPPFLIGETDNVEERKKKTIVVMLPLSTSQLQKLRSKANGSKHSDPAKGFTRYETVTGHVWRCACKARGHSPEQPTALGICIDTRSRMEPPLPRGYFGNATLDVVAASTSGELISNELGFAASLISKAIKNVTNEYVMIGIEYLKNQKDLKKFQDLHALGSTEGPFYGNPNLGVVSWLTLPMYGLDFGWGKEFYTGPGTHDFDGDSLILPDQNEDGSVILATCLQVAHMEAFKKHFYEDI

SEQ ID NO: 49465 - DNA, 682 bp, Arabidopsis thaliana; identical to SEQ ID NO: 47245
  misc_feature (1)..(682): Ceres Seq. ID no. 12601843
  misc_feature (1)..(682): Ortholog of  Ceres SEQ ID NO 15179194 as cited in SEQ ID NO 0

SEQ ID NO: 49466 - protein, 181 aa, Arabidopsis thaliana; identical to SEQ ID NO: 47246
  peptide (1)..(181): Ceres Seq. ID no. 12601844

SEQ ID NO: 49467 - protein, 177 aa, Arabidopsis thaliana; identical to SEQ ID NO: 47247
  peptide (1)..(177): Ceres Seq. ID no. 12601845

SEQ ID NO: 49468 - protein, 162 aa, Arabidopsis thaliana; identical to SEQ ID NO: 47248
  peptide (1)..(162): Ceres Seq. ID no. 12601846

SEQ ID NO: 49469 - DNA, 1545 bp, Arabidopsis thaliana
  misc_feature (1)..(1545): Ceres Seq. ID no. 12591195
  misc_feature (1)..(1545): Ortholog of  Ceres SEQ ID NO 13597638 as cited in SEQ ID NO 65448
  misc_feature (1)..(1545): Ortholog of  Ceres SEQ ID NO 14302772 as cited in SEQ ID NO 69055
atacacaacataattcacaacacaacacaaacacatttctgttttctccattgtttcaaaccataaaaaaaaacacagattaaatggaatcgagtagcgttgatgagagtactacaagtacaggttccatctgtgaaaccccggcgataactccggcgaaaaagtcgtcggtaggtaacttatacaggatgggaagcggatcaagcgttgtgttagattcagagaacggcgtagaagctgaatctaggaagcttccgtcgtcaaaatacaaaggtgtggtgccacaaccaaacggaagatggggagctcagatttacgagaaacaccagcgcgtgtggctcgggacattcaacgaagaagacgaagccgctcgtgcctacgacgtcgcggttcacaggttccgtcgccgtgacgccgtcacaaatttcaaagacgtgaagatggacgaagacgaggtcgatttcttgaattctcattcgaaatctgagatcgttgatatgttgaggaaacatacttataacgaagagttagagcagagtaaacggcgtcgtaatggtaacggaaacatgactaggacgttgttaacgtcggggttgagtaatgatggtgtttctacgacggggtttagatcggcggaggcactgtttgagaaagcggtaacgccaagcgacgttgggaagctaaaccgtttggttataccgaaacatcacgcagagaaacattttccgttaccgtcaagtaacgtttccgtgaaaggagtgttgttgaactttgaggacgttaacgggaaagtgtggaggttccgttactcgtattggaacagtagtcagagttatgttttgactaaaggttggagcaggttcgttaaggagaagaatctacgtgctggtgacgtggttagtttcagtagatctaacggtcaggatcaacagttgtacattgggtggaagtcgagatccgggtcagatttagatgcgggtcgggttttgagattgttcggagttaacatttcaccggagagttcaagaaacgacgtcgtaggaaacaaaagagtgaacgatactgagatgttatcgttggtgtgtagcaagaagcaacgcatctttcacgcctcgtaacaactcttcttcctttttttttcttttgttgttttaataatttttaaaaactccattttcgttttctttatttgcatcggtttctttcttcttgtttaccaaaggttcatgagttgtttttgttgtattgatgaactgtaaattttatttataggataaattttaaaaagggttacttaaaaaaaaaaaaaaaaaaaaaaaaaaaaaaaaaaaaaaaaaaaaaaaaaaaaaaaaaaaaaaaaaaaaaaaaaaaaaaaaaaaaaaaaaaaaaacaaaaatcccccgggggggggcggggaaaccctttcccccaaaggggggggttattaaaattccggggggcgtttttaaaaaacggggggggggaaaaaccccggggtaccccaatataaccccctgggaaaaaaccccccttttccaagggggg

SEQ ID NO: 49470 - protein, 344 aa, Arabidopsis thaliana
  peptide (1)..(344): Ceres Seq. ID no. 12591196
MESSSVDESTTSTGSICETPAITPAKKSSVGNLYRMGSGSSVVLDSENGVEAESRKLPSSKYKGVVPQPNGRWGAQIYEKHQRVWLGTFNEEDEAARAYDVAVHRFRRRDAVTNFKDVKMDEDEVDFLNSHSKSEIVDMLRKHTYNEELEQSKRRRNGNGNMTRTLLTSGLSNDGVSTTGFRSAEALFEKAVTPSDVGKLNRLVIPKHHAEKHFPLPSSNVSVKGVLLNFEDVNGKVWRFRYSYWNSSQSYVLTKGWSRFVKEKNLRAGDVVSFSRSNGQDQQLYIGWKSRSGSDLDAGRVLRLFGVNISPESSRNDVVGNKRVNDTEMLSLVCSKKQRIFHAS

SEQ ID NO: 49471 - protein, 309 aa, Arabidopsis thaliana
  peptide (1)..(309): Ceres Seq. ID no. 12591197
MGSGSSVVLDSENGVEAESRKLPSSKYKGVVPQPNGRWGAQIYEKHQRVWLGTFNEEDEAARAYDVAVHRFRRRDAVTNFKDVKMDEDEVDFLNSHSKSEIVDMLRKHTYNEELEQSKRRRNGNGNMTRTLLTSGLSNDGVSTTGFRSAEALFEKAVTPSDVGKLNRLVIPKHHAEKHFPLPSSNVSVKGVLLNFEDVNGKVWRFRYSYWNSSQSYVLTKGWSRFVKEKNLRAGDVVSFSRSNGQDQQLYIGWKSRSGSDLDAGRVLRLFGVNISPESSRNDVVGNKRVNDTEMLSLVCSKKQRIFHAS

SEQ ID NO: 49472 - protein, 225 aa, Arabidopsis thaliana
  peptide (1)..(225): Ceres Seq. ID no. 12591198
MDEDEVDFLNSHSKSEIVDMLRKHTYNEELEQSKRRRNGNGNMTRTLLTSGLSNDGVSTTGFRSAEALFEKAVTPSDVGKLNRLVIPKHHAEKHFPLPSSNVSVKGVLLNFEDVNGKVWRFRYSYWNSSQSYVLTKGWSRFVKEKNLRAGDVVSFSRSNGQDQQLYIGWKSRSGSDLDAGRVLRLFGVNISPESSRNDVVGNKRVNDTEMLSLVCSKKQRIFHAS

SEQ ID NO: 49473 - DNA, 830 bp, Arabidopsis thaliana
  misc_feature (1)..(830): Ceres Seq. ID no. 13592647
  misc_feature (1)..(830): Ortholog of  Ceres SEQ ID NO 13638849 as cited in SEQ ID NO 52046
  misc_feature (1)..(830): Ortholog of  Ceres SEQ ID NO 13599613 as cited in SEQ ID NO 0
gaagaagtcgagagacaaagttaaaagtagagaagaaaatgagtgaggaggagaggaagcaacacgtcgttctagtacatggtgcttgccatggcgcctggtgctggtacaaggttaagccgcagctcgaggcttctggccaccgcgtaaccgccgtagatctagctgcctccggtatagacatgaccaggtcaatcacagatatatccacatgcgaacaatactcagagccattgatgcagctaatgacctcactaccagatgatgagaaggttgtgcttgttggtcatagcttaggaggtttgagtttagctatggccatggatatgtttccgaccaaaatctctgtttctgtctttgtgactgctatgatgccagacaccaaacactcaccatccttcgtatgggataagctaagaaaagaaacttcacgagaggaatggttagacaccgtgtttacgagcgagaaacctgattttcctagcgagttttggatttttggaccagaattcatggccaagaacttgtatcagttgtctccagtccaagatcttgaattggcgaaaatgttggtgagggcaaacccattgattaagaaagatatggcagagagaagaagcttcagtgaggaaggatacggatccgttacacgtatatttattgtatgcggaaaggatcttgtgtcacccgaagattaccagcgatcgatgatcagcaactttcccccaaaagaagtaatggagatcaaagacgcagatcatatgccaatgttctccaagcctcaacaactatgtgctcttctcttggagattgcaaataaatatgcctaa

SEQ ID NO: 49474 - protein, 275 aa, Arabidopsis thaliana
  peptide (1)..(275): Ceres Seq. ID no. 13592648
RSRETKLKVEKKMSEEERKQHVVLVHGACHGAWCWYKVKPQLEASGHRVTAVDLAASGIDMTRSITDISTCEQYSEPLMQLMTSLPDDEKVVLVGHSLGGLSLAMAMDMFPTKISVSVFVTAMMPDTKHSPSFVWDKLRKETSREEWLDTVFTSEKPDFPSEFWIFGPEFMAKNLYQLSPVQDLELAKMLVRANPLIKKDMAERRSFSEEGYGSVTRIFIVCGKDLVSPEDYQRSMISNFPPKEVMEIKDADHMPMFSKPQQLCALLLEIANKYA

SEQ ID NO: 49475 - protein, 263 aa, Arabidopsis thaliana
  peptide (1)..(263): Ceres Seq. ID no. 13592649
MSEEERKQHVVLVHGACHGAWCWYKVKPQLEASGHRVTAVDLAASGIDMTRSITDISTCEQYSEPLMQLMTSLPDDEKVVLVGHSLGGLSLAMAMDMFPTKISVSVFVTAMMPDTKHSPSFVWDKLRKETSREEWLDTVFTSEKPDFPSEFWIFGPEFMAKNLYQLSPVQDLELAKMLVRANPLIKKDMAERRSFSEEGYGSVTRIFIVCGKDLVSPEDYQRSMISNFPPKEVMEIKDADHMPMFSKPQQLCALLLEIANKYA

SEQ ID NO: 49476 - protein, 215 aa, Arabidopsis thaliana
  peptide (1)..(215): Ceres Seq. ID no. 13592650
MTRSITDISTCEQYSEPLMQLMTSLPDDEKVVLVGHSLGGLSLAMAMDMFPTKISVSVFVTAMMPDTKHSPSFVWDKLRKETSREEWLDTVFTSEKPDFPSEFWIFGPEFMAKNLYQLSPVQDLELAKMLVRANPLIKKDMAERRSFSEEGYGSVTRIFIVCGKDLVSPEDYQRSMISNFPPKEVMEIKDADHMPMFSKPQQLCALLLEIANKYA

SEQ ID NO: 49477 - DNA, 1119 bp, Arabidopsis thaliana
  misc_feature (1)..(1119): Ceres Seq. ID no. 13648473
  misc_feature (1)..(1119): Ortholog of  Ceres SEQ ID NO 14307370 as cited in SEQ ID NO 54127
  misc_feature (1)..(1119): Ortholog of  Ceres SEQ ID NO 13596338 as cited in SEQ ID NO 68005
  misc_feature (1)..(1119): Ortholog of  Ceres SEQ ID NO 14302128 as cited in SEQ ID NO 0
acgttatctcctccccacgactcaaaaaaaataaacagaaaaaaagaggagtagaaaccaaagagacctgccctaatatttagcgatgatagtttgaacggaacgaaatctgacgaaagaaactaaagagacctttgaattatcttcacggcgttaacaaaaaaaaagggttgtagaaagtgagtaaggaagaaataatcaggaacattaataaaggaaatgacaacggcgtgtccggcgaggacaagctcactaatggacgatctcttgggcctccttagaatccgtatcaaacgtggcgtcaatttagccgtccgtgacatcagtagcagcgatccttacgtcgtcgtcaagatgggcaaacagaaattgaagactcgtgtcattaacaaagatgttaatccagaatggaatgaagatttgactctctccgtcacagactccaatcttaccgtcctcttgacggtgtatgatcacgacatgtttagcaaagacgacaagatgggcgatgctgagttcgagataaagccctatattgaggctttgaggatgcaactcgatggacttcctagtggaaccattgtgaccacggttaagcctagtcgtcgtaactgtctagccgaggagtcacgtgtcacctgggtcgacggcaagctcgtccaggatctcgttctcagattgcgacatgtggaatgcggagaggtcgaagctcagcttcagtggattgacctccctggctccaagggtctatgaatcttttttcttttcttatttaccgttactttgagttgttttctttcaaattgaactaaaccaagtaacagcatggaaaaaaaacaagtaatttcaatcttgaaggatatagtgaactagaaacacgtattaatccatggaaatataaggattaagaacgttgagggaagttttgttcccatatggtgatcgagtccaagtcgagtcgtggtggtggatatgtaaatgtggtgtattgttgatgtgtatgtatatttgggctagctatgccttaaataaggcatttacactgtttaaacaactaatacagatattttatttaaaaaagaaaaaaaaaaaaaaaaaactcgagggggggcccggtac

SEQ ID NO: 49478 - protein, 177 aa, Arabidopsis thaliana
  peptide (1)..(177): Ceres Seq. ID no. 15220537
MTTACPARTSSLMDDLLGLLRIRIKRGVNLAVRDISSSDPYVVVKMGKQKLKTRVINKDVNPEWNEDLTLSVTDSNLTVLLTVYDHDMFSKDDKMGDAEFEIKPYIEALRMQLDGLPSGTIVTTVKPSRRNCLAEESRVTWVDGKLVQDLVLRLRHVECGEVEAQLQWIDLPGSKGL

SEQ ID NO: 49479 - protein, 165 aa, Arabidopsis thaliana
  peptide (1)..(165): Ceres Seq. ID no. 15220538
MDDLLGLLRIRIKRGVNLAVRDISSSDPYVVVKMGKQKLKTRVINKDVNPEWNEDLTLSVTDSNLTVLLTVYDHDMFSKDDKMGDAEFEIKPYIEALRMQLDGLPSGTIVTTVKPSRRNCLAEESRVTWVDGKLVQDLVLRLRHVECGEVEAQLQWIDLPGSKGL

SEQ ID NO: 49480 - protein, 132 aa, Arabidopsis thaliana
  peptide (1)..(132): Ceres Seq. ID no. 15220539
MGKQKLKTRVINKDVNPEWNEDLTLSVTDSNLTVLLTVYDHDMFSKDDKMGDAEFEIKPYIEALRMQLDGLPSGTIVTTVKPSRRNCLAEESRVTWVDGKLVQDLVLRLRHVECGEVEAQLQWIDLPGSKGL

SEQ ID NO: 49481 - DNA, 1710 bp, Arabidopsis thaliana
  misc_feature (1)..(1710): Ceres Seq. ID no. 12601847
  misc_feature (1)..(1710): Ortholog of  Ceres SEQ ID NO 13594209 as cited in SEQ ID NO 59089
  misc_feature (1)..(1710): Ortholog of  Ceres SEQ ID NO 15170167 as cited in SEQ ID NO 66224
  misc_feature (1)..(1710): Ortholog of  Ceres SEQ ID NO 13502874 as cited in SEQ ID NO 66298
  misc_feature (1)..(1710): Ortholog of  Ceres SEQ ID NO 12614124 as cited in SEQ ID NO 68392
  misc_feature (1)..(1710): Ortholog of  Ceres SEQ ID NO 14307980 as cited in SEQ ID NO 69214
acatcaaatctatgaaaaaaaatgacagacatttccagtctctttagaaaccgaagtcgcaaggaccaacttgactatggtttaactgtgatagttatatcaactctttgttggtgtctttggctctacgccaaatgcaaacggcggtctccaccgttgccgccgggaccttggggccttcccattatcggaaaccttccattcctccaaccggagcttcacacctacttccaagggctggctaaaaagcacggtcccattttcaaactctggctcggggccaagctcacaatcgtggtcacctcttctgaagtagcgcaagagattctcaaaacgaatgacatcatcttcgcgaaccacgatgtccctgctgtgggccctgttaacacgtatggtggtacggagatcatttggtcgccgtatggaccaaagtggcggatgctgaggaagctatgtgttaataggatactgagaaacgccatgttggattcctccactgacctccgtcgccgagagactcggcaaaccgtccggtatttggcggaccaggctcgggtcggttcaccagttaacctgggagaacaaatattcttgatgatgttgaatgttgtgacgcagatgctatggggaacaacggttaaggaagaagagagggaggttgttggagccgagttcttagaggtgattagagagatgaacgacctcctgctagtgcccaatatctccgactttttcccggtattgagccggtttgatcttcagggtttggctaagcgtatgcgaagaccggctcaaagaatggatcagatgttcgaccggatcattaaccaacggttggggatggatagggacagtagtgacgggagagctgtggattttctagacgtcttgttgaaagtcaaggatgaagaagctgaaaagacgaagttgaccatgaacgatgtcaaggccgtactcatggacatggtgctcggtggtacagacacatcactgcacgtaatagaattcgcgatggccgagctattacacaaccccgatatcatgaagagagctcaacaagaggttgacaaagttgtgggaaaagaaaaagttgtggaagaatctcacatctctaaacttccatacattctcgccattatgaaagaaactctaaggcttcacacggttgctccactccttgttcctcggcgcccgtcacaaaccaccgtggtgggcggcttcaccatccctaaagattcaaagattttcatcaacgcgtgggcaatccataggaacccgaatgtatgggagaatccactgaagtttgatcccgacaggtttctggatatgtcttatgacttcaaaggaaatgacttcaattatctaccgtttgggtctggtcgtaggatatgcgtgggaatggctatgggcgagagggttgttctttacaatctcgctacgtttttgcattcttttgattggaaaattccgcaaggagagagagtggaggtcgaggagaagtttgggatcgtgttggagctaaagaatccacttgttgccacgcccgttctaaggttgtccgatccaaatctttatctctagggtcttaagttcaacacaaaggaactgaatgttctacaattcgagcttatttgtgtgtcttgtatgatttaataaaagccgttcaatgagtcaatgactttattacgtgaataaaaatctccataactc

SEQ ID NO: 49482 - protein, 519 aa, Arabidopsis thaliana
  peptide (1)..(519): Ceres Seq. ID no. 12601848
MTDISSLFRNRSRKDQLDYGLTVIVISTLCWCLWLYAKCKRRSPPLPPGPWGLPIIGNLPFLQPELHTYFQGLAKKHGPIFKLWLGAKLTIVVTSSEVAQEILKTNDIIFANHDVPAVGPVNTYGGTEIIWSPYGPKWRMLRKLCVNRILRNAMLDSSTDLRRRETRQTVRYLADQARVGSPVNLGEQIFLMMLNVVTQMLWGTTVKEEEREVVGAEFLEVIREMNDLLLVPNISDFFPVLSRFDLQGLAKRMRRPAQRMDQMFDRIINQRLGMDRDSSDGRAVDFLDVLLKVKDEEAEKTKLTMNDVKAVLMDMVLGGTDTSLHVIEFAMAELLHNPDIMKRAQQEVDKVVGKEKVVEESHISKLPYILAIMKETLRLHTVAPLLVPRRPSQTTVVGGFTIPKDSKIFINAWAIHRNPNVWENPLKFDPDRFLDMSYDFKGNDFNYLPFGSGRRICVGMAMGERVVLYNLATFLHSFDWKIPQGERVEVEEKFGIVLELKNPLVATPVLRLSDPNLYL

SEQ ID NO: 49483 - protein, 380 aa, Arabidopsis thaliana
  peptide (1)..(380): Ceres Seq. ID no. 12601849
MLRKLCVNRILRNAMLDSSTDLRRRETRQTVRYLADQARVGSPVNLGEQIFLMMLNVVTQMLWGTTVKEEEREVVGAEFLEVIREMNDLLLVPNISDFFPVLSRFDLQGLAKRMRRPAQRMDQMFDRIINQRLGMDRDSSDGRAVDFLDVLLKVKDEEAEKTKLTMNDVKAVLMDMVLGGTDTSLHVIEFAMAELLHNPDIMKRAQQEVDKVVGKEKVVEESHISKLPYILAIMKETLRLHTVAPLLVPRRPSQTTVVGGFTIPKDSKIFINAWAIHRNPNVWENPLKFDPDRFLDMSYDFKGNDFNYLPFGSGRRICVGMAMGERVVLYNLATFLHSFDWKIPQGERVEVEEKFGIVLELKNPLVATPVLRLSDPNLYL

SEQ ID NO: 49484 - protein, 366 aa, Arabidopsis thaliana
  peptide (1)..(366): Ceres Seq. ID no. 12601850
MLDSSTDLRRRETRQTVRYLADQARVGSPVNLGEQIFLMMLNVVTQMLWGTTVKEEEREVVGAEFLEVIREMNDLLLVPNISDFFPVLSRFDLQGLAKRMRRPAQRMDQMFDRIINQRLGMDRDSSDGRAVDFLDVLLKVKDEEAEKTKLTMNDVKAVLMDMVLGGTDTSLHVIEFAMAELLHNPDIMKRAQQEVDKVVGKEKVVEESHISKLPYILAIMKETLRLHTVAPLLVPRRPSQTTVVGGFTIPKDSKIFINAWAIHRNPNVWENPLKFDPDRFLDMSYDFKGNDFNYLPFGSGRRICVGMAMGERVVLYNLATFLHSFDWKIPQGERVEVEEKFGIVLELKNPLVATPVLRLSDPNLYL

SEQ ID NO: 49485 - DNA, 1581 bp, Arabidopsis thaliana
  misc_feature (1)..(1581): Ceres Seq. ID no. 13592277
  misc_feature (1)..(1581): Ortholog of  Ceres SEQ ID NO 14315346 as cited in SEQ ID NO 53970
acttttcacgtttcagttttcaacaatctctctctatccattctctatcaaattctaaaatcaaaaatggctctgcatttgagatcttctttttcatcaaaatcgactttactcaatattctcagacacaacctcggtttcggttctaggagccacgtgactcggcatatccgccaaatcctaccacatgaccccccgcttcgaggttcacagaatccaattagccgtctctgtaataccatggcggagccagagacactctctagttttgttcagcacgaatacgccaacaatcatcaggtaatggactttccaggaggaaaggtagctttcacacctgagattcaattcatatcagaatctgataaagagcgtgttccttgctaccgtgttcttgatgacaatggccaacttatcaccaacagccagtttgttcaggttagcgaggaggttgcggtgaagatatatagcgatatggttactcttcaaattatggataacatattctacgaagctcaaagacaaggcagactttccttttacgctactgcaatcggtgaagaggccattaatattgcatcagctgctgctctcactcctcaagatgttatctttcctcagtacagagagcctggtgttctactatggcgtggtttcacgcttcaagaatttgcaaaccagtgttttgggaacaaatctgattatggaaaaggcaggcagatgcccgtccactatggctctaacaagctcaattattttaccgtttctgcaaccattgctacgcagttaccaaacgcggttggtgctgcttattccttaaagatggacaagaaggatgcatgtgcggtcacatattttggcgatggtggcacgagtgagggagatttccatgctgctttgaatattgcagcagttatggaagctcctgttttatttatttgccggaacaatggatgggccatcagtactcccacctcagatcagttccgaagtgatggtgtagtggtcaaaggccgtgcttatggaattcgaagtatacgtgtggatggaaatgatgcacttgccatgtacagtgcggtacatactgctcgcgaaatggcaattagagaacagaggccaatcttgattgaggccttaacataccgtgtaggacaccattcaacatcagatgattccactaggtaccgctctgcaggtgagatagagtggtggaacaaagcaagaaacccactgtctaggtttaggacatggattgaaagtaatggctggtggagtgataaaacggaatcggatctgagaagcagaatcaaaaaagagatgttagaagcgctccgggttgcagagaagactgagaaaccgaatctgcagaacatgttctcagatgtctacgatgttcctccatctaacctcagggaacaagaacttctggtgaggcagacgatcaatagtcacccacaagattacccatcagatgtgcctctttaggtagactctagttgtatgctttgtgtagtaatttatgtaagccaaataatctacattgtgtattgaaatcttttattgaaatcgagaccaatattc

SEQ ID NO: 49486 - protein, 494 aa, Arabidopsis thaliana
  peptide (1)..(494): Ceres Seq. ID no. 13592278
TFHVSVFNNLSLSILYQILKSKMALHLRSSFSSKSTLLNILRHNLGFGSRSHVTRHIRQILPHDPPLRGSQNPISRLCNTMAEPETLSSFVQHEYANNHQVMDFPGGKVAFTPEIQFISESDKERVPCYRVLDDNGQLITNSQFVQVSEEVAVKIYSDMVTLQIMDNIFYEAQRQGRLSFYATAIGEEAINIASAAALTPQDVIFPQYREPGVLLWRGFTLQEFANQCFGNKSDYGKGRQMPVHYGSNKLNYFTVSATIATQLPNAVGAAYSLKMDKKDACAVTYFGDGGTSEGDFHAALNIAAVMEAPVLFICRNNGWAISTPTSDQFRSDGVVVKGRAYGIRSIRVDGNDALAMYSAVHTAREMAIREQRPILIEALTYRVGHHSTSDDSTRYRSAGEIEWWNKARNPLSRFRTWIESNGWWSDKTESDLRSRIKKEMLEALRVAEKTEKPNLQNMFSDVYDVPPSNLREQELLVRQTINSHPQDYPSDVPL

SEQ ID NO: 49487 - protein, 472 aa, Arabidopsis thaliana
  peptide (1)..(472): Ceres Seq. ID no. 13592279
MALHLRSSFSSKSTLLNILRHNLGFGSRSHVTRHIRQILPHDPPLRGSQNPISRLCNTMAEPETLSSFVQHEYANNHQVMDFPGGKVAFTPEIQFISESDKERVPCYRVLDDNGQLITNSQFVQVSEEVAVKIYSDMVTLQIMDNIFYEAQRQGRLSFYATAIGEEAINIASAAALTPQDVIFPQYREPGVLLWRGFTLQEFANQCFGNKSDYGKGRQMPVHYGSNKLNYFTVSATIATQLPNAVGAAYSLKMDKKDACAVTYFGDGGTSEGDFHAALNIAAVMEAPVLFICRNNGWAISTPTSDQFRSDGVVVKGRAYGIRSIRVDGNDALAMYSAVHTAREMAIREQRPILIEALTYRVGHHSTSDDSTRYRSAGEIEWWNKARNPLSRFRTWIESNGWWSDKTESDLRSRIKKEMLEALRVAEKTEKPNLQNMFSDVYDVPPSNLREQELLVRQTINSHPQDYPSDVPL

SEQ ID NO: 49488 - protein, 414 aa, Arabidopsis thaliana
  peptide (1)..(414): Ceres Seq. ID no. 13592280
MAEPETLSSFVQHEYANNHQVMDFPGGKVAFTPEIQFISESDKERVPCYRVLDDNGQLITNSQFVQVSEEVAVKIYSDMVTLQIMDNIFYEAQRQGRLSFYATAIGEEAINIASAAALTPQDVIFPQYREPGVLLWRGFTLQEFANQCFGNKSDYGKGRQMPVHYGSNKLNYFTVSATIATQLPNAVGAAYSLKMDKKDACAVTYFGDGGTSEGDFHAALNIAAVMEAPVLFICRNNGWAISTPTSDQFRSDGVVVKGRAYGIRSIRVDGNDALAMYSAVHTAREMAIREQRPILIEALTYRVGHHSTSDDSTRYRSAGEIEWWNKARNPLSRFRTWIESNGWWSDKTESDLRSRIKKEMLEALRVAEKTEKPNLQNMFSDVYDVPPSNLREQELLVRQTINSHPQDYPSDVPL

SEQ ID NO: 49489 - DNA, 1252 bp, Arabidopsis thaliana; identical to SEQ ID NO: 46531
  misc_feature (1)..(1252): Ceres Seq. ID no. 13591768
  misc_feature (1)..(1252): Ortholog of  Ceres SEQ ID NO 14303542 as cited in SEQ ID NO 63539
  misc_feature (1)..(1252): Ortholog of  Ceres SEQ ID NO 12407937 as cited in SEQ ID NO 0

SEQ ID NO: 49490 - protein, 344 aa, Arabidopsis thaliana; identical to SEQ ID NO: 46532
  peptide (1)..(344): Ceres Seq. ID no. 13591769

SEQ ID NO: 49491 - protein, 330 aa, Arabidopsis thaliana; identical to SEQ ID NO: 46533
  peptide (1)..(330): Ceres Seq. ID no. 13591770

SEQ ID NO: 49492 - protein, 322 aa, Arabidopsis thaliana; identical to SEQ ID NO: 46534
  peptide (1)..(322): Ceres Seq. ID no. 13591771

SEQ ID NO: 49493 - DNA, 1590 bp, Arabidopsis thaliana; identical to SEQ ID NO: 44988
  misc_feature (1)..(1590): Ceres Seq. ID no. 12600281
  misc_feature (1)..(1590): Ortholog of  Ceres SEQ ID NO 14314264 as cited in SEQ ID NO 57374

SEQ ID NO: 49494 - protein, 439 aa, Arabidopsis thaliana; identical to SEQ ID NO: 44989
  peptide (1)..(439): Ceres Seq. ID no. 12600282

SEQ ID NO: 49495 - protein, 434 aa, Arabidopsis thaliana; identical to SEQ ID NO: 44990
  peptide (1)..(434): Ceres Seq. ID no. 12600283

SEQ ID NO: 49496 - protein, 220 aa, Arabidopsis thaliana; identical to SEQ ID NO: 44991
  peptide (1)..(220): Ceres Seq. ID no. 12600284

SEQ ID NO: 49497 - DNA, 1501 bp, Arabidopsis thaliana
  misc_feature (1)..(1501): Ceres Seq. ID no. 13588790
  misc_feature (1)..(1501): Ortholog of  Ceres SEQ ID NO 14314879 as cited in SEQ ID NO 54119
gaatccttttcacattttccgctcaattcgatcttacatgttaacaatggttggtctaactccagctgaggatcgttcagagattgcctttttcgacgtcgagacgacaattccgttccgagttggtcaggggtacgcgattctggagtttggatcgattctggtttgccccaagaagcttgtggagctgaaaaactactctgttctggttcgtcctgctaatctcaacctcatcacgcctcggtccgtgaagtgcaacggcatcaaacgcgaagacgtcgaatcagctcttacctttgcagatatcgccgacaccgtctacgatattctccatggaaggatatgggcaggtcataacatattgaagttcgattgtccaaggataagagaagcatttgctgagattggacgagatccaccagagccaaagggcaccattgactccttggctttgcttactcaaaggtttgggagaagagctggtgatatgaagatggcgactttggctacatactttggacttggaaaccagacgcataggagtctggacgatgtaaggatgaacttcgaggttctcaagtattgtgccactgttttgttcttggagtcaagtcttccagatgaacttatagagaactcggttactactactactcctgaaactagttcaagaaggcgtaggactataaaaaaatctcctctgcaatctcccactgatcagcagacaggagagaacatgacaactatacctattttatcatttgtttcatccgcagaagctcaaacggatccatttgatatgagcactttgaggaacgaaatagcccctgaagttcttcaatcagatgttcccatggaagaagaacaaaatcagcagtctgagactgttgcctctgaaggtaccggtgaccaggaaggattcatggagctagataaaatatctgtttcaagtatcagagcaactcatgtcccgctatatgacgggagccaaacaatgaagctgcaactcttccttggggacagaccccttcagctccattgtcctcgtctgaaagtacggtttggaatcaatgggaaatttatggataaagctggaagacggaggttgaactttgtaattgatctgtatccaagtctctgcaacgtacttcaagaatgcgacagtgctgcacagacaatatctgttgattcaggcagtggttctgactggaaccctctagtcattccaatgaaaggatttctgaactgtcccactgcaaggatacatatacccacagagttaaatggagatatagatcggtacgcagctgagatacaccagaaagagttctctggagctactgctactcagaaactcatttctagcaaccccaaggctgaagagattgagtctttgttgaatccgagaactgttcttgacgctttcttgtctctggagccatatgattatcagcagagagccggaatccgtctagttgctagaaagcttgttatacattag

SEQ ID NO: 49498 - protein, 499 aa, Arabidopsis thaliana
  peptide (1)..(499): Ceres Seq. ID no. 13588791
NPFHIFRSIRSYMLTMVGLTPAEDRSEIAFFDVETTIPFRVGQGYAILEFGSILVCPKKLVELKNYSVLVRPANLNLITPRSVKCNGIKREDVESALTFADIADTVYDILHGRIWAGHNILKFDCPRIREAFAEIGRDPPEPKGTIDSLALLTQRFGRRAGDMKMATLATYFGLGNQTHRSLDDVRMNFEVLKYCATVLFLESSLPDELIENSVTTTTPETSSRRRRTIKKSPLQSPTDQQTGENMTTIPILSFVSSAEAQTDPFDMSTLRNEIAPEVLQSDVPMEEEQNQQSETVASEGTGDQEGFMELDKISVSSIRATHVPLYDGSQTMKLQLFLGDRPLQLHCPRLKVRFGINGKFMDKAGRRRLNFVIDLYPSLCNVLQECDSAAQTISVDSGSGSDWNPLVIPMKGFLNCPTARIHIPTELNGDIDRYAAEIHQKEFSGATATQKLISSNPKAEEIESLLNPRTVLDAFLSLEPYDYQQRAGIRLVARKLVIH

SEQ ID NO: 49499 - protein, 487 aa, Arabidopsis thaliana
  peptide (1)..(487): Ceres Seq. ID no. 13588792
MLTMVGLTPAEDRSEIAFFDVETTIPFRVGQGYAILEFGSILVCPKKLVELKNYSVLVRPANLNLITPRSVKCNGIKREDVESALTFADIADTVYDILHGRIWAGHNILKFDCPRIREAFAEIGRDPPEPKGTIDSLALLTQRFGRRAGDMKMATLATYFGLGNQTHRSLDDVRMNFEVLKYCATVLFLESSLPDELIENSVTTTTPETSSRRRRTIKKSPLQSPTDQQTGENMTTIPILSFVSSAEAQTDPFDMSTLRNEIAPEVLQSDVPMEEEQNQQSETVASEGTGDQEGFMELDKISVSSIRATHVPLYDGSQTMKLQLFLGDRPLQLHCPRLKVRFGINGKFMDKAGRRRLNFVIDLYPSLCNVLQECDSAAQTISVDSGSGSDWNPLVIPMKGFLNCPTARIHIPTELNGDIDRYAAEIHQKEFSGATATQKLISSNPKAEEIESLLNPRTVLDAFLSLEPYDYQQRAGIRLVARKLVIH

SEQ ID NO: 49500 - protein, 484 aa, Arabidopsis thaliana
  peptide (1)..(484): Ceres Seq. ID no. 13588793
MVGLTPAEDRSEIAFFDVETTIPFRVGQGYAILEFGSILVCPKKLVELKNYSVLVRPANLNLITPRSVKCNGIKREDVESALTFADIADTVYDILHGRIWAGHNILKFDCPRIREAFAEIGRDPPEPKGTIDSLALLTQRFGRRAGDMKMATLATYFGLGNQTHRSLDDVRMNFEVLKYCATVLFLESSLPDELIENSVTTTTPETSSRRRRTIKKSPLQSPTDQQTGENMTTIPILSFVSSAEAQTDPFDMSTLRNEIAPEVLQSDVPMEEEQNQQSETVASEGTGDQEGFMELDKISVSSIRATHVPLYDGSQTMKLQLFLGDRPLQLHCPRLKVRFGINGKFMDKAGRRRLNFVIDLYPSLCNVLQECDSAAQTISVDSGSGSDWNPLVIPMKGFLNCPTARIHIPTELNGDIDRYAAEIHQKEFSGATATQKLISSNPKAEEIESLLNPRTVLDAFLSLEPYDYQQRAGIRLVARKLVIH

SEQ ID NO: 49501 - DNA, 748 bp, Arabidopsis thaliana; identical to SEQ ID NO: 44404
  misc_feature (1)..(748): Ceres Seq. ID no. 13502510
  misc_feature (1)..(748): Ortholog of  Ceres SEQ ID NO 13595067 as cited in SEQ ID NO 55857
  misc_feature (1)..(748): Ortholog of  Ceres SEQ ID NO 12635516 as cited in SEQ ID NO 0

SEQ ID NO: 49502 - protein, 163 aa, Arabidopsis thaliana; identical to SEQ ID NO: 44405
  peptide (1)..(163): Ceres Seq. ID no. 13502511

SEQ ID NO: 49503 - protein, 118 aa, Arabidopsis thaliana; identical to SEQ ID NO: 44406
  peptide (1)..(118): Ceres Seq. ID no. 13502512

SEQ ID NO: 49504 - protein, 111 aa, Arabidopsis thaliana; identical to SEQ ID NO: 44407
  peptide (1)..(111): Ceres Seq. ID no. 13502513

SEQ ID NO: 49505 - DNA, 1812 bp, Arabidopsis thaliana
  misc_feature (1)..(1812): Ceres Seq. ID no. 13588016
  misc_feature (1)..(1812): Ortholog of  Ceres SEQ ID NO 14313288 as cited in SEQ ID NO 67419
atgaagcttctactgttgctgcttgccttctgctgtctatctctatcaaggtgtgaagaacaatccgtcccttatgattactcggcaacaatagagacattttttttttttttttttttaatgttcattaagacatggtcatttgaaattctgattacattttttgtcttggtgcagtgtctagagaacccttataaaccacagtacaatggagggatcatcgtgaatcctgacttgcaaaatggttcacaaggctggtcacagtttggaaacgccaaagtcgatttcagagaatttggaggcaataagtttgttgttgccacacaaaggaatcaatcttctgacagcatctcgcagaaggtgtacttggaaaaaggaattctctacactttctctgcttggttacaagtgagcataggaaaatctcccgtgagcgctgttttcaagaagaatggtgaatataagcatgccggttcggttgttgctgaatccaaatgttggtccatgctgaaaggtggtctcactgttgatgaatctggtcctgctgaactcttcttcgagagcgagaacacaatggttgagatttgggttgatagcgtctctttgcaacctttcacacaagaagagtggaactctcaccacgaacagagcattggcaaagtaagaaaaggtaccgtgagaatcagagtcatgaataacaaaggcgagacgatacctaatgcaaccatatccatagaacagaagaaactcggatacccattcgggtgcgcggtagaaaacaacatacttgggaatcaagcataccaaaactggttcactcaaagatttaccgtgacaactttcgggaacgagatgaaatggtacagcacagaaagaataagagggcaagaggattactcgacagctgacgcgatgttaagtttcttcaagagccacgggattgctgtacgtgggcacaatgttttatgggatgatcctaagtaccaacctggatgggtgaattctctgtctggtaacgacctctacaacgctgtgaaacgaagggtttactcggttgtctcgcgatacaaaggacagcttttgggttgggatgttgtgaatgagaatcttcatttctccttctttgagagcaagttcggtcctaaagcctcttataacacctacacaatggcccatgccgtcgatccaaggacaccaatgttcatgaatgaatataatacgttagagcaacctaaggatttaacttctagtccagcaaggtatttgggaaagcttagggagcttcaatctattcgggttgccggaaagattccgttagcgataggtcttgagtctcatttcagcactcctaacattccgtatatgagatcagctcttgatacttttggtgccactggtttgcctatttggctcactgagattgacgttgatgcgcctcccaatgtccgggccaactatttcgagcaagttctaagggaaggccatgcacatccgaaagtgaatggaatggtgatgtggacaggttattctccatcaggttgctaccgaatgtgcctcaccgatggaaactttaagaacctacccactggagacgtcgtggacaagcttttacgtgaatggggagggcttcgcagccaaaccacaggtgtcactgatgctaatgggttatttgaagctccactctttcatggtgactatgatctccgtatatcccatcctctcaccaattcaaaggcttcttacaactttacgttgacttccgatgacgactcctcacagaaacaaccatctctatatgtctttcgtgtttga

SEQ ID NO: 49506 - protein, 603 aa, Arabidopsis thaliana
  peptide (1)..(603): Ceres Seq. ID no. 13588017
MKLLLLLLAFCCLSLSRCEEQSVPYDYSATIETFFFFFFLMFIKTWSFEILITFFVLVQCLENPYKPQYNGGIIVNPDLQNGSQGWSQFGNAKVDFREFGGNKFVVATQRNQSSDSISQKVYLEKGILYTFSAWLQVSIGKSPVSAVFKKNGEYKHAGSVVAESKCWSMLKGGLTVDESGPAELFFESENTMVEIWVDSVSLQPFTQEEWNSHHEQSIGKVRKGTVRIRVMNNKGETIPNATISIEQKKLGYPFGCAVENNILGNQAYQNWFTQRFTVTTFGNEMKWYSTERIRGQEDYSTADAMLSFFKSHGIAVRGHNVLWDDPKYQPGWVNSLSGNDLYNAVKRRVYSVVSRYKGQLLGWDVVNENLHFSFFESKFGPKASYNTYTMAHAVDPRTPMFMNEYNTLEQPKDLTSSPARYLGKLRELQSIRVAGKIPLAIGLESHFSTPNIPYMRSALDTFGATGLPIWLTEIDVDAPPNVRANYFEQVLREGHAHPKVNGMVMWTGYSPSGCYRMCLTDGNFKNLPTGDVVDKLLREWGGLRSQTTGVTDANGLFEAPLFHGDYDLRISHPLTNSKASYNFTLTSDDDSSQKQPSLYVFRV

SEQ ID NO: 49507 - protein, 563 aa, Arabidopsis thaliana
  peptide (1)..(563): Ceres Seq. ID no. 13588018
MFIKTWSFEILITFFVLVQCLENPYKPQYNGGIIVNPDLQNGSQGWSQFGNAKVDFREFGGNKFVVATQRNQSSDSISQKVYLEKGILYTFSAWLQVSIGKSPVSAVFKKNGEYKHAGSVVAESKCWSMLKGGLTVDESGPAELFFESENTMVEIWVDSVSLQPFTQEEWNSHHEQSIGKVRKGTVRIRVMNNKGETIPNATISIEQKKLGYPFGCAVENNILGNQAYQNWFTQRFTVTTFGNEMKWYSTERIRGQEDYSTADAMLSFFKSHGIAVRGHNVLWDDPKYQPGWVNSLSGNDLYNAVKRRVYSVVSRYKGQLLGWDVVNENLHFSFFESKFGPKASYNTYTMAHAVDPRTPMFMNEYNTLEQPKDLTSSPARYLGKLRELQSIRVAGKIPLAIGLESHFSTPNIPYMRSALDTFGATGLPIWLTEIDVDAPPNVRANYFEQVLREGHAHPKVNGMVMWTGYSPSGCYRMCLTDGNFKNLPTGDVVDKLLREWGGLRSQTTGVTDANGLFEAPLFHGDYDLRISHPLTNSKASYNFTLTSDDDSSQKQPSLYVFRV

SEQ ID NO: 49508 - protein, 435 aa, Arabidopsis thaliana
  peptide (1)..(435): Ceres Seq. ID no. 13588019
MLKGGLTVDESGPAELFFESENTMVEIWVDSVSLQPFTQEEWNSHHEQSIGKVRKGTVRIRVMNNKGETIPNATISIEQKKLGYPFGCAVENNILGNQAYQNWFTQRFTVTTFGNEMKWYSTERIRGQEDYSTADAMLSFFKSHGIAVRGHNVLWDDPKYQPGWVNSLSGNDLYNAVKRRVYSVVSRYKGQLLGWDVVNENLHFSFFESKFGPKASYNTYTMAHAVDPRTPMFMNEYNTLEQPKDLTSSPARYLGKLRELQSIRVAGKIPLAIGLESHFSTPNIPYMRSALDTFGATGLPIWLTEIDVDAPPNVRANYFEQVLREGHAHPKVNGMVMWTGYSPSGCYRMCLTDGNFKNLPTGDVVDKLLREWGGLRSQTTGVTDANGLFEAPLFHGDYDLRISHPLTNSKASYNFTLTSDDDSSQKQPSLYVFRV

SEQ ID NO: 49509 - DNA, 959 bp, Arabidopsis thaliana
  misc_feature (1)..(959): Ceres Seq. ID no. 13593649
  misc_feature (1)..(959): Ortholog of  Ceres SEQ ID NO 14306682 as cited in SEQ ID NO 53140
ggtgtttagcttcttcactaccacacagaaacagagtttccgtcyttcatcttcctccatatgcgycgctcttaaaaacctaattcacaatgtccgtcgttctcaacgccggcttcagttctccgcttcaaaacagatcacatcatgttatacagttaaagccttcgccttttgcgtcatacatatctctaaacagttcaagaaggtcactgttatgcaaaagaagattggttgtatcttgtttggatacaaatgacaattctgtcacaactacatccgtagattcttcttcttcttcagattctaataaaccagtaagtgaatcagttgaatcaagcaatggcactgccaaaaaagcaccattgacagcacgagagagactaagagcggctcgtgttcttagccgatacactgaagcaacaccgaaaccatcaaaacccaaaatgggaagccagcttcttgatgttctcaaggaaagtgataagaaatcaaagaggaaaccgggtctacccgaagcaccaactaacatgcttgatgatagcaggagggggatgccaaagagtggcctaacgtttgatttaccgggaggctcggatattctcatcattgctttctcctttgtgttcataagcacagtcatgtttgctactacttttcttgtttggaaactaggtgcgatacacttcaacgaataggtaaagttgagatctggagaagattaatggagtttggaaaccaatcaagcagggaacgagagagagtgttttgttacaatgttagttaacaatgcatacttggggatgtgatggggatgttcatcacttggcaaagccggtttgagtgtatatacatatactatgtagtacacataattttgctatgaactctcttcatgcttgatttgtaattttaatcttttgcattgtaatttcttwtcatatggaaatggatrcttaaag

SEQ ID NO: 49510 - protein, 201 aa, Arabidopsis thaliana
  peptide (1)..(201): Ceres Seq. ID no. 15221228
MSVVLNAGFSSPLQNRSHHVIQLKPSPFASYISLNSSRRSLLCKRRLVVSCLDTNDNSVTTTSVDSSSSSDSNKPVSESVESSNGTAKKAPLTARERLRAARVLSRYTEATPKPSKPKMGSQLLDVLKESDKKSKRKPGLPEAPTNMLDDSRRGMPKSGLTFDLPGGSDILIIAFSFVFISTVMFATTFLVWKLGAIHFNE

SEQ ID NO: 49511 - DNA, 2073 bp, Arabidopsis thaliana; identical to SEQ ID NO: 48959
  misc_feature (1)..(2073): Ceres Seq. ID no. 13591980
  misc_feature (1)..(2073): Ortholog of  Ceres SEQ ID NO 15170155 as cited in SEQ ID NO 64363

SEQ ID NO: 49512 - protein, 561 aa, Arabidopsis thaliana; identical to SEQ ID NO: 48960
  peptide (1)..(561): Ceres Seq. ID no. 13591981

SEQ ID NO: 49513 - protein, 469 aa, Arabidopsis thaliana; identical to SEQ ID NO: 48961
  peptide (1)..(469): Ceres Seq. ID no. 13591982

SEQ ID NO: 49514 - protein, 401 aa, Arabidopsis thaliana; identical to SEQ ID NO: 48962
  peptide (1)..(401): Ceres Seq. ID no. 13591983

SEQ ID NO: 49515 - DNA, 1194 bp, Arabidopsis thaliana
  misc_feature (1)..(1194): Ceres Seq. ID no. 13648070
  misc_feature (1)..(1194): Ortholog of  Ceres SEQ ID NO 15225786 as cited in SEQ ID NO 68277
aagccatgtggtaattctaattttgtgtatttattattttctgttaagacgaatcggacagagagaactccggcggcggattgcatttccggcaagatctcgtggggataaataagatggcggatgagaggtataatcggaagaatccggcggtgaagaggattttgcaggaggttaaggagatgcaagctaatccgtctgatgattttatgtctcttcctcttgaggagaatatctttgagtggcaattcgccatccgaggtcctggtgatactgaattcgagggcgggatttatcatgggagaattcagttgcctgcagattatccattcaaacctccttcattcatgttattgacccctaacgggcgctttgaaactaacaccaagatttgcttgagcatttcaaactaccaccctgagcattggcaaccttcatggagtgttcggactgctttggtggctctcattgcatttatgcccacaagtcccaatggagcactgggctcagtagattatccaaaggatgagagacgtacactagccattaaatcacgtgagacaccacctaagtatggctctcctgaacggcaaaaaattattgatgagattcatcagtacatccttagcaaagcaaccgtggttccaaaacctcttcctctggaatgtagccaagcaccttccatcgtatcagaagctcactcccaagttgagccacaggaagcgataactgtagtagaagagcggtccatcgctacaacagacaccatagttgatgatcaaatcatagaagagacagctgaagcagtcaatacagcagctagtgtggttcccgctgcagcacctttaccagcggttgaagttgtggtcaaagcttctgtaagtggtgagcaaaggatggccagaagagcggctcagaagccagtcgatgacagactcttcacgtgggcggcggttgggctcacaatcgctatcatggttcttcttctgaagaagttcataaaatcaaatggttacagtactgggtttatggatgatcagtcttgaactctgatgaaagtcaatgctgcgtttaagaaatggggttgtgttgtttaatattttataaatataattaaagtgcataatggcgtaaataatttctgtgtgacattgtcttgcaacttagttgatagattggattatagcttgtgat

SEQ ID NO: 49516 - protein, 309 aa, Arabidopsis thaliana
  peptide (1)..(309): Ceres Seq. ID no. 13648071
MADERYNRKNPAVKRILQEVKEMQANPSDDFMSLPLEENIFEWQFAIRGPGDTEFEGGIYHGRIQLPADYPFKPPSFMLLTPNGRFETNTKICLSISNYHPEHWQPSWSVRTALVALIAFMPTSPNGALGSVDYPKDERRTLAIKSRETPPKYGSPERQKIIDEIHQYILSKATVVPKPLPLECSQAPSIVSEAHSQVEPQEAITVVEERSIATTDTIVDDQIIEETAEAVNTAASVVPAAAPLPAVEVVVKASVSGEQRMARRAAQKPVDDRLFTWAAVGLTIAIMVLLLKKFIKSNGYSTGFMDDQS

SEQ ID NO: 49517 - protein, 287 aa, Arabidopsis thaliana
  peptide (1)..(287): Ceres Seq. ID no. 13648072
MQANPSDDFMSLPLEENIFEWQFAIRGPGDTEFEGGIYHGRIQLPADYPFKPPSFMLLTPNGRFETNTKICLSISNYHPEHWQPSWSVRTALVALIAFMPTSPNGALGSVDYPKDERRTLAIKSRETPPKYGSPERQKIIDEIHQYILSKATVVPKPLPLECSQAPSIVSEAHSQVEPQEAITVVEERSIATTDTIVDDQIIEETAEAVNTAASVVPAAAPLPAVEVVVKASVSGEQRMARRAAQKPVDDRLFTWAAVGLTIAIMVLLLKKFIKSNGYSTGFMDDQS

SEQ ID NO: 49518 - protein, 278 aa, Arabidopsis thaliana
  peptide (1)..(278): Ceres Seq. ID no. 13648073
MSLPLEENIFEWQFAIRGPGDTEFEGGIYHGRIQLPADYPFKPPSFMLLTPNGRFETNTKICLSISNYHPEHWQPSWSVRTALVALIAFMPTSPNGALGSVDYPKDERRTLAIKSRETPPKYGSPERQKIIDEIHQYILSKATVVPKPLPLECSQAPSIVSEAHSQVEPQEAITVVEERSIATTDTIVDDQIIEETAEAVNTAASVVPAAAPLPAVEVVVKASVSGEQRMARRAAQKPVDDRLFTWAAVGLTIAIMVLLLKKFIKSNGYSTGFMDDQS

SEQ ID NO: 49519 - DNA, 1226 bp, Arabidopsis thaliana
  misc_feature (1)..(1226): Ceres Seq. ID no. 13588641
  misc_feature (1)..(1226): Ortholog of  Ceres SEQ ID NO 13656147 as cited in SEQ ID NO 64422
  misc_feature (1)..(1226): Ortholog of  Ceres SEQ ID NO 13596496 as cited in SEQ ID NO 68639
ggtggtcaaagtttccatacgtagcttctcttctctacactcacgtccaccacaatcctcgtgctccttcctctaaacccgtccgattcacgtacttttactatcttttctcaatccaacagctcacagtccacaaacaaatttcaaatcgcgtcctataaaatcccctctcctctgctccacactctctcaaaaccctagaaaaaatggcaggaaccggagttgtggcggtgtacggcgaaggagccatgacggagacgaaacagaaatctcccttctccgtgaaagttggtctcgctcagatgcttcgtggcggtgtaatcatggatgtcgtcaacgcagagcaagctcgaatcgctgaagaagctggcgcatgcgccgtgatggctcttgaacgtgttcccgccgatattcgagctcaaggcggtgttgctcgaatgagcgatccagagatgatcaaagaaatcaaaaacgccgtgacgattccggtgatggcgaaagctagaattggtcatttcgttgaagctcagatcctggaagcaatcggagttgattacgtcgacgagagtgaagttctcactctcgccgacgaagataatcacatcaacaaacataatttcaaaatcccttttgtttgtggatgtaggaatctcggtgaagctttaaggcggatccgtgaaggagccgccatgataagaaccaaaggtgaggctggaactggtaacgttgttgaagccgttaggcacgtgaggagtgtgaacggagctattcggttacttagaagcatggacgatgacgaggttttcacttacgcgaaaaagatcgctgcgccgtatgatttggttgtgcagactaaggagcttgggaggttaccggtggttcagttcgctgctggaggagtggcgacgccggcggatgcggcgttgatgatgcagttgggatgtgatggagtgtttgttgggtcgggtgttttcaagagtggagatccggtgaagagggctaaggctattgttcaggcggttacgaattatagagacgcggcggtgttggcggaggtgagctgtggtttaggtgaagccatggttggtcttaatttggatgataaggttgagaggttcgctagtcgttctgagtaaccaatcaaatttcagatgtttttatccataacgtttgtcactttaatatgtatccacaaaccaatattctcgatttattcaagattttat

SEQ ID NO: 49520 - protein, 309 aa, Arabidopsis thaliana
  peptide (1)..(309): Ceres Seq. ID no. 13588642
MAGTGVVAVYGEGAMTETKQKSPFSVKVGLAQMLRGGVIMDVVNAEQARIAEEAGACAVMALERVPADIRAQGGVARMSDPEMIKEIKNAVTIPVMAKARIGHFVEAQILEAIGVDYVDESEVLTLADEDNHINKHNFKIPFVCGCRNLGEALRRIREGAAMIRTKGEAGTGNVVEAVRHVRSVNGAIRLLRSMDDDEVFTYAKKIAAPYDLVVQTKELGRLPVVQFAAGGVATPADAALMMQLGCDGVFVGSGVFKSGDPVKRAKAIVQAVTNYRDAAVLAEVSCGLGEAMVGLNLDDKVERFASRSE

SEQ ID NO: 49521 - protein, 295 aa, Arabidopsis thaliana
  peptide (1)..(295): Ceres Seq. ID no. 13588643
MTETKQKSPFSVKVGLAQMLRGGVIMDVVNAEQARIAEEAGACAVMALERVPADIRAQGGVARMSDPEMIKEIKNAVTIPVMAKARIGHFVEAQILEAIGVDYVDESEVLTLADEDNHINKHNFKIPFVCGCRNLGEALRRIREGAAMIRTKGEAGTGNVVEAVRHVRSVNGAIRLLRSMDDDEVFTYAKKIAAPYDLVVQTKELGRLPVVQFAAGGVATPADAALMMQLGCDGVFVGSGVFKSGDPVKRAKAIVQAVTNYRDAAVLAEVSCGLGEAMVGLNLDDKVERFASRSE

SEQ ID NO: 49522 - protein, 277 aa, Arabidopsis thaliana
  peptide (1)..(277): Ceres Seq. ID no. 13588644
MLRGGVIMDVVNAEQARIAEEAGACAVMALERVPADIRAQGGVARMSDPEMIKEIKNAVTIPVMAKARIGHFVEAQILEAIGVDYVDESEVLTLADEDNHINKHNFKIPFVCGCRNLGEALRRIREGAAMIRTKGEAGTGNVVEAVRHVRSVNGAIRLLRSMDDDEVFTYAKKIAAPYDLVVQTKELGRLPVVQFAAGGVATPADAALMMQLGCDGVFVGSGVFKSGDPVKRAKAIVQAVTNYRDAAVLAEVSCGLGEAMVGLNLDDKVERFASRSE

SEQ ID NO: 49523 - DNA, 2078 bp, Arabidopsis thaliana; identical to SEQ ID NO: 47217
  misc_feature (1)..(2078): Ceres Seq. ID no. 12601002
  misc_feature (1)..(2078): Ortholog of  Ceres SEQ ID NO 13579556 as cited in SEQ ID NO 53743

SEQ ID NO: 49524 - protein, 442 aa, Arabidopsis thaliana; identical to SEQ ID NO: 47218
  peptide (1)..(442): Ceres Seq. ID no. 12601003

SEQ ID NO: 49525 - protein, 279 aa, Arabidopsis thaliana; identical to SEQ ID NO: 47219
  peptide (1)..(279): Ceres Seq. ID no. 12601004

SEQ ID NO: 49526 - protein, 231 aa, Arabidopsis thaliana; identical to SEQ ID NO: 47220
  peptide (1)..(231): Ceres Seq. ID no. 12601005

SEQ ID NO: 49527 - DNA, 1481 bp, Arabidopsis thaliana
  misc_feature (1)..(1481): Ceres Seq. ID no. 13588020
  misc_feature (1)..(1481): Ortholog of  Ceres SEQ ID NO 14302990 as cited in SEQ ID NO 67543
atcttctcgactctgctgcgttgctttatcaactgaggaattttgaatttcatatctccaaagtaatctcttttccaaggaagttcagtaaaaatcttaaaacccccgatcagagtaatccggggacctatctccgccgttgatttcagtctgagggtttctccgatttcagttcgatctgtgtccgggattctctctgtgttgctttctcattgcgtttacgattcttcttcccctttcaagggttttttttttctccgctataagcttcaatccttagtccactgggattcttgaacacctcccggagaatttaggagggaattagctcttctccagatcttgcttagctcttgtacagaatggcggatttgttacccatttacctcattattttggcatttctatgcactgtcggagccattgctttggctttattccatatctacaagcacctattgaactatacggaacccatttatcagagatatattgtgcgcattgtcttcatggtcccggtttatgccttgatgtcattcttggctctcgttttgcccaagagctctatatattttaactctatccgtgaagtgcgttttattagacgatgcaagcaaggttgtctgcaatttgttattctaaagccaatcctagttgctgtcacacttgtgctttatgcaaaagggaaatacaaggatggaaattttagccctgatcaatcctatctctatcttaccatcatctatacaatatcatacactgtagctctgtacgcgctggtcctcttttatgtggcatgcaaagatctgcttcagccattcaatccagtcccaaaatttgtgattataaagtctgttgtctttctaacctattggcagggtgttctagttttcctttttgctaaatctggatttataagggatgaagaagaagcagccctcttccaaaattttataatatgtgtggaaatgcttattgctgcagctgctcatttctatgcatttccgtacaaggaatatgcagaggccaatgttggaggagctcgcagtttctcaggaagtctggcacatgctcttatgctaaacgatttctaccatgatactgttcaccagtttgcaccaacatatcacgattatgtgctctataatcataatgatgggggtgaggaagggacaaggaagtaccgagcacgaacatttgtgccaactggtcaggaaatggatgctgttagaaagaacaaacacatgtttggaaacaagatagatggtgtttcggtctccagtcaatcttcagaaacaagcacacccaaaacctctggtgtaacttatgatcctgcacgccctgagagcatgaaatcttccttgctggtagatgcctcggactctgtttccacaatgtatgacatgtcgctcattgacattgatatatcgagctaccctagcaaggtaccttctgcaaatataagtggaggacctaaatag

SEQ ID NO: 49528 - protein, 372 aa, Arabidopsis thaliana
  peptide (1)..(372): Ceres Seq. ID no. 13588021
MADLLPIYLIILAFLCTVGAIALALFHIYKHLLNYTEPIYQRYIVRIVFMVPVYALMSFLALVLPKSSIYFNSIREVRFIRRCKQGCLQFVILKPILVAVTLVLYAKGKYKDGNFSPDQSYLYLTIIYTISYTVALYALVLFYVACKDLLQPFNPVPKFVIIKSVVFLTYWQGVLVFLFAKSGFIRDEEEAALFQNFIICVEMLIAAAAHFYAFPYKEYAEANVGGARSFSGSLAHALMLNDFYHDTVHQFAPTYHDYVLYNHNDGGEEGTRKYRARTFVPTGQEMDAVRKNKHMFGNKIDGVSVSSQSSETSTPKTSGVTYDPARPESMKSSLLVDASDSVSTMYDMSLIDIDISSYPSKVPSANISGGPK

SEQ ID NO: 49529 - protein, 323 aa, Arabidopsis thaliana
  peptide (1)..(323): Ceres Seq. ID no. 13588022
MVPVYALMSFLALVLPKSSIYFNSIREVRFIRRCKQGCLQFVILKPILVAVTLVLYAKGKYKDGNFSPDQSYLYLTIIYTISYTVALYALVLFYVACKDLLQPFNPVPKFVIIKSVVFLTYWQGVLVFLFAKSGFIRDEEEAALFQNFIICVEMLIAAAAHFYAFPYKEYAEANVGGARSFSGSLAHALMLNDFYHDTVHQFAPTYHDYVLYNHNDGGEEGTRKYRARTFVPTGQEMDAVRKNKHMFGNKIDGVSVSSQSSETSTPKTSGVTYDPARPESMKSSLLVDASDSVSTMYDMSLIDIDISSYPSKVPSANISGGPK

SEQ ID NO: 49530 - protein, 316 aa, Arabidopsis thaliana
  peptide (1)..(316): Ceres Seq. ID no. 13588023
MSFLALVLPKSSIYFNSIREVRFIRRCKQGCLQFVILKPILVAVTLVLYAKGKYKDGNFSPDQSYLYLTIIYTISYTVALYALVLFYVACKDLLQPFNPVPKFVIIKSVVFLTYWQGVLVFLFAKSGFIRDEEEAALFQNFIICVEMLIAAAAHFYAFPYKEYAEANVGGARSFSGSLAHALMLNDFYHDTVHQFAPTYHDYVLYNHNDGGEEGTRKYRARTFVPTGQEMDAVRKNKHMFGNKIDGVSVSSQSSETSTPKTSGVTYDPARPESMKSSLLVDASDSVSTMYDMSLIDIDISSYPSKVPSANISGGPK

SEQ ID NO: 49531 - DNA, 1420 bp, Arabidopsis thaliana; identical to SEQ ID NO: 36272
  misc_feature (1)..(1420): Ceres Seq. ID no. 12580277
  misc_feature (1)..(1420): Ortholog of  Ceres SEQ ID NO 13592768 as cited in SEQ ID NO 20317
  misc_feature (1)..(1420): Ortholog of  Ceres SEQ ID NO 14303656 as cited in SEQ ID NO 61363

SEQ ID NO: 49532 - protein, 351 aa, Arabidopsis thaliana; identical to SEQ ID NO: 36273
  peptide (1)..(351): Ceres Seq. ID no. 12580278

SEQ ID NO: 49533 - protein, 315 aa, Arabidopsis thaliana; identical to SEQ ID NO: 36274
  peptide (1)..(315): Ceres Seq. ID no. 12580279

SEQ ID NO: 49534 - protein, 308 aa, Arabidopsis thaliana; identical to SEQ ID NO: 36275
  peptide (1)..(308): Ceres Seq. ID no. 12580280

SEQ ID NO: 49535 - DNA, 983 bp, Arabidopsis thaliana
  misc_feature (1)..(983): Ceres Seq. ID no. 13592284
  misc_feature (1)..(983): Ortholog of  Ceres SEQ ID NO 15225031 as cited in SEQ ID NO 0
gaggaagagaagaagaaaaaatgttgggaagcataagcctcatctcctgcaacttctctcgccttccacgtcttcttaaaccctccactcgacctcaaaccctaacacaatcctcaagcctccttcttcttcttcaatcacgagcttcttcttcaccacatagaattgcccttttcccgaaatacgagaagaaagtcacattcttccatatctgcaaaagctcttcaaacaacccagaagaaccagagaagactcaaattcaagatgaaggaagagactggtctagctcaattttgctttttgcgctttggggtgcgctcttgtactattgcttcaatctcgctcctgatcaaacacccacacaagacttgtactttttgaaaaagcttttgaatttgaaaggtgatgatggttttagaatgaatcagatccttgttgggttatggtacatcatgggtttgtggcctttggtttatgccatgctcttgcttcccactggtacaagtaaaacaccggcttggcctttcgttgtgctttcctttttcggtggtgtttatgctttgttaccttattttgcactgtggaatcctccttctcctcctgtttcagagactgagctgagacaatggcctttgaatgttctggaatcaaaagtaactgctggggtcactctagttgcaggactgggtataattctttattcagttgtcggtaatgccggtgattggacggagttttatcagtactttcgagagagcaaatttattcatgttacaagtcttgatttctgtttactctctgcatttgctccgttttgggtttacaacgacatgaccacccgaaaatggtttgataaaggcagttggctgttaccggtatcggtgattccattcttgggaccttctttgtatctactcctacgaccagcagtgtcagagacgatagctcccaaagatactgcatcatctgacccaaatcaatag

SEQ ID NO: 49536 - protein, 326 aa, Arabidopsis thaliana
  peptide (1)..(326): Ceres Seq. ID no. 13592285
GREEEKMLGSISLISCNFSRLPRLLKPSTRPQTLTQSSSLLLLLQSRASSSPHRIALFPKYEKKVTFFHICKSSSNNPEEPEKTQIQDEGRDWSSSILLFALWGALLYYCFNLAPDQTPTQDLYFLKKLLNLKGDDGFRMNQILVGLWYIMGLWPLVYAMLLLPTGTSKTPAWPFVVLSFFGGVYALLPYFALWNPPSPPVSETELRQWPLNVLESKVTAGVTLVAGLGIILYSVVGNAGDWTEFYQYFRESKFIHVTSLDFCLLSAFAPFWVYNDMTTRKWFDKGSWLLPVSVIPFLGPSLYLLLRPAVSETIAPKDTASSDPNQ

SEQ ID NO: 49537 - protein, 320 aa, Arabidopsis thaliana
  peptide (1)..(320): Ceres Seq. ID no. 13592286
MLGSISLISCNFSRLPRLLKPSTRPQTLTQSSSLLLLLQSRASSSPHRIALFPKYEKKVTFFHICKSSSNNPEEPEKTQIQDEGRDWSSSILLFALWGALLYYCFNLAPDQTPTQDLYFLKKLLNLKGDDGFRMNQILVGLWYIMGLWPLVYAMLLLPTGTSKTPAWPFVVLSFFGGVYALLPYFALWNPPSPPVSETELRQWPLNVLESKVTAGVTLVAGLGIILYSVVGNAGDWTEFYQYFRESKFIHVTSLDFCLLSAFAPFWVYNDMTTRKWFDKGSWLLPVSVIPFLGPSLYLLLRPAVSETIAPKDTASSDPNQ

SEQ ID NO: 49538 - protein, 187 aa, Arabidopsis thaliana
  peptide (1)..(187): Ceres Seq. ID no. 13592287
MNQILVGLWYIMGLWPLVYAMLLLPTGTSKTPAWPFVVLSFFGGVYALLPYFALWNPPSPPVSETELRQWPLNVLESKVTAGVTLVAGLGIILYSVVGNAGDWTEFYQYFRESKFIHVTSLDFCLLSAFAPFWVYNDMTTRKWFDKGSWLLPVSVIPFLGPSLYLLLRPAVSETIAPKDTASSDPNQ

SEQ ID NO: 49539 - DNA, 1125 bp, Arabidopsis thaliana
  misc_feature (1)..(1125): Ceres Seq. ID no. 12591213
  misc_feature (1)..(1125): Ortholog of  Ceres SEQ ID NO 15169300 as cited in SEQ ID NO 59572
  misc_feature (1)..(1125): Ortholog of  Ceres SEQ ID NO 13596876 as cited in SEQ ID NO 62696
  misc_feature (1)..(1125): Ortholog of  Ceres SEQ ID NO 13655442 as cited in SEQ ID NO 64359
  misc_feature (1)..(1125): Ortholog of  Ceres SEQ ID NO 14303652 as cited in SEQ ID NO 67569
atggcgtctaaatcgaagcagcatcttcgttatcagccgcgaaaatctgtgtcacgatcaacacaagctttcacggtgcttatacttcttctcgtagtgattctgattcttctgggtctcgggattttgtcactacctaatgctaatagaaactcttccaagacgaatgatttgaccaacattgtacgaaagagtgagacgagttctggagatgaagaagggaatggtgaacgttgggttgaagttatttcttgggagcctcgtgctgttgtttatcacaatttcttgactaatgaagaatgtgagcacttgatcagccttgctaaaccgagtatggttaagtcaaccgtggtagatgagaaaaccggtgggagcaaagatagcagagtgagaactagctcaggaacttttcttagaagaggacatgacgaagttgtcgaggtgattgagaaaaggatttcagatttcaccttcattcctgttgaaaatggtgaaggtcttcaagttcttcactaccaagttgggcagaagtatgagcctcactatgactatttcttagatgagttcaacaccaagaatggaggacaacgaatagctactgtgcttatgtacctctctgatgtcgatgatggtggcgagactgtgttccctgcagcaagaggaaacattagtgctgtcccatggtggaacgagctctcaaaatgtggtaaagaaggactatctgttctaccaaagaagcgagatgctttacttttctggaacatgaggcctgatgcatctctagacccttcgagcttgcacggtggatgtccagtggtgaaaggaaacaaatggtcatccacgaaatggttccatgtccacgagttcaaggtttaagagaaaccaaacaaagaaagctaaaatatgaggaggttttcatggaagcttcgaatttgtgtggatacagttaaacaggtataatgtgtatttcccttttgaagtgagagatctttaggaaattggaggctgttctttcatgggggatatttgaaattttttgtactttttaaaaaaaactattttgaatgatttgtactttacgacatattcgaatctgagtcttgtaacttttaacaactcaatacg

SEQ ID NO: 49540 - protein, 291 aa, Arabidopsis thaliana; identical to SEQ ID NO: 23298
  peptide (1)..(291): Ceres Seq. ID no. 12591214

SEQ ID NO: 49541 - protein, 180 aa, Arabidopsis thaliana; identical to SEQ ID NO: 23299
  peptide (1)..(180): Ceres Seq. ID no. 12591215

SEQ ID NO: 49542 - DNA, 1386 bp, Arabidopsis thaliana
  misc_feature (1)..(1386): Ceres Seq. ID no. 13588653
  misc_feature (1)..(1386): Ortholog of  Ceres SEQ ID NO 15169466 as cited in SEQ ID NO 66135
gcacaaaacccttctcactctctctcaagggttcctctcatcttcttcctctgttctttcctctctcttttcctcctcccgccgtcaaatatcgccgccgtgagtaaccacaacaaatacctaaagcttccactactacgcaaatctccgtttccttctccaacacaagctctagctttagacactcgccgtctccattttctctctctccgtagaaaaccaatcccattcgtcaaatctccggtggtctccggcgcagcttccgggtcgggtcaatactttgtggatcttcgtatcggacaaccgcctcaatcgttacttctgatcgccgacacaggaagcgatctcgtttgggttaaatgttcagcttgccggaactgttctcatcattctccggccaccgtcttcttccctcgccactcctcaacattctctcccgcccattgctacgacccggtttgtcgtttagtacctaaaccggatcgagctccgatatgtaaccatacccggatccattccacgtgtcattacgagtatggttacgctgacggttcattaacttccggtttattcgctagagaaacgacgtcgttgaaaacaagctctggtaaagaagcgaggttaaaaagcgttgcttttggatgcgggtttcggatctcgggtcaatccgtatcaggtacgagtttcaatggagccaatggagtaatgggcttgggccgtgggcctatttcttttgcttctcagttgggccgtcgttttggtaacaagttttcttattgcttaatggattacacactctctccgccgccgacgagttatctcatcatcggtaacggcggcgacggcatttcaaagcttttcttcactccgttgctcacgaatccgttatcgccaactttttactacgttaaattaaaatctgttttcgttaacggtgcgaaattacgaatcgatccttcaatttgggaaatcgatgattcaggtaacggcggaaccgtcgtggattccggcacaaccttagcgtttttagctgaaccggcgtatcgatcggttatcgccgccgtgagacgacgggtaaagctccctatcgctgatgcgctgactccggggtttgatttatgcgttaacgtctccggcgtcacgaaaccggaaaagatattaccgaggttgaaatttgaattctccggtggtgctgtgtttgttccgccgccgaggaattactttattgagacggaggagcagattcagtgtctggcgattcaatcggtggatccgaaagttggattttcagtgattgggaatttgatgcaacaaggtttcttgtttgaattcgatagagatagatcacggttaggtttttctcgtcgtggttgtgctctgccgtga

SEQ ID NO: 49543 - protein, 461 aa, Arabidopsis thaliana
  peptide (1)..(461): Ceres Seq. ID no. 13588654
AQNPSHSLSRVPLIFFLCSFLSLFLLPPSNIAAVSNHNKYLKLPLLRKSPFPSPTQALALDTRRLHFLSLRRKPIPFVKSPVVSGAASGSGQYFVDLRIGQPPQSLLLIADTGSDLVWVKCSACRNCSHHSPATVFFPRHSSTFSPAHCYDPVCRLVPKPDRAPICNHTRIHSTCHYEYGYADGSLTSGLFARETTSLKTSSGKEARLKSVAFGCGFRISGQSVSGTSFNGANGVMGLGRGPISFASQLGRRFGNKFSYCLMDYTLSPPPTSYLIIGNGGDGISKLFFTPLLTNPLSPTFYYVKLKSVFVNGAKLRIDPSIWEIDDSGNGGTVVDSGTTLAFLAEPAYRSVIAAVRRRVKLPIADALTPGFDLCVNVSGVTKPEKILPRLKFEFSGGAVFVPPPRNYFIETEEQIQCLAIQSVDPKVGFSVIGNLMQQGFLFEFDRDRSRLGFSRRGCALP

SEQ ID NO: 49544 - DNA, 1194 bp, Arabidopsis thaliana
  misc_feature (1)..(1194): Ceres Seq. ID no. 13588747
  misc_feature (1)..(1194): Ortholog of  Ceres SEQ ID NO 14310369 as cited in SEQ ID NO 54765
  misc_feature (1)..(1194): Ortholog of  Ceres SEQ ID NO 13638746 as cited in SEQ ID NO 59296
  misc_feature (1)..(1194): Ortholog of  Ceres SEQ ID NO 13596474 as cited in SEQ ID NO 62169
  misc_feature (1)..(1194): Ortholog of  Ceres SEQ ID NO 13598714 as cited in SEQ ID NO 62656
  misc_feature (1)..(1194): Ortholog of  Ceres SEQ ID NO 14302434 as cited in SEQ ID NO 63410
  misc_feature (1)..(1194): Ortholog of  Ceres SEQ ID NO 13597519 as cited in SEQ ID NO 64759
  misc_feature (1)..(1194): Ortholog of  Ceres SEQ ID NO 13587054 as cited in SEQ ID NO 0
gatccctcgtaactcctatagaaaaacagaagtaaaacaaaaataaaataaaaacacaaagatggagtgctatgagcagagtcgtcagagagctgcgttcgttgtgctgttgtttatcgttatgttgggatcccaggcacaggcccaactacgcactgacttctattcggacagctgtccatcactgctccctacggtgaggcgggtggtgcagcgagaggtggccaaagagcgtcggatagctgcttccctcctccgactattcttccatgattgcttcgtcaacggctgtgatgcgtcaatattattggatgatacacgttcattcctcggagaaaagacggctggacctaacaataattccgttcgaggatatgaagtcatcgacgcaatcaaatcaagggttgagagactctgcccaggcgtggtgtcatgcgctgacatcctggcaatcacggctcgggactcggtccttctaatgggtggccgcggctggagcgtaaaactagggagacgtgattctatcacggcgagcttctccactgctaactccggcgtcctgccacctccaacctctactcttgataaccttattaaccttttccgagcaaacggtttatccccacgcgacatggtggcgctctccggggctcacaccattgggcaagccaggtgcgtcaccttcaggagccggatatataactcaacaaacatcgacctttcatttgccttatccagacggaggagctgccctgcggcaactggctccggcgataacaacgccgccattctcgatctccgcacacctgaaaagttcgacggcagctacttcatgcagcttgtcaaccacaggggacttctcacatcagatcaggtcttgttcaacggaggttccaccgactcgatcgtcgtatcctacagccggagtgtccaagcattctacagagattttgtagcggcgatgataaaaatgggcgacatcagcccactcaccgggtccaatggacagatccgtcgcagctgtcgcaggcccaactaaaatagtctctactattaagcccataataatctcttagtgaactgtttttttcttattttaatgtgcatcattctgatgttattgcgatatgtcaattaattaaaccggaaatatctattgtttaatcgatataatatataatataattaagtaac

SEQ ID NO: 49545 - protein, 325 aa, Arabidopsis thaliana
  peptide (1)..(325): Ceres Seq. ID no. 13588748
MECYEQSRQRAAFVVLLFIVMLGSQAQAQLRTDFYSDSCPSLLPTVRRVVQREVAKERRIAASLLRLFFHDCFVNGCDASILLDDTRSFLGEKTAGPNNNSVRGYEVIDAIKSRVERLCPGVVSCADILAITARDSVLLMGGRGWSVKLGRRDSITASFSTANSGVLPPPTSTLDNLINLFRANGLSPRDMVALSGAHTIGQARCVTFRSRIYNSTNIDLSFALSRRRSCPAATGSGDNNAAILDLRTPEKFDGSYFMQLVNHRGLLTSDQVLFNGGSTDSIVVSYSRSVQAFYRDFVAAMIKMGDISPLTGSNGQIRRSCRRPN

SEQ ID NO: 49546 - protein, 305 aa, Arabidopsis thaliana
  peptide (1)..(305): Ceres Seq. ID no. 13588749
MLGSQAQAQLRTDFYSDSCPSLLPTVRRVVQREVAKERRIAASLLRLFFHDCFVNGCDASILLDDTRSFLGEKTAGPNNNSVRGYEVIDAIKSRVERLCPGVVSCADILAITARDSVLLMGGRGWSVKLGRRDSITASFSTANSGVLPPPTSTLDNLINLFRANGLSPRDMVALSGAHTIGQARCVTFRSRIYNSTNIDLSFALSRRRSCPAATGSGDNNAAILDLRTPEKFDGSYFMQLVNHRGLLTSDQVLFNGGSTDSIVVSYSRSVQAFYRDFVAAMIKMGDISPLTGSNGQIRRSCRRPN

SEQ ID NO: 49547 - protein, 186 aa, Arabidopsis thaliana
  peptide (1)..(186): Ceres Seq. ID no. 13588750
MGGRGWSVKLGRRDSITASFSTANSGVLPPPTSTLDNLINLFRANGLSPRDMVALSGAHTIGQARCVTFRSRIYNSTNIDLSFALSRRRSCPAATGSGDNNAAILDLRTPEKFDGSYFMQLVNHRGLLTSDQVLFNGGSTDSIVVSYSRSVQAFYRDFVAAMIKMGDISPLTGSNGQIRRSCRRPN

SEQ ID NO: 49548 - DNA, 1581 bp, Arabidopsis thaliana
  misc_feature (1)..(1581): Ceres Seq. ID no. 13588795
  misc_feature (1)..(1581): Ortholog of  Ceres SEQ ID NO 14313373 as cited in SEQ ID NO 67312
tggagaaatcgctgatagagagtagagagacacacgcagattttgagctgcgtgctctgttttaagcttgaaggaggaaaaacatggcagaccaagaatcagataagaacattgagatttggaagattaagaagctaatcaaaggacttgaaaccgcaagaggtaatggaacaagtatgatctctcttataatgcctcctagagatcaagtagctcgtgtcactaagatgcttgctgatgaatacggaaccgcctcaaacatcaagagtcgagtgaatcgtcaatctgttttatctgccattacttctgctcaacaaagattgaagctttacaacaaagttcctccgaatggtcttgttctctatactggaaccattgttactgatgatggtaaagagaagaaagtgacgattgatttcgagccttttaaaccgattaatgcttcgttgtatttgtgtgacaataagttccacaccgagcctttgaatgagcttttggagtctgatgataagtttggtttcattgttatggatggaaatggaactttgtttggtactttgagtgggaatacaagagaggttcttcataagttcactgtcgatcttccgaaaaagcacggaagaggaggacaatctgcgttgcgatttgctcgtcttaggatggagaagagacataactatgtgaggaaaaccgcggagcttgccactcagttttacattaatccagctacgagtcagcctaatgtctctggtcttatacttgctggttcagcggattttaagaccgagctaagtcaatcagaactgtttgatcctcgtcttcaagctaagatattgaatgtggttgatgtttcttacggaggagagaatggtttcaaccaagcaattgagctgtctgctgagattctatctaatgtgaagttcatacaagaaaagaaattgattgggaagtactttgaggagattagtcaagacactgggaaatatgttttcggtgttgaagatactttaaaggctctggaaatgggtgctgttgagactcttatagtgtgggagaatctagatattaataggtatgagttaaagaacaacacgaccggagaaatcgtgattaagcatttgggaaaggatcaagagaacaaccaaagcaatttccatgatgcagagactaatgcagagttagaagttcaggagaagatgcctctgcttgaatggtttgctaacgaatataaacgttttggttgtacacttgagtttgtgactaacaagtcccaagaaggatcacaattttgcagaggctttggcggtattggtggattgttgcggtaccagcttgatatgaggacattcgatgaattatccgatggtgaagtttatgaagactcagattaagtaagagaaaatgtggtttaagatctgaagaaggatttgaagtttggggaaaaaaagaaagactatgaacttttgtttgatatactttgtctctctctattatcttctgttgccgcttttaagtttttctgaaacagttatgttaaaatgtatgagaaatttgagcttcattatactctattttgaagac

SEQ ID NO: 49549 - protein, 435 aa, Arabidopsis thaliana
  peptide (1)..(435): Ceres Seq. ID no. 13588796
MADQESDKNIEIWKIKKLIKGLETARGNGTSMISLIMPPRDQVARVTKMLADEYGTASNIKSRVNRQSVLSAITSAQQRLKLYNKVPPNGLVLYTGTIVTDDGKEKKVTIDFEPFKPINASLYLCDNKFHTEPLNELLESDDKFGFIVMDGNGTLFGTLSGNTREVLHKFTVDLPKKHGRGGQSALRFARLRMEKRHNYVRKTAELATQFYINPATSQPNVSGLILAGSADFKTELSQSELFDPRLQAKILNVVDVSYGGENGFNQAIELSAEILSNVKFIQEKKLIGKYFEEISQDTGKYVFGVEDTLKALEMGAVETLIVWENLDINRYELKNNTTGEIVIKHLGKDQENNQSNFHDAETNAELEVQEKMPLLEWFANEYKRFGCTLEFVTNKSQEGSQFCRGFGGIGGLLRYQLDMRTFDELSDGEVYEDSD

SEQ ID NO: 49550 - protein, 404 aa, Arabidopsis thaliana
  peptide (1)..(404): Ceres Seq. ID no. 13588797
MISLIMPPRDQVARVTKMLADEYGTASNIKSRVNRQSVLSAITSAQQRLKLYNKVPPNGLVLYTGTIVTDDGKEKKVTIDFEPFKPINASLYLCDNKFHTEPLNELLESDDKFGFIVMDGNGTLFGTLSGNTREVLHKFTVDLPKKHGRGGQSALRFARLRMEKRHNYVRKTAELATQFYINPATSQPNVSGLILAGSADFKTELSQSELFDPRLQAKILNVVDVSYGGENGFNQAIELSAEILSNVKFIQEKKLIGKYFEEISQDTGKYVFGVEDTLKALEMGAVETLIVWENLDINRYELKNNTTGEIVIKHLGKDQENNQSNFHDAETNAELEVQEKMPLLEWFANEYKRFGCTLEFVTNKSQEGSQFCRGFGGIGGLLRYQLDMRTFDELSDGEVYEDSD

SEQ ID NO: 49551 - protein, 399 aa, Arabidopsis thaliana
  peptide (1)..(399): Ceres Seq. ID no. 13588798
MPPRDQVARVTKMLADEYGTASNIKSRVNRQSVLSAITSAQQRLKLYNKVPPNGLVLYTGTIVTDDGKEKKVTIDFEPFKPINASLYLCDNKFHTEPLNELLESDDKFGFIVMDGNGTLFGTLSGNTREVLHKFTVDLPKKHGRGGQSALRFARLRMEKRHNYVRKTAELATQFYINPATSQPNVSGLILAGSADFKTELSQSELFDPRLQAKILNVVDVSYGGENGFNQAIELSAEILSNVKFIQEKKLIGKYFEEISQDTGKYVFGVEDTLKALEMGAVETLIVWENLDINRYELKNNTTGEIVIKHLGKDQENNQSNFHDAETNAELEVQEKMPLLEWFANEYKRFGCTLEFVTNKSQEGSQFCRGFGGIGGLLRYQLDMRTFDELSDGEVYEDSD

SEQ ID NO: 49552 - DNA, 1873 bp, Arabidopsis thaliana
  misc_feature (1)..(1873): Ceres Seq. ID no. 12591220
  misc_feature (1)..(1873): Ortholog of  Ceres SEQ ID NO 12613725 as cited in SEQ ID NO 68196
  misc_feature (1)..(1873): Ortholog of  Ceres SEQ ID NO 14301486 as cited in SEQ ID NO 69222
acacacacttagagaaagcagagcagagcatagagaaaaacataacaatggaggttgagaagacagagaagaacattgcagaggatgatgagtctaagatcatctacagaggatggaaagtcatgcccttcatcattggaaatgagacatttgaaaaattggggattgttggaagttcatcgaatctggttatatacttaacgacggttttcaacatgaagagcatcacggctgcgaaagtcgtcaacatctacggtggcacaagcaactttggcaccatcgtcgctgctttcctctgtgactcctactttggccgctacaagaccctatctttcgccatgatcgcttgctttctcggttcggtggcaatggatctaacggctgtgattcatcccctgcatccagctcaatgcgctaaggaaataggaagcgtgtgcaatgggccatccatcggacaaatcatgtttctcgccggagcaatggttttgctggtgatcggagccggtgggattaggccatgcaatcttccatttggtgctgatcagttcgatccgaagacaaaagaagggaaacgagggattgagagtttcttcaattggtatttcttcaccttcacgtttgctcagatggtgtcgttaaccctcatcgtctatgttcagtcaaacgtgagctggagcattggtttagccatcccagctattctaatgctacttggttgcatcatattcttcgctggttctaagctctatgtcaaggttaaagctagtggcagtcccattcacagcataactcgtgtcattgttgtcgcgatcaagaagaggcggttaaagcccgttgggcctaacgagctttacaactacatcgccagtgatttcaagaactcgaaattgggccatacagagcagttcaggtttcttgacaaatcggcaatccaaacacaagacgacaagctgaacaaagatgggtcgccggtggatgcatggaaactctgcagtatgcaacaagtggaggaagttaaatgcgtgatccgggtgcttccggtttggctctcggccgccttattctacctagcttacattcaacaaacaacctacacaatctttcagtctcttcaatccgatagacgccttggtccaggaagtttccagatcccggccggttcttataccgtcttcctaatgcttggaatgacgatattcatacctatctatgaccgcgtccttgtacctttccttagaaagtatacaggcagagacggcggtatcacacaactgcagagagttggagcaggactgtttctatgcatcacaagtatgatggtgtctgcaattgtagaacaatacagaagaaaggtagctctcacaaaaccgacgctagggttggccccaagaaaaggcgcaatctcttcgatgtccggtatgtggttgattcctcagctagtgctaatgggtatcgcggacgccctcgctggagttggacaaatggagttttactacaaacagtttccagagaacatgcgaagttttgctggttctctgtattattgtggaatcggattggcgagttacctcagcacctttttgttatcggcggtacacgataccacagagggattttcaggaggaagttggcttccggaagatttaaacaagggaagattggagtatttctacttcttggttgctggtatgatgactctaaacttggcctatttcttgttggtctcacattggtaccgttacaaagatgttgtggccaaggacaaggacatggacaagacttctgctgagtttgataaggtgtcagtgtaataaagatctttcctttgactctttggtttaggggctttgagacaataaaaatacaacctttg

SEQ ID NO: 49553 - protein, 602 aa, Arabidopsis thaliana
  peptide (1)..(602): Ceres Seq. ID no. 12591221
THLEKAEQSIEKNITMEVEKTEKNIAEDDESKIIYRGWKVMPFIIGNETFEKLGIVGSSSNLVIYLTTVFNMKSITAAKVVNIYGGTSNFGTIVAAFLCDSYFGRYKTLSFAMIACFLGSVAMDLTAVIHPLHPAQCAKEIGSVCNGPSIGQIMFLAGAMVLLVIGAGGIRPCNLPFGADQFDPKTKEGKRGIESFFNWYFFTFTFAQMVSLTLIVYVQSNVSWSIGLAIPAILMLLGCIIFFAGSKLYVKVKASGSPIHSITRVIVVAIKKRRLKPVGPNELYNYIASDFKNSKLGHTEQFRFLDKSAIQTQDDKLNKDGSPVDAWKLCSMQQVEEVKCVIRVLPVWLSAALFYLAYIQQTTYTIFQSLQSDRRLGPGSFQIPAGSYTVFLMLGMTIFIPIYDRVLVPFLRKYTGRDGGITQLQRVGAGLFLCITSMMVSAIVEQYRRKVALTKPTLGLAPRKGAISSMSGMWLIPQLVLMGIADALAGVGQMEFYYKQFPENMRSFAGSLYYCGIGLASYLSTFLLSAVHDTTEGFSGGSWLPEDLNKGRLEYFYFLVAGMMTLNLAYFLLVSHWYRYKDVVAKDKDMDKTSAEFDKVSV

SEQ ID NO: 49554 - protein, 587 aa, Arabidopsis thaliana
  peptide (1)..(587): Ceres Seq. ID no. 12591222
MEVEKTEKNIAEDDESKIIYRGWKVMPFIIGNETFEKLGIVGSSSNLVIYLTTVFNMKSITAAKVVNIYGGTSNFGTIVAAFLCDSYFGRYKTLSFAMIACFLGSVAMDLTAVIHPLHPAQCAKEIGSVCNGPSIGQIMFLAGAMVLLVIGAGGIRPCNLPFGADQFDPKTKEGKRGIESFFNWYFFTFTFAQMVSLTLIVYVQSNVSWSIGLAIPAILMLLGCIIFFAGSKLYVKVKASGSPIHSITRVIVVAIKKRRLKPVGPNELYNYIASDFKNSKLGHTEQFRFLDKSAIQTQDDKLNKDGSPVDAWKLCSMQQVEEVKCVIRVLPVWLSAALFYLAYIQQTTYTIFQSLQSDRRLGPGSFQIPAGSYTVFLMLGMTIFIPIYDRVLVPFLRKYTGRDGGITQLQRVGAGLFLCITSMMVSAIVEQYRRKVALTKPTLGLAPRKGAISSMSGMWLIPQLVLMGIADALAGVGQMEFYYKQFPENMRSFAGSLYYCGIGLASYLSTFLLSAVHDTTEGFSGGSWLPEDLNKGRLEYFYFLVAGMMTLNLAYFLLVSHWYRYKDVVAKDKDMDKTSAEFDKVSV

SEQ ID NO: 49555 - protein, 562 aa, Arabidopsis thaliana
  peptide (1)..(562): Ceres Seq. ID no. 12591223
MPFIIGNETFEKLGIVGSSSNLVIYLTTVFNMKSITAAKVVNIYGGTSNFGTIVAAFLCDSYFGRYKTLSFAMIACFLGSVAMDLTAVIHPLHPAQCAKEIGSVCNGPSIGQIMFLAGAMVLLVIGAGGIRPCNLPFGADQFDPKTKEGKRGIESFFNWYFFTFTFAQMVSLTLIVYVQSNVSWSIGLAIPAILMLLGCIIFFAGSKLYVKVKASGSPIHSITRVIVVAIKKRRLKPVGPNELYNYIASDFKNSKLGHTEQFRFLDKSAIQTQDDKLNKDGSPVDAWKLCSMQQVEEVKCVIRVLPVWLSAALFYLAYIQQTTYTIFQSLQSDRRLGPGSFQIPAGSYTVFLMLGMTIFIPIYDRVLVPFLRKYTGRDGGITQLQRVGAGLFLCITSMMVSAIVEQYRRKVALTKPTLGLAPRKGAISSMSGMWLIPQLVLMGIADALAGVGQMEFYYKQFPENMRSFAGSLYYCGIGLASYLSTFLLSAVHDTTEGFSGGSWLPEDLNKGRLEYFYFLVAGMMTLNLAYFLLVSHWYRYKDVVAKDKDMDKTSAEFDKVSV

SEQ ID NO: 49556 - DNA, 874 bp, Arabidopsis thaliana
  misc_feature (1)..(874): Ceres Seq. ID no. 12592182
  misc_feature (1)..(874): Ortholog of  Ceres SEQ ID NO 13623723 as cited in SEQ ID NO 0
  misc_feature (1)..(874): Ortholog of  Ceres SEQ ID NO 15179986 as cited in SEQ ID NO 0
gcactgacatgaattctcaacgaagctaagatcaattcgatagagagtgaaaactatgaggaatctgcgaatcatctcctctcacttctcacgagttttgaaatccaccgagacacgctcaagttccgttcaattattcacgatccaatctcggagctactcatctccggcgacgcaatcggagaacgtgtccaaaatcgtcaatgagctatcgaatctcactcttttggaaacaatggatcttactgagatccttaggcagaagctaaacatcagtgaattgcctgtgatggcggcgatgatgccagggatgtcattaccgggatctggagctagtaaatccgccggcggagaagggaaagagaagaagaaggaagcaaagactgcgtttgatgtgatgcttcaagcgtacgatgcagtgtcgaagataaaggtgattaaagaagtgagaacgattacggcattggggttgaaggaagcgaaagatttggtggagaaagctccaacattgttgaagaaaggagttagtaaggaagaagcagagaagatcattgagaagttgaaggctgttggagctaaagttgctatggagtgaccatttttaggtgttattaaaatggagcatgagcaagaacaaatgaagcttctgctgagtagtccttcctagtgtttattacaaatgtaagatgtgatggaaagtcatcagcagctcttttctttagagatagaaacagatttttgtcttctatcaaatatacacgaaggcttgttagaagcaaagttctctcttctttggatcaatcattctctcagttcttggtttgtactaacagttgatgatttctttcatataataatgaatcatgttatttcc

SEQ ID NO: 49557 - protein, 179 aa, Arabidopsis thaliana
  peptide (1)..(179): Ceres Seq. ID no. 12592183
MRNLRIISSHFSRVLKSTETRSSSVQLFTIQSRSYSSPATQSENVSKIVNELSNLTLLETMDLTEILRQKLNISELPVMAAMMPGMSLPGSGASKSAGGEGKEKKKEAKTAFDVMLQAYDAVSKIKVIKEVRTITALGLKEAKDLVEKAPTLLKKGVSKEEAEKIIEKLKAVGAKVAME

SEQ ID NO: 49558 - protein, 119 aa, Arabidopsis thaliana
  peptide (1)..(119): Ceres Seq. ID no. 12592184
MDLTEILRQKLNISELPVMAAMMPGMSLPGSGASKSAGGEGKEKKKEAKTAFDVMLQAYDAVSKIKVIKEVRTITALGLKEAKDLVEKAPTLLKKGVSKEEAEKIIEKLKAVGAKVAME

SEQ ID NO: 49559 - protein, 101 aa, Arabidopsis thaliana
  peptide (1)..(101): Ceres Seq. ID no. 12592185
MAAMMPGMSLPGSGASKSAGGEGKEKKKEAKTAFDVMLQAYDAVSKIKVIKEVRTITALGLKEAKDLVEKAPTLLKKGVSKEEAEKIIEKLKAVGAKVAME

SEQ ID NO: 49560 - DNA, 1592 bp, Arabidopsis thaliana
  misc_feature (1)..(1592): Ceres Seq. ID no. 14302961
  misc_feature (1)..(1592): Ortholog of  Ceres SEQ ID NO 15172321 as cited in SEQ ID NO 55415
atcgtcttcatcgttaacttcgcagactctgttgattagtcaacacagatcagaatctgaggctttggccgagacgagagaagcagaagaagaaaatggcggagactgtacattctccgatcgttacttacgcatcgatgttatcgcttctcgccttctgtccacctttcgtcattctcctatggtacacaatggttcatcaggatggttctgttactcagacctttggcttcttttgggagaatggagttcaaggacttatcaacatatggccaagacccactttgattgcttggaaaattatattttgctatggagcatttgaagctattcttcagctgcttctgcctggtaaaagagttgagggtccaatatctccagccggaaaccgaccagtttacaaggccaatggtctggctgcttactttgtgacactagcaacctatcttggtctttggtggtttggaatcttcaaccctgcaattgtctatgatcacttgggtgaaatattttcggcactaatattcggaagcttcatattttgtgttttgttgtacataaaaggccatgttgcaccttcatcaagtgactctggttcatgtggtaacctaataattgacttctattggggcatggagttgtaccctcgaattggtaagagctttgacatcaaggtgtttactaattgcagattcggaatgatgtcttgggcagttcttgcagtcacgtactgcataaaacagtatgaaataaatggcaaagtatctgattcaatgctggtgaacaccatcctgatgctggtgtatgtcacaaaattcttctggtgggaagctggttattggaacaccatggacattgcacatgaccgagctggattctatatatgctggggttgcccagtgtgggtgccttctgtctacacttctccaggcatgtaccttgtgaaccaccccgtcgaactcggaactcagttggcaatatacattctcgttgcaggaattctgtgcatttacataaactatgactgtgatagacaaaggcaagagttcaggaggacaaacgggaaatgtttggtttggggaagagccccgtcaaagattgtggcgtcgtatactacaacatctggtgaaactaaaactagtcttctcttaacgtctggatggtggggattggctcgtcatttccattatgttcctgagatcttaagtgctttcttctggaccgtaccggctctcttcgataacttcttggcatacttctacgtcatatttctcacccttcttctctttgatcgagccaagagagacgatgaccgatgccgatcaaagtatgggaaatattggaagctgtattgtgagaaagtcaaatacaggatcattccgggaatttattgattgtaacgaagtctgttgttctcattttctagttattacgttaattcgaacgttggaatcatcaaaagaccgtgccaaaacaaaaatgcaaattgatgcgatagacattcttttgctgatttgtatgctataggttttcaaatctctagctacgcttatgtatttccctagattatcaaagttagcctgccgttttct

SEQ ID NO: 49561 - protein, 432 aa, Arabidopsis thaliana
  peptide (1)..(432): Ceres Seq. ID no. 14302962
MAETVHSPIVTYASMLSLLAFCPPFVILLWYTMVHQDGSVTQTFGFFWENGVQGLINIWPRPTLIAWKIIFCYGAFEAILQLLLPGKRVEGPISPAGNRPVYKANGLAAYFVTLATYLGLWWFGIFNPAIVYDHLGEIFSALIFGSFIFCVLLYIKGHVAPSSSDSGSCGNLIIDFYWGMELYPRIGKSFDIKVFTNCRFGMMSWAVLAVTYCIKQYEINGKVSDSMLVNTILMLVYVTKFFWWEAGYWNTMDIAHDRAGFYICWGCPVWVPSVYTSPGMYLVNHPVELGTQLAIYILVAGILCIYINYDCDRQRQEFRRTNGKCLVWGRAPSKIVASYTTTSGETKTSLLLTSGWWGLARHFHYVPEILSAFFWTVPALFDNFLAYFYVIFLTLLLFDRAKRDDDRCRSKYGKYWKLYCEKVKYRIIPGIY

SEQ ID NO: 49562 - protein, 418 aa, Arabidopsis thaliana
  peptide (1)..(418): Ceres Seq. ID no. 14302963
MLSLLAFCPPFVILLWYTMVHQDGSVTQTFGFFWENGVQGLINIWPRPTLIAWKIIFCYGAFEAILQLLLPGKRVEGPISPAGNRPVYKANGLAAYFVTLATYLGLWWFGIFNPAIVYDHLGEIFSALIFGSFIFCVLLYIKGHVAPSSSDSGSCGNLIIDFYWGMELYPRIGKSFDIKVFTNCRFGMMSWAVLAVTYCIKQYEINGKVSDSMLVNTILMLVYVTKFFWWEAGYWNTMDIAHDRAGFYICWGCPVWVPSVYTSPGMYLVNHPVELGTQLAIYILVAGILCIYINYDCDRQRQEFRRTNGKCLVWGRAPSKIVASYTTTSGETKTSLLLTSGWWGLARHFHYVPEILSAFFWTVPALFDNFLAYFYVIFLTLLLFDRAKRDDDRCRSKYGKYWKLYCEKVKYRIIPGIY

SEQ ID NO: 49563 - protein, 400 aa, Arabidopsis thaliana
  peptide (1)..(400): Ceres Seq. ID no. 14302964
MVHQDGSVTQTFGFFWENGVQGLINIWPRPTLIAWKIIFCYGAFEAILQLLLPGKRVEGPISPAGNRPVYKANGLAAYFVTLATYLGLWWFGIFNPAIVYDHLGEIFSALIFGSFIFCVLLYIKGHVAPSSSDSGSCGNLIIDFYWGMELYPRIGKSFDIKVFTNCRFGMMSWAVLAVTYCIKQYEINGKVSDSMLVNTILMLVYVTKFFWWEAGYWNTMDIAHDRAGFYICWGCPVWVPSVYTSPGMYLVNHPVELGTQLAIYILVAGILCIYINYDCDRQRQEFRRTNGKCLVWGRAPSKIVASYTTTSGETKTSLLLTSGWWGLARHFHYVPEILSAFFWTVPALFDNFLAYFYVIFLTLLLFDRAKRDDDRCRSKYGKYWKLYCEKVKYRIIPGIY

SEQ ID NO: 49564 - DNA, 1698 bp, Arabidopsis thaliana; identical to SEQ ID NO: 46504
  misc_feature (1)..(1698): Ceres Seq. ID no. 12574979
  misc_feature (1)..(1698): Ortholog of  Ceres SEQ ID NO 14315257 as cited in SEQ ID NO 52552
  misc_feature (1)..(1698): Ortholog of  Ceres SEQ ID NO 15168421 as cited in SEQ ID NO 60131
  misc_feature (1)..(1698): Ortholog of  Ceres SEQ ID NO 13597574 as cited in SEQ ID NO 64677
  misc_feature (1)..(1698): Ortholog of  Ceres SEQ ID NO 13597843 as cited in SEQ ID NO 64850
  misc_feature (1)..(1698): Ortholog of  Ceres SEQ ID NO 13597678 as cited in SEQ ID NO 65375
  misc_feature (1)..(1698): Ortholog of  Ceres SEQ ID NO 15176787 as cited in SEQ ID NO 66468
  misc_feature (1)..(1698): Ortholog of  Ceres SEQ ID NO 13596180 as cited in SEQ ID NO 67941
  misc_feature (1)..(1698): Ortholog of  Ceres SEQ ID NO 13591190 as cited in SEQ ID NO 68044
  misc_feature (1)..(1698): Ortholog of  Ceres SEQ ID NO 13595961 as cited in SEQ ID NO 68223

SEQ ID NO: 49565 - protein, 485 aa, Arabidopsis thaliana; identical to SEQ ID NO: 46505
  peptide (1)..(485): Ceres Seq. ID no. 12574980

SEQ ID NO: 49566 - protein, 443 aa, Arabidopsis thaliana; identical to SEQ ID NO: 46506
  peptide (1)..(443): Ceres Seq. ID no. 12574981

SEQ ID NO: 49567 - protein, 363 aa, Arabidopsis thaliana; identical to SEQ ID NO: 46507
  peptide (1)..(363): Ceres Seq. ID no. 12574982

SEQ ID NO: 49568 - DNA, 1451 bp, Arabidopsis thaliana
  misc_feature (1)..(1451): Ceres Seq. ID no. 14312108
  misc_feature (1)..(1451): Ortholog of  Ceres SEQ ID NO 15170911 as cited in SEQ ID NO 55290
gcaccagtccccccccccccgaccgtacacacatccccatacgaacactcacaatcgttaaaaagaagagaagagaagagagagaaagcttaaatcggaaaaaatggtttcgtggatgatgacaaccaaggcggtgctaatctcaagcggcgtcgccaccgtggctctgttactgaaactctctgttccggtagctgttgatttctccgtgtcacgagctccgatcttgtggagctccttgttgtcatggctgaaaccaccgtatctttacgttgttaccaacggaatcatcatcactatcgttgcttcttctaagtattaccgaagtcaccatgaccgtgatgaagaagatgagatcgtcgtgtacggtggtggaggttataaggtccagacgggggagccgattgtgaatcaacatcaagcttctccgaggattctggaggttaaggatttggatactggtgcgcattttggtttcgttatggcgaatccggaagcggaggaactggaatcagaggcggttacggcggttgtgtttgatgatgaggaggaggagaacaagattatagatgaggcggcgacggtggaggatggaattgaagaggagcttaagagtgtgattatggctgagaattcagatctggttgaatccgatgtcataccgccgccgatcccaatcgaatcggagaatattcctccgattgagaagcctctcgttacttcaaggttcgggtcaccggaaattgatgaaagcaagtcacgaaggtggaagagctctgagagtgacgaagccgaagaagaacgagacgttggagaatacgtggaagatgataacggaagggaagtcaacgccgttgactagacagttataccggagatctgacacgtttggacgtggagattccgggggagttgacggtgaggtgaaaccggtttataagaaatcggatacgtttagggacaggactaattattatcagttggcggagacggcgaaggtgaggaaagagccgtcgctgagtcaggaagagttgaatcggcgagttgaagcgtttataaagaagtttaatgaggagatgaagttgcagagaatggagtctctcagacagtacaaagagataactagccgtggggtttagttaactgtttttattttctggttaaaatttttttattggcttttttatacacagaaaaaaatagaaaaagaagattagtcagagtggatttaacttaaaagaaaaaaaagttacagtagaaaaaaaatctctttattaatttgtgaagcttgaaggttttttttttgtcaacgctttgaagttacataggttttttttctttgctttgttgttgtgtgtgtgattttactgagatatagtttggtttgtatatattaatgtgttggttttacaagtaaaaattagatatatatacacttgtggttttgttgc

SEQ ID NO: 49569 - protein, 252 aa, Arabidopsis thaliana
  peptide (1)..(252): Ceres Seq. ID no. 14312109
MVSWMMTTKAVLISSGVATVALLLKLSVPVAVDFSVSRAPILWSSLLSWLKPPYLYVVTNGIIITIVASSKYYRSHHDRDEEDEIVVYGGGGYKVQTGEPIVNQHQASPRILEVKDLDTGAHFGFVMANPEAEELESEAVTAVVFDDEEEENKIIDEAATVEDGIEEELKSVIMAENSDLVESDVIPPPIPIESENIPPIEKPLVTSRFGSPEIDESKSRRWKSSESDEAEEERDVGEYVEDDNGREVNAVD

SEQ ID NO: 49570 - protein, 248 aa, Arabidopsis thaliana
  peptide (1)..(248): Ceres Seq. ID no. 14312110
MMTTKAVLISSGVATVALLLKLSVPVAVDFSVSRAPILWSSLLSWLKPPYLYVVTNGIIITIVASSKYYRSHHDRDEEDEIVVYGGGGYKVQTGEPIVNQHQASPRILEVKDLDTGAHFGFVMANPEAEELESEAVTAVVFDDEEEENKIIDEAATVEDGIEEELKSVIMAENSDLVESDVIPPPIPIESENIPPIEKPLVTSRFGSPEIDESKSRRWKSSESDEAEEERDVGEYVEDDNGREVNAVD

SEQ ID NO: 49571 - protein, 247 aa, Arabidopsis thaliana
  peptide (1)..(247): Ceres Seq. ID no. 14312111
MTTKAVLISSGVATVALLLKLSVPVAVDFSVSRAPILWSSLLSWLKPPYLYVVTNGIIITIVASSKYYRSHHDRDEEDEIVVYGGGGYKVQTGEPIVNQHQASPRILEVKDLDTGAHFGFVMANPEAEELESEAVTAVVFDDEEEENKIIDEAATVEDGIEEELKSVIMAENSDLVESDVIPPPIPIESENIPPIEKPLVTSRFGSPEIDESKSRRWKSSESDEAEEERDVGEYVEDDNGREVNAVD

SEQ ID NO: 49572 - DNA, 1762 bp, Arabidopsis thaliana
  misc_feature (1)..(1762): Ceres Seq. ID no. 12591232
  misc_feature (1)..(1762): Ortholog of  Ceres SEQ ID NO 15176862 as cited in SEQ ID NO 67415
agtttttctcttgccgttgaagcaagtgagaaccaaatccccctctgttcgatcccgccgcggtgagaagcgatgaagtcggagactttaacattagttctggtgtatctcgccggaatcatggagagagccgatgagtctctgcttccaggagtttacaaagaagttggagatgctctacacgtggatcccacagctcttggaacattaactctgttccgctctattgttcagtcttcttgttaccctttagccgcttacttgtcttctagacataaccgagctcacgtcatcgctctcggtgctttcctctgggccactgccactttcctcgtcgccgtctccactactttcttccaggtggcagtatcaagaggcttgaacgggatagggctagccattgtgacacccgcgattcagtccctagtcgctgactcaactgatgactataaccgtgggatggcatttgggtggttaggattcacatcaaacattggttccatacttggctatgtatgttccatcctctttgcctcaaaatctttcaatggtgtcgctggatggagaatcgctttccttttggtagcagtcgttagcgtgatagtaggcattttggtccgtctcttcgcaacagatcctcactacagcgacagaaagatcacaaaacatgtcaaagacaaacctttctggtcagacataagagatctattgaaagaagctaagatggtgataaagattccgtctttccaaatctttgtcgctcagggagtttcgggttctttcccttggtcagctttggcttttgcaccattgtggctagaactcattggtttctcccacaaaacaaccgcggttctcgtgactcttttcaccatttcttgctctcttggaggtttgtttggaggatacatgggagatactctcgccaagaagttcccaaatggcggtaggattttcctctctcaggtaagctctggctcggcaattcctttagctgcgattttgcttatcggattacctgatgatccctccacggcctttagccacggtctggttcttgtcatcatgggattatgcatctcatggaacggtgcagctacaaacggtccaatatttgcagagatagttcctgagagagcacgaacgagcatctacgcgttagacagatcattcgagtcgattctagcttcttttgctcctcctatagtagggatgcttgctcagaacatctatggatataaaccaatcccggaaggatccacaagctcggtcaagattgatacagatagagcgaacgcagcatcgctcgctaaagcattatacacatcgattgggatcccgatggtgatctgttgcacaatctactcgttcctatattgcacatacccgagggaccgagacagagcaaaaatgcaagccttgatcgagtcagagatgcaacaactcaatgaagaggaagatgagatcgaagtgaagtgttttggagctgaagaacacgatgaggcttatttgcttaagcagcatcagaatgagagttaagaacagagtcaaatgatgatgatttgggttgttattgacaatagggttccatacttcaattataggaagatggggtcatagttataatttttgtaaaagaaaagtactgaagtgaaatataccggtagataacatttacaagaacagagtaaaaggaaaattactgatttttgtttttgtaaggaaaaatattaatgagtattgaatgattattcgctttctt

SEQ ID NO: 49573 - protein, 488 aa, Arabidopsis thaliana
  peptide (1)..(488): Ceres Seq. ID no. 12591233
MKSETLTLVLVYLAGIMERADESLLPGVYKEVGDALHVDPTALGTLTLFRSIVQSSCYPLAAYLSSRHNRAHVIALGAFLWATATFLVAVSTTFFQVAVSRGLNGIGLAIVTPAIQSLVADSTDDYNRGMAFGWLGFTSNIGSILGYVCSILFASKSFNGVAGWRIAFLLVAVVSVIVGILVRLFATDPHYSDRKITKHVKDKPFWSDIRDLLKEAKMVIKIPSFQIFVAQGVSGSFPWSALAFAPLWLELIGFSHKTTAVLVTLFTISCSLGGLFGGYMGDTLAKKFPNGGRIFLSQVSSGSAIPLAAILLIGLPDDPSTAFSHGLVLVIMGLCISWNGAATNGPIFAEIVPERARTSIYALDRSFESILASFAPPIVGMLAQNIYGYKPIPEGSTSSVKIDTDRANAASLAKALYTSIGIPMVICCTIYSFLYCTYPRDRDRAKMQALIESEMQQLNEEEDEIEVKCFGAEEHDEAYLLKQHQNES

SEQ ID NO: 49574 - protein, 472 aa, Arabidopsis thaliana
  peptide (1)..(472): Ceres Seq. ID no. 12591234
MERADESLLPGVYKEVGDALHVDPTALGTLTLFRSIVQSSCYPLAAYLSSRHNRAHVIALGAFLWATATFLVAVSTTFFQVAVSRGLNGIGLAIVTPAIQSLVADSTDDYNRGMAFGWLGFTSNIGSILGYVCSILFASKSFNGVAGWRIAFLLVAVVSVIVGILVRLFATDPHYSDRKITKHVKDKPFWSDIRDLLKEAKMVIKIPSFQIFVAQGVSGSFPWSALAFAPLWLELIGFSHKTTAVLVTLFTISCSLGGLFGGYMGDTLAKKFPNGGRIFLSQVSSGSAIPLAAILLIGLPDDPSTAFSHGLVLVIMGLCISWNGAATNGPIFAEIVPERARTSIYALDRSFESILASFAPPIVGMLAQNIYGYKPIPEGSTSSVKIDTDRANAASLAKALYTSIGIPMVICCTIYSFLYCTYPRDRDRAKMQALIESEMQQLNEEEDEIEVKCFGAEEHDEAYLLKQHQNES

SEQ ID NO: 49575 - protein, 359 aa, Arabidopsis thaliana
  peptide (1)..(359): Ceres Seq. ID no. 12591235
MAFGWLGFTSNIGSILGYVCSILFASKSFNGVAGWRIAFLLVAVVSVIVGILVRLFATDPHYSDRKITKHVKDKPFWSDIRDLLKEAKMVIKIPSFQIFVAQGVSGSFPWSALAFAPLWLELIGFSHKTTAVLVTLFTISCSLGGLFGGYMGDTLAKKFPNGGRIFLSQVSSGSAIPLAAILLIGLPDDPSTAFSHGLVLVIMGLCISWNGAATNGPIFAEIVPERARTSIYALDRSFESILASFAPPIVGMLAQNIYGYKPIPEGSTSSVKIDTDRANAASLAKALYTSIGIPMVICCTIYSFLYCTYPRDRDRAKMQALIESEMQQLNEEEDEIEVKCFGAEEHDEAYLLKQHQNES

SEQ ID NO: 49576 - DNA, 2122 bp, Arabidopsis thaliana
  misc_feature (1)..(2122): Ceres Seq. ID no. 13588667
  misc_feature (1)..(2122): Ortholog of  Ceres SEQ ID NO 13582619 as cited in SEQ ID NO 56520
  misc_feature (1)..(2122): Ortholog of  Ceres SEQ ID NO 12611392 as cited in SEQ ID NO 56826
  misc_feature (1)..(2122): Ortholog of  Ceres SEQ ID NO 13660872 as cited in SEQ ID NO 60830
gacacaaagtctcatttctcgttaatttccattttcgttatctctctctctcgccgatcaaaccctaggtgtatcaattcgttcagattcccggcggttggtctcactgtcatgtaggtttgattcatcttctcttctggatcttgagtgacgaagagagaagagatctgagtttttctgagagagagatttttctccctcgttgacccgatcagttttttttcgtcgctggggattttcaaattttttttgagggatcggttttgatttgttacgtagatggcggattcttcacccgattcgtgtttcaaaggaggcaaatttagtgctccagggtttcgatttcatccaactgatgaagagcttgtgatgtattatttgaagaggaagatttgtaggaagaggcttagagttaatgttatcggtgttgttgatgtttacaaaatggatcctgaggaattgcctggtcaatcaatgttgaagacgggagatagacagtggttctatttcactccaaggagtaggaagtatccaaacgcagctaggtctaatagaggaactgaaaatgggtattggaaggctacagggaaggatcgagtcattgagtataattctagatcggtgggacttaaaaagactcttgttttctatagaggccgggctcctagtggtgagcggactgattgggtgatgcatgagtatacgatggatgaagatgaactagggagatgtaagaaccctcaggagtactatgctctttataagttgttcaagaaaagtggggctggtcctaagaatggtgaacagtatggtgctccgtttcaagaagaggaatgggttgatgatgataatgaagatgtgaatgctattgctgtagctgtgccagagcaacctgtggttcgttatgaggatgctcgtcgtgtggatgagaggagactttttaatcctgttattcttcagttagaggatatcgatgagcttctcaatggaatccctaatgcacctggtgttcctcaaagatgtattcctcaggtgaatagtgaagaagagctgcagagtacgttggtgaataattctgctagagagttcttgccaaacggtcagcaatacaacaggccctcaagttttgactcattagagaccgctgaggtcacctcagctcctctggtgtttgagaaggaagatttcattgaaatggatgatcttcttctgatccctgaattcggagcttcttcaactgagaaagccgcacagttctcgaaccatggtgaattcgacgattttaatgagtttgaccaattgttccatgacgtttccatgtctttggatatggaacctattgatcagggaacttctgcaaatctgtcttctctgagtgattctgctaactacacatcagaccaaaaacagcaactcctttatcaacagttccaggaccagactcccgagaaccagctgaacaacatcatggatcctagtacaactctcaatcaaatcactagcgatatttggttcgaggatgatcaggccattctatttgatcaacaacaatccttttctggagcatttgcttcaccctcatcaggtgtgatgcctgattccaccaatcctactatgagtgtgaatgcccaaggccatgaaatccaaaatggtggtggaacaacaagccagttctcatcggctttgtgggcattaatggactcaataccttcaacgccagcctctgcgtgtgagggtccccttaaccgaacctttgtacgtatgtctagcttcagccgtatgaggttcaatggaaaggctaatggaacgccagtgagtactaccatagcaaagaagggtattagaaacagaggttttcttctattatcaatcgtgggtgctttgtgtgccatcttctgggtgttggtagccacagttcgagtctcaggtagaagtcttctcttgaaagactagtggtggttctcttgaactcttaactactggtaagttagaagaagaaaccatgatccacattagtgttcatgggattattgacctatctataatatatgaaactttgaatatgtacagagtttgaaagagtaaagtacaataattcgtgataaaggagtttcttttcctt

SEQ ID NO: 49577 - protein, 557 aa, Arabidopsis thaliana
  peptide (1)..(557): Ceres Seq. ID no. 13588668
MADSSPDSCFKGGKFSAPGFRFHPTDEELVMYYLKRKICRKRLRVNVIGVVDVYKMDPEELPGQSMLKTGDRQWFYFTPRSRKYPNAARSNRGTENGYWKATGKDRVIEYNSRSVGLKKTLVFYRGRAPSGERTDWVMHEYTMDEDELGRCKNPQEYYALYKLFKKSGAGPKNGEQYGAPFQEEEWVDDDNEDVNAIAVAVPEQPVVRYEDARRVDERRLFNPVILQLEDIDELLNGIPNAPGVPQRCIPQVNSEEELQSTLVNNSAREFLPNGQQYNRPSSFDSLETAEVTSAPLVFEKEDFIEMDDLLLIPEFGASSTEKAAQFSNHGEFDDFNEFDQLFHDVSMSLDMEPIDQGTSANLSSLSDSANYTSDQKQQLLYQQFQDQTPENQLNNIMDPSTTLNQITSDIWFEDDQAILFDQQQSFSGAFASPSSGVMPDSTNPTMSVNAQGHEIQNGGGTTSQFSSALWALMDSIPSTPASACEGPLNRTFVRMSSFSRMRFNGKANGTPVSTTIAKKGIRNRGFLLLSIVGALCAIFWVLVATVRVSGRSLLLKD

SEQ ID NO: 49578 - protein, 527 aa, Arabidopsis thaliana
  peptide (1)..(527): Ceres Seq. ID no. 13588669
MYYLKRKICRKRLRVNVIGVVDVYKMDPEELPGQSMLKTGDRQWFYFTPRSRKYPNAARSNRGTENGYWKATGKDRVIEYNSRSVGLKKTLVFYRGRAPSGERTDWVMHEYTMDEDELGRCKNPQEYYALYKLFKKSGAGPKNGEQYGAPFQEEEWVDDDNEDVNAIAVAVPEQPVVRYEDARRVDERRLFNPVILQLEDIDELLNGIPNAPGVPQRCIPQVNSEEELQSTLVNNSAREFLPNGQQYNRPSSFDSLETAEVTSAPLVFEKEDFIEMDDLLLIPEFGASSTEKAAQFSNHGEFDDFNEFDQLFHDVSMSLDMEPIDQGTSANLSSLSDSANYTSDQKQQLLYQQFQDQTPENQLNNIMDPSTTLNQITSDIWFEDDQAILFDQQQSFSGAFASPSSGVMPDSTNPTMSVNAQGHEIQNGGGTTSQFSSALWALMDSIPSTPASACEGPLNRTFVRMSSFSRMRFNGKANGTPVSTTIAKKGIRNRGFLLLSIVGALCAIFWVLVATVRVSGRSLLLKD

SEQ ID NO: 49579 - protein, 502 aa, Arabidopsis thaliana
  peptide (1)..(502): Ceres Seq. ID no. 13588670
MDPEELPGQSMLKTGDRQWFYFTPRSRKYPNAARSNRGTENGYWKATGKDRVIEYNSRSVGLKKTLVFYRGRAPSGERTDWVMHEYTMDEDELGRCKNPQEYYALYKLFKKSGAGPKNGEQYGAPFQEEEWVDDDNEDVNAIAVAVPEQPVVRYEDARRVDERRLFNPVILQLEDIDELLNGIPNAPGVPQRCIPQVNSEEELQSTLVNNSAREFLPNGQQYNRPSSFDSLETAEVTSAPLVFEKEDFIEMDDLLLIPEFGASSTEKAAQFSNHGEFDDFNEFDQLFHDVSMSLDMEPIDQGTSANLSSLSDSANYTSDQKQQLLYQQFQDQTPENQLNNIMDPSTTLNQITSDIWFEDDQAILFDQQQSFSGAFASPSSGVMPDSTNPTMSVNAQGHEIQNGGGTTSQFSSALWALMDSIPSTPASACEGPLNRTFVRMSSFSRMRFNGKANGTPVSTTIAKKGIRNRGFLLLSIVGALCAIFWVLVATVRVSGRSLLLKD

SEQ ID NO: 49580 - DNA, 1795 bp, Arabidopsis thaliana
  misc_feature (1)..(1795): Ceres Seq. ID no. 12606328
  misc_feature (1)..(1795): Ortholog of  Ceres SEQ ID NO 13597269 as cited in SEQ ID NO 63932
acacaacactcttctctattttctttctttctatctatatatattcatatctcttctccattctctcttacttcaaaattcatcacaaagagagatagagagatggagaacggtgagaaagcagctgagactgtcgttgttgggaactatgttgagatggagaaggatggtaaagctttagacatcaaatctaagctatctgacatgttttggcatggtggctctgcttatgatgcttggttcagctgtgcttccaatcaggtggcacaagtgctgttgacactgccatactcgttctcacagctggggatgctctcagggattctgtttcagctcttttatggcatcttaggtagttggactgcttacctcatcagtattctctatgttgaatacagaaccagaaaggaaagagagaaagttaacttcagaaaccatgtcattcagtggtttgaggttcttgatggattgcttgggaagcattggaggaatgttggtttagcctttaactgcaccttccttctctttggatctgtcattcaactcatagcttgtgccagcaacatatattacataaatgataatctggacaagaggacatggacatacatatttggagcatgttgtgcaaccacagtctttattccttccttccacaactacaggatctggtcttttcttggactcttgatgaccacttacactgcttggtacctcaccattgcctctatcctccatggacaggtagaaggagtgaagcattcaggaccaagcaagctggttttatacttcacaggggccacaaacattctttacacattcggtggacatgctgttactgtagagataatgcatgctatgtggaaacctcagaagttcaagtccatatacctgtttgcaacactctacgtgctgacgctaacgctgccttctgcgtctgcggtttattgggcgtttggtgatttgcttctaaaccattcaaacgcatttgctcttctcccaaagaatctttaccgtgactttgcagttgtgcttatgctcatccatcagttcatcacctttggttttgcttgcacgccactctactttgtgtgggagaagctaatagggatgcatgagtgcagaagcatgtgtaaacgagccgctgcgaggctccctgtcgttatacccatttggtttcttgctatcatattcccgttctttggtcccattaactcaaccgtaggatctcttctcgtcagcttcactgtctacatcatcccagcactagctcacatcttcaccttccgctcatccgccgcacgtgaaaacgctgtggagcagccaccaaggtttctaggacgatggactggggcattcacgatcaatgccttcatagttgtgtgggtgttcattgttggattcgggttcggtggttgggctagtatgatcaattttgtacaccagattgacacctttggcctcttcaccaaatgctaccaatgcccaccaccggttatggtctcacctccaccaatcagccatcctcacttcaatcacactcatggcctttgaattttaagcatcaaatctttagtaccggcccaaaagtgtccctagctgccacgaaagttggcgtttttccacggatcagaaaaagacgagatttgggtttttcttagatctaccaagcccgtagtgtgtttgggtgtttgtttagcatctaaagttggttggtctgtttttattgtatttcatgtttgggaattaaagaaaaaaaaaacaaaactttaggagttaatgccatatctttcac

SEQ ID NO: 49581 - protein, 517 aa, Arabidopsis thaliana
  peptide (1)..(517): Ceres Seq. ID no. 12606329
TQHSSLFSFFLSIYIHISSPFSLTSKFITKRDREMENGEKAAETVVVGNYVEMEKDGKALDIKSKLSDMFWHGGSAYDAWFSCASNQVAQVLLTLPYSFSQLGMLSGILFQLFYGILGSWTAYLISILYVEYRTRKEREKVNFRNHVIQWFEVLDGLLGKHWRNVGLAFNCTFLLFGSVIQLIACASNIYYINDNLDKRTWTYIFGACCATTVFIPSFHNYRIWSFLGLLMTTYTAWYLTIASILHGQVEGVKHSGPSKLVLYFTGATNILYTFGGHAVTVEIMHAMWKPQKFKSIYLFATLYVLTLTLPSASAVYWAFGDLLLNHSNAFALLPKNLYRDFAVVLMLIHQFITFGFACTPLYFVWEKLIGMHECRSMCKRAAARLPVVIPIWFLAIIFPFFGPINSTVGSLLVSFTVYIIPALAHIFTFRSSAARENAVEQPPRFLGRWTGAFTINAFIVVWVFIVGFGFGGWASMINFVHQIDTFGLFTKCYQCPPPVMVSPPPISHPHFNHTHGL

SEQ ID NO: 49582 - protein, 483 aa, Arabidopsis thaliana
  peptide (1)..(483): Ceres Seq. ID no. 12606330
MENGEKAAETVVVGNYVEMEKDGKALDIKSKLSDMFWHGGSAYDAWFSCASNQVAQVLLTLPYSFSQLGMLSGILFQLFYGILGSWTAYLISILYVEYRTRKEREKVNFRNHVIQWFEVLDGLLGKHWRNVGLAFNCTFLLFGSVIQLIACASNIYYINDNLDKRTWTYIFGACCATTVFIPSFHNYRIWSFLGLLMTTYTAWYLTIASILHGQVEGVKHSGPSKLVLYFTGATNILYTFGGHAVTVEIMHAMWKPQKFKSIYLFATLYVLTLTLPSASAVYWAFGDLLLNHSNAFALLPKNLYRDFAVVLMLIHQFITFGFACTPLYFVWEKLIGMHECRSMCKRAAARLPVVIPIWFLAIIFPFFGPINSTVGSLLVSFTVYIIPALAHIFTFRSSAARENAVEQPPRFLGRWTGAFTINAFIVVWVFIVGFGFGGWASMINFVHQIDTFGLFTKCYQCPPPVMVSPPPISHPHFNHTHGL

SEQ ID NO: 49583 - protein, 465 aa, Arabidopsis thaliana
  peptide (1)..(465): Ceres Seq. ID no. 12606331
MEKDGKALDIKSKLSDMFWHGGSAYDAWFSCASNQVAQVLLTLPYSFSQLGMLSGILFQLFYGILGSWTAYLISILYVEYRTRKEREKVNFRNHVIQWFEVLDGLLGKHWRNVGLAFNCTFLLFGSVIQLIACASNIYYINDNLDKRTWTYIFGACCATTVFIPSFHNYRIWSFLGLLMTTYTAWYLTIASILHGQVEGVKHSGPSKLVLYFTGATNILYTFGGHAVTVEIMHAMWKPQKFKSIYLFATLYVLTLTLPSASAVYWAFGDLLLNHSNAFALLPKNLYRDFAVVLMLIHQFITFGFACTPLYFVWEKLIGMHECRSMCKRAAARLPVVIPIWFLAIIFPFFGPINSTVGSLLVSFTVYIIPALAHIFTFRSSAARENAVEQPPRFLGRWTGAFTINAFIVVWVFIVGFGFGGWASMINFVHQIDTFGLFTKCYQCPPPVMVSPPPISHPHFNHTHGL

SEQ ID NO: 49584 - DNA, 1707 bp, Arabidopsis thaliana
  misc_feature (1)..(1707): Ceres Seq. ID no. 13588671
  misc_feature (1)..(1707): Ortholog of  Ceres SEQ ID NO 12611314 as cited in SEQ ID NO 56535
  misc_feature (1)..(1707): Ortholog of  Ceres SEQ ID NO 15178046 as cited in SEQ ID NO 60380
  misc_feature (1)..(1707): Ortholog of  Ceres SEQ ID NO 14312016 as cited in SEQ ID NO 60412
  misc_feature (1)..(1707): Ortholog of  Ceres SEQ ID NO 13661438 as cited in SEQ ID NO 61414
accacttaccatctgggttttgcttcattaaccattacagtgactctgcaatctttcaagttttcagatatcttctctttaagtggcccagattgtgttcgtctgtttctgtgagagtgagtaaaactctatttttcgaaaagatacattcttgcatgtgcgtagatcagccttgtatagaactgagattttggtgaagctttggattggtttctttgttctctctgttcttgtgaagggaacaacacaaagacggtggctttgctcggtaaatagattatggaacatggtttaccgtctattaaatcatggaagtcacttgttaagagaagaaacaatgctcaagaagggggtaaatcgtcatggaaaatgaaaccagttgtggtgctaatgtgtacagtacttttgatcttttggtataagactacaaatattcagtatgaacaaacagagatagaagaaacagattatccatttgagatggcaaaggaatctgaaccggtcagtgaaaagttgaaaggcttaccttttggtatcatgcaacctaaatcagatttggagttaaagccactttggtcaagtagtagtttgaggtcaaagagcggcgaattgaccaaccgtaacttgttggcaatgccggtaggacttaagcaaaaggataatgttgatgctgttgtaaagaagtttcttcctgcgaatttcactgtcattctatttcattatgatggaaacatggatcaatggtgggatctagagtggagctcaaaagccatacacattgttgcacataaccaaacaaaatggtggtttgcgaaacgttttctccatcctgatattgtctccatttacgattatgtttttctttgggatgaagatcttggagtggagaatttcaaccctcaaaagtacctgaggatagttaaaacagcgggactggagatatctcaaccggccttgcacccaaactcaactgaagttcaccatagaattacagtccggtctagaacgaaaatatttcataggcgagtttacgatagtagaggcaatatgaaatgttcaaatgctagtgaagggcccccatgcacaggatttgttgaaggaatggctccagtgttttcgagatctgcatggttttgcacttggaatctaatacaaaatgatctggttcatggttggggaatggatatgaaacttggatactgtgctcagggtgaccgtagcaagaaagtaggcattgtcgacagtgaatatatcttccatcaaggcattcaaacactaggtggaagcggttatcccgataagaagaactcagctcgcagcggagtaaataggagacgcggttctgcgacttttgattcaagaacagagatacggagacaatcaacgtgggagctgcaagcttttaaagaacggtggaaccaagcggttgcagaagacaaatactgggtggagcggtcttcaccgagccggaaccgaataggcaataaccggagattaaaaagaagtagtatgattccaagtttattgcagaggaaagctgaagagactacaacataaacagatacagttttaatcagattaaatatagagaaatgtttttttggttggtctcattgttatatataagttaatagttaatcatttacctctctttgattagtgtagttttcatgatcttctttaatggttcagtctctctccattttg

SEQ ID NO: 49585 - protein, 425 aa, Arabidopsis thaliana
  peptide (1)..(425): Ceres Seq. ID no. 13588672
MEHGLPSIKSWKSLVKRRNNAQEGGKSSWKMKPVVVLMCTVLLIFWYKTTNIQYEQTEIEETDYPFEMAKESEPVSEKLKGLPFGIMQPKSDLELKPLWSSSSLRSKSGELTNRNLLAMPVGLKQKDNVDAVVKKFLPANFTVILFHYDGNMDQWWDLEWSSKAIHIVAHNQTKWWFAKRFLHPDIVSIYDYVFLWDEDLGVENFNPQKYLRIVKTAGLEISQPALHPNSTEVHHRITVRSRTKIFHRRVYDSRGNMKCSNASEGPPCTGFVEGMAPVFSRSAWFCTWNLIQNDLVHGWGMDMKLGYCAQGDRSKKVGIVDSEYIFHQGIQTLGGSGYPDKKNSARSGVNRRRGSATFDSRTEIRRQSTWELQAFKERWNQAVAEDKYWVERSSPSRNRIGNNRRLKRSSMIPSLLQRKAEETTT

SEQ ID NO: 49586 - protein, 395 aa, Arabidopsis thaliana
  peptide (1)..(395): Ceres Seq. ID no. 13588673
MKPVVVLMCTVLLIFWYKTTNIQYEQTEIEETDYPFEMAKESEPVSEKLKGLPFGIMQPKSDLELKPLWSSSSLRSKSGELTNRNLLAMPVGLKQKDNVDAVVKKFLPANFTVILFHYDGNMDQWWDLEWSSKAIHIVAHNQTKWWFAKRFLHPDIVSIYDYVFLWDEDLGVENFNPQKYLRIVKTAGLEISQPALHPNSTEVHHRITVRSRTKIFHRRVYDSRGNMKCSNASEGPPCTGFVEGMAPVFSRSAWFCTWNLIQNDLVHGWGMDMKLGYCAQGDRSKKVGIVDSEYIFHQGIQTLGGSGYPDKKNSARSGVNRRRGSATFDSRTEIRRQSTWELQAFKERWNQAVAEDKYWVERSSPSRNRIGNNRRLKRSSMIPSLLQRKAEETTT

SEQ ID NO: 49587 - protein, 388 aa, Arabidopsis thaliana
  peptide (1)..(388): Ceres Seq. ID no. 13588674
MCTVLLIFWYKTTNIQYEQTEIEETDYPFEMAKESEPVSEKLKGLPFGIMQPKSDLELKPLWSSSSLRSKSGELTNRNLLAMPVGLKQKDNVDAVVKKFLPANFTVILFHYDGNMDQWWDLEWSSKAIHIVAHNQTKWWFAKRFLHPDIVSIYDYVFLWDEDLGVENFNPQKYLRIVKTAGLEISQPALHPNSTEVHHRITVRSRTKIFHRRVYDSRGNMKCSNASEGPPCTGFVEGMAPVFSRSAWFCTWNLIQNDLVHGWGMDMKLGYCAQGDRSKKVGIVDSEYIFHQGIQTLGGSGYPDKKNSARSGVNRRRGSATFDSRTEIRRQSTWELQAFKERWNQAVAEDKYWVERSSPSRNRIGNNRRLKRSSMIPSLLQRKAEETTT

SEQ ID NO: 49588 - DNA, 3561 bp, Arabidopsis thaliana; identical to SEQ ID NO: 44871
  misc_feature (1)..(3561): Ceres Seq. ID no. 12639063
  misc_feature (1)..(3561): Ortholog of  Ceres SEQ ID NO 13600310 as cited in SEQ ID NO 5086
  misc_feature (1)..(3561): Ortholog of  Ceres SEQ ID NO 14313863 as cited in SEQ ID NO 54791

SEQ ID NO: 49589 - protein, 1037 aa, Arabidopsis thaliana; identical to SEQ ID NO: 44872
  peptide (1)..(1037): Ceres Seq. ID no. 12639064

SEQ ID NO: 49590 - protein, 1029 aa, Arabidopsis thaliana; identical to SEQ ID NO: 44873
  peptide (1)..(1029): Ceres Seq. ID no. 12639065

SEQ ID NO: 49591 - protein, 1013 aa, Arabidopsis thaliana; identical to SEQ ID NO: 44874
  peptide (1)..(1013): Ceres Seq. ID no. 12639066

SEQ ID NO: 49592 - DNA, 2113 bp, Arabidopsis thaliana
  misc_feature (1)..(2113): Ceres Seq. ID no. 13588679
  misc_feature (1)..(2113): Ortholog of  Ceres SEQ ID NO 13655755 as cited in SEQ ID NO 65117
ttttaagcttctcccgcaaaattcagcaaagctttcggaggaatctcctaacagtcaccaccaccaccaccgtctagggtttcgcgccgggatctaaaaaatcacaatcatgccggtgagtttgactccgaacgcaatcacggcgatacatgacggcgacgtgaatttgaagccgttgttacagattttagaaatcaaaatgataggaagaagtcaagagagaagccaggagaggtatcgtttcctcatttcagatggtgtttctgctcaacatgctatggtcgcggttcagcttaatgatcgagtcaagtcaggacaatttgagaaaggatctatcgttcagctgattgattacatttgtagcgacgttaaaggccgcaagcttattgtggtgctgaacatggagacgatagtacaacagtctgaaaccattgggaacccctacaatatttggagaaacagatacagaagcccagaagacattttcaggtacgggcaatataccgcctccgaacagggttgtttttaatgaaccaatggttcagcattctgttaatagagcacctcccaggggtgtaaacattcaaaatcaagccaacaatactccaagcttcaggccatctgttcaaccttcatatcaaccgcctgcaagttacagaaatcatggacccatcatgaagaacgaggctccagctcgagtcatccctattgctgctctcaatccataccaaggtcgatgggctattaaggctagagtaactgcgaaaggagatatcagacgatataacaatgcaaaaggagatggaaaggttttctcgtttgatctgcttgactatgatggaggggagattcgggttacgtgctttaatgctcttgttgaccgtttctatgatgttactgaggttggtaaggtatatttgatttcaaagggaagtttgaagcctgcacagaaaaatttcaaccacttaaagaatgaatgggaaattttcttggagtcaacatcgactgtggagctttgccctgatgaagatggctccataccaaagcagcaattctccttccgcccaataagtgacattgagaacgctgagaacaataccatactcgatgtcattggtgtggtgacttctgtgaacccctcggtgccaatcttgagaaagaacgggatggaaacccataggaggatcctgaatctaaaggatgaatcaggaaaggctgtagaggtaacactttggggagaattctgtaaccgagatggtcggcaactggaagagatggttgattcagcttttcacccggttttagcaataaaagctggaaaagtaagcgacttcagtgggaaatcagtagggacaatatcttcaacacagctcttcataaatccagatttccctgaagctcataaactacggacctggttcgattacgggggaaaagacactgcttccttctccatctccagggacactatgcctggaggagtttccaggaacgagataaggaaaaatgtttctcagatcaaagaggaaggtcttggaagatcagataagcctgactggatcactgtgaaagcaaccatatcattcatcaaaacagatagcttctgttatacagcttgtcctttgatgatcggggataaacaatgcaacaagaaggttacacggtctggaacaaacaggtggctctgtgaccggtgcaaccaagagtctgatgaatgcgactatagataccttcttcaggtacagattcaagaccacactgggttgacttggataaccgcgtttcaagaaacaggagaagaaataatgggatgtccggctaagaagctttacgcaatgaaatacgaattggagaaggaggaagagttcgcagagattgttagagacagactgtttcatcagtacatgttgaagctgaagatcaaagaggaatcgtatggggatgaacaaagagtgaagatgactgttgtgaaggttgataaggtgaattatacatccgagagtaaatacatgcttgatttgctcgtaaggtaagttcgttctaggtattacagtgaggtatttcaattaactcagaatatgcaagctcgagtttagtacactattatattacg

SEQ ID NO: 49593 - protein, 498 aa, Arabidopsis thaliana
  peptide (1)..(498): Ceres Seq. ID no. 13588680
MVQHSVNRAPPRGVNIQNQANNTPSFRPSVQPSYQPPASYRNHGPIMKNEAPARVIPIAALNPYQGRWAIKARVTAKGDIRRYNNAKGDGKVFSFDLLDYDGGEIRVTCFNALVDRFYDVTEVGKVYLISKGSLKPAQKNFNHLKNEWEIFLESTSTVELCPDEDGSIPKQQFSFRPISDIENAENNTILDVIGVVTSVNPSVPILRKNGMETHRRILNLKDESGKAVEVTLWGEFCNRDGRQLEEMVDSAFHPVLAIKAGKVSDFSGKSVGTISSTQLFINPDFPEAHKLRTWFDYGGKDTASFSISRDTMPGGVSRNEIRKNVSQIKEEGLGRSDKPDWITVKATISFIKTDSFCYTACPLMIGDKQCNKKVTRSGTNRWLCDRCNQESDECDYRYLLQVQIQDHTGLTWITAFQETGEEIMGCPAKKLYAMKYELEKEEEFAEIVRDRLFHQYMLKLKIKEESYGDEQRVKMTVVKVDKVNYTSESKYMLDLLVR

SEQ ID NO: 49594 - protein, 452 aa, Arabidopsis thaliana
  peptide (1)..(452): Ceres Seq. ID no. 13588681
MKNEAPARVIPIAALNPYQGRWAIKARVTAKGDIRRYNNAKGDGKVFSFDLLDYDGGEIRVTCFNALVDRFYDVTEVGKVYLISKGSLKPAQKNFNHLKNEWEIFLESTSTVELCPDEDGSIPKQQFSFRPISDIENAENNTILDVIGVVTSVNPSVPILRKNGMETHRRILNLKDESGKAVEVTLWGEFCNRDGRQLEEMVDSAFHPVLAIKAGKVSDFSGKSVGTISSTQLFINPDFPEAHKLRTWFDYGGKDTASFSISRDTMPGGVSRNEIRKNVSQIKEEGLGRSDKPDWITVKATISFIKTDSFCYTACPLMIGDKQCNKKVTRSGTNRWLCDRCNQESDECDYRYLLQVQIQDHTGLTWITAFQETGEEIMGCPAKKLYAMKYELEKEEEFAEIVRDRLFHQYMLKLKIKEESYGDEQRVKMTVVKVDKVNYTSESKYMLDLLVR

SEQ ID NO: 49595 - protein, 288 aa, Arabidopsis thaliana
  peptide (1)..(288): Ceres Seq. ID no. 13588682
METHRRILNLKDESGKAVEVTLWGEFCNRDGRQLEEMVDSAFHPVLAIKAGKVSDFSGKSVGTISSTQLFINPDFPEAHKLRTWFDYGGKDTASFSISRDTMPGGVSRNEIRKNVSQIKEEGLGRSDKPDWITVKATISFIKTDSFCYTACPLMIGDKQCNKKVTRSGTNRWLCDRCNQESDECDYRYLLQVQIQDHTGLTWITAFQETGEEIMGCPAKKLYAMKYELEKEEEFAEIVRDRLFHQYMLKLKIKEESYGDEQRVKMTVVKVDKVNYTSESKYMLDLLVR

SEQ ID NO: 49596 - DNA, 1614 bp, Arabidopsis thaliana; identical to SEQ ID NO: 43163
  misc_feature (1)..(1614): Ceres Seq. ID no. 12602150
  misc_feature (1)..(1614): Ortholog of  Ceres SEQ ID NO 15171297 as cited in SEQ ID NO 51458

SEQ ID NO: 49597 - protein, 325 aa, Arabidopsis thaliana; identical to SEQ ID NO: 43164
  peptide (1)..(325): Ceres Seq. ID no. 12602151

SEQ ID NO: 49598 - protein, 319 aa, Arabidopsis thaliana; identical to SEQ ID NO: 43165
  peptide (1)..(319): Ceres Seq. ID no. 12602152

SEQ ID NO: 49599 - protein, 290 aa, Arabidopsis thaliana; identical to SEQ ID NO: 43166
  peptide (1)..(290): Ceres Seq. ID no. 12602153

SEQ ID NO: 49600 - DNA, 1538 bp, Arabidopsis thaliana
  misc_feature (1)..(1538): Ceres Seq. ID no. 13648394
  misc_feature (1)..(1538): Ortholog of  Ceres SEQ ID NO 14308061 as cited in SEQ ID NO 55155
  misc_feature (1)..(1538): Ortholog of  Ceres SEQ ID NO 13654238 as cited in SEQ ID NO 67874
ctagtcccccccccccccgaagactcatatagtaaaaatgttttgacaatcaaaaaccaaataagcaaagagatctctgactctctatctgaaatctcaaaacggagaacgcgagggaacaagagattaaagcatagtgagaccctaagagagagagctttaggtctagaggggatcttcacaattcacacaacaactacgagataggatcgtgcgcgtcaaaagaagctggtactgctgattccagccgaagattagtctccgcttctggttgttccggtggagactcgtcggaaatgagaggtcttttcaaatccaaaccgcggactcccgctgatattgttcgtcagactcgcgatctcctcctctacgccgatcgatccaactccttccctgaccttcgagagtccaaacgcgaggaaaagatggtggaactaagtaagagcatacgagatttgaagttgattctatatggaaacagtgaggctgagcctgttgctgaagcttgtgctcagttgactcaggagttctttaaggctgatactcttcgccgtttgctcacttctcttcctaatttgaacttggaggcgaggaaagatgctacacaagttgttgcaaatcttcagaggcaacaagtcaattcacgtcttattgctgctgattatcttgaatccaacattgatcttatggattttctagttgatgggtttgaaaacaccgatatggcgttacactatggtactatgtttagagagtgcatccgtcatcagattgttgcaaaatatgttttggactcggagcacgtgaagaagtttttttactacatacagcttcccaatttcgacattgctgctgatgctgctgcaacttttaaggaacttctgacaaggcacaagtctacagttgctgagtttctcattaagaatgaagactggttttttgcagactacaactcaaagcttcttgaatcaactaattatattacccgacggcaagctattaagttgttgggcgatatattattggataggtcaaattcggctgtgatgacgaagtatgtgagctcgatggataacttgaggattctgatgaatcttctcagagaatcaagcaagactattcagatagaagctttccatgttttcaagctgtttgtagcgaaccaaaacaagccttcagacatcgccaacattctggtggcaaacagaaacaagcttctgagattgttggctgatatcaagccggacaaagaggacgagaggtttgacgcagacaaagctcaggttgtgagagagattgcaaaccttaagctgcgagagcttgcttgagcatgcacatatacacagaagctcatgatttctgttaatctttgaaagacatttttggaccatcaaagattgttgttatttattaggtactgtttctttttctctctctcagcatctacgctgttgactactctggatttttttagatcatatgaattcacatgtacactcctttagtgttgatcaaataaaaatggcattataaatccc

SEQ ID NO: 49601 - protein, 343 aa, Arabidopsis thaliana
  peptide (1)..(343): Ceres Seq. ID no. 13648395
MRGLFKSKPRTPADIVRQTRDLLLYADRSNSFPDLRESKREEKMVELSKSIRDLKLILYGNSEAEPVAEACAQLTQEFFKADTLRRLLTSLPNLNLEARKDATQVVANLQRQQVNSRLIAADYLESNIDLMDFLVDGFENTDMALHYGTMFRECIRHQIVAKYVLDSEHVKKFFYYIQLPNFDIAADAAATFKELLTRHKSTVAEFLIKNEDWFFADYNSKLLESTNYITRRQAIKLLGDILLDRSNSAVMTKYVSSMDNLRILMNLLRESSKTIQIEAFHVFKLFVANQNKPSDIANILVANRNKLLRLLADIKPDKEDERFDADKAQVVREIANLKLRELA

SEQ ID NO: 49602 - protein, 300 aa, Arabidopsis thaliana
  peptide (1)..(300): Ceres Seq. ID no. 13648396
MVELSKSIRDLKLILYGNSEAEPVAEACAQLTQEFFKADTLRRLLTSLPNLNLEARKDATQVVANLQRQQVNSRLIAADYLESNIDLMDFLVDGFENTDMALHYGTMFRECIRHQIVAKYVLDSEHVKKFFYYIQLPNFDIAADAAATFKELLTRHKSTVAEFLIKNEDWFFADYNSKLLESTNYITRRQAIKLLGDILLDRSNSAVMTKYVSSMDNLRILMNLLRESSKTIQIEAFHVFKLFVANQNKPSDIANILVANRNKLLRLLADIKPDKEDERFDADKAQVVREIANLKLRELA

SEQ ID NO: 49603 - protein, 213 aa, Arabidopsis thaliana
  peptide (1)..(213): Ceres Seq. ID no. 13648397
MDFLVDGFENTDMALHYGTMFRECIRHQIVAKYVLDSEHVKKFFYYIQLPNFDIAADAAATFKELLTRHKSTVAEFLIKNEDWFFADYNSKLLESTNYITRRQAIKLLGDILLDRSNSAVMTKYVSSMDNLRILMNLLRESSKTIQIEAFHVFKLFVANQNKPSDIANILVANRNKLLRLLADIKPDKEDERFDADKAQVVREIANLKLRELA

SEQ ID NO: 49604 - DNA, 944 bp, Arabidopsis thaliana
  misc_feature (1)..(944): Ceres Seq. ID no. 14304292
  misc_feature (1)..(944): Ortholog of  Ceres SEQ ID NO 13595844 as cited in SEQ ID NO 51300
  misc_feature (1)..(944): Ortholog of  Ceres SEQ ID NO 13596593 as cited in SEQ ID NO 62448
  misc_feature (1)..(944): Ortholog of  Ceres SEQ ID NO 13586031 as cited in SEQ ID NO 0
aaaaaaaacgaaaaggattattccgccgtagaatccatattctctccctcatcactttgataaacaagagtctcatttttcgcttttccaaagggaacaacttcttcggattattatctatggcagagaagcttgagccggtgaaggttttgtactgcggagtttgctctcttccagcggaatactgcgaattcggtcccgatttcgctagatgtaagccctggctcgtcgaaaacgccccagatctctatcctgatctcctcaaagaagcaaatgagaaggcagcagataatgtttctgacaaactccagtcggtgggaatctcttcaggtggtgctgatggggcaccatcttcagctcagactggagggacatccaagaaggaggaagtgaagcgcctacctggggggaaagttaaaaagaaagatcgacaggaagttatcattgaaaaggttgtacgcaacaaacgcaagtgtatcaccattgtgaaaggactagaactgtttgggataaaactcagtgatgcctctaaaaagcttggtaagaagtttgccactggagcatcagttgtcaagggaccaactgaaaaggagcaaattgatgttcaaggggatataatctatgatatcgttgaattcattacagacacttggcccgacgtacctgaaagatccattttcttcatcgaagatgggaagaaggttcaggctggttgatgatcacctttgtcctcgttttttggcatggcgggttcatgtagacgagctagttcctgagttttcctatgtgtttggaggaaatcgcatcatgattataactttcaacgtaacgtatagttggatttatcatactattttcttattcgggttgcgatagttccagacatgtttctccaaacatttctctttttgggggtcttaatatttaaaatgtgtcttgaaatg

SEQ ID NO: 49605 - protein, 237 aa, Arabidopsis thaliana
  peptide (1)..(237): Ceres Seq. ID no. 14304293
KKRKGLFRRRIHILSLITLINKSLIFRFSKGNNFFGLLSMAEKLEPVKVLYCGVCSLPAEYCEFGPDFARCKPWLVENAPDLYPDLLKEANEKAADNVSDKLQSVGISSGGADGAPSSAQTGGTSKKEEVKRLPGGKVKKKDRQEVIIEKVVRNKRKCITIVKGLELFGIKLSDASKKLGKKFATGASVVKGPTEKEQIDVQGDIIYDIVEFITDTWPDVPERSIFFIEDGKKVQAG

SEQ ID NO: 49606 - protein, 198 aa, Arabidopsis thaliana
  peptide (1)..(198): Ceres Seq. ID no. 14304294
MAEKLEPVKVLYCGVCSLPAEYCEFGPDFARCKPWLVENAPDLYPDLLKEANEKAADNVSDKLQSVGISSGGADGAPSSAQTGGTSKKEEVKRLPGGKVKKKDRQEVIIEKVVRNKRKCITIVKGLELFGIKLSDASKKLGKKFATGASVVKGPTEKEQIDVQGDIIYDIVEFITDTWPDVPERSIFFIEDGKKVQAG

SEQ ID NO: 49607 - DNA, 1220 bp, Arabidopsis thaliana
  misc_feature (1)..(1220): Ceres Seq. ID no. 13647668
  misc_feature (1)..(1220): Ortholog of  Ceres SEQ ID NO 13598413 as cited in SEQ ID NO 68934
aatcacagttcgggaaagacttaacatttaagatttacgggtttgtttgatcgattagtctcatctgggtttttctccaagttaaattctttgtttctgagatggatcaagcttcgtcttcttcgactatggaggaagacaagaagtcttccactgatcctgtgaatgtcgatgataacgaggagagagaagctatagagattgctctgttccaagtgcctgaatgctatgtttatttgatacctccaaggaaaaccgcagcttcgtacagagcagatgagtgggacgtgaacaaatgggcatgggaaggagctttgaaagtggtgagcaaaggagaagaatgcattataaaactagtagataaaaccacaggggaactttacgctcaggcatttctaagagagggggaacttcatcctgtagaagcagtaatcgacagtagcagatattttgttctccgtgttgaagaaaagatagatggtcgtgttcgacatgcttttatcggactcggattccgggaaagaacagaagcatatgatttccaagcagcactacatgaccatatgaagtatttgaacaagaagaaaacagcagaagaaatggaacaacactatcagaacacttcatccgttgattacagcttaaaggaaggagaaaccattgttctccaactcaaaaatagaagcgataaagacagcaagtcaaaaacggtagagaagagtctgggcaatctctcgttggaggataaaggcaagtcaatagaaaccaccattccttcaatcatcctgccacctccacctccgggaccgctttcccctgtcacaactgctcagaagtccccgtcaagtctgccgccaagcctcagcctccaaagatcgtctgaacaacaagatttagatacaaagcgagaagaagaagaagaagagaagaaagaagacctaaaagccaaagatggaggggttgaagatgcaccagatgatgactttggagatttccaagctgcgggttgatttaaacttataatcttttttaccatacacaaagatcgttttataagtaatgtgactgatcaaagtttggattgtttgctactgagagcttatcttctgtacaattccaaaatacaagcctatttctctgaacttgtgattagatagacaaaactccaaaaaaaaaaaaaaaaaaactcgagggggggcccggtacccaattcgccctat

SEQ ID NO: 49608 - protein, 302 aa, Arabidopsis thaliana; identical to SEQ ID NO: 25622
  peptide (1)..(302): Ceres Seq. ID no. 13647669

SEQ ID NO: 49609 - protein, 293 aa, Arabidopsis thaliana; identical to SEQ ID NO: 25623
  peptide (1)..(293): Ceres Seq. ID no. 13647670

SEQ ID NO: 49610 - DNA, 1825 bp, Arabidopsis thaliana
  misc_feature (1)..(1825): Ceres Seq. ID no. 12592214
  misc_feature (1)..(1825): Ortholog of  Ceres SEQ ID NO 13600220 as cited in SEQ ID NO 0
atgcaacacaacacatacatctacatattaaccatgaagcttcttgggttcgccttagctattctattagttgtggcgacttgcaaacctgaagaagagattacttgcgaagagaacgttccattcacatgtagccaaacagatcgtttcaacaaacaagatttcgaaagcgacttcatcttcggtgttgcatcttctgcttaccagatcgaaggcggcagaggtcgtggacttaacgtttgggatggcttcactcaccgatacccagagaaaggtggagccgatttgggcaatggagacactacttgtgactcataccggacttggcagaaagatctagacgtgatggaagagcttggagttaaaggctacagattctcctttgcgtggtcaagaatccttccaaaaggaaagaggagtaggggaatcaacgaagatggtattaactactacagcggtctcatagatggcctgatcgcaaggaacataacgcctttcgttacactctttcactgggaccttcctcaatcattgcaagatgaatatgaaggtttcttggacagaacgatcatagacgatttcaaagattacgcggatctatgtttcgagagatttggtgatagagtaaagcactggatcaccatcaaccagcttttcacagtgcctacgagaggctatgcattgggaacagatgcacccggtcgatgttcccaatgggtggataaaagatgttacggtggagattcttccaccgaaccctatatcgttgcgcataaccagcttcttgctcatgccacggtcgttgatctatacaggacgagatataagtaccaaggagggaagattggacctgtgatgataactagatggtttctaccatatgatgacactctagagagcaaacaagcaacttggagggccaaagaattcttcttgggatggttcatggagccgctaacaaagggtaaatacccatacatcatgaggaaacttgttggtaatcggcttccaaagttcaacagcacagaagctcgccttttaaagggttcatatgattttcttggtctcaactattacgtcactcaatacgcccacgcccttgacccaagtcctccggaaaaactcactgccatgacggactcactcgcaaaccttacatctcttgatgcaaatggtcaaccccctggtccaccgttctctaaaggcagttattaccacccaagagggatgttaaacgtaatggagcacttcaaaaccaaatacggtgaccctttaatctatgtcaccgagaacggattcagtacctccggtggccccatacccttcaccgaagcatttcacgattacaaccggattgattatctctgcagtcatctatgttttctccgcaaggccatcaaggagaagcgtgtcaacgtgaaaggatactttgtttggtctcttggggataattacgaattctgcaacggctacaccgtcagattcggacttagttacgttgatttcaataatgtcactgctgatagagacctcaaagcttctggcttatggtaccagtcgttcttgagagataccaccaagaaccaagatatcctccgctcaagtctgccctttaagaacggggataggaagagcctcacatgaaagaccaaaaccactttatgcccatcgagatcatcttcatgtctcttctttctacttgctccatagataaaaggagcttctacctactgtattaaataaaagatgatcaaacttaataaatattttgtatactacattatgccatgggatggggaaaaatccgatgaaaccaaaattgaac

SEQ ID NO: 49611 - protein, 547 aa, Arabidopsis thaliana
  peptide (1)..(547): Ceres Seq. ID no. 12592215
MQHNTYIYILTMKLLGFALAILLVVATCKPEEEITCEENVPFTCSQTDRFNKQDFESDFIFGVASSAYQIEGGRGRGLNVWDGFTHRYPEKGGADLGNGDTTCDSYRTWQKDLDVMEELGVKGYRFSFAWSRILPKGKRSRGINEDGINYYSGLIDGLIARNITPFVTLFHWDLPQSLQDEYEGFLDRTIIDDFKDYADLCFERFGDRVKHWITINQLFTVPTRGYALGTDAPGRCSQWVDKRCYGGDSSTEPYIVAHNQLLAHATVVDLYRTRYKYQGGKIGPVMITRWFLPYDDTLESKQATWRAKEFFLGWFMEPLTKGKYPYIMRKLVGNRLPKFNSTEARLLKGSYDFLGLNYYVTQYAHALDPSPPEKLTAMTDSLANLTSLDANGQPPGPPFSKGSYYHPRGMLNVMEHFKTKYGDPLIYVTENGFSTSGGPIPFTEAFHDYNRIDYLCSHLCFLRKAIKEKRVNVKGYFVWSLGDNYEFCNGYTVRFGLSYVDFNNVTADRDLKASGLWYQSFLRDTTKNQDILRSSLPFKNGDRKSLT

SEQ ID NO: 49612 - protein, 536 aa, Arabidopsis thaliana
  peptide (1)..(536): Ceres Seq. ID no. 12592216
MKLLGFALAILLVVATCKPEEEITCEENVPFTCSQTDRFNKQDFESDFIFGVASSAYQIEGGRGRGLNVWDGFTHRYPEKGGADLGNGDTTCDSYRTWQKDLDVMEELGVKGYRFSFAWSRILPKGKRSRGINEDGINYYSGLIDGLIARNITPFVTLFHWDLPQSLQDEYEGFLDRTIIDDFKDYADLCFERFGDRVKHWITINQLFTVPTRGYALGTDAPGRCSQWVDKRCYGGDSSTEPYIVAHNQLLAHATVVDLYRTRYKYQGGKIGPVMITRWFLPYDDTLESKQATWRAKEFFLGWFMEPLTKGKYPYIMRKLVGNRLPKFNSTEARLLKGSYDFLGLNYYVTQYAHALDPSPPEKLTAMTDSLANLTSLDANGQPPGPPFSKGSYYHPRGMLNVMEHFKTKYGDPLIYVTENGFSTSGGPIPFTEAFHDYNRIDYLCSHLCFLRKAIKEKRVNVKGYFVWSLGDNYEFCNGYTVRFGLSYVDFNNVTADRDLKASGLWYQSFLRDTTKNQDILRSSLPFKNGDRKSLT

SEQ ID NO: 49613 - protein, 432 aa, Arabidopsis thaliana
  peptide (1)..(432): Ceres Seq. ID no. 12592217
MEELGVKGYRFSFAWSRILPKGKRSRGINEDGINYYSGLIDGLIARNITPFVTLFHWDLPQSLQDEYEGFLDRTIIDDFKDYADLCFERFGDRVKHWITINQLFTVPTRGYALGTDAPGRCSQWVDKRCYGGDSSTEPYIVAHNQLLAHATVVDLYRTRYKYQGGKIGPVMITRWFLPYDDTLESKQATWRAKEFFLGWFMEPLTKGKYPYIMRKLVGNRLPKFNSTEARLLKGSYDFLGLNYYVTQYAHALDPSPPEKLTAMTDSLANLTSLDANGQPPGPPFSKGSYYHPRGMLNVMEHFKTKYGDPLIYVTENGFSTSGGPIPFTEAFHDYNRIDYLCSHLCFLRKAIKEKRVNVKGYFVWSLGDNYEFCNGYTVRFGLSYVDFNNVTADRDLKASGLWYQSFLRDTTKNQDILRSSLPFKNGDRKSLT

SEQ ID NO: 49614 - DNA, 1412 bp, Arabidopsis thaliana
  misc_feature (1)..(1412): Ceres Seq. ID no. 14304356
  misc_feature (1)..(1412): Ortholog of  Ceres SEQ ID NO 14310350 as cited in SEQ ID NO 20670
  misc_feature (1)..(1412): Ortholog of  Ceres SEQ ID NO 15177648 as cited in SEQ ID NO 58917
gaaggaaagagcgagagagagagagagagagagagaaaaaagaagaagaagaatttgaggcgattgggtaagcgatgcacatcgtcttctctgtcgatgatttgaccgaatccttctggcctgttcccgctccggcgccgtcgccgggatcgtcatcgactccgtcaccgacgcagaacgtggcggatgggatgactcgaagtcaatcggagtgggcgttccacaggcttatcaatgagttgtctggttccgattcgagccctacgactaacacaatcgagagatcacctccaccggttcagtctctttcgagattagaagaaaccgttgacgaaaccgaagatgttgttgagattcagaaaccgcagaatcatcgacggctccctgttgatgatcaagggaagaatcggaatcgtgctccgtcgtctgatccggttgattcttcagctcctgttgttgttgatcctaatcagtatcatgcgattcttaagagcaagctcgagcttgcttgcgctgctgttgctcgtcgtgtgggaactgtgaaaccggaagattcgagtgcttcagctagcaatcaaaaacaagctcaaggctccattgtggcacaaacctcacctggtgcttcatctgttagattttctcccacaacaagcacgcaaaagaaacctgatgttccagccagacaaactactagtatttcatcacgagatgattctgatgacgatgatcttgatggagacgcagataatggagatcctactgatgtgaagcgtgctaggaggatgctctcaaaccgagaatccgctaggcgctctaggagaagaaagcaagaacaaatgaatgaatttgatacacaggtaggccaattaagagccgagcattcaactttaattaatcgtcttagtgacatgaatcataagtatgatgcagctgctgttgacaacagaattctaagagctgatatcgaaactttgagaacaaaggttaagatggcagaggaaactgtgaaaagagtgacaggagtgaaccctttgcattggtcaagaccaaacatgggcataccattcagcaacacaccgagtgcttcctctagtattccgccaaactctaaccacattttgaaaccagcaaattcaagtaccaacaccagtgctggtttagcacaaaatcagagagtggagacggcaaatttcttgccggaacaggtgaaccgtgaaggcatgcagaatccatttgctcctgattctaatctgtacgaaaccctaccccattggaatcacaagcattaaccagaaaaagagtcattggttttgtgattttgattgaggtaactattgtctgtatttttatttactgtatgactcagcgacggtaaactcttaatattatatatatgattggacatgaaaaag

SEQ ID NO: 49615 - protein, 404 aa, Arabidopsis thaliana
  peptide (1)..(404): Ceres Seq. ID no. 14304357
MHIVFSVDDLTESFWPVPAPAPSPGSSSTPSPTQNVADGMTRSQSEWAFHRLINELSGSDSSPTTNTIERSPPPVQSLSRLEETVDETEDVVEIQKPQNHRRLPVDDQGKNRNRAPSSDPVDSSAPVVVDPNQYHAILKSKLELACAAVARRVGTVKPEDSSASASNQKQAQGSIVAQTSPGASSVRFSPTTSTQKKPDVPARQTTSISSRDDSDDDDLDGDADNGDPTDVKRARRMLSNRESARRSRRRKQEQMNEFDTQVGQLRAEHSTLINRLSDMNHKYDAAAVDNRILRADIETLRTKVKMAEETVKRVTGVNPLHWSRPNMGIPFSNTPSASSSIPPNSNHILKPANSSTNTSAGLAQNQRVETANFLPEQVNREGMQNPFAPDSNLYETLPHWNHKH

SEQ ID NO: 49616 - protein, 365 aa, Arabidopsis thaliana
  peptide (1)..(365): Ceres Seq. ID no. 14304358
MTRSQSEWAFHRLINELSGSDSSPTTNTIERSPPPVQSLSRLEETVDETEDVVEIQKPQNHRRLPVDDQGKNRNRAPSSDPVDSSAPVVVDPNQYHAILKSKLELACAAVARRVGTVKPEDSSASASNQKQAQGSIVAQTSPGASSVRFSPTTSTQKKPDVPARQTTSISSRDDSDDDDLDGDADNGDPTDVKRARRMLSNRESARRSRRRKQEQMNEFDTQVGQLRAEHSTLINRLSDMNHKYDAAAVDNRILRADIETLRTKVKMAEETVKRVTGVNPLHWSRPNMGIPFSNTPSASSSIPPNSNHILKPANSSTNTSAGLAQNQRVETANFLPEQVNREGMQNPFAPDSNLYETLPHWNHKH

SEQ ID NO: 49617 - DNA, 983 bp, Arabidopsis thaliana
  misc_feature (1)..(983): Ceres Seq. ID no. 12591240
  misc_feature (1)..(983): Ortholog of  Ceres SEQ ID NO 15173936 as cited in SEQ ID NO 61736
  misc_feature (1)..(983): Ortholog of  Ceres SEQ ID NO 13596373 as cited in SEQ ID NO 67991
actccaatcacatcactgctaagactcattgaattcaaatcgttatgtctacacattcatcaatctcgcaaccgccgcttcctctcgccggaagagtcgccattgtcaccggctcttcccgtggtattggccgagcgatagcgatccacttagctgaactcggtgcgaggattgttatcaactacacctctaaagccgcagacgccgagcgtgtcgcgtcggagatcaatgattttccagttagggaagaaatcactggaaagggaccaagagctattgtggttcaggccaatgtctctgagccaagccaggttaaatcaatgtttgatgcggcggagagtgcctttgaagcgccggttcacattctggttaactctgctgggattctcgatccaaagtaccctacgatcgcagacacatcagtcgaagatttcgatcatacgttcagtgtcaacacaaaaggagcgttcctgtgtagcaaggaagctgccaataggctaaaacaaggaggtggtggtcggatcatacttctgacatcttcccagactcgatctttaaagccagggtttggtgcctatgccgcatcaaaggcagctgtggaaactatggtcaagattcttgcaaaagagctcaaaggaacaggaatcactgcaaactgtgttgctccaggacccatcgccactgagatgttctttgatggaaagaccccagagttggtggaaaagatagccgcagagtctccctttgggagggtcggcgaagccaaagacgtggtgcctcttgttggattcttggctggtgacggtggtgaatgggtcaatggtcaaatcattcctgttaatggtggatatgtataaaagagttcgtcttgagaggagcctcttcctgataccttgagaagcaaatgtaggggttaacttgttagaaataaaacattgggttcaattggaataataataataataaacactgaggttgaaaat

SEQ ID NO: 49618 - protein, 270 aa, Arabidopsis thaliana
  peptide (1)..(270): Ceres Seq. ID no. 12591241
MSTHSSISQPPLPLAGRVAIVTGSSRGIGRAIAIHLAELGARIVINYTSKAADAERVASEINDFPVREEITGKGPRAIVVQANVSEPSQVKSMFDAAESAFEAPVHILVNSAGILDPKYPTIADTSVEDFDHTFSVNTKGAFLCSKEAANRLKQGGGGRIILLTSSQTRSLKPGFGAYAASKAAVETMVKILAKELKGTGITANCVAPGPIATEMFFDGKTPELVEKIAAESPFGRVGEAKDVVPLVGFLAGDGGEWVNGQIIPVNGGYV

SEQ ID NO: 49619 - protein, 178 aa, Arabidopsis thaliana
  peptide (1)..(178): Ceres Seq. ID no. 12591242
MFDAAESAFEAPVHILVNSAGILDPKYPTIADTSVEDFDHTFSVNTKGAFLCSKEAANRLKQGGGGRIILLTSSQTRSLKPGFGAYAASKAAVETMVKILAKELKGTGITANCVAPGPIATEMFFDGKTPELVEKIAAESPFGRVGEAKDVVPLVGFLAGDGGEWVNGQIIPVNGGYV

SEQ ID NO: 49620 - DNA, 933 bp, Arabidopsis thaliana; identical to SEQ ID NO: 37998
  misc_feature (1)..(933): Ceres Seq. ID no. 12601209
  misc_feature (1)..(933): Ortholog of  Ceres SEQ ID NO 15226343 as cited in SEQ ID NO 61627

SEQ ID NO: 49621 - protein, 229 aa, Arabidopsis thaliana; identical to SEQ ID NO: 37999
  peptide (1)..(229): Ceres Seq. ID no. 12601210

SEQ ID NO: 49622 - protein, 210 aa, Arabidopsis thaliana; identical to SEQ ID NO: 38000
  peptide (1)..(210): Ceres Seq. ID no. 12601211

SEQ ID NO: 49623 - protein, 208 aa, Arabidopsis thaliana; identical to SEQ ID NO: 38001
  peptide (1)..(208): Ceres Seq. ID no. 12601212

SEQ ID NO: 49624 - DNA, 1425 bp, Arabidopsis thaliana
  misc_feature (1)..(1425): Ceres Seq. ID no. 12602340
  misc_feature (1)..(1425): Ortholog of  Ceres SEQ ID NO 13639663 as cited in SEQ ID NO 57850
agggaagaggcaagatggcaaagctgtgatttaaaacaccgtcacctccccgtcaacggagacaaacaaagatcgtgttttctcgaaccttccacgagatatactaagccaaagaagaagaagagacctgagacgaacaagaaatccagaaattaccaattccttttttttgtttaatcgaattcaggaaaagtgaagaaacgaaagagagaagacaaagaagaagaaggtgagatgggagttgattattacaaggttttacaggttgatagaagcgctaacgacgatgaccttaagaaagcttatagaaaactcgctatgaaatggcatcctgataagaaccctaacaacaaaaaagacgctgaggctaagttcaagcagatctctgaggcctacgatgttcttagcgatcctcaaaagagagctgtatatgatcaatacggtgaggaagggttaaaagggaatgtgccacctcccaatgctgctactagtggagcatcctacttctcaacaggagatggatcttcgtctttcagattcaacccgagaagtgcagatgatatattcgctgagtttttcgggttctcgaccccgtttggtggcggtggtggtggcactggagggcagagattcgctagccgcatgtttggtgatgatatgtatgcctcgtttggtgaaggagcaggtggaggaggagctatgcatcatcatcaccatcatcatcatcacgctgcagctaggaaagtggctcctatcgagaacaagttgccttgtagccttgaagatctctacaaaggaaccaccaagaagatgaagatctccagggagattgtagatgtcagcggtaaggcaatgcaagtggaagagattctaacgattggagtgaaacccgggtggaagaaaggcacaaagatcacattcccagagaaaggcaatgagcatccaggtgtgattccagcggatctagtcttcatcattgacgagaaaccccatccagtgtttacccgtgagggcaacgacctgattgtcacacagaaagtctcactagctgatgccttaacaggctacaccgcaaacatagcgacccttgatggccgtacacttacaatcccgatcacaaatgtgatccatccagagtatgaagaggtggttcctaaagagggaatgccactccagaaagatcagacaaagaaagggaacttaaggatcaagttcaatatcaagtttccagcgagattaactgcggaacagaaagctgggtttaagaagcttattgggtgatgattaaagcatctctgtcttgtgatgtgtggagattgggataaatttggtaatatacaatttatagggaattatctccctcttcattaaatttcgtgttgttaaacaagtcttctttttaaagaatagttttttcaagatttg

SEQ ID NO: 49625 - protein, 348 aa, Arabidopsis thaliana
  peptide (1)..(348): Ceres Seq. ID no. 12602341
MGVDYYKVLQVDRSANDDDLKKAYRKLAMKWHPDKNPNNKKDAEAKFKQISEAYDVLSDPQKRAVYDQYGEEGLKGNVPPPNAATSGASYFSTGDGSSSFRFNPRSADDIFAEFFGFSTPFGGGGGGTGGQRFASRMFGDDMYASFGEGAGGGGAMHHHHHHHHHAAARKVAPIENKLPCSLEDLYKGTTKKMKISREIVDVSGKAMQVEEILTIGVKPGWKKGTKITFPEKGNEHPGVIPADLVFIIDEKPHPVFTREGNDLIVTQKVSLADALTGYTANIATLDGRTLTIPITNVIHPEYEEVVPKEGMPLQKDQTKKGNLRIKFNIKFPARLTAEQKAGFKKLIG

SEQ ID NO: 49626 - protein, 320 aa, Arabidopsis thaliana
  peptide (1)..(320): Ceres Seq. ID no. 12602342
MKWHPDKNPNNKKDAEAKFKQISEAYDVLSDPQKRAVYDQYGEEGLKGNVPPPNAATSGASYFSTGDGSSSFRFNPRSADDIFAEFFGFSTPFGGGGGGTGGQRFASRMFGDDMYASFGEGAGGGGAMHHHHHHHHHAAARKVAPIENKLPCSLEDLYKGTTKKMKISREIVDVSGKAMQVEEILTIGVKPGWKKGTKITFPEKGNEHPGVIPADLVFIIDEKPHPVFTREGNDLIVTQKVSLADALTGYTANIATLDGRTLTIPITNVIHPEYEEVVPKEGMPLQKDQTKKGNLRIKFNIKFPARLTAEQKAGFKKLIG

SEQ ID NO: 49627 - protein, 212 aa, Arabidopsis thaliana
  peptide (1)..(212): Ceres Seq. ID no. 12602343
MFGDDMYASFGEGAGGGGAMHHHHHHHHHAAARKVAPIENKLPCSLEDLYKGTTKKMKISREIVDVSGKAMQVEEILTIGVKPGWKKGTKITFPEKGNEHPGVIPADLVFIIDEKPHPVFTREGNDLIVTQKVSLADALTGYTANIATLDGRTLTIPITNVIHPEYEEVVPKEGMPLQKDQTKKGNLRIKFNIKFPARLTAEQKAGFKKLIG

SEQ ID NO: 49628 - DNA, 2425 bp, Arabidopsis thaliana; identical to SEQ ID NO: 42027
  misc_feature (1)..(2425): Ceres Seq. ID no. 13488766
  misc_feature (1)..(2425): Ortholog of  Ceres SEQ ID NO 15173102 as cited in SEQ ID NO 61106

SEQ ID NO: 49629 - protein, 785 aa, Arabidopsis thaliana; identical to SEQ ID NO: 42028
  peptide (1)..(785): Ceres Seq. ID no. 13488767

SEQ ID NO: 49630 - protein, 773 aa, Arabidopsis thaliana; identical to SEQ ID NO: 42029
  peptide (1)..(773): Ceres Seq. ID no. 13488768

SEQ ID NO: 49631 - protein, 625 aa, Arabidopsis thaliana; identical to SEQ ID NO: 42030
  peptide (1)..(625): Ceres Seq. ID no. 13488769

SEQ ID NO: 49632 - DNA, 1557 bp, Arabidopsis thaliana
  misc_feature (1)..(1557): Ceres Seq. ID no. 12592218
  misc_feature (1)..(1557): Ortholog of  Ceres SEQ ID NO 13596780 as cited in SEQ ID NO 62360
acaattttacagaagaaagtgaaaagaaagagagaaaggggaagaagaaaaatgtataaatcaccattaacgttgctcacacttcttactatttgttttggattcttcgatctcagcagtgctctttatgaatcttcgtcacctgtggttcagctcactgcttctaactttaagtccaaggttcttaattcaaatggagttgttttggtagagttctttgcaccatggtgtggtcattgcaaagctctaacacctacatgggagaaagtggctaatattctgaaaggagttgctactgtggctgcaattgatgcagatgctcatcagtctgccgcgcaggattatggtattaaaggtttcccaacaattaaggtttttgttcctggaaaggctccaatcgattaccaaggagcaagagatgccaaatccattgctaattttgcttataagcagatcaagggtcttttgagtgaccgtttggaaggcaaaagtaaaccaactggaggaggatctaaagaaaagaaatctgaacctagtgcatctgtggaactgaacgctagcaattttgatgatttggtcatcgaaagcaatgaactttggatcgttgagttttttgcaccttggtgtggacattgcaaaaagcttgccccggagtggaagagggctgcaaaaaatttgcagggaaaggtgaaattaggtcatgtcaattgtgatgttgagcagtcgataatgagcagattcaaagttcaaggattccctacaattttggtatttggtccagacaaaagtagtccatatccttacgagggtgctagatctgcttcagcgatagaatcttttgcttctgaacttgtggaatccagtgctggccctgttgaagtgactgaactaactggaccggatgtcatggaaaagaagtgtggttctgctgctatttgctttatctctttcttacctgacattcttgactccaaagctgaaggaaggaataagtacctcgagatgttattatcagttgcagagaagtttaagaagcagccttacagttttatgtgggtggcggctgtaactcaaatggatttggagaagcgagttaatgtaggaggatacggttatccagcaatggtagccatgaatgtgaagaaaggagtatatgctcctcttaaaagcgcctttgagcttcaacacctcttagaatttgtgaaagatgctggaaccggtggaaaaggaaatgtgccaatgaatggaacaccagagatcgtgaagacaaaggagtgggatggtaaagatggagagttgattgaggaagatgaattctcacttgatgagctcatgggaggtgatgatgctgttggttctaaggatgagttgtgaagaatccaaggggattttgctacttttgggatctgaaccgctgaatgtatttcacccttttttatttttgaaaagaaagtaagagcatttcaagagatagaacatgtacggattttgtattacgatagacacataacagagaatctatgctggagttatattagagttcattgctagtttttc

SEQ ID NO: 49633 - protein, 457 aa, Arabidopsis thaliana
  peptide (1)..(457): Ceres Seq. ID no. 12592219
TILQKKVKRKRERGRRKMYKSPLTLLTLLTICFGFFDLSSALYESSSPVVQLTASNFKSKVLNSNGVVLVEFFAPWCGHCKALTPTWEKVANILKGVATVAAIDADAHQSAAQDYGIKGFPTIKVFVPGKAPIDYQGARDAKSIANFAYKQIKGLLSDRLEGKSKPTGGGSKEKKSEPSASVELNASNFDDLVIESNELWIVEFFAPWCGHCKKLAPEWKRAAKNLQGKVKLGHVNCDVEQSIMSRFKVQGFPTILVFGPDKSSPYPYEGARSASAIESFASELVESSAGPVEVTELTGPDVMEKKCGSAAICFISFLPDILDSKAEGRNKYLEMLLSVAEKFKKQPYSFMWVAAVTQMDLEKRVNVGGYGYPAMVAMNVKKGVYAPLKSAFELQHLLEFVKDAGTGGKGNVPMNGTPEIVKTKEWDGKDGELIEEDEFSLDELMGGDDAVGSKDEL

SEQ ID NO: 49634 - protein, 440 aa, Arabidopsis thaliana
  peptide (1)..(440): Ceres Seq. ID no. 12592220
MYKSPLTLLTLLTICFGFFDLSSALYESSSPVVQLTASNFKSKVLNSNGVVLVEFFAPWCGHCKALTPTWEKVANILKGVATVAAIDADAHQSAAQDYGIKGFPTIKVFVPGKAPIDYQGARDAKSIANFAYKQIKGLLSDRLEGKSKPTGGGSKEKKSEPSASVELNASNFDDLVIESNELWIVEFFAPWCGHCKKLAPEWKRAAKNLQGKVKLGHVNCDVEQSIMSRFKVQGFPTILVFGPDKSSPYPYEGARSASAIESFASELVESSAGPVEVTELTGPDVMEKKCGSAAICFISFLPDILDSKAEGRNKYLEMLLSVAEKFKKQPYSFMWVAAVTQMDLEKRVNVGGYGYPAMVAMNVKKGVYAPLKSAFELQHLLEFVKDAGTGGKGNVPMNGTPEIVKTKEWDGKDGELIEEDEFSLDELMGGDDAVGSKDEL

SEQ ID NO: 49635 - DNA, 1966 bp, Arabidopsis thaliana
  misc_feature (1)..(1966): Ceres Seq. ID no. 12601878
  misc_feature (1)..(1966): Ortholog of  Ceres SEQ ID NO 15169061 as cited in SEQ ID NO 55497
ctcttcgtagtctttgaatcctaaagtaacaatctttcgtttcagagcacgtctgtaagatgacagaggacaacgatgaggctagggttcctctcagcgactcgtctacaacgaacgatgcttctcgaacgagacaaaggagaaagagaaagtgggataagccagcggagcaacttgttgcggctggagttgcgtttcctcagttacttcctttaggcaacactatgaatgttccttctatgtcaccattgccccaaacgctttcggtgcctctagcagttccaaaagttaatcaacctaaaatccaggatgaggtgatcatagcgcgagaaattgttatcaacgatgctgaggcttctcttaggcacaggcttaccaaacgctcaactcaagaagatattcagaggtctaccggtgctgtggtgattactaggggcaagtatcgtcctccaaatgcacctcctgatggtgaaaagccattatatcttcacatatctgccgctgcccagttgcagttaaaagagactacagaacgtatcttagcagttgatcgtgcagcagctatgattgaggagatgatgaaacagaaatcaatttcacagatcggatcagttggtttacagacggtcaagatgctgagcacatgcgtatatttgggtttcgaagctgacccatcatctaatgttgctgctcgtattcgtgggcctaatgagcaactgttgtattaagagggcgtggttcaggaagccttgagaatcaacatggagatgaagcacagctaccgctgcatctattattatccggcagcaacccaaagagcatcgacgatgcaaaacgtttagctgagaatcttatggatacaatcagtgtagaatttggggcttcaagggtttcctcaagcaaggtgtatggtgcagtaccaccaccacagcaactgatttctggagctccgggttctgaccaggagaaccaaaatttgatttcaacgtatggtttgatgacatcgatacccatcacagcaccaccatacgctgttagttcgtttccagttactccagcaacaagtctttatcctcagtttccagtaatgcaatctctaggaatatcaaatggtggcccctcgcagcccgtggctggaggaactagctatagtgggtatgctggaatataccctcaagccacaccattgcaacaagttgctcaagtccttaagcaatcaatttctcctgttatctctactgtgccccctactatgttgacagctacgtccttatcgatcccaagtgataatgcaagtaatgaaatggaaaggcgtccaccccggaagcgaaagtttcaggaacttccagctgattgtaaggttccagaaaaagacaaacagcaatcggagttagcaatgacaggtgatgttactccatcagcaaatagagtgcggtcgccgccttcaccaagatctgtaatgcctcctcctccaccaaagaccatcgcaccaccgccttctaagaccatgtctcctccatcatcaaaaagcatgcttcctccaccaccacgttctaagaccatgtctcctctatcatcaaaaagcatgcttcctccaccaccgcgatttacactgacaactcaacgttcaagattacaggacaaccacatcagtgtaaagaaaccaaatccagttccagatacgttaataaagctgatggaatatggagacgatgaagacgatgatgacgatcctgatgagccattgacaactagatcgtgacagtgtattagattacagaaccttcttatctggcaacaaaatgtcaatttgtgtttgtaacaatagaaagaaatgttggtctcttactgatttggaacttcattgcctaaggctattagttaaatatttaagacattagctacttgttttgcaaggcactgctcgttttgttgtatttcttatcattaatacataatggttaac

SEQ ID NO: 49636 - protein, 302 aa, Arabidopsis thaliana
  peptide (1)..(302): Ceres Seq. ID no. 12601879
MDTISVEFGASRVSSSKVYGAVPPPQQLISGAPGSDQENQNLISTYGLMTSIPITAPPYAVSSFPVTPATSLYPQFPVMQSLGISNGGPSQPVAGGTSYSGYAGIYPQATPLQQVAQVLKQSISPVISTVPPTMLTATSLSIPSDNASNEMERRPPRKRKFQELPADCKVPEKDKQQSELAMTGDVTPSANRVRSPPSPRSVMPPPPPKTIAPPPSKTMSPPSSKSMLPPPPRSKTMSPLSSKSMLPPPPRFTLTTQRSRLQDNHISVKKPNPVPDTLIKLMEYGDDEDDDDDPDEPLTTRS

SEQ ID NO: 49637 - protein, 254 aa, Arabidopsis thaliana
  peptide (1)..(254): Ceres Seq. ID no. 12601880
MTSIPITAPPYAVSSFPVTPATSLYPQFPVMQSLGISNGGPSQPVAGGTSYSGYAGIYPQATPLQQVAQVLKQSISPVISTVPPTMLTATSLSIPSDNASNEMERRPPRKRKFQELPADCKVPEKDKQQSELAMTGDVTPSANRVRSPPSPRSVMPPPPPKTIAPPPSKTMSPPSSKSMLPPPPRSKTMSPLSSKSMLPPPPRFTLTTQRSRLQDNHISVKKPNPVPDTLIKLMEYGDDEDDDDDPDEPLTTRS

SEQ ID NO: 49638 - protein, 224 aa, Arabidopsis thaliana
  peptide (1)..(224): Ceres Seq. ID no. 12601881
MQSLGISNGGPSQPVAGGTSYSGYAGIYPQATPLQQVAQVLKQSISPVISTVPPTMLTATSLSIPSDNASNEMERRPPRKRKFQELPADCKVPEKDKQQSELAMTGDVTPSANRVRSPPSPRSVMPPPPPKTIAPPPSKTMSPPSSKSMLPPPPRSKTMSPLSSKSMLPPPPRFTLTTQRSRLQDNHISVKKPNPVPDTLIKLMEYGDDEDDDDDPDEPLTTRS

SEQ ID NO: 49639 - DNA, 1538 bp, Arabidopsis thaliana
  misc_feature (1)..(1538): Ceres Seq. ID no. 13588804
  misc_feature (1)..(1538): Ortholog of  Ceres SEQ ID NO 13598818 as cited in SEQ ID NO 0
atgaagaagaagaagaaagaaagtgacacaaatcggactctccgttcatcgccggggagggatcaaatggataacattgtggactcattgaacaaagcttatgagaagtttgttcttgcttcagctggtgttcttgagtctaaagagagtgcaggtggacaaaaagctttgctcactgatactgcgttggagaatttcaaggagaaatgggaactgttccgtgtggcttgtgatcaagcagaggagtttgtggagtcagttaagcagagaattggatctgagtgtttagttgatgaggctactggtttaactactactgcagcaggtggccaagcaccagcagcggtgactggtgctgcgactagtctccctcccattagtgcagtaaggcttgaacagatgagtagagcggttcgatggcttgttcttgagctgcaacgtggctctggtgtagctcctggttctgttcattcatcctctaccggatatatggattcgaatcaatcgatgcggctcctcagtgcttggattggtcaaattggtgatcttggtcttaatttgctatggcgttttatacacattgttgtgagcttatggtacattgtctctggcatatttgaggcaatagaaagctatgccataacgttaggattgaataaaaagtacggttccatcgatcttgagaaactccggtgtctagctgttgtagtggacatcgaagcagctcaagatgttgccaatgttgttgagcttttgcaatggctaaccaccattggggttaaacaagttggtctatttgactctcaaggtttattgaagaaatccaaggatttgatccttgaaaccgttccaggttccatgttgttagaggagattgaaaaggatgttgcgcctgacggaaagcgcattgcattagaattcatttcatcttcagacaataaagaagctgttatgaaagcagccaacatacttcttcagagatacttgaaatccagccatcctgaggacgacaaaggggaagacttttttacagagtctcatttgaatgacgcattaagagttgttggtgagaatgtgcatgtacccgatctgttactggtttatggacctataaggagccacctcggtttccctgcttggagacttcgatacactgagatagtacatatgggaactttgaagtatatgagatatggttcccttttgaaggcaattcacaagttcacaggagtccaccaaaactatggaacttaacggtgactagagagcagagtttcagagatcgatttttggtttgtgattcacatatttgcaatgaattctaaaggagagattattggagagcttttgagtcagtgcagccactactgttcccaatttccggcaattctatgtaccaaagcaacatatgcattggcattgtataggattaagtagtaacaagctggacctaaccaatccggtttttccataaagttccggtttgcttggttatcgtgtgtaaacaaaaatagaacacaactttcagatttttcagt

SEQ ID NO: 49640 - protein, 417 aa, Arabidopsis thaliana
  peptide (1)..(417): Ceres Seq. ID no. 13588805
MKKKKKESDTNRTLRSSPGRDQMDNIVDSLNKAYEKFVLASAGVLESKESAGGQKALLTDTALENFKEKWELFRVACDQAEEFVESVKQRIGSECLVDEATGLTTTAAGGQAPAAVTGAATSLPPISAVRLEQMSRAVRWLVLELQRGSGVAPGSVHSSSTGYMDSNQSMRLLSAWIGQIGDLGLNLLWRFIHIVVSLWYIVSGIFEAIESYAITLGLNKKYGSIDLEKLRCLAVVVDIEAAQDVANVVELLQWLTTIGVKQVGLFDSQGLLKKSKDLILETVPGSMLLEEIEKDVAPDGKRIALEFISSSDNKEAVMKAANILLQRYLKSSHPEDDKGEDFFTESHLNDALRVVGENVHVPDLLLVYGPIRSHLGFPAWRLRYTEIVHMGTLKYMRYGSLLKAIHKFTGVHQNYGT

SEQ ID NO: 49641 - protein, 395 aa, Arabidopsis thaliana
  peptide (1)..(395): Ceres Seq. ID no. 13588806
MDNIVDSLNKAYEKFVLASAGVLESKESAGGQKALLTDTALENFKEKWELFRVACDQAEEFVESVKQRIGSECLVDEATGLTTTAAGGQAPAAVTGAATSLPPISAVRLEQMSRAVRWLVLELQRGSGVAPGSVHSSSTGYMDSNQSMRLLSAWIGQIGDLGLNLLWRFIHIVVSLWYIVSGIFEAIESYAITLGLNKKYGSIDLEKLRCLAVVVDIEAAQDVANVVELLQWLTTIGVKQVGLFDSQGLLKKSKDLILETVPGSMLLEEIEKDVAPDGKRIALEFISSSDNKEAVMKAANILLQRYLKSSHPEDDKGEDFFTESHLNDALRVVGENVHVPDLLLVYGPIRSHLGFPAWRLRYTEIVHMGTLKYMRYGSLLKAIHKFTGVHQNYGT

SEQ ID NO: 49642 - protein, 284 aa, Arabidopsis thaliana
  peptide (1)..(284): Ceres Seq. ID no. 13588807
MSRAVRWLVLELQRGSGVAPGSVHSSSTGYMDSNQSMRLLSAWIGQIGDLGLNLLWRFIHIVVSLWYIVSGIFEAIESYAITLGLNKKYGSIDLEKLRCLAVVVDIEAAQDVANVVELLQWLTTIGVKQVGLFDSQGLLKKSKDLILETVPGSMLLEEIEKDVAPDGKRIALEFISSSDNKEAVMKAANILLQRYLKSSHPEDDKGEDFFTESHLNDALRVVGENVHVPDLLLVYGPIRSHLGFPAWRLRYTEIVHMGTLKYMRYGSLLKAIHKFTGVHQNYGT

SEQ ID NO: 49643 - DNA, 2228 bp, Arabidopsis thaliana
  misc_feature (1)..(2228): Ceres Seq. ID no. 13592297
  misc_feature (1)..(2228): Ortholog of  Ceres SEQ ID NO 15178310 as cited in SEQ ID NO 1089
  misc_feature (1)..(2228): Ortholog of  Ceres SEQ ID NO 15178931 as cited in SEQ ID NO 1125
  misc_feature (1)..(2228): Ortholog of  Ceres SEQ ID NO 13596648 as cited in SEQ ID NO 63080
  misc_feature (1)..(2228): Ortholog of  Ceres SEQ ID NO 13655640 as cited in SEQ ID NO 63844
  misc_feature (1)..(2228): Ortholog of  Ceres SEQ ID NO 14303173 as cited in SEQ ID NO 66550
  misc_feature (1)..(2228): Ortholog of  Ceres SEQ ID NO 13584744 as cited in SEQ ID NO 69137
  misc_feature (1)..(2228): Ortholog of  Ceres SEQ ID NO 15179672 as cited in SEQ ID NO 0
ggaaagataaccacagaacacaaaaactcattcattaagaatgagaaagaaagtcccaaaaaccttttttgctctgaaaaagcaacgcaaagttttgaaaaatctcacacctttttcacttctctgttaccacttgtgtttcccctttggcatttttctcggttgtcattaatgagagttcctaaaatcatcatcatcaagtgtaacttctctctctttctctatctctatctcaaagctctgaactttggagagatcatggtttgtgtttgatttctcaagtttggttttttttacccttttggaggatctgagaggagaaatttgcttttttttggaaaatggggagaaaaaagtttgaagcttttggttttgtctgcttaatctcactgcttcttctgtttaattcgttatggcttgcctcttctaacatggaaggtgatgcactgcacagtttgagagctaatctagttgatccaaataatgtcttgcaaagctgggatcctacgcttgttaatccgtgtacttggtttcacgtaacgtgtaacaacgagaacagtgttataagagtcgatcttgggaatgcagacttgtctggtcagttggttcctcagctaggtcagctcaagaacttgcagtacttggagctttatagtaataacataaccgggccggttccaagcgatcttgggaatctgacaaacttagtgagcttggatctttacttgaacagcttcactggtccaattccagattctctaggaaagctattcaagcttcgctttcttcggctcaacaataacagtctcaccggaccaattcccatgtcattgactaatatcatgacccttcaagttttggatctgtcgaacaaccgattatccggatctgttcctgataatggttccttctcgctcttcactcccatcagttttgctaacaacttggatctatgcggcccagttactagccgtccttgtcctggatctcccccgttttctcctccaccaccttttataccacctcccatagttcctacaccaggtgggtatagtgctactggagccattgcgggaggagttgctgctggtgctgctttactatttgctgcccctgctttagcttttgcttggtggcgtagaagaaaacctcaagaattcttctttgatgttcctgccgaagaggaccctgaggttcacttggggcagcttaagcggttctctctacgggaacttcaagtagcaactgatagcttcagcaacaagaacattttgggccgaggtgggttcggaaaagtctacaaaggccgtcttgctgatggaacacttgttgcagtcaaacggcttaaagaagagcgaaccccaggtggcgagctccagtttcagacagaagtggagatgataagcatggccgttcacagaaatctcctcaggctacgcggtttctgtatgacccctaccgagagattgcttgtttatccttacatggctaatggaagtgtcgcttcctgtttgagagaacgtccaccatcacagttgcctctagcctggtcaataagacagcaaatcgcgctaggatcagcgaggggtttgtcttatcttcatgatcattgcgaccccaaaattattcaccgtgatgtgaaagctgctaatattctgttggacgaggaatttgaggcggtggtaggtgatttcgggttagctagacttatggactataaagatactcatgtcacaacggctgtgcgtgggactattggacacattgctcctgagtatctctcaactggaaaatcttcagagaaaactgatgtttttggctacgggatcatgcttttggaactgattacaggtcagagagcttttgatcttgcaagactggcgaatgacgatgacgttatgctcctagattgggtgaaagggcttttgaaggagaagaagctggagatgcttgtggatcctgacctgcaaagcaattacacagaagcagaagtagaacagctcatacaagtggctcttctctgcacacagagctcacctatggaacgacctaagatgtctgaggttgttcgaatgcttgaaggtgacggtttagcggagaaatgggacgagtggcagaaagtggaagttctcaggcaagaagtggagctctcttctcaccccacctctgactggatccttgattcgactgataatcttcatgctatggagttgtctggtccaagataa

SEQ ID NO: 49644 - protein, 628 aa, Arabidopsis thaliana
  peptide (1)..(628): Ceres Seq. ID no. 15221085
MGRKKFEAFGFVCLISLLLLFNSLWLASSNMEGDALHSLRANLVDPNNVLQSWDPTLVNPCTWFHVTCNNENSVIRVDLGNADLSGQLVPQLGQLKNLQYLELYSNNITGPVPSDLGNLTNLVSLDLYLNSFTGPIPDSLGKLFKLRFLRLNNNSLTGPIPMSLTNIMTLQVLDLSNNRLSGSVPDNGSFSLFTPISFANNLDLCGPVTSRPCPGSPPFSPPPPFIPPPIVPTPGGYSATGAIAGGVAAGAALLFAAPALAFAWWRRRKPQEFFFDVPAEEDPEVHLGQLKRFSLRELQVATDSFSNKNILGRGGFGKVYKGRLADGTLVAVKRLKEERTPGGELQFQTEVEMISMAVHRNLLRLRGFCMTPTERLLVYPYMANGSVASCLRERPPSQLPLAWSIRQQIALGSARGLSYLHDHCDPKIIHRDVKAANILLDEEFEAVVGDFGLARLMDYKDTHVTTAVRGTIGHIAPEYLSTGKSSEKTDVFGYGIMLLELITGQRAFDLARLANDDDVMLLDWVKGLLKEKKLEMLVDPDLQSNYTEAEVEQLIQVALLCTQSSPMERPKMSEVVRMLEGDGLAEKWDEWQKVEVLRQEVELSSHPTSDWILDSTDNLHAMELSGPR

SEQ ID NO: 49645 - protein, 598 aa, Arabidopsis thaliana
  peptide (1)..(598): Ceres Seq. ID no. 15221086
MEGDALHSLRANLVDPNNVLQSWDPTLVNPCTWFHVTCNNENSVIRVDLGNADLSGQLVPQLGQLKNLQYLELYSNNITGPVPSDLGNLTNLVSLDLYLNSFTGPIPDSLGKLFKLRFLRLNNNSLTGPIPMSLTNIMTLQVLDLSNNRLSGSVPDNGSFSLFTPISFANNLDLCGPVTSRPCPGSPPFSPPPPFIPPPIVPTPGGYSATGAIAGGVAAGAALLFAAPALAFAWWRRRKPQEFFFDVPAEEDPEVHLGQLKRFSLRELQVATDSFSNKNILGRGGFGKVYKGRLADGTLVAVKRLKEERTPGGELQFQTEVEMISMAVHRNLLRLRGFCMTPTERLLVYPYMANGSVASCLRERPPSQLPLAWSIRQQIALGSARGLSYLHDHCDPKIIHRDVKAANILLDEEFEAVVGDFGLARLMDYKDTHVTTAVRGTIGHIAPEYLSTGKSSEKTDVFGYGIMLLELITGQRAFDLARLANDDDVMLLDWVKGLLKEKKLEMLVDPDLQSNYTEAEVEQLIQVALLCTQSSPMERPKMSEVVRMLEGDGLAEKWDEWQKVEVLRQEVELSSHPTSDWILDSTDNLHAMELSGPR

SEQ ID NO: 49646 - protein, 467 aa, Arabidopsis thaliana
  peptide (1)..(467): Ceres Seq. ID no. 15221087
MSLTNIMTLQVLDLSNNRLSGSVPDNGSFSLFTPISFANNLDLCGPVTSRPCPGSPPFSPPPPFIPPPIVPTPGGYSATGAIAGGVAAGAALLFAAPALAFAWWRRRKPQEFFFDVPAEEDPEVHLGQLKRFSLRELQVATDSFSNKNILGRGGFGKVYKGRLADGTLVAVKRLKEERTPGGELQFQTEVEMISMAVHRNLLRLRGFCMTPTERLLVYPYMANGSVASCLRERPPSQLPLAWSIRQQIALGSARGLSYLHDHCDPKIIHRDVKAANILLDEEFEAVVGDFGLARLMDYKDTHVTTAVRGTIGHIAPEYLSTGKSSEKTDVFGYGIMLLELITGQRAFDLARLANDDDVMLLDWVKGLLKEKKLEMLVDPDLQSNYTEAEVEQLIQVALLCTQSSPMERPKMSEVVRMLEGDGLAEKWDEWQKVEVLRQEVELSSHPTSDWILDSTDNLHAMELSGPR

SEQ ID NO: 49647 - DNA, 2121 bp, Arabidopsis thaliana; identical to SEQ ID NO: 24365
  misc_feature (1)..(2121): Ceres Seq. ID no. 12601883
  misc_feature (1)..(2121): Ortholog of  Ceres SEQ ID NO 15179194 as cited in SEQ ID NO 0

SEQ ID NO: 49648 - protein, 181 aa, Arabidopsis thaliana; identical to SEQ ID NO: 24366
  peptide (1)..(181): Ceres Seq. ID no. 12601884

SEQ ID NO: 49649 - protein, 177 aa, Arabidopsis thaliana; identical to SEQ ID NO: 24367
  peptide (1)..(177): Ceres Seq. ID no. 12601885

SEQ ID NO: 49650 - protein, 162 aa, Arabidopsis thaliana; identical to SEQ ID NO: 24368
  peptide (1)..(162): Ceres Seq. ID no. 12601886

SEQ ID NO: 49651 - DNA, 1696 bp, Arabidopsis thaliana
  misc_feature (1)..(1696): Ceres Seq. ID no. 12603956
  misc_feature (1)..(1696): Ortholog of  Ceres SEQ ID NO 13596816 as cited in SEQ ID NO 62287
tggtctggaggaaatagtaccagctaagctcgcagctcaaagctcagtgtttaataattgtatagcttttttggtgaacgaagagtcagatcggcgagcctgagatgggttggggttcggtgttgctattactggcggtggctcttctttgtcagagggcaagttcaatcggagctaactggggcacacaggcgtcgcacccacttccaccggacatagttgtgcggatgctaagagagaatggtattcagaaagtaaagctctttgacgccgaatacgacactctcagagctttgggcaaatccggaatcgaagtcatggttggtattcccaatgagatgcttgcgactctcgcctctagcctgaaagctgctgagaaatgggttgctaaaaatgtctctactcacatctccaccgacaacgtcaacatcagatatgtggctgttgggaatgaacctttcttgtctacttataatgggagctatctgagtactactttccctgcgttgaggaacatccaaattgcaattataaaggctggccttcagaaccaagtgaaggtcacttgtcccttgaacgctgatgtctatgacagctccaccacttttccttctggaggggacttcagggccaatatccgtgacctcatgatcactatcgtcaagttcttgagcgaaaatggcggtcctttcactgttaacatctacccttacatcagtctttacaccaaccccgatttcccagttgattacgccttctttgacggcaatgcacagcccctgaacgatggtgggactttttattacaacatgtttgatgcaaattacgacaccctagtccacgcgttggagaagaatgggtttggtaacatgcctatcattattggggaaattggttggcctactgatggggacagtaatgcgaatttggactacgctaagaagttcaaccaaggctttatggctcacatctcaggggggaaagggactccgaggagacctggccctatcgatgcatacctgttcagcttgatagacgaggacgccaagagtgttcagccaggatactttgagcgacactgggggatattcacatttgacggcttaccaaaatatgccttgaacctagggacaacgaacacaggagctctgatccaggccaaaggggtacgctacctagagaggaagtggtgtgtgatgaagccaaatgtgaggttggatgatccgcaggtagctccagccgtgagctacgcgtgtagccttggggactgtactagtcttggggttgggacgtcctgtgctaatcttgacgggaaacaaaacatatcgtatgcattcaacagttattatcagatacaggatcagcttgatacagcttgtaagttcccaaacatatcagaggtgaccaagacagatccatctactggaacttgcagatttccgattatgatagaaccttactacggtggggcagcccgggaacacgggttctttttcccactactgatggtggcagccatcgcagtctctattttttgatggtttcttcttgtcaatttgtaattctgtgtgatggcttgaactatttttttttcttcttgaattctgatttctcttccttacaccaagtgattattagagctgttttctgggaccaaactgaccttaaaacgatgccatattgccatgttcagtag

SEQ ID NO: 49652 - protein, 477 aa, Arabidopsis thaliana; identical to SEQ ID NO: 45752
  peptide (1)..(477): Ceres Seq. ID no. 12603957

SEQ ID NO: 49653 - protein, 436 aa, Arabidopsis thaliana; identical to SEQ ID NO: 45753
  peptide (1)..(436): Ceres Seq. ID no. 12603958

SEQ ID NO: 49654 - protein, 406 aa, Arabidopsis thaliana; identical to SEQ ID NO: 45754
  peptide (1)..(406): Ceres Seq. ID no. 12603959

SEQ ID NO: 49655 - DNA, 760 bp, Arabidopsis thaliana
  misc_feature (1)..(760): Ceres Seq. ID no. 14302976
  misc_feature (1)..(760): Ortholog of  Ceres SEQ ID NO 15179952 as cited in SEQ ID NO 1063
gctcactagtcccccccccccggaaaatctctgaaagtctttttgtttgaagaagatgacgcatgttgaagatgataaggaattcaaggagaaacctttggttcaggttctgagcgacgacgacagtgaagtgaaggaagccaaagacggaggaggtgaagaagttaccggcggcgacggtgaaggagaggctaatgtagaagaggaagacgacgaagcagaaaatgaagacgatgatgatgatgatgatgatgatgacgacgacgaggacgaggacgatgaagaaggggaggaggatcttgggacagagtacctagtgaggccggttggtgaggttgaagatgaggatgatgcaagtgattttgaccctgaggagaatggcttggatgaagaagaaggtgatgaagagattgaagaagatgatgttgatgaggacatcagcttgagtgctggcaaatctgagcctctgtccaagaggaagagggttgctaaggaccacagtgagcaaggagatgtcactggtgataacattaggccttctaaacggtagttcttctaacttcgaactgatctcaatccaagaagaaagtcagaaattgattcgaattctcagtattttgaatcattcgttgggttgatatagtttttaatctaatggtagtagtgttgcttagagcttaatggattgttgtttcttctttatgttccttgagactgctttcaaacaagtttaagtattcaacgcttttcttttcaaggg

SEQ ID NO: 49656 - protein, 164 aa, Arabidopsis thaliana
  peptide (1)..(164): Ceres Seq. ID no. 14302977
MTHVEDDKEFKEKPLVQVLSDDDSEVKEAKDGGGEEVTGGDGEGEANVEEEDDEAENEDDDDDDDDDDDDEDEDDEEGEEDLGTEYLVRPVGEVEDEDDASDFDPEENGLDEEEGDEEIEEDDVDEDISLSAGKSEPLSKRKRVAKDHSEQGDVTGDNIRPSKR

SEQ ID NO: 49657 - DNA, 1239 bp, Arabidopsis thaliana
  misc_feature (1)..(1239): Ceres Seq. ID no. 14313001
  misc_feature (1)..(1239): Ortholog of  Ceres SEQ ID NO 15175425 as cited in SEQ ID NO 0
aagcaaaacaatcggagaaagttgatggaggagatgttcgttttgtgaacgcttcaatggcataaatttccggccatcacatttcttctactttctctttctctctcccttgttgttgttctctagaattcgattcatcgttgttaacgtcgtccattcttcttctttgatcccttctttgatctctcacatttccgattccaatttagggtttcctctcttttcacatttctagggtttttcttgttccctttgtaccggagatggtgaattgaaaggaaaaataaaacgcttttgagagcttatatttgaggttgtttcctcaagttttgtagatctgaggttgctatttttgaattagagattctttttttttttcaaaattttgtttgttgtgatcatacatagacgtacgtagctccatttctggtggagaaggaagaagaagagaaatgagcgcttcgaggttcataaagtgtgtcaccgttggcgacggagctgttggtaaaacctgtttgctgatttcttacaccagcaacacttttcctacggattatgtaccgactgttttcgataactttagcgcaaatgtggttgttaatggagccactgtgaatcttgggctatgggataccgcagggcaggaggattataacagattaagacctttgagttaccgcggtgctgatgttttcatcttagcattctctcttatcagtaaggctagttatgagaatgtctccaagaagtggatcccagagctgaagcattatgcccctggtgtccctatagttcttgttggaaccaaactagatcttcgggatgacaaacagttcttcattgaccaccctggcgctgtaccaattactactgctcagggagaggaactgaagaaactaattggagctcccgcatacatcgagtgcagttcaaaaacacaagagaacgtgaaaggagtatttgatgcagcgatccgagtggttcttcaacctccaaagcagaagaaaaagaaaagcaaagcacaaaaagcctgctccattttgtaatttctctacgcttctcttacgtatctctctctgtctctctgtctcttccactcttctagtgaaggcttaagaagaaaacacattgggcttaaaaattgttccagagttcgttgtgataagctctcttaatccttaaaaaaacgattatttctgtttattgatgaatagtttccagctttagctgagacctaac

SEQ ID NO: 49658 - protein, 197 aa, Arabidopsis thaliana; identical to SEQ ID NO: 22405
  peptide (1)..(197): Ceres Seq. ID no. 14313002

SEQ ID NO: 49659 - DNA, 1663 bp, Arabidopsis thaliana; identical to SEQ ID NO: 30264
  misc_feature (1)..(1663): Ceres Seq. ID no. 13591657
  misc_feature (1)..(1663): Ortholog of  Ceres SEQ ID NO 15179007 as cited in SEQ ID NO 1038
  misc_feature (1)..(1663): Ortholog of  Ceres SEQ ID NO 15226449 as cited in SEQ ID NO 58879
  misc_feature (1)..(1663): Ortholog of  Ceres SEQ ID NO 13597146 as cited in SEQ ID NO 63311

SEQ ID NO: 49660 - protein, 476 aa, Arabidopsis thaliana; identical to SEQ ID NO: 30265
  peptide (1)..(476): Ceres Seq. ID no. 13591658

SEQ ID NO: 49661 - protein, 391 aa, Arabidopsis thaliana; identical to SEQ ID NO: 30266
  peptide (1)..(391): Ceres Seq. ID no. 13591659

SEQ ID NO: 49662 - protein, 327 aa, Arabidopsis thaliana; identical to SEQ ID NO: 30267
  peptide (1)..(327): Ceres Seq. ID no. 13591660

SEQ ID NO: 49663 - DNA, 1895 bp, Arabidopsis thaliana
  misc_feature (1)..(1895): Ceres Seq. ID no. 12592233
  misc_feature (1)..(1895): Ortholog of  Ceres SEQ ID NO 14313803 as cited in SEQ ID NO 54540
  misc_feature (1)..(1895): Ortholog of  Ceres SEQ ID NO 15172124 as cited in SEQ ID NO 59754
ataactccaattccaccgctgcgacgagagaggagcacagagatctctcgtttcgtttttcccggaaaatctgaggaaataaaattaagcaaaagtttccatcgatcctctgagaaaaaattcgactctctagtccacgagttttttttttgttcacctctctctttttcgttaatctctctcaaacaacgcctcttcatcatttccttgtaattcactttcttctccgttttttttttttttgaatctctcttcgtccttcgccgtttcgatttcttgtttcctctacttgatgatgaaattttgatcagatctagtgtagaatagttaggatttacccagagagattatgtttatggatcgagagagacggagttctggtcgtaatgggactcctgaatatagcaatggcaaattccgagatgataatggttttggattcttagatcgattggaaaattgccgtgagaagagtcctcctagatcgaagatccttcggatcccgtctccgacctcgtctcctccaccttctagctcttctccgccatttcatggttccaattcgcctgaccgtggatatatcgaacaccgcatctccaagtttgatactctcgccggcgttgccatcaaatacggtgttgaggttgcagatgtgaaaaagatgaataaccttgttactgatcttcaaatgtttgctctcaagtctcttcagattccgttacctgggagacatcctccttctccatgtttatctaatggctccttaaaccatggagagggatgttcatgccacgaaccggaatcaccaaaccatagcgaacaggaagtgtttgactcatttcagtctctgagattgaaatcttcggaaaagaaagtttctccagccatgtactcactgcaaggttattacgggctaaaaccagcagacagaacagtctctgatggaggatgcttcgagatgggaaattacaagacggaaacttctcatcatatcttcaacaacggtgataacggatatctcagacctttcccatccacaaatactcccttaaatcaccacaggaaatctagaagcttggtcaatgcgcttatcgaagaggttaaccaatcacctgataataatactcaagaaccaacatctgataagtttatgagaagacgccaaaaatctgaggccgatttttcatcccggactccagaacttgtgttgaaagaagagaacggtagcagcaatggcggatttttatcaatagctggaaaaggcttagctttgagatcgaaagcgtcaagcagaaccaatctagcagcagaatctgagaacggtaatttcaatccggtatcaatgaacttgatggatgctccagtttcagacagctttagcagtgtaagaaaatcgtcgagtgcatcgagtctacaagatccagatggtaacagcaataatggttcgttgtcgctatggccaacgtcaaagtggagcttgaaaccggatttgcttacacctgcggccattacaagttccatctttgatggattaccaaagcctttaactggtcgaagaaacaaaacggctctggactaaacacaaggtcagtttctggttatttataactgccttattcttttttggggtactatacaaatcaattgtcaaaagaagctatttagcttaatgcggagtaaatacaaaagtaaagagattagaggaaaacaaaattgaaggaaggaagaaagaaaaacttccggaaattgaaatttataaggaagcttctgatgatgtaatgattgggtcttttttgtaagttatattctgtaccattttctgggtgggggttgtatcgacaaaatctgtagcgtagttttattttatttttgatttaatgatacattgtcacaac

SEQ ID NO: 49664 - protein, 409 aa, Arabidopsis thaliana
  peptide (1)..(409): Ceres Seq. ID no. 12592234
MFMDRERRSSGRNGTPEYSNGKFRDDNGFGFLDRLENCREKSPPRSKILRIPSPTSSPPPSSSSPPFHGSNSPDRGYIEHRISKFDTLAGVAIKYGVEVADVKKMNNLVTDLQMFALKSLQIPLPGRHPPSPCLSNGSLNHGEGCSCHEPESPNHSEQEVFDSFQSLRLKSSEKKVSPAMYSLQGYYGLKPADRTVSDGGCFEMGNYKTETSHHIFNNGDNGYLRPFPSTNTPLNHHRKSRSLVNALIEEVNQSPDNNTQEPTSDKFMRRRQKSEADFSSRTPELVLKEENGSSNGGFLSIAGKGLALRSKASSRTNLAAESENGNFNPVSMNLMDAPVSDSFSSVRKSSSASSLQDPDGNSNNGSLSLWPTSKWSLKPDLLTPAAITSSIFDGLPKPLTGRRNKTALD

SEQ ID NO: 49665 - protein, 407 aa, Arabidopsis thaliana
  peptide (1)..(407): Ceres Seq. ID no. 12592235
MDRERRSSGRNGTPEYSNGKFRDDNGFGFLDRLENCREKSPPRSKILRIPSPTSSPPPSSSSPPFHGSNSPDRGYIEHRISKFDTLAGVAIKYGVEVADVKKMNNLVTDLQMFALKSLQIPLPGRHPPSPCLSNGSLNHGEGCSCHEPESPNHSEQEVFDSFQSLRLKSSEKKVSPAMYSLQGYYGLKPADRTVSDGGCFEMGNYKTETSHHIFNNGDNGYLRPFPSTNTPLNHHRKSRSLVNALIEEVNQSPDNNTQEPTSDKFMRRRQKSEADFSSRTPELVLKEENGSSNGGFLSIAGKGLALRSKASSRTNLAAESENGNFNPVSMNLMDAPVSDSFSSVRKSSSASSLQDPDGNSNNGSLSLWPTSKWSLKPDLLTPAAITSSIFDGLPKPLTGRRNKTALD

SEQ ID NO: 49666 - protein, 305 aa, Arabidopsis thaliana
  peptide (1)..(305): Ceres Seq. ID no. 12592236
MNNLVTDLQMFALKSLQIPLPGRHPPSPCLSNGSLNHGEGCSCHEPESPNHSEQEVFDSFQSLRLKSSEKKVSPAMYSLQGYYGLKPADRTVSDGGCFEMGNYKTETSHHIFNNGDNGYLRPFPSTNTPLNHHRKSRSLVNALIEEVNQSPDNNTQEPTSDKFMRRRQKSEADFSSRTPELVLKEENGSSNGGFLSIAGKGLALRSKASSRTNLAAESENGNFNPVSMNLMDAPVSDSFSSVRKSSSASSLQDPDGNSNNGSLSLWPTSKWSLKPDLLTPAAITSSIFDGLPKPLTGRRNKTALD

SEQ ID NO: 49667 - DNA, 940 bp, Arabidopsis thaliana
  misc_feature (1)..(940): Ceres Seq. ID no. 12591255
  misc_feature (1)..(940): Ortholog of  Ceres SEQ ID NO 14314534 as cited in SEQ ID NO 52434
  misc_feature (1)..(940): Ortholog of  Ceres SEQ ID NO 12619999 as cited in SEQ ID NO 66123
  misc_feature (1)..(940): Ortholog of  Ceres SEQ ID NO 13656436 as cited in SEQ ID NO 69154
aattccctgaaaaaatttcataattcaaagagtgttccttggagagaaaagtttcatcctttcaacagatctgaagagggtcaattgaaattcgttttcacgattcatccgccatttttccaggaaaaaaaacaaaaggtgagatcaaagaggaaaaatggcgcatagggtagaacaggattatgattatttgttcaagatcgtgttgattggtgattctggtgtcgggaaaacaaacatcttgtctagattcacaaggaatgagttttgtttggaatctaagtccactattggtgttgaattcgccaccagaactcttcaggttgaaggaaagactgttaaggcccagatatgggacactgcaggtcaagagcggtacagagctatcacaagtgcttattacagaggagcggtaggtgcacttcttgtctatgacatcactaaaagacaaacctttgacaatgttctgaggtggctacgtgaactaagagaccatgcggattccaacattgtgatcatgatggctgggaacaaagctgatctaaaccacttgagatcagttgcggaggaagatggacagactctagctgagacagaaggtctctctttcttggagacatcagctcttgaagccaccaatgtggagaaagcatttcaaaccgtgttagcagagatttaccacatcatcagcaaaaaagctttggctgctcaagaagcagcggctgctaattctgccattccggggcaaggaacaacgattaacgttgaagacacatctggagctggcaaaagaggttgctgctctacttaattgaaagtttaaactttcgttttctattgcttattcactgtctttttttctcttcaagttttgggtgatgaaatgtaacaacgatgcaagaccatgtagaatatatatctcttcatttactcttgtcgt

SEQ ID NO: 49668 - protein, 217 aa, Arabidopsis thaliana
  peptide (1)..(217): Ceres Seq. ID no. 12591256
MAHRVEQDYDYLFKIVLIGDSGVGKTNILSRFTRNEFCLESKSTIGVEFATRTLQVEGKTVKAQIWDTAGQERYRAITSAYYRGAVGALLVYDITKRQTFDNVLRWLRELRDHADSNIVIMMAGNKADLNHLRSVAEEDGQTLAETEGLSFLETSALEATNVEKAFQTVLAEIYHIISKKALAAQEAAAANSAIPGQGTTINVEDTSGAGKRGCCST

SEQ ID NO: 49669 - DNA, 1730 bp, Arabidopsis thaliana
  misc_feature (1)..(1730): Ceres Seq. ID no. 12592241
  misc_feature (1)..(1730): Ortholog of  Ceres SEQ ID NO 14310736 as cited in SEQ ID NO 52901
  misc_feature (1)..(1730): Ortholog of  Ceres SEQ ID NO 13594345 as cited in SEQ ID NO 58043
  misc_feature (1)..(1730): Ortholog of  Ceres SEQ ID NO 14308594 as cited in SEQ ID NO 60384
  misc_feature (1)..(1730): Ortholog of  Ceres SEQ ID NO 13597678 as cited in SEQ ID NO 65375
  misc_feature (1)..(1730): Ortholog of  Ceres SEQ ID NO 13662880 as cited in SEQ ID NO 65422
  misc_feature (1)..(1730): Ortholog of  Ceres SEQ ID NO 12779098 as cited in SEQ ID NO 67698
  misc_feature (1)..(1730): Ortholog of  Ceres SEQ ID NO 13596180 as cited in SEQ ID NO 67941
  misc_feature (1)..(1730): Ortholog of  Ceres SEQ ID NO 13591190 as cited in SEQ ID NO 68044
  misc_feature (1)..(1730): Ortholog of  Ceres SEQ ID NO 13595961 as cited in SEQ ID NO 68223
atccaaaactataccaagaggttccaaagtatcactctctcttcttccactatcaattatgggacgatacactcaagttgagtgactcaacgttgcggaatccatcatcatcatcatcgtcatcgtcaaaaggatggaacaacatggcggttctagctcacagaaacctcacgcaatgtgcataccttatccagcacaaggccacatcaacccaatgctgaaactagccaagctcctccacgctagaggcttccacgtcactttcgtcaacaccgactacaaccaccgccgtatcctccaatcacgtggccctcacgctctcaacggtctcccctcgtttcgcttcgagactatccccgacggtcttccttggacagacgtcgacgctaagcaagacatgctcaagcttattgactccacaataaacaactgtttagctccattcaaagacctcatcctccggttaaactccggttctgatataccaccggttagctgtatcatctccgacgcttcaatgagcttcacaattgacgcagcggaggagcttaaaattccggtagttctcctctggaccaacagtgctactgctttaatcttgtatctccattaccaaaaactcatcgagaaagagataattcccctcaaagattcgagtgacttgaagaagcatttagagacggagattgattggataccgtcgatgaagaagattaagcttaaggattttccagatttcgtcaccacgacgaatcctcaagatccgatgattagtttcatccttcatgtaaccggaagaatcaaaagagcttctgcgatcttcatcaacactttcgaaaaactcgagcataacgttctcttatctctgcgatctcttctccctcagatctactccgttggaccgttccagattctggagaatcgcgaaatcgataagaacagcgaaatcagaaagctaggattgaatctctgggaagaagagacggagtctttggattggctagatactaaagctgagaaagctgtgatttacgtcaacttcgggagtctaacggttttgactagtgagcagatcttagagttcgcttggggtttagcgaggagcgggaaagagtttctctgggtggtgagatctggtatggtcgacggagatgattcgattcttccggcggagtttttatcggagacgaagaatcgaggaatgttaattaaaggatggtgttctcaggagaaggtactttcgcatccggcgattggaggatttttgactcactgtggatggaattcgacgttggagagtttgtacgccggtgttccgatgatctgttggccattttttgctgatcagttgacgaatcgaaagttctgttgcgaggattgggggattgggatggagatcggcgaggaggtgaagagggagagagtggagacggtggttaaagagctcatggacggagagaagggaaagaggttaagagagaaggtggtggagtggcggcgcttggcggaagaagcttcggcgccaccgttgggatcatcgtacgtgaattttgaaacggtggttaataaagtccttacatgtcacacgattagatcgacctaattgggctttccgtatccaaataggcccattagaaaaggcctgtttgtttccactatcatttgggctggctttaatgacaattttaaaagatgtacttacaagttgcaataatctatagtgttcttct

SEQ ID NO: 49670 - protein, 489 aa, Arabidopsis thaliana
  peptide (1)..(489): Ceres Seq. ID no. 12592242
MEQHGGSSSQKPHAMCIPYPAQGHINPMLKLAKLLHARGFHVTFVNTDYNHRRILQSRGPHALNGLPSFRFETIPDGLPWTDVDAKQDMLKLIDSTINNCLAPFKDLILRLNSGSDIPPVSCIISDASMSFTIDAAEELKIPVVLLWTNSATALILYLHYQKLIEKEIIPLKDSSDLKKHLETEIDWIPSMKKIKLKDFPDFVTTTNPQDPMISFILHVTGRIKRASAIFINTFEKLEHNVLLSLRSLLPQIYSVGPFQILENREIDKNSEIRKLGLNLWEEETESLDWLDTKAEKAVIYVNFGSLTVLTSEQILEFAWGLARSGKEFLWVVRSGMVDGDDSILPAEFLSETKNRGMLIKGWCSQEKVLSHPAIGGFLTHCGWNSTLESLYAGVPMICWPFFADQLTNRKFCCEDWGIGMEIGEEVKRERVETVVKELMDGEKGKRLREKVVEWRRLAEEASAPPLGSSYVNFETVVNKVLTCHTIRST

SEQ ID NO: 49671 - protein, 475 aa, Arabidopsis thaliana
  peptide (1)..(475): Ceres Seq. ID no. 12592243
MCIPYPAQGHINPMLKLAKLLHARGFHVTFVNTDYNHRRILQSRGPHALNGLPSFRFETIPDGLPWTDVDAKQDMLKLIDSTINNCLAPFKDLILRLNSGSDIPPVSCIISDASMSFTIDAAEELKIPVVLLWTNSATALILYLHYQKLIEKEIIPLKDSSDLKKHLETEIDWIPSMKKIKLKDFPDFVTTTNPQDPMISFILHVTGRIKRASAIFINTFEKLEHNVLLSLRSLLPQIYSVGPFQILENREIDKNSEIRKLGLNLWEEETESLDWLDTKAEKAVIYVNFGSLTVLTSEQILEFAWGLARSGKEFLWVVRSGMVDGDDSILPAEFLSETKNRGMLIKGWCSQEKVLSHPAIGGFLTHCGWNSTLESLYAGVPMICWPFFADQLTNRKFCCEDWGIGMEIGEEVKRERVETVVKELMDGEKGKRLREKVVEWRRLAEEASAPPLGSSYVNFETVVNKVLTCHTIRST

SEQ ID NO: 49672 - protein, 462 aa, Arabidopsis thaliana
  peptide (1)..(462): Ceres Seq. ID no. 12592244
MLKLAKLLHARGFHVTFVNTDYNHRRILQSRGPHALNGLPSFRFETIPDGLPWTDVDAKQDMLKLIDSTINNCLAPFKDLILRLNSGSDIPPVSCIISDASMSFTIDAAEELKIPVVLLWTNSATALILYLHYQKLIEKEIIPLKDSSDLKKHLETEIDWIPSMKKIKLKDFPDFVTTTNPQDPMISFILHVTGRIKRASAIFINTFEKLEHNVLLSLRSLLPQIYSVGPFQILENREIDKNSEIRKLGLNLWEEETESLDWLDTKAEKAVIYVNFGSLTVLTSEQILEFAWGLARSGKEFLWVVRSGMVDGDDSILPAEFLSETKNRGMLIKGWCSQEKVLSHPAIGGFLTHCGWNSTLESLYAGVPMICWPFFADQLTNRKFCCEDWGIGMEIGEEVKRERVETVVKELMDGEKGKRLREKVVEWRRLAEEASAPPLGSSYVNFETVVNKVLTCHTIRST

SEQ ID NO: 49673 - DNA, 738 bp, Arabidopsis thaliana; identical to SEQ ID NO: 37407
  misc_feature (1)..(738): Ceres Seq. ID no. 13592500
  misc_feature (1)..(738): Ortholog of  Ceres SEQ ID NO 12557607 as cited in SEQ ID NO 8
  misc_feature (1)..(738): Ortholog of  Ceres SEQ ID NO 12611808 as cited in SEQ ID NO 59894
  misc_feature (1)..(738): Ortholog of  Ceres SEQ ID NO 13600599 as cited in SEQ ID NO 0

SEQ ID NO: 49674 - protein, 171 aa, Arabidopsis thaliana; identical to SEQ ID NO: 37408
  peptide (1)..(171): Ceres Seq. ID no. 13592501

SEQ ID NO: 49675 - protein, 168 aa, Arabidopsis thaliana; identical to SEQ ID NO: 37409
  peptide (1)..(168): Ceres Seq. ID no. 13592502

SEQ ID NO: 49676 - protein, 130 aa, Arabidopsis thaliana; identical to SEQ ID NO: 37410
  peptide (1)..(130): Ceres Seq. ID no. 13592503

SEQ ID NO: 49677 - DNA, 1172 bp, Arabidopsis thaliana
  misc_feature (1)..(1172): Ceres Seq. ID no. 13648445
  misc_feature (1)..(1172): Ortholog of  Ceres SEQ ID NO 15177071 as cited in SEQ ID NO 54383
agagagctcactagtccccccccccccccccacagagtttcggctcctccgttgtgtttcaggacgacgcaaaggggaaaaaaaattgaattctttctctccaagcgaaactagggtttcgaaagtctctgtctcatcaaagcttcgaaaagaaagtgattgcattaagagaaacattgggataaaagatgagctttactcaggctaattgttttcgaccatcctactatcctgcaaggataacacgaccaaattgcatctccagtgtacctattaggtcttcagtacgctttgatcacttcccgcgtacctcgtttactcttcgagctactgctgcagtgtctactcagttttcgcctcttcttgatcatcgccgtcgtttacctactgggaaatcgaaacaaagttctgctgtgtgcttatttggtgggaaagataaacctgatggtagtgatgagatatcgccatggaaagcaatagagaaagctatggggaagaaatcggttgaagatatgttgcgagagcagatacagaagaaagacttttatgatactgacagtggcggcaacatgcctccacgtggaggaggcagtggtggcggtggtggaaatggtgaggagcgtcctgaagggtcaggaggagaagatggtggtcttgctgggatcgcagatgaaactttgcaagtggttttggcgaccttaggcttcatctttttgtacacatacattatcactggggaggaattggtcaagcttgcaagggattacattaggtttcttatgggaagacctaagactgttcgattgacccgagccatggatagttggaacggattcttggagaagatgtcgaggcaaagagtgtatgatgagtattggctagaaaaggcgatcatcaacacaccaacctggtatgatagccctgagaagtacagacgtgttatcaaggcttatgttgattcaaattctgatgaagcttatgtggaatcaaattctgatgaggtatcttactaggttaggaacaggaagagatccataataacaattgagttttttttcttagtgtttgaaattaagaatcagtttctttgaattagatttatgttcgtacatttgtatggaattggtttatttatacacgatgaacattctcgagggggggcccggtcccaa

SEQ ID NO: 49678 - protein, 274 aa, Arabidopsis thaliana
  peptide (1)..(274): Ceres Seq. ID no. 13648446
MSFTQANCFRPSYYPARITRPNCISSVPIRSSVRFDHFPRTSFTLRATAAVSTQFSPLLDHRRRLPTGKSKQSSAVCLFGGKDKPDGSDEISPWKAIEKAMGKKSVEDMLREQIQKKDFYDTDSGGNMPPRGGGSGGGGGNGEERPEGSGGEDGGLAGIADETLQVVLATLGFIFLYTYIITGEELVKLARDYIRFLMGRPKTVRLTRAMDSWNGFLEKMSRQRVYDEYWLEKAIINTPTWYDSPEKYRRVIKAYVDSNSDEAYVESNSDEVSY

SEQ ID NO: 49679 - protein, 174 aa, Arabidopsis thaliana
  peptide (1)..(174): Ceres Seq. ID no. 13648447
MGKKSVEDMLREQIQKKDFYDTDSGGNMPPRGGGSGGGGGNGEERPEGSGGEDGGLAGIADETLQVVLATLGFIFLYTYIITGEELVKLARDYIRFLMGRPKTVRLTRAMDSWNGFLEKMSRQRVYDEYWLEKAIINTPTWYDSPEKYRRVIKAYVDSNSDEAYVESNSDEVSY

SEQ ID NO: 49680 - protein, 166 aa, Arabidopsis thaliana
  peptide (1)..(166): Ceres Seq. ID no. 13648448
MLREQIQKKDFYDTDSGGNMPPRGGGSGGGGGNGEERPEGSGGEDGGLAGIADETLQVVLATLGFIFLYTYIITGEELVKLARDYIRFLMGRPKTVRLTRAMDSWNGFLEKMSRQRVYDEYWLEKAIINTPTWYDSPEKYRRVIKAYVDSNSDEAYVESNSDEVSY

SEQ ID NO: 49681 - DNA, 1061 bp, Arabidopsis thaliana
  misc_feature (1)..(1061): Ceres Seq. ID no. 13588596
  misc_feature (1)..(1061): Ortholog of  Ceres SEQ ID NO 13582388 as cited in SEQ ID NO 56812
gctcgatcatttttgcagtctctctcccaaccaatcccattctgctcgactctcattgttgcagaggtttaggaagaaaggaatggttcgatcgtgactttgaattgggatattgtgtgtaaaatgtgggtgcctacattgagctcaagctcatgttcaagtgatgagagggatgagagcagtggagaagccgcgcttacgccggtttatctcaatgtctatgatctaacgcctgtcaacaattacctttattggtttgggattggcattttccattctggtattgaggctcataatttggaatattgctatggagctcacgagtatccaacaagtggggtatatgaggtggaacctaggaactgtccagggttcatctttagacggtcggttttactgggaactaccagcatgtcccgttcagatttccgctcatacatggagaagctttcaagaaagtaccatggtgacacttaccatttgattgccaagaactgtaaccatttcactgaagaagtatgcttgcagctaacaggaaagcctattccaggatggattaatcggctggcccgagtaggttccttctgtaattgtcttctgccagaaagcattcagcttacagctgttagtgctcttcccgaacgccttgaattctccgatgaggatgaatcaaactcagaggcatcttctgtgtcagatgaagaaggatcagagcagcatctcataaatgtagcagacagagagattgtgtatctacaaaacaaaccagtgcgacttaccagagaggagatcccctgagaaaccaaccagcgacgacaatgtacttcctcctgaatcaacccaaccaatcatcaaaacttgcagagtgtggtgtgcccatggaagctgaaagggagtaagttatatatctcgttttgtcaccttagtgctgcgttggttctgtcggaaattcgatttggtattcttctcatcattttaggaatgtaaaaacggattcccggattcattttaatcagacaaccctttggcagtaaaaatctaaagatttctccatattttcc

SEQ ID NO: 49682 - protein, 224 aa, Arabidopsis thaliana
  peptide (1)..(224): Ceres Seq. ID no. 13588597
MWVPTLSSSSCSSDERDESSGEAALTPVYLNVYDLTPVNNYLYWFGIGIFHSGIEAHNLEYCYGAHEYPTSGVYEVEPRNCPGFIFRRSVLLGTTSMSRSDFRSYMEKLSRKYHGDTYHLIAKNCNHFTEEVCLQLTGKPIPGWINRLARVGSFCNCLLPESIQLTAVSALPERLEFSDEDESNSEASSVSDEEGSEQHLINVADREIVYLQNKPVRLTREEIP

SEQ ID NO: 49683 - protein, 128 aa, Arabidopsis thaliana
  peptide (1)..(128): Ceres Seq. ID no. 13588598
MSRSDFRSYMEKLSRKYHGDTYHLIAKNCNHFTEEVCLQLTGKPIPGWINRLARVGSFCNCLLPESIQLTAVSALPERLEFSDEDESNSEASSVSDEEGSEQHLINVADREIVYLQNKPVRLTREEIP

SEQ ID NO: 49684 - protein, 119 aa, Arabidopsis thaliana
  peptide (1)..(119): Ceres Seq. ID no. 13588599
MEKLSRKYHGDTYHLIAKNCNHFTEEVCLQLTGKPIPGWINRLARVGSFCNCLLPESIQLTAVSALPERLEFSDEDESNSEASSVSDEEGSEQHLINVADREIVYLQNKPVRLTREEIP

SEQ ID NO: 49685 - DNA, 1504 bp, Arabidopsis thaliana
  misc_feature (1)..(1504): Ceres Seq. ID no. 12591261
  misc_feature (1)..(1504): Ortholog of  Ceres SEQ ID NO 13595870 as cited in SEQ ID NO 62101
  misc_feature (1)..(1504): Ortholog of  Ceres SEQ ID NO 13590241 as cited in SEQ ID NO 63878
  misc_feature (1)..(1504): Ortholog of  Ceres SEQ ID NO 13657939 as cited in SEQ ID NO 66349
  misc_feature (1)..(1504): Ortholog of  Ceres SEQ ID NO 13660597 as cited in SEQ ID NO 67655
aaacccattgctcaagaaaacttttcagacagatttgtttcgagaaaagatcgcttgcttggcttttcaggataatctgagatctatctgtagaagaagcagatacagaattcagaaacgatgaccgacgtcgatgaatccgttagacgccgtacagccgccgtttccgagtaccggaaaaagctcctccaacataaggaactcgaatcccgtgttcgaacagctagggagaacttaagaggagctaaaaaggaattcaacaaaaccgaggatgatctcaagtctcttcaaagtgttgggcagattattggagaagtgcttcgacccctggataatgaaagattgattgtgaaagcgagcagtggtccacgttatgtggtgggttgccgaagcaaagtggataaggaaaagctaacctccggaactcgagttgttctcgatatgacaacactaacaattatgcgagcccttccccgagaagttgatcctgttgtttataacatgcttcatgaagaccctggcaacattagctactccgctgtcggagggttaggtgatcagatcagagaactcagggaatctattgagctccctctcatgaatcctgagcttttcctcagagtagggatcaaacctccaaagggtgtccttctgtatggacctccaggtactggaaaaactctactagccagggctattgccagcaacatcgatgctaacttcttgaaggttgtatccagtgcaatcatagacaagtacattggagaaagtgctaggctgattcgggagatgtttaactatgcccgtgaacatcagccttgtatcatattcatggatgaaatcgatgctattggtgggcgtcgttttagtgagggaactagtgctgatcgtgaaattcaaagaacgcttatggagttactcaaccagcttgatgggtttgacaacctcggaaaggtgaaaatgataatggccacaaacaggcctgatgtgcttgatcctgcgcttctccgtccgggaaggttagatagaaagattgagatccctttgccaaacgagcagtcaagaatggatattcttaagatccatgcagctggtatcgccaaacatggtgaaatcgattacgaggctattgtcaaacttgcagagggattcaatggtgctgatctgcgtaacatatgcacggaagctggaatgtttgcaatccgagcagagcgggattatgtgatccatgaagatttcatgaaggcggtgagaaagctgagtgaggccaagaaactggagtccagttcgcactataacgctgattttggaaaagagtgagagagtacacactctttcttgtgctttagggatgaagaaaggacattgcaatgactgtctcgtattctttattagcaatgtgaaacttgtttttttaactctttcaaaagcaaagcttgttgtgaagtgtgtgcttagttactacgtttcagtaatttagtgcttcaaacaagcatttacctct

SEQ ID NO: 49686 - protein, 399 aa, Arabidopsis thaliana
  peptide (1)..(399): Ceres Seq. ID no. 12591262
MTDVDESVRRRTAAVSEYRKKLLQHKELESRVRTARENLRGAKKEFNKTEDDLKSLQSVGQIIGEVLRPLDNERLIVKASSGPRYVVGCRSKVDKEKLTSGTRVVLDMTTLTIMRALPREVDPVVYNMLHEDPGNISYSAVGGLGDQIRELRESIELPLMNPELFLRVGIKPPKGVLLYGPPGTGKTLLARAIASNIDANFLKVVSSAIIDKYIGESARLIREMFNYAREHQPCIIFMDEIDAIGGRRFSEGTSADREIQRTLMELLNQLDGFDNLGKVKMIMATNRPDVLDPALLRPGRLDRKIEIPLPNEQSRMDILKIHAAGIAKHGEIDYEAIVKLAEGFNGADLRNICTEAGMFAIRAERDYVIHEDFMKAVRKLSEAKKLESSSHYNADFGKE

SEQ ID NO: 49687 - protein, 292 aa, Arabidopsis thaliana
  peptide (1)..(292): Ceres Seq. ID no. 12591263
MTTLTIMRALPREVDPVVYNMLHEDPGNISYSAVGGLGDQIRELRESIELPLMNPELFLRVGIKPPKGVLLYGPPGTGKTLLARAIASNIDANFLKVVSSAIIDKYIGESARLIREMFNYAREHQPCIIFMDEIDAIGGRRFSEGTSADREIQRTLMELLNQLDGFDNLGKVKMIMATNRPDVLDPALLRPGRLDRKIEIPLPNEQSRMDILKIHAAGIAKHGEIDYEAIVKLAEGFNGADLRNICTEAGMFAIRAERDYVIHEDFMKAVRKLSEAKKLESSSHYNADFGKE

SEQ ID NO: 49688 - protein, 286 aa, Arabidopsis thaliana
  peptide (1)..(286): Ceres Seq. ID no. 12591264
MRALPREVDPVVYNMLHEDPGNISYSAVGGLGDQIRELRESIELPLMNPELFLRVGIKPPKGVLLYGPPGTGKTLLARAIASNIDANFLKVVSSAIIDKYIGESARLIREMFNYAREHQPCIIFMDEIDAIGGRRFSEGTSADREIQRTLMELLNQLDGFDNLGKVKMIMATNRPDVLDPALLRPGRLDRKIEIPLPNEQSRMDILKIHAAGIAKHGEIDYEAIVKLAEGFNGADLRNICTEAGMFAIRAERDYVIHEDFMKAVRKLSEAKKLESSSHYNADFGKE

SEQ ID NO: 49689 - DNA, 1180 bp, Arabidopsis thaliana
  misc_feature (1)..(1180): Ceres Seq. ID no. 13648107
  misc_feature (1)..(1180): Ortholog of  Ceres SEQ ID NO 13596131 as cited in SEQ ID NO 67838
aacaaggtgatgacgtggtttttacatttttcaaaaatctcttttgcccagagagagaagaagagacagatcggaaggagttgagtaagaatggcgaagctggtgctcttcaccgccgtaattatcgctattttctcccatggatcctccgtcgatgacaaatgcgccgcttgcaacgccgtcgctgaggaattagagttacagcttttaaaggaaaagccacgaaaccatcttgatatgagaaaccggctcaattctaaaggccagcgtgaaggaaaggtcattgattacagaataagcgacctgagggtggttgatttgttggacggtctgtgtgatagaatgcaggactatactctacaaaaggtggaacctaagaatagacaatgggtgaaagtaggaaattttgacaatctaacaagtaatgtgttctttcctttccttttaaaatttgcgctccgtgacatatttgcaattgttcatcacatagctgcttcaatacttacgttatttgataagtacgcttaggtgcatcgtttaatgagtcaatggaagctgtctacttgatcacactgtcaccgtgtctgctgtccgctttatctgtttataacttctgttgagcaaatgagtaactgttagagagctttcatgatgctgaaaattctagaacaagtgcagtgacggttttaaagttctagaataagctgtgaaattctcatctctagttatattagtggtttagagacttgtttgggatttaatgtttcatctgtgtgtgtgttgtcatatagataaacaggaagcgaaagcgcatgcaaatgacatttcaacttattgtggaagattgctggaggaaactgaagatgagctaggtgaggtgataaagaatggctccctaaaagcaggagaagtccgaaaggttctgtgtcaaactttgagtaaccactgccgacaatcaagtgaaacagactcagaggatgaggaggacgacgatgcagatgaattataactcaatccaatgaaaagttcacgtcaaattaagatcccatcttagtagctatgttatagatacatccatccacaactcatatgtaacttaagacacctttcactttttaagttatgtcgaaactcgggtctagattcttatttatattgtggcaattgttcgttttccctc

SEQ ID NO: 49690 - protein, 145 aa, Arabidopsis thaliana
  peptide (1)..(145): Ceres Seq. ID no. 13648108
MAKLVLFTAVIIAIFSHGSSVDDKCAACNAVAEELELQLLKEKPRNHLDMRNRLNSKGQREGKVIDYRISDLRVVDLLDGLCDRMQDYTLQKVEPKNRQWVKVGNFDNLTSNVFFPFLLKFALRDIFAIVHHIAASILTLFDKYA

SEQ ID NO: 49691 - protein, 96 aa, Arabidopsis thaliana
  peptide (1)..(96): Ceres Seq. ID no. 13648109
MRNRLNSKGQREGKVIDYRISDLRVVDLLDGLCDRMQDYTLQKVEPKNRQWVKVGNFDNLTSNVFFPFLLKFALRDIFAIVHHIAASILTLFDKYA

SEQ ID NO: 49692 - protein, 82 aa, Arabidopsis thaliana
  peptide (1)..(82): Ceres Seq. ID no. 13648110
MFHLCVCCHIDKQEAKAHANDISTYCGRLLEETEDELGEVIKNGSLKAGEVRKVLCQTLSNHCRQSSETDSEDEEDDDADEL

SEQ ID NO: 49693 - DNA, 2045 bp, Arabidopsis thaliana; identical to SEQ ID NO: 44129
  misc_feature (1)..(2045): Ceres Seq. ID no. 13504748
  misc_feature (1)..(2045): Ortholog of  Ceres SEQ ID NO 15171040 as cited in SEQ ID NO 55332

SEQ ID NO: 49694 - protein, 578 aa, Arabidopsis thaliana; identical to SEQ ID NO: 44130
  peptide (1)..(578): Ceres Seq. ID no. 13504749

SEQ ID NO: 49695 - protein, 565 aa, Arabidopsis thaliana; identical to SEQ ID NO: 44131
  peptide (1)..(565): Ceres Seq. ID no. 13504750

SEQ ID NO: 49696 - DNA, 1701 bp, Arabidopsis thaliana
  misc_feature (1)..(1701): Ceres Seq. ID no. 13593470
  misc_feature (1)..(1701): Ortholog of  Ceres SEQ ID NO 12617253 as cited in SEQ ID NO 64065
tcggcgataaggaaatatctaaccagaccggcccaaggagcgggcaaaatcagaaagcatttgatcttcaaactcttgggttcttctctgattgaaaatgagcttatcatcgccaaccagtgcttgtagctcgtccagatgttactcctcgggattatcgtttccgattggatttggatcgaatcccatcaatgtgggattggtttgttacccaaaaagatacagtattgctgctcggaagttcgtagtggcttgctcctcctcctcttccgatccacttttggttaaggctgcaaaagggcaagccataagtcgtcctccagcttggatgatgaggcaagcaggaaggtatatggctgtttaccaaaagctcgccaagaaacatccgtccttcagagagagatcagagaacactgatctaatagtggaaatctctttgcagccttggcaagcattcagaccagacggtgtcatcattttctctgacatcctcacccctttacctgcattcggtgtcccttttgatattgaagaggtaaaaggtcctgtaatccaatctcctatccgaactgaagaagatatgaagagattacatcccattgatttcgagaaactacagtttgttggagattctctcaagattttgagacgagaggttggggaacatgctgcggtgttgggtttcgttggagcgccttggacaattgcaacatatattgttgaaggaggaacaactcgaacatatacagtcataaagaatatgtgccacactgcaccagatgtattgagagctctattatctcatttaaccaaggccattaccgagtatgtggtttaccaagttgagcacggagctcactgcatacaaatattcgattcctggggtggccaactgactccggagatgtgggagcgctggtccaaaccatacattgaagagatcatacatgctgtaaagaaaagatgtccagatacgccgatagttttctacatcaatggaaatggtggccttcttgagcgaatgaaaggaactggagctgatgttattggacttgactggactgtagatatggctgatggaaggaggcgattgggaagcgaggtaagtgtgcagggaaatgttgatccagcttacctattctctccgcttcctgctttgaccgaagaaattgaaagagttgtgaagtgtgctggaccaaaagggcatattctcaatctaggacacggtgtcttggtagggacaccagaggaagccgtggctcatttctttgaaaccgctagaaacttggattaccaaacacttttccaaaatcatgttcctgcagaaaaagctgaacctgaattggttgtctgagaaatggtgactagacaagtgcctacgccgaagaatttgctgtttaagttttgtgaacatatgtctgaatctcttaaacttggtgcaggaatgagagaaaaagttccatgtctgacccttaatcgatgctagagttggtaacttgctatgagatatatgcgaagctgtccagtttttgtttggcttgcttgaggatttccaatcttctggaccaagctctgcttaacgtttaacaatgtattgagttgctcctaggcttcaaatgttgctgcttcttttggagatatgactctggttaaagtttaaccaaacattcatttatctggttaatctcaaacctttgctat

SEQ ID NO: 49697 - protein, 418 aa, Arabidopsis thaliana
  peptide (1)..(418): Ceres Seq. ID no. 13593471
MSLSSPTSACSSSRCYSSGLSFPIGFGSNPINVGLVCYPKRYSIAARKFVVACSSSSSDPLLVKAAKGQAISRPPAWMMRQAGRYMAVYQKLAKKHPSFRERSENTDLIVEISLQPWQAFRPDGVIIFSDILTPLPAFGVPFDIEEVKGPVIQSPIRTEEDMKRLHPIDFEKLQFVGDSLKILRREVGEHAAVLGFVGAPWTIATYIVEGGTTRTYTVIKNMCHTAPDVLRALLSHLTKAITEYVVYQVEHGAHCIQIFDSWGGQLTPEMWERWSKPYIEEIIHAVKKRCPDTPIVFYINGNGGLLERMKGTGADVIGLDWTVDMADGRRRLGSEVSVQGNVDPAYLFSPLPALTEEIERVVKCAGPKGHILNLGHGVLVGTPEEAVAHFFETARNLDYQTLFQNHVPAEKAEPELVV

SEQ ID NO: 49698 - protein, 341 aa, Arabidopsis thaliana
  peptide (1)..(341): Ceres Seq. ID no. 13593472
MMRQAGRYMAVYQKLAKKHPSFRERSENTDLIVEISLQPWQAFRPDGVIIFSDILTPLPAFGVPFDIEEVKGPVIQSPIRTEEDMKRLHPIDFEKLQFVGDSLKILRREVGEHAAVLGFVGAPWTIATYIVEGGTTRTYTVIKNMCHTAPDVLRALLSHLTKAITEYVVYQVEHGAHCIQIFDSWGGQLTPEMWERWSKPYIEEIIHAVKKRCPDTPIVFYINGNGGLLERMKGTGADVIGLDWTVDMADGRRRLGSEVSVQGNVDPAYLFSPLPALTEEIERVVKCAGPKGHILNLGHGVLVGTPEEAVAHFFETARNLDYQTLFQNHVPAEKAEPELVV

SEQ ID NO: 49699 - protein, 340 aa, Arabidopsis thaliana
  peptide (1)..(340): Ceres Seq. ID no. 13593473
MRQAGRYMAVYQKLAKKHPSFRERSENTDLIVEISLQPWQAFRPDGVIIFSDILTPLPAFGVPFDIEEVKGPVIQSPIRTEEDMKRLHPIDFEKLQFVGDSLKILRREVGEHAAVLGFVGAPWTIATYIVEGGTTRTYTVIKNMCHTAPDVLRALLSHLTKAITEYVVYQVEHGAHCIQIFDSWGGQLTPEMWERWSKPYIEEIIHAVKKRCPDTPIVFYINGNGGLLERMKGTGADVIGLDWTVDMADGRRRLGSEVSVQGNVDPAYLFSPLPALTEEIERVVKCAGPKGHILNLGHGVLVGTPEEAVAHFFETARNLDYQTLFQNHVPAEKAEPELVV

SEQ ID NO: 49700 - DNA, 2392 bp, Arabidopsis thaliana
  misc_feature (1)..(2392): Ceres Seq. ID no. 13575487
  misc_feature (1)..(2392): Ortholog of  Ceres SEQ ID NO 13663839 as cited in SEQ ID NO 60834
  misc_feature (1)..(2392): Ortholog of  Ceres SEQ ID NO 14313284 as cited in SEQ ID NO 67146
  misc_feature (1)..(2392): Ortholog of  Ceres SEQ ID NO 14308925 as cited in SEQ ID NO 0
tggcatcartacttctctctgctctcaagataattttgttctctcaatttcattcttaaaccctarttcttcgatttttatccgatctacgamaatggcggacgcagaaacctttgctttccaagctgagatcaaccagttgctctccctcatcatcaataccttttactctaacaaggagatcttccttcgtgaactcatcagtaactcttctgatgctttggacaagattaggtttgagtccttgacagacaagagcaagctcgatggtcagccagagctcttcattcacatcattcccgacaagactaacaacaccttgacgattatcgatagtggtattgggatgaccaaggctgatctggtgaacaaccttggaacaattgcaagatctggaaccaaagaattcatggaggcgttggctgctggagctgatgttagcatgattggacagtttggtgttggtttctactctgcttacttggttgctgacaaggttgttgttactaccaagcacaatgacgatgagcagtacgtgtgggagtctcaggccggtggatctttcaccgtcaccagagacacctctggtgaggctcttggtagaggaactaagatggtcctttacctcaaggaagaccagatggagtacattgaggagcgaaggcttaaggatttggtgaagaagcactctgagttcatcagctacccaatctctctctggattgagaagaccattgagaaggagatctctgatgatgaagaggaggaagagaagaaggatgaggaaggcaaggttgaggaagttgatgaggagaaagaaaaggaggagaagaaaaagaagaagattaaggaggtttctcatgagtgggatttggtgaacaagcagaaaccgatttggatgaggaagccagaggagatcaacaaggaggagtacgctgctttctacaagagtttgagcaatgactgggaagagcatttggctgtgaagcatttctcagttgaaggacagcttgagttcaaagctatcctctttgttcccaagagagctccttttgatctctttgacactaagaagaagcccaacaacatcaagctctatgtccgtcgtgtcttcatcatggacaactgtgaagacatcattcctgagtaccttgggtttgtcaagggtattgttgactctgaagatcttcctctcaacatctcaagagaaacattgcagcagaacaagatcctcaaggtcatccgcaagaaccttgtgaagaagtgtcttgagctcttctttgagattgctgagaacaaggaggactacaacaagttctatgaggctttctctaagaacctgaagctcggtatccatgaggactcccaaaacagaaccaagattgctgagttgctccgttaccactcaaccaagagcggtgatgaattgaccagtctcaaggactacgtgacaaggatgaaggaaggtcagaacgatatcttctatatcactggtgagagcaagaaggctgttgagaactctccattccttgagaagctcaagaagaagggtattgaagttctctacatggttgacgctatcgatgagtatgctattggtcagctcaaggaattcgaaggaaagaagcttgtctctgcaaccaaggaaggtctgaaactggatgagactgaagacgagaagaagaagaaagaagagctcaaggagaagtttgagggactctgcaaagtgatcaaggacgttttgggagacaaggttgagaaggttatcgtctctgaccgtgttgtggactcaccctgctgtcttgtaacaggcgagtatggctggactgcaaacatggagaggatcatgaaagctcaagccttgagagacagcagcatgggtggctacatgtcgagcaagaagacaatggagattaacccagagaactccatcatggatgagctgagaaagagagctgatgcagacaagaacgacaagtctgtgaaggaccttgtacttcttctctttgagaccgctcttctcacttctggtttcagcctcgatgagcccaacactttcgggagcaggattcacaggatgttgaagcttggattgagcattgatgacgatgatgttgttgaagccgatgctgacatgcctccacttgaagatgatgccgatgctgaaggtagcaagatggaggaagttgactaawttatcacacaraagtcgactwaatyattagcggtkttwtaagactmtggttttctttttwtctttttcgttaaaacttmtgttattttggtgatyatcttcacgaattttttctatggtttyatttgttgtgaagatatttcyctgaactcggttttatgacaaagattctattatgcycaagagactgattcttac

SEQ ID NO: 49701 - protein, 730 aa, Arabidopsis thaliana
  peptide (1)..(730): Ceres Seq. ID no. 15222620
  misc_feature (3)..(3): Xaa is any aa, unknown or other
  misc_feature (22)..(22): Xaa is any aa, unknown or other
  misc_feature (31)..(31): Xaa is any aa, unknown or other
GIXTSLCSQDNFVLSISFLNPXSSIFIRSTXMADAETFAFQAEINQLLSLIINTFYSNKEIFLRELISNSSDALDKIRFESLTDKSKLDGQPELFIHIIPDKTNNTLTIIDSGIGMTKADLVNNLGTIARSGTKEFMEALAAGADVSMIGQFGVGFYSAYLVADKVVVTTKHNDDEQYVWESQAGGSFTVTRDTSGEALGRGTKMVLYLKEDQMEYIEERRLKDLVKKHSEFISYPISLWIEKTIEKEISDDEEEEEKKDEEGKVEEVDEEKEKEEKKKKKIKEVSHEWDLVNKQKPIWMRKPEEINKEEYAAFYKSLSNDWEEHLAVKHFSVEGQLEFKAILFVPKRAPFDLFDTKKKPNNIKLYVRRVFIMDNCEDIIPEYLGFVKGIVDSEDLPLNISRETLQQNKILKVIRKNLVKKCLELFFEIAENKEDYNKFYEAFSKNLKLGIHEDSQNRTKIAELLRYHSTKSGDELTSLKDYVTRMKEGQNDIFYITGESKKAVENSPFLEKLKKKGIEVLYMVDAIDEYAIGQLKEFEGKKLVSATKEGLKLDETEDEKKKKEELKEKFEGLCKVIKDVLGDKVEKVIVSDRVVDSPCCLVTGEYGWTANMERIMKAQALRDSSMGGYMSSKKTMEINPENSIMDELRKRADADKNDKSVKDLVLLLFETALLTSGFSLDEPNTFGSRIHRMLKLGLSIDDDDVVEADADMPPLEDDADAEGSKMEEVD

SEQ ID NO: 49702 - protein, 699 aa, Arabidopsis thaliana
  peptide (1)..(699): Ceres Seq. ID no. 15222621
MADAETFAFQAEINQLLSLIINTFYSNKEIFLRELISNSSDALDKIRFESLTDKSKLDGQPELFIHIIPDKTNNTLTIIDSGIGMTKADLVNNLGTIARSGTKEFMEALAAGADVSMIGQFGVGFYSAYLVADKVVVTTKHNDDEQYVWESQAGGSFTVTRDTSGEALGRGTKMVLYLKEDQMEYIEERRLKDLVKKHSEFISYPISLWIEKTIEKEISDDEEEEEKKDEEGKVEEVDEEKEKEEKKKKKIKEVSHEWDLVNKQKPIWMRKPEEINKEEYAAFYKSLSNDWEEHLAVKHFSVEGQLEFKAILFVPKRAPFDLFDTKKKPNNIKLYVRRVFIMDNCEDIIPEYLGFVKGIVDSEDLPLNISRETLQQNKILKVIRKNLVKKCLELFFEIAENKEDYNKFYEAFSKNLKLGIHEDSQNRTKIAELLRYHSTKSGDELTSLKDYVTRMKEGQNDIFYITGESKKAVENSPFLEKLKKKGIEVLYMVDAIDEYAIGQLKEFEGKKLVSATKEGLKLDETEDEKKKKEELKEKFEGLCKVIKDVLGDKVEKVIVSDRVVDSPCCLVTGEYGWTANMERIMKAQALRDSSMGGYMSSKKTMEINPENSIMDELRKRADADKNDKSVKDLVLLLFETALLTSGFSLDEPNTFGSRIHRMLKLGLSIDDDDVVEADADMPPLEDDADAEGSKMEEVD

SEQ ID NO: 49703 - protein, 615 aa, Arabidopsis thaliana
  peptide (1)..(615): Ceres Seq. ID no. 15222622
MTKADLVNNLGTIARSGTKEFMEALAAGADVSMIGQFGVGFYSAYLVADKVVVTTKHNDDEQYVWESQAGGSFTVTRDTSGEALGRGTKMVLYLKEDQMEYIEERRLKDLVKKHSEFISYPISLWIEKTIEKEISDDEEEEEKKDEEGKVEEVDEEKEKEEKKKKKIKEVSHEWDLVNKQKPIWMRKPEEINKEEYAAFYKSLSNDWEEHLAVKHFSVEGQLEFKAILFVPKRAPFDLFDTKKKPNNIKLYVRRVFIMDNCEDIIPEYLGFVKGIVDSEDLPLNISRETLQQNKILKVIRKNLVKKCLELFFEIAENKEDYNKFYEAFSKNLKLGIHEDSQNRTKIAELLRYHSTKSGDELTSLKDYVTRMKEGQNDIFYITGESKKAVENSPFLEKLKKKGIEVLYMVDAIDEYAIGQLKEFEGKKLVSATKEGLKLDETEDEKKKKEELKEKFEGLCKVIKDVLGDKVEKVIVSDRVVDSPCCLVTGEYGWTANMERIMKAQALRDSSMGGYMSSKKTMEINPENSIMDELRKRADADKNDKSVKDLVLLLFETALLTSGFSLDEPNTFGSRIHRMLKLGLSIDDDDVVEADADMPPLEDDADAEGSKMEEVD

SEQ ID NO: 49704 - DNA, 1288 bp, Arabidopsis thaliana; identical to SEQ ID NO: 46902
  misc_feature (1)..(1288): Ceres Seq. ID no. 13646915
  misc_feature (1)..(1288): Ortholog of  Ceres SEQ ID NO 13596581 as cited in SEQ ID NO 62420
  misc_feature (1)..(1288): Ortholog of  Ceres SEQ ID NO 13591273 as cited in SEQ ID NO 65904
  misc_feature (1)..(1288): Ortholog of  Ceres SEQ ID NO 13623086 as cited in SEQ ID NO 0

SEQ ID NO: 49705 - protein, 394 aa, Arabidopsis thaliana; identical to SEQ ID NO: 46903
  peptide (1)..(394): Ceres Seq. ID no. 13646916

SEQ ID NO: 49706 - protein, 386 aa, Arabidopsis thaliana; identical to SEQ ID NO: 46904
  peptide (1)..(386): Ceres Seq. ID no. 13646917

SEQ ID NO: 49707 - protein, 253 aa, Arabidopsis thaliana; identical to SEQ ID NO: 46905
  peptide (1)..(253): Ceres Seq. ID no. 13646918

SEQ ID NO: 49708 - DNA, 2532 bp, Arabidopsis thaliana
  misc_feature (1)..(2532): Ceres Seq. ID no. 12592245
  misc_feature (1)..(2532): Ortholog of  Ceres SEQ ID NO 13532807 as cited in SEQ ID NO 53012
  misc_feature (1)..(2532): Ortholog of  Ceres SEQ ID NO 13663060 as cited in SEQ ID NO 60964
  misc_feature (1)..(2532): Ortholog of  Ceres SEQ ID NO 13500573 as cited in SEQ ID NO 67431
  misc_feature (1)..(2532): Ortholog of  Ceres SEQ ID NO 13656501 as cited in SEQ ID NO 69206
ctacaaaagtgagcaaataaacttgcctcttcgtctgcttcgtgagatttcagatcctgtaaagaaattttattagctcaaaagaatcatttttgggtttctgaaccataaaagcttctctcgactttcaaaaactctctcctttttccttttagccatttcaagcagagagattgatcgaagaagataaaaacctcgtctttcttcaatctcagtgattctcaaattacccatcgcttccttcttttgatctctttgatttcacttcaaaaagcaaagaaatctcgattaggttattccttgtttcaccccataaatttgcctccttttttttggtctcgggaactactctgatttgtttcaatcgattctggatttcgggatttggatatagagctctctgtttttgacattgcctttggaactaaaattctcagtctttgcatttttttgattcaaaagctcactaagtttgggtttcagaagctattacatttggtcttcgtaagcgtcctttgaatgccctgtagctgaagatgcagcctgatcaccgcaaaaagtcatcagttgaggtagatttcttcacggaatatggtgaaggaagcagatacagaatagaggaagtgattggtaaaggaagttatggagttgtctgttctgcttacgatacacataccggagagaaagttgcgattaagaaaatcaatgatatctttgagcatgtttcggatgcaactcgcattcttcgtgagatcaaacttcttagactcttacgccatcctgacattgttgagatcaaacacatcttgttgccgccttcaagaagagagtttcgagacatttacgtggttttcgagcttatggaatctgatttgcatcaggttattaaggcaaatgatgatttgactcctgagcattatcagtttttcctctatcagcttcttcgtggcctcaagtatatacacacagctaatgtctttcatcgggatcttaaacccaaaaacatattggcaaatgctgattgcaaactcaagatctgtgattttggacttgcaagagtcgcattcaatgatacaccgactgcgatattctggactgattatgtagctactcgatggtacagggctccagaactatgtggatcttttttctcaaagtatacaccggcaatagatatatggagcatcgggtgcatttttgcagaactcttaacagggaaacctcttttccccgggaaaaatgtggtccatcaattggatctgatgacggatatgctgggaactccatctgctgaagccattggaagggttaggaacgagaaagctcgaagatacttgagcagcatgaggaagaagaagcctattcctttttcacataagttcccacatactgatcctcttgctcttcgtcttctagaaaagatgttgtcttttgaacccaaggaccggcctacagctgaagaggcgcttgcagatgtgtacttcaagggtttagctaaggttgaaagagagccttctgctcaacctgtcacaaagttggaatttgagtttgaaaggcggaggatcacaaaagaagacgtccgagagctcatatacagagagtctctggagtaccacccaaagatgctgaaagaatacttggatggatcagagccaactaactttatgtacccgagtgcggtggaacatttcaagaaacaatttgcttacctcgaggaacactacaagaatggtacttctcataatccccctgagaggcaacagcatgcatcattaccaagggcttgcgtattgtactctgataacaatcatccggtggcacaacagagttcagctgaagtcactgatggactctccaagtgtagcattagagacgagagacctcggggtgcagacaggaatgcccagatgccaatgtcgagaattcctatcaacgtccctcaaacaatccaaggtgctgcagtagctaggcctggtaaagtagttggatcagtgttacgctataacaactgcggcgcagccacaggcgttgaagctcttgaacaacaacagagaaggatggtcagaaatccagctgctgcgtctcaatacccaaagaggactcaaccttgcaaaagcaacagaggagatgaagattgcgccaccgctgctgaaggtccaagtagattgaagccaaacactcagtatataccacaaaaagtgtctgcagcacaagatactgcaatgagtcgctggtattaaacatgatgttatggttctagttttagctttaccacctcacgtctcagggagagctaaaaagagtatccctttgagtcatccattgtgttatcaagagccgaaacgtgaagacatgcttaagagcgaaatgagagaaggaagcgtgagaagataaaagaagttcttacagatcctgtcatgtaatttgtcttcatagttttgtattcttaaaacaacctttgtttatctacgttgtaacacttacactgtctacgattcttatatcccatgaactcaatctgtttcacctaat

SEQ ID NO: 49709 - protein, 567 aa, Arabidopsis thaliana
  peptide (1)..(567): Ceres Seq. ID no. 12592246
MQPDHRKKSSVEVDFFTEYGEGSRYRIEEVIGKGSYGVVCSAYDTHTGEKVAIKKINDIFEHVSDATRILREIKLLRLLRHPDIVEIKHILLPPSRREFRDIYVVFELMESDLHQVIKANDDLTPEHYQFFLYQLLRGLKYIHTANVFHRDLKPKNILANADCKLKICDFGLARVAFNDTPTAIFWTDYVATRWYRAPELCGSFFSKYTPAIDIWSIGCIFAELLTGKPLFPGKNVVHQLDLMTDMLGTPSAEAIGRVRNEKARRYLSSMRKKKPIPFSHKFPHTDPLALRLLEKMLSFEPKDRPTAEEALADVYFKGLAKVEREPSAQPVTKLEFEFERRRITKEDVRELIYRESLEYHPKMLKEYLDGSEPTNFMYPSAVEHFKKQFAYLEEHYKNGTSHNPPERQQHASLPRACVLYSDNNHPVAQQSSAEVTDGLSKCSIRDERPRGADRNAQMPMSRIPINVPQTIQGAAVARPGKVVGSVLRYNNCGAATGVEALEQQQRRMVRNPAAASQYPKRTQPCKSNRGDEDCATAAEGPSRLKPNTQYIPQKVSAAQDTAMSRWY

SEQ ID NO: 49710 - protein, 459 aa, Arabidopsis thaliana
  peptide (1)..(459): Ceres Seq. ID no. 12592247
MESDLHQVIKANDDLTPEHYQFFLYQLLRGLKYIHTANVFHRDLKPKNILANADCKLKICDFGLARVAFNDTPTAIFWTDYVATRWYRAPELCGSFFSKYTPAIDIWSIGCIFAELLTGKPLFPGKNVVHQLDLMTDMLGTPSAEAIGRVRNEKARRYLSSMRKKKPIPFSHKFPHTDPLALRLLEKMLSFEPKDRPTAEEALADVYFKGLAKVEREPSAQPVTKLEFEFERRRITKEDVRELIYRESLEYHPKMLKEYLDGSEPTNFMYPSAVEHFKKQFAYLEEHYKNGTSHNPPERQQHASLPRACVLYSDNNHPVAQQSSAEVTDGLSKCSIRDERPRGADRNAQMPMSRIPINVPQTIQGAAVARPGKVVGSVLRYNNCGAATGVEALEQQQRRMVRNPAAASQYPKRTQPCKSNRGDEDCATAAEGPSRLKPNTQYIPQKVSAAQDTAMSRWY

SEQ ID NO: 49711 - protein, 325 aa, Arabidopsis thaliana
  peptide (1)..(325): Ceres Seq. ID no. 12592248
MTDMLGTPSAEAIGRVRNEKARRYLSSMRKKKPIPFSHKFPHTDPLALRLLEKMLSFEPKDRPTAEEALADVYFKGLAKVEREPSAQPVTKLEFEFERRRITKEDVRELIYRESLEYHPKMLKEYLDGSEPTNFMYPSAVEHFKKQFAYLEEHYKNGTSHNPPERQQHASLPRACVLYSDNNHPVAQQSSAEVTDGLSKCSIRDERPRGADRNAQMPMSRIPINVPQTIQGAAVARPGKVVGSVLRYNNCGAATGVEALEQQQRRMVRNPAAASQYPKRTQPCKSNRGDEDCATAAEGPSRLKPNTQYIPQKVSAAQDTAMSRWY

SEQ ID NO: 49712 - DNA, 1226 bp, Arabidopsis thaliana; identical to SEQ ID NO: 49519
  misc_feature (1)..(1226): Ceres Seq. ID no. 13588641
  misc_feature (1)..(1226): Ortholog of  Ceres SEQ ID NO 13656147 as cited in SEQ ID NO 64422
  misc_feature (1)..(1226): Ortholog of  Ceres SEQ ID NO 13596496 as cited in SEQ ID NO 68639

SEQ ID NO: 49713 - protein, 309 aa, Arabidopsis thaliana; identical to SEQ ID NO: 49520
  peptide (1)..(309): Ceres Seq. ID no. 13588642

SEQ ID NO: 49714 - protein, 295 aa, Arabidopsis thaliana; identical to SEQ ID NO: 49521
  peptide (1)..(295): Ceres Seq. ID no. 13588643

SEQ ID NO: 49715 - protein, 277 aa, Arabidopsis thaliana; identical to SEQ ID NO: 49522
  peptide (1)..(277): Ceres Seq. ID no. 13588644

SEQ ID NO: 49716 - DNA, 830 bp, Arabidopsis thaliana
  misc_feature (1)..(830): Ceres Seq. ID no. 13592298
  misc_feature (1)..(830): Ortholog of  Ceres SEQ ID NO 12597207 as cited in SEQ ID NO 62146
gaagctgctcacttttaatcaccccggagtagtaagcttgcggctgatcagagctgagtgaaaaatggtgtctggatcaggaatttgcgcgaagcgcgtggtggttgatgctcgtcaccacatgctaggtcgcttggcttcggttgtagcaaaggatctgctcaatggccagaatattgtggttgtccggtgcgaggagatttgtctctccggcggacttgttcgtcagaagatgaagtacatgaggtttctccgtaagcgtatgaacactaaaccttctcacggacctattcacttccgtgctccctccaagatcttctggcgtaccgttcgcggtatgattccacacaagactaagcgtggagctaatgcacttgcccgcttgaaggtctttgaaggagttcctactccatatgacaagatcaagaggatggtcgttcctgatgctctcaaggtcttgaggctgcaggctggacacaaatactgtctgttgggtcgcctttcttctgaagtcgggtggaaccactacgacaccatcaaggagctggagaacaagagaaaggaaagagctcaagctgtttatgagagaaagaagcaacttagcaaactcagagctaaggccgagaaggttgctgaagagaagcttggatctcaattggatgttcttgcacccgtcaagtactgaattcaatcagtttatcgtatttgaatgtttttgcaagttttgctcagacattatactattatattacgaggttttgttgtatgcgattttgacttagtttatttcttgaattcgactttacttagtttatttcttgaattcgtct

SEQ ID NO: 49717 - protein, 206 aa, Arabidopsis thaliana [sequence omitted]

SEQ ID NO: 49718 - protein, 187 aa, Arabidopsis thaliana
  peptide (1)..(187): Ceres Seq. ID no. 13592300
MLGRLASVVAKDLLNGQNIVVVRCEEICLSGGLVRQKMKYMRFLRKRMNTKPSHGPIHFRAPSKIFWRTVRGMIPHKTKRGANALARLKVFEGVPTPYDKIKRMVVPDALKVLRLQAGHKYCLLGRLSSEVGWNHYDTIKELENKRKERAQAVYERKKQLSKLRAKAEKVAEEKLGSQLDVLAPVKY

SEQ ID NO: 49719 - protein, 150 aa, Arabidopsis thaliana
  peptide (1)..(150): Ceres Seq. ID no. 13592301
MKYMRFLRKRMNTKPSHGPIHFRAPSKIFWRTVRGMIPHKTKRGANALARLKVFEGVPTPYDKIKRMVVPDALKVLRLQAGHKYCLLGRLSSEVGWNHYDTIKELENKRKERAQAVYERKKQLSKLRAKAEKVAEEKLGSQLDVLAPVKY

SEQ ID NO: 49720 - DNA, 1750 bp, Arabidopsis thaliana
  misc_feature (1)..(1750): Ceres Seq. ID no. 13647686
  misc_feature (1)..(1750): Ortholog of  Ceres SEQ ID NO 14313491 as cited in SEQ ID NO 0
attttgatttcttcctctcttctctctagaaacatctttcatgcgttatcttctccaaaagctctgattctgattctgaatcatcctgaaaaaaaacctagaaaaatttatatcccacaaaatcttctaagatccatggccgtaattatccctcgttcagatccaccttcacgaatccatccggaaccaccacaaaccctagaaatcgaccatttcgatcatcttcctgactcaatcctcctcctcgttttcaacaaaatcggcgacgtcaaagctctcggaagatgctgtgtcgtttccagaagattccattctctcgttcctcaagtcgataacgtcgttgttcgtgtcgattgcgtaatctccgacgacgattcgtcatctttgtcatctatcaaatctcgctccggttcttccgctggttcgttctcggctatatttcgtcttgttgttggtggcattgttaagccgttacaagctttaggtcaattccttggtacgaagagatcatcatcatcatgtggtggttctggatcttcttcttcttcgttgtctattagtggagatgatgatggtggagagatcgaacaaggcggtgttacgcatcattcacctactcaggttttgaaaaacttcgatgagattcgttacttaagaattgagcttcctagtggtgaattagggattgatgatggagttttgttgaaatggagagctgaatttggttctactcttgataattgtgtgattctcggtgcttcttcagtgattccaccaaatccaatgagagtttctcaagcttgtgatactactacagtcgttgaagctcccggttctggctccgatgataatgggagtataccggaatcgttttacacaaacggaggtttgaaattgcgtgttgtatggacgattagctctttgattgctgcatcagcacgacattacttgttacaaccgataatcgcggagcataagacgcttgatagtttagtgctcactgattcagatgggcaaggtgtgctctgtatgaacagagatcagctagaagagcttagggtgaaaccattagcagcttcatcggcttcgaagaggacacttgtgcctgctctgaatatgagactatggtatgctccaaccttggaattgcctgatggaactgtgttaaaaggtgcgactttggttgcgataagaccgagtgaatcgaaaaaggaagtgtctgatatctcttgggtgtcttcggcttttgaggagccttatgagacggctgctaagatgctggttaaaagaaggacttactgtcttgaaatgaactcgttctagcttgaatggtttcagtcggaatctgagagaactggcaaccctgtggcgaattcaggaaattacaattaaaagcatataatggggagaagcagagaatgaaataaaatcgaagttttgatgaatcaagaaacaagttttgctgcctactactactgcatctgctagctagttttttcattgaagcatatgcctttgcaggatctcgcaatcatatataatatatatcaacaaattacagatatcatgtaagagtttttcttttcttttttctgtctttttcttctcctttgcttgctcttctctatttatgtgaatattgtaggtattgcttattcccctgtcattatacaagttatttaagattgtagttaaaaaaaaaaaaaaaaaaaaaaaaaactcgagggggggcccggtacccaattcgctg

SEQ ID NO: 49721 - protein, 440 aa, Arabidopsis thaliana
  peptide (1)..(440): Ceres Seq. ID no. 13647687
ILISSSLLSRNIFHALSSPKALILILNHPEKKPRKIYIPQNLLRSMAVIIPRSDPPSRIHPEPPQTLEIDHFDHLPDSILLLVFNKIGDVKALGRCCVVSRRFHSLVPQVDNVVVRVDCVISDDDSSSLSSIKSRSGSSAGSFSAIFRLVVGGIVKPLQALGQFLGTKRSSSSCGGSGSSSSSLSISGDDDGGEIEQGGVTHHSPTQVLKNFDEIRYLRIELPSGELGIDDGVLLKWRAEFGSTLDNCVILGASSVIPPNPMRVSQACDTTTVVEAPGSGSDDNGSIPESFYTNGGLKLRVVWTISSLIAASARHYLLQPIIAEHKTLDSLVLTDSDGQGVLCMNRDQLEELRVKPLAASSASKRTLVPALNMRLWYAPTLELPDGTVLKGATLVAIRPSESKKEVSDISWVSSAFEEPYETAAKMLVKRRTYCLEMNSF

SEQ ID NO: 49722 - protein, 395 aa, Arabidopsis thaliana
  peptide (1)..(395): Ceres Seq. ID no. 13647688
MAVIIPRSDPPSRIHPEPPQTLEIDHFDHLPDSILLLVFNKIGDVKALGRCCVVSRRFHSLVPQVDNVVVRVDCVISDDDSSSLSSIKSRSGSSAGSFSAIFRLVVGGIVKPLQALGQFLGTKRSSSSCGGSGSSSSSLSISGDDDGGEIEQGGVTHHSPTQVLKNFDEIRYLRIELPSGELGIDDGVLLKWRAEFGSTLDNCVILGASSVIPPNPMRVSQACDTTTVVEAPGSGSDDNGSIPESFYTNGGLKLRVVWTISSLIAASARHYLLQPIIAEHKTLDSLVLTDSDGQGVLCMNRDQLEELRVKPLAASSASKRTLVPALNMRLWYAPTLELPDGTVLKGATLVAIRPSESKKEVSDISWVSSAFEEPYETAAKMLVKRRTYCLEMNSF

SEQ ID NO: 49723 - DNA, 1426 bp, Arabidopsis thaliana
  misc_feature (1)..(1426): Ceres Seq. ID no. 13588718
  misc_feature (1)..(1426): Ortholog of  Ceres SEQ ID NO 13659640 as cited in SEQ ID NO 67101
gagagagagacactgaaacatagagagaagaaaaagaagaggtttagagagagaaaaatggcgtcaaagctctgcgattcgtgcaaatcagcgacggcggcgttatactgccgaccagacgcagcgtttctatgcttaagctgcgattcaaaagtccacgcggcgaacaaactcgcgtcacgacacgcgcgcgtgtggatgtgtgaagtgtgcgagcaagcaccggcacacgtcacgtgcaaagcagacgcggccgcgttatgcgtcacgtgcgaccgtgatatccactcggctaatccgttagctcgccgtcacgaacgcgttcccgttactccgttttacgattccgtctctagtgacggttccgttaaacacaccgccgttaatttccttgacgactgttacttctccgatatagatggtaacggaagccgtgaagaagaggaggaagaagctgcttcgtggctgttacttcccaatccaaagactacaacgacggcgacggcggggatcgttgctgttacttcagctgaggaagttccgggagatagtccggagatgaacactggtcaacagtatttgttctcggatccggatccgtatctggatctggattatggaaatgttgatccgaaggtggaatcgttagagcagaatagctccggtactgatggtgttgttccggtggagaatcggacggttaggattccgacggtgaacgagaattgctttgaaatggattttaccggaggatctaaaggctttacttatggtggtggttacaattgcatcagtcacagcgtgtcatcatcgtcgatggaagtgggagtggtgccagatggtggttcggtggctgatgtatcgtatccttacggtggtcctgcaaccagtggagctgatccggggacacagcgggctgttccgctgacttcagctgagagagaagcgagggtaatgaggtacagagagaagaggaagaacaggaagtttgagaagactataaggtatgcttcaaggaaagcgtatgcggaaatgagaccgagaatcaagggacggtttgcgaagcggacggatacaaatgagagcaatgatgtggttggtcatggtggtatctttagtgggttcggacttgtacctacattttagatattgagagagggagagactctaaaatggaagatggtgggtggtttggtgtttgttttagtaataaggtttttaacgaacgtttaatttaaacgagtttgtttgttttttgttgatgagtatttttagttgttgtgggcgatgaagaggaagagaagtgagtgggtggtgtttaactgtttataagtaacttgttttgtatatatcgtgattttgaatatgttcttgtttatgttatgtactcaaactatttagaatcaacaagtttacaaaatttggg

SEQ ID NO: 49724 - protein, 381 aa, Arabidopsis thaliana
  peptide (1)..(381): Ceres Seq. ID no. 15220897
ERETLKHREKKKKRFRERKMASKLCDSCKSATAALYCRPDAAFLCLSCDSKVHAANKLASRHARVWMCEVCEQAPAHVTCKADAAALCVTCDRDIHSANPLARRHERVPVTPFYDSVSSDGSVKHTAVNFLDDCYFSDIDGNGSREEEEEEAASWLLLPNPKTTTTATAGIVAVTSAEEVPGDSPEMNTGQQYLFSDPDPYLDLDYGNVDPKVESLEQNSSGTDGVVPVENRTVRIPTVNENCFEMDFTGGSKGFTYGGGYNCISHSVSSSSMEVGVVPDGGSVADVSYPYGGPATSGADPGTQRAVPLTSAEREARVMRYREKRKNRKFEKTIRYASRKAYAEMRPRIKGRFAKRTDTNESNDVVGHGGIFSGFGLVPTF

SEQ ID NO: 49725 - protein, 362 aa, Arabidopsis thaliana
  peptide (1)..(362): Ceres Seq. ID no. 15220898
MASKLCDSCKSATAALYCRPDAAFLCLSCDSKVHAANKLASRHARVWMCEVCEQAPAHVTCKADAAALCVTCDRDIHSANPLARRHERVPVTPFYDSVSSDGSVKHTAVNFLDDCYFSDIDGNGSREEEEEEAASWLLLPNPKTTTTATAGIVAVTSAEEVPGDSPEMNTGQQYLFSDPDPYLDLDYGNVDPKVESLEQNSSGTDGVVPVENRTVRIPTVNENCFEMDFTGGSKGFTYGGGYNCISHSVSSSSMEVGVVPDGGSVADVSYPYGGPATSGADPGTQRAVPLTSAEREARVMRYREKRKNRKFEKTIRYASRKAYAEMRPRIKGRFAKRTDTNESNDVVGHGGIFSGFGLVPTF

SEQ ID NO: 49726 - protein, 315 aa, Arabidopsis thaliana
  peptide (1)..(315): Ceres Seq. ID no. 15220899
MCEVCEQAPAHVTCKADAAALCVTCDRDIHSANPLARRHERVPVTPFYDSVSSDGSVKHTAVNFLDDCYFSDIDGNGSREEEEEEAASWLLLPNPKTTTTATAGIVAVTSAEEVPGDSPEMNTGQQYLFSDPDPYLDLDYGNVDPKVESLEQNSSGTDGVVPVENRTVRIPTVNENCFEMDFTGGSKGFTYGGGYNCISHSVSSSSMEVGVVPDGGSVADVSYPYGGPATSGADPGTQRAVPLTSAEREARVMRYREKRKNRKFEKTIRYASRKAYAEMRPRIKGRFAKRTDTNESNDVVGHGGIFSGFGLVPTF

SEQ ID NO: 49727 - DNA, 1323 bp, Arabidopsis thaliana
  misc_feature (1)..(1323): Ceres Seq. ID no. 13588812
  misc_feature (1)..(1323): Ortholog of  Ceres SEQ ID NO 13597647 as cited in SEQ ID NO 65258
gaagcgaacaatatagtcgcacgtcgtatctctctcgctgcctcacttcatcgtcccaaaaaacgcctctgtttcaccgttcttcgccgtataagctcgtctctagccatggctcttccgctcgggaagctcaccatcctcatcggtgcaggtcttattggatcagcattttctaaagaagggggcttaccagatgtctccaatttggtttctggtgcttttaagatggtattcaggcaactgaaacaagacgaacctagcaaatcagctagcaaaccccacgatgatgtacttgtggcccaggttaacagtcttaggcatgagatacagttgctggggtcaaacagacctatcaccattgtttcaccttcaggatcaggtggtagaaactatggtttgatcattatcgttggggtgataggctacggatatgtgtggtggaagggctggaaacttccagattttatgtttgcaacaaggcgtagcttatcagatgcatgtaataatgttggcaaccagatcgatggtttttactcatcactcaagggtacaaaacgagagttaagttcagaaattgatatgatgggtcgtcgtttggatgcaaatacagaagtaattcaagaaacaatacaagaggtggctaagctacaggatggtacatcatttataaaggatgacgttaaggctgttttcgatgcttttgaaaatctggcaagcaaagtgtgtcgtatagagggaaatcaggatatcacacttagaggagttggggctctgcatgctcagtgtcaggagaaccaaagaattcaagagtccaataaggctttgccatcaacttcatcactgccagcccttgaggcagctcctatggcaccctcttcaaagactctgtctttacctcctgcttctcccgatgaatcccagtccccgtcaacccctaatgtagctcaaaagtcacggggcctacttcagcacactcaatctatgtctggtttgaaggacataaatgaaagctctagtagccacaacacgtcttcaaatggaatatattttgggggaaacggtgcatcaggatcgagttcgggcgtgcttggtaggttctcaatagcaagaataatgaggactcgtactgtggtcaacacagtgtctactaactgaagagagagtttgttttatctaattattaggattaacaaagaagggggcatgttgtatctagtagagtatttgaatagattttgcttcttatttttttttttgacaatgctataaatggtgcataatttttttaagaatgcagcttatatttgaatgggtttataggtc

SEQ ID NO: 49728 - protein, 384 aa, Arabidopsis thaliana
  peptide (1)..(384): Ceres Seq. ID no. 15220909
EANNIVARRISLAASLHRPKKRLCFTVLRRISSSLAMALPLGKLTILIGAGLIGSAFSKEGGLPDVSNLVSGAFKMVFRQLKQDEPSKSASKPHDDVLVAQVNSLRHEIQLLGSNRPITIVSPSGSGGRNYGLIIIVGVIGYGYVWWKGWKLPDFMFATRRSLSDACNNVGNQIDGFYSSLKGTKRELSSEIDMMGRRLDANTEVIQETIQEVAKLQDGTSFIKDDVKAVFDAFENLASKVCRIEGNQDITLRGVGALHAQCQENQRIQESNKALPSTSSLPALEAAPMAPSSKTLSLPPASPDESQSPSTPNVAQKSRGLLQHTQSMSGLKDINESSSSHNTSSNGIYFGGNGASGSSSGVLGRFSIARIMRTRTVVNTVSTN

SEQ ID NO: 49729 - protein, 348 aa, Arabidopsis thaliana; identical to SEQ ID NO: 49130
  peptide (1)..(348): Ceres Seq. ID no. 15220910

SEQ ID NO: 49730 - protein, 309 aa, Arabidopsis thaliana; identical to SEQ ID NO: 49131
  peptide (1)..(309): Ceres Seq. ID no. 15220911

SEQ ID NO: 49731 - DNA, 1239 bp, Arabidopsis thaliana
  misc_feature (1)..(1239): Ceres Seq. ID no. 13588813
  misc_feature (1)..(1239): Ortholog of  Ceres SEQ ID NO 13647762 as cited in SEQ ID NO 20426
tctatctctcttctatttttagtttctcttcccttaatccctaaacccagaaacatgaatccaaatctccttgagaaagatctaagaggtaaggaaactacaaatgggtcaataagatacaaagaagcaaacaacttcagatctctaccaaactcacacactgctgcttgtaaaacttcactcaacaacccctctatctctagaaaccatcctcacaacaaatcagcctcagtcttggagtcggaagatgaacatgggaacgagagaggtgaaaacgaaaagagtttaagaatgaggggcaaaagtggaattaacacaaaagtatgctcacgaggacactggagaccaacagaagatgctaaactcaaggagcttgttgcccagtttggtccccaaaactggaacttgatttctaaccaccttcttggtagatcaggcaagagttgtagattgagatggtttaaccaactagacccaaggattaacaagagagccttcacggaggaagaagagtttaggctgttagcagctcatcgagcctatggcaacaagtgggctttgatctctcgtctctttccaggtcgtaccgataacgctgtcaagaaccattggcacgtcatcatggctcgacggactagagaaagccaaagacaacgtcaacagcctcctccgacgttgtcaagagacgctgaaatgacggtttcgtcctcttgccgctacaatcaaggtaagttcatcaatgaagaagatgacgacgacgatgtgtcagctgtctctacttgtacgacggagctctctctcactccgccttcttcagcttaccagcctcgcttctttaattacgatagtacccttgcatcaggcaaagatggtcagtgtgtgcagagagcagaagtaaatggcatatatggtaaaaagatggaccatcaaaatcaccacacaatctcagtcagtgaaagaaaggtggagatgaagatgaggagtggctattactactttgattttcttggagttggagcttcctgattaattagttgcagagctagggttcaatgctgaggaattgtgagataagaaatggctttagtttcttctatttttcctggttaattaggcatgtttgtttaacatcttaatttgggttttggaagaagtaagcggtatgagggaaaactgaaaacaaaaacaaaacctagaagtaaaataaaaagttgaatatataatcaacctcttttctgt

SEQ ID NO: 49732 - protein, 341 aa, Arabidopsis thaliana
  peptide (1)..(341): Ceres Seq. ID no. 13588814
SISLLFLVSLPLIPKPRNMNPNLLEKDLRGKETTNGSIRYKEANNFRSLPNSHTAACKTSLNNPSISRNHPHNKSASVLESEDEHGNERGENEKSLRMRGKSGINTKVCSRGHWRPTEDAKLKELVAQFGPQNWNLISNHLLGRSGKSCRLRWFNQLDPRINKRAFTEEEEFRLLAAHRAYGNKWALISRLFPGRTDNAVKNHWHVIMARRTRESQRQRQQPPPTLSRDAEMTVSSSCRYNQGKFINEEDDDDDVSAVSTCTTELSLTPPSSAYQPRFFNYDSTLASGKDGQCVQRAEVNGIYGKKMDHQNHHTISVSERKVEMKMRSGYYYFDFLGVGAS

SEQ ID NO: 49733 - protein, 323 aa, Arabidopsis thaliana
  peptide (1)..(323): Ceres Seq. ID no. 13588815
MNPNLLEKDLRGKETTNGSIRYKEANNFRSLPNSHTAACKTSLNNPSISRNHPHNKSASVLESEDEHGNERGENEKSLRMRGKSGINTKVCSRGHWRPTEDAKLKELVAQFGPQNWNLISNHLLGRSGKSCRLRWFNQLDPRINKRAFTEEEEFRLLAAHRAYGNKWALISRLFPGRTDNAVKNHWHVIMARRTRESQRQRQQPPPTLSRDAEMTVSSSCRYNQGKFINEEDDDDDVSAVSTCTTELSLTPPSSAYQPRFFNYDSTLASGKDGQCVQRAEVNGIYGKKMDHQNHHTISVSERKVEMKMRSGYYYFDFLGVGAS

SEQ ID NO: 49734 - protein, 244 aa, Arabidopsis thaliana
  peptide (1)..(244): Ceres Seq. ID no. 13588816
MRGKSGINTKVCSRGHWRPTEDAKLKELVAQFGPQNWNLISNHLLGRSGKSCRLRWFNQLDPRINKRAFTEEEEFRLLAAHRAYGNKWALISRLFPGRTDNAVKNHWHVIMARRTRESQRQRQQPPPTLSRDAEMTVSSSCRYNQGKFINEEDDDDDVSAVSTCTTELSLTPPSSAYQPRFFNYDSTLASGKDGQCVQRAEVNGIYGKKMDHQNHHTISVSERKVEMKMRSGYYYFDFLGVGAS

SEQ ID NO: 49735 - DNA, 2627 bp, Arabidopsis thaliana
  misc_feature (1)..(2627): Ceres Seq. ID no. 13588719
  misc_feature (1)..(2627): Ortholog of  Ceres SEQ ID NO 14309904 as cited in SEQ ID NO 20623
cagggcctagctcctccgtctttacgctctctcatcaaactcgagaaaaaaaagtggcgcctctgcaatttcaattttcaaatcctaataatttttctctcgcttcccggagaacggaaccctaatttctcgacgcagacatgattttgagaactccgcagccgaagaggctcaggtccgacgccggagaaagccccttccccaccggcgctactggttccggcaatcagctaatcatctacgaagattctcctcttcctgctcctgctccgctacaaacttctcatgatcattcggcggatcaacatctttgcacctatcaatgccgccaaatggttaaagctgatgttctagatgccttgagcacagcagagaaacaagttgaggaatctaaaaccaaattacagactcttaatgccaacttcaccgaagcagatgctgaaagaaagcattttcgagataaattcttatactcagagcaagagcttgctgctgctaaagcgcgtgagaaaatgcttcaggagcagcttcttatggagatcaacaattctcaagagcggtataccaaagaactacaatcttgccatgaactggaggtaaaacttcaaaatgaaatgaaccttcgaaagaaagcggagtcttctgctgcaacagctgaggaaaaagctaaacttttggaggataaactaactcagctatctggaagtgtggacagggagaagaaacgtctcaacaatgatattgctcaactgggtaaagaagcaaagctttctgtggctaggattggtgcagatcttgaaaggatgcaatgtagggcacaaaatgctgagacggaatcaaatcttttaagatcacaactggagcatcttaaactgatatttgacgagtgtttgcaagaaaagactgaagtagacaagaagctatcgtcattcacttcggaggcagcatcttcttcagataacagtgtattggttaaacatcttcaggaagaacttaaacgctatgaagctgaagtgcgagaagctagaaagttaaaatcacggcatttagatgcggagttgttgaatgtgaacttattagaagaacaaagccgtagggagagggcagagtcagagttatcaaaatttcatgacttgcagctaagcatggaaaagttggagaatgaattgtcctcttggaagtcattgctaaatgacattcctggtgtgtcctgtcctgatgacatagttatgagattctcggtgctacagaatgaggtggttcaaagcactatgaagattggggaagcaagtacccgtattaaacaactggaggagacgctggaggctatacaacttggcagacagaatgctgtaagtgaggctgcattagcgaaagagaaatctgaggctctcaaaacagacgtgaagagaattgaagtaatgctcactttggtcacggaggagaaagaacagttgaaagctgttgttaatgaattaaggaagtcaaacagtgaaggatctgtgtctggagccgcagatggagcccttattcaggggtttgaatcttctcttgcaaagaaggagaactatattaaggatttagagcaggatctaaatcaactgaaggatgtcaataatcgtcaacgtactgaaatagaacttctaaatgagaaactagttgatgaagcaaggaggaataagtcgctggaaagggatagtgatcgtcttcgctctgagatctctttactggagtcaaagctgggtcatggtgattattctgccgcaaatacaagggttttgcgcatggtgaatactcttggtgttgaaaacgaggcaaaacaaacaatagaggctttacaagctgagttacagaagacaaaagaaagacttcaagctgttgaagaattaaagagccagtctggagatgctgggaagctagttgactctcatataactggaaagattgctcaactaaaagagcaaaatgctacgcttgaaaaacgtgaagagaggtacaaaactgtttttgctgatagaatttccgtgtttagaagggcttgttgtgagctttttggttataagattgtaatggacgaacatcagcgtcccaatggaatcccagtgactcggtttactctccagtctatatatgctcaaagtgatgatgaaaaactcgagtttgaatacgagtcaggaaacaccagtattctaaacaatgagtatgcctctcagggcgacatagcgaagcagatagaaatattcatcaggaaattcaactcgattccagcttttacagccaacttaacgatggaatcattcaaccgtcggacgctatattgagagcactgcgtccttatttccaactctgtgttttgtatatttctaaagcctgctgaatagaaactgaaactcgaaagccgcagcttaaaacactggccttatctatgtctacctctggttcgttatgtctgctataattgtggtgtcagtaactctattttggtatgaaagaaactagtttcgatttactcagaaagaatatctaatgtcattctctgattatgcgtttattactttatagtcaccaaaaacagtaacacttgaatatcaagcaaacagatttttatataaccatgaatttaaaac

SEQ ID NO: 49736 - protein, 726 aa, Arabidopsis thaliana
  peptide (1)..(726): Ceres Seq. ID no. 13588720
MILRTPQPKRLRSDAGESPFPTGATGSGNQLIIYEDSPLPAPAPLQTSHDHSADQHLCTYQCRQMVKADVLDALSTAEKQVEESKTKLQTLNANFTEADAERKHFRDKFLYSEQELAAAKAREKMLQEQLLMEINNSQERYTKELQSCHELEVKLQNEMNLRKKAESSAATAEEKAKLLEDKLTQLSGSVDREKKRLNNDIAQLGKEAKLSVARIGADLERMQCRAQNAETESNLLRSQLEHLKLIFDECLQEKTEVDKKLSSFTSEAASSSDNSVLVKHLQEELKRYEAEVREARKLKSRHLDAELLNVNLLEEQSRRERAESELSKFHDLQLSMEKLENELSSWKSLLNDIPGVSCPDDIVMRFSVLQNEVVQSTMKIGEASTRIKQLEETLEAIQLGRQNAVSEAALAKEKSEALKTDVKRIEVMLTLVTEEKEQLKAVVNELRKSNSEGSVSGAADGALIQGFESSLAKKENYIKDLEQDLNQLKDVNNRQRTEIELLNEKLVDEARRNKSLERDSDRLRSEISLLESKLGHGDYSAANTRVLRMVNTLGVENEAKQTIEALQAELQKTKERLQAVEELKSQSGDAGKLVDSHITGKIAQLKEQNATLEKREERYKTVFADRISVFRRACCELFGYKIVMDEHQRPNGIPVTRFTLQSIYAQSDDEKLEFEYESGNTSILNNEYASQGDIAKQIEIFIRKFNSIPAFTANLTMESFNRRTLY

SEQ ID NO: 49737 - protein, 662 aa, Arabidopsis thaliana
  peptide (1)..(662): Ceres Seq. ID no. 13588721
MVKADVLDALSTAEKQVEESKTKLQTLNANFTEADAERKHFRDKFLYSEQELAAAKAREKMLQEQLLMEINNSQERYTKELQSCHELEVKLQNEMNLRKKAESSAATAEEKAKLLEDKLTQLSGSVDREKKRLNNDIAQLGKEAKLSVARIGADLERMQCRAQNAETESNLLRSQLEHLKLIFDECLQEKTEVDKKLSSFTSEAASSSDNSVLVKHLQEELKRYEAEVREARKLKSRHLDAELLNVNLLEEQSRRERAESELSKFHDLQLSMEKLENELSSWKSLLNDIPGVSCPDDIVMRFSVLQNEVVQSTMKIGEASTRIKQLEETLEAIQLGRQNAVSEAALAKEKSEALKTDVKRIEVMLTLVTEEKEQLKAVVNELRKSNSEGSVSGAADGALIQGFESSLAKKENYIKDLEQDLNQLKDVNNRQRTEIELLNEKLVDEARRNKSLERDSDRLRSEISLLESKLGHGDYSAANTRVLRMVNTLGVENEAKQTIEALQAELQKTKERLQAVEELKSQSGDAGKLVDSHITGKIAQLKEQNATLEKREERYKTVFADRISVFRRACCELFGYKIVMDEHQRPNGIPVTRFTLQSIYAQSDDEKLEFEYESGNTSILNNEYASQGDIAKQIEIFIRKFNSIPAFTANLTMESFNRRTLY

SEQ ID NO: 49738 - protein, 602 aa, Arabidopsis thaliana
  peptide (1)..(602): Ceres Seq. ID no. 13588722
MLQEQLLMEINNSQERYTKELQSCHELEVKLQNEMNLRKKAESSAATAEEKAKLLEDKLTQLSGSVDREKKRLNNDIAQLGKEAKLSVARIGADLERMQCRAQNAETESNLLRSQLEHLKLIFDECLQEKTEVDKKLSSFTSEAASSSDNSVLVKHLQEELKRYEAEVREARKLKSRHLDAELLNVNLLEEQSRRERAESELSKFHDLQLSMEKLENELSSWKSLLNDIPGVSCPDDIVMRFSVLQNEVVQSTMKIGEASTRIKQLEETLEAIQLGRQNAVSEAALAKEKSEALKTDVKRIEVMLTLVTEEKEQLKAVVNELRKSNSEGSVSGAADGALIQGFESSLAKKENYIKDLEQDLNQLKDVNNRQRTEIELLNEKLVDEARRNKSLERDSDRLRSEISLLESKLGHGDYSAANTRVLRMVNTLGVENEAKQTIEALQAELQKTKERLQAVEELKSQSGDAGKLVDSHITGKIAQLKEQNATLEKREERYKTVFADRISVFRRACCELFGYKIVMDEHQRPNGIPVTRFTLQSIYAQSDDEKLEFEYESGNTSILNNEYASQGDIAKQIEIFIRKFNSIPAFTANLTMESFNRRTLY

SEQ ID NO: 49739 - DNA, 1228 bp, Arabidopsis thaliana; identical to SEQ ID NO: 49144
  misc_feature (1)..(1228): Ceres Seq. ID no. 12601521
  misc_feature (1)..(1228): Ortholog of  Ceres SEQ ID NO 13590967 as cited in SEQ ID NO 65553
  misc_feature (1)..(1228): Ortholog of  Ceres SEQ ID NO 14309438 as cited in SEQ ID NO 0

SEQ ID NO: 49740 - protein, 290 aa, Arabidopsis thaliana; identical to SEQ ID NO: 49145
  peptide (1)..(290): Ceres Seq. ID no. 12601522

SEQ ID NO: 49741 - protein, 288 aa, Arabidopsis thaliana; identical to SEQ ID NO: 49146
  peptide (1)..(288): Ceres Seq. ID no. 12601523

SEQ ID NO: 49742 - protein, 177 aa, Arabidopsis thaliana; identical to SEQ ID NO: 49147
  peptide (1)..(177): Ceres Seq. ID no. 12601524

SEQ ID NO: 49743 - DNA, 1861 bp, Arabidopsis thaliana
  misc_feature (1)..(1861): Ceres Seq. ID no. 12605081
  misc_feature (1)..(1861): Ortholog of  Ceres SEQ ID NO 13594209 as cited in SEQ ID NO 59089
  misc_feature (1)..(1861): Ortholog of  Ceres SEQ ID NO 13664173 as cited in SEQ ID NO 61223
  misc_feature (1)..(1861): Ortholog of  Ceres SEQ ID NO 15176091 as cited in SEQ ID NO 65733
  misc_feature (1)..(1861): Ortholog of  Ceres SEQ ID NO 15169599 as cited in SEQ ID NO 66096
  misc_feature (1)..(1861): Ortholog of  Ceres SEQ ID NO 14307964 as cited in SEQ ID NO 66191
  misc_feature (1)..(1861): Ortholog of  Ceres SEQ ID NO 13502874 as cited in SEQ ID NO 66298
  misc_feature (1)..(1861): Ortholog of  Ceres SEQ ID NO 12614124 as cited in SEQ ID NO 68392
  misc_feature (1)..(1861): Ortholog of  Ceres SEQ ID NO 14308011 as cited in SEQ ID NO 69234
gagaagaattctacaagtgaattcgatttacacttttttttgtccttttttattaataaatcactgacccgaaaataaaaatagaagcaaaacttcatgtcgtggtttctaatagcggtggcgacaatcgccgccgtcgtatcctacaagctaatccaacggctaagatacaagttcccaccaggcccaagccccaagccgatcgtcggtaacctctacgacataaaaccggtccggttcagatgttactacgagtgggctcaatcttatggaccaatcatatcggtctggatcggttcaattctaaacgtggtcgtatctagcgccgagctagcaaaagaagttctgaaagaacacgaccagaaactcgccgaccggcaccggaacagatcgacggaagcatttagccgcaacggtcaggatcttatatgggccgattatgggcctcattacgtgaaggtgagaaaagtttgcacgcttgagctcttcacaccgaaacgactcgagtctctcagacctatccgtgaagatgaagtcaccgccatggttgaatccgtcttcagagactgtaaccttcctgaaaacagagcaaaaggtttacaactgaggaagtacttaggagcggttgcgttcaacaacataacgcggctagcctttgggaagcgttttatgaacgctgaaggtgttgtggacgagcaagggcttgagttcaaggccatagtatccaacggtctgaagctaggtgcttcactgtcaatagctgaacacatcccgtggctcaggtggatgtttccggctgatgagaaggcgtttgctgagcacggggctcgtcgtgaccgcctcactcgagctatcatggaggagcatactttggcccgtcaaaagtctagtggagcgaaacagcatttcgttgatgcgttgctaacgttgaaggatcagtatgatcttagtgaggatactatcattggtcttctatgggatatgatcacggcagggatggacacgacagcgataacagcggaatgggcgatggcggaaatgatcaagaatccaagagtgcaacaaaaagtgcaagaagagttcgacagagtggttggacttgaccggatcttaaccgaggcagatttctcccgcttaccttacttgcaatgcgtggtgaaagagtcattcaggctgcatcctccaacgcctctaatgctacctcaccgaagcaacgcagatgtcaagatcggaggctatgatattcccaaaggatcaaacgttcatgtgaatgtgtgggctgtggctagagacccggctgtatggaaaaatccatttgagtttagaccagagagattcttggaagaagatgttgacatgaagggtcatgattttaggctgcttccgtttggagctggaagacgggtttgtcccggtgcacaacttggtatcaatttggtaacttcgatgatgagtcatttgcttcaccattttgtttggacacctcctcaagggactaaaccggaggagattgacatgtctgaaaaccctggactcgttacttacatgcgtacccctgtgcaagcggttgcaacgcctcggttgccttcggatctgtacaaacgcgtgccttacgatatgtaaatgtcactctgatctaccttttgttgctgctgctcatgctcttgttgttgtttgtagacatgtttcttgtggtttatcatcgaaaaacttttgatgagatttgttgtatcaattctctcaaggagaagtaaagaagccatcttctttgtcattgggtttacgatctttcaatcagtgcaatgttgtaacttgaaacataagaataaacaggaaacaaacatacaaagatatttgcagg

SEQ ID NO: 49744 - protein, 508 aa, Arabidopsis thaliana
  peptide (1)..(508): Ceres Seq. ID no. 12605082
MSWFLIAVATIAAVVSYKLIQRLRYKFPPGPSPKPIVGNLYDIKPVRFRCYYEWAQSYGPIISVWIGSILNVVVSSAELAKEVLKEHDQKLADRHRNRSTEAFSRNGQDLIWADYGPHYVKVRKVCTLELFTPKRLESLRPIREDEVTAMVESVFRDCNLPENRAKGLQLRKYLGAVAFNNITRLAFGKRFMNAEGVVDEQGLEFKAIVSNGLKLGASLSIAEHIPWLRWMFPADEKAFAEHGARRDRLTRAIMEEHTLARQKSSGAKQHFVDALLTLKDQYDLSEDTIIGLLWDMITAGMDTTAITAEWAMAEMIKNPRVQQKVQEEFDRVVGLDRILTEADFSRLPYLQCVVKESFRLHPPTPLMLPHRSNADVKIGGYDIPKGSNVHVNVWAVARDPAVWKNPFEFRPERFLEEDVDMKGHDFRLLPFGAGRRVCPGAQLGINLVTSMMSHLLHHFVWTPPQGTKPEEIDMSENPGLVTYMRTPVQAVATPRLPSDLYKRVPYDM

SEQ ID NO: 49745 - protein, 359 aa, Arabidopsis thaliana
  peptide (1)..(359): Ceres Seq. ID no. 12605083
MVESVFRDCNLPENRAKGLQLRKYLGAVAFNNITRLAFGKRFMNAEGVVDEQGLEFKAIVSNGLKLGASLSIAEHIPWLRWMFPADEKAFAEHGARRDRLTRAIMEEHTLARQKSSGAKQHFVDALLTLKDQYDLSEDTIIGLLWDMITAGMDTTAITAEWAMAEMIKNPRVQQKVQEEFDRVVGLDRILTEADFSRLPYLQCVVKESFRLHPPTPLMLPHRSNADVKIGGYDIPKGSNVHVNVWAVARDPAVWKNPFEFRPERFLEEDVDMKGHDFRLLPFGAGRRVCPGAQLGINLVTSMMSHLLHHFVWTPPQGTKPEEIDMSENPGLVTYMRTPVQAVATPRLPSDLYKRVPYDM

SEQ ID NO: 49746 - protein, 317 aa, Arabidopsis thaliana
  peptide (1)..(317): Ceres Seq. ID no. 12605084
MNAEGVVDEQGLEFKAIVSNGLKLGASLSIAEHIPWLRWMFPADEKAFAEHGARRDRLTRAIMEEHTLARQKSSGAKQHFVDALLTLKDQYDLSEDTIIGLLWDMITAGMDTTAITAEWAMAEMIKNPRVQQKVQEEFDRVVGLDRILTEADFSRLPYLQCVVKESFRLHPPTPLMLPHRSNADVKIGGYDIPKGSNVHVNVWAVARDPAVWKNPFEFRPERFLEEDVDMKGHDFRLLPFGAGRRVCPGAQLGINLVTSMMSHLLHHFVWTPPQGTKPEEIDMSENPGLVTYMRTPVQAVATPRLPSDLYKRVPYDM

SEQ ID NO: 49747 - DNA, 642 bp, Arabidopsis thaliana
  misc_feature (1)..(642): Ceres Seq. ID no. 11407426
  misc_feature (1)..(642): Ortholog of  Ceres SEQ ID NO 13599316 as cited in SEQ ID NO 0
gacatttctccaaaatctccgagttctacaattgtgtgatcaatcaatcttctccgatttcaagcttctcgatcaaaagaatcatcatgggaggaggaagagctatggcgacggcagcgaaggttgctggaatcggagttggtaaaggaggattcaagggatttggatttcctccggcgactgagcagtttcgtgttaaaaccgcggcggctgcggcgtcgtctaaaccggtttcggcttcgatttcatcggtggttcattcttctgttgaagaagatgggatgattatgcagagaccggtttgggatgattgggaatttgctgaagaagaaccgattcctagggttgtttttagcaaacctcctagtcttgaagaagctaaagaagctactgaagatcttaaagaagcaattaatttggtgtatatgtcatctccaaagtcgtctgctgctatggaaggatcaaatgatggtggctctgtttccaaaatgctctctggttttcaatcttctgagaacagagctgttgaatcagctgttccacaagttgctcttcaagcatttgcttttctgagtgagaacactgctgcgcaggtatattcggattcctctctctttgcttggttaaatggtctctgctctt

SEQ ID NO: 49748 - protein, 213 aa, Arabidopsis thaliana
  peptide (1)..(213): Ceres Seq. ID no. 11407427
HFSKISEFYNCVINQSSPISSFSIKRIIMGGGRAMATAAKVAGIGVGKGGFKGFGFPPATEQFRVKTAAAAASSKPVSASISSVVHSSVEEDGMIMQRPVWDDWEFAEEEPIPRVVFSKPPSLEEAKEATEDLKEAINLVYMSSPKSSAAMEGSNDGGSVSKMLSGFQSSENRAVESAVPQVALQAFAFLSENTAAQVYSDSSLFAWLNGLCS

SEQ ID NO: 49749 - protein, 185 aa, Arabidopsis thaliana
  peptide (1)..(185): Ceres Seq. ID no. 11407428
MGGGRAMATAAKVAGIGVGKGGFKGFGFPPATEQFRVKTAAAAASSKPVSASISSVVHSSVEEDGMIMQRPVWDDWEFAEEEPIPRVVFSKPPSLEEAKEATEDLKEAINLVYMSSPKSSAAMEGSNDGGSVSKMLSGFQSSENRAVESAVPQVALQAFAFLSENTAAQVYSDSSLFAWLNGLCS

SEQ ID NO: 49750 - protein, 179 aa, Arabidopsis thaliana
  peptide (1)..(179): Ceres Seq. ID no. 11407429
MATAAKVAGIGVGKGGFKGFGFPPATEQFRVKTAAAAASSKPVSASISSVVHSSVEEDGMIMQRPVWDDWEFAEEEPIPRVVFSKPPSLEEAKEATEDLKEAINLVYMSSPKSSAAMEGSNDGGSVSKMLSGFQSSENRAVESAVPQVALQAFAFLSENTAAQVYSDSSLFAWLNGLCS

SEQ ID NO: 49751 - DNA, 939 bp, Arabidopsis thaliana
  misc_feature (1)..(939): Ceres Seq. ID no. 13592603
  misc_feature (1)..(939): Ortholog of  Ceres SEQ ID NO 14314174 as cited in SEQ ID NO 54350
  misc_feature (1)..(939): Ortholog of  Ceres SEQ ID NO 15224566 as cited in SEQ ID NO 55626
  misc_feature (1)..(939): Ortholog of  Ceres SEQ ID NO 13502979 as cited in SEQ ID NO 69150
ggacaaggctttcgaagaaacccaaacaaaaaaaaacttcaacgccgtttcttcttccattaatctcatctctcaatcaaccaaaagcttcccatctcaaatccctcagtttgattttctaggcaaacaatcatctgccaccatgtttatgaatcggctattcgggaaacccaaacaggagactagtactctccaaacgttagacaagctcaatgagactcttgagatgttagagaagaaggagaatgttcttctcaagaaagctactggagaggttgagaaagctaaggaattctcccgggcgaagaacaaacgcgcggctatacaatgtttgaaaaggaaaaggttatatgagcaacaagttgaacagctcgggaatttccagctccgtattcatgatcaaatgattatgttagaaggtgctaaagcaacaacagagactgtagatgctttgaggactggagcttctgcaatgaaagctatgcagaaagcaacaaacattgatgatgttgacaagacaatggatgagatcaatgaacaaactgagaacatgaaacagatccaagaagcattgtcggctccatttggggctaatgattttgatgaggatgaattggaagcagaacttgacgaactagaaggcgctgagctagaagagcaacttcttcagcctgttccaatccatgtgcctcaaggaaacaagcctgctcgtgctccagctcagaagcaacctactgctgaggaagatgaactcgctgccttacaagctgagatggctctctaagctgaagctagccttggaagatttcgattaagtggggagatttgtgtgtgcattatctaaaaacagaaagaaaagattttatgtatataaggatccgagtctaattgatcggaagattttttttttctttttcaatataattaacttattaaact

SEQ ID NO: 49752 - protein, 260 aa, Arabidopsis thaliana
  peptide (1)..(260): Ceres Seq. ID no. 13592604
DKAFEETQTKKNFNAVSSSINLISQSTKSFPSQIPQFDFLGKQSSATMFMNRLFGKPKQETSTLQTLDKLNETLEMLEKKENVLLKKATGEVEKAKEFSRAKNKRAAIQCLKRKRLYEQQVEQLGNFQLRIHDQMIMLEGAKATTETVDALRTGASAMKAMQKATNIDDVDKTMDEINEQTENMKQIQEALSAPFGANDFDEDELEAELDELEGAELEEQLLQPVPIHVPQGNKPARAPAQKQPTAEEDELAALQAEMAL

SEQ ID NO: 49753 - protein, 213 aa, Arabidopsis thaliana
  peptide (1)..(213): Ceres Seq. ID no. 13592605
MFMNRLFGKPKQETSTLQTLDKLNETLEMLEKKENVLLKKATGEVEKAKEFSRAKNKRAAIQCLKRKRLYEQQVEQLGNFQLRIHDQMIMLEGAKATTETVDALRTGASAMKAMQKATNIDDVDKTMDEINEQTENMKQIQEALSAPFGANDFDEDELEAELDELEGAELEEQLLQPVPIHVPQGNKPARAPAQKQPTAEEDELAALQAEMAL

SEQ ID NO: 49754 - protein, 211 aa, Arabidopsis thaliana
  peptide (1)..(211): Ceres Seq. ID no. 13592606
MNRLFGKPKQETSTLQTLDKLNETLEMLEKKENVLLKKATGEVEKAKEFSRAKNKRAAIQCLKRKRLYEQQVEQLGNFQLRIHDQMIMLEGAKATTETVDALRTGASAMKAMQKATNIDDVDKTMDEINEQTENMKQIQEALSAPFGANDFDEDELEAELDELEGAELEEQLLQPVPIHVPQGNKPARAPAQKQPTAEEDELAALQAEMAL

SEQ ID NO: 49755 - DNA, 2622 bp, Arabidopsis thaliana; identical to SEQ ID NO: 45814
  misc_feature (1)..(2622): Ceres Seq. ID no. 13647162
  misc_feature (1)..(2622): Ortholog of  Ceres SEQ ID NO 13663060 as cited in SEQ ID NO 60964
  misc_feature (1)..(2622): Ortholog of  Ceres SEQ ID NO 13598532 as cited in SEQ ID NO 65204
  misc_feature (1)..(2622): Ortholog of  Ceres SEQ ID NO 13656849 as cited in SEQ ID NO 65764
  misc_feature (1)..(2622): Ortholog of  Ceres SEQ ID NO 13656501 as cited in SEQ ID NO 69206

SEQ ID NO: 49756 - protein, 499 aa, Arabidopsis thaliana; identical to SEQ ID NO: 45815
  peptide (1)..(499): Ceres Seq. ID no. 13647163

SEQ ID NO: 49757 - protein, 465 aa, Arabidopsis thaliana; identical to SEQ ID NO: 45816
  peptide (1)..(465): Ceres Seq. ID no. 13647164

SEQ ID NO: 49758 - protein, 443 aa, Arabidopsis thaliana; identical to SEQ ID NO: 45817
  peptide (1)..(443): Ceres Seq. ID no. 13647165

SEQ ID NO: 49759 - DNA, 1488 bp, Arabidopsis thaliana; identical to SEQ ID NO: 46447
  misc_feature (1)..(1488): Ceres Seq. ID no. 13592020
  misc_feature (1)..(1488): Ortholog of  Ceres SEQ ID NO 14314404 as cited in SEQ ID NO 57421
  misc_feature (1)..(1488): Ortholog of  Ceres SEQ ID NO 13493536 as cited in SEQ ID NO 58515
  misc_feature (1)..(1488): Ortholog of  Ceres SEQ ID NO 15225741 as cited in SEQ ID NO 59606
  misc_feature (1)..(1488): Ortholog of  Ceres SEQ ID NO 12618461 as cited in SEQ ID NO 64349

SEQ ID NO: 49760 - protein, 434 aa, Arabidopsis thaliana; identical to SEQ ID NO: 46448
  peptide (1)..(434): Ceres Seq. ID no. 13592021

SEQ ID NO: 49761 - protein, 425 aa, Arabidopsis thaliana; identical to SEQ ID NO: 46449
  peptide (1)..(425): Ceres Seq. ID no. 13592022

SEQ ID NO: 49762 - protein, 313 aa, Arabidopsis thaliana; identical to SEQ ID NO: 46450
  peptide (1)..(313): Ceres Seq. ID no. 13592023

SEQ ID NO: 49763 - DNA, 2362 bp, Arabidopsis thaliana; identical to SEQ ID NO: 45950
  misc_feature (1)..(2362): Ceres Seq. ID no. 12560857
  misc_feature (1)..(2362): Ortholog of  Ceres SEQ ID NO 12583190 as cited in SEQ ID NO 56386

SEQ ID NO: 49764 - protein, 549 aa, Arabidopsis thaliana; identical to SEQ ID NO: 45951
  peptide (1)..(549): Ceres Seq. ID no. 12560858

SEQ ID NO: 49765 - protein, 546 aa, Arabidopsis thaliana; identical to SEQ ID NO: 45952
  peptide (1)..(546): Ceres Seq. ID no. 12560859

SEQ ID NO: 49766 - protein, 544 aa, Arabidopsis thaliana; identical to SEQ ID NO: 45953
  peptide (1)..(544): Ceres Seq. ID no. 12560860

SEQ ID NO: 49767 - DNA, 1359 bp, Arabidopsis thaliana
  misc_feature (1)..(1359): Ceres Seq. ID no. 13587957
  misc_feature (1)..(1359): Ortholog of  Ceres SEQ ID NO 13597574 as cited in SEQ ID NO 64677
  misc_feature (1)..(1359): Ortholog of  Ceres SEQ ID NO 13597843 as cited in SEQ ID NO 64850
  misc_feature (1)..(1359): Ortholog of  Ceres SEQ ID NO 13597678 as cited in SEQ ID NO 65375
  misc_feature (1)..(1359): Ortholog of  Ceres SEQ ID NO 13596180 as cited in SEQ ID NO 67941
  misc_feature (1)..(1359): Ortholog of  Ceres SEQ ID NO 13591190 as cited in SEQ ID NO 68044
  misc_feature (1)..(1359): Ortholog of  Ceres SEQ ID NO 13595961 as cited in SEQ ID NO 68223
atgaagaagattgagctcgtgttcataccttcgccgggaatcggccatctccggccaaccgtgaagctagcaaagcaactcatcggaagcgaagaacattttttcaatcaccagtctcaagatcgcctccgctacgaacccatctccgtcgaaaaacaaccaccaaccgcaaatcttgagccgtctcaagtctacatcgagaaacaaaaaccacaagtgagagacaccgtctccagaatcatcaatccaacaagaaaactcgccggattcgtggtggacatgttctgttcttcaatgatcgatatagctaacgaatttggagttccttgttatatgatctacacatcaaacgctacgtttttgggaatcacacttcacgttcaagaaatgtacgacgacaaaaagtatgacgtcagcgatttggatgagtcagtcaacgaattggagtttccttgtttgactcgtccttatccagtgaagtgccttcctcatatccttagttcaaaagattggttacctttttttgcagctcaaggtaggtctttccggaagatgaaaggtattttggtaaatacagttgctgagcttgagcctcacgctttgaagatgtttaacaatgttgatcttcctcaagcttatcctgttggaccagtgttgcatcttgataacggcgatgacgacgatgaaaagagattggaggttttgcggtggcttgatgatcaaccgcctaaatctgttttgtttctctgttttggaagtatgggaggtttcactgaggaacaaactagagaggtagctgtggcgttaaaccgaagtggtcaccggtttctttggtctctccgtcgtgcatcgccgaatataatgatggaacgtcccggagattataagaatcttgaggaggttttaccggacgggttcttggaacggactttggatagagggaaagtgattggatgggctccacaagtggcggtgttagagaagccggcgataggagggtttgttactcattgtgggtggaactctatgttagagagcttgtggtttggtgttccgatggtgacgtggccgctttacgcggagcagaaggttaacgcgtttgagatggtggaggagctgggattggcggtggagatacgtaagtgcattagtggagatttgttgttgatcggagagatggagatagtgacggcggaggatatagagagagctataaggtgtgtgatggagcaggatagtgatgtaaggagtcgagtgaaggagatggcggagaagtgtcacgtggcgttgatggacggtggatcttccaagacggctttgcaaaagtttattcaagacgtgatagagaatgttgcttaa

SEQ ID NO: 49768 - protein, 452 aa, Arabidopsis thaliana
  peptide (1)..(452): Ceres Seq. ID no. 13587958
MKKIELVFIPSPGIGHLRPTVKLAKQLIGSEEHFFNHQSQDRLRYEPISVEKQPPTANLEPSQVYIEKQKPQVRDTVSRIINPTRKLAGFVVDMFCSSMIDIANEFGVPCYMIYTSNATFLGITLHVQEMYDDKKYDVSDLDESVNELEFPCLTRPYPVKCLPHILSSKDWLPFFAAQGRSFRKMKGILVNTVAELEPHALKMFNNVDLPQAYPVGPVLHLDNGDDDDEKRLEVLRWLDDQPPKSVLFLCFGSMGGFTEEQTREVAVALNRSGHRFLWSLRRASPNIMMERPGDYKNLEEVLPDGFLERTLDRGKVIGWAPQVAVLEKPAIGGFVTHCGWNSMLESLWFGVPMVTWPLYAEQKVNAFEMVEELGLAVEIRKCISGDLLLIGEMEIVTAEDIERAIRCVMEQDSDVRSRVKEMAEKCHVALMDGGSSKTALQKFIQDVIENVA

SEQ ID NO: 49769 - protein, 359 aa, Arabidopsis thaliana
  peptide (1)..(359): Ceres Seq. ID no. 13587959
MFCSSMIDIANEFGVPCYMIYTSNATFLGITLHVQEMYDDKKYDVSDLDESVNELEFPCLTRPYPVKCLPHILSSKDWLPFFAAQGRSFRKMKGILVNTVAELEPHALKMFNNVDLPQAYPVGPVLHLDNGDDDDEKRLEVLRWLDDQPPKSVLFLCFGSMGGFTEEQTREVAVALNRSGHRFLWSLRRASPNIMMERPGDYKNLEEVLPDGFLERTLDRGKVIGWAPQVAVLEKPAIGGFVTHCGWNSMLESLWFGVPMVTWPLYAEQKVNAFEMVEELGLAVEIRKCISGDLLLIGEMEIVTAEDIERAIRCVMEQDSDVRSRVKEMAEKCHVALMDGGSSKTALQKFIQDVIENVA

SEQ ID NO: 49770 - protein, 354 aa, Arabidopsis thaliana
  peptide (1)..(354): Ceres Seq. ID no. 13587960
MIDIANEFGVPCYMIYTSNATFLGITLHVQEMYDDKKYDVSDLDESVNELEFPCLTRPYPVKCLPHILSSKDWLPFFAAQGRSFRKMKGILVNTVAELEPHALKMFNNVDLPQAYPVGPVLHLDNGDDDDEKRLEVLRWLDDQPPKSVLFLCFGSMGGFTEEQTREVAVALNRSGHRFLWSLRRASPNIMMERPGDYKNLEEVLPDGFLERTLDRGKVIGWAPQVAVLEKPAIGGFVTHCGWNSMLESLWFGVPMVTWPLYAEQKVNAFEMVEELGLAVEIRKCISGDLLLIGEMEIVTAEDIERAIRCVMEQDSDVRSRVKEMAEKCHVALMDGGSSKTALQKFIQDVIENVA

SEQ ID NO: 49771 - DNA, 1201 bp, Arabidopsis thaliana
  misc_feature (1)..(1201): Ceres Seq. ID no. 13648117
  misc_feature (1)..(1201): Ortholog of  Ceres SEQ ID NO 14312148 as cited in SEQ ID NO 57263
gacggtgaagagaagaggcaagagagagagagagagggaaaaggaagacgatgatgatttctcggagacccgtttcaagtccgggtcgggtagagaaatatccaccgccttttatggggtttttgagaagtaagagcaacggcggaagtacaagcaggagtagaagtcgaagcagaggaaggtcacgcgctagtcctcttttcgttcgccggaataaatccgcggcggcggtgactcaagaaccgtcgtctccgaaggttacttgcatgggtcaagtccgggtcaaccgatcgaagcccaaaattaaacccgaatctcgagataacccgacccgacgacgatgtgagtggctccgaaacgcgtcgttttataacaaattcgccgggaaaatcaaaacgatgacgttttggcctaaatggagactgtgttcgttttcgtgtgcttgtcggaatttgaaggagaaagattctccgagaagtcaattagatcatccgacaacggaatcagtcagagaaatcaaagaagaaatcgaaggagaagaaaatttcgaaatccctaaattatttgtgtctccggctactacgccgcctataaacgctctgttgttgacgagaagcagatctgcaccgtatagatcgtcgtcgttggctttcagattctgggaagaaaataaccaacgagaagttgaatcacagcaaaatgtgagatcggagaaaactgaatcggaagttcccatcgagaaaatcaatggttttcacgagccggagtatgttgacagagatgaagaagaattcacgaagttaagatttgtacggcagccggtgttgacaaggagcaaatcggagccggcgaggatcggcgagaagatgatggtgttgcttcccgatgaagaagaaggttaggtagggtttaggtctctcacgtgattagtcaataattgcactaatcttaattaattaatcgctggtatgactaatttaatttgcattgtttaggataatttgactgtgttttagatatagtagaggaaacaaatttgtataaagatttgtaaccatacatataacgtaaggtgtagatatgtttggcattcaaaaaaaaaatgtttaacaatacactatgtaatcattttcaatttgtaaatttacattatctgtttgattgaaaaaaaaaaaaaaaaaaactcgagggggggcccggt

SEQ ID NO: 49772 - protein, 283 aa, Arabidopsis thaliana
  peptide (1)..(283): Ceres Seq. ID no. 13648118
MMISRRPVSSPGRVEKYPPPFMGFLRSKSNGGSTSRSRSRSRGRSRASPLFVRRNKSAAAVTQEPSSPKVTCMGQVRVNRSKPKIKPESRDNPTRRRCEWLRNASFYNKFAGKIKTMTFWPKWRLCSFSCACRNLKEKDSPRSQLDHPTTESVREIKEEIEGEENFEIPKLFVSPATTPPINALLLTRSRSAPYRSSSLAFRFWEENNQREVESQQNVRSEKTESEVPIEKINGFHEPEYVDRDEEEFTKLRFVRQPVLTRSKSEPARIGEKMMVLLPDEEEG

SEQ ID NO: 49773 - protein, 282 aa, Arabidopsis thaliana
  peptide (1)..(282): Ceres Seq. ID no. 13648119
MISRRPVSSPGRVEKYPPPFMGFLRSKSNGGSTSRSRSRSRGRSRASPLFVRRNKSAAAVTQEPSSPKVTCMGQVRVNRSKPKIKPESRDNPTRRRCEWLRNASFYNKFAGKIKTMTFWPKWRLCSFSCACRNLKEKDSPRSQLDHPTTESVREIKEEIEGEENFEIPKLFVSPATTPPINALLLTRSRSAPYRSSSLAFRFWEENNQREVESQQNVRSEKTESEVPIEKINGFHEPEYVDRDEEEFTKLRFVRQPVLTRSKSEPARIGEKMMVLLPDEEEG

SEQ ID NO: 49774 - protein, 262 aa, Arabidopsis thaliana
  peptide (1)..(262): Ceres Seq. ID no. 13648120
MGFLRSKSNGGSTSRSRSRSRGRSRASPLFVRRNKSAAAVTQEPSSPKVTCMGQVRVNRSKPKIKPESRDNPTRRRCEWLRNASFYNKFAGKIKTMTFWPKWRLCSFSCACRNLKEKDSPRSQLDHPTTESVREIKEEIEGEENFEIPKLFVSPATTPPINALLLTRSRSAPYRSSSLAFRFWEENNQREVESQQNVRSEKTESEVPIEKINGFHEPEYVDRDEEEFTKLRFVRQPVLTRSKSEPARIGEKMMVLLPDEEEG

SEQ ID NO: 49775 - DNA, 1183 bp, Arabidopsis thaliana
  misc_feature (1)..(1183): Ceres Seq. ID no. 13648121
  misc_feature (1)..(1183): Ortholog of  Ceres SEQ ID NO 15175931 as cited in SEQ ID NO 54701
aaatcgtggtaattggtgatggagaaagacgataacagtgacaaggtttgtctttcagtgaaggagaaatatacgtcagagcagcctgaggaaatggtgacaaatctgaaggcatctgtaagagaattgagtgtgaaagtgaaagaacagaatcagagaaaatgtgatgctaaggataagttgcagcagttgcgagaaagaataagcaaggaagttgttgatgtttcagtccaggagttgataccgcttcttagatcactcaaggaatttgtgaaggaggaatctgaagtcaggtctcgttgtaatgttaaacgttctgctttagaagatgcagttcatgatttggaggagagagctggtaaggggcttgatggtgagattcaagaggaagatttagatggtttgttggttgtatctttagataatctcacttcagcaaagaaggagcttggagcaacgctaagagagatagtctctctgaagcgacagattgacgatgtgccatgccaatctgaactcctccaatatgaaagaagattctcagagctgaatgtctgtattcaggagaaacttcaacaaactaggaagctctatgcaacatacaatgctcttttagaaatcaaagatttgatgcttaaggagacatcattattgaattccataggttcacagtttcaagacgtgattggtactcctgctggccgtgtgaagcttattgattcaatggaaggagtcatgaaaggaatccaacagaagattggaaaaatacaacttgggcttcaagaagagcagaggctccgtgatgcttcaaaagaaaagtatatagctgcagctgcagagcaaagaaaatgctacactgtactaagagcataccaggaggaatgtactaagaatgagaggctgagaagtcatatatctgccatgaacgaacacctctgactcgaagaagggtttgaataaggtgatatgaagtgactctcctttcgagttacagctaaccagagtagagccagagttgatttagatatgattctcttgtgatgtgatgtatccatatgctcagccttacatggaaatatacgaaaatcgataggcctagaaatagtaggtttggttgaccaatatgtttatatatgagctatgagaaaatattattctctaaatcattgaggagatgagtttg

SEQ ID NO: 49776 - protein, 306 aa, Arabidopsis thaliana
  peptide (1)..(306): Ceres Seq. ID no. 13648122
MEKDDNSDKVCLSVKEKYTSEQPEEMVTNLKASVRELSVKVKEQNQRKCDAKDKLQQLRERISKEVVDVSVQELIPLLRSLKEFVKEESEVRSRCNVKRSALEDAVHDLEERAGKGLDGEIQEEDLDGLLVVSLDNLTSAKKELGATLREIVSLKRQIDDVPCQSELLQYERRFSELNVCIQEKLQQTRKLYATYNALLEIKDLMLKETSLLNSIGSQFQDVIGTPAGRVKLIDSMEGVMKGIQQKIGKIQLGLQEEQRLRDASKEKYIAAAAEQRKCYTVLRAYQEECTKNERLRSHISAMNEHL

SEQ ID NO: 49777 - protein, 281 aa, Arabidopsis thaliana
  peptide (1)..(281): Ceres Seq. ID no. 13648123
MVTNLKASVRELSVKVKEQNQRKCDAKDKLQQLRERISKEVVDVSVQELIPLLRSLKEFVKEESEVRSRCNVKRSALEDAVHDLEERAGKGLDGEIQEEDLDGLLVVSLDNLTSAKKELGATLREIVSLKRQIDDVPCQSELLQYERRFSELNVCIQEKLQQTRKLYATYNALLEIKDLMLKETSLLNSIGSQFQDVIGTPAGRVKLIDSMEGVMKGIQQKIGKIQLGLQEEQRLRDASKEKYIAAAAEQRKCYTVLRAYQEECTKNERLRSHISAMNEHL

SEQ ID NO: 49778 - DNA, 1830 bp, Arabidopsis thaliana
  misc_feature (1)..(1830): Ceres Seq. ID no. 13587961
  misc_feature (1)..(1830): Ortholog of  Ceres SEQ ID NO 14311857 as cited in SEQ ID NO 51473
  misc_feature (1)..(1830): Ortholog of  Ceres SEQ ID NO 14303094 as cited in SEQ ID NO 66388
atggttggtggtggaaacaggagagatgagggatcgatgccgattcagaacaccaacttgtttgctgctttggatacttcgaggaagaagaagaagtctgataaggctggtaagagcaaagcttcctctaagagagaagattcacagaaggagcctgagccacaggttttctgggcacctacgcctctcaaagcaaaggcttgggctgatatcgatagcgatgatgaagatgatgattattacgctaccactgctccacctcagtccctgtggagcacttctgaagcctcccattcagatgctaaagacgttcccgctgaggaaattgaaagcgaagaagacactcttgatgatggagatgatgatgatgtggaggaagatcacgagcagggaacagagacacaagttcatccagaagcagagcctgaggtgaaaaaggctcctgaagttcgtgctcctcctaaggaggcagagaggcaactttccaagaaagagaggaaaaagaaggaacttgctgagcttgaggctttgctagcagattttggagttgcaaccaaagatgagaatggtcaacaagactctcaagataagggggagaagaaagaagtgaatgatgagggagagaagaaggagaacacaaccggagaatcaaaggcctcaaagaagaagaaaaagaaggacaaacagaaggagctaaaagaatcccagagtgaagtgaagagcaactcggatgctgcaagtgagtccgctgagcaggaggagtcttcttcttccatcgacgtcaaagaacggctaaagaagattgcatcaatgaagaagaagaaatcaagcaaggaggttgatggtgcttcaacagctgctgcaaaggaagcagctgcgaggaaggcaaagttggccgcagcgaagaaaaaagaaaagaaaaactacaatcagcaacctgtgagacaattcgtcgtgttgcttgctactctcgacgacggagaagtagaaatgtggagaagagtgatcggaaatgtcgccgtccggcatcaattacagcgagcgctatctagtaaagccggtggaagtggaaagagcgccaacgtttcagctgcagtggattcgatgcttctgcgttccctcaaggaacattacttagaggtttctaagatgactcctcctccgaaagtgagtcctccgtcaccatttgagattgtgaaagggtcgcttgaaggaagtactggtgctgttctgaagaaatctgttggaaatgaagagatcaatcttttcgttatgcgcttggctcacggaggtgatgaagaagacgatggtgggatcaaccagttgttccttcatgttgctgtatcaaagccaaatcagcctgattctttgcatttcctttgtggcctttaccctgatgcattgggtattcattctgtttccatgaggccaaaacttgaggctttggagatgtctgatgatcctactcaatacacaggcccttcttttgaagagctcgatgagaagatgagagatgtattccatggattcctagaggaacgaggtgtgaacgagagtctcttcccctttcttcaggcatggctctatgtaaaggatcaccgtaacctactgcgatggttcaaatcagttggcacgtttgttcatgaaaacccatctgcagaaaacaccgcctagaaggacgtgtcttttcggtctctggatcggtttctgcggttaatttttttagtatggcactataccgcttttaaatgtttcaggaactgaatcacttttattttcaaaccatttcaaaacatatgcatccgagattaatgttaagaaaaagttctc

SEQ ID NO: 49779 - protein, 557 aa, Arabidopsis thaliana
  peptide (1)..(557): Ceres Seq. ID no. 13587962
MVGGGNRRDEGSMPIQNTNLFAALDTSRKKKKSDKAGKSKASSKREDSQKEPEPQVFWAPTPLKAKAWADIDSDDEDDDYYATTAPPQSLWSTSEASHSDAKDVPAEEIESEEDTLDDGDDDDVEEDHEQGTETQVHPEAEPEVKKAPEVRAPPKEAERQLSKKERKKKELAELEALLADFGVATKDENGQQDSQDKGEKKEVNDEGEKKENTTGESKASKKKKKKDKQKELKESQSEVKSNSDAASESAEQEESSSSIDVKERLKKIASMKKKKSSKEVDGASTAAAKEAAARKAKLAAAKKKEKKNYNQQPVRQFVVLLATLDDGEVEMWRRVIGNVAVRHQLQRALSSKAGGSGKSANVSAAVDSMLLRSLKEHYLEVSKMTPPPKVSPPSPFEIVKGSLEGSTGAVLKKSVGNEEINLFVMRLAHGGDEEDDGGINQLFLHVAVSKPNQPDSLHFLCGLYPDALGIHSVSMRPKLEALEMSDDPTQYTGPSFEELDEKMRDVFHGFLEERGVNESLFPFLQAWLYVKDHRNLLRWFKSVGTFVHENPSAENTA

SEQ ID NO: 49780 - protein, 545 aa, Arabidopsis thaliana
  peptide (1)..(545): Ceres Seq. ID no. 13587963
MPIQNTNLFAALDTSRKKKKSDKAGKSKASSKREDSQKEPEPQVFWAPTPLKAKAWADIDSDDEDDDYYATTAPPQSLWSTSEASHSDAKDVPAEEIESEEDTLDDGDDDDVEEDHEQGTETQVHPEAEPEVKKAPEVRAPPKEAERQLSKKERKKKELAELEALLADFGVATKDENGQQDSQDKGEKKEVNDEGEKKENTTGESKASKKKKKKDKQKELKESQSEVKSNSDAASESAEQEESSSSIDVKERLKKIASMKKKKSSKEVDGASTAAAKEAAARKAKLAAAKKKEKKNYNQQPVRQFVVLLATLDDGEVEMWRRVIGNVAVRHQLQRALSSKAGGSGKSANVSAAVDSMLLRSLKEHYLEVSKMTPPPKVSPPSPFEIVKGSLEGSTGAVLKKSVGNEEINLFVMRLAHGGDEEDDGGINQLFLHVAVSKPNQPDSLHFLCGLYPDALGIHSVSMRPKLEALEMSDDPTQYTGPSFEELDEKMRDVFHGFLEERGVNESLFPFLQAWLYVKDHRNLLRWFKSVGTFVHENPSAENTA

SEQ ID NO: 49781 - protein, 287 aa, Arabidopsis thaliana
  peptide (1)..(287): Ceres Seq. ID no. 13587964
MKKKKSSKEVDGASTAAAKEAAARKAKLAAAKKKEKKNYNQQPVRQFVVLLATLDDGEVEMWRRVIGNVAVRHQLQRALSSKAGGSGKSANVSAAVDSMLLRSLKEHYLEVSKMTPPPKVSPPSPFEIVKGSLEGSTGAVLKKSVGNEEINLFVMRLAHGGDEEDDGGINQLFLHVAVSKPNQPDSLHFLCGLYPDALGIHSVSMRPKLEALEMSDDPTQYTGPSFEELDEKMRDVFHGFLEERGVNESLFPFLQAWLYVKDHRNLLRWFKSVGTFVHENPSAENTA

SEQ ID NO: 49782 - DNA, 789 bp, Arabidopsis thaliana
  misc_feature (1)..(789): Ceres Seq. ID no. 13588691
  misc_feature (1)..(789): Ortholog of  Ceres SEQ ID NO 13597679 as cited in SEQ ID NO 65073
atggataaaagatggagtcttcaaggtatgaatgctcttgtgaccggtggcactaaaggcatcggggaagctgttgtggaggaactgtcaattttgggagcaagagtccacacatgtgctagagacgagactcagcttcaagaacgtttacgtgaatggcaagaaaaagggtttcaggtcaccacttctatctgcgacgtttctttgcgtgagcaacgagagaaactcatggaaaccgtttcctctctcttccaaggaaaactcaacatcctcgtgaacaatgtgggaacgttaatgctcaagccgaccacagagtatacagcagaagaattctcgtttcttatggctacaaatctcgactcagctttccatatttcacagcttgcgcaccctttgttgaaagcctctggctcagggagcattgtgctcatgtcctctattgccggagtcgtgcatgtcggtgttggatccatctatggagcaacaaaaggagccatgaatcagttggctagaaacttagcttgcgaatgggcaagcgacaacataaggactaacgctatttgtccatggttaatcacaactcctttgattagtgatcttctcagtgttgaggagatgaaaaaagaagcagaggaaaggacacccatggggcgtgtgggagaggcaaatgaagtctcaccgcttgtggcatttctttgtcttcctgcagcttcttatattactggtcaagtcatttgtgttgatggaggtctcactgttaatggcttctcctatcagccacatgcttga

SEQ ID NO: 49783 - protein, 262 aa, Arabidopsis thaliana
  peptide (1)..(262): Ceres Seq. ID no. 13588692
MDKRWSLQGMNALVTGGTKGIGEAVVEELSILGARVHTCARDETQLQERLREWQEKGFQVTTSICDVSLREQREKLMETVSSLFQGKLNILVNNVGTLMLKPTTEYTAEEFSFLMATNLDSAFHISQLAHPLLKASGSGSIVLMSSIAGVVHVGVGSIYGATKGAMNQLARNLACEWASDNIRTNAICPWLITTPLISDLLSVEEMKKEAEERTPMGRVGEANEVSPLVAFLCLPAASYITGQVICVDGGLTVNGFSYQPHA

SEQ ID NO: 49784 - protein, 253 aa, Arabidopsis thaliana
  peptide (1)..(253): Ceres Seq. ID no. 13588693
MNALVTGGTKGIGEAVVEELSILGARVHTCARDETQLQERLREWQEKGFQVTTSICDVSLREQREKLMETVSSLFQGKLNILVNNVGTLMLKPTTEYTAEEFSFLMATNLDSAFHISQLAHPLLKASGSGSIVLMSSIAGVVHVGVGSIYGATKGAMNQLARNLACEWASDNIRTNAICPWLITTPLISDLLSVEEMKKEAEERTPMGRVGEANEVSPLVAFLCLPAASYITGQVICVDGGLTVNGFSYQPHA

SEQ ID NO: 49785 - protein, 186 aa, Arabidopsis thaliana
  peptide (1)..(186): Ceres Seq. ID no. 13588694
METVSSLFQGKLNILVNNVGTLMLKPTTEYTAEEFSFLMATNLDSAFHISQLAHPLLKASGSGSIVLMSSIAGVVHVGVGSIYGATKGAMNQLARNLACEWASDNIRTNAICPWLITTPLISDLLSVEEMKKEAEERTPMGRVGEANEVSPLVAFLCLPAASYITGQVICVDGGLTVNGFSYQPHA

SEQ ID NO: 49786 - DNA, 1182 bp, Arabidopsis thaliana
  misc_feature (1)..(1182): Ceres Seq. ID no. 13588695
  misc_feature (1)..(1182): Ortholog of  Ceres SEQ ID NO 14311249 as cited in SEQ ID NO 53778
atggaagtttccggcgtcgtcctccgacaaattccatgtgtttcttcaggttccgttgcaggtctccgattagtatcggaattttccggtaataccagaacggtagggtttcgaaccagaagatttcgtggtattgtgtgtaataatgagtttgcggataaagggcatgtgaattactatatcgagccaacgagatgcggcgaggagaaagagaaggttaaggttatggagaaggagaagaaggcgttgaagaagaaggcgaaagttcttaaaagtctttctaagaacttggatatgttctctagtatagggtttggtcttgatcctgaagctggtttggttggtgagattcagaccaagacaatctcggaagctacagagatattggttaagcagctggagcagttgaaagcagaggagaagatattgaagaaacagaggaaagaagagaaggctaaagccaaagccatgaagaagatgactgaaatggactctgaatcatcttcttcgtctgaatcaagtgatagtgattgtgataaaggcaaagttgtggacatgagctctttaagaaacaaggctaaaccggttcttgagccgttacaaccagaagccacagtagcaacccttcctaggatccaagaggatgcaatttcttgcaagaacaccagtgaagcattgcagattgctctacaaacatccacaatttttccttcaatggccaatcctggacagacattgaagacggtagaagcggtttcagtggttggattaccattgaatagagtagaagtgtgtatgggagggaagtgtaagagatcaggaggagctttgttgttggatgagtttcaaagggcgatgacgggtttcgaaggatctgctgtggcttgcaagtgcatggggaagtgtcgtgatggcccaaacgttagagttgtgaaggagactgatgctgtgatgactgattcagttaggacaccatccaagaccctttgtgtaggagttggattgcaggatgtggaaactattgtgacaagtttctttgatgaagaatgtagcagagaaggactcggttctgtctcatattgaaagtgttttgaaacggctaatgttttatatagtgtggtgctttctcattgtacatatttaccttctcgataagtcattgatataagccgtgtaattgcg

SEQ ID NO: 49787 - protein, 360 aa, Arabidopsis thaliana
  peptide (1)..(360): Ceres Seq. ID no. 13588696
MEVSGVVLRQIPCVSSGSVAGLRLVSEFSGNTRTVGFRTRRFRGIVCNNEFADKGHVNYYIEPTRCGEEKEKVKVMEKEKKALKKKAKVLKSLSKNLDMFSSIGFGLDPEAGLVGEIQTKTISEATEILVKQLEQLKAEEKILKKQRKEEKAKAKAMKKMTEMDSESSSSSESSDSDCDKGKVVDMSSLRNKAKPVLEPLQPEATVATLPRIQEDAISCKNTSEALQIALQTSTIFPSMANPGQTLKTVEAVSVVGLPLNRVEVCMGGKCKRSGGALLLDEFQRAMTGFEGSAVACKCMGKCRDGPNVRVVKETDAVMTDSVRTPSKTLCVGVGLQDVETIVTSFFDEECSREGLGSVSY

SEQ ID NO: 49788 - protein, 285 aa, Arabidopsis thaliana
  peptide (1)..(285): Ceres Seq. ID no. 13588697
MEKEKKALKKKAKVLKSLSKNLDMFSSIGFGLDPEAGLVGEIQTKTISEATEILVKQLEQLKAEEKILKKQRKEEKAKAKAMKKMTEMDSESSSSSESSDSDCDKGKVVDMSSLRNKAKPVLEPLQPEATVATLPRIQEDAISCKNTSEALQIALQTSTIFPSMANPGQTLKTVEAVSVVGLPLNRVEVCMGGKCKRSGGALLLDEFQRAMTGFEGSAVACKCMGKCRDGPNVRVVKETDAVMTDSVRTPSKTLCVGVGLQDVETIVTSFFDEECSREGLGSVSY

SEQ ID NO: 49789 - protein, 262 aa, Arabidopsis thaliana
  peptide (1)..(262): Ceres Seq. ID no. 13588698
MFSSIGFGLDPEAGLVGEIQTKTISEATEILVKQLEQLKAEEKILKKQRKEEKAKAKAMKKMTEMDSESSSSSESSDSDCDKGKVVDMSSLRNKAKPVLEPLQPEATVATLPRIQEDAISCKNTSEALQIALQTSTIFPSMANPGQTLKTVEAVSVVGLPLNRVEVCMGGKCKRSGGALLLDEFQRAMTGFEGSAVACKCMGKCRDGPNVRVVKETDAVMTDSVRTPSKTLCVGVGLQDVETIVTSFFDEECSREGLGSVSY

SEQ ID NO: 49790 - DNA, 1815 bp, Arabidopsis thaliana; identical to SEQ ID NO: 40621
  misc_feature (1)..(1815): Ceres Seq. ID no. 13622016
  misc_feature (1)..(1815): Ortholog of  Ceres SEQ ID NO 14316344 as cited in SEQ ID NO 60120

SEQ ID NO: 49791 - protein, 495 aa, Arabidopsis thaliana; identical to SEQ ID NO: 40622
  peptide (1)..(495): Ceres Seq. ID no. 15219327

SEQ ID NO: 49792 - protein, 352 aa, Arabidopsis thaliana; identical to SEQ ID NO: 40623
  peptide (1)..(352): Ceres Seq. ID no. 15219328

SEQ ID NO: 49793 - protein, 343 aa, Arabidopsis thaliana; identical to SEQ ID NO: 40624
  peptide (1)..(343): Ceres Seq. ID no. 15219329

SEQ ID NO: 49794 - DNA, 2089 bp, Arabidopsis thaliana; identical to SEQ ID NO: 48678
  misc_feature (1)..(2089): Ceres Seq. ID no. 13591931
  misc_feature (1)..(2089): Ortholog of  Ceres SEQ ID NO 13599900 as cited in SEQ ID NO 531
  misc_feature (1)..(2089): Ortholog of  Ceres SEQ ID NO 14310498 as cited in SEQ ID NO 55066
  misc_feature (1)..(2089): Ortholog of  Ceres SEQ ID NO 13659971 as cited in SEQ ID NO 67565
  misc_feature (1)..(2089): Ortholog of  Ceres SEQ ID NO 13500385 as cited in SEQ ID NO 67583

SEQ ID NO: 49795 - protein, 482 aa, Arabidopsis thaliana; identical to SEQ ID NO: 48679
  peptide (1)..(482): Ceres Seq. ID no. 13591932

SEQ ID NO: 49796 - protein, 411 aa, Arabidopsis thaliana; identical to SEQ ID NO: 48680
  peptide (1)..(411): Ceres Seq. ID no. 13591933

SEQ ID NO: 49797 - protein, 400 aa, Arabidopsis thaliana; identical to SEQ ID NO: 48681
  peptide (1)..(400): Ceres Seq. ID no. 13591934

SEQ ID NO: 49798 - DNA, 1979 bp, Arabidopsis thaliana
  misc_feature (1)..(1979): Ceres Seq. ID no. 12673269
  misc_feature (1)..(1979): Ortholog of  Ceres SEQ ID NO 15176759 as cited in SEQ ID NO 59678
  misc_feature (1)..(1979): Ortholog of  Ceres SEQ ID NO 13659971 as cited in SEQ ID NO 67565
aattccaattccagtcaaacaaaaccttcacaactcaattattcttccgattttggtttctctcttccaatcatccttcaagctcatctttttcttctacccaataacgaaagtctcctcctttactaatgggttgcttcagcagtaaacaccggaaaactcaaaacgacggcggagaaaaatcaatcccgatcaatccagttcaaacccatgtagtccccgagcatcgtaaacctcaaaccccaacaccaaaacccatgactcaaccaatccatcagcagatttcaacaccgtcttcaaatccagtctcagttcgagatccagatacgattttaggtaaaccattcgaagacatcaggaaattttacagcttggggaaagaattaggtcgaggtcaatttgggattacgtatatgtgtaaagagattggtactggtaacacttatgcttgcaaatcgattcttaagaggaagctaattagtaagcaagataaagaagatgtgaagagagagattcagataatgcagtatttgtctggacaacctaacattgttgagatcaaaggtgcttatgaagatagacaatctatacatttggttatggagttgtgtgctggtggtgagttgtttgataggattatagctcaaggtcattactctgagagagctgctgctggtatcattaggtctattgtcaatgttgttcagatttgtcattttatgggtgtggttcatcgagatctcaagcctgagaatttcttgctttcgagtaaagaggagaatgctatgcttaaagctactgatttcggtttgtccgtcttcatcgaagaaggaaaagtttaccgggatatagttgggagtgcttactacgttgctccagaagtattaaggcgaagttacggaaaagaaatcgacatttggagtgcaggtgtcattttatacatcctactcagcggtgtacctcctttttgggccgaaaatgagaaaggaatattcgatgaggtcataaaaggcgaaattgattttgtaagtgagccatggccttctatatctgaaagcgcgaaagatcttgttaggaagatgctaaccaaagacccgaagagacgaatcacggctgcacaggttcttgaacatccttggatcaaagggggagaagcaccagacaagcctattgatagcgctgtgttatcccgcatgaagcaattccgagcaatgaacaagcttaagaagctagctctaaaggttatcgcggagagtctatcagaagaggagattaaaggtcttaaaaccatgtttgcgaatatagataccgacaaaagcgggacaatcacttatgaagaactcaaaactgggctaactagacttgggtctagactctcggaaactgaagttaagcaactcatggaagccgctgacgtcgatggtaatggaacaatcgactactacgagtttatctctgcgacaatgcatagatacaaattagatcgagatgagcatgtatacaaagcattccaacactttgataaagacaacagcgggcacataactagagatgagttggaaagtgccatgaaggaatatggaatgggagatgaagctagcatcaaagaagttatatccgaagttgataccgacaatgatggaagaataaactttgaagaattttgcgcgatgatgagaagtggcagcacgcagccacaggggaaactgcttccattccattgatcaagtcggcataaatcccaacggtttatcaaccgaaagcgattcttgaacccagagtagaagagctaaaccgggggtaaaccgaggtgagcatagttgatatactgtctcaaaatgttgttctatcttctctgtgtttgaacagatttatttatccttctccttagttagtctgaaactgattttgagagactgtcatgtcttagctccttgtaacagtaacatatccacttatatttttttgaaactttcttg

SEQ ID NO: 49799 - protein, 531 aa, Arabidopsis thaliana
  peptide (1)..(531): Ceres Seq. ID no. 12673270
MGCFSSKHRKTQNDGGEKSIPINPVQTHVVPEHRKPQTPTPKPMTQPIHQQISTPSSNPVSVRDPDTILGKPFEDIRKFYSLGKELGRGQFGITYMCKEIGTGNTYACKSILKRKLISKQDKEDVKREIQIMQYLSGQPNIVEIKGAYEDRQSIHLVMELCAGGELFDRIIAQGHYSERAAAGIIRSIVNVVQICHFMGVVHRDLKPENFLLSSKEENAMLKATDFGLSVFIEEGKVYRDIVGSAYYVAPEVLRRSYGKEIDIWSAGVILYILLSGVPPFWAENEKGIFDEVIKGEIDFVSEPWPSISESAKDLVRKMLTKDPKRRITAAQVLEHPWIKGGEAPDKPIDSAVLSRMKQFRAMNKLKKLALKVIAESLSEEEIKGLKTMFANIDTDKSGTITYEELKTGLTRLGSRLSETEVKQLMEAADVDGNGTIDYYEFISATMHRYKLDRDEHVYKAFQHFDKDNSGHITRDELESAMKEYGMGDEASIKEVISEVDTDNDGRINFEEFCAMMRSGSTQPQGKLLPFH

SEQ ID NO: 49800 - protein, 488 aa, Arabidopsis thaliana
  peptide (1)..(488): Ceres Seq. ID no. 12673271
MTQPIHQQISTPSSNPVSVRDPDTILGKPFEDIRKFYSLGKELGRGQFGITYMCKEIGTGNTYACKSILKRKLISKQDKEDVKREIQIMQYLSGQPNIVEIKGAYEDRQSIHLVMELCAGGELFDRIIAQGHYSERAAAGIIRSIVNVVQICHFMGVVHRDLKPENFLLSSKEENAMLKATDFGLSVFIEEGKVYRDIVGSAYYVAPEVLRRSYGKEIDIWSAGVILYILLSGVPPFWAENEKGIFDEVIKGEIDFVSEPWPSISESAKDLVRKMLTKDPKRRITAAQVLEHPWIKGGEAPDKPIDSAVLSRMKQFRAMNKLKKLALKVIAESLSEEEIKGLKTMFANIDTDKSGTITYEELKTGLTRLGSRLSETEVKQLMEAADVDGNGTIDYYEFISATMHRYKLDRDEHVYKAFQHFDKDNSGHITRDELESAMKEYGMGDEASIKEVISEVDTDNDGRINFEEFCAMMRSGSTQPQGKLLPFH

SEQ ID NO: 49801 - protein, 436 aa, Arabidopsis thaliana
  peptide (1)..(436): Ceres Seq. ID no. 12673272
MCKEIGTGNTYACKSILKRKLISKQDKEDVKREIQIMQYLSGQPNIVEIKGAYEDRQSIHLVMELCAGGELFDRIIAQGHYSERAAAGIIRSIVNVVQICHFMGVVHRDLKPENFLLSSKEENAMLKATDFGLSVFIEEGKVYRDIVGSAYYVAPEVLRRSYGKEIDIWSAGVILYILLSGVPPFWAENEKGIFDEVIKGEIDFVSEPWPSISESAKDLVRKMLTKDPKRRITAAQVLEHPWIKGGEAPDKPIDSAVLSRMKQFRAMNKLKKLALKVIAESLSEEEIKGLKTMFANIDTDKSGTITYEELKTGLTRLGSRLSETEVKQLMEAADVDGNGTIDYYEFISATMHRYKLDRDEHVYKAFQHFDKDNSGHITRDELESAMKEYGMGDEASIKEVISEVDTDNDGRINFEEFCAMMRSGSTQPQGKLLPFH

SEQ ID NO: 49802 - DNA, 1741 bp, Arabidopsis thaliana; identical to SEQ ID NO: 45145
  misc_feature (1)..(1741): Ceres Seq. ID no. 13575914
  misc_feature (1)..(1741): Ortholog of  Ceres SEQ ID NO 15171476 as cited in SEQ ID NO 55569
  misc_feature (1)..(1741): Ortholog of  Ceres SEQ ID NO 14312069 as cited in SEQ ID NO 59191

SEQ ID NO: 49803 - protein, 530 aa, Arabidopsis thaliana; identical to SEQ ID NO: 45146
  peptide (1)..(530): Ceres Seq. ID no. 13575915

SEQ ID NO: 49804 - protein, 501 aa, Arabidopsis thaliana; identical to SEQ ID NO: 45147
  peptide (1)..(501): Ceres Seq. ID no. 13575916

SEQ ID NO: 49805 - protein, 433 aa, Arabidopsis thaliana; identical to SEQ ID NO: 45148
  peptide (1)..(433): Ceres Seq. ID no. 13575917

SEQ ID NO: 49806 - DNA, 1776 bp, Arabidopsis thaliana; identical to SEQ ID NO: 45411
  misc_feature (1)..(1776): Ceres Seq. ID no. 12600395
  misc_feature (1)..(1776): Ortholog of  Ceres SEQ ID NO 15178173 as cited in SEQ ID NO 54139
  misc_feature (1)..(1776): Ortholog of  Ceres SEQ ID NO 14304136 as cited in SEQ ID NO 59024

SEQ ID NO: 49807 - protein, 336 aa, Arabidopsis thaliana; identical to SEQ ID NO: 45412
  peptide (1)..(336): Ceres Seq. ID no. 12600396

SEQ ID NO: 49808 - protein, 328 aa, Arabidopsis thaliana; identical to SEQ ID NO: 45413
  peptide (1)..(328): Ceres Seq. ID no. 12600397

SEQ ID NO: 49809 - protein, 299 aa, Arabidopsis thaliana; identical to SEQ ID NO: 45414
  peptide (1)..(299): Ceres Seq. ID no. 12600398

SEQ ID NO: 49810 - DNA, 1387 bp, Arabidopsis thaliana
  misc_feature (1)..(1387): Ceres Seq. ID no. 14304385
  misc_feature (1)..(1387): Ortholog of  Ceres SEQ ID NO 15168521 as cited in SEQ ID NO 58180
atcttcattctcacactcaacccctctctctcctttcattctcattctctctcggctttgttttctctttaatctgattcatctattctatttctatcaccacacaaaaagaagaaaaaaaacaaactttactttaagaattttgaagaataaaatcaaaagagaataaccatggttttctcctccatccaagcctatcttgattcatccaactggcaacaggctcctccgagcaattataatcatgacggaacaggcgcctcagcaaatggaggtcatgttcttcgtcctcagctgcagccacagcagcagccacagcagcagccgcatcctaatgggagcgggggcggaggtggaggtggaggcggctcgatccgagcaggatcaatggtggacagagcaagacaagcaaacgtagccttgccagaagcagcactgaaatgtccgagatgcgaatccaccaacaccaagttctgctacttcaacaactacagcctcactcaaccacgccacttctgcaagacctgccggagatactggacacgtggcggagctctccgcaacgtcccagtcggcggtggctgccggagaaacaggcgtaccaaaagcaacagcaacaacaacaataacagcactgctactagcaataacaccagtttctcctccgggaatgcatccaccatcagcacgattctctcctcccactatggaggaaaccaagagagtatcttaagccagattttgtctccggcgaggctaatgaatcctacttacaatcatctcggagatctcacaagtaatacaaaaacagacaacaacatgagcttgttgaactatggaggattgagtcaagacttgaggtcaatccacatgggagcttctggtggctcgcttatgagctgtgttgatgaatggagatcggcgtcttatcatcagcagtcaagtatgggcggtgggaacttggaggattcttctaatcctaatccatccgcaaatgggttttactcttttgagtcgccgaggataacttcagcgtcaatctcttctgctttagcatcgcagttttcttcggttaaagttgaagataatccttacaaatgggttaatgtcaatggtaattgctcttcctggaatgatctttctgctttcggctcttctcgttgagttcaaccacacaacaaaaaggaaacttgagggtatactttggtggggaaaaaactagttaccaggttaattttgtcttatttttcgtttttgattagttaatgttgtttactactttcctcgttctcaatctactatgcttctagttctaggtagcctaagttattggatgtttttgagactatccctttgttatttttgtcgacaatgttctttcgttatc

SEQ ID NO: 49811 - protein, 330 aa, Arabidopsis thaliana
  peptide (1)..(330): Ceres Seq. ID no. 14304386
MVFSSIQAYLDSSNWQQAPPSNYNHDGTGASANGGHVLRPQLQPQQQPQQQPHPNGSGGGGGGGGGSIRAGSMVDRARQANVALPEAALKCPRCESTNTKFCYFNNYSLTQPRHFCKTCRRYWTRGGALRNVPVGGGCRRNRRTKSNSNNNNNSTATSNNTSFSSGNASTISTILSSHYGGNQESILSQILSPARLMNPTYNHLGDLTSNTKTDNNMSLLNYGGLSQDLRSIHMGASGGSLMSCVDEWRSASYHQQSSMGGGNLEDSSNPNPSANGFYSFESPRITSASISSALASQFSSVKVEDNPYKWVNVNGNCSSWNDLSAFGSSR

SEQ ID NO: 49812 - protein, 258 aa, Arabidopsis thaliana
  peptide (1)..(258): Ceres Seq. ID no. 14304387
MVDRARQANVALPEAALKCPRCESTNTKFCYFNNYSLTQPRHFCKTCRRYWTRGGALRNVPVGGGCRRNRRTKSNSNNNNNSTATSNNTSFSSGNASTISTILSSHYGGNQESILSQILSPARLMNPTYNHLGDLTSNTKTDNNMSLLNYGGLSQDLRSIHMGASGGSLMSCVDEWRSASYHQQSSMGGGNLEDSSNPNPSANGFYSFESPRITSASISSALASQFSSVKVEDNPYKWVNVNGNCSSWNDLSAFGSSR

SEQ ID NO: 49813 - DNA, 2139 bp, Arabidopsis thaliana
  misc_feature (1)..(2139): Ceres Seq. ID no. 13592484
  misc_feature (1)..(2139): Ortholog of  Ceres SEQ ID NO 12611963 as cited in SEQ ID NO 53414
gggtatctctctaatttatttatttatttcagattgctcaaaagaataaataaataaaagaatttggctgtctgatttccttgttcggaatcggagaagaaggaagactagattcgatgtgttggtgaagaagatctcgactttgttcaaaattccaatttcgttcgcctcaaagatcattctctcatcttctcgactttgatgcgattgattaaatatggtggatacggttattcccggagatatggcttgtttggatgcagatttgttgcagcttcaggaaatgtcttcctttgttctcaattctaaacctggattcactcagaagctcttcgaccagtggctttctcttcccgaagctcagcgacaggttggatcattgcttaaggatgctgtagctggagctcctatcaatgttactggaagtgcatcgggttctaattctgccactataccatctatgtttcctgcgggaagcgctcctcctctttcaccaagaagttgtggttcaccccgtacaaccaaacagagagccccttctaacttaggttctactctcaaagtagtcaacgagcctgttaaagagcctatacctcagttttatttccaaaatggtcgccctccaccaagcgagattaaagagcaatgtatgtttagaatcaatcacttcttttatggtcacatggatggcttgcagatacaagaattcaagttagtcaccagagaaatctgcaagctcccatctttcttctccacttcccttttccggaagatcgatctcaacaatacaggttttgttactagagatgcatttattgatttttgggtaaacgggaacatgttgataatggatacaacgacccaaatcttcaagatcctaaagcagaaagatcagagtttcattgttaaggatgatttcaaaccactacttaaagaactgttggcgacgcatcctggcctagagttcctgcaatccacacctgaattccaagaaagatatgctgaaactgtcacctacagaatattttactacataaatagatctggcaatggtcgaattacatttagggagcttaaacggggaaacttaattgatgctatgctacatgctgatgaagaagaagatattaacaaagtgttgagatacttctcatatgagcatttctatgtcatatactgcaagttctgggagctggatacggatcacgatttcctgattgacaaagaaaatcttatgagatatggaaaccatgctcttacctaccggattgtcgacagaatattctcccaggttgctaggaagttcactagcaaagttgaagggaagatggggtatgaagactttgtctatttcattcttgcggaagaagataaatcgtcagtgcctagcctagaatattggtttaagtgcatagacttggatgcaaatgggattataacgcgaaatgagatgcaattcttttatgaagagcagttgcatagaatggagtgcatggcgcaagaggctgttcttttcgaggatatcttatgtcagatgattgatatgatcggacctgagaacgaaagccatataacgctgcatgacctgaaaggctcaaagctctctggaaacgtcttcaacatcctttttaatctaaacaaatttatggcatttgaaacccgggatccgttcctcattcgtcaggagcgcgagaacccgacattgacagactgggaccgttttgcacatagagagtatattcggctatcaatggaagaagatgttgaagatgcatccaatggaagtgctgaggtttgggatgactcgtcactggaggctcccttctgagttcataaagaagagaaatgtaaagtccctgagaagaacatttggagctttgttgaggaaggaaagtgaaaaacaaacgaaaagccggtagtatcctctgttgaataccatacttagcttggatttgttttctaacttctctttatttgttagctgattctacagttatatttattaacaatcgtctagattttacagtcttcttcacctgtattgcattcactttgctctgatgtttctatctctgggtgttacttcatcatctccagatgttgagacttgtgaatttcaatgctatagttcctttaatt

SEQ ID NO: 49814 - protein, 536 aa, Arabidopsis thaliana
  peptide (1)..(536): Ceres Seq. ID no. 15221112
MVDTVIPGDMACLDADLLQLQEMSSFVLNSKPGFTQKLFDQWLSLPEAQRQVGSLLKDAVAGAPINVTGSASGSNSATIPSMFPAGSAPPLSPRSCGSPRTTKQRAPSNLGSTLKVVNEPVKEPIPQFYFQNGRPPPSEIKEQCMFRINHFFYGHMDGLQIQEFKLVTREICKLPSFFSTSLFRKIDLNNTGFVTRDAFIDFWVNGNMLIMDTTTQIFKILKQKDQSFIVKDDFKPLLKELLATHPGLEFLQSTPEFQERYAETVTYRIFYYINRSGNGRITFRELKRGNLIDAMLHADEEEDINKVLRYFSYEHFYVIYCKFWELDTDHDFLIDKENLMRYGNHALTYRIVDRIFSQVARKFTSKVEGKMGYEDFVYFILAEEDKSSVPSLEYWFKCIDLDANGIITRNEMQFFYEEQLHRMECMAQEAVLFEDILCQMIDMIGPENESHITLHDLKGSKLSGNVFNILFNLNKFMAFETRDPFLIRQERENPTLTDWDRFAHREYIRLSMEEDVEDASNGSAEVWDDSSLEAPF

SEQ ID NO: 49815 - protein, 527 aa, Arabidopsis thaliana
  peptide (1)..(527): Ceres Seq. ID no. 15221113
MACLDADLLQLQEMSSFVLNSKPGFTQKLFDQWLSLPEAQRQVGSLLKDAVAGAPINVTGSASGSNSATIPSMFPAGSAPPLSPRSCGSPRTTKQRAPSNLGSTLKVVNEPVKEPIPQFYFQNGRPPPSEIKEQCMFRINHFFYGHMDGLQIQEFKLVTREICKLPSFFSTSLFRKIDLNNTGFVTRDAFIDFWVNGNMLIMDTTTQIFKILKQKDQSFIVKDDFKPLLKELLATHPGLEFLQSTPEFQERYAETVTYRIFYYINRSGNGRITFRELKRGNLIDAMLHADEEEDINKVLRYFSYEHFYVIYCKFWELDTDHDFLIDKENLMRYGNHALTYRIVDRIFSQVARKFTSKVEGKMGYEDFVYFILAEEDKSSVPSLEYWFKCIDLDANGIITRNEMQFFYEEQLHRMECMAQEAVLFEDILCQMIDMIGPENESHITLHDLKGSKLSGNVFNILFNLNKFMAFETRDPFLIRQERENPTLTDWDRFAHREYIRLSMEEDVEDASNGSAEVWDDSSLEAPF

SEQ ID NO: 49816 - protein, 514 aa, Arabidopsis thaliana
  peptide (1)..(514): Ceres Seq. ID no. 15221114
MSSFVLNSKPGFTQKLFDQWLSLPEAQRQVGSLLKDAVAGAPINVTGSASGSNSATIPSMFPAGSAPPLSPRSCGSPRTTKQRAPSNLGSTLKVVNEPVKEPIPQFYFQNGRPPPSEIKEQCMFRINHFFYGHMDGLQIQEFKLVTREICKLPSFFSTSLFRKIDLNNTGFVTRDAFIDFWVNGNMLIMDTTTQIFKILKQKDQSFIVKDDFKPLLKELLATHPGLEFLQSTPEFQERYAETVTYRIFYYINRSGNGRITFRELKRGNLIDAMLHADEEEDINKVLRYFSYEHFYVIYCKFWELDTDHDFLIDKENLMRYGNHALTYRIVDRIFSQVARKFTSKVEGKMGYEDFVYFILAEEDKSSVPSLEYWFKCIDLDANGIITRNEMQFFYEEQLHRMECMAQEAVLFEDILCQMIDMIGPENESHITLHDLKGSKLSGNVFNILFNLNKFMAFETRDPFLIRQERENPTLTDWDRFAHREYIRLSMEEDVEDASNGSAEVWDDSSLEAPF

SEQ ID NO: 49817 - DNA, 1775 bp, Arabidopsis thaliana
  misc_feature (1)..(1775): Ceres Seq. ID no. 13578549
  misc_feature (1)..(1775): Ortholog of  Ceres SEQ ID NO 13585324 as cited in SEQ ID NO 64329
gaagacgtttctctctgcttcaccaccagagagatacatccaaaaattcatatctttccttcatttttattggcgttttaagaaaacaaagcttccccaattagggttttgtattagaagaatgggattgtggaatggaaaaggcaccggaggatttatcctctaccttctcgtggctttctccgtcgccgtcttctctgtttcttacgtcggagacacaacaaaccctattcatcatcatctctcttctctctctgccaccgaaaaaatttggccggatttgaagtttagctggaaacttgtgttggctacagtgatagcgtttctaggatcagcttgtgggactgttggtggtgttggaggtggtgggatttttgttcctatgctcactcttatactcgggttcgatacaaaatccgcagctgcaatatcaaaatgtatgataatgggagcatcagcatcatcagtttggtacaatgtacgagttcgtcatccgacaaaagaagtaccaatcttagattatgatcttgctcttctctttcaaccaatgcttcttctcggtatcactgttggtgtttctctcagtgttgtgttcccttattggctcattactgtcctcatcatcattcttttcgtcggtacttcttcgagatctttttttaaaggcattgagatgtggaaggaagagacattgttaaagaacgaaatggcgcagcaacgagctaatatggttaattcccggggagaacttttaatcgatacagagtatgagccgctttacccgagagaagaaaaatcagagctggaaataatacgctccaacctcaaatggaaagggcttctaattctagtaactgtgtggttgactttcttgctcattcaaattgtcaagaacgaaataaaggtctgcagcacaatatattggatactattcatcgtacagttcccagttgctttagcggtgtttgggtttgaagcaagcaaattgtatacagcgaacaaaaagaggttaaacagtggcaacactgaatgtatctgtgaagctacgattgagtggactcctctgagtctaatcttctgtggtctctgtggtctcattggaggtatcgtaggtggtctccttggatccggtggtggatttgttctcgggcctttgcttcttgagattggagtcatcccacaggttgctagcgcaacagctacctttgtgatgatgttttcttcgtccttatccgtagtcgagttctatctcctcaagagattcccaataccatacgcaatgtacttgatttcggtatcgattcttgccggtttttggggacaatcctttataagaaagctcgtggcgatcctgagaagagcttccataatcgttttcgttctctcaggagtcatttgtgcaagtgctctcacaatgggagtgattgggatagagaagagcataaagatgatacataaccatgaattcatgggattcttaggattctgcagcagtcaatgaatcaaccatctatctgaacaaaaatttcaagtgttttgttttcatttactggacaatttcggttgtccaacaccattattgtgagaagttataaaattagattgttttacttgcagtccaagtcatttgtgctctgttcttggtcaatacatagttgaccatcttcagaaatagagtttgtctaaattgttgtcattgtgttttgcttgtattcaaacgttgtattattatttgcgagacgatagataaaataaaaatggaagtctttttctat

SEQ ID NO: 49818 - protein, 499 aa, Arabidopsis thaliana; identical to SEQ ID NO: 48758
  peptide (1)..(499): Ceres Seq. ID no. 13578550

SEQ ID NO: 49819 - protein, 459 aa, Arabidopsis thaliana; identical to SEQ ID NO: 48759
  peptide (1)..(459): Ceres Seq. ID no. 13578551

SEQ ID NO: 49820 - protein, 372 aa, Arabidopsis thaliana; identical to SEQ ID NO: 48760
  peptide (1)..(372): Ceres Seq. ID no. 13578552

SEQ ID NO: 49821 - DNA, 783 bp, Arabidopsis thaliana
  misc_feature (1)..(783): Ceres Seq. ID no. 13587945
  misc_feature (1)..(783): Ortholog of  Ceres SEQ ID NO 13599506 as cited in SEQ ID NO 334
  misc_feature (1)..(783): Ortholog of  Ceres SEQ ID NO 15172970 as cited in SEQ ID NO 51736
  misc_feature (1)..(783): Ortholog of  Ceres SEQ ID NO 13598157 as cited in SEQ ID NO 61570
  misc_feature (1)..(783): Ortholog of  Ceres SEQ ID NO 15173774 as cited in SEQ ID NO 61771
  misc_feature (1)..(783): Ortholog of  Ceres SEQ ID NO 15175549 as cited in SEQ ID NO 0
attttattcaataacccttacaacaccgaatataactttgaaaaaaaaaacaaatggcttcaaagaactcagcctctcttgctcttttctttgcgctcaacatcctctttttcaccttaaccgttgcaacaaattgcaactgcaagccaagtcctaaaccaaagccagtcccaagtcctaagcccaagccggtccaatgtcctcctccaccccgtccttcagtcccaagtcctaatcctaggccggtcacacctccacgcacccctggttcatccggaaacagctgtcctattgatgctctcaagctcggtgtatgtgcaaatgtcttaagcagtctactcaacatccagttgggacagccatcctctcaacaatgttgctcgctcatccaaggtttggttgacgtcgacgctgcgatttgtctatgcactgctctgagggctaacgttcttggtatcaaccttaacgttccgatatctctcagcgttcttctcaacgtttgtaacagaaagcttccatctggtttccaatgtgcttgagcaatatccattatgcatacgatgcgatgccagtgcacaatatcgtcttcgaaatttattatagtttgaataaatgcatgtaaggtatagtttatgtatcaatcttaatttgttaaagagaaaaaataaatgtgtgagatttttatagtttttcattttgtttgtaaacgttgtcccccgccttccaagctttgtatgcttctgtagcaatctatttctatttctatttcaacgaaattttaat

SEQ ID NO: 49822 - protein, 161 aa, Arabidopsis thaliana
  peptide (1)..(161): Ceres Seq. ID no. 15220838
MASKNSASLALFFALNILFFTLTVATNCNCKPSPKPKPVPSPKPKPVQCPPPPRPSVPSPNPRPVTPPRTPGSSGNSCPIDALKLGVCANVLSSLLNIQLGQPSSQQCCSLIQGLVDVDAAICLCTALRANVLGINLNVPISLSVLLNVCNRKLPSGFQCA

SEQ ID NO: 49823 - DNA, 2186 bp, Arabidopsis thaliana
  misc_feature (1)..(2186): Ceres Seq. ID no. 12591109
  misc_feature (1)..(2186): Ortholog of  Ceres SEQ ID NO 12778278 as cited in SEQ ID NO 63035
attacagagtttctggttttttttggcttgcgtgatctctctcttctcttctctctctcactcatccaaatctttgatcatctcatcatcattggacttgaagctaactccagagttttatccagattcatcattttccaacgtttttcttcaatcgaatcatcagcgagtttggttccgacgacgatcttagtagcttcataagctcaagattcttcaggtttcggtggattttcttgagctcttctaagcttctccattttgtgagcctccgatttcgaacctggtagtgttgtggatctcactggaccacgaagctttcttcactgagctaagcttgaagtcaattcctctgttcgacaatcaatagaggaagatgaattatttcccagacgaggttatagagcacgtgtttgacttcgtagcttctcacaaagacaggaactcgatatctctggtctgcaaatcatggcacaagatcgagaggtttagtaggaaggaagtgttcatcggaaactgctacgcgattaacccggagaggttgatcaggaggtttccatgtctcaaatccttaactttaaaagggaagcctcattttgcagacttcaacttggttcctcatgaatggggaggtttcgtgcatccttggattgaagctttggctagaagccgtgtgggacttgaggagctgaggttgaagcggatggttgtaacagatgaaagcttggaccttctttcacgttcttttgcaaatttcaagtctttggttcttgttagctgtgaagggtttaccactgatggcttagcttccattgccgctaattgcaggcatcttcgtgagctggacttgcaagagaatgagattgatgatcatagaggtcaatggctgaactgttttccagatagctgcactactcttatgtcgttgaatttcgcttgccttaaaggagagaccaatgttgctgctttagaaaggcttgttgctaggtcaccaaacctgaagagcttgaagttaaaccgtgcagtaccgcttgacgcactcgcaaggttaatgagttgtgcgccgcagctagtggacttaggagtagggtcttatgagaatgagccagatcctgaatcttttgcaaaactcatgactgccattaagaaatacacatcgttaaggagcttgtctggctttttagaggttgctccactctgcctcccagcgttctacccaatttgccaaaaccttatctctttgaacctcagctatgcagctgaaatccaaggcaaccacctcattaagcttattcagctttgcaagagacttcaacgattatggatattggatagtattggtgacaaaggacttgcggttgtcgctgccacatgtaaagagttacaagagcttagagtttttccctctgatgtacatggtgaagaagataacaacgcatctgtgactgaggttggactagtcgccatttccgcaggttgccctaaacttcattcgattctgtacttctgcaaacagatgacaaacgcagcgctcatagccgtggccaaaaactgtccaaacttcatccggttcaggctatgcattctcgagccacacaaacctgaccacattacatttcaatcactggacgagggctttggtgcaatcgtacaagcttgcaagggtctaagacggctctctgtctccggtctcttaaccgatcaagtctttctctacatcggtatgtacgcggaacagctcgagatgctttcgatagcttttgcgggggacactgacaaaggaatgctctatgtgttgaatggatgcaaaaaaatgaggaagctggagataagggacagtccttttgggaacgctgcgcttcttgctgacgtgggtaggtacgaaacaatgcgatccctttggatgtcgtcttgtgaagtaacactcggtggctgcaagaggctcgcgcagaattcgccacggcttaacgtagagatcatcaacgagaatgagaataatgggatggaacagaatgaagaagatgaaagagagaaggttgataaactttacctctaccgaacagtggttgggactagaaaagatgcaccaccatatgttaggattctttagtctctttgcaccttcatgtgttttcaaacttttctttgtactagtttttgccttttatcaaacttggaacaaatac

SEQ ID NO: 49824 - protein, 577 aa, Arabidopsis thaliana
  peptide (1)..(577): Ceres Seq. ID no. 12591110
MNYFPDEVIEHVFDFVASHKDRNSISLVCKSWHKIERFSRKEVFIGNCYAINPERLIRRFPCLKSLTLKGKPHFADFNLVPHEWGGFVHPWIEALARSRVGLEELRLKRMVVTDESLDLLSRSFANFKSLVLVSCEGFTTDGLASIAANCRHLRELDLQENEIDDHRGQWLNCFPDSCTTLMSLNFACLKGETNVAALERLVARSPNLKSLKLNRAVPLDALARLMSCAPQLVDLGVGSYENEPDPESFAKLMTAIKKYTSLRSLSGFLEVAPLCLPAFYPICQNLISLNLSYAAEIQGNHLIKLIQLCKRLQRLWILDSIGDKGLAVVAATCKELQELRVFPSDVHGEEDNNASVTEVGLVAISAGCPKLHSILYFCKQMTNAALIAVAKNCPNFIRFRLCILEPHKPDHITFQSLDEGFGAIVQACKGLRRLSVSGLLTDQVFLYIGMYAEQLEMLSIAFAGDTDKGMLYVLNGCKKMRKLEIRDSPFGNAALLADVGRYETMRSLWMSSCEVTLGGCKRLAQNSPRLNVEIINENENNGMEQNEEDEREKVDKLYLYRTVVGTRKDAPPYVRIL

SEQ ID NO: 49825 - protein, 468 aa, Arabidopsis thaliana
  peptide (1)..(468): Ceres Seq. ID no. 12591111
MVVTDESLDLLSRSFANFKSLVLVSCEGFTTDGLASIAANCRHLRELDLQENEIDDHRGQWLNCFPDSCTTLMSLNFACLKGETNVAALERLVARSPNLKSLKLNRAVPLDALARLMSCAPQLVDLGVGSYENEPDPESFAKLMTAIKKYTSLRSLSGFLEVAPLCLPAFYPICQNLISLNLSYAAEIQGNHLIKLIQLCKRLQRLWILDSIGDKGLAVVAATCKELQELRVFPSDVHGEEDNNASVTEVGLVAISAGCPKLHSILYFCKQMTNAALIAVAKNCPNFIRFRLCILEPHKPDHITFQSLDEGFGAIVQACKGLRRLSVSGLLTDQVFLYIGMYAEQLEMLSIAFAGDTDKGMLYVLNGCKKMRKLEIRDSPFGNAALLADVGRYETMRSLWMSSCEVTLGGCKRLAQNSPRLNVEIINENENNGMEQNEEDEREKVDKLYLYRTVVGTRKDAPPYVRIL

SEQ ID NO: 49826 - protein, 396 aa, Arabidopsis thaliana
  peptide (1)..(396): Ceres Seq. ID no. 12591112
MSLNFACLKGETNVAALERLVARSPNLKSLKLNRAVPLDALARLMSCAPQLVDLGVGSYENEPDPESFAKLMTAIKKYTSLRSLSGFLEVAPLCLPAFYPICQNLISLNLSYAAEIQGNHLIKLIQLCKRLQRLWILDSIGDKGLAVVAATCKELQELRVFPSDVHGEEDNNASVTEVGLVAISAGCPKLHSILYFCKQMTNAALIAVAKNCPNFIRFRLCILEPHKPDHITFQSLDEGFGAIVQACKGLRRLSVSGLLTDQVFLYIGMYAEQLEMLSIAFAGDTDKGMLYVLNGCKKMRKLEIRDSPFGNAALLADVGRYETMRSLWMSSCEVTLGGCKRLAQNSPRLNVEIINENENNGMEQNEEDEREKVDKLYLYRTVVGTRKDAPPYVRIL

SEQ ID NO: 49827 - DNA, 1049 bp, Arabidopsis thaliana
  misc_feature (1)..(1049): Ceres Seq. ID no. 13647430
  misc_feature (1)..(1049): Ortholog of  Ceres SEQ ID NO 12557432 as cited in SEQ ID NO 92
  misc_feature (1)..(1049): Ortholog of  Ceres SEQ ID NO 14315553 as cited in SEQ ID NO 60445
  misc_feature (1)..(1049): Ortholog of  Ceres SEQ ID NO 15224319 as cited in SEQ ID NO 66044
  misc_feature (1)..(1049): Ortholog of  Ceres SEQ ID NO 13598045 as cited in SEQ ID NO 66822
agaaaccttgagagcttaaaaattcttcacttgggtctcttctctctctcttctcttgcgaccattccgttgttcgatccatatatcaaagcttgatttagttggttttcaatgggggacagtcagtactcgttttctctcaccaccttcagcccatcagggaagctggttcagatagaacatgccctaacagctgttggatcaggccaaacatcacttggaattaaagcttcaaatggagttgtcattgcaactgaaaagaaacttccttctatattggttgatgaagcgtctgttcaaaagattcaacatttgactcccaacattggaactgtttacagtggtatgggtcctgatttccgagttcttgtgcgaaagagtaggaagcaggctgagcaatatctccgtctgtacaaggaacccatccccgttactcaacttgtaagggaaactgccacggtgatgcaagagttcactcaatcgggtggtgttaggccgtttggagtttctctactggtggctgggtatgatgacaagggtccacaactgtatcaagtggatccatctggctcttatttctcatggaaagcttctgcaatgggaaagaatgtttcgaatgcaaagacgtttcttgagaagaggtacacagaagatatggaacttgatgatgccattcacacggcaatattgacattgaaggaaggtttcgagggagaaatctcaagcaaaaacatcgagattggcaaaatcggtactgacaaagttttcagggtgctaacaccagcagaaatcgatgattacttggctgaagtcgagtaaaactttcacttaaccgtgcaaccaacctgatttgaatctcagtatactctcagagttgatggttcttgcttttgtaaaacttttggaatttgttaaggagactcgtgacccaataatttagaatatgttttttcactcatttaaacgtctgttgtgaaaattcagtttcatataaccaagtttcatgcacacaaaaaaaaaaaaaaaaaaaactcgagggggggcccggt

SEQ ID NO: 49828 - protein, 235 aa, Arabidopsis thaliana
  peptide (1)..(235): Ceres Seq. ID no. 13647431
MGDSQYSFSLTTFSPSGKLVQIEHALTAVGSGQTSLGIKASNGVVIATEKKLPSILVDEASVQKIQHLTPNIGTVYSGMGPDFRVLVRKSRKQAEQYLRLYKEPIPVTQLVRETATVMQEFTQSGGVRPFGVSLLVAGYDDKGPQLYQVDPSGSYFSWKASAMGKNVSNAKTFLEKRYTEDMELDDAIHTAILTLKEGFEGEISSKNIEIGKIGTDKVFRVLTPAEIDDYLAEVE

SEQ ID NO: 49829 - protein, 157 aa, Arabidopsis thaliana
  peptide (1)..(157): Ceres Seq. ID no. 13647432
MGPDFRVLVRKSRKQAEQYLRLYKEPIPVTQLVRETATVMQEFTQSGGVRPFGVSLLVAGYDDKGPQLYQVDPSGSYFSWKASAMGKNVSNAKTFLEKRYTEDMELDDAIHTAILTLKEGFEGEISSKNIEIGKIGTDKVFRVLTPAEIDDYLAEVE

SEQ ID NO: 49830 - protein, 118 aa, Arabidopsis thaliana
  peptide (1)..(118): Ceres Seq. ID no. 13647433
MQEFTQSGGVRPFGVSLLVAGYDDKGPQLYQVDPSGSYFSWKASAMGKNVSNAKTFLEKRYTEDMELDDAIHTAILTLKEGFEGEISSKNIEIGKIGTDKVFRVLTPAEIDDYLAEVE

SEQ ID NO: 49831 - DNA, 416 bp, Arabidopsis thaliana
  misc_feature (1)..(416): Ceres Seq. ID no. 11405393
  misc_feature (1)..(416): Ortholog of  Ceres SEQ ID NO 15170788 as cited in SEQ ID NO 52635
  misc_feature (1)..(416): Ortholog of  Ceres SEQ ID NO 13638058 as cited in SEQ ID NO 55054
  misc_feature (1)..(416): Ortholog of  Ceres SEQ ID NO 15170362 as cited in SEQ ID NO 57883
  misc_feature (1)..(416): Ortholog of  Ceres SEQ ID NO 14303297 as cited in SEQ ID NO 67765
aaagaactggaactacacagcttttgttgaggccatacacaatggagaaggaaaatgctggactgccaaggtgagatgcgaggaggagctagtgaaagcaatcaacacggcaaccaatgaggaaaaagagagcttttgtttcattgaagtgatagtgcacaaagacgatacaagcaaggaacttttggagtggggctctagagtctctgctgctaatagtcgtcccccaaatccgcagtagagtatatagatgcactcaacttatatatatatatatgtcagatttggtagtgtcttcgccgttttatgtaaagtagtgtgtatccttttacatccatctggatgggaaaacaatgtgtgtccccttgggatataaactgtttgagtgcctaaatacgaactcgtttcctctgctc

SEQ ID NO: 49832 - protein, 79 aa, Arabidopsis thaliana
  peptide (1)..(79): Ceres Seq. ID no. 11405394
KNWNYTAFVEAIHNGEGKCWTAKVRCEEELVKAINTATNEEKESFCFIEVIVHKDDTSKELLEWGSRVSAANSRPPNPQ

SEQ ID NO: 49833 - protein, 41 aa, Arabidopsis thaliana
  peptide (1)..(41): Ceres Seq. ID no. 11405395
MHSTYIYIYVRFGSVFAVLCKVVCILLHPSGWENNVCPLGI

SEQ ID NO: 49834 - DNA, 1196 bp, Arabidopsis thaliana
  misc_feature (1)..(1196): Ceres Seq. ID no. 14302949
  misc_feature (1)..(1196): Ortholog of  Ceres SEQ ID NO 14305649 as cited in SEQ ID NO 52548
atcttcttcttctacttcttattaagctccattgggtttagagattctggtgtataaactgctaatgacgagtaaccttatccagccaccatcaatggcagcttcacgaggagcaatctcgagaagaacaggaaacgtgaaagtattagtctctttcaccagttctaatagcaaaacgctgagttttagtgacaactcatttaggctcagacccatgttcatcgggaaagtcacagaacagagttcttgctcctctttaaatgaacaacaacaagatgaagaacaagaacaagaagaagaagagattacagtttctcatataaaagaagagctctacgaagctctcaaagggatcaatagagggatattcggagttaagtcggataaaaagacagagatcgagggactggtgaagcttttggaatgtcggaatccgacaccggagccgactggagagttagacaagatcggaggttgctggaaactcatttacagtacaatcactgtattgggttctaaacgaactaaattgggtcttcgagatttcgtctctcttggtgatcttcttcaacagattgacattgctcagggcaaaacggtccatgtgttgaaattcgatgtccggggattgaatctactcgacggcgagtttagaatcgtcgcttccttcaagatctcgtccaaatcgagtgtagagattacttatgaaagctcaacgatcaaaccagaccagttgatgaacatatttaggaagaacatggatcttcttttgggaatcttcaaccccgagggactattcgagatttcatacttagacgaagatttacaagtagggagagatgggaaagggaatgtttttgttttggaaagaatagagaaaccttaaatcttttataccaaaatgtttactgcatttttttcaaactcatttccataagaagaaattgcttgtttctcaagaaaattttcaattttttctttggtttgggttatgaccatcagtatttcttctttcttttggtttaaaagaagaagaaaaatctagatttagtctttttttgtcttgggaatgttagtaactccagttcattcattattgacataattgattgctcaataatactgtataagtactattagcttgctcccatctgtttacttctaaatcctagtgttgatattacaacaaaagaact

SEQ ID NO: 49835 - protein, 273 aa, Arabidopsis thaliana
  peptide (1)..(273): Ceres Seq. ID no. 14302950
MTSNLIQPPSMAASRGAISRRTGNVKVLVSFTSSNSKTLSFSDNSFRLRPMFIGKVTEQSSCSSLNEQQQDEEQEQEEEEITVSHIKEELYEALKGINRGIFGVKSDKKTEIEGLVKLLECRNPTPEPTGELDKIGGCWKLIYSTITVLGSKRTKLGLRDFVSLGDLLQQIDIAQGKTVHVLKFDVRGLNLLDGEFRIVASFKISSKSSVEITYESSTIKPDQLMNIFRKNMDLLLGIFNPEGLFEISYLDEDLQVGRDGKGNVFVLERIEKP

SEQ ID NO: 49836 - protein, 263 aa, Arabidopsis thaliana
  peptide (1)..(263): Ceres Seq. ID no. 14302951
MAASRGAISRRTGNVKVLVSFTSSNSKTLSFSDNSFRLRPMFIGKVTEQSSCSSLNEQQQDEEQEQEEEEITVSHIKEELYEALKGINRGIFGVKSDKKTEIEGLVKLLECRNPTPEPTGELDKIGGCWKLIYSTITVLGSKRTKLGLRDFVSLGDLLQQIDIAQGKTVHVLKFDVRGLNLLDGEFRIVASFKISSKSSVEITYESSTIKPDQLMNIFRKNMDLLLGIFNPEGLFEISYLDEDLQVGRDGKGNVFVLERIEKP

SEQ ID NO: 49837 - protein, 223 aa, Arabidopsis thaliana
  peptide (1)..(223): Ceres Seq. ID no. 14302952
MFIGKVTEQSSCSSLNEQQQDEEQEQEEEEITVSHIKEELYEALKGINRGIFGVKSDKKTEIEGLVKLLECRNPTPEPTGELDKIGGCWKLIYSTITVLGSKRTKLGLRDFVSLGDLLQQIDIAQGKTVHVLKFDVRGLNLLDGEFRIVASFKISSKSSVEITYESSTIKPDQLMNIFRKNMDLLLGIFNPEGLFEISYLDEDLQVGRDGKGNVFVLERIEKP

SEQ ID NO: 49838 - DNA, 1223 bp, Arabidopsis thaliana; identical to SEQ ID NO: 45780
  misc_feature (1)..(1223): Ceres Seq. ID no. 13591684
  misc_feature (1)..(1223): Ortholog of  Ceres SEQ ID NO 14304830 as cited in SEQ ID NO 54884
  misc_feature (1)..(1223): Ortholog of  Ceres SEQ ID NO 14316297 as cited in SEQ ID NO 57465
  misc_feature (1)..(1223): Ortholog of  Ceres SEQ ID NO 12784351 as cited in SEQ ID NO 60968
  misc_feature (1)..(1223): Ortholog of  Ceres SEQ ID NO 13584213 as cited in SEQ ID NO 63690

SEQ ID NO: 49839 - protein, 312 aa, Arabidopsis thaliana; identical to SEQ ID NO: 45781
  peptide (1)..(312): Ceres Seq. ID no. 13591685

SEQ ID NO: 49840 - protein, 211 aa, Arabidopsis thaliana; identical to SEQ ID NO: 45782
  peptide (1)..(211): Ceres Seq. ID no. 13591686

SEQ ID NO: 49841 - protein, 187 aa, Arabidopsis thaliana; identical to SEQ ID NO: 45783
  peptide (1)..(187): Ceres Seq. ID no. 13591687

SEQ ID NO: 49842 - DNA, 1458 bp, Arabidopsis thaliana
  misc_feature (1)..(1458): Ceres Seq. ID no. 13592224
  misc_feature (1)..(1458): Ortholog of  Ceres SEQ ID NO 13590671 as cited in SEQ ID NO 68208
gagaagagaaaagggttttttaggattctttaaacgcagagctgagctgagttacataagatcgagagaattcgcaaactcgtttcttcattcgtcttcgtctttcgccatggctgctctacaatacttggaatctctgaaaaatacgcatccagagctcggcgaatggtacaattcccttgcagatctgtatcagaaaaagctctggcatcaactcacccttaagctcgaacagttcatcgctctcgctgtctttcaggctggtgatgctttgattcagttctatcacaatttcatcactgactttgagacgaagatcaatcttctgaagcttgcgcattttgctgtggtggtctctcgacagtactctgagaaagaagctgcagttagctatcttgaaagcgtgattgagaaacttagagctactaaagagcctaggattactgaaccaatcatttatattgaaacacaaaaagctttattcaagcttgagcaaggtgatcagaaggagtgcaaaaaaatcttggacgatggaaagagctctcttgatagtatgactgacattgatccatcagtctatgccaacttctattgggtgtcttctcagtaccataagtgccgtcaagaattttctgatttctacaaaagtgctctgctttatcttgcatacacgtctgtggaggacctttcagaatcgtttaagctggatttggctttcgatttgtcactatcagctctacttggggagaacatctataactttggggaactgttagcccatcccattttgaaaagtctccttggaacaaatgtggaatggctctaccacattctacaggcattcaaccatggtgatttagttcagtatcaagaactatgccgtgtgcacaacgcatccttgattgctcaaccagcacttgttgagaacgagaagaagcttttggaaaagatcaacattctctgccttatcgagatcatcttcagccgacccgctgaagatagaaccattcctttgagcatcatcgctgagcgtactaaactttccattgaagatgttgagcaccttctcatgaagagcctttctgtgcatttgatcgagggcatcatagaccaagtgaacggaacaatttatgtctcatgggcgcaaccgagagtactagggattccacagatcaaggctttgagggatcaattagacagttgggttgacaaagttcacaccactttactatctgttgaagccgagacaccagatcttgttgcagcataagagaaaagaaaaccttcttcctccttttgaagctactgaatgtaaaacaccatcttctctgggattagattcaagttttttatttcagtcgtagaagaaattacaattgctttttaatcttttgacttccatttcaagatgtccgaaatttcagttctacatttagactattttcatacattttttct

SEQ ID NO: 49843 - protein, 422 aa, Arabidopsis thaliana
  peptide (1)..(422): Ceres Seq. ID no. 13592225
RREKGFLGFFKRRAELSYIRSREFANSFLHSSSSFAMAALQYLESLKNTHPELGEWYNSLADLYQKKLWHQLTLKLEQFIALAVFQAGDALIQFYHNFITDFETKINLLKLAHFAVVVSRQYSEKEAAVSYLESVIEKLRATKEPRITEPIIYIETQKALFKLEQGDQKECKKILDDGKSSLDSMTDIDPSVYANFYWVSSQYHKCRQEFSDFYKSALLYLAYTSVEDLSESFKLDLAFDLSLSALLGENIYNFGELLAHPILKSLLGTNVEWLYHILQAFNHGDLVQYQELCRVHNASLIAQPALVENEKKLLEKINILCLIEIIFSRPAEDRTIPLSIIAERTKLSIEDVEHLLMKSLSVHLIEGIIDQVNGTIYVSWAQPRVLGIPQIKALRDQLDSWVDKVHTTLLSVEAETPDLVAA

SEQ ID NO: 49844 - protein, 386 aa, Arabidopsis thaliana
  peptide (1)..(386): Ceres Seq. ID no. 13592226
MAALQYLESLKNTHPELGEWYNSLADLYQKKLWHQLTLKLEQFIALAVFQAGDALIQFYHNFITDFETKINLLKLAHFAVVVSRQYSEKEAAVSYLESVIEKLRATKEPRITEPIIYIETQKALFKLEQGDQKECKKILDDGKSSLDSMTDIDPSVYANFYWVSSQYHKCRQEFSDFYKSALLYLAYTSVEDLSESFKLDLAFDLSLSALLGENIYNFGELLAHPILKSLLGTNVEWLYHILQAFNHGDLVQYQELCRVHNASLIAQPALVENEKKLLEKINILCLIEIIFSRPAEDRTIPLSIIAERTKLSIEDVEHLLMKSLSVHLIEGIIDQVNGTIYVSWAQPRVLGIPQIKALRDQLDSWVDKVHTTLLSVEAETPDLVAA

SEQ ID NO: 49845 - protein, 238 aa, Arabidopsis thaliana
  peptide (1)..(238): Ceres Seq. ID no. 13592227
MTDIDPSVYANFYWVSSQYHKCRQEFSDFYKSALLYLAYTSVEDLSESFKLDLAFDLSLSALLGENIYNFGELLAHPILKSLLGTNVEWLYHILQAFNHGDLVQYQELCRVHNASLIAQPALVENEKKLLEKINILCLIEIIFSRPAEDRTIPLSIIAERTKLSIEDVEHLLMKSLSVHLIEGIIDQVNGTIYVSWAQPRVLGIPQIKALRDQLDSWVDKVHTTLLSVEAETPDLVAA

SEQ ID NO: 49846 - DNA, 2405 bp, Arabidopsis thaliana
  misc_feature (1)..(2405): Ceres Seq. ID no. 14302972
  misc_feature (1)..(2405): Ortholog of  Ceres SEQ ID NO 13590691 as cited in SEQ ID NO 66290
gatcttcattattttagatttgaccgtttagaaaagtaagaaccagaccgtaccgaaccaaaacgaaccagagccagacgactccttaacggcggctaagctatctgtaaaccgaccgaaccacacagccacaggcacacaaatcaaaccttctagaaatcaaagagagacatttattctctaaattcattttcctattttgcccctacgaatatttttcttcttcgtctctctctctcagctcttgaagtctttggtctgttggcgaattttcaagcagctttctaattctgaactgaaaatttcgtctttggaactttatattctctcatctgaaactgaaggagaaggaagatgacgactatggagagtttgattgggttagttaataggatacagagagcatgtaccgtactcggtgactatggtggtggaactggaagtaacgctttcaattctctctgggaagctcttccaaccgtcgccgtcgtcggtggtcagagttctgggaaatcttcggttcttgagagtatagttgggagagattttcttcctagaggatctggtatcgttacgagacggcctttagtgttgcagcttcataagactgatgatggaacagaggagtatgcagagttccttcatcttcccaagaagcaattcacagattttgctttggttcgcagggagattcaggatgagactgatagaatcacagggaaaaacaaacagatatctccagttcctattcacctcagtatctactctccaaatgttgtgaatttgacactcattgatttgcccggtttaactaaagtggctgttgagggacagccggaaaccattgctgaggatatcgaatccatggttcgcacatatgttgataagcccaattgtatcatattggctatatctcctgccaaccaagacattgccacatcagatgcaattaagctcgcaaaagatgtcgatccaacaggtgagaggacatttggtgttcttaccaagttagacttgatggacaaaggaactaatgcgttagaagttcttgaaggaagatcttacaggctgcaacatccttaggttgggatagtgaaccgttcacaagcagatattaataagaatgtcgatatgatgcttgcaagacgcaaggaacgagaatattttgataccagtcctgactatggtcacttagccagcaaaatgggttcagaatatctggcaaaactgctctctaagcacttggagtctgttatcaggacccgtattccaagtatactatccttaataaacaaaagcattgaagaacttgaaagagagttagaccgaatgggtcggcctgtcgcagttgatgctggggctcaactatacactatattggagatgtgccgtgcattcgataagatattcaaggaacatcttgatggcgggcgtcctggaggtgaccgtatctatggagtctttgacaaccaacttccagctgcacttaaaaagcttccttttgatcgccatctttctctacaaagcgtgaagaaaatcgtgtccgaggcagatggttatcaacctcacttgattgcaccagaacagggttatcgccgtctaatcgaaggggcactgggttactttagaggtccagctgaagcttctgtggatgctgttcactatgtcttgaaagagcttgtgaggaaatcaatatcagaaactgaggagctaaagcgtttcccttcactgcaagtcgagcttgctgcagcagccaacagctccttggagaaattcagggaagaaagcaagaagtcggttattcgacttgttgacatggaatctgcgtatctaacagctgagttcttccggaaacttcctcaagaaatagaaagaccagtaaccaacagcaaaaaccaaaccgcttctccttcgtctgcaacattagaccagtatggagacggacatttcagaaggatagcatcaaatgtatctgcgtatgttaatatggtttcggacacacttcgtaacaccattccaaaagcttgtgtgtactgtcaggttagacaagccaagctcgcattgctcaattacttctactctcagatcagcaagagagaggggaaacagttgggacagttactagatgaagatccggcattgatggaccggagactagagtgcgcgaagaggctagagttatacaagaaagcaagagatgaaattgatgctgttgcttgggtaagatgataaaacctaaaagtgtgtttctggtgatggttttagagaactataaattcgtctgttgtttaagttcgttgactatgtctttgtatgtatgtatatgatcatcagaccctattgagagagacttgagacgttttgtaataaacttatcattactatttaaaaacgccatagcgtgt

SEQ ID NO: 49847 - protein, 365 aa, Arabidopsis thaliana
  peptide (1)..(365): Ceres Seq. ID no. 14302973
MMLARRKEREYFDTSPDYGHLASKMGSEYLAKLLSKHLESVIRTRIPSILSLINKSIEELERELDRMGRPVAVDAGAQLYTILEMCRAFDKIFKEHLDGGRPGGDRIYGVFDNQLPAALKKLPFDRHLSLQSVKKIVSEADGYQPHLIAPEQGYRRLIEGALGYFRGPAEASVDAVHYVLKELVRKSISETEELKRFPSLQVELAAAANSSLEKFREESKKSVIRLVDMESAYLTAEFFRKLPQEIERPVTNSKNQTASPSSATLDQYGDGHFRRIASNVSAYVNMVSDTLRNTIPKACVYCQVRQAKLALLNYFYSQISKREGKQLGQLLDEDPALMDRRLECAKRLELYKKARDEIDAVAWVR

SEQ ID NO: 49848 - protein, 364 aa, Arabidopsis thaliana
  peptide (1)..(364): Ceres Seq. ID no. 14302974
MLARRKEREYFDTSPDYGHLASKMGSEYLAKLLSKHLESVIRTRIPSILSLINKSIEELERELDRMGRPVAVDAGAQLYTILEMCRAFDKIFKEHLDGGRPGGDRIYGVFDNQLPAALKKLPFDRHLSLQSVKKIVSEADGYQPHLIAPEQGYRRLIEGALGYFRGPAEASVDAVHYVLKELVRKSISETEELKRFPSLQVELAAAANSSLEKFREESKKSVIRLVDMESAYLTAEFFRKLPQEIERPVTNSKNQTASPSSATLDQYGDGHFRRIASNVSAYVNMVSDTLRNTIPKACVYCQVRQAKLALLNYFYSQISKREGKQLGQLLDEDPALMDRRLECAKRLELYKKARDEIDAVAWVR

SEQ ID NO: 49849 - protein, 341 aa, Arabidopsis thaliana
  peptide (1)..(341): Ceres Seq. ID no. 14302975
MGSEYLAKLLSKHLESVIRTRIPSILSLINKSIEELERELDRMGRPVAVDAGAQLYTILEMCRAFDKIFKEHLDGGRPGGDRIYGVFDNQLPAALKKLPFDRHLSLQSVKKIVSEADGYQPHLIAPEQGYRRLIEGALGYFRGPAEASVDAVHYVLKELVRKSISETEELKRFPSLQVELAAAANSSLEKFREESKKSVIRLVDMESAYLTAEFFRKLPQEIERPVTNSKNQTASPSSATLDQYGDGHFRRIASNVSAYVNMVSDTLRNTIPKACVYCQVRQAKLALLNYFYSQISKREGKQLGQLLDEDPALMDRRLECAKRLELYKKARDEIDAVAWVR

SEQ ID NO: 49850 - DNA, 881 bp, Arabidopsis thaliana
  misc_feature (1)..(881): Ceres Seq. ID no. 14307605
  misc_feature (1)..(881): Ortholog of  Ceres SEQ ID NO 12614051 as cited in SEQ ID NO 67827
gacgattttcaattaactctcttcttttttttttttttggtttttcatttaagtctattcaatcatggaaaccggtttaaacatcttaaagctatcgctatgcgtcagcctagtcgtggttggatcatatgctcaggctcccgcaccatggaatccatctaatgggtttcgtccggggacatgtgaccactacgagtgtcccacctataaattggtagaggccggatacggctttgagatccgcatgtacgacgctgccctatggatatctactagtcctatcccctccctatccatgactcaagccaccaaaaccggtttccgacgattaaataggtacatagaaggagataacaagagcaacgtgaagatgaacatgacagctccggtgatcgcacaagcaacgcctggaagatcagtctacacggtctcactctacctcccgaagaagaaccaacagaacccacctcaggccgatgatctccacgtgcggtctacgaaaccaacctacgtagccgtgagacagatcggtggctacgtgtcgaacaatgtagccaaggaagaagctgcggctctgatggaaagcctccgggattctaactggattttgcccatcgagaagagcaaaggaaagtcgccggcgtatttactcgctgtttataacccgccgtctcataccacggctagggtgattaatgagatcatggttccgtttaacatgtaatgatcatgttaatgacgccctcacgatttgattgttacgtagcaattggattagaagaggtggtttagaaccgatactgtaacagcagcttgcagcttctggtttaaccggtataaattgtatctctggttaagtggtgattaatattgttatttgt

SEQ ID NO: 49851 - protein, 219 aa, Arabidopsis thaliana
  peptide (1)..(219): Ceres Seq. ID no. 14307606
METGLNILKLSLCVSLVVVGSYAQAPAPWNPSNGFRPGTCDHYECPTYKLVEAGYGFEIRMYDAALWISTSPIPSLSMTQATKTGFRRLNRYIEGDNKSNVKMNMTAPVIAQATPGRSVYTVSLYLPKKNQQNPPQADDLHVRSTKPTYVAVRQIGGYVSNNVAKEEAAALMESLRDSNWILPIEKSKGKSPAYLLAVYNPPSHTTARVINEIMVPFNM

SEQ ID NO: 49852 - protein, 159 aa, Arabidopsis thaliana
  peptide (1)..(159): Ceres Seq. ID no. 14307607
MYDAALWISTSPIPSLSMTQATKTGFRRLNRYIEGDNKSNVKMNMTAPVIAQATPGRSVYTVSLYLPKKNQQNPPQADDLHVRSTKPTYVAVRQIGGYVSNNVAKEEAAALMESLRDSNWILPIEKSKGKSPAYLLAVYNPPSHTTARVINEIMVPFNM

SEQ ID NO: 49853 - protein, 142 aa, Arabidopsis thaliana
  peptide (1)..(142): Ceres Seq. ID no. 14307608
MTQATKTGFRRLNRYIEGDNKSNVKMNMTAPVIAQATPGRSVYTVSLYLPKKNQQNPPQADDLHVRSTKPTYVAVRQIGGYVSNNVAKEEAAALMESLRDSNWILPIEKSKGKSPAYLLAVYNPPSHTTARVINEIMVPFNM

SEQ ID NO: 49854 - DNA, 3311 bp, Arabidopsis thaliana
  misc_feature (1)..(3311): Ceres Seq. ID no. 12591089
  misc_feature (1)..(3311): Ortholog of  Ceres SEQ ID NO 13655640 as cited in SEQ ID NO 63844
ctaacgatttatcattttcgatgagacattgttttacagagatatttttgttgcaatgatatctctgtatcaaatattggccgagaagaagaagaagaagaaaaatgatcttaacatctttgcattttctgtttttgccatcatttgcttcaaattttatagtgtaaatgctatcaaattaccgcagcaagaagtcgatgctctgcagcaaatcgctaccacattgggctcgaaattctggaaattcgatgctgaaaattgtaagattgaaatggtggggttaactgaaactcctcctccaacagctaagcaagaaatagaatgtgaatgcagtcccactaacgacactgattgtcatgttgtcaaatttgcattcaaggaccataatcttccaggaactcttcctcaaatagtcaagcttccctaccttcgggagatagacttggcctacaactacatcaatgggaccttacctcgtgaatgggcttcttcaaatttaacttttatttctcttcttgtgaatcggttgtctggagaaattccgaaggagtttggaaactcttctctaacatacttggatctcgagtcaaatgcgttttctggaactattcctcaggagcttgggaacttagtccacttgaaaaaactgttgctttcctctaacaaattgaccggaactttgccagcttcactagctagactacagaatatgacagatttcaggattaacgatcttcaactcagtggaacgatacctagttacatacaaaattggaagcaactcgagagacttgaaatgattgcatctggtctcactggtccaatcccatcggtcatctcagttctgagcaatcttgttaatctgaggatcagtgatatacgtggaccagtccaaccattcccttcgttgaagaacgtgacaggtctaactaaaattatattgaagaactgtaacatttctggacaaattcctacttatctttcacatttgaaggagttggagacactggatttgagttttaacaagttggttgggggaattccgtcgcttgcacaagcagaaaatttacggcttataattttggctggaaatatgctcgagggagatgctccagatgaattactaagagatggaatcacagaagatctttcatataacaatctcaagtggcagagtcctgaaagtcgtgcttgtcgcccaaatatgaatctgaatctaaacttgtttcagagcacttcgacaaaaaaatcgagcaaatttctgccgtgtatcaaagatttcaaatgtcctcgatattctagctgcttgcatgtgaactgcggtggaagcgatatgtatgttaaggagaaaaaaacaaaagaattatatgaaggagatggaaatgttgaaggtggtgctgctaagtattttttgaagcctgacgctaattggggatttagcagcacaggggacttcatggacgataacaatttccaaaacactagattcaccatgtttgtcccggcatctaaccagtctgatctctacaaatcggcacgaattgctccagtatctctaacttacttccatgcctgcttggaaaatggaaattacactataaatctagacttcgctgagatacggttcaccaatgatgaaaactataaccggcttggaaggcgtctgtttgacatttacattcaggagaaattagtggcaaaggactttaacatcatggatgaagcaaagggagctcaaacacctataatcaaaccacttactgcctatgtgacaaaccactttttaaccatccggttgagttgggccggtaaaggaactaccaggattcccactagaggggtttatggtcctatcatatcggctatttccatagtttcagattccaagccgtgcgaacgtccgaaaactggaatgagccctggagcatatattgcaattggaattggagcaccatgtcttattatctttatactgggatttctgtggatatgtggctgcctcccaagatgtggtcgacaacgaaaagatccgtatgaagaagagttgccttctggaacttttacattgaggcaaatcaaattcgctacggatgacttcaatccaactaacaagattggagaaggtggtttcggtgctgtctttaagggtgtgttagcagatggaagagttgtagcagttaagcaactctcatctaaatcgagacaagggaaccgagaatttctaaacgagataggcgcaatttcttgtcttcaacatccaaatctcgtcaagcttcatggtttctgcgtcgagcgggctcagctattactggcgtacgaatacatggaaaataacagtttatctagcgcgttattcagtccaaagcataaacagataccaatggactggcctactaggtttaagatttgctgcgggatcgcaaagggtctcgcgtttctccatgaggaatcaccgttgaagtttgtacatagagacatcaaggccacaaatattttattggacaaggacttaactcccaagatatctgatttcggattggctaggcttgacgaagaggagaaaacacacatcagcaccaaagttgctgggactataggatatatggcaccagaatacgcactgtggggctacctaactttcaaagcagatgtctacagcttcggtgttttggttctagaaatcgtcgccggcataaccaacagtaatttcatgggggcaggagattccgtttgcctcttagaatttgctaacgagtgcgtagaatcggggcacttgatgcaagtagtggatgagaggttgaggcctgaagtggatagaaaagaagcagaggcggttataaaagtggctctcgtgtgctcgagcgcttctccaacagatcgtcctttaatgtcagaggtcgttgctatgctagaaggtctatatccagtgccagaatcaacaccaggagtaagcaggaacgcaggggatataaggtttaaggcatttaaagatttaaggagaggcatggagaacaatagtaagacgcagtgttctgttaaaagctatccgtcttcttcttcgacttcttctggggcaggacaagcagttcaagaaagaaagaaagaagagtcaaggccttgaagaggttttgaatccttccctctcttttttttttttttgtaaaatgtctgtctttagtaaaatgtttatgagtttattctgtgattagtcatttactgtaattccccatatctgtatttaggttctgttagttggggattgaatgttgtgaaaactcaaaactcaaatgatatataatcagtgatctttc

SEQ ID NO: 49855 - protein, 1021 aa, Arabidopsis thaliana
  peptide (1)..(1021): Ceres Seq. ID no. 12591090
MISLYQILAEKKKKKKNDLNIFAFSVFAIICFKFYSVNAIKLPQQEVDALQQIATTLGSKFWKFDAENCKIEMVGLTETPPPTAKQEIECECSPTNDTDCHVVKFAFKDHNLPGTLPQIVKLPYLREIDLAYNYINGTLPREWASSNLTFISLLVNRLSGEIPKEFGNSSLTYLDLESNAFSGTIPQELGNLVHLKKLLLSSNKLTGTLPASLARLQNMTDFRINDLQLSGTIPSYIQNWKQLERLEMIASGLTGPIPSVISVLSNLVNLRISDIRGPVQPFPSLKNVTGLTKIILKNCNISGQIPTYLSHLKELETLDLSFNKLVGGIPSLAQAENLRLIILAGNMLEGDAPDELLRDGITEDLSYNNLKWQSPESRACRPNMNLNLNLFQSTSTKKSSKFLPCIKDFKCPRYSSCLHVNCGGSDMYVKEKKTKELYEGDGNVEGGAAKYFLKPDANWGFSSTGDFMDDNNFQNTRFTMFVPASNQSDLYKSARIAPVSLTYFHACLENGNYTINLDFAEIRFTNDENYNRLGRRLFDIYIQEKLVAKDFNIMDEAKGAQTPIIKPLTAYVTNHFLTIRLSWAGKGTTRIPTRGVYGPIISAISIVSDSKPCERPKTGMSPGAYIAIGIGAPCLIIFILGFLWICGCLPRCGRQRKDPYEEELPSGTFTLRQIKFATDDFNPTNKIGEGGFGAVFKGVLADGRVVAVKQLSSKSRQGNREFLNEIGAISCLQHPNLVKLHGFCVERAQLLLAYEYMENNSLSSALFSPKHKQIPMDWPTRFKICCGIAKGLAFLHEESPLKFVHRDIKATNILLDKDLTPKISDFGLARLDEEEKTHISTKVAGTIGYMAPEYALWGYLTFKADVYSFGVLVLEIVAGITNSNFMGAGDSVCLLEFANECVESGHLMQVVDERLRPEVDRKEAEAVIKVALVCSSASPTDRPLMSEVVAMLEGLYPVPESTPGVSRNAGDIRFKAFKDLRRGMENNSKTQCSVKSYPSSSSTSSGAGQAVQERKKEESRP

SEQ ID NO: 49856 - protein, 949 aa, Arabidopsis thaliana
  peptide (1)..(949): Ceres Seq. ID no. 12591091
MVGLTETPPPTAKQEIECECSPTNDTDCHVVKFAFKDHNLPGTLPQIVKLPYLREIDLAYNYINGTLPREWASSNLTFISLLVNRLSGEIPKEFGNSSLTYLDLESNAFSGTIPQELGNLVHLKKLLLSSNKLTGTLPASLARLQNMTDFRINDLQLSGTIPSYIQNWKQLERLEMIASGLTGPIPSVISVLSNLVNLRISDIRGPVQPFPSLKNVTGLTKIILKNCNISGQIPTYLSHLKELETLDLSFNKLVGGIPSLAQAENLRLIILAGNMLEGDAPDELLRDGITEDLSYNNLKWQSPESRACRPNMNLNLNLFQSTSTKKSSKFLPCIKDFKCPRYSSCLHVNCGGSDMYVKEKKTKELYEGDGNVEGGAAKYFLKPDANWGFSSTGDFMDDNNFQNTRFTMFVPASNQSDLYKSARIAPVSLTYFHACLENGNYTINLDFAEIRFTNDENYNRLGRRLFDIYIQEKLVAKDFNIMDEAKGAQTPIIKPLTAYVTNHFLTIRLSWAGKGTTRIPTRGVYGPIISAISIVSDSKPCERPKTGMSPGAYIAIGIGAPCLIIFILGFLWICGCLPRCGRQRKDPYEEELPSGTFTLRQIKFATDDFNPTNKIGEGGFGAVFKGVLADGRVVAVKQLSSKSRQGNREFLNEIGAISCLQHPNLVKLHGFCVERAQLLLAYEYMENNSLSSALFSPKHKQIPMDWPTRFKICCGIAKGLAFLHEESPLKFVHRDIKATNILLDKDLTPKISDFGLARLDEEEKTHISTKVAGTIGYMAPEYALWGYLTFKADVYSFGVLVLEIVAGITNSNFMGAGDSVCLLEFANECVESGHLMQVVDERLRPEVDRKEAEAVIKVALVCSSASPTDRPLMSEVVAMLEGLYPVPESTPGVSRNAGDIRFKAFKDLRRGMENNSKTQCSVKSYPSSSSTSSGAGQAVQERKKEESRP

SEQ ID NO: 49857 - protein, 803 aa, Arabidopsis thaliana
  peptide (1)..(803): Ceres Seq. ID no. 12591092
MTDFRINDLQLSGTIPSYIQNWKQLERLEMIASGLTGPIPSVISVLSNLVNLRISDIRGPVQPFPSLKNVTGLTKIILKNCNISGQIPTYLSHLKELETLDLSFNKLVGGIPSLAQAENLRLIILAGNMLEGDAPDELLRDGITEDLSYNNLKWQSPESRACRPNMNLNLNLFQSTSTKKSSKFLPCIKDFKCPRYSSCLHVNCGGSDMYVKEKKTKELYEGDGNVEGGAAKYFLKPDANWGFSSTGDFMDDNNFQNTRFTMFVPASNQSDLYKSARIAPVSLTYFHACLENGNYTINLDFAEIRFTNDENYNRLGRRLFDIYIQEKLVAKDFNIMDEAKGAQTPIIKPLTAYVTNHFLTIRLSWAGKGTTRIPTRGVYGPIISAISIVSDSKPCERPKTGMSPGAYIAIGIGAPCLIIFILGFLWICGCLPRCGRQRKDPYEEELPSGTFTLRQIKFATDDFNPTNKIGEGGFGAVFKGVLADGRVVAVKQLSSKSRQGNREFLNEIGAISCLQHPNLVKLHGFCVERAQLLLAYEYMENNSLSSALFSPKHKQIPMDWPTRFKICCGIAKGLAFLHEESPLKFVHRDIKATNILLDKDLTPKISDFGLARLDEEEKTHISTKVAGTIGYMAPEYALWGYLTFKADVYSFGVLVLEIVAGITNSNFMGAGDSVCLLEFANECVESGHLMQVVDERLRPEVDRKEAEAVIKVALVCSSASPTDRPLMSEVVAMLEGLYPVPESTPGVSRNAGDIRFKAFKDLRRGMENNSKTQCSVKSYPSSSSTSSGAGQAVQERKKEESRP

SEQ ID NO: 49858 - DNA, 1454 bp, Arabidopsis thaliana
  misc_feature (1)..(1454): Ceres Seq. ID no. 13588706
  misc_feature (1)..(1454): Ortholog of  Ceres SEQ ID NO 13585382 as cited in SEQ ID NO 63889
gactaacaattagcaacaaaataaaagcacacgaattttcaaatctttctcttctctcgctctctcgaattcttctctctgttcctcgtagatcccctctgtttccgttttcgtcttttcgaattccgaagatctcaaatgggtgaggatgcaatctcaggtaatctcaagaatctaacgatcgacacaagagattcagaaactcttgtggtatgtttcggtgaaatgttgattgattttgttcctacggtgggaggtgtttcattggctgaagcaccagctttcaagaaagctcctggaggagctcctgctaatgtagctgttggtgtctctagacttggtggctcctctgctttcattggaaaggttggtgatgatgagtttggaagaatgttagctgatattctaaggctgaacaatgttgacaactctgggatgagattcgaccataatgcacggactgctttggcctttgttacgctaagaggtgatggagagagggagtttttgttcttcaggcatccgagtgctgatatgcttcttttggaatctgagcttgacaagaacctcatccaaaaggccaagatctttcactacggatctatcagtttgattgaggaaccttgccgttctactcagcttgtagctatgaaaatcgctaaggctgcagggagtcttttatcttatgacccgaatttgagattgccgttgtggccatcagaagaagctgctaggaaagagataatgagtatctggaatttagctgatgttataaagattagcgaagacgagataacattcctgaccggtggtgatgatccttatgatgatgatgtggtgttgcaaaagctctttcatcccaatcttaagcttcttgttgtttcagaaggacctaatggctgtagatactacactcaggagtttaaaggtagagttggtggagtaaaagtgaagccagttgatacaaccggtgcaggagatgcattcgtgagcgggttattgaacagcttagcttctgatcttactcttctcaaggatgagaagaaactaagagaggcgcttctatttgcaaacgcatgtggagccattacagtaacagagagaggagcgataccggcgatgccaagcatggatgctgttcaagatcttctttcttctactcgctcctaaaatgcttcaaaagtctcttttgagtgtatcaattcattaccttttacagtgtttttgtttttttaaatatttttccccaatttgtaggaactcaagaatgttgtgtgtgtttttttagtttgttgttgatctcccggagttttagtattggggtggtttggttttactattatcaagttaggttttctacaaagaacaaattcatgctttgtaaaaactacttgccgttttatgtaacgagaacgacacacactctttaacgcaaaaccattaattgtttagtt

SEQ ID NO: 49859 - protein, 343 aa, Arabidopsis thaliana
  peptide (1)..(343): Ceres Seq. ID no. 13588707
MGEDAISGNLKNLTIDTRDSETLVVCFGEMLIDFVPTVGGVSLAEAPAFKKAPGGAPANVAVGVSRLGGSSAFIGKVGDDEFGRMLADILRLNNVDNSGMRFDHNARTALAFVTLRGDGEREFLFFRHPSADMLLLESELDKNLIQKAKIFHYGSISLIEEPCRSTQLVAMKIAKAAGSLLSYDPNLRLPLWPSEEAARKEIMSIWNLADVIKISEDEITFLTGGDDPYDDDVVLQKLFHPNLKLLVVSEGPNGCRYYTQEFKGRVGGVKVKPVDTTGAGDAFVSGLLNSLASDLTLLKDEKKLREALLFANACGAITVTERGAIPAMPSMDAVQDLLSSTRS

SEQ ID NO: 49860 - protein, 314 aa, Arabidopsis thaliana
  peptide (1)..(314): Ceres Seq. ID no. 13588708
MLIDFVPTVGGVSLAEAPAFKKAPGGAPANVAVGVSRLGGSSAFIGKVGDDEFGRMLADILRLNNVDNSGMRFDHNARTALAFVTLRGDGEREFLFFRHPSADMLLLESELDKNLIQKAKIFHYGSISLIEEPCRSTQLVAMKIAKAAGSLLSYDPNLRLPLWPSEEAARKEIMSIWNLADVIKISEDEITFLTGGDDPYDDDVVLQKLFHPNLKLLVVSEGPNGCRYYTQEFKGRVGGVKVKPVDTTGAGDAFVSGLLNSLASDLTLLKDEKKLREALLFANACGAITVTERGAIPAMPSMDAVQDLLSSTRS

SEQ ID NO: 49861 - protein, 259 aa, Arabidopsis thaliana
  peptide (1)..(259): Ceres Seq. ID no. 13588709
MLADILRLNNVDNSGMRFDHNARTALAFVTLRGDGEREFLFFRHPSADMLLLESELDKNLIQKAKIFHYGSISLIEEPCRSTQLVAMKIAKAAGSLLSYDPNLRLPLWPSEEAARKEIMSIWNLADVIKISEDEITFLTGGDDPYDDDVVLQKLFHPNLKLLVVSEGPNGCRYYTQEFKGRVGGVKVKPVDTTGAGDAFVSGLLNSLASDLTLLKDEKKLREALLFANACGAITVTERGAIPAMPSMDAVQDLLSSTRS

SEQ ID NO: 49862 - DNA, 1620 bp, Arabidopsis thaliana; identical to SEQ ID NO: 42382
  misc_feature (1)..(1620): Ceres Seq. ID no. 13592581
  misc_feature (1)..(1620): Ortholog of  Ceres SEQ ID NO 15169244 as cited in SEQ ID NO 58988

SEQ ID NO: 49863 - protein, 472 aa, Arabidopsis thaliana; identical to SEQ ID NO: 42383
  peptide (1)..(472): Ceres Seq. ID no. 15221122

SEQ ID NO: 49864 - protein, 335 aa, Arabidopsis thaliana; identical to SEQ ID NO: 42384
  peptide (1)..(335): Ceres Seq. ID no. 15221123

SEQ ID NO: 49865 - protein, 309 aa, Arabidopsis thaliana; identical to SEQ ID NO: 42385
  peptide (1)..(309): Ceres Seq. ID no. 15221124

SEQ ID NO: 49866 - DNA, 2254 bp, Arabidopsis thaliana; identical to SEQ ID NO: 45016
  misc_feature (1)..(2254): Ceres Seq. ID no. 13591474
  misc_feature (1)..(2254): Ortholog of  Ceres SEQ ID NO 15174638 as cited in SEQ ID NO 53185
  misc_feature (1)..(2254): Ortholog of  Ceres SEQ ID NO 13657460 as cited in SEQ ID NO 66115
  misc_feature (1)..(2254): Ortholog of  Ceres SEQ ID NO 13659394 as cited in SEQ ID NO 67049

SEQ ID NO: 49867 - protein, 587 aa, Arabidopsis thaliana; identical to SEQ ID NO: 45017
  peptide (1)..(587): Ceres Seq. ID no. 13591475

SEQ ID NO: 49868 - protein, 559 aa, Arabidopsis thaliana; identical to SEQ ID NO: 45018
  peptide (1)..(559): Ceres Seq. ID no. 13591476

SEQ ID NO: 49869 - protein, 558 aa, Arabidopsis thaliana; identical to SEQ ID NO: 45019
  peptide (1)..(558): Ceres Seq. ID no. 13591477

SEQ ID NO: 49870 - DNA, 1452 bp, Arabidopsis thaliana
  misc_feature (1)..(1452): Ceres Seq. ID no. 14304315
  misc_feature (1)..(1452): Ortholog of  Ceres SEQ ID NO 14307253 as cited in SEQ ID NO 54783
  misc_feature (1)..(1452): Ortholog of  Ceres SEQ ID NO 15171508 as cited in SEQ ID NO 58526
  misc_feature (1)..(1452): Ortholog of  Ceres SEQ ID NO 14312300 as cited in SEQ ID NO 58632
  misc_feature (1)..(1452): Ortholog of  Ceres SEQ ID NO 13654989 as cited in SEQ ID NO 63117
  misc_feature (1)..(1452): Ortholog of  Ceres SEQ ID NO 13584744 as cited in SEQ ID NO 69137
gaacaatcttctgtttctttggaagcaactaactacaaaggacatcttcacgactacaaagacacatacccttctgtcttaaggacgagaccagaagcttcttctatcggctttgtaatggtctacaaaggataagaaaaaaccaaatccaaactaaagctatgcattttccacttgtttcggcttggaacaagagaaggagaagcaaatcatatgatacggatccatgtacgttccttttctccatcatcttcgccagatggcataaaagggtctacagaacagcagaatgctggcaaatcgaagatcaggcttctcagccaaggaagcgaagattcgggtcatcagtttataccctcaaggagatggaggaggccacaagttctttcagtgatgagaatctcctcggtaaaggaggctttggccgagtttaccaaggcactttaaaaacaggagaggttgttgcaatcaagaagatggatttacctacgtttaaaaaggctgacggagaaagagaatttcgtgtggaggtggatatcttgagcagactcgaccacccaaatctggtctctttgatcggctattgtgcagatgggaaacaccggttcctagtatatgaatatatgcaaaatggaaacctgcaagatcatttgaatggaatcaaagaagcaaaaataagctggccaataaggctcagaattgcactaggagcagcaaaaggactcgcgtatctccattcaagttcttctgttgggattccaattgttcacagagacttcaaatccaccaacgttctactagactccaattataatgcaaagatatccgactttggactagcaaagttgatgccagaaggaaaggatacttgtgtcacagcaagagttctaggaacatttggctatttcgacccagaatatacatcgacaggtaaacttactctacaaagcgacatttatgcatttggggttgtgctgctagaactacttactggacgcagagcagttgacttaactcagggcccaaatgaacagaacctggtgctacaggttaggaatatactgaatgatagaaagaaattgcgtaaggttatagatgtcgagctgcctcggaattcatacagcatggaagctataaccatgtttgctgatctagcatcacgatgcatccgtatagagagtaaagagcgaccttcagtgatggattgtgttaaggaactgcaactaattatctacacaaactcgaagggtggtttgggtgggacgattcctacattcagaaggctctagacactgaattcttcgaaacaagtaaaatggattactgtcatttttcctaaaatgagaggtcactgataaaaaaacacttgataaatataaacaaacaatactaattatgaattaccggataatttcaattcaacttccagctaggaaactttgatcaagcgat

SEQ ID NO: 49871 - protein, 375 aa, Arabidopsis thaliana
  peptide (1)..(375): Ceres Seq. ID no. 14304316
MHFPLVSAWNKRRRSKSYDTDPCTFLFSIIFARWHKRVYRTAECWQIEDQASQPRKRRFGSSVYTLKEMEEATSSFSDENLLGKGGFGRVYQGTLKTGEVVAIKKMDLPTFKKADGEREFRVEVDILSRLDHPNLVSLIGYCADGKHRFLVYEYMQNGNLQDHLNGIKEAKISWPIRLRIALGAAKGLAYLHSSSSVGIPIVHRDFKSTNVLLDSNYNAKISDFGLAKLMPEGKDTCVTARVLGTFGYFDPEYTSTGKLTLQSDIYAFGVVLLELLTGRRAVDLTQGPNEQNLVLQVRNILNDRKKLRKVIDVELPRNSYSMEAITMFADLASRCIRIESKERPSVMDCVKELQLIIYTNSKGGLGGTIPTFRRL

SEQ ID NO: 49872 - protein, 307 aa, Arabidopsis thaliana
  peptide (1)..(307): Ceres Seq. ID no. 14304317
MEEATSSFSDENLLGKGGFGRVYQGTLKTGEVVAIKKMDLPTFKKADGEREFRVEVDILSRLDHPNLVSLIGYCADGKHRFLVYEYMQNGNLQDHLNGIKEAKISWPIRLRIALGAAKGLAYLHSSSSVGIPIVHRDFKSTNVLLDSNYNAKISDFGLAKLMPEGKDTCVTARVLGTFGYFDPEYTSTGKLTLQSDIYAFGVVLLELLTGRRAVDLTQGPNEQNLVLQVRNILNDRKKLRKVIDVELPRNSYSMEAITMFADLASRCIRIESKERPSVMDCVKELQLIIYTNSKGGLGGTIPTFRRL

SEQ ID NO: 49873 - protein, 270 aa, Arabidopsis thaliana
  peptide (1)..(270): Ceres Seq. ID no. 14304318
MDLPTFKKADGEREFRVEVDILSRLDHPNLVSLIGYCADGKHRFLVYEYMQNGNLQDHLNGIKEAKISWPIRLRIALGAAKGLAYLHSSSSVGIPIVHRDFKSTNVLLDSNYNAKISDFGLAKLMPEGKDTCVTARVLGTFGYFDPEYTSTGKLTLQSDIYAFGVVLLELLTGRRAVDLTQGPNEQNLVLQVRNILNDRKKLRKVIDVELPRNSYSMEAITMFADLASRCIRIESKERPSVMDCVKELQLIIYTNSKGGLGGTIPTFRRL

SEQ ID NO: 49874 - DNA, 1492 bp, Arabidopsis thaliana
  misc_feature (1)..(1492): Ceres Seq. ID no. 13648263
  misc_feature (1)..(1492): Ortholog of  Ceres SEQ ID NO 15176709 as cited in SEQ ID NO 1148
  misc_feature (1)..(1492): Ortholog of  Ceres SEQ ID NO 13658922 as cited in SEQ ID NO 66316
gacaaagagaattctctcatttcttcttcttcgctcagctccgacaacgaagggtgaagaatctcgctccctcagtttcgcattgccatcgattttcttagaggctaccatggtcgaacagactcagcaccccacgattcttcagaaggcttctggccaactcttgagctcgagtgtttctcaggacattcggggttatgcttcggattccaaaaggcctgctacataccagaaacatgcagcttacggaaactactccaatgctgcatttcaatatcctcttgcggctgcatctcagattgcaactactacttctcctgtgtttgtccaagctncaggagagaagggatttactaactttgctattgatttcatgatgggtgggtgtttctgctgctgtgtcaaagactgctgctgctcccattgagcgtgtcaagcttttgattcaaaaccaggatgagatgcttaaggctggaaggcttactgagccatacaagggtattcgtgactgtttcggcaggacaattagggatgaaggtattggttcgttgtggagaggaaacaccgctaatgttatccgttacttccccactcaggccttgaactttgcattcaaagattacttcaagaggcttttcaacttcaagaaagacaaggatggctactggaagtggtttgctggtaacttggcatctggaggtgctgctggtgcctcttcccttctctttgtgtactctcttgactatgcacgtacccgtcttgccaatgactccaagtctgccaagaagggaggaggtgaaaggcagttcaatggtcttgttgatgtctacaagaagaccctcaagtcagatggtattgctggactttaccgtggtttcaacatctcgtgtgctggtatcattgtctaccgtggtctctactttggactgtacgactctatgaagcctgtcctcctcactggagacctgcaggacagtttcttcgctagttttgctcttggatggctcatcaccaatggtgcgggtcttgcatcgtacccgattgacacggttagaagaagaatgatgatgacatcaggtgaagcggtgaagtacaagagctcatttgatgcgttctcccagatcgtgaagaaggaaggagccaagtctctgttcaagggtgcgggtgccaacatccggagtgtcgttgcaggtgctggtgtgctttctgggtgcgacaagctgcagttaatcgtcttcggcaagaagtatggatctggaggtgcctaagtaccaccaaatcccgcagtcattaagcttcggcttttgtttttttctccaatttttttgcagtttcagatttcttttataaaaaagatgttgatgaaatcatttccccataaaattagagaggagcaaggggaaatattatctgttcgacgataaggtttttgttatatggaataaattttgtatgggagggaaaaaaaaaaaaaaaaaaaactcgagggggg

SEQ ID NO: 49875 - protein, 268 aa, Arabidopsis thaliana
  peptide (1)..(268): Ceres Seq. ID no. 13648264
MLKAGRLTEPYKGIRDCFGRTIRDEGIGSLWRGNTANVIRYFPTQALNFAFKDYFKRLFNFKKDKDGYWKWFAGNLASGGAAGASSLLFVYSLDYARTRLANDSKSAKKGGGERQFNGLVDVYKKTLKSDGIAGLYRGFNISCAGIIVYRGLYFGLYDSMKPVLLTGDLQDSFFASFALGWLITNGAGLASYPIDTVRRRMMMTSGEAVKYKSSFDAFSQIVKKEGAKSLFKGAGANIRSVVAGAGVLSGCDKLQLIVFGKKYGSGGA

SEQ ID NO: 49876 - protein, 141 aa, Arabidopsis thaliana
  peptide (1)..(141): Ceres Seq. ID no. 13648265
  misc_feature (112)..(112): Xaa is any aa, unknown or other
TKRILSFLLLRSAPTTKGEESRSLSFALPSIFLEATMVEQTQHPTILQKASGQLLSSSVSQDIRGYASDSKRPATYQKHAAYGNYSNAAFQYPLAAASQIATTTSPVFVQAXGEKGFTNFAIDFMMGGCFCCCVKDCCCSH

SEQ ID NO: 49877 - DNA, 1880 bp, Arabidopsis thaliana; identical to SEQ ID NO: 45024
  misc_feature (1)..(1880): Ceres Seq. ID no. 12559206
  misc_feature (1)..(1880): Ortholog of  Ceres SEQ ID NO 13503610 as cited in SEQ ID NO 62416
  misc_feature (1)..(1880): Ortholog of  Ceres SEQ ID NO 13657610 as cited in SEQ ID NO 66165
  misc_feature (1)..(1880): Ortholog of  Ceres SEQ ID NO 13598312 as cited in SEQ ID NO 68448
  misc_feature (1)..(1880): Ortholog of  Ceres SEQ ID NO 13596100 as cited in SEQ ID NO 68573

SEQ ID NO: 49878 - protein, 528 aa, Arabidopsis thaliana; identical to SEQ ID NO: 45025
  peptide (1)..(528): Ceres Seq. ID no. 12559207

SEQ ID NO: 49879 - protein, 520 aa, Arabidopsis thaliana; identical to SEQ ID NO: 45026
  peptide (1)..(520): Ceres Seq. ID no. 12559208

SEQ ID NO: 49880 - protein, 511 aa, Arabidopsis thaliana; identical to SEQ ID NO: 45027
  peptide (1)..(511): Ceres Seq. ID no. 12559209

SEQ ID NO: 49881 - DNA, 838 bp, Arabidopsis thaliana
  misc_feature (1)..(838): Ceres Seq. ID no. 13592589
  misc_feature (1)..(838): Ortholog of  Ceres SEQ ID NO 13595210 as cited in SEQ ID NO 56285
attcctctgcggcgtctctctctcttccttatcatcatcatcttcactctaaacttcacagagagccattcaagcagaagaagagctctctgatccttctctgccattttcattattatcctttcttctgtttcagagttttctattcttctcaatcttatctcgcttcgaagtggatcaatatgtcaatgacggaagaaaccaagacgacgaagctcgaatcggcgggagattcgtccgatgtagacaacgggaactgtagtagcagtggaagtggaggtgatacgaagaagacatgcgttgattgtggaacaagcaggactcctctttggcgtggtggacctgctggccctaaatcattgtgcaatgcgtgtgggatcaaaagcagaaagaagagacaagcagctcttggaattagacaagatgatattaaaatcaagagcaaaagtaataacaatcttggtcttgagagccgaaatgtcaagaccggaaaaggcgaaccagttaatgttaagattgcaaaatgtgaaccgggaaatgtcaagattgccaaaggtgaaccaggaaatgtcaagaacaaaatcaagagagatcctgagaattccagtagcagcaataataacaagaagaacgtgaaaagggttggtagatttttggattttgggtttaaggtaccggcgatgaagagatcggctgtggagaagaagaggctatggaggaaacttggggaagaggaacgagccgcagtacttctcatggctctttcttgtggttgagattttgtctcttaaccctttttttttgatgtgtcgtaatggttgagtgaaagagattaggg

SEQ ID NO: 49882 - protein, 257 aa, Arabidopsis thaliana
  peptide (1)..(257): Ceres Seq. ID no. 13592590
SSAASLSLPYHHHLHSKLHREPFKQKKSSLILLCHFHYYPFFCFRVFYSSQSYLASKWINMSMTEETKTTKLESAGDSSDVDNGNCSSSGSGGDTKKTCVDCGTSRTPLWRGGPAGPKSLCNACGIKSRKKRQAALGIRQDDIKIKSKSNNNLGLESRNVKTGKGEPVNVKIAKCEPGNVKIAKGEPGNVKNKIKRDPENSSSSNNNKKNVKRVGRFLDFGFKVPAMKRSAVEKKRLWRKLGEEERAAVLLMALSCG

SEQ ID NO: 49883 - protein, 197 aa, Arabidopsis thaliana
  peptide (1)..(197): Ceres Seq. ID no. 13592591
MSMTEETKTTKLESAGDSSDVDNGNCSSSGSGGDTKKTCVDCGTSRTPLWRGGPAGPKSLCNACGIKSRKKRQAALGIRQDDIKIKSKSNNNLGLESRNVKTGKGEPVNVKIAKCEPGNVKIAKGEPGNVKNKIKRDPENSSSSNNNKKNVKRVGRFLDFGFKVPAMKRSAVEKKRLWRKLGEEERAAVLLMALSCG

SEQ ID NO: 49884 - protein, 195 aa, Arabidopsis thaliana
  peptide (1)..(195): Ceres Seq. ID no. 13592592
MTEETKTTKLESAGDSSDVDNGNCSSSGSGGDTKKTCVDCGTSRTPLWRGGPAGPKSLCNACGIKSRKKRQAALGIRQDDIKIKSKSNNNLGLESRNVKTGKGEPVNVKIAKCEPGNVKIAKGEPGNVKNKIKRDPENSSSSNNNKKNVKRVGRFLDFGFKVPAMKRSAVEKKRLWRKLGEEERAAVLLMALSCG

SEQ ID NO: 49885 - DNA, 690 bp, Arabidopsis thaliana
  misc_feature (1)..(690): Ceres Seq. ID no. 13592346
  misc_feature (1)..(690): Ortholog of  Ceres SEQ ID NO 13581889 as cited in SEQ ID NO 50900
  misc_feature (1)..(690): Ortholog of  Ceres SEQ ID NO 13581902 as cited in SEQ ID NO 52223
  misc_feature (1)..(690): Ortholog of  Ceres SEQ ID NO 12585528 as cited in SEQ ID NO 62991
gataccaatcaaacacgacagtctcaacaatcaaaagcttcaaatttttcattgtcaagaattctcaaaatggctagaacaaagcaaacagctagaaaatccaccggaggaaaagctcctagaaagcaactggcgacgaaagcagcaaggaaatcagctccagccaccggaggagtgaagaagccacacagattccgtccaggaacagtagcgttacgtgaaatcagaaagtatcaaaaaagcacagagcttttgatccgtaagcttcctttccagagattggttcgtgagatagctcaagatttcaagacggatcttaggtttcagagtagtgcagtcgcagctcttcaagaagcagctgaagcttatttggttggattgtttgaagatactaatctttgtgctattcatgctaagagggttacgattatgcctaaggatattcaacttgcgaggaggattagaggtgagagggcttaagatttgaagaagatgaagaagaaaaacaatggtctagtgtagatttgcttgtttgctctcataagatttgtagattcatgttttagatttggttttgagttttcttagtcttttgttctgaagtgtcttccagatgttcgatgaaatgcccaaatgaaaatttaatctacttttgctactttctaagaacagtcttcagtttaacttatt

SEQ ID NO: 49886 - protein, 159 aa, Arabidopsis thaliana
  peptide (1)..(159): Ceres Seq. ID no. 15221093
DTNQTRQSQQSKASNFSLSRILKMARTKQTARKSTGGKAPRKQLATKAARKSAPATGGVKKPHRFRPGTVALREIRKYQKSTELLIRKLPFQRLVREIAQDFKTDLRFQSSAVAALQEAAEAYLVGLFEDTNLCAIHAKRVTIMPKDIQLARRIRGERA

SEQ ID NO: 49887 - protein, 136 aa, Arabidopsis thaliana; identical to SEQ ID NO: 8709
  peptide (1)..(136): Ceres Seq. ID no. 15221094

SEQ ID NO: 49888 - DNA, 1118 bp, Arabidopsis thaliana
  misc_feature (1)..(1118): Ceres Seq. ID no. 13588838
  misc_feature (1)..(1118): Ortholog of  Ceres SEQ ID NO 13654989 as cited in SEQ ID NO 63117
  misc_feature (1)..(1118): Ortholog of  Ceres SEQ ID NO 13657138 as cited in SEQ ID NO 65923
  misc_feature (1)..(1118): Ortholog of  Ceres SEQ ID NO 13584744 as cited in SEQ ID NO 69137
gtttggtttttggatcagtatacagagattcaatgagctgttttggctgttgccgtgaagatgatttgcctggagctaatgattatggaggtcacaatatgaccaaacaatctggaggaaatgatggaaggcgcaacggctctgaaactgcacaaaaaggtgctcagagtgtgaaagtgcagcctatagaagtagctgctattctcgctgatgaactgattgaagcaacgaatgattttggaactaattctcttatcggtgaaggctcgtatgcgagagtgtatcacggggtgttaaagaatggtcagcgtgcagccattaaaaagttagattctaacaaacagcctaatgaagagtttctagcacaggtttccatggtttcgaggttgaagcatgttaactttgttgagctgcttggttactctgttgatgggaattcgaggatacttgtctttgagtttgcccaaaatggatctcttcatgatattcttcacgggagaaaaggtgtgaagggagcaaagcctggtccactcttgtcgtggcatcaacgagtgaagattgctgttggagcagcaagagggcttgagtatttacatgaaaaggcaaatccacatgtcatccaccgtgacataaaatccagcaatgttctaatctttgataacgatgtagccaagatagctgactttgatctctcaaatcaagctcctgatatggcagcacgccttcattcaactcgtgttcttggaacctttggttaccatgcccctgaatatgcaatgactgggcaattgagtgccaagagtgacgtatacagtttcggagttgtactgctcgagcttcttacaggtcgaaagcctgttgatcatacattgcctcgaggccagcaaagtctagtcacatgggctacaccaaagctaagcgaagacaaggttaagcagtgtgttgattcaagactgggaggagattaccctccaaaagctgttgctaagttagctgctgttgctgcattgtgtgtacaatacgaagctgatttcagaccaaacatgagtattgtcgtgaaggctctgcaaccattgttgaatgctcggaccggacctgcaggagaaggagcaccttag

SEQ ID NO: 49889 - protein, 371 aa, Arabidopsis thaliana
  peptide (1)..(371): Ceres Seq. ID no. 13588839
LVFGSVYRDSMSCFGCCREDDLPGANDYGGHNMTKQSGGNDGRRNGSETAQKGAQSVKVQPIEVAAILADELIEATNDFGTNSLIGEGSYARVYHGVLKNGQRAAIKKLDSNKQPNEEFLAQVSMVSRLKHVNFVELLGYSVDGNSRILVFEFAQNGSLHDILHGRKGVKGAKPGPLLSWHQRVKIAVGAARGLEYLHEKANPHVIHRDIKSSNVLIFDNDVAKIADFDLSNQAPDMAARLHSTRVLGTFGYHAPEYAMTGQLSAKSDVYSFGVVLLELLTGRKPVDHTLPRGQQSLVTWATPKLSEDKVKQCVDSRLGGDYPPKAVAKLAAVAALCVQYEADFRPNMSIVVKALQPLLNARTGPAGEGAP

SEQ ID NO: 49890 - protein, 361 aa, Arabidopsis thaliana
  peptide (1)..(361): Ceres Seq. ID no. 13588840
MSCFGCCREDDLPGANDYGGHNMTKQSGGNDGRRNGSETAQKGAQSVKVQPIEVAAILADELIEATNDFGTNSLIGEGSYARVYHGVLKNGQRAAIKKLDSNKQPNEEFLAQVSMVSRLKHVNFVELLGYSVDGNSRILVFEFAQNGSLHDILHGRKGVKGAKPGPLLSWHQRVKIAVGAARGLEYLHEKANPHVIHRDIKSSNVLIFDNDVAKIADFDLSNQAPDMAARLHSTRVLGTFGYHAPEYAMTGQLSAKSDVYSFGVVLLELLTGRKPVDHTLPRGQQSLVTWATPKLSEDKVKQCVDSRLGGDYPPKAVAKLAAVAALCVQYEADFRPNMSIVVKALQPLLNARTGPAGEGAP

SEQ ID NO: 49891 - protein, 339 aa, Arabidopsis thaliana
  peptide (1)..(339): Ceres Seq. ID no. 13588841
MTKQSGGNDGRRNGSETAQKGAQSVKVQPIEVAAILADELIEATNDFGTNSLIGEGSYARVYHGVLKNGQRAAIKKLDSNKQPNEEFLAQVSMVSRLKHVNFVELLGYSVDGNSRILVFEFAQNGSLHDILHGRKGVKGAKPGPLLSWHQRVKIAVGAARGLEYLHEKANPHVIHRDIKSSNVLIFDNDVAKIADFDLSNQAPDMAARLHSTRVLGTFGYHAPEYAMTGQLSAKSDVYSFGVVLLELLTGRKPVDHTLPRGQQSLVTWATPKLSEDKVKQCVDSRLGGDYPPKAVAKLAAVAALCVQYEADFRPNMSIVVKALQPLLNARTGPAGEGAP

SEQ ID NO: 49892 - DNA, 2851 bp, Arabidopsis thaliana; identical to SEQ ID NO: 46663
  misc_feature (1)..(2851): Ceres Seq. ID no. 12639101
  misc_feature (1)..(2851): Ortholog of  Ceres SEQ ID NO 14306908 as cited in SEQ ID NO 53320

SEQ ID NO: 49893 - protein, 495 aa, Arabidopsis thaliana; identical to SEQ ID NO: 46664
  peptide (1)..(495): Ceres Seq. ID no. 12639102

SEQ ID NO: 49894 - protein, 469 aa, Arabidopsis thaliana; identical to SEQ ID NO: 46665
  peptide (1)..(469): Ceres Seq. ID no. 12639103

SEQ ID NO: 49895 - protein, 385 aa, Arabidopsis thaliana; identical to SEQ ID NO: 46666
  peptide (1)..(385): Ceres Seq. ID no. 12639104

SEQ ID NO: 49896 - DNA, 2948 bp, Arabidopsis thaliana; identical to SEQ ID NO: 47703
  misc_feature (1)..(2948): Ceres Seq. ID no. 12591727
  misc_feature (1)..(2948): Ortholog of  Ceres SEQ ID NO 15172237 as cited in SEQ ID NO 55116

SEQ ID NO: 49897 - protein, 809 aa, Arabidopsis thaliana; identical to SEQ ID NO: 47704
  peptide (1)..(809): Ceres Seq. ID no. 12591728

SEQ ID NO: 49898 - protein, 531 aa, Arabidopsis thaliana; identical to SEQ ID NO: 47705
  peptide (1)..(531): Ceres Seq. ID no. 12591729

SEQ ID NO: 49899 - protein, 488 aa, Arabidopsis thaliana; identical to SEQ ID NO: 47706
  peptide (1)..(488): Ceres Seq. ID no. 12591730

SEQ ID NO: 49900 - DNA, 1328 bp, Arabidopsis thaliana
  misc_feature (1)..(1328): Ceres Seq. ID no. 13592347
  misc_feature (1)..(1328): Ortholog of  Ceres SEQ ID NO 12578315 as cited in SEQ ID NO 62451
  misc_feature (1)..(1328): Ortholog of  Ceres SEQ ID NO 12615466 as cited in SEQ ID NO 62761
  misc_feature (1)..(1328): Ortholog of  Ceres SEQ ID NO 12617090 as cited in SEQ ID NO 64005
  misc_feature (1)..(1328): Ortholog of  Ceres SEQ ID NO 13597439 as cited in SEQ ID NO 64081
  misc_feature (1)..(1328): Ortholog of  Ceres SEQ ID NO 13597233 as cited in SEQ ID NO 64370
  misc_feature (1)..(1328): Ortholog of  Ceres SEQ ID NO 13584577 as cited in SEQ ID NO 65298
  misc_feature (1)..(1328): Ortholog of  Ceres SEQ ID NO 13598327 as cited in SEQ ID NO 68040
ggaagagcacataatgatgaccaaaaattctatcgaattcgatccttacatcgagcgtaaagctttcgacgaaacaaaacaaggtgtgaaaggcctcgtcgacgctaaaatcactgaagttcctcgtatcttccaccaccgtcaagatatcttaaccaacaagaaaccttctgcttcagtatcagacctagagatccctatcatcgactttgcaagcgtccacgcggacacagcctcacgtgaagccatcgtagagaaagtcaaatatgcggtggagaattggggattcttccaggttatcaatcatagtattcctttaaacgttcttgaagagattaaagatggggttcgtaggtttcacgaggaagatcctgaggtcaagaaatcattcttctcgcgtgatgccggcaacaaaaaatttgtatacaacagtaacttcgatctatacagttcttcgccgtctgttaattggagagattctttctcttgttacatagctccagatcctccagctcctgaggagatccctgagacttgcagggatgctatgtttgaatactcaaagcatgtgttgagtttcggtggtttactatttgagcttctctcagaagcacttggtttgaaatctcagacccttgagagcatggattgcgtgaagactttgcttatgatctgccattattacccaccttgtccacaacctgacctaacgttagggataacgaaacactcagataactccttcctcacgcttcttctccaagacaacattggtggtcttcaaattcttcatcaagactcttgggttgatgtctctcctatccatggagctcttgtcgtcaacattggagattttttgcagctgataacgaacgataagtttgtaagtgtggagcatagagtgcttgcaaatagacaaggaccaaggatttcagtagctagctttttcagctcaagtatgcgtccaaattccagagtttacggaccgatgaaagagcttgtgtctgaagaaaaccctccaaaatacagagacataaccataaaagagtattcaaaaatattttttgagaaaggtctcgatggaacgtcgcatctctcgaatatcaggatatgaaaaacgaaaacgacagaaatttcttaatgagtttctttgcatcaattatactgtttgtttatgtctcttcaataatcaaaccaatgcatgtaccaaatataagaaataattgtgtgtgtcgttgtgtgtaaactatgtatatctgtatattcgttgagctactgtgtatttaaatcttatcacttgtaaaatgttatcaagtgatattgaccgc

SEQ ID NO: 49901 - protein, 370 aa, Arabidopsis thaliana
  peptide (1)..(370): Ceres Seq. ID no. 13592348
EEHIMMTKNSIEFDPYIERKAFDETKQGVKGLVDAKITEVPRIFHHRQDILTNKKPSASVSDLEIPIIDFASVHADTASREAIVEKVKYAVENWGFFQVINHSIPLNVLEEIKDGVRRFHEEDPEVKKSFFSRDAGNKKFVYNSNFDLYSSSPSVNWRDSFSCYIAPDPPAPEEIPETCRDAMFEYSKHVLSFGGLLFELLSEALGLKSQTLESMDCVKTLLMICHYYPPCPQPDLTLGITKHSDNSFLTLLLQDNIGGLQILHQDSWVDVSPIHGALVVNIGDFLQLITNDKFVSVEHRVLANRQGPRISVASFFSSSMRPNSRVYGPMKELVSEENPPKYRDITIKEYSKIFFEKGLDGTSHLSNIRI

SEQ ID NO: 49902 - protein, 366 aa, Arabidopsis thaliana
  peptide (1)..(366): Ceres Seq. ID no. 13592349
MMTKNSIEFDPYIERKAFDETKQGVKGLVDAKITEVPRIFHHRQDILTNKKPSASVSDLEIPIIDFASVHADTASREAIVEKVKYAVENWGFFQVINHSIPLNVLEEIKDGVRRFHEEDPEVKKSFFSRDAGNKKFVYNSNFDLYSSSPSVNWRDSFSCYIAPDPPAPEEIPETCRDAMFEYSKHVLSFGGLLFELLSEALGLKSQTLESMDCVKTLLMICHYYPPCPQPDLTLGITKHSDNSFLTLLLQDNIGGLQILHQDSWVDVSPIHGALVVNIGDFLQLITNDKFVSVEHRVLANRQGPRISVASFFSSSMRPNSRVYGPMKELVSEENPPKYRDITIKEYSKIFFEKGLDGTSHLSNIRI

SEQ ID NO: 49903 - protein, 365 aa, Arabidopsis thaliana
  peptide (1)..(365): Ceres Seq. ID no. 13592350
MTKNSIEFDPYIERKAFDETKQGVKGLVDAKITEVPRIFHHRQDILTNKKPSASVSDLEIPIIDFASVHADTASREAIVEKVKYAVENWGFFQVINHSIPLNVLEEIKDGVRRFHEEDPEVKKSFFSRDAGNKKFVYNSNFDLYSSSPSVNWRDSFSCYIAPDPPAPEEIPETCRDAMFEYSKHVLSFGGLLFELLSEALGLKSQTLESMDCVKTLLMICHYYPPCPQPDLTLGITKHSDNSFLTLLLQDNIGGLQILHQDSWVDVSPIHGALVVNIGDFLQLITNDKFVSVEHRVLANRQGPRISVASFFSSSMRPNSRVYGPMKELVSEENPPKYRDITIKEYSKIFFEKGLDGTSHLSNIRI

SEQ ID NO: 49904 - DNA, 1370 bp, Arabidopsis thaliana; identical to SEQ ID NO: 49014
  misc_feature (1)..(1370): Ceres Seq. ID no. 13592099
  misc_feature (1)..(1370): Ortholog of  Ceres SEQ ID NO 15175368 as cited in SEQ ID NO 60071
  misc_feature (1)..(1370): Ortholog of  Ceres SEQ ID NO 13528157 as cited in SEQ ID NO 60102
  misc_feature (1)..(1370): Ortholog of  Ceres SEQ ID NO 15179340 as cited in SEQ ID NO 0

SEQ ID NO: 49905 - protein, 312 aa, Arabidopsis thaliana; identical to SEQ ID NO: 49015
  peptide (1)..(312): Ceres Seq. ID no. 13592100

SEQ ID NO: 49906 - protein, 306 aa, Arabidopsis thaliana; identical to SEQ ID NO: 49016
  peptide (1)..(306): Ceres Seq. ID no. 13592101

SEQ ID NO: 49907 - protein, 304 aa, Arabidopsis thaliana; identical to SEQ ID NO: 49017
  peptide (1)..(304): Ceres Seq. ID no. 13592102

SEQ ID NO: 49908 - DNA, 1109 bp, Arabidopsis thaliana
  misc_feature (1)..(1109): Ceres Seq. ID no. 13588070
  misc_feature (1)..(1109): Ortholog of  Ceres SEQ ID NO 14303487 as cited in SEQ ID NO 54521
  misc_feature (1)..(1109): Ortholog of  Ceres SEQ ID NO 14316302 as cited in SEQ ID NO 55232
  misc_feature (1)..(1109): Ortholog of  Ceres SEQ ID NO 14308274 as cited in SEQ ID NO 55597
  misc_feature (1)..(1109): Ortholog of  Ceres SEQ ID NO 13659710 as cited in SEQ ID NO 60808
actttcattttattcgtcgtcagtttcatcttgttgcttcggagcgagcgagaattatcgtcggagaatttatcgtctctctctctgaaaattctgatcggtgaagaatcgtcggatcgaaagtttcataagctttccatcaactagcagtatctgccaatatcacagacagataattcgtaatgggagacgtatatttcaaccatttcgctcagcaactgcagatgtctgaccaagagaagggtgaaatgtcaagacattcacaccctcattcaatcaatgaagaatctgagtcgtcaactctggaaagggtagcagcagagtcattaacaaacaaagtccttgatagaggactaatggagtatggatgtccacattacagaagaaggtgttgcattagagctccttgctgtaatgagatctttggttgccatcactgtcattatgaggcgaagaacaacataaatgtagatcagaagcagaggcatgatattcctcgccaccaagttgaacaggttatttgtttactttgtggtactgaacaagaggtgggccaaatttgtatccactgtggagtgtgcatggggaagtacttctgtaaagtctgcaagctctacgatgatgatacgtctaaaaaacagtaccactgcgatgggtgtggaatttgcagaatcggaggacgtgaaaatttctttcactgttacaagtgtggctgttgttattcaatcctcctcaagaacggtcacccttgtgtcgaaggagcaatgcatcacgactgccccatttgctttgagtttctgtttgaatcacggaacgatgtgacggttttaccatgtggacacacaattcatcagaagtgcttggaggaaatgagagatcattaccaatatgcgtgcccactttgctcaaaatctgtatgcgacatgtcaaaagtgtgggagaagtttgacatggagattgcggctacaccaatgccagaaccataccagaacagaatggttcagattctctgcaacgactgtgggaagaaagcagaggtacagtaccatgtggtggctcagaaatgcccaaactgcaaatcatacaacactcgccaaaccagaggctga

SEQ ID NO: 49909 - protein, 308 aa, Arabidopsis thaliana
  peptide (1)..(308): Ceres Seq. ID no. 13588071
MGDVYFNHFAQQLQMSDQEKGEMSRHSHPHSINEESESSTLERVAAESLTNKVLDRGLMEYGCPHYRRRCCIRAPCCNEIFGCHHCHYEAKNNINVDQKQRHDIPRHQVEQVICLLCGTEQEVGQICIHCGVCMGKYFCKVCKLYDDDTSKKQYHCDGCGICRIGGRENFFHCYKCGCCYSILLKNGHPCVEGAMHHDCPICFEFLFESRNDVTVLPCGHTIHQKCLEEMRDHYQYACPLCSKSVCDMSKVWEKFDMEIAATPMPEPYQNRMVQILCNDCGKKAEVQYHVVAQKCPNCKSYNTRQTRG

SEQ ID NO: 49910 - protein, 294 aa, Arabidopsis thaliana
  peptide (1)..(294): Ceres Seq. ID no. 13588072
MSDQEKGEMSRHSHPHSINEESESSTLERVAAESLTNKVLDRGLMEYGCPHYRRRCCIRAPCCNEIFGCHHCHYEAKNNINVDQKQRHDIPRHQVEQVICLLCGTEQEVGQICIHCGVCMGKYFCKVCKLYDDDTSKKQYHCDGCGICRIGGRENFFHCYKCGCCYSILLKNGHPCVEGAMHHDCPICFEFLFESRNDVTVLPCGHTIHQKCLEEMRDHYQYACPLCSKSVCDMSKVWEKFDMEIAATPMPEPYQNRMVQILCNDCGKKAEVQYHVVAQKCPNCKSYNTRQTRG

SEQ ID NO: 49911 - protein, 286 aa, Arabidopsis thaliana
  peptide (1)..(286): Ceres Seq. ID no. 13588073
MSRHSHPHSINEESESSTLERVAAESLTNKVLDRGLMEYGCPHYRRRCCIRAPCCNEIFGCHHCHYEAKNNINVDQKQRHDIPRHQVEQVICLLCGTEQEVGQICIHCGVCMGKYFCKVCKLYDDDTSKKQYHCDGCGICRIGGRENFFHCYKCGCCYSILLKNGHPCVEGAMHHDCPICFEFLFESRNDVTVLPCGHTIHQKCLEEMRDHYQYACPLCSKSVCDMSKVWEKFDMEIAATPMPEPYQNRMVQILCNDCGKKAEVQYHVVAQKCPNCKSYNTRQTRG

SEQ ID NO: 49912 - DNA, 1388 bp, Arabidopsis thaliana
  misc_feature (1)..(1388): Ceres Seq. ID no. 15178744
  misc_feature (1)..(1388): Ortholog of  Ceres SEQ ID NO 13593967 as cited in SEQ ID NO 56966
gtcccccccccccccccccgagtttgttttttctactaatttgctgaagaaagagttaatctttggttggtttaagattcttcaaagaagcaatcataacgcaattgattatatccccaaaagaaaaggtttttaaactccaaaaatgcagactccaaaatcaaggccaggatcattggagctgccacaaaagaagtctcctttaccagctcccaaagttgttaggagactcaaaccaagcggagcagaatccgatccaaaaaccaagacaatatcgaaaactcaaatcccgaaagtagtagctgatcgtcgctctgcaagaatccctctcaatgagattcagaagaagcggacgggaaggataccggaactggaatctacgatatctcagcttcaagaagagcttaagaaggcaaaagaagagctaaacagatcagaagcattgaaaagagaagctcaagaagaagctgaagatgccaagcatcagttaatggatatcaatgcctcggaagattcaagaattgaggagctgcgtaaactctcgcaggagcgagacaagacatggcagtctgaacttgaagctatgcagagacaacacggaatggattctaccgctctgtcttctgccattaacgaagttcagaaactgaaatcgaagctctttgagtccgagtctgagttagagcagtctaagtatgaggtaaggtctttagagaaactcgtcagacagctcgaggaagaaagagtaaacagtagagactcttcatcatcaatggaagtggaagagctgaaagaagcaatgaatctttcaaggcaagagataacacaattgaaatctgcagttgaagcagcagagacaaggtatcaagaagagtatatacagagcacattgcagataagaagcgcatacgaacaaacagaggcggttaaatcaagatattcacagagagaagcagagttaacggaagaattgaacagaaccaaagatgaaatcgaaggtttgcgcaaagagttaatggagaaggtgaaagaagacgaatctacgggcgatttgaagaagctagaatcggatttgatggaagtgagagggagtttaatggataaagagatggagttgcagattctaaggagtgcaatggagaagaaagtggaaaccgcaaacacggaagccatggaagctgagcttaaaagagtgaagattcaatgtgagcaatggaggaaagctgctgagacggcagcttctatactgaacaatgatgaggaaagaacagattctattgagactagcaaaatgttgaaaaagtttggtgtgttactcaagaaaaaccataagtaataataatactgattctttttacttgatttaataaaaatggcattattgttgt

SEQ ID NO: 49913 - protein, 396 aa, Arabidopsis thaliana
  peptide (1)..(396): Ceres Seq. ID no. 15178745
MQTPKSRPGSLELPQKKSPLPAPKVVRRLKPSGAESDPKTKTISKTQIPKVVADRRSARIPLNEIQKKRTGRIPELESTISQLQEELKKAKEELNRSEALKREAQEEAEDAKHQLMDINASEDSRIEELRKLSQERDKTWQSELEAMQRQHGMDSTALSSAINEVQKLKSKLFESESELEQSKYEVRSLEKLVRQLEEERVNSRDSSSSMEVEELKEAMNLSRQEITQLKSAVEAAETRYQEEYIQSTLQIRSAYEQTEAVKSRYSQREAELTEELNRTKDEIEGLRKELMEKVKEDESTGDLKKLESDLMEVRGSLMDKEMELQILRSAMEKKVETANTEAMEAELKRVKIQCEQWRKAAETAASILNNDEERTDSIETSKMLKKFGVLLKKNHK

SEQ ID NO: 49914 - protein, 281 aa, Arabidopsis thaliana
  peptide (1)..(281): Ceres Seq. ID no. 15178746
MDINASEDSRIEELRKLSQERDKTWQSELEAMQRQHGMDSTALSSAINEVQKLKSKLFESESELEQSKYEVRSLEKLVRQLEEERVNSRDSSSSMEVEELKEAMNLSRQEITQLKSAVEAAETRYQEEYIQSTLQIRSAYEQTEAVKSRYSQREAELTEELNRTKDEIEGLRKELMEKVKEDESTGDLKKLESDLMEVRGSLMDKEMELQILRSAMEKKVETANTEAMEAELKRVKIQCEQWRKAAETAASILNNDEERTDSIETSKMLKKFGVLLKKNHK

SEQ ID NO: 49915 - protein, 250 aa, Arabidopsis thaliana
  peptide (1)..(250): Ceres Seq. ID no. 15178747
MQRQHGMDSTALSSAINEVQKLKSKLFESESELEQSKYEVRSLEKLVRQLEEERVNSRDSSSSMEVEELKEAMNLSRQEITQLKSAVEAAETRYQEEYIQSTLQIRSAYEQTEAVKSRYSQREAELTEELNRTKDEIEGLRKELMEKVKEDESTGDLKKLESDLMEVRGSLMDKEMELQILRSAMEKKVETANTEAMEAELKRVKIQCEQWRKAAETAASILNNDEERTDSIETSKMLKKFGVLLKKNHK

SEQ ID NO: 49916 - DNA, 1220 bp, Arabidopsis thaliana
  misc_feature (1)..(1220): Ceres Seq. ID no. 13588846
  misc_feature (1)..(1220): Ortholog of  Ceres SEQ ID NO 15169809 as cited in SEQ ID NO 52839
  misc_feature (1)..(1220): Ortholog of  Ceres SEQ ID NO 15224302 as cited in SEQ ID NO 53942
  misc_feature (1)..(1220): Ortholog of  Ceres SEQ ID NO 14306297 as cited in SEQ ID NO 56907
aatcgatctcaaccgtccgatcatccatcttgccatcaccgttcaccaatcttcttcgtctcctctctctttctctctttttgctgtttctagctcctctctctctggatctcgccggcgaaccgtttctcttgggtgtaaacagtagcaatcaagctatagaatctcagatatcgctgaattagctgttggattttatccgccttttcttcgttatccggggctcgggtataaggtttcatcgtcttatttcatctgtaaatgggctgcttccactcaaaggcagcaaaagaatttcgaggacacgaagaccctgttaagcttgcctctgagacagcttttagtgtgagtgaggttgaagcattatttgagctattcaagagcataagcagttcggttgttgatgatggtctgattaacaaggaggagtttcaacttgctttgttcaaaagccggaagagggagaatatatttgctaataggatatttgatatgtttgatgttaaacgaaaaggagtcatcgatttcggggactttgtaagatcactcaatgttttccaccccaatgcttctctagaagacaaaatagattttacgtttaggctttacgacatggactgcacgggttacattgaacgacaagaggtcaagcaaatgttgatcgcgcttctctgcgaatctgaaatgaaactggctgatgaaaccatagagataatactcgataagacatttgaagatgcagacgtgaatcaagatggaaaaattgataaattagagtggagtgatttcgtaaacaaaaatccatcattgcttaagatcatgactcttccatatctcagggatattacgacaacgtttccgagttttgtcttccattcggaggtcgatgagattgccacatgaagaaacaaactggtttaagaccgagtagattgccacgagttggaagaacaagtctgagctaatcggtgtaatcaacatctgtttgtaaacagtagtagagcatattctcttgaaattgtttgggttacttttttcttctcacaacagtttaaaattttgggtttttagcttacaaaaaaaaaaaaaagaagaagcgcgtaatcaccaatccttcacttcatatagttaggaaatgttaatgagtttgtacatattacatcatacgtttgttgtaattgttttttttcaagtaaaaaagtaaagatttgttacgtttc

SEQ ID NO: 49917 - protein, 213 aa, Arabidopsis thaliana
  peptide (1)..(213): Ceres Seq. ID no. 13588847
MGCFHSKAAKEFRGHEDPVKLASETAFSVSEVEALFELFKSISSSVVDDGLINKEEFQLALFKSRKRENIFANRIFDMFDVKRKGVIDFGDFVRSLNVFHPNASLEDKIDFTFRLYDMDCTGYIERQEVKQMLIALLCESEMKLADETIEIILDKTFEDADVNQDGKIDKLEWSDFVNKNPSLLKIMTLPYLRDITTTFPSFVFHSEVDEIAT

SEQ ID NO: 49918 - protein, 136 aa, Arabidopsis thaliana; identical to SEQ ID NO: 35421
  peptide (1)..(136): Ceres Seq. ID no. 13588848

SEQ ID NO: 49919 - DNA, 1196 bp, Arabidopsis thaliana
  misc_feature (1)..(1196): Ceres Seq. ID no. 13592355
  misc_feature (1)..(1196): Ortholog of  Ceres SEQ ID NO 14307619 as cited in SEQ ID NO 20411
gtggataagcttctcactttcagttcaattggatagccggaaaggctctcctccaagtggcgtttatatggaggtgacaaatacgagcagcatcatgtggttcttcagggacaaaggtttcgatgatccgagtatcgacaagatgttgagaaaatgcaaacagttggaaaaggctcaaagcgatgtggcatcagaaaactgggactacctgagtaacattgttggtatccaagagagaaaactcccttacatcgtctcccgatgccccaaaatcctgactttacgcctcgatgagagactcatcccgatggtcgagtgcctctccagtcttggaaggaatcctcgggaagttgcttccgccattaccaaatttcctccaatactctctcatagcgtggaggagaaactctgtccccttcttgctttctttcaagcgttaggtgtgcctgagactcaacttggcaaaatgatactttttaacccaaggcttatcagctacagcatcgacaccaagctgacagtgatcgtcagctttcttgctagccttggccttgatcaagatgggatgattggcaaagttctggtgaagaacccatttcttatggggtacagtgttgataaaaggttacggcctaccactgaattcttgaaatcatccgttggcctgagtgaggatggcattaagtcggtggtcatgaatttcccacaacttttgtgcagagacgttaacaagattctcaaaccaaattatgattatttgaaggagtgtgggtttggagattcccagatagcaaccatggtcactggttatccccaaatcttgattaagagtgttaagaattcactacagcctaggatcagattcctcgtccaggtgatgggaagaggcatggatgaagtggcttcttatcctgaattctttcaccatggattgaagaagaaggtcgaatcgaggtttaaacttgtcaaaaagaacaacattgactgcagccttagagaaatgctggactgtaacacaaagaaattccatgagaagtttggcttttcggaggtaactgcaagctcctagcttttatatctctctctagttttttccttcatcaggctctctctgtaagctgttttcagcttgtgcaccaatttctagcacgagcttttccttgagtgattgtgatatcaatagagtgttttcttcc

SEQ ID NO: 49920 - protein, 355 aa, Arabidopsis thaliana
  peptide (1)..(355): Ceres Seq. ID no. 13592356
WISFSLSVQLDSRKGSPPSGVYMEVTNTSSIMWFFRDKGFDDPSIDKMLRKCKQLEKAQSDVASENWDYLSNIVGIQERKLPYIVSRCPKILTLRLDERLIPMVECLSSLGRNPREVASAITKFPPILSHSVEEKLCPLLAFFQALGVPETQLGKMILFNPRLISYSIDTKLTVIVSFLASLGLDQDGMIGKVLVKNPFLMGYSVDKRLRPTTEFLKSSVGLSEDGIKSVVMNFPQLLCRDVNKILKPNYDYLKECGFGDSQIATMVTGYPQILIKSVKNSLQPRIRFLVQVMGRGMDEVASYPEFFHHGLKKKVESRFKLVKKNNIDCSLREMLDCNTKKFHEKFGFSEVTASS

SEQ ID NO: 49921 - protein, 333 aa, Arabidopsis thaliana
  peptide (1)..(333): Ceres Seq. ID no. 13592357
MEVTNTSSIMWFFRDKGFDDPSIDKMLRKCKQLEKAQSDVASENWDYLSNIVGIQERKLPYIVSRCPKILTLRLDERLIPMVECLSSLGRNPREVASAITKFPPILSHSVEEKLCPLLAFFQALGVPETQLGKMILFNPRLISYSIDTKLTVIVSFLASLGLDQDGMIGKVLVKNPFLMGYSVDKRLRPTTEFLKSSVGLSEDGIKSVVMNFPQLLCRDVNKILKPNYDYLKECGFGDSQIATMVTGYPQILIKSVKNSLQPRIRFLVQVMGRGMDEVASYPEFFHHGLKKKVESRFKLVKKNNIDCSLREMLDCNTKKFHEKFGFSEVTASS

SEQ ID NO: 49922 - protein, 324 aa, Arabidopsis thaliana
  peptide (1)..(324): Ceres Seq. ID no. 13592358
MWFFRDKGFDDPSIDKMLRKCKQLEKAQSDVASENWDYLSNIVGIQERKLPYIVSRCPKILTLRLDERLIPMVECLSSLGRNPREVASAITKFPPILSHSVEEKLCPLLAFFQALGVPETQLGKMILFNPRLISYSIDTKLTVIVSFLASLGLDQDGMIGKVLVKNPFLMGYSVDKRLRPTTEFLKSSVGLSEDGIKSVVMNFPQLLCRDVNKILKPNYDYLKECGFGDSQIATMVTGYPQILIKSVKNSLQPRIRFLVQVMGRGMDEVASYPEFFHHGLKKKVESRFKLVKKNNIDCSLREMLDCNTKKFHEKFGFSEVTASS

SEQ ID NO: 49923 - DNA, 839 bp, Arabidopsis thaliana
  misc_feature (1)..(839): Ceres Seq. ID no. 13648287
  misc_feature (1)..(839): Ortholog of  Ceres SEQ ID NO 12587236 as cited in SEQ ID NO 67904
gagctcactagtcccccccccccgagaaacactctcttatcttcttcaacctctcgactagtaaaagccgcgaaaatcaaaatcctccaaaactatggctctgattttgccctgtacattttgtacttcgcttcagaagaagaattttccgattaatcggagatatattacgaatttccgtcgaggagctacgactgcgacgtgtgagttccggattcctgtagaagtttccactccatcagatagaggatcgttggttgttccttcgcacaaagtcactgttcacgatcgacaacgaggagtggttcacgaattcgaggttccagaggatcagtatatattgcattcagctgaatctcagaacattagtcttccgtttgcttgcaggcatggttgttgtactagttgtgctgtacgtgtaaaatctggagagctgaggcagcctcaagcattgggaatatcagcagaactgaagtcccaggggtatgcacttctttgtgtgggtttccccacatctgaccttgaagtagaaacacaagacgaggacgaggtctactggctacaatttggaagatactttgctcgtggaccaattgaaagagacgattacgctcttgaactcgccatgggagatgaatagaaaccaaaagaagcatgtaaactgtaaagtggcagactttctgtattagaggtgactagtgagttcaactttcttagtcctgaatatcgtggtgcatcatcgtaaatctcttactgaactcaacgatattccgattaaacttctcaacaattcaacatttcaaaaaaaaaaaaaaaaaaaactcgagggggggcccggt

SEQ ID NO: 49924 - protein, 181 aa, Arabidopsis thaliana
  peptide (1)..(181): Ceres Seq. ID no. 13648288
MALILPCTFCTSLQKKNFPINRRYITNFRRGATTATCEFRIPVEVSTPSDRGSLVVPSHKVTVHDRQRGVVHEFEVPEDQYILHSAESQNISLPFACRHGCCTSCAVRVKSGELRQPQALGISAELKSQGYALLCVGFPTSDLEVETQDEDEVYWLQFGRYFARGPIERDDYALELAMGDE

SEQ ID NO: 49925 - DNA, 2894 bp, Arabidopsis thaliana
  misc_feature (1)..(2894): Ceres Seq. ID no. 12591312
  misc_feature (1)..(2894): Ortholog of  Ceres SEQ ID NO 14313575 as cited in SEQ ID NO 58703
agtcttgatctctcgattattgcccaccaagtgatcgatcttttgtctcactgaactcggttacgcttgagatttgatctaacagctgaaagtttctgactttttgggtttttgatttcgattttcatggcgtatcatccggcttatactgagactatgtctatgggaggagggtcaagccatgggggcggccagcaatacgtgccgtttgctacgagtagtggctctttgagggtcgaattgttacatggtaacttagacatttgggttaaggaagctaaacatcttcctaatatggatggtttccataacagacttggtgggatgttgtctgggttaggtcggaagaaagtggaaggtgagaagtcttctaagatcactagtgatccttatgttactgtctctatctctggtgctgtgattggtagaacttttgttattagcaatagtgagaatcctgtgtggatgcagcattttgatgtaccggttgctcatagtgctgctgaagtacattttgttgtgaaagatagtgatattattggatcacagatcatgggagctgttggaatcccaacggagcagctgtgttcggggaataggatcgaagggctctttccgatacttaatagtagtgggaagccttgtaaacaaggtgctgtgttgggtttgtctattcaatacactccaatggaaagaatgagactttaccaaatgggtgttggttctggtaatgagtgtgtaggagttcccggtacatacttccctttgaggaaaggcggtagggttactctgtatcaggatgctcatgttgatgacggtactcttccgagtgtacatcttgatggtgggattcagtatagacatggaaagtgctgggaggatatggctgatgcaataaggcaggcaagaaggttgatttatatcacaggttggtcagttttccatccggttaggctggttcgtcgtaccaatgatcccaccgaaggtacattaggggagttgcttaaagtcaaatctcaagaaggtgttagagtgttggttttggtgtgggacgatccaacgtcaaggagtcttctgggattcaaaacacaaggagttatgaacacaagcgatgaggagactcgccgttttttcaagcattcgtcggtgcaagttctcctttgtcccagatctggagggaaaggtcacagcttcataaaaaaatctgaagttggaacaatctacacgcatcatcaaaaaactgtgattgtagacgctgaagcagctcagaaccgaagaaagatcgtagcatttgttggagggctagatttgtgcaacggacgatttgatactcccaagcatcctctcttcaggacattaaagacactccataaagatgacttccacaacccaaattttgtgactactgcggatgatggaccaagagaaccatggcatgatcttcacagcaagattgatggtccagctgcatatgatgtacttgctaatttcgaggaacgctggatgaaggcttcaaaacctcgcggaattgggaaactaaaatcttcttctgatgattctttgcttaggatagacagaattcctgacatcgtgggactttctgaagcttcttctgctaatgataatgatccagagtcttggcatgttcaggttttccgttccattgattcaagttcagtcaaagggtttccaaaggacccaaaggaagctactggaagaaatcttctatgtgggaagaatattctcatagatatgagcatacacgcagcttatgttaaggccatacgatctgctcagcacttcatttacattgagaaccaatattttcttggatcttcattcaactgggattcaaacaaggacttgggtgctaataatctaatcccgatggaaatcgcgcttaagattgctaacaaaattagagcaagggagaagtttgctgcttatattgtcattccaatgtggccagaaggtgctccaacaagtaaccctattcaaagaattctctactggcagcacaagacaatgcaaatgatgtatcaaaccatctacaaggcacttgtggaagttggtcttgatagccagtttgagccacaagactttttgaactttttctgtcttggaaccagagaagttcctgttggaacagttagcgtatataatagtcctcggaagccacctcagccaaacgcaaatgcaaatgctgcacaggtacaagctttgaagagtcgaagattcatgatatatgttcattccaaaggtatggtagtggatgatgagtttgtcttaattggttccgcgaatatcaaccagagatccttggaaggaactagagatactgaaatcgccatgggagggtatcagccacactattcatgggctatgaaaggttctcgtcctcatggtcagatctttgggtatagaatgtcgttatgggcagaacatctagggtttctagagcaaggtttcgaggaaccagagaacatggaatgcgtgagacgagtaaggcaattgagtgagctgaattggagacagtatgcagcagaggaagtcacagagatgtcaggtcatcttcttaagtatccagttcaagttgatagaacaggcaaagtgagttctcttcctggatgcgagacattcccagatctgggtggcaagatcataggatcgttccttgcactacaagaaaacctcaccatatgaaacttaccttgtaggcttgtagtgatcaacatttgttctttatttcttccacttcaagaaatctctctcagtgtgatctgattgaaagtgtgcctttagggtctagttgtgcttttcaaatttatgagctgtaaatctatttattacaaaatttcaattgatctatcaaagtgtgtgttttggatttttac

SEQ ID NO: 49926 - protein, 858 aa, Arabidopsis thaliana
  peptide (1)..(858): Ceres Seq. ID no. 12591313
MAYHPAYTETMSMGGGSSHGGGQQYVPFATSSGSLRVELLHGNLDIWVKEAKHLPNMDGFHNRLGGMLSGLGRKKVEGEKSSKITSDPYVTVSISGAVIGRTFVISNSENPVWMQHFDVPVAHSAAEVHFVVKDSDIIGSQIMGAVGIPTEQLCSGNRIEGLFPILNSSGKPCKQGAVLGLSIQYTPMERMRLYQMGVGSGNECVGVPGTYFPLRKGGRVTLYQDAHVDDGTLPSVHLDGGIQYRHGKCWEDMADAIRQARRLIYITGWSVFHPVRLVRRTNDPTEGTLGELLKVKSQEGVRVLVLVWDDPTSRSLLGFKTQGVMNTSDEETRRFFKHSSVQVLLCPRSGGKGHSFIKKSEVGTIYTHHQKTVIVDAEAAQNRRKIVAFVGGLDLCNGRFDTPKHPLFRTLKTLHKDDFHNPNFVTTADDGPREPWHDLHSKIDGPAAYDVLANFEERWMKASKPRGIGKLKSSSDDSLLRIDRIPDIVGLSEASSANDNDPESWHVQVFRSIDSSSVKGFPKDPKEATGRNLLCGKNILIDMSIHAAYVKAIRSAQHFIYIENQYFLGSSFNWDSNKDLGANNLIPMEIALKIANKIRAREKFAAYIVIPMWPEGAPTSNPIQRILYWQHKTMQMMYQTIYKALVEVGLDSQFEPQDFLNFFCLGTREVPVGTVSVYNSPRKPPQPNANANAAQVQALKSRRFMIYVHSKGMVVDDEFVLIGSANINQRSLEGTRDTEIAMGGYQPHYSWAMKGSRPHGQIFGYRMSLWAEHLGFLEQGFEEPENMECVRRVRQLSELNWRQYAAEEVTEMSGHLLKYPVQVDRTGKVSSLPGCETFPDLGGKIIGSFLALQENLTI

SEQ ID NO: 49927 - protein, 848 aa, Arabidopsis thaliana
  peptide (1)..(848): Ceres Seq. ID no. 12591314
MSMGGGSSHGGGQQYVPFATSSGSLRVELLHGNLDIWVKEAKHLPNMDGFHNRLGGMLSGLGRKKVEGEKSSKITSDPYVTVSISGAVIGRTFVISNSENPVWMQHFDVPVAHSAAEVHFVVKDSDIIGSQIMGAVGIPTEQLCSGNRIEGLFPILNSSGKPCKQGAVLGLSIQYTPMERMRLYQMGVGSGNECVGVPGTYFPLRKGGRVTLYQDAHVDDGTLPSVHLDGGIQYRHGKCWEDMADAIRQARRLIYITGWSVFHPVRLVRRTNDPTEGTLGELLKVKSQEGVRVLVLVWDDPTSRSLLGFKTQGVMNTSDEETRRFFKHSSVQVLLCPRSGGKGHSFIKKSEVGTIYTHHQKTVIVDAEAAQNRRKIVAFVGGLDLCNGRFDTPKHPLFRTLKTLHKDDFHNPNFVTTADDGPREPWHDLHSKIDGPAAYDVLANFEERWMKASKPRGIGKLKSSSDDSLLRIDRIPDIVGLSEASSANDNDPESWHVQVFRSIDSSSVKGFPKDPKEATGRNLLCGKNILIDMSIHAAYVKAIRSAQHFIYIENQYFLGSSFNWDSNKDLGANNLIPMEIALKIANKIRAREKFAAYIVIPMWPEGAPTSNPIQRILYWQHKTMQMMYQTIYKALVEVGLDSQFEPQDFLNFFCLGTREVPVGTVSVYNSPRKPPQPNANANAAQVQALKSRRFMIYVHSKGMVVDDEFVLIGSANINQRSLEGTRDTEIAMGGYQPHYSWAMKGSRPHGQIFGYRMSLWAEHLGFLEQGFEEPENMECVRRVRQLSELNWRQYAAEEVTEMSGHLLKYPVQVDRTGKVSSLPGCETFPDLGGKIIGSFLALQENLTI

SEQ ID NO: 49928 - protein, 846 aa, Arabidopsis thaliana
  peptide (1)..(846): Ceres Seq. ID no. 12591315
MGGGSSHGGGQQYVPFATSSGSLRVELLHGNLDIWVKEAKHLPNMDGFHNRLGGMLSGLGRKKVEGEKSSKITSDPYVTVSISGAVIGRTFVISNSENPVWMQHFDVPVAHSAAEVHFVVKDSDIIGSQIMGAVGIPTEQLCSGNRIEGLFPILNSSGKPCKQGAVLGLSIQYTPMERMRLYQMGVGSGNECVGVPGTYFPLRKGGRVTLYQDAHVDDGTLPSVHLDGGIQYRHGKCWEDMADAIRQARRLIYITGWSVFHPVRLVRRTNDPTEGTLGELLKVKSQEGVRVLVLVWDDPTSRSLLGFKTQGVMNTSDEETRRFFKHSSVQVLLCPRSGGKGHSFIKKSEVGTIYTHHQKTVIVDAEAAQNRRKIVAFVGGLDLCNGRFDTPKHPLFRTLKTLHKDDFHNPNFVTTADDGPREPWHDLHSKIDGPAAYDVLANFEERWMKASKPRGIGKLKSSSDDSLLRIDRIPDIVGLSEASSANDNDPESWHVQVFRSIDSSSVKGFPKDPKEATGRNLLCGKNILIDMSIHAAYVKAIRSAQHFIYIENQYFLGSSFNWDSNKDLGANNLIPMEIALKIANKIRAREKFAAYIVIPMWPEGAPTSNPIQRILYWQHKTMQMMYQTIYKALVEVGLDSQFEPQDFLNFFCLGTREVPVGTVSVYNSPRKPPQPNANANAAQVQALKSRRFMIYVHSKGMVVDDEFVLIGSANINQRSLEGTRDTEIAMGGYQPHYSWAMKGSRPHGQIFGYRMSLWAEHLGFLEQGFEEPENMECVRRVRQLSELNWRQYAAEEVTEMSGHLLKYPVQVDRTGKVSSLPGCETFPDLGGKIIGSFLALQENLTI

SEQ ID NO: 49929 - DNA, 1754 bp, Arabidopsis thaliana; identical to SEQ ID NO: 47475
  misc_feature (1)..(1754): Ceres Seq. ID no. 13592310
  misc_feature (1)..(1754): Ortholog of  Ceres SEQ ID NO 13596509 as cited in SEQ ID NO 62004
  misc_feature (1)..(1754): Ortholog of  Ceres SEQ ID NO 13659971 as cited in SEQ ID NO 67565
  misc_feature (1)..(1754): Ortholog of  Ceres SEQ ID NO 13500385 as cited in SEQ ID NO 67583

SEQ ID NO: 49930 - protein, 446 aa, Arabidopsis thaliana; identical to SEQ ID NO: 47476
  peptide (1)..(446): Ceres Seq. ID no. 13592311

SEQ ID NO: 49931 - protein, 442 aa, Arabidopsis thaliana; identical to SEQ ID NO: 47477
  peptide (1)..(442): Ceres Seq. ID no. 13592312

SEQ ID NO: 49932 - protein, 405 aa, Arabidopsis thaliana; identical to SEQ ID NO: 47478
  peptide (1)..(405): Ceres Seq. ID no. 13592313

SEQ ID NO: 49933 - DNA, 642 bp, Arabidopsis thaliana
  misc_feature (1)..(642): Ceres Seq. ID no. 13588078
  misc_feature (1)..(642): Ortholog of  Ceres SEQ ID NO 12467471 as cited in SEQ ID NO 55509
  misc_feature (1)..(642): Ortholog of  Ceres SEQ ID NO 13598557 as cited in SEQ ID NO 65168
gaattcctttcgcttaccagtctcttgtcttctcaggttgttagagatacatagatagaaatatgagctggaccggaggagattggctatgtggtgcgtgtcagcacgcaaacttcaagaaaagagaatcatgtcaaaaatgcggataccccaaatttggaggggttgatgtgtcaacgtacttgtacaacaggaccgaagttatggctggtgattggtattgtggtgcattgaattgtgggagccacaattacgcgagccgaacaagttgttaccgatgtggaatgatcaaagtcgagtatacggaacagtactatggagctcaaatggttgcttacgggaatgatggcgcagcttgtcctcccggatggaaaactggcgattgggtttgtcctagggtgggatgtggggttcataactacgcaagcagggcagaatgcttcaaatgcaagacaacaagagattatggtggcgtctaaatggacgagaaagagctaatgaagaatctcttgttttaattatacctttcaacaagtgtttctactttctaacatgcatgacgctttcttacgttgacttgaaatcaattgaaagtttagactcgtgcaaattaacgtaagtacaaatagttgcaaacaaaat

SEQ ID NO: 49934 - protein, 138 aa, Arabidopsis thaliana
  peptide (1)..(138): Ceres Seq. ID no. 13588079
MSWTGGDWLCGACQHANFKKRESCQKCGYPKFGGVDVSTYLYNRTEVMAGDWYCGALNCGSHNYASRTSCYRCGMIKVEYTEQYYGAQMVAYGNDGAACPPGWKTGDWVCPRVGCGVHNYASRAECFKCKTTRDYGGV

SEQ ID NO: 49935 - protein, 91 aa, Arabidopsis thaliana
  peptide (1)..(91): Ceres Seq. ID no. 13588080
MAGDWYCGALNCGSHNYASRTSCYRCGMIKVEYTEQYYGAQMVAYGNDGAACPPGWKTGDWVCPRVGCGVHNYASRAECFKCKTTRDYGGV

SEQ ID NO: 49936 - DNA, 993 bp, Arabidopsis thaliana; identical to SEQ ID NO: 35133
  misc_feature (1)..(993): Ceres Seq. ID no. 12602231
  misc_feature (1)..(993): Ortholog of  Ceres SEQ ID NO 12557497 as cited in SEQ ID NO 43
  misc_feature (1)..(993): Ortholog of  Ceres SEQ ID NO 15177850 as cited in SEQ ID NO 51765
  misc_feature (1)..(993): Ortholog of  Ceres SEQ ID NO 14303417 as cited in SEQ ID NO 54923
  misc_feature (1)..(993): Ortholog of  Ceres SEQ ID NO 15169084 as cited in SEQ ID NO 59115
  misc_feature (1)..(993): Ortholog of  Ceres SEQ ID NO 12635723 as cited in SEQ ID NO 0

SEQ ID NO: 49937 - protein, 241 aa, Arabidopsis thaliana; identical to SEQ ID NO: 35134
  peptide (1)..(241): Ceres Seq. ID no. 12602232

SEQ ID NO: 49938 - protein, 235 aa, Arabidopsis thaliana; identical to SEQ ID NO: 35135
  peptide (1)..(235): Ceres Seq. ID no. 12602233

SEQ ID NO: 49939 - protein, 198 aa, Arabidopsis thaliana; identical to SEQ ID NO: 35136
  peptide (1)..(198): Ceres Seq. ID no. 12602234

SEQ ID NO: 49940 - DNA, 1415 bp, Arabidopsis thaliana
  misc_feature (1)..(1415): Ceres Seq. ID no. 13592359
  misc_feature (1)..(1415): Ortholog of  Ceres SEQ ID NO 13503549 as cited in SEQ ID NO 65414
gaagcttcgttctcaatccccaattcgaaatcctagctgaagtctatgctccataatcaaatccagttcatcagagatcaaagatggctattgcacgaactggagtttatgttgatgattaccttgagtatgcaagcactttccctgcagagctacaaagattactaaacacagttcgcgaactagacgagagatctcaatcgcttataaatcagacaagacagcaaactaagtattgcttagggcttgcttcacagagttctaaaaagggtaatggtaatcattacaataatggtggtcttgatgaagaggaaacgattgagaaaatgcgtaaagagattgagtctagtcaggaaaatgcgttaagtttgtgtaccgagaaggttttattggcccgacaagcgtatgatcttatagatagtcatgtaaaacgacttgatgaagatctgaataattttgcagaagatttaaagcaagagggaaaaattccaccagacgagccctctgttcttcctccactacctatagttcctaaagcggaaaagcgtaagtccttctatggcacacctcagcccaagaagattgattatagagatagagactgggatcgtgacagggattttgagctcatgcctcctccaggaagcaatcggaaagaccttatgccaattgaagagcagccaatcgatccaaacgaaccaacttactgtgtctgccatcaggtgtcctttggagacatgattgcctgtgacaatgagaatgtgagcctgctctcccagcatcttattatttattttttaatgtatagctgttatgatgaaaccttttgttcctgtttcgacagtgccaaggaggtgaatggtttcactatacatgcgttggcctcacacctgagaccagattcaaagggaaatggtactgccccacctgcagactcctcccacagtcacactaatatcatttgtacctgtgagaaggtattgctttactatcatcagaactaagctctcctcctgcaatttccatgcattctgtagctaatataatacgtatggagatttgcacgtacttatgatattaattctcataggtgccactggcatcttctttggcaccttcccttcatgaccaatgccaccaaactcatctttcttgttacccaacatctagcaagtgcaagtagaagcaaactttagatggagaaatcatcatgttttgtaaacctcgggttaattcgtggagcatatattttgtatatcaattgtatttgggtattggtgggcattttccgttttattctactagtatcgatatttacatctgcttctttctttcttttttcccctcaaaccatgagcctttgtattgatcaaatgacatgtacaaaggttttgttcatcagaaggaatttcact

SEQ ID NO: 49941 - protein, 306 aa, Arabidopsis thaliana
  peptide (1)..(306): Ceres Seq. ID no. 13592360
MAIARTGVYVDDYLEYASTFPAELQRLLNTVRELDERSQSLINQTRQQTKYCLGLASQSSKKGNGNHYNNGGLDEEETIEKMRKEIESSQENALSLCTEKVLLARQAYDLIDSHVKRLDEDLNNFAEDLKQEGKIPPDEPSVLPPLPIVPKAEKRKSFYGTPQPKKIDYRDRDWDRDRDFELMPPPGSNRKDLMPIEEQPIDPNEPTYCVCHQVSFGDMIACDNENVSLLSQHLIIYFLMYSCYDETFCSCFDSAKEVNGFTIHALASHLRPDSKGNGTAPPADSSHSHTNIICTCEKVLLYYHQN

SEQ ID NO: 49942 - protein, 225 aa, Arabidopsis thaliana
  peptide (1)..(225): Ceres Seq. ID no. 13592361
MRKEIESSQENALSLCTEKVLLARQAYDLIDSHVKRLDEDLNNFAEDLKQEGKIPPDEPSVLPPLPIVPKAEKRKSFYGTPQPKKIDYRDRDWDRDRDFELMPPPGSNRKDLMPIEEQPIDPNEPTYCVCHQVSFGDMIACDNENVSLLSQHLIIYFLMYSCYDETFCSCFDSAKEVNGFTIHALASHLRPDSKGNGTAPPADSSHSHTNIICTCEKVLLYYHQN

SEQ ID NO: 49943 - DNA, 1710 bp, Arabidopsis thaliana; identical to SEQ ID NO: 49481
  misc_feature (1)..(1710): Ceres Seq. ID no. 12601847
  misc_feature (1)..(1710): Ortholog of  Ceres SEQ ID NO 13594209 as cited in SEQ ID NO 59089
  misc_feature (1)..(1710): Ortholog of  Ceres SEQ ID NO 15170167 as cited in SEQ ID NO 66224
  misc_feature (1)..(1710): Ortholog of  Ceres SEQ ID NO 13502874 as cited in SEQ ID NO 66298
  misc_feature (1)..(1710): Ortholog of  Ceres SEQ ID NO 12614124 as cited in SEQ ID NO 68392
  misc_feature (1)..(1710): Ortholog of  Ceres SEQ ID NO 14307980 as cited in SEQ ID NO 69214

SEQ ID NO: 49944 - protein, 519 aa, Arabidopsis thaliana; identical to SEQ ID NO: 49482
  peptide (1)..(519): Ceres Seq. ID no. 12601848

SEQ ID NO: 49945 - protein, 380 aa, Arabidopsis thaliana; identical to SEQ ID NO: 49483
  peptide (1)..(380): Ceres Seq. ID no. 12601849

SEQ ID NO: 49946 - protein, 366 aa, Arabidopsis thaliana; identical to SEQ ID NO: 49484
  peptide (1)..(366): Ceres Seq. ID no. 12601850

SEQ ID NO: 49947 - DNA, 2050 bp, Arabidopsis thaliana; identical to SEQ ID NO: 47611
  misc_feature (1)..(2050): Ceres Seq. ID no. 13592370
  misc_feature (1)..(2050): Ortholog of  Ceres SEQ ID NO 13657873 as cited in SEQ ID NO 66361

SEQ ID NO: 49948 - protein, 521 aa, Arabidopsis thaliana; identical to SEQ ID NO: 47612
  peptide (1)..(521): Ceres Seq. ID no. 13592371

SEQ ID NO: 49949 - protein, 518 aa, Arabidopsis thaliana; identical to SEQ ID NO: 47613
  peptide (1)..(518): Ceres Seq. ID no. 13592372

SEQ ID NO: 49950 - protein, 440 aa, Arabidopsis thaliana; identical to SEQ ID NO: 47614
  peptide (1)..(440): Ceres Seq. ID no. 13592373

SEQ ID NO: 49951 - DNA, 646 bp, Arabidopsis thaliana; identical to SEQ ID NO: 21352
  misc_feature (1)..(646): Ceres Seq. ID no. 12601909
  misc_feature (1)..(646): Ortholog of  Ceres SEQ ID NO 13583459 as cited in SEQ ID NO 62680

SEQ ID NO: 49952 - protein, 116 aa, Arabidopsis thaliana; identical to SEQ ID NO: 21353
  peptide (1)..(116): Ceres Seq. ID no. 12601910

SEQ ID NO: 49953 - protein, 70 aa, Arabidopsis thaliana; identical to SEQ ID NO: 21354
  peptide (1)..(70): Ceres Seq. ID no. 12601911

SEQ ID NO: 49954 - protein, 69 aa, Arabidopsis thaliana; identical to SEQ ID NO: 21355
  peptide (1)..(69): Ceres Seq. ID no. 12601912

SEQ ID NO: 49955 - DNA, 1166 bp, Arabidopsis thaliana; identical to SEQ ID NO: 45209
  misc_feature (1)..(1166): Ceres Seq. ID no. 13591615
  misc_feature (1)..(1166): Ortholog of  Ceres SEQ ID NO 13593955 as cited in SEQ ID NO 54278
  misc_feature (1)..(1166): Ortholog of  Ceres SEQ ID NO 13655302 as cited in SEQ ID NO 63307
  misc_feature (1)..(1166): Ortholog of  Ceres SEQ ID NO 13597380 as cited in SEQ ID NO 64054
  misc_feature (1)..(1166): Ortholog of  Ceres SEQ ID NO 12625474 as cited in SEQ ID NO 64169
  misc_feature (1)..(1166): Ortholog of  Ceres SEQ ID NO 13597502 as cited in SEQ ID NO 64681

SEQ ID NO: 49956 - protein, 385 aa, Arabidopsis thaliana; identical to SEQ ID NO: 45210
  peptide (1)..(385): Ceres Seq. ID no. 13591616

SEQ ID NO: 49957 - protein, 379 aa, Arabidopsis thaliana; identical to SEQ ID NO: 45211
  peptide (1)..(379): Ceres Seq. ID no. 13591617

SEQ ID NO: 49958 - DNA, 1258 bp, Arabidopsis thaliana
  misc_feature (1)..(1258): Ceres Seq. ID no. 13592599
  misc_feature (1)..(1258): Ortholog of  Ceres SEQ ID NO 15170155 as cited in SEQ ID NO 64363
ggaaaagatttttcaagctctctctttctctcgaaggtaaatgcttctctgatttcaccatttttgcttactcgattcaaaagacatgtcgccggcagctacggagacggagcgatggtgcgttgttaccggcggtagaggattcgcggcgaggcatcttgttgaaatgctcgtacgctacgaaatgttttgcgtccgtatcgccgatttagctccggcgataatgcttgatcctcaggaagggaacggagttctcgacgaaggattaagatctggtcgtgttcaatatatctccgctgatcttcgagataaatctcaagtcgttaaagcttttcagggagcggaggtggtgtttcatatggcagctccagattcttctattaacaatcatcagcttcagtattcggtgaatgttcaagggacacaaaatgtgattgatgcttgtgttgatgttggagtaaagaggcttatttacactagctctcctagtgttgtgtttgatggtgttcatggtattttgaacggtactgaatcaatggcttacccaattaagcacaatgactcatattcagcaactaaagctgaaggagaagagttgatcatgaaggctaatggtagaaatggactactcacttgttgcatacgtccaagcagtatttttggtcccggtgatagattattggttccgtcgcttgttgctgctgctagggctgggaaatctaagtttattattggtgatgggaataatctctatgatttcacttacgttgagaatgttgctcatgcccatgtttgtgctgagcgtgctctagcttcaggaggagatgtttctacaaaagctgcaggacaggcatatttcattaccaacatggagccaattaaattttgggaatttatgtcacagctccttgatggacttggttacgagaggccaagcataaagatccctgcgtttatcatgatgccgattgcgcatctggttgaactgacatataaagtgttgggaccatatgggatgacagtaccacaactaacaccttcaagagttaggcttctctcatgcagcagaactttcgattccacgaaagcaaaggatcgactaggctatgctcctgtggtcccacttcaggaaggtatacggaggacgatagactcattctctcacctaacagctggaagtcaatccaaaagagagggcccatccaaggcttctaggattcttggaggcggaaagggtatgaccatatatttcaattag

SEQ ID NO: 49959 - protein, 390 aa, Arabidopsis thaliana
  peptide (1)..(390): Ceres Seq. ID no. 13592600
MSPAATETERWCVVTGGRGFAARHLVEMLVRYEMFCVRIADLAPAIMLDPQEGNGVLDEGLRSGRVQYISADLRDKSQVVKAFQGAEVVFHMAAPDSSINNHQLQYSVNVQGTQNVIDACVDVGVKRLIYTSSPSVVFDGVHGILNGTESMAYPIKHNDSYSATKAEGEELIMKANGRNGLLTCCIRPSSIFGPGDRLLVPSLVAAARAGKSKFIIGDGNNLYDFTYVENVAHAHVCAERALASGGDVSTKAAGQAYFITNMEPIKFWEFMSQLLDGLGYERPSIKIPAFIMMPIAHLVELTYKVLGPYGMTVPQLTPSRVRLLSCSRTFDSTKAKDRLGYAPVVPLQEGIRRTIDSFSHLTAGSQSKREGPSKASRILGGGKGMTIYFN

SEQ ID NO: 49960 - protein, 363 aa, Arabidopsis thaliana
  peptide (1)..(363): Ceres Seq. ID no. 13592601
MLVRYEMFCVRIADLAPAIMLDPQEGNGVLDEGLRSGRVQYISADLRDKSQVVKAFQGAEVVFHMAAPDSSINNHQLQYSVNVQGTQNVIDACVDVGVKRLIYTSSPSVVFDGVHGILNGTESMAYPIKHNDSYSATKAEGEELIMKANGRNGLLTCCIRPSSIFGPGDRLLVPSLVAAARAGKSKFIIGDGNNLYDFTYVENVAHAHVCAERALASGGDVSTKAAGQAYFITNMEPIKFWEFMSQLLDGLGYERPSIKIPAFIMMPIAHLVELTYKVLGPYGMTVPQLTPSRVRLLSCSRTFDSTKAKDRLGYAPVVPLQEGIRRTIDSFSHLTAGSQSKREGPSKASRILGGGKGMTIYFN

SEQ ID NO: 49961 - protein, 357 aa, Arabidopsis thaliana
  peptide (1)..(357): Ceres Seq. ID no. 13592602
MFCVRIADLAPAIMLDPQEGNGVLDEGLRSGRVQYISADLRDKSQVVKAFQGAEVVFHMAAPDSSINNHQLQYSVNVQGTQNVIDACVDVGVKRLIYTSSPSVVFDGVHGILNGTESMAYPIKHNDSYSATKAEGEELIMKANGRNGLLTCCIRPSSIFGPGDRLLVPSLVAAARAGKSKFIIGDGNNLYDFTYVENVAHAHVCAERALASGGDVSTKAAGQAYFITNMEPIKFWEFMSQLLDGLGYERPSIKIPAFIMMPIAHLVELTYKVLGPYGMTVPQLTPSRVRLLSCSRTFDSTKAKDRLGYAPVVPLQEGIRRTIDSFSHLTAGSQSKREGPSKASRILGGGKGMTIYFN

SEQ ID NO: 49962 - DNA, 1627 bp, Arabidopsis thaliana
  misc_feature (1)..(1627): Ceres Seq. ID no. 12591332
  misc_feature (1)..(1627): Ortholog of  Ceres SEQ ID NO 13648081 as cited in SEQ ID NO 165
  misc_feature (1)..(1627): Ortholog of  Ceres SEQ ID NO 14308598 as cited in SEQ ID NO 60416
  misc_feature (1)..(1627): Ortholog of  Ceres SEQ ID NO 13502952 as cited in SEQ ID NO 62271
  misc_feature (1)..(1627): Ortholog of  Ceres SEQ ID NO 13502973 as cited in SEQ ID NO 68052
  misc_feature (1)..(1627): Ortholog of  Ceres SEQ ID NO 13596000 as cited in SEQ ID NO 68188
aaaacaattgtctacattcatcttcttcttcttcaaacaaaaaatgggtttcttaaagttatctccaatgatccttctcctagcaatgatcggcgtttcatatgccatggacatgtcaatcatctcctacgacgaaaaccaccacatcaccaccgagaccagccgtagcgactcggaggttgagagaatctacgaagcgtggatggtggaacacgggaagaagaagatgaatcaaaacggtcttggtgcagagaaagatcaaagattcgagatctttaaagataatcttcgtttcatcgatgaacataacaccaaaaacctcagttataaacttggtttaacccggtttgctgatttaaccaatgaggagtaccgatctatgtaccttggtgctaaaccgaccaagagggttttgaaaaccagtgatcggtatcaggcgcgtgttggtgacgcgcttcctgattcggttgactggagaaaagaaggtgccgtcgctgatgttaaagatcaaggaagctgtgggagttgttgggcattctcaactattggagcagtggaaggaataaacaagattgtgacaggagatttaatatctttgtctgaacaagaattggttgattgtgacacatcttataaccaaggatgtaatggtggtttaatggactatgcgtttgagtttattatcaaaaatggtggtattgataccgaagcggattatccttacaaggctgctgatggtcgttgtgaccagaacaggaaaaatgctaaggttgttaccattgattcatatgaagatgtccctgagaacagcgaggcgtctctaaagaaagctttggctcaccagcctattagtgtcgccattgaagcgggtggtcgcgctttccagctctattcttcgggtgtatttgatggactttgtgggacggagttagaccacggtgttgtggctgtgggttatggaaccgagaacggaaaggactactggattgtgagaaactcatggggaaacagatggggagagagcggatacataaagatggcacgtaacattgaagcgccaacaggaaagtgtggaatcgctatggaggcttcgtatccgatcaagaaaggtcagaacccaccaaaccctggcccgtcaccaccatctcccattaagccaccaaccacatgtgacaagtacttctcttgccctgagagcaacacttgttgttgtctctacaagtatggtaagtactgcttcggatggggatgttgcccgctcgaagctgctacttgctgcgatgataactcaagttgctgtcctcatgagtacccggtttgtgacgttaaccgcggaacctgtttgatgagcaagaacagtccgtttagcgtgaaggctttaaagcgtacacccgcaataccgttctgggcaaagagcagaaagcacattgcgtaagaagaggaagacaaaaacattgagaattcatcaaaagcattttatgttgttgttgttcagatttaaaaattgctgattctgctgctgaggttttctgtacatataaaacctctccctaagtttcattcagtttcatcattgttaaagtaactaactcagaacaaatgggtttggttattaatctctttcaac

SEQ ID NO: 49963 - protein, 477 aa, Arabidopsis thaliana
  peptide (1)..(477): Ceres Seq. ID no. 12591333
KQLSTFIFFFFKQKMGFLKLSPMILLLAMIGVSYAMDMSIISYDENHHITTETSRSDSEVERIYEAWMVEHGKKKMNQNGLGAEKDQRFEIFKDNLRFIDEHNTKNLSYKLGLTRFADLTNEEYRSMYLGAKPTKRVLKTSDRYQARVGDALPDSVDWRKEGAVADVKDQGSCGSCWAFSTIGAVEGINKIVTGDLISLSEQELVDCDTSYNQGCNGGLMDYAFEFIIKNGGIDTEADYPYKAADGRCDQNRKNAKVVTIDSYEDVPENSEASLKKALAHQPISVAIEAGGRAFQLYSSGVFDGLCGTELDHGVVAVGYGTENGKDYWIVRNSWGNRWGESGYIKMARNIEAPTGKCGIAMEASYPIKKGQNPPNPGPSPPSPIKPPTTCDKYFSCPESNTCCCLYKYGKYCFGWGCCPLEAATCCDDNSSCCPHEYPVCDVNRGTCLMSKNSPFSVKALKRTPAIPFWAKSRKHIA

SEQ ID NO: 49964 - protein, 463 aa, Arabidopsis thaliana
  peptide (1)..(463): Ceres Seq. ID no. 12591334
MGFLKLSPMILLLAMIGVSYAMDMSIISYDENHHITTETSRSDSEVERIYEAWMVEHGKKKMNQNGLGAEKDQRFEIFKDNLRFIDEHNTKNLSYKLGLTRFADLTNEEYRSMYLGAKPTKRVLKTSDRYQARVGDALPDSVDWRKEGAVADVKDQGSCGSCWAFSTIGAVEGINKIVTGDLISLSEQELVDCDTSYNQGCNGGLMDYAFEFIIKNGGIDTEADYPYKAADGRCDQNRKNAKVVTIDSYEDVPENSEASLKKALAHQPISVAIEAGGRAFQLYSSGVFDGLCGTELDHGVVAVGYGTENGKDYWIVRNSWGNRWGESGYIKMARNIEAPTGKCGIAMEASYPIKKGQNPPNPGPSPPSPIKPPTTCDKYFSCPESNTCCCLYKYGKYCFGWGCCPLEAATCCDDNSSCCPHEYPVCDVNRGTCLMSKNSPFSVKALKRTPAIPFWAKSRKHIA

SEQ ID NO: 49965 - protein, 455 aa, Arabidopsis thaliana
  peptide (1)..(455): Ceres Seq. ID no. 12591335
MILLLAMIGVSYAMDMSIISYDENHHITTETSRSDSEVERIYEAWMVEHGKKKMNQNGLGAEKDQRFEIFKDNLRFIDEHNTKNLSYKLGLTRFADLTNEEYRSMYLGAKPTKRVLKTSDRYQARVGDALPDSVDWRKEGAVADVKDQGSCGSCWAFSTIGAVEGINKIVTGDLISLSEQELVDCDTSYNQGCNGGLMDYAFEFIIKNGGIDTEADYPYKAADGRCDQNRKNAKVVTIDSYEDVPENSEASLKKALAHQPISVAIEAGGRAFQLYSSGVFDGLCGTELDHGVVAVGYGTENGKDYWIVRNSWGNRWGESGYIKMARNIEAPTGKCGIAMEASYPIKKGQNPPNPGPSPPSPIKPPTTCDKYFSCPESNTCCCLYKYGKYCFGWGCCPLEAATCCDDNSSCCPHEYPVCDVNRGTCLMSKNSPFSVKALKRTPAIPFWAKSRKHIA

SEQ ID NO: 49966 - DNA, 1337 bp, Arabidopsis thaliana
  misc_feature (1)..(1337): Ceres Seq. ID no. 13592378
  misc_feature (1)..(1337): Ortholog of  Ceres SEQ ID NO 13594037 as cited in SEQ ID NO 55666
gatccagaaaaaaaaaacgaaaaaaaacaaaaagaaataataaaacaaaaaacactttttatttttaaataaaaataaaataaaaaatgggatacacaaatgtgtccattttattaggtctgttggtggtctttgttacaccgatggtgttcgcagatgatgtgacaccaatcccagagggcaaaccccaagtggcgcagtggttcaatgccaacgttggtccattggctcaacgtaaaggcttagatcctgctcttgtagctgctgaggctgctccacgtatcatcaacgtgaatccaaagggtggtgaattcaaaacactaacggacgcaataaagagcgttcctgcagggaacacaaagcgggtgatcataaagatggctcctggtgagtacaaagagaaggtcactattgacaggaacaaacccttcattacattgatgggacaacccaatgccatgcctgttatcacctatgacggtaccgccgccaagtatggaaccgttgatagcgcctctctcataatcttatccgactatttcatggccgttaacatcgtcgttaagaacactgcgccggcaccagatggtaaaactaagggagcacaagctttatccatgagaatctccggaaattttgctgctttctacaactgcaaattctacggtttccaagacacaatctgtgacgatacaggaaaccatttcttcaaggattgttacgttgaaggaacattcgatttcatcttcggaagtggaacctctatgtacttgggaacacaattgcacgtggttggagacggtattagagtgatagcagcgcatgcaggaaagagcgcagaagagaagagtggatactctttcgtgcactgcaaggtgactggaaccggtggaggaatttatttgggaagagcatggatgagccaccctaaggttgtttatgcctacaccgagatgaccagcgttgtcaaccccaccggatggcaagaaaacaagactcccgcacatgacaaaaccgtgttctacggagagtacaagtgttcaggaccaggatcacacaaagccaagagagtaccattcacacaagacattgacgacaaagaagctaaccgtttcctatccctcggctacatccaaggatccaagtggcttctcccaccacccgctttgtaaactcttcaatatcaagtctaaaatcatattttgcacatatatcacttttaacaaaaaaattatttttacatatatcacttttagcaaactttttctttacctagtcgtcactacttacgaccctatgtatgcttttatgcaaagaaccgagaggtcgataatctg

SEQ ID NO: 49967 - protein, 361 aa, Arabidopsis thaliana
  peptide (1)..(361): Ceres Seq. ID no. 13592379
MGYTNVSILLGLLVVFVTPMVFADDVTPIPEGKPQVAQWFNANVGPLAQRKGLDPALVAAEAAPRIINVNPKGGEFKTLTDAIKSVPAGNTKRVIIKMAPGEYKEKVTIDRNKPFITLMGQPNAMPVITYDGTAAKYGTVDSASLIILSDYFMAVNIVVKNTAPAPDGKTKGAQALSMRISGNFAAFYNCKFYGFQDTICDDTGNHFFKDCYVEGTFDFIFGSGTSMYLGTQLHVVGDGIRVIAAHAGKSAEEKSGYSFVHCKVTGTGGGIYLGRAWMSHPKVVYAYTEMTSVVNPTGWQENKTPAHDKTVFYGEYKCSGPGSHKAKRVPFTQDIDDKEANRFLSLGYIQGSKWLLPPPAL

SEQ ID NO: 49968 - protein, 342 aa, Arabidopsis thaliana
  peptide (1)..(342): Ceres Seq. ID no. 13592380
MVFADDVTPIPEGKPQVAQWFNANVGPLAQRKGLDPALVAAEAAPRIINVNPKGGEFKTLTDAIKSVPAGNTKRVIIKMAPGEYKEKVTIDRNKPFITLMGQPNAMPVITYDGTAAKYGTVDSASLIILSDYFMAVNIVVKNTAPAPDGKTKGAQALSMRISGNFAAFYNCKFYGFQDTICDDTGNHFFKDCYVEGTFDFIFGSGTSMYLGTQLHVVGDGIRVIAAHAGKSAEEKSGYSFVHCKVTGTGGGIYLGRAWMSHPKVVYAYTEMTSVVNPTGWQENKTPAHDKTVFYGEYKCSGPGSHKAKRVPFTQDIDDKEANRFLSLGYIQGSKWLLPPPAL

SEQ ID NO: 49969 - protein, 264 aa, Arabidopsis thaliana
  peptide (1)..(264): Ceres Seq. ID no. 13592381
MAPGEYKEKVTIDRNKPFITLMGQPNAMPVITYDGTAAKYGTVDSASLIILSDYFMAVNIVVKNTAPAPDGKTKGAQALSMRISGNFAAFYNCKFYGFQDTICDDTGNHFFKDCYVEGTFDFIFGSGTSMYLGTQLHVVGDGIRVIAAHAGKSAEEKSGYSFVHCKVTGTGGGIYLGRAWMSHPKVVYAYTEMTSVVNPTGWQENKTPAHDKTVFYGEYKCSGPGSHKAKRVPFTQDIDDKEANRFLSLGYIQGSKWLLPPPAL

SEQ ID NO: 49970 - DNA, 1581 bp, Arabidopsis thaliana; identical to SEQ ID NO: 49485
  misc_feature (1)..(1581): Ceres Seq. ID no. 13592277
  misc_feature (1)..(1581): Ortholog of  Ceres SEQ ID NO 14315346 as cited in SEQ ID NO 53970

SEQ ID NO: 49971 - protein, 494 aa, Arabidopsis thaliana; identical to SEQ ID NO: 49486
  peptide (1)..(494): Ceres Seq. ID no. 13592278

SEQ ID NO: 49972 - protein, 472 aa, Arabidopsis thaliana; identical to SEQ ID NO: 49487
  peptide (1)..(472): Ceres Seq. ID no. 13592279

SEQ ID NO: 49973 - protein, 414 aa, Arabidopsis thaliana; identical to SEQ ID NO: 49488
  peptide (1)..(414): Ceres Seq. ID no. 13592280

SEQ ID NO: 49974 - DNA, 1537 bp, Arabidopsis thaliana
  misc_feature (1)..(1537): Ceres Seq. ID no. 13647981
  misc_feature (1)..(1537): Ortholog of  Ceres SEQ ID NO 13595199 as cited in SEQ ID NO 59815
  misc_feature (1)..(1537): Ortholog of  Ceres SEQ ID NO 13598276 as cited in SEQ ID NO 69311
gaaaacagcaataatatctttttttctctgctccagggggaaattaaaaaagtggaaccttttcatctcctggagcgatcaatttctttttcatcatatcgctgactctcgtcttcgtcgtctttgatcgtatcgaggaattgggtttagttcgattcgatcatcagctatctcaatttttctggggattgttctaaaggtttctagtgacttgtttaaagtggttggtattggataatgccttctctcatctcacagcaatggcaggagaggactagtggattcttttcttcatcaggaacgaagcttagggaagcagggcagactgctggtagttttgtcggggaagttgctaaggatgcgaaagtgaatgttgcagatgttgcagaaagagttgggtcgttgtttaaaagccggtgggcaattcttcagcagcctgcaactagacatgccgtgcaagaacacctcataacagctgctgccacaaccgggacttttgtcaggaagggtataactgagacaaaggaaaaggtttctgttggaaagatcaaagtggaagaggcggccaaaaagactgcacaaaagagcaagaccattttgacggatatcgaaaggtggcaaaagggagttgccagctcagatgtgtttggtgttgcgattgagatcactgtccagcggcaggagtcaagcaggcctattcctctgatactagttaaatgcgcagattatctcatattaacaggacttaattcaccgaacttgttcaaggccgaaggagatagaaagttgattcaacaattggtttctgcttacaatcaagatcctagggcgtcaatacctgagggtgtgaatccagttgatgtcgctgcactcttgaaatactatcttgctagccttccgacaccactaactacttttgagctttataatgaaatcaaagatgcacggtcgagcatacacagaatgagacagtcactccagaagctttccaatgtgaattataatacattggagttcataacagcgctattgcttcgtgtgagccagaaatcacttcttaacaaaatggattcgcatagcctagctatggaaatggctccagtgatcatgtggcgagaagacaacaggcctgaatcttatcgggaatactggagacgcccgtcaaggagtcctaagaaaagtaacgactttgaaactgctactccatgggacttgctctcagatgaaggagaaggtccagatgcatcctcatcaatccctctagatgatatcgcacgagttgattttggagcggtcgaggttgtccagtgcctaattgaacaccacaatgcgattttcactgatgcagccgagactgtatggaggtgaaaccaccacagttaaccaatattgatctggttacaagaacatatgcattttgatctggatgatgattgactagtggtttcagtaaataagatgttgtttcatatttggttcttctgtaacaatttttagactttagaactctgatgattaaaagataagtttttcttat

SEQ ID NO: 49975 - protein, 376 aa, Arabidopsis thaliana
  peptide (1)..(376): Ceres Seq. ID no. 13647982
MPSLISQQWQERTSGFFSSSGTKLREAGQTAGSFVGEVAKDAKVNVADVAERVGSLFKSRWAILQQPATRHAVQEHLITAAATTGTFVRKGITETKEKVSVGKIKVEEAAKKTAQKSKTILTDIERWQKGVASSDVFGVAIEITVQRQESSRPIPLILVKCADYLILTGLNSPNLFKAEGDRKLIQQLVSAYNQDPRASIPEGVNPVDVAALLKYYLASLPTPLTTFELYNEIKDARSSIHRMRQSLQKLSNVNYNTLEFITALLLRVSQKSLLNKMDSHSLAMEMAPVIMWREDNRPESYREYWRRPSRSPKKSNDFETATPWDLLSDEGEGPDASSSIPLDDIARVDFGAVEVVQCLIEHHNAIFTDAAETVWR

SEQ ID NO: 49976 - DNA, 876 bp, Arabidopsis thaliana
  misc_feature (1)..(876): Ceres Seq. ID no. 13648398
  misc_feature (1)..(876): Ortholog of  Ceres SEQ ID NO 13595532 as cited in SEQ ID NO 56705
tctttagcgtttacacagccacaaattcctcaatactctatatttctcttcccgtttgaaactccaaagcttgtttgatgaaaacagagtaaacggttctgttcaaaacatttttcaagctctgttactttgttttttcaacgatgaggaagttaagaggaatcaaaattagaagaccgattaaacaaatctcaagatggatcctccggagaattaagattcgtcgttcaagatacacccggttaagcccaaaccgcccggtttgcaagccgagagccatcacaaaactcataagttggggtcgaagtctcacatcccacagcgccaggtttattgggtctaaatgctccaattcagggtacataccaattggtcaagaacccattcgagaaaaactcgacccggttccgaaaggtcactcggcggtttatatcggtaaaaaagacggcgactttcagagagttttggtgcctatcgtttactttaaccatcctctgtttggtgagcttcttagagaggctgaagaagaatttgggttttctcaagaaggtggaatcactatcccttgtccttactcagatttcaaacgggtccaaacccgaattgaatccgggtcgggtttctgtaaatttccctggagccggcggcggcaataacgacggtggaagaagatgatgatgatgaaaaagttctttaactcttttttactattttctaccttttcacttttgttactatttttacccttttgttagatatgtacatattctgtatgtgaaaagtgaggtttgaatttaggcgataatgtaaataatataaagattttttatttttcatgaaaaaaaaaaaaaaaaaaaactcgagggggggcccggt

SEQ ID NO: 49977 - protein, 170 aa, Arabidopsis thaliana
  peptide (1)..(170): Ceres Seq. ID no. 13648399
MRKLRGIKIRRPIKQISRWILRRIKIRRSRYTRLSPNRPVCKPRAITKLISWGRSLTSHSARFIGSKCSNSGYIPIGQEPIREKLDPVPKGHSAVYIGKKDGDFQRVLVPIVYFNHPLFGELLREAEEEFGFSQEGGITIPCPYSDFKRVQTRIESGSGFCKFPWSRRRQ

SEQ ID NO: 49978 - DNA, 1176 bp, Arabidopsis thaliana; identical to SEQ ID NO: 35853
  misc_feature (1)..(1176): Ceres Seq. ID no. 13592325
  misc_feature (1)..(1176): Ortholog of  Ceres SEQ ID NO 13599131 as cited in SEQ ID NO 0

SEQ ID NO: 49979 - protein, 215 aa, Arabidopsis thaliana; identical to SEQ ID NO: 35854
  peptide (1)..(215): Ceres Seq. ID no. 13592326

SEQ ID NO: 49980 - protein, 210 aa, Arabidopsis thaliana; identical to SEQ ID NO: 35855
  peptide (1)..(210): Ceres Seq. ID no. 13592327

SEQ ID NO: 49981 - protein, 189 aa, Arabidopsis thaliana; identical to SEQ ID NO: 35856
  peptide (1)..(189): Ceres Seq. ID no. 13592328

SEQ ID NO: 49982 - DNA, 1276 bp, Arabidopsis thaliana
  misc_feature (1)..(1276): Ceres Seq. ID no. 14307635
  misc_feature (1)..(1276): Ortholog of  Ceres SEQ ID NO 14315915 as cited in SEQ ID NO 57583
attatcgctctgtagaaagcttccccattttcgtagatcactctcactgacaagatgaattctcttcatcgtgttgtaggattgatcaccagaacgacgaacacatctccaatttctcatacccgtttcaatctcccatcgattctcgtcaatttgatgtcaacaaaatctggaaacgatgaagacaaatggaacgacgcttgggaatcagcttggttaccagatgatctcacagataaaatccgagcaccatgggagagagatgtgaacttccctgtaaaagaatcaacggcgacggcgattgaagaaatcgatgtggaagcaaaagcgttcgtagaggatatgaatgagcattgggacgagaggagagggaagagtgggaaagtggagaagagagaagagaagaagaaagagattggagatggagaagatgaatcatcatcatcgctttatagtttggagacgatgaagaaggattataggttgaagaaacaaagagttcatgcttctctgtgggttaaagagattgagaaattggaagaagctaaattggatgattctggatctggtggtggagctgatgatattgataggcttcttgatagttgctcagagattttcgattcggtagaccatgattttgacaaattagaggtttcgagtggatctgaattgaagaataagcctgatggttgggaatcaacagcaaaggaacaagatggaaacctctgggagatgtcacaaagagaagaagacattcttctccaagaatttgatcgtcgcactgccttctgcaaatttcagatagctagttttataaagcaacacatattcagtaggagaagaccgattgatgggtggaaatacatgattgaagtgattggtccaaatgcgaggaaagggaaaggaagtgtttctaggctcccggctttatcggatgtgtcgactcagccgtttaaagaagaaaccagcagtctcactaccttgaagcgtcggtagaagaaactagaggagttcacaatgtttgttagattgttaaatgatcttcaactacttgcacttgttaaaggccggccatgtcctctgttcctacagttctaccatttcgggttttatattagcatcagttcttcaatcatgcaatttcttgttagcttagttttgaaacgttgaaacaatgggtcttgtcttagatgttgatcaagaacagaggacaaatctcacccagtagaaactaacaatgttgaaaattaaagcaaatataatcagatgagag

SEQ ID NO: 49983 - protein, 314 aa, Arabidopsis thaliana
  peptide (1)..(314): Ceres Seq. ID no. 14307636
MNSLHRVVGLITRTTNTSPISHTRFNLPSILVNLMSTKSGNDEDKWNDAWESAWLPDDLTDKIRAPWERDVNFPVKESTATAIEEIDVEAKAFVEDMNEHWDERRGKSGKVEKREEKKKEIGDGEDESSSSLYSLETMKKDYRLKKQRVHASLWVKEIEKLEEAKLDDSGSGGGADDIDRLLDSCSEIFDSVDHDFDKLEVSSGSELKNKPDGWESTAKEQDGNLWEMSQREEDILLQEFDRRTAFCKFQIASFIKQHIFSRRRPIDGWKYMIEVIGPNARKGKGSVSRLPALSDVSTQPFKEETSSLTTLKRR

SEQ ID NO: 49984 - protein, 280 aa, Arabidopsis thaliana
  peptide (1)..(280): Ceres Seq. ID no. 14307637
MSTKSGNDEDKWNDAWESAWLPDDLTDKIRAPWERDVNFPVKESTATAIEEIDVEAKAFVEDMNEHWDERRGKSGKVEKREEKKKEIGDGEDESSSSLYSLETMKKDYRLKKQRVHASLWVKEIEKLEEAKLDDSGSGGGADDIDRLLDSCSEIFDSVDHDFDKLEVSSGSELKNKPDGWESTAKEQDGNLWEMSQREEDILLQEFDRRTAFCKFQIASFIKQHIFSRRRPIDGWKYMIEVIGPNARKGKGSVSRLPALSDVSTQPFKEETSSLTTLKRR

SEQ ID NO: 49985 - protein, 218 aa, Arabidopsis thaliana
  peptide (1)..(218): Ceres Seq. ID no. 14307638
MNEHWDERRGKSGKVEKREEKKKEIGDGEDESSSSLYSLETMKKDYRLKKQRVHASLWVKEIEKLEEAKLDDSGSGGGADDIDRLLDSCSEIFDSVDHDFDKLEVSSGSELKNKPDGWESTAKEQDGNLWEMSQREEDILLQEFDRRTAFCKFQIASFIKQHIFSRRRPIDGWKYMIEVIGPNARKGKGSVSRLPALSDVSTQPFKEETSSLTTLKRR

SEQ ID NO: 49986 - DNA, 1636 bp, Arabidopsis thaliana
  misc_feature (1)..(1636): Ceres Seq. ID no. 13648342
  misc_feature (1)..(1636): Ortholog of  Ceres SEQ ID NO 15176851 as cited in SEQ ID NO 61348
gaaccattggttggttttgatcaaaaccaaaggatgtgtgtatgtatgtatatattctaacgctcaaaactgatcactagcattcctagatttttccttcttgtgatcacttgcagctatggccacacatgcagctctcgccgtctcaagaatcccggtcacacagcgactgcagtctaagagtgccattcactctttccctgctcaatgctcctccaagaggctagaagtcgctgaattctccggtctgcgtatgagtagtatcggtggggaagcatctttcttcgatgctgtagctgcacaaatcatccctaaggctgtgacaacatcaactcctgttagaggagagacagtggcgaaactgaaagttgcgattaacggttttggaaggattggtaggaactttcttaggtgttggcatggtcgtaaagactctcctctcgaagttgttgtacttaacgacagtggtggtgtcaagaatgcatcccacttgcttaagtatgactccatgcttggaaccttcaaggctgaagtgaaaattgtggacaatgaaactattagtgttgatggtaagctcatcaaagttgtctccaacagagaccctcttaagcttccatgggctgagctcggcattgacattgttatcgagggaacaggagtgtttgttgatgggccaggagcagggaagcatatccaagccggagcctcgaaagttatcatcactgcaccagccaaaggtgctgatatccctacctatgttatgggagtcaatgagcaagactatggtcacgatgtcgctaacattattagcaatgcatcttgcaccaccaactgtttggcaccttttgctaaagtcttggatgaagaatttggaattgtcaaggggacaatgacaaccacacactcctacaccggagaccaaaggcttctagatgcatcacacagggacctaaggcgtgcaagagccgcagcactgaacatagtgcctaccagcacaggagcagccaaggcggtgtcattagtgttgccgcagctgaagggtaaacttaacggcattgcactccgtgtgccaacaccaaacgtctcagtggttgaccttgttataaacgttgagaagaaaggtttgacagcagaggatgtgaacgaggcctttagaaaagccgctaatggaccgatgaaaggcattttagacgtttgcgatgcgcctcttgtctctgttgacttcaggtgctctgatgtctctaccaccattgactcgtccctcactatggttatgggtgatgatatggtcaaggtggttgcttggtatgataacgagtggggttacagccaaagagtggtggatttggctcacctagtggctagcaagtggccgggagcggaagctgttggaagtggagatcctttggaggatttctgcaagacaaacccggctgatgaggaatgcaaagtctatgactgaacaactttgatcatttctttctttatttttcaccaaaacaatactttgtatcatgagttacttattcgaaatcgtactatgcatacttgtttttctcataagattttcttgtctgatgaacaactatatgttaagactgagagaattgtatttgagaaataaccattttatgct

SEQ ID NO: 49987 - protein, 447 aa, Arabidopsis thaliana
  peptide (1)..(447): Ceres Seq. ID no. 13648343
MATHAALAVSRIPVTQRLQSKSAIHSFPAQCSSKRLEVAEFSGLRMSSIGGEASFFDAVAAQIIPKAVTTSTPVRGETVAKLKVAINGFGRIGRNFLRCWHGRKDSPLEVVVLNDSGGVKNASHLLKYDSMLGTFKAEVKIVDNETISVDGKLIKVVSNRDPLKLPWAELGIDIVIEGTGVFVDGPGAGKHIQAGASKVIITAPAKGADIPTYVMGVNEQDYGHDVANIISNASCTTNCLAPFAKVLDEEFGIVKGTMTTTHSYTGDQRLLDASHRDLRRARAAALNIVPTSTGAAKAVSLVLPQLKGKLNGIALRVPTPNVSVVDLVINVEKKGLTAEDVNEAFRKAANGPMKGILDVCDAPLVSVDFRCSDVSTTIDSSLTMVMGDDMVKVVAWYDNEWGYSQRVVDLAHLVASKWPGAEAVGSGDPLEDFCKTNPADEECKVYD

SEQ ID NO: 49988 - protein, 402 aa, Arabidopsis thaliana
  peptide (1)..(402): Ceres Seq. ID no. 13648344
MSSIGGEASFFDAVAAQIIPKAVTTSTPVRGETVAKLKVAINGFGRIGRNFLRCWHGRKDSPLEVVVLNDSGGVKNASHLLKYDSMLGTFKAEVKIVDNETISVDGKLIKVVSNRDPLKLPWAELGIDIVIEGTGVFVDGPGAGKHIQAGASKVIITAPAKGADIPTYVMGVNEQDYGHDVANIISNASCTTNCLAPFAKVLDEEFGIVKGTMTTTHSYTGDQRLLDASHRDLRRARAAALNIVPTSTGAAKAVSLVLPQLKGKLNGIALRVPTPNVSVVDLVINVEKKGLTAEDVNEAFRKAANGPMKGILDVCDAPLVSVDFRCSDVSTTIDSSLTMVMGDDMVKVVAWYDNEWGYSQRVVDLAHLVASKWPGAEAVGSGDPLEDFCKTNPADEECKVYD

SEQ ID NO: 49989 - protein, 317 aa, Arabidopsis thaliana
  peptide (1)..(317): Ceres Seq. ID no. 13648345
MLGTFKAEVKIVDNETISVDGKLIKVVSNRDPLKLPWAELGIDIVIEGTGVFVDGPGAGKHIQAGASKVIITAPAKGADIPTYVMGVNEQDYGHDVANIISNASCTTNCLAPFAKVLDEEFGIVKGTMTTTHSYTGDQRLLDASHRDLRRARAAALNIVPTSTGAAKAVSLVLPQLKGKLNGIALRVPTPNVSVVDLVINVEKKGLTAEDVNEAFRKAANGPMKGILDVCDAPLVSVDFRCSDVSTTIDSSLTMVMGDDMVKVVAWYDNEWGYSQRVVDLAHLVASKWPGAEAVGSGDPLEDFCKTNPADEECKVYD

SEQ ID NO: 49990 - DNA, 1573 bp, Arabidopsis thaliana; identical to SEQ ID NO: 49214
  misc_feature (1)..(1573): Ceres Seq. ID no. 13600765
  misc_feature (1)..(1573): Ortholog of  Ceres SEQ ID NO 13597407 as cited in SEQ ID NO 64106

SEQ ID NO: 49991 - protein, 467 aa, Arabidopsis thaliana; identical to SEQ ID NO: 49215
  peptide (1)..(467): Ceres Seq. ID no. 13600766

SEQ ID NO: 49992 - protein, 458 aa, Arabidopsis thaliana; identical to SEQ ID NO: 49216
  peptide (1)..(458): Ceres Seq. ID no. 13600767

SEQ ID NO: 49993 - protein, 409 aa, Arabidopsis thaliana; identical to SEQ ID NO: 49217
  peptide (1)..(409): Ceres Seq. ID no. 13600768

SEQ ID NO: 49994 - DNA, 3774 bp, Arabidopsis thaliana
  misc_feature (1)..(3774): Ceres Seq. ID no. 13588094
  misc_feature (1)..(3774): Ortholog of  Ceres SEQ ID NO 13593889 as cited in SEQ ID NO 53305
atggatcaagcaaaaggttatgaacatgttcggtatactgcccctgaccctagagatgagggacttggctccattaatcaaaggttttcccacgactcttcaactaatgttaacacttatgtacgacctccagattatggtgtttcaacccctgctcggccagtgctaaactactcaatacagaccggtgaagaatttgcttttgagtttatgagagatagggttattatgaaaccgcagttcatcccaaatgtgtatggtgagcacagtggtatgcctgtttctgttaacttaagtgctctgggaatggttcatccaatgtcagagagtggccctaacgctacagtgcttaacatagaagaaaaacgtcagagctttgagcacgagaggaaacccccttctagaattgaagataagacctatcatgaactggtccagtcagccccagttatctcttcgaaaaatgatactggtcaaaggcgtcatagtttggtttcttctagagcttctgatagctctttgaaccgtgcgaagttcttgtgtagttttggtggtaaagttataccccgccccagagatcagaaacttaggtatgtaggtggtgaaacgcgtatcatacggattagcaagactatttctttccaagaactcatgcataaaatgaaagaaatatttcctgaagcacgcaccataaaatatcagctgccaggagaggatcttgatgccctagtctctgtatcttctgacgaggatttacaaaacatgatggaagaatgtatcgtgtttggtaatggaggatctgagaagcccaggatgttcttgttttcaagcagtgatatagaggaggctcagtttgttatggaacatgcagagggtgattctgaggttcagtatgttgttgctgtcaatgggatggatctaagttcacggagaagttcccttggattaagtcctcccgggaacaatttggatgaactacttcatgggaattttgataggaagatcgatcgggctgctacagaaccagcagtggcttcgcttactcccttagcaggtaatgaatctttaccagcgagccaaacttctcaacctgtaacaggattttctactggaaatgagccattttcacagccttatctaggacaacaattgcagttccccggacttggtaaccaccaaatttacacgtcaggtcacatggcaagcataggctatatagatgagaagaggtctgctcctttacatgttcaaccacaacctcattatatcccgtattctgtgaatcctgaaacacctcttgaaagcctggtgccccactatccacaaaaacctgagcaaggatttttgcgtgaggagcagatctttcatgtacaagatccagaaacttcatcaaaagaggccaaaatgagaagagatgactcatttcagaaggtaaatgatcatcctatatctactgtcgagagcaatctttcagcaaaggagccaaagatgaggagagaatcctcaaccccaagggtcaatgagtatcctgtttcttctatgcctagtgatttaatagtcccagatgacctcccgaaggaagaagctccaattgtcacacaaacatctagttcaacaccagatccaagttcttcaactctctcagagaaaagtcttaggaaatccgaggaccatgttgagaacaatctgtcagcaaaggagccaaagatgagaaaagaacactccaccacaagggtcaatgaatattccgtttcctctgtatctagtgattctatggtcccagatcaagccctcaaggaagaagctcctatttccatgaagatatccaattcaacaccagatccaaaatccttggtttatccagaaaaaagtcttagaacatcccaggagaaaacgggtgccttcgatacaacaaatgaaggcatgaaaaagaatcaggacaatcaattttgtctgcttggaggattctcagtatctggacatggtacttcaaataatagttcatctaatgtgagcaatttcgaccagcctgtgactcagcaaagagtctttcattctgagcgaactgtacgagatccaacagaaactaaccgtttgtctaaatctgatgattcccttgcttctcaatttgtaatggctcaaacaacatcagatgctttcctgcctatcagcgaatcatctgaaacttctcatgaagcaaatatggagtcccagaatgttcatcctactgcgccagtaataccagctcctgatagcatctggacagccgagggtagtatgtcacagtctgaaaaaaaaaacgtggaaactaacaccccggagcatgtaagtcagacagagacttcagcaaaggctgttccacaaggacacaatgagaagggggatatagttgttgatataaatgataggtttcctcgtgagtttcttgctgatatattaaaaacgaaagagtctctgaacttccctggattagggccattgcatgccgatggagctggtgtgagtttaaatattcagaataatgaccctaaaacttggtcgtattttcgaaatttggcgcaggatgagtttgagaggaaggatctatcccttatggatcaggaccaccctggatttcccacttccatgactaacaccaacggagttcctattgattatagctacccaccattgcagtctgagaaagttgcctcaagtcagatacatccacaaatccactttgatggaaatatcaagccagatgtgtctaccattaccatacctgatttgaacacagtagacacacaagaagattacagtcagtcacaaatcaaaggtgctgaaagcacggatgcaactctgaatgctggagttcctcttattgactttatggctgcggatagtggcatgaggtctctgcaggtcattaaaaatgacgacttggaagaactgaaggaattaggttctggtacctttggaactgtttatcacggaaaatggaggggtacagatgttgctatcaagcgaataaaaaggagctgttttattggtcgttcatctgaacaagagagattgacctcggagttctggcatgaagcagaaattctttcaaagcttcatcatccaaatgttatggcattttacggcgtagtgaaagatggaccaggaggaactttagctacagtgacagagtacatggtcaatggatcgctcaggcatgttctgctcagcaacaggcaccttgatcgacgtaagcgacttatcattgcaatggacgcagcttttgggatggaatatttgcactcaaagagcatagtgcatttcgatttgaagtgtgataacttgcttgtcaacttaaaggatcccgcccgtcccatatgcaaggttggtgattttggtctgtcaaagataaaaagaaacactttggtcactggcggtgtaaggggaaccctcccttggatggctcccgagctacttagtggaagcagcagcaaagtttctgaaaaggttgatgtgttctctttcggaattgtcttatgggaaattcttaccggtgaggaaccctacgccaatatgcattatggggcaataatcggaggcatagtgaacaatacattgagaccaaccgtgccaaactactgtgacccggagtggagaatgctgatggagcagtgttgggctcctgacccatttgttcgacctgcgttcccggaaatagccagacgtctccgcaccatgtcctcctctgcggtccacacaaaaccacacgctgtcaaccaccaaatccacaagtaa

SEQ ID NO: 49995 - protein, 1257 aa, Arabidopsis thaliana
  peptide (1)..(1257): Ceres Seq. ID no. 13588095
MDQAKGYEHVRYTAPDPRDEGLGSINQRFSHDSSTNVNTYVRPPDYGVSTPARPVLNYSIQTGEEFAFEFMRDRVIMKPQFIPNVYGEHSGMPVSVNLSALGMVHPMSESGPNATVLNIEEKRQSFEHERKPPSRIEDKTYHELVQSAPVISSKNDTGQRRHSLVSSRASDSSLNRAKFLCSFGGKVIPRPRDQKLRYVGGETRIIRISKTISFQELMHKMKEIFPEARTIKYQLPGEDLDALVSVSSDEDLQNMMEECIVFGNGGSEKPRMFLFSSSDIEEAQFVMEHAEGDSEVQYVVAVNGMDLSSRRSSLGLSPPGNNLDELLHGNFDRKIDRAATEPAVASLTPLAGNESLPASQTSQPVTGFSTGNEPFSQPYLGQQLQFPGLGNHQIYTSGHMASIGYIDEKRSAPLHVQPQPHYIPYSVNPETPLESLVPHYPQKPEQGFLREEQIFHVQDPETSSKEAKMRRDDSFQKVNDHPISTVESNLSAKEPKMRRESSTPRVNEYPVSSMPSDLIVPDDLPKEEAPIVTQTSSSTPDPSSSTLSEKSLRKSEDHVENNLSAKEPKMRKEHSTTRVNEYSVSSVSSDSMVPDQALKEEAPISMKISNSTPDPKSLVYPEKSLRTSQEKTGAFDTTNEGMKKNQDNQFCLLGGFSVSGHGTSNNSSSNVSNFDQPVTQQRVFHSERTVRDPTETNRLSKSDDSLASQFVMAQTTSDAFLPISESSETSHEANMESQNVHPTAPVIPAPDSIWTAEGSMSQSEKKNVETNTPEHVSQTETSAKAVPQGHNEKGDIVVDINDRFPREFLADILKTKESLNFPGLGPLHADGAGVSLNIQNNDPKTWSYFRNLAQDEFERKDLSLMDQDHPGFPTSMTNTNGVPIDYSYPPLQSEKVASSQIHPQIHFDGNIKPDVSTITIPDLNTVDTQEDYSQSQIKGAESTDATLNAGVPLIDFMAADSGMRSLQVIKNDDLEELKELGSGTFGTVYHGKWRGTDVAIKRIKRSCFIGRSSEQERLTSEFWHEAEILSKLHHPNVMAFYGVVKDGPGGTLATVTEYMVNGSLRHVLLSNRHLDRRKRLIIAMDAAFGMEYLHSKSIVHFDLKCDNLLVNLKDPARPICKVGDFGLSKIKRNTLVTGGVRGTLPWMAPELLSGSSSKVSEKVDVFSFGIVLWEILTGEEPYANMHYGAIIGGIVNNTLRPTVPNYCDPEWRMLMEQCWAPDPFVRPAFPEIARRLRTMSSSAVHTKPHAVNHQIHK

SEQ ID NO: 49996 - protein, 1187 aa, Arabidopsis thaliana
  peptide (1)..(1187): Ceres Seq. ID no. 13588096
MRDRVIMKPQFIPNVYGEHSGMPVSVNLSALGMVHPMSESGPNATVLNIEEKRQSFEHERKPPSRIEDKTYHELVQSAPVISSKNDTGQRRHSLVSSRASDSSLNRAKFLCSFGGKVIPRPRDQKLRYVGGETRIIRISKTISFQELMHKMKEIFPEARTIKYQLPGEDLDALVSVSSDEDLQNMMEECIVFGNGGSEKPRMFLFSSSDIEEAQFVMEHAEGDSEVQYVVAVNGMDLSSRRSSLGLSPPGNNLDELLHGNFDRKIDRAATEPAVASLTPLAGNESLPASQTSQPVTGFSTGNEPFSQPYLGQQLQFPGLGNHQIYTSGHMASIGYIDEKRSAPLHVQPQPHYIPYSVNPETPLESLVPHYPQKPEQGFLREEQIFHVQDPETSSKEAKMRRDDSFQKVNDHPISTVESNLSAKEPKMRRESSTPRVNEYPVSSMPSDLIVPDDLPKEEAPIVTQTSSSTPDPSSSTLSEKSLRKSEDHVENNLSAKEPKMRKEHSTTRVNEYSVSSVSSDSMVPDQALKEEAPISMKISNSTPDPKSLVYPEKSLRTSQEKTGAFDTTNEGMKKNQDNQFCLLGGFSVSGHGTSNNSSSNVSNFDQPVTQQRVFHSERTVRDPTETNRLSKSDDSLASQFVMAQTTSDAFLPISESSETSHEANMESQNVHPTAPVIPAPDSIWTAEGSMSQSEKKNVETNTPEHVSQTETSAKAVPQGHNEKGDIVVDINDRFPREFLADILKTKESLNFPGLGPLHADGAGVSLNIQNNDPKTWSYFRNLAQDEFERKDLSLMDQDHPGFPTSMTNTNGVPIDYSYPPLQSEKVASSQIHPQIHFDGNIKPDVSTITIPDLNTVDTQEDYSQSQIKGAESTDATLNAGVPLIDFMAADSGMRSLQVIKNDDLEELKELGSGTFGTVYHGKWRGTDVAIKRIKRSCFIGRSSEQERLTSEFWHEAEILSKLHHPNVMAFYGVVKDGPGGTLATVTEYMVNGSLRHVLLSNRHLDRRKRLIIAMDAAFGMEYLHSKSIVHFDLKCDNLLVNLKDPARPICKVGDFGLSKIKRNTLVTGGVRGTLPWMAPELLSGSSSKVSEKVDVFSFGIVLWEILTGEEPYANMHYGAIIGGIVNNTLRPTVPNYCDPEWRMLMEQCWAPDPFVRPAFPEIARRLRTMSSSAVHTKPHAVNHQIHK

SEQ ID NO: 49997 - protein, 1181 aa, Arabidopsis thaliana
  peptide (1)..(1181): Ceres Seq. ID no. 13588097
MKPQFIPNVYGEHSGMPVSVNLSALGMVHPMSESGPNATVLNIEEKRQSFEHERKPPSRIEDKTYHELVQSAPVISSKNDTGQRRHSLVSSRASDSSLNRAKFLCSFGGKVIPRPRDQKLRYVGGETRIIRISKTISFQELMHKMKEIFPEARTIKYQLPGEDLDALVSVSSDEDLQNMMEECIVFGNGGSEKPRMFLFSSSDIEEAQFVMEHAEGDSEVQYVVAVNGMDLSSRRSSLGLSPPGNNLDELLHGNFDRKIDRAATEPAVASLTPLAGNESLPASQTSQPVTGFSTGNEPFSQPYLGQQLQFPGLGNHQIYTSGHMASIGYIDEKRSAPLHVQPQPHYIPYSVNPETPLESLVPHYPQKPEQGFLREEQIFHVQDPETSSKEAKMRRDDSFQKVNDHPISTVESNLSAKEPKMRRESSTPRVNEYPVSSMPSDLIVPDDLPKEEAPIVTQTSSSTPDPSSSTLSEKSLRKSEDHVENNLSAKEPKMRKEHSTTRVNEYSVSSVSSDSMVPDQALKEEAPISMKISNSTPDPKSLVYPEKSLRTSQEKTGAFDTTNEGMKKNQDNQFCLLGGFSVSGHGTSNNSSSNVSNFDQPVTQQRVFHSERTVRDPTETNRLSKSDDSLASQFVMAQTTSDAFLPISESSETSHEANMESQNVHPTAPVIPAPDSIWTAEGSMSQSEKKNVETNTPEHVSQTETSAKAVPQGHNEKGDIVVDINDRFPREFLADILKTKESLNFPGLGPLHADGAGVSLNIQNNDPKTWSYFRNLAQDEFERKDLSLMDQDHPGFPTSMTNTNGVPIDYSYPPLQSEKVASSQIHPQIHFDGNIKPDVSTITIPDLNTVDTQEDYSQSQIKGAESTDATLNAGVPLIDFMAADSGMRSLQVIKNDDLEELKELGSGTFGTVYHGKWRGTDVAIKRIKRSCFIGRSSEQERLTSEFWHEAEILSKLHHPNVMAFYGVVKDGPGGTLATVTEYMVNGSLRHVLLSNRHLDRRKRLIIAMDAAFGMEYLHSKSIVHFDLKCDNLLVNLKDPARPICKVGDFGLSKIKRNTLVTGGVRGTLPWMAPELLSGSSSKVSEKVDVFSFGIVLWEILTGEEPYANMHYGAIIGGIVNNTLRPTVPNYCDPEWRMLMEQCWAPDPFVRPAFPEIARRLRTMSSSAVHTKPHAVNHQIHK

SEQ ID NO: 49998 - DNA, 1212 bp, Arabidopsis thaliana
  misc_feature (1)..(1212): Ceres Seq. ID no. 13592406
  misc_feature (1)..(1212): Ortholog of  Ceres SEQ ID NO 15175368 as cited in SEQ ID NO 60071
  misc_feature (1)..(1212): Ortholog of  Ceres SEQ ID NO 13528157 as cited in SEQ ID NO 60102
  misc_feature (1)..(1212): Ortholog of  Ceres SEQ ID NO 15225423 as cited in SEQ ID NO 64689
gagagagataaaagagagaaagataatctctataatgtgcacattatctctctcttcttcttcaccttcttgagaaacctcctctccccaaaaacgacgtagtttcacatttctcgacttcttgaatggagtttgaagacaacaacaacaacaacgacgaagagcaagaagaggatatgaatcttcatgaggaagaagaagacgacgacgccgtttacgactctcctcctctctctcgtgttctccccaaagcctcgacagaaagtcatgaaaccaccggaactacttccacaggcggtggcggaggattcatggttgttcacggcggtggagggagcaggtttaggttccgtgagtgtctcaagaaccaagcggtgaacataggaggacacgcggtcgatggttgtggtgagtttatgccagctggaatcgaaggtaccatcgacgctctaaaatgcgccgcttgtggctgtcaccgtaacttccaccgcaaggaattaccttacttccatcacgcgccgccacaacatcagcctcctcctcccccgccagggttttaccgtcttccagctccggttagctaccgaccaccaccgtcacaagctcctcctcttcagctcgctcttccccctccacaaagagagagatcagaagatccaatggagacgtcttcagctgaagcaggaggagggattaggaagaggcataggactaagtttacggctgagcaaaaggaaaggatgttagctttagctgagaggattggatggagaattcagagacaagacgatgaagtgattcagagattttgtcaggagactggtgttccgagacaagttcttaaggtttggttacataacaacaaacacactcttggtaagtcgccttcaccacttcatcatcatcaggctcctcctcctccaccaccacagtcttcgtttcatcatgaacaagaccaaccatgaatcttgaatttctttgatcactagggttttaatttagcttaattaattacttgagaaatttgagagacaaggtttttattgtttaatttatgtacccattttcctctttgatgatgatgttgatgatgttggtgatgatctttaatttctggttaattatgtagtgcattaggagctttttaggtctcttagcaaaatctttgattggcctgactataaattactgacgtccttatttgcatcacat

SEQ ID NO: 49999 - protein, 279 aa, Arabidopsis thaliana
  peptide (1)..(279): Ceres Seq. ID no. 13592407
MEFEDNNNNNDEEQEEDMNLHEEEEDDDAVYDSPPLSRVLPKASTESHETTGTTSTGGGGGFMVVHGGGGSRFRFRECLKNQAVNIGGHAVDGCGEFMPAGIEGTIDALKCAACGCHRNFHRKELPYFHHAPPQHQPPPPPPGFYRLPAPVSYRPPPSQAPPLQLALPPPQRERSEDPMETSSAEAGGGIRKRHRTKFTAEQKERMLALAERIGWRIQRQDDEVIQRFCQETGVPRQVLKVWLHNNKHTLGKSPSPLHHHQAPPPPPPQSSFHHEQDQP

SEQ ID NO: 50000 - protein, 262 aa, Arabidopsis thaliana
  peptide (1)..(262): Ceres Seq. ID no. 13592408
MNLHEEEEDDDAVYDSPPLSRVLPKASTESHETTGTTSTGGGGGFMVVHGGGGSRFRFRECLKNQAVNIGGHAVDGCGEFMPAGIEGTIDALKCAACGCHRNFHRKELPYFHHAPPQHQPPPPPPGFYRLPAPVSYRPPPSQAPPLQLALPPPQRERSEDPMETSSAEAGGGIRKRHRTKFTAEQKERMLALAERIGWRIQRQDDEVIQRFCQETGVPRQVLKVWLHNNKHTLGKSPSPLHHHQAPPPPPPQSSFHHEQDQP

SEQ ID NO: 50001 - protein, 217 aa, Arabidopsis thaliana
  peptide (1)..(217): Ceres Seq. ID no. 13592409
MVVHGGGGSRFRFRECLKNQAVNIGGHAVDGCGEFMPAGIEGTIDALKCAACGCHRNFHRKELPYFHHAPPQHQPPPPPPGFYRLPAPVSYRPPPSQAPPLQLALPPPQRERSEDPMETSSAEAGGGIRKRHRTKFTAEQKERMLALAERIGWRIQRQDDEVIQRFCQETGVPRQVLKVWLHNNKHTLGKSPSPLHHHQAPPPPPPQSSFHHEQDQP

SEQ ID NO: 50002 - DNA, 1259 bp, Arabidopsis thaliana
  misc_feature (1)..(1259): Ceres Seq. ID no. 13588405
  misc_feature (1)..(1259): Ortholog of  Ceres SEQ ID NO 15176294 as cited in SEQ ID NO 60388
atgatgatagcaaggtgttctctttttccgccgccgtgtttctccgccgtgaggattagatgtttcgccggagaaacttcagatactgggattctattccgggagaagcttatttaccttcaagaccttaacgtagatcctcacaaagctctccgagtaaacccatctctccgttctgctccaatctcctccgtcgtctccgtcgagactctactctcttccaccggactctcaagacccgccgttggtcgtatcctcgacatgtttccagatttgttaacttctgatcctgaatctgaaatcttaccagttcttcgcttcttatccaatgagatttcaatttcagagcaagacatacctaaatcgatctctcgttgtcctcgattgctaatttcatctgtagattatcagcttcgtcctgcattaacgttcctcaaaaccctaggattcgtgggtcgcgacacgattacgtcacggaacacggtgttgcttgtatcgaatgtggaacgaaccctaatccccaaaattgagtatcttgaagaagggttagggtttacaagagaagaagtagcgaagatggttgtgagatctccggcgttgttgacttatagtgttgataacaatttagttcctaaagttgagttttttattgaggagatgcgtggagatgttaaggagctgaaacgtttccctcagtatttttcgtttagcttggagaggaagataaagccaaggcatagattgcttaaggaacatgggattttgatgcctttgtctgagatgttgaaggttagtgatggtcagtttaaccattggcttttagaacttcgtcttaggtctgctgaaagaagatgatgataaacaacaacgttctttttgatgttctttttacttgagatttgggacatgtcaagacacttcacatgagttttgtatatagtttctgtttcaatgattaggctgagtacatgtttcgttagatcatgtaatgtgtaacttgagatcgtgaaagaagatgatgatcaacaacaacaatgtaagctttttgatgttctttgttcttggtacttgagatttgagagatgaaaattgcagaagttttgtactttgggacatgctaagacactttcatatgagcttgtatatagttttttgtttcaatatgttagatcatgaaggtgtaattaagaatctagttttttttttttggtaaggtaattaagaatctagttgatgaggaatgaaagttgctttaaggt

SEQ ID NO: 50003 - protein, 284 aa, Arabidopsis thaliana
  peptide (1)..(284): Ceres Seq. ID no. 13588406
MMIARCSLFPPPCFSAVRIRCFAGETSDTGILFREKLIYLQDLNVDPHKALRVNPSLRSAPISSVVSVETLLSSTGLSRPAVGRILDMFPDLLTSDPESEILPVLRFLSNEISISEQDIPKSISRCPRLLISSVDYQLRPALTFLKTLGFVGRDTITSRNTVLLVSNVERTLIPKIEYLEEGLGFTREEVAKMVVRSPALLTYSVDNNLVPKVEFFIEEMRGDVKELKRFPQYFSFSLERKIKPRHRLLKEHGILMPLSEMLKVSDGQFNHWLLELRLRSAERR

SEQ ID NO: 50004 - protein, 283 aa, Arabidopsis thaliana
  peptide (1)..(283): Ceres Seq. ID no. 13588407
MIARCSLFPPPCFSAVRIRCFAGETSDTGILFREKLIYLQDLNVDPHKALRVNPSLRSAPISSVVSVETLLSSTGLSRPAVGRILDMFPDLLTSDPESEILPVLRFLSNEISISEQDIPKSISRCPRLLISSVDYQLRPALTFLKTLGFVGRDTITSRNTVLLVSNVERTLIPKIEYLEEGLGFTREEVAKMVVRSPALLTYSVDNNLVPKVEFFIEEMRGDVKELKRFPQYFSFSLERKIKPRHRLLKEHGILMPLSEMLKVSDGQFNHWLLELRLRSAERR

SEQ ID NO: 50005 - protein, 197 aa, Arabidopsis thaliana
  peptide (1)..(197): Ceres Seq. ID no. 13588408
MFPDLLTSDPESEILPVLRFLSNEISISEQDIPKSISRCPRLLISSVDYQLRPALTFLKTLGFVGRDTITSRNTVLLVSNVERTLIPKIEYLEEGLGFTREEVAKMVVRSPALLTYSVDNNLVPKVEFFIEEMRGDVKELKRFPQYFSFSLERKIKPRHRLLKEHGILMPLSEMLKVSDGQFNHWLLELRLRSAERR

SEQ ID NO: 50006 - DNA, 1440 bp, Arabidopsis thaliana
  misc_feature (1)..(1440): Ceres Seq. ID no. 13647884
  misc_feature (1)..(1440): Ortholog of  Ceres SEQ ID NO 14301916 as cited in SEQ ID NO 69281
gagagagagagagagagagagctcactagtcccccccccccaaaaaccctcaacagcttttcagttttaggataaagttggagtttcaaattctgctgcctttactcttttcctcaatctctctgctttttgtcacataccaaaagatgtataagaatcagttgcaagagcttgcacagaggagttgtttcagtctcccatcatatacatgcacaagagaaggaccagatcatgctccaagattcaaagctagtgtaaacttcaatggtgagatatttgaaagcccaacttactgttctactctcagacaagctgagcattcagctgctgaagttgctcttagtgctctctcttccaaaggtccttcaaagtctctaactgctagagttctagatgagactgggatctacaagaatctgcttcaagagacagcacacagagctggtcttgatctaccggtttacacaagtgtgagatcaggacctggtcacatcccaacattctcttgtactgtggagcttgctggaatgagttttaatggagaatcagcaaagactaagaaacaagctgagaagaatgcagccattgcagcttggttctccttgagaaaaatgccaagattggacccattgagaggtgaagagaaggaacaagagatagttgcaagagtcctctcaagatttagacccaaagaagtgaaaagaagagaaccaaaccagtcaagaagaagaacagtcatcagaacaattcgccaaaacacaacaacaacaacaacaaccacaggagacttgttgtgtgagaaactcagatccatcaatctatataccaatgaagcttcatcatcatcaccaccaccacagagattctggccttcaagaacaaatctcacacaagaacaatccaaagtcaaatcattgctagagaaatgtcaagaatatgcagagaagaaacagagcctagatgatcctaagccagagatgagaatcaaaacatcatcaccatcaccattatcatcatcagtggagagaaactgttatagtaagctcttaccctttccaagttttgtgttaaaccatcagaaactagctccagctgttcacatcagatcagtgatcccagtttgttcagctcctccaccaaaacctaaccctaaccctaattcatcaccgttcatcacaagggagctgggaaatggaagccaagagaagaagtcattaccgaattaggattagaaacaaaatctgaatcaaacccatgattaaaggtcgtgtctttagataaacccatgttaaggatttgataatagagagattagagaaatgggtaaaatcaaatcaggtcatgggtttctgtatgttcgtcgtgtaaatttgacttttttgaattttacgacctgacacaaaaaaaaaaaaaaaaaaaactcgagggggggcccggtac

SEQ ID NO: 50007 - protein, 359 aa, Arabidopsis thaliana
  peptide (1)..(359): Ceres Seq. ID no. 15220525
MYKNQLQELAQRSCFSLPSYTCTREGPDHAPRFKASVNFNGEIFESPTYCSTLRQAEHSAAEVALSALSSKGPSKSLTARVLDETGIYKNLLQETAHRAGLDLPVYTSVRSGPGHIPTFSCTVELAGMSFNGESAKTKKQAEKNAAIAAWFSLRKMPRLDPLRGEEKEQEIVARVLSRFRPKEVKRREPNQSRRRTVIRTIRQNTTTTTTTTGDLLCEKLRSINLYTNEASSSSPPPQRFWPSRTNLTQEQSKVKSLLEKCQEYAEKKQSLDDPKPEMRIKTSSPSPLSSSVERNCYSKLLPFPSFVLNHQKLAPAVHIRSVIPVCSAPPPKPNPNPNSSPFITRELGNGSQEKKSLPN

SEQ ID NO: 50008 - protein, 232 aa, Arabidopsis thaliana
  peptide (1)..(232): Ceres Seq. ID no. 15220526
MSFNGESAKTKKQAEKNAAIAAWFSLRKMPRLDPLRGEEKEQEIVARVLSRFRPKEVKRREPNQSRRRTVIRTIRQNTTTTTTTTGDLLCEKLRSINLYTNEASSSSPPPQRFWPSRTNLTQEQSKVKSLLEKCQEYAEKKQSLDDPKPEMRIKTSSPSPLSSSVERNCYSKLLPFPSFVLNHQKLAPAVHIRSVIPVCSAPPPKPNPNPNSSPFITRELGNGSQEKKSLPN

SEQ ID NO: 50009 - protein, 204 aa, Arabidopsis thaliana
  peptide (1)..(204): Ceres Seq. ID no. 15220527
MPRLDPLRGEEKEQEIVARVLSRFRPKEVKRREPNQSRRRTVIRTIRQNTTTTTTTTGDLLCEKLRSINLYTNEASSSSPPPQRFWPSRTNLTQEQSKVKSLLEKCQEYAEKKQSLDDPKPEMRIKTSSPSPLSSSVERNCYSKLLPFPSFVLNHQKLAPAVHIRSVIPVCSAPPPKPNPNPNSSPFITRELGNGSQEKKSLPN

SEQ ID NO: 50010 - DNA, 1959 bp, Arabidopsis thaliana
  misc_feature (1)..(1959): Ceres Seq. ID no. 13588423
  misc_feature (1)..(1959): Ortholog of  Ceres SEQ ID NO 14312408 as cited in SEQ ID NO 55042
aaagaaccaaacctataatcttcctctataatgaattttcatatctttcgattttttcaatttatcctcgtcgcagttttcatcttccacgactcgtgttattccgatgaagctggaaactatagatttatgaaagatgcaacattagcaccaaagttatctcacttcgactacataatcatcggaggaggaaccgctggatgtgcattagccgcaacgctctctcaaaacgcaaccgttctagtcctcgaacgcggaggttccccttacgacgatccagcggcaacagacatcggaaacttcgcaaacacactcttgaacataactccaaactcatggtcgcagcttttcatctccgaagacggcgttttcaactcacgcgctcgtgtactcggtggaggcacagtcataaacgcaggattctactcacgtgcggaagaagatttcgtggcggaagcaggatgggagagagacgaggtcgaagcggcttacgagtgggtcgagaagaaagtggtttttgaaccaccggttaacaaatggcaatcagcgtttcgagatgggcttttggaagctggtgtgactccatacaatggtttcacgtacgaacatatcgttgggactaaatttggtggtacgatatttgaccgggatggtcatagacacacggcggcgaatttgttggagtatgctaatccgaacatgatagttgtctacttgcatgcttctgtccataagatcctcttcactattaaaggtaaccagaggcccaaagcatatggggtgatatttctggacgcaaatggagtgtcctacaaggcagaattggcaacgcaagactcgacaatgagtgaggtgatcttatcagcaggtgccatcgcgagccctcaactattgatgctaagtggtgtgggccctgcggctcatcttgcagcctatagagtgaacccggtcatcgtagatcaacccatggtgggccaagggatgggtgataacccgatgaatccggtttttatcccttctcctgaacccgtagaagtgtctcttgtacaagccgtaggaatcaccaagtttggtagttacattgaaggtggaagtgccttaagtctctctattagtttgacccgtagcttcttcgatggtgttttgaatcttcttaaaaagacaaaacttcctacccaatccatctcaaagtttttcaaatctttggatcttaccttgaacgtgactacaaaagcgggtgtgatcatccaaaaagtgaatggaccgctctcgagaggtcacttggagttgcggaatacgaatccagatgataacccttcagtgacattcaactactttaaggatccagaggatttgaacaagtgtgttgaaggacttagtaccattattaaagtgatagattcgaagggatactccaagtacaagtaccctttagcgagtgcacgtggactactaaatctcattcttgctcttcccactaatttaaggccaagacacataacttcaacgtttgatttggagcagtattgtatcgataccgtgatgactatttatcattaccatggaggttgtcaagttggaaaagtggtcgacaacaattacaaagtattaggggttgatgctttgaggatcatcgatggatccacgtttctcaagtctccggggactaatccacaggccacaatcatgatgctcggaagatatatggggcagaagattcttcgagagaggatggctttccgaggaaaagaggaagaaacatgagatttctaagtacatatgctaaaagatattgttgtttggtgttcgttgctccaaacgaagacattcactatagtgtatatcacatatttcatgaatcttacaaatggggttttctgttgcactaaagtcatttataaccgactgaaacacttgatacatatccttgttgataatggccttagacaataaaaggat

SEQ ID NO: 50011 - protein, 577 aa, Arabidopsis thaliana
  peptide (1)..(577): Ceres Seq. ID no. 13588424
MNFHIFRFFQFILVAVFIFHDSCYSDEAGNYRFMKDATLAPKLSHFDYIIIGGGTAGCALAATLSQNATVLVLERGGSPYDDPAATDIGNFANTLLNITPNSWSQLFISEDGVFNSRARVLGGGTVINAGFYSRAEEDFVAEAGWERDEVEAAYEWVEKKVVFEPPVNKWQSAFRDGLLEAGVTPYNGFTYEHIVGTKFGGTIFDRDGHRHTAANLLEYANPNMIVVYLHASVHKILFTIKGNQRPKAYGVIFLDANGVSYKAELATQDSTMSEVILSAGAIASPQLLMLSGVGPAAHLAAYRVNPVIVDQPMVGQGMGDNPMNPVFIPSPEPVEVSLVQAVGITKFGSYIEGGSALSLSISLTRSFFDGVLNLLKKTKLPTQSISKFFKSLDLTLNVTTKAGVIIQKVNGPLSRGHLELRNTNPDDNPSVTFNYFKDPEDLNKCVEGLSTIIKVIDSKGYSKYKYPLASARGLLNLILALPTNLRPRHITSTFDLEQYCIDTVMTIYHYHGGCQVGKVVDNNYKVLGVDALRIIDGSTFLKSPGTNPQATIMMLGRYMGQKILRERMAFRGKEEET

SEQ ID NO: 50012 - protein, 544 aa, Arabidopsis thaliana
  peptide (1)..(544): Ceres Seq. ID no. 13588425
MKDATLAPKLSHFDYIIIGGGTAGCALAATLSQNATVLVLERGGSPYDDPAATDIGNFANTLLNITPNSWSQLFISEDGVFNSRARVLGGGTVINAGFYSRAEEDFVAEAGWERDEVEAAYEWVEKKVVFEPPVNKWQSAFRDGLLEAGVTPYNGFTYEHIVGTKFGGTIFDRDGHRHTAANLLEYANPNMIVVYLHASVHKILFTIKGNQRPKAYGVIFLDANGVSYKAELATQDSTMSEVILSAGAIASPQLLMLSGVGPAAHLAAYRVNPVIVDQPMVGQGMGDNPMNPVFIPSPEPVEVSLVQAVGITKFGSYIEGGSALSLSISLTRSFFDGVLNLLKKTKLPTQSISKFFKSLDLTLNVTTKAGVIIQKVNGPLSRGHLELRNTNPDDNPSVTFNYFKDPEDLNKCVEGLSTIIKVIDSKGYSKYKYPLASARGLLNLILALPTNLRPRHITSTFDLEQYCIDTVMTIYHYHGGCQVGKVVDNNYKVLGVDALRIIDGSTFLKSPGTNPQATIMMLGRYMGQKILRERMAFRGKEEET

SEQ ID NO: 50013 - protein, 354 aa, Arabidopsis thaliana
  peptide (1)..(354): Ceres Seq. ID no. 13588426
MIVVYLHASVHKILFTIKGNQRPKAYGVIFLDANGVSYKAELATQDSTMSEVILSAGAIASPQLLMLSGVGPAAHLAAYRVNPVIVDQPMVGQGMGDNPMNPVFIPSPEPVEVSLVQAVGITKFGSYIEGGSALSLSISLTRSFFDGVLNLLKKTKLPTQSISKFFKSLDLTLNVTTKAGVIIQKVNGPLSRGHLELRNTNPDDNPSVTFNYFKDPEDLNKCVEGLSTIIKVIDSKGYSKYKYPLASARGLLNLILALPTNLRPRHITSTFDLEQYCIDTVMTIYHYHGGCQVGKVVDNNYKVLGVDALRIIDGSTFLKSPGTNPQATIMMLGRYMGQKILRERMAFRGKEEET

SEQ ID NO: 50014 - DNA, 1859 bp, Arabidopsis thaliana
  misc_feature (1)..(1859): Ceres Seq. ID no. 12602423
  misc_feature (1)..(1859): Ortholog of  Ceres SEQ ID NO 15170885 as cited in SEQ ID NO 54326
gaatcctaaaacttcttttgagtgtgttgaagaagaagaagattaaaattcactaaaaacccgagaaaagtggaagaagaaggaaggaagaagaagacaagagagcattctgattcatgtgactctggtttcgtttctttctgtgtctctgctgtgtcgttttctcggcatatttctgatctttcgttctcggttggtttttggtttctgggtattgattgattgattcaaaagtcttcaactttcctggaaactggatctgggtttatccgtttttactcgtctgagaagagaaaaaaggatgaatccttatgatgcgaaagacagaagatggattctctctatgttcttcttcgtcgttttgttctgcaacaacgtttcgacttcgtcttcttcatctgaagttatcacgattaagccaagacatttatccttgctaaagagtgctttacaacggtcaagtggagaacagtctgatctatggaggccattgactgatcaaggatggagtccttgtattgatttgggaaattctccttcattaccggataaaaccgcgggatatgttcaggtatttcttgatggaggacttaaccagcaacgaatgggaatatgtgatgctgttgcagttgcgaagattttaaacgcaacactcgtgatcccttatcttgaagtgaatcctgtgtggcaagattcaagttcttttgttgatatttttgatgtcgatcattttatcgattctttaaaagatgacataagggtggttagagaactacctgatgaatactcttggagtacaagagagtattacggtacagcagtacgtgaaacacgagtgaaaaccgcgcctgttcatgcctctgcgaattggtatattgagaacgtctcaccagttctacaaagttatgggattgctgccatttctccattctctcaccggctatcattcgaccacttacctgctgagatccaacgactaagatgcaaagtgaatttccaagctttacgttttgtccctcacattacatcactcggtgatgctcttgtcagccgccttagaaacccgtcatggagaagcaataaggaacagaaaaatgttgatcatttaggagacatgaccaacccacacagaagacaagaacccgggaagtttgctgtgcttcatcttcgcttcgacaaggacatggctgcgcattcagcgtgtgattttggcggaggcaaagccgagaaactctccttggcgaaatacagacaaatgatttggcaaggaagagtgttgaattctcaattcactgatgaagagttaagaagtcaaggacggtgtcctctaacaccagaagaaatgggacttcttttagctgctttcggattcgataacaatactcgtctctatcttgcatcccacaaggtgtatggaggagaagctagaatctcaacattaagacaagtattcccaagaatggaagacaaaagaagtcttgcatcttctgaagaacgagctcgaatcaagggcaaagcttctttattagctgcacttgactactacgttagtatgcacagcgacattttcatctccgcatcacctggaaacatgcacaacgctcttgttggtcatcgaacattcgagaatctcaagacgatcagaccaaacatggcgttaataggacagcttttcctcaacaaaagcatcacttgggtagattttcagcaagcgcttggtgaaggacatgtgaatagacaaggacagatccggttaaggaaaccaaaacagtcgatttatacttatcctgctcctgattgtatgtgccatgtttgattagtttttaaagtcttgatctttagatatttcttataagaat

SEQ ID NO: 50015 - protein, 504 aa, Arabidopsis thaliana
  peptide (1)..(504): Ceres Seq. ID no. 12602424
MNPYDAKDRRWILSMFFFVVLFCNNVSTSSSSSEVITIKPRHLSLLKSALQRSSGEQSDLWRPLTDQGWSPCIDLGNSPSLPDKTAGYVQVFLDGGLNQQRMGICDAVAVAKILNATLVIPYLEVNPVWQDSSSFVDIFDVDHFIDSLKDDIRVVRELPDEYSWSTREYYGTAVRETRVKTAPVHASANWYIENVSPVLQSYGIAAISPFSHRLSFDHLPAEIQRLRCKVNFQALRFVPHITSLGDALVSRLRNPSWRSNKEQKNVDHLGDMTNPHRRQEPGKFAVLHLRFDKDMAAHSACDFGGGKAEKLSLAKYRQMIWQGRVLNSQFTDEELRSQGRCPLTPEEMGLLLAAFGFDNNTRLYLASHKVYGGEARISTLRQVFPRMEDKRSLASSEERARIKGKASLLAALDYYVSMHSDIFISASPGNMHNALVGHRTFENLKTIRPNMALIGQLFLNKSITWVDFQQALGEGHVNRQGQIRLRKPKQSIYTYPAPDCMCHV

SEQ ID NO: 50016 - protein, 490 aa, Arabidopsis thaliana
  peptide (1)..(490): Ceres Seq. ID no. 12602425
MFFFVVLFCNNVSTSSSSSEVITIKPRHLSLLKSALQRSSGEQSDLWRPLTDQGWSPCIDLGNSPSLPDKTAGYVQVFLDGGLNQQRMGICDAVAVAKILNATLVIPYLEVNPVWQDSSSFVDIFDVDHFIDSLKDDIRVVRELPDEYSWSTREYYGTAVRETRVKTAPVHASANWYIENVSPVLQSYGIAAISPFSHRLSFDHLPAEIQRLRCKVNFQALRFVPHITSLGDALVSRLRNPSWRSNKEQKNVDHLGDMTNPHRRQEPGKFAVLHLRFDKDMAAHSACDFGGGKAEKLSLAKYRQMIWQGRVLNSQFTDEELRSQGRCPLTPEEMGLLLAAFGFDNNTRLYLASHKVYGGEARISTLRQVFPRMEDKRSLASSEERARIKGKASLLAALDYYVSMHSDIFISASPGNMHNALVGHRTFENLKTIRPNMALIGQLFLNKSITWVDFQQALGEGHVNRQGQIRLRKPKQSIYTYPAPDCMCHV

SEQ ID NO: 50017 - protein, 403 aa, Arabidopsis thaliana
  peptide (1)..(403): Ceres Seq. ID no. 12602426
MGICDAVAVAKILNATLVIPYLEVNPVWQDSSSFVDIFDVDHFIDSLKDDIRVVRELPDEYSWSTREYYGTAVRETRVKTAPVHASANWYIENVSPVLQSYGIAAISPFSHRLSFDHLPAEIQRLRCKVNFQALRFVPHITSLGDALVSRLRNPSWRSNKEQKNVDHLGDMTNPHRRQEPGKFAVLHLRFDKDMAAHSACDFGGGKAEKLSLAKYRQMIWQGRVLNSQFTDEELRSQGRCPLTPEEMGLLLAAFGFDNNTRLYLASHKVYGGEARISTLRQVFPRMEDKRSLASSEERARIKGKASLLAALDYYVSMHSDIFISASPGNMHNALVGHRTFENLKTIRPNMALIGQLFLNKSITWVDFQQALGEGHVNRQGQIRLRKPKQSIYTYPAPDCMCHV

SEQ ID NO: 50018 - DNA, 1308 bp, Arabidopsis thaliana
  misc_feature (1)..(1308): Ceres Seq. ID no. 14304345
  misc_feature (1)..(1308): Ortholog of  Ceres SEQ ID NO 14316382 as cited in SEQ ID NO 57756
aatgaagcattagaagaatcatttccacacgattttccctgtgatttcttcatttccggcgacttaaaacggtgtctagcaaaatgagccgaccacaagatccaccccgaggtttcttcccatttggaaatccctttcggatgttatcatcaaagggatcagatttatcgccatggctactttctctattgaacggctttgagctacgtttggaagagagactgaagaaacttatgcctaagaacaaagatgacatcctcactttatcctggatgaagctagctatggagtcactctgcgagactcataagaacattaacactctcattactgatctccagcttcctgtctctgattgggaagagaaatgggttgatgtttacctcaacataagcgttaggttactagatctctgtaatgcctttagctctgagctcacacgtctcaaccagggagatctcttcctcaagtgtgttctgcacaatttacaatcggattctggggagaagtatctccaggctcgatcttcgcttgatagctggaggcaacatgttaatacaaacaaccctagaattgaaaactgccgtgcggttctagacagtcttgttaaatctctgagtctgcctaaagtcaagaactcgcctaaaggaaaggttctgatgcgagctttttatggtgtgaaggttcaaacagtttatatctgcagtgtatttaccgcagcctggtctgattccaccaaggatcttttcgatttacctgtctctgaaaaaccattatgggcaaaggtctttactgatatgcagagtgttgtaaatgctgagatcagagacatgttgtcttccggtagaaccacgattctcaaagagctggagagcgttgatgctagtgtcgagaagctatacccgatgatccaagatggcgttgatcctgtcgaagttgaattcttcaaagataatgttatggaattggggacacaagctgagaaattgtctcaagggttggatcagttactggaggaagttgatagtttctttaaactgactttgagagggcgcgatgtgttgctctgtaatcttaggtcaagtgactcaatctctggcaatgcagttggagaagatgtagactaaaatagtgaggtaaacaaacaagtttaacccttacaaaaggcagctttaggttctataaatagtgttttctctattttctttgttttgagtccatctgtcgagcttgtctcttccgtttaggtgtgttggtcttgtatgtgtgactgtatgaaatcaattctgcaataaaatataaatatag

SEQ ID NO: 50019 - protein, 347 aa, Arabidopsis thaliana
  peptide (1)..(347): Ceres Seq. ID no. 14304346
MSRPQDPPRGFFPFGNPFRMLSSKGSDLSPWLLSLLNGFELRLEERLKKLMPKNKDDILTLSWMKLAMESLCETHKNINTLITDLQLPVSDWEEKWVDVYLNISVRLLDLCNAFSSELTRLNQGDLFLKCVLHNLQSDSGEKYLQARSSLDSWRQHVNTNNPRIENCRAVLDSLVKSLSLPKVKNSPKGKVLMRAFYGVKVQTVYICSVFTAAWSDSTKDLFDLPVSEKPLWAKVFTDMQSVVNAEIRDMLSSGRTTILKELESVDASVEKLYPMIQDGVDPVEVEFFKDNVMELGTQAEKLSQGLDQLLEEVDSFFKLTLRGRDVLLCNLRSSDSISGNAVGEDVD

SEQ ID NO: 50020 - protein, 328 aa, Arabidopsis thaliana
  peptide (1)..(328): Ceres Seq. ID no. 14304347
MLSSKGSDLSPWLLSLLNGFELRLEERLKKLMPKNKDDILTLSWMKLAMESLCETHKNINTLITDLQLPVSDWEEKWVDVYLNISVRLLDLCNAFSSELTRLNQGDLFLKCVLHNLQSDSGEKYLQARSSLDSWRQHVNTNNPRIENCRAVLDSLVKSLSLPKVKNSPKGKVLMRAFYGVKVQTVYICSVFTAAWSDSTKDLFDLPVSEKPLWAKVFTDMQSVVNAEIRDMLSSGRTTILKELESVDASVEKLYPMIQDGVDPVEVEFFKDNVMELGTQAEKLSQGLDQLLEEVDSFFKLTLRGRDVLLCNLRSSDSISGNAVGEDVD

SEQ ID NO: 50021 - protein, 297 aa, Arabidopsis thaliana
  peptide (1)..(297): Ceres Seq. ID no. 14304348
MPKNKDDILTLSWMKLAMESLCETHKNINTLITDLQLPVSDWEEKWVDVYLNISVRLLDLCNAFSSELTRLNQGDLFLKCVLHNLQSDSGEKYLQARSSLDSWRQHVNTNNPRIENCRAVLDSLVKSLSLPKVKNSPKGKVLMRAFYGVKVQTVYICSVFTAAWSDSTKDLFDLPVSEKPLWAKVFTDMQSVVNAEIRDMLSSGRTTILKELESVDASVEKLYPMIQDGVDPVEVEFFKDNVMELGTQAEKLSQGLDQLLEEVDSFFKLTLRGRDVLLCNLRSSDSISGNAVGEDVD

SEQ ID NO: 50022 - DNA, 1218 bp, Arabidopsis thaliana
  misc_feature (1)..(1218): Ceres Seq. ID no. 13648010
  misc_feature (1)..(1218): Ortholog of  Ceres SEQ ID NO 14315892 as cited in SEQ ID NO 57776
  misc_feature (1)..(1218): Ortholog of  Ceres SEQ ID NO 13662173 as cited in SEQ ID NO 62002
gaagggggaaaagaaagactgattttacgctttattgctctcactaaaaccctaattctctccgtctcgatcgcgacctctgtttcttcggcaatggcggattctcctcaaagaagaagggattcacgatctccttcaccccgaaaagaacgagctagatccagatccaggtctaggtccaggtctagatccaggcccaggcttaggtccaggtcaagatctttgccaaggcctgtttctccatcacgaagccgtggaaggtcaaggtcaagaagccgtggaagaagtgaagttgaaaaccctggtaccactctctatgtgactggcctatctacaagagtcactgacaaggatcttgaagcacatttcgccaaggaaggaaaggttgcgtcttgttttcttgtgatggagccgcgcacccgtgtgtctcgtggttttgcctttgttacaatgagcagccttaaagatgctgagcggtgcattaaatatctcaaccagtctgtactagaaggccgatacataactgtggaaaggaaaatattgcatcaagcaacaatcagagatgataagagtactcatccttgctcaacatcattaagtgaaacacagcttgatcaatcgaatcgccagcttaaacataatcataagcaactatattgcctcaactctcaactctcaactagtcaaaggacattatcaatccaggagaaagcgcccgagaactcccaccccaggccactatcttggcttgaaaagctccagagacagcgatcgagaaggccgtagcagtcgagggaggcactatgatcgtgatgattacagagaccgtaggtcaccaagacgcgactattcacctcgtgatgaaagaaggtctagaagagatcggtcttactctcctcatggaagaagcccagagagaagatcagagagaaggtctgagaggtcagagagaaggtatgaaccccgtggctcgagatgacctgttttcatccttttgacaaaggattcaaaaacttctctgttgatttaggttgtgtaattgatcatccttaaaatagcacaaagattctgtcaggcaacgctttgggtttcatttattttctgttgttaacgtgttattctgtcggaactctctgaagtgaaaactaaaaactgtaatagcttctctgttatgtctctactctacttgtttttgaatgaatcagaatatcttatgtg

SEQ ID NO: 50023 - protein, 261 aa, Arabidopsis thaliana
  peptide (1)..(261): Ceres Seq. ID no. 13648011
EGGKERLILRFIALTKTLILSVSIATSVSSAMADSPQRRRDSRSPSPRKERARSRSRSRSRSRSRPRLRSRSRSLPRPVSPSRSRGRSRSRSRGRSEVENPGTTLYVTGLSTRVTDKDLEAHFAKEGKVASCFLVMEPRTRVSRGFAFVTMSSLKDAERCIKYLNQSVLEGRYITVERKILHQATIRDDKSTHPCSTSLSETQLDQSNRQLKHNHKQLYCLNSQLSTSQRTLSIQEKAPENSHPRPLSWLEKLQRQRSRRP

SEQ ID NO: 50024 - protein, 230 aa, Arabidopsis thaliana
  peptide (1)..(230): Ceres Seq. ID no. 13648012
MADSPQRRRDSRSPSPRKERARSRSRSRSRSRSRPRLRSRSRSLPRPVSPSRSRGRSRSRSRGRSEVENPGTTLYVTGLSTRVTDKDLEAHFAKEGKVASCFLVMEPRTRVSRGFAFVTMSSLKDAERCIKYLNQSVLEGRYITVERKILHQATIRDDKSTHPCSTSLSETQLDQSNRQLKHNHKQLYCLNSQLSTSQRTLSIQEKAPENSHPRPLSWLEKLQRQRSRRP

SEQ ID NO: 50025 - DNA, 1532 bp, Arabidopsis thaliana
  misc_feature (1)..(1532): Ceres Seq. ID no. 13588431
  misc_feature (1)..(1532): Ortholog of  Ceres SEQ ID NO 12614670 as cited in SEQ ID NO 68565
gaacacgtcaagatatggcagtgttcttcatcttggtcttggtctttttcttccttgtcttcagattcatctacagtaatatatgggttccgtggagaatccaatctcacttcaagaagcagagcgtgacgggtcctagttaccggatattcagtggaaactccggcgaggttagccggctaacggcaaaggcgaagtcaaagccgattccttccgggagaaatcctcatgagttcgtccaccgtgtggcgcctcactaccacgaatggtcacgtgtctacgggaagacgttcctctactggttcgggtcgaaacctgtggtggctacgtcggatccaagactaatccgggaagctttgacgacgggtgggtcgtttgaccgaattgggcataaccctttgtctaagctgctttatgctcaaggtcttcctggtcttagaggtgatcaatgggctttccatagaagaatcgccaaacaagcttttacaatggagaaactcaagaggtgggtgccacaaatggtaacaagtactatgatgttgatggagaagtgggaagatatgagaaacggaggagaagagattgagttagaggtacacaaagagatgcacaatttgtctgcagaaatgttatcaagaacagcttttgggaacagcgtggaagaagggaaaggaatctttgaattgcaggagcgtatgatgcgtcttttttatctggttcgatggagcgtttatatcccaggattcagattctttccttcgaagacgaatagagagatatggagaattgagaagcaaatccgtgtttctatcttgaaactgatcgaaaacaataaaacagctgttgagaaatcaggaactctgcttcaggcttttatgtctccttacacaaatcagaatggtcaagaagagaagcttgggatagaagaagttacagatgaatgcaaaacgttctactttgcagctaaggaaacaactgctaaccttatgacgtttgttttagtcctcttagctatgaaccaagaatggcaaaacattgctcgggaagaagtcatatgcgttctcggacaaaccgggcttcctactctagacatcttacaagacctcaagactctaagtatgataatcaatgagactctccggctctaccctccagcaatgacattaaaccgtgacactcttaaaagagctaagctaggagaccttgacatccctgcaggaactcaactctatttatcagtagtcgcgatgcaccacgataaagaaacatggggagacgacgcagaggagtttaatccgcgtaggtttgaagatcctaagaaacaatcagctctgcttgtaccgtttgggttagggcctaggacttgtgtgggacagaatcttgctgtgaatgaggctaaaactgttctggctacgatcttgaagtattacagtttcaggttgtctccaagttatgctcatgctcctgttttatttgtgacgttgcagcctcaaaatggtgctcatcttctctttactaggatatcaagttaa

SEQ ID NO: 50026 - protein, 509 aa, Arabidopsis thaliana
  peptide (1)..(509): Ceres Seq. ID no. 13588432
TRQDMAVFFILVLVFFFLVFRFIYSNIWVPWRIQSHFKKQSVTGPSYRIFSGNSGEVSRLTAKAKSKPIPSGRNPHEFVHRVAPHYHEWSRVYGKTFLYWFGSKPVVATSDPRLIREALTTGGSFDRIGHNPLSKLLYAQGLPGLRGDQWAFHRRIAKQAFTMEKLKRWVPQMVTSTMMLMEKWEDMRNGGEEIELEVHKEMHNLSAEMLSRTAFGNSVEEGKGIFELQERMMRLFYLVRWSVYIPGFRFFPSKTNREIWRIEKQIRVSILKLIENNKTAVEKSGTLLQAFMSPYTNQNGQEEKLGIEEVTDECKTFYFAAKETTANLMTFVLVLLAMNQEWQNIAREEVICVLGQTGLPTLDILQDLKTLSMIINETLRLYPPAMTLNRDTLKRAKLGDLDIPAGTQLYLSVVAMHHDKETWGDDAEEFNPRRFEDPKKQSALLVPFGLGPRTCVGQNLAVNEAKTVLATILKYYSFRLSPSYAHAPVLFVTLQPQNGAHLLFTRISS

SEQ ID NO: 50027 - protein, 505 aa, Arabidopsis thaliana
  peptide (1)..(505): Ceres Seq. ID no. 13588433
MAVFFILVLVFFFLVFRFIYSNIWVPWRIQSHFKKQSVTGPSYRIFSGNSGEVSRLTAKAKSKPIPSGRNPHEFVHRVAPHYHEWSRVYGKTFLYWFGSKPVVATSDPRLIREALTTGGSFDRIGHNPLSKLLYAQGLPGLRGDQWAFHRRIAKQAFTMEKLKRWVPQMVTSTMMLMEKWEDMRNGGEEIELEVHKEMHNLSAEMLSRTAFGNSVEEGKGIFELQERMMRLFYLVRWSVYIPGFRFFPSKTNREIWRIEKQIRVSILKLIENNKTAVEKSGTLLQAFMSPYTNQNGQEEKLGIEEVTDECKTFYFAAKETTANLMTFVLVLLAMNQEWQNIAREEVICVLGQTGLPTLDILQDLKTLSMIINETLRLYPPAMTLNRDTLKRAKLGDLDIPAGTQLYLSVVAMHHDKETWGDDAEEFNPRRFEDPKKQSALLVPFGLGPRTCVGQNLAVNEAKTVLATILKYYSFRLSPSYAHAPVLFVTLQPQNGAHLLFTRISS

SEQ ID NO: 50028 - protein, 347 aa, Arabidopsis thaliana
  peptide (1)..(347): Ceres Seq. ID no. 13588434
MEKLKRWVPQMVTSTMMLMEKWEDMRNGGEEIELEVHKEMHNLSAEMLSRTAFGNSVEEGKGIFELQERMMRLFYLVRWSVYIPGFRFFPSKTNREIWRIEKQIRVSILKLIENNKTAVEKSGTLLQAFMSPYTNQNGQEEKLGIEEVTDECKTFYFAAKETTANLMTFVLVLLAMNQEWQNIAREEVICVLGQTGLPTLDILQDLKTLSMIINETLRLYPPAMTLNRDTLKRAKLGDLDIPAGTQLYLSVVAMHHDKETWGDDAEEFNPRRFEDPKKQSALLVPFGLGPRTCVGQNLAVNEAKTVLATILKYYSFRLSPSYAHAPVLFVTLQPQNGAHLLFTRISS

SEQ ID NO: 50029 - DNA, 1999 bp, Arabidopsis thaliana
  misc_feature (1)..(1999): Ceres Seq. ID no. 13588106
  misc_feature (1)..(1999): Ortholog of  Ceres SEQ ID NO 14306319 as cited in SEQ ID NO 59927
tctctctctctctctctctctctctctctctctcttcgacttcttcgtcttcgtttcttcatttcgaagctctctctgtgtgtgatggcgtgccctagaaactccataacatacaacgccacgcgctgcgcgtgcggtatcggtcagctactaaaccggagctccgggagctgcgagatcttcggttggccgtcaacaatctccacagacaaagatgtaaactacagcgtaatatcattcgccgagactttattcgctttcgataggatccgtaagttcacgcaatctcaagctattttcttagaagctacgctcgtgatgcttctctcctggttagtcttttgtttcttcctgagattcaccaaactcggcgatggtcgtaatgtctggtttaatctccgttggtggattactcgacttgacgtcttcttctccactagacattggctcgatgatcaacaaattgtcaagaaacgtaaaacagaacttggtggaacattttctgttgcgagctggattgttttcattggtttattcgctgcgctgctttatcaaatcataaccaagagaacaattgaagttcacaatgtgagagctactggttctccagatttgatctcattcgagaacgatttggagtttaacatcaccgctgtttcggatatgagttgctctaatttacgcggtattgggaacgtggtcatgggtaatcccgggtttagcgagttcaaagttgctgctctttctagtttaggaagctatacttgtaagaatacaacttcaggaccaacagtgaatttcaaatgtaccaaatgtcgtctcaccaacgattacatatatatctcgtggcatttcgttgatcttcctgattcgcctgctgctgctgttggatttcagtttaactttacgtctaagaatggacctaacgagaagcatatgagttttgttagtggcactctgagaaacggaagcattctcgatgaaagtccggttactttccgtggaaccgaagggaatatattgaagtttaatctgtttcctcggatttaccatcatttgcatgatctaaagctaatccaacctctctttcacgagtttatccctggctctgtttaccgagacactactcagcttcaggcatctatgggaaggtcaacagatggcatactcaatacgacattgttcatcaactatctctctgcttatattgttgagatagaccatgaaaatatactcggtcctgttagcttccttgccgatcttggtggtttgtattgcatcagtattggcatatttttctacctactagtgcagtgtgagtacaggatcaagaagctgcgaaatgaagatactgttttcaggaagataaggaatcgtcgtaaagctctagatcactgggataaactgagaagatatgttgcatacacatgggattgcagcatattggtcgatgatgccatcaaaacgacaaaggtatcaggaatgtgtggtttaacgagacctccaacatcttctaatagctcggaacacggggaatcgatcatggcgaacaagaagcctaacttaggtattgagaagaatgtgatttcacaacctgcaagtttagaactgagctcttttgattcggcttcttctctggctcatggagataatttctcaaataaaaagagtataactcatccaatttctcatagtgaagacgtttcaatccctccacctcctccaatggagttcattgatggatcttctggttcagaagtggacgcaatggatatcaagaataaatttcaacttctttacgactacaatgtattgcttagggaaaaacttttagagactcagtctttgcttaatactttggcacccaaaccaatagcatcatcatcttcaaccgtggaacgcagtgcctagaacaacgaggttgtttgacatgtattgtttgtatactccctgtaacttccacatttattgaacaaaggaatgactaatgcttgttgtt

SEQ ID NO: 50030 - protein, 636 aa, Arabidopsis thaliana
  peptide (1)..(636): Ceres Seq. ID no. 13588107
SLSLSLSLSLSLRLLRLRFFISKLSLCVMACPRNSITYNATRCACGIGQLLNRSSGSCEIFGWPSTISTDKDVNYSVISFAETLFAFDRIRKFTQSQAIFLEATLVMLLSWLVFCFFLRFTKLGDGRNVWFNLRWWITRLDVFFSTRHWLDDQQIVKKRKTELGGTFSVASWIVFIGLFAALLYQIITKRTIEVHNVRATGSPDLISFENDLEFNITAVSDMSCSNLRGIGNVVMGNPGFSEFKVAALSSLGSYTCKNTTSGPTVNFKCTKCRLTNDYIYISWHFVDLPDSPAAAVGFQFNFTSKNGPNEKHMSFVSGTLRNGSILDESPVTFRGTEGNILKFNLFPRIYHHLHDLKLIQPLFHEFIPGSVYRDTTQLQASMGRSTDGILNTTLFINYLSAYIVEIDHENILGPVSFLADLGGLYCISIGIFFYLLVQCEYRIKKLRNEDTVFRKIRNRRKALDHWDKLRRYVAYTWDCSILVDDAIKTTKVSGMCGLTRPPTSSNSSEHGESIMANKKPNLGIEKNVISQPASLELSSFDSASSLAHGDNFSNKKSITHPISHSEDVSIPPPPPMEFIDGSSGSEVDAMDIKNKFQLLYDYNVLLREKLLETQSLLNTLAPKPIASSSSTVERSA

SEQ ID NO: 50031 - protein, 608 aa, Arabidopsis thaliana
  peptide (1)..(608): Ceres Seq. ID no. 13588108
MACPRNSITYNATRCACGIGQLLNRSSGSCEIFGWPSTISTDKDVNYSVISFAETLFAFDRIRKFTQSQAIFLEATLVMLLSWLVFCFFLRFTKLGDGRNVWFNLRWWITRLDVFFSTRHWLDDQQIVKKRKTELGGTFSVASWIVFIGLFAALLYQIITKRTIEVHNVRATGSPDLISFENDLEFNITAVSDMSCSNLRGIGNVVMGNPGFSEFKVAALSSLGSYTCKNTTSGPTVNFKCTKCRLTNDYIYISWHFVDLPDSPAAAVGFQFNFTSKNGPNEKHMSFVSGTLRNGSILDESPVTFRGTEGNILKFNLFPRIYHHLHDLKLIQPLFHEFIPGSVYRDTTQLQASMGRSTDGILNTTLFINYLSAYIVEIDHENILGPVSFLADLGGLYCISIGIFFYLLVQCEYRIKKLRNEDTVFRKIRNRRKALDHWDKLRRYVAYTWDCSILVDDAIKTTKVSGMCGLTRPPTSSNSSEHGESIMANKKPNLGIEKNVISQPASLELSSFDSASSLAHGDNFSNKKSITHPISHSEDVSIPPPPPMEFIDGSSGSEVDAMDIKNKFQLLYDYNVLLREKLLETQSLLNTLAPKPIASSSSTVERSA

SEQ ID NO: 50032 - protein, 530 aa, Arabidopsis thaliana
  peptide (1)..(530): Ceres Seq. ID no. 13588109
MLLSWLVFCFFLRFTKLGDGRNVWFNLRWWITRLDVFFSTRHWLDDQQIVKKRKTELGGTFSVASWIVFIGLFAALLYQIITKRTIEVHNVRATGSPDLISFENDLEFNITAVSDMSCSNLRGIGNVVMGNPGFSEFKVAALSSLGSYTCKNTTSGPTVNFKCTKCRLTNDYIYISWHFVDLPDSPAAAVGFQFNFTSKNGPNEKHMSFVSGTLRNGSILDESPVTFRGTEGNILKFNLFPRIYHHLHDLKLIQPLFHEFIPGSVYRDTTQLQASMGRSTDGILNTTLFINYLSAYIVEIDHENILGPVSFLADLGGLYCISIGIFFYLLVQCEYRIKKLRNEDTVFRKIRNRRKALDHWDKLRRYVAYTWDCSILVDDAIKTTKVSGMCGLTRPPTSSNSSEHGESIMANKKPNLGIEKNVISQPASLELSSFDSASSLAHGDNFSNKKSITHPISHSEDVSIPPPPPMEFIDGSSGSEVDAMDIKNKFQLLYDYNVLLREKLLETQSLLNTLAPKPIASSSSTVERSA

SEQ ID NO: 50033 - DNA, 1351 bp, Arabidopsis thaliana
  misc_feature (1)..(1351): Ceres Seq. ID no. 12591870
  misc_feature (1)..(1351): Ortholog of  Ceres SEQ ID NO 14304120 as cited in SEQ ID NO 58862
  misc_feature (1)..(1351): Ortholog of  Ceres SEQ ID NO 13595658 as cited in SEQ ID NO 59888
  misc_feature (1)..(1351): Ortholog of  Ceres SEQ ID NO 13661330 as cited in SEQ ID NO 61614
  misc_feature (1)..(1351): Ortholog of  Ceres SEQ ID NO 13596025 as cited in SEQ ID NO 62024
  misc_feature (1)..(1351): Ortholog of  Ceres SEQ ID NO 13662324 as cited in SEQ ID NO 62162
  misc_feature (1)..(1351): Ortholog of  Ceres SEQ ID NO 12625713 as cited in SEQ ID NO 64160
  misc_feature (1)..(1351): Ortholog of  Ceres SEQ ID NO 14303564 as cited in SEQ ID NO 65360
  misc_feature (1)..(1351): Ortholog of  Ceres SEQ ID NO 15170103 as cited in SEQ ID NO 66345
  misc_feature (1)..(1351): Ortholog of  Ceres SEQ ID NO 14313495 as cited in SEQ ID NO 0
ctctcactccaatttctttcattaccatataaatacaacgccttcacatttgcactctttatacatttctctcgagagcagaaacagagtcaccggtaaactcatctccggcgacataaaaacacaaaagttcatatatttagattctggtgactctctgctctaatgggtcaatctcaagtttctctctttcttcttctaattcttgttttcatctatggagtttcctccaccactttcaccatcgttaaccagtgtagctacaccgtctggcctggacttctctccggcgccggaacctctcctttacctacaaccggattctccttaaaccctaccgagacacgagttatcccgatccccgcagcttggtccggtcgtatttggggtcgtactctctgcacacaagacgcaaccaccggaagattcacttgcatcaccggggactgtggttcttccaccgtagaatgctccggatccggtgctgcacctccggctacactcgctgaattcaccttaaacggagctaatggtctcgatttctacgacgtcagtctcgtcgacggttacaacatcccgatgaccatcgtccctcagggtggaggagatgccggaggcgtcgccggaaactgtacgacaaccggctgcgttgcggagctcaacggtccatgtcctgctcagctgaaagtggcgacgacgggagctgaaggagtagcttgcaaaagcgcgtgtgaagcgtttggaacgccggagtactgctgtagcggcgcgtttggaacgccggacacgtgtaagccaagcgagtactcacagtttttcaaaaacgcgtgcccgagagcttatagttacgcttacgacgacggaactagtaccttcacttgtggcggagctgattacgtcatcactttctgtccttctcctaacccaagtgtgaagagtgcaacgaagggagtccaacccgtagctgttagctactctaaggcatctccaaacgcgtcgccaactctttctgccgtgttttcgattggcgttttggctgtcgcgtcttgggtgatgcaacgcgttttgtgattcatgtacggctgcgtttgaagtttttaataacatcaatctcaatcattcgacgagaaagaaaagatcattgaagagaagattttagttagtcgaggagtgatttattctaggtgataatttgtagaagaacaacttattttagattggattagttctagtattactattagtttctacgtaattttttagacaaatgttcagtctttatggtgtctctgtaagatatataacagttttgcttgcacaactaattgattggtaatgcgttttaaaattt

SEQ ID NO: 50034 - protein, 301 aa, Arabidopsis thaliana
  peptide (1)..(301): Ceres Seq. ID no. 12591871
MGQSQVSLFLLLILVFIYGVSSTTFTIVNQCSYTVWPGLLSGAGTSPLPTTGFSLNPTETRVIPIPAAWSGRIWGRTLCTQDATTGRFTCITGDCGSSTVECSGSGAAPPATLAEFTLNGANGLDFYDVSLVDGYNIPMTIVPQGGGDAGGVAGNCTTTGCVAELNGPCPAQLKVATTGAEGVACKSACEAFGTPEYCCSGAFGTPDTCKPSEYSQFFKNACPRAYSYAYDDGTSTFTCGGADYVITFCPSPNPSVKSATKGVQPVAVSYSKASPNASPTLSAVFSIGVLAVASWVMQRVL

SEQ ID NO: 50035 - protein, 163 aa, Arabidopsis thaliana
  peptide (1)..(163): Ceres Seq. ID no. 12591872
MTIVPQGGGDAGGVAGNCTTTGCVAELNGPCPAQLKVATTGAEGVACKSACEAFGTPEYCCSGAFGTPDTCKPSEYSQFFKNACPRAYSYAYDDGTSTFTCGGADYVITFCPSPNPSVKSATKGVQPVAVSYSKASPNASPTLSAVFSIGVLAVASWVMQRVL

SEQ ID NO: 50036 - DNA, 2070 bp, Arabidopsis thaliana; identical to SEQ ID NO: 44648
  misc_feature (1)..(2070): Ceres Seq. ID no. 12455389
  misc_feature (1)..(2070): Ortholog of  Ceres SEQ ID NO 15179739 as cited in SEQ ID NO 62016

SEQ ID NO: 50037 - protein, 525 aa, Arabidopsis thaliana; identical to SEQ ID NO: 44649
  peptide (1)..(525): Ceres Seq. ID no. 12455390

SEQ ID NO: 50038 - protein, 442 aa, Arabidopsis thaliana; identical to SEQ ID NO: 44650
  peptide (1)..(442): Ceres Seq. ID no. 12455391

SEQ ID NO: 50039 - protein, 298 aa, Arabidopsis thaliana; identical to SEQ ID NO: 44651
  peptide (1)..(298): Ceres Seq. ID no. 12455392

SEQ ID NO: 50040 - DNA, 1739 bp, Arabidopsis thaliana
  misc_feature (1)..(1739): Ceres Seq. ID no. 13648393
  misc_feature (1)..(1739): Ortholog of  Ceres SEQ ID NO 15174599 as cited in SEQ ID NO 53646
  misc_feature (1)..(1739): Ortholog of  Ceres SEQ ID NO 15174646 as cited in SEQ ID NO 54499
aggtgactcaataaaatcaagtcttttgtttccttttatccaaaaaaaaaaaaaaagtcttgtgtttctcttaggttggttgagaatcatttcatttcaatggaatccaattgtgttcaatttctcggtaacaagaccattctcatcacaggagctcctggttttcttgccaaggttttggtagagaaaatactaaggttgcaaccaaatgtgaagaagatataccttctgctgagagcttccgacgaaaaatcagccatgcaacgcctacgtagtgaggttatggagatcgacctttttaaagtgttgaggaacaatctaggtgaagacaatttgaatgccttggtgcgggaaaaaattgtgccggttccaggtgatatatcgatcgataatttgggattgaaagacaccgatctcatacaacgtatgtggagggagattgatatcataatcaacatcgcagccacaacaaatttcgatgaaagatatgatattggtcttggcatcaacacatttggagcccctgaatgttctcaacttcgccaaaaagtgtgttaaaggacaattgcttctccatgtctcaaccgcgtatrtaagcggtgaacaacctggattgttactagagaaacccattcaagatgggggagactctcagcggggatcgggaactagacatcaatatagaacatgatctaatgaaacaaaaattgaaagagcttcaagattgttctgatgaagagatctcgcaaacaatgaaagattttggaatggcaagggcaaagcttcatggatggccaaatacatatgtattcaccaaagcaatgggagagatgctaatgggaaaatacagagaaaatttgccacttgttatcatacgtccaacaatgattactagtactattgccgaaccattccccggttggattgaagggttgaaaacattagacagtgtgattgttgcatatggtaaaggaaggcttaaatgttttcttgcggattcaaactcagtctttgaccttataccggcagacatggtagtaaatgcgatggttgcagccgcgacagctcattcgggagacaccgggattcaggcaatatatcatgttggttcgtcttgtaagaatccagtcacgtttggacaacttcacgatttcacggctcgttacttcgctaaacgtcctttgattggtcggaatggctcgccaatcatagtggtcaaaggaaccattctgtccactatggctcaattcagcctctacatgacccttcgttacaagcttcctctacagatacttcgattgatcaatatagtttatccatggagtcacggagataactacagtgacctaagccgcaaaatcaagctagctatgcgactagttgagctttaccagccttacttactcttcaagggcatatttgatgatttaaataccgaaagactgcgaatgaaaagaaaggagaatatcaaagagttagatggatcgttcgagttcgatcccaagtccattgattgggacaattatatcacaaacacccacattcctggcctcatcacccatgtgcttaaacaataaattatgctggtaatatgtttggaactattgtgaatctcgtgtgtaatattattaaagaatacgattatatcattctaatcttgtaatttacagtttgtgttggcgtgtaatatcaaaataaataaaaaaaacttattccacaatggataagactttgaatcg

SEQ ID NO: 50041 - protein, 312 aa, Arabidopsis thaliana
  peptide (1)..(312): Ceres Seq. ID no. 15219550
MGETLSGDRELDINIEHDLMKQKLKELQDCSDEEISQTMKDFGMARAKLHGWPNTYVFTKAMGEMLMGKYRENLPLVIIRPTMITSTIAEPFPGWIEGLKTLDSVIVAYGKGRLKCFLADSNSVFDLIPADMVVNAMVAAATAHSGDTGIQAIYHVGSSCKNPVTFGQLHDFTARYFAKRPLIGRNGSPIIVVKGTILSTMAQFSLYMTLRYKLPLQILRLINIVYPWSHGDNYSDLSRKIKLAMRLVELYQPYLLFKGIFDDLNTERLRMKRKENIKELDGSFEFDPKSIDWDNYITNTHIPGLITHVLKQ

SEQ ID NO: 50042 - protein, 293 aa, Arabidopsis thaliana
  peptide (1)..(293): Ceres Seq. ID no. 15219551
MKQKLKELQDCSDEEISQTMKDFGMARAKLHGWPNTYVFTKAMGEMLMGKYRENLPLVIIRPTMITSTIAEPFPGWIEGLKTLDSVIVAYGKGRLKCFLADSNSVFDLIPADMVVNAMVAAATAHSGDTGIQAIYHVGSSCKNPVTFGQLHDFTARYFAKRPLIGRNGSPIIVVKGTILSTMAQFSLYMTLRYKLPLQILRLINIVYPWSHGDNYSDLSRKIKLAMRLVELYQPYLLFKGIFDDLNTERLRMKRKENIKELDGSFEFDPKSIDWDNYITNTHIPGLITHVLKQ

SEQ ID NO: 50043 - protein, 274 aa, Arabidopsis thaliana
  peptide (1)..(274): Ceres Seq. ID no. 15219552
MKDFGMARAKLHGWPNTYVFTKAMGEMLMGKYRENLPLVIIRPTMITSTIAEPFPGWIEGLKTLDSVIVAYGKGRLKCFLADSNSVFDLIPADMVVNAMVAAATAHSGDTGIQAIYHVGSSCKNPVTFGQLHDFTARYFAKRPLIGRNGSPIIVVKGTILSTMAQFSLYMTLRYKLPLQILRLINIVYPWSHGDNYSDLSRKIKLAMRLVELYQPYLLFKGIFDDLNTERLRMKRKENIKELDGSFEFDPKSIDWDNYITNTHIPGLITHVLKQ

SEQ ID NO: 50044 - DNA, 1835 bp, Arabidopsis thaliana; identical to SEQ ID NO: 40183
  misc_feature (1)..(1835): Ceres Seq. ID no. 13487232
  misc_feature (1)..(1835): Ortholog of  Ceres SEQ ID NO 13599900 as cited in SEQ ID NO 531
  misc_feature (1)..(1835): Ortholog of  Ceres SEQ ID NO 15171402 as cited in SEQ ID NO 51174
  misc_feature (1)..(1835): Ortholog of  Ceres SEQ ID NO 13659971 as cited in SEQ ID NO 67565
  misc_feature (1)..(1835): Ortholog of  Ceres SEQ ID NO 13500385 as cited in SEQ ID NO 67583

SEQ ID NO: 50045 - protein, 435 aa, Arabidopsis thaliana; identical to SEQ ID NO: 40184
  peptide (1)..(435): Ceres Seq. ID no. 13487233

SEQ ID NO: 50046 - protein, 362 aa, Arabidopsis thaliana; identical to SEQ ID NO: 40185
  peptide (1)..(362): Ceres Seq. ID no. 13487234

SEQ ID NO: 50047 - protein, 347 aa, Arabidopsis thaliana; identical to SEQ ID NO: 40186
  peptide (1)..(347): Ceres Seq. ID no. 13487235

SEQ ID NO: 50048 - DNA, 957 bp, Arabidopsis thaliana
  misc_feature (1)..(957): Ceres Seq. ID no. 13575346
  misc_feature (1)..(957): Ortholog of  Ceres SEQ ID NO 13599131 as cited in SEQ ID NO 0
atgactttcctcttatcaagaacatttatttctctcactctcagaccttcttgttcgatttccatggcgaatttaacgacgaacgctaaaactcgcctgagaggtgttgtattcgatatggacggaaccctgactgttccggtcatcgatttcgccgcaatgtatagagctgttcttggtgaagatgcttacaagcgaatcaaagcagagagccctagtgggattgatattctgcatcatattgagtcgtggagtcctgataaacagcagaaggcgtatgaaatcattgctgattatgagaaacaaggaatagataagcttcaaatcatgcctggtactgctgaactatgtggcttccttgattccaaaaagataaagagggggctaattacacgcaatgttcaaaaggcaatcgacatcttccatcaacgttttgaggttatcttttctccagcactaggcagagagtttcgtccatataaaccaaacccagacccgctgttgcatatatgttctacatgggacatccaacctaatgaagtcatgatggttggtgacagcttaaaagatgatatagcatgtgggaaacgagctggagccttcacttgcttgctagatgaaaccggaaggtatggaccagacgatttttctgtttccggtctgcaacctgattttaaggttgattccttgtccaaaatccagaacctattggagacgaacttcgacctgaacccgtagtttttccaagttcctcatcttgtagtttcagtgaccaaattagtgtcctactcaacacagtatctgttcaggatagccataaatgtcaaaccacggaattctatgcactggctatctttaagttgcacaattgtgtccctgcatggtcgtctagcgaacatgtgtgtgagggcaaacattgttgtttgttaaatccaaaatttcaagatttttaatatc

SEQ ID NO: 50049 - protein, 245 aa, Arabidopsis thaliana
  peptide (1)..(245): Ceres Seq. ID no. 13575347
MTFLLSRTFISLTLRPSCSISMANLTTNAKTRLRGVVFDMDGTLTVPVIDFAAMYRAVLGEDAYKRIKAESPSGIDILHHIESWSPDKQQKAYEIIADYEKQGIDKLQIMPGTAELCGFLDSKKIKRGLITRNVQKAIDIFHQRFEVIFSPALGREFRPYKPNPDPLLHICSTWDIQPNEVMMVGDSLKDDIACGKRAGAFTCLLDETGRYGPDDFSVSGLQPDFKVDSLSKIQNLLETNFDLNP

SEQ ID NO: 50050 - protein, 224 aa, Arabidopsis thaliana
  peptide (1)..(224): Ceres Seq. ID no. 13575348
MANLTTNAKTRLRGVVFDMDGTLTVPVIDFAAMYRAVLGEDAYKRIKAESPSGIDILHHIESWSPDKQQKAYEIIADYEKQGIDKLQIMPGTAELCGFLDSKKIKRGLITRNVQKAIDIFHQRFEVIFSPALGREFRPYKPNPDPLLHICSTWDIQPNEVMMVGDSLKDDIACGKRAGAFTCLLDETGRYGPDDFSVSGLQPDFKVDSLSKIQNLLETNFDLNP

SEQ ID NO: 50051 - protein, 206 aa, Arabidopsis thaliana
  peptide (1)..(206): Ceres Seq. ID no. 13575349
MDGTLTVPVIDFAAMYRAVLGEDAYKRIKAESPSGIDILHHIESWSPDKQQKAYEIIADYEKQGIDKLQIMPGTAELCGFLDSKKIKRGLITRNVQKAIDIFHQRFEVIFSPALGREFRPYKPNPDPLLHICSTWDIQPNEVMMVGDSLKDDIACGKRAGAFTCLLDETGRYGPDDFSVSGLQPDFKVDSLSKIQNLLETNFDLNP

SEQ ID NO: 50052 - DNA, 1516 bp, Arabidopsis thaliana
  misc_feature (1)..(1516): Ceres Seq. ID no. 13592681
  misc_feature (1)..(1516): Ortholog of  Ceres SEQ ID NO 13594345 as cited in SEQ ID NO 58043
  misc_feature (1)..(1516): Ortholog of  Ceres SEQ ID NO 13597678 as cited in SEQ ID NO 65375
  misc_feature (1)..(1516): Ortholog of  Ceres SEQ ID NO 13662880 as cited in SEQ ID NO 65422
  misc_feature (1)..(1516): Ortholog of  Ceres SEQ ID NO 12779098 as cited in SEQ ID NO 67698
  misc_feature (1)..(1516): Ortholog of  Ceres SEQ ID NO 13596180 as cited in SEQ ID NO 67941
  misc_feature (1)..(1516): Ortholog of  Ceres SEQ ID NO 13591190 as cited in SEQ ID NO 68044
  misc_feature (1)..(1516): Ortholog of  Ceres SEQ ID NO 13595961 as cited in SEQ ID NO 68223
  misc_feature (1)..(1516): Ortholog of  Ceres SEQ ID NO 13596089 as cited in SEQ ID NO 68373
actactctcttcttcacctcctcaagtcacagtgaccaaaatcacacacttcacaagaaacaacctatggatccaaatgaatctccaccaaaccaatttcgccacgtggtggccatgccttatccaggtcgaggacacatcaaccctatgatgaacctctgcaaacgccttgtccgtcgataccctaaccttcacgtcaccttcgtcgtcacagaagaatggctcgggtttattggacccgacccgaaacccgaccggatccatttctccactctccctaatctcatcccttccgagcttgtcagggccaaagacttcataggcttcattgatgccgtctacacaagattggaagaaccattcgagaagcttcttgacagcctcaattcaccacctccgagtgtaatattcgccgacacttacgtcatttgggctgtgcgagtcggcagaaaaaggaatattccggtggtttctctctggaccatgtcagccacgattctctccttcttcctccactctgatctactcataagtcatggccatgctctgttcgaaccatcagaagaagaggttgttgattacgtccccggtttatctccgacgaaactccgagatttgccgccgatatttgacggttacagcgaccgagtcttcaagacagctaagttgtgtttcgatgaactaccaggagctaggtctttactcttcaccaccgcctatgagcttgaacacaaagctattgacgctttcacctccaagctcgatatcccggtctacgctattggtcctttaataccttttgaagaactttctgttcaaaatgataacaaggaacctaattacatccagtggcttgaggaacaaccggaaggctctgttctttacatatctcagggaagttttctttcggtctcggaagctcagatggaggaaatagtgaaaggactgagagaaagtggagtccggtttctttgggtggctcgtgggggcgagttaaagcttaaggaggctcttgaaggtagcttaggtgtagtggtgagctggtgtgatcagcttcgggtgctgtgtcacaaagctgtaggcgggttttggactcattgcgggtttaactcgacattggaagggatatattcaggagtaccaatgctagcgtttccgttgttttgggatcagattctgaacgctaagatgattgttgaggactggagagtcggaatgaggatcgagaggacgaaaaagaatgagttgttgatagggagagaggagatcaaggaagtagtgaagaggtttatggatagagagagtgaagaagggaaagagatgagaagaagggcttgtgaccttagtgaaatcagtcgaggagctgttgcgaaaagcggttcgtctaatgtaaacatcgatgagttcgttcggcatattaccaatacaaattaaggctcaaagaggttttattgtttcaatacaatgtaaggctcaatggcatgctcactaaatcatatgtatcttttgaatgact

SEQ ID NO: 50053 - protein, 477 aa, Arabidopsis thaliana
  peptide (1)..(477): Ceres Seq. ID no. 15221125
TTLFFTSSSHSDQNHTLHKKQPMDPNESPPNQFRHVVAMPYPGRGHINPMMNLCKRLVRRYPNLHVTFVVTEEWLGFIGPDPKPDRIHFSTLPNLIPSELVRAKDFIGFIDAVYTRLEEPFEKLLDSLNSPPPSVIFADTYVIWAVRVGRKRNIPVVSLWTMSATILSFFLHSDLLISHGHALFEPSEEEVVDYVPGLSPTKLRDLPPIFDGYSDRVFKTAKLCFDELPGARSLLFTTAYELEHKAIDAFTSKLDIPVYAIGPLIPFEELSVQNDNKEPNYIQWLEEQPEGSVLYISQGSFLSVSEAQMEEIVKGLRESGVRFLWVARGGELKLKEALEGSLGVVVSWCDQLRVLCHKAVGGFWTHCGFNSTLEGIYSGVPMLAFPLFWDQILNAKMIVEDWRVGMRIERTKKNELLIGREEIKEVVKRFMDRESEEGKEMRRRACDLSEISRGAVAKSGSSNVNIDEFVRHITNTN

SEQ ID NO: 50054 - protein, 455 aa, Arabidopsis thaliana
  peptide (1)..(455): Ceres Seq. ID no. 15221126
MDPNESPPNQFRHVVAMPYPGRGHINPMMNLCKRLVRRYPNLHVTFVVTEEWLGFIGPDPKPDRIHFSTLPNLIPSELVRAKDFIGFIDAVYTRLEEPFEKLLDSLNSPPPSVIFADTYVIWAVRVGRKRNIPVVSLWTMSATILSFFLHSDLLISHGHALFEPSEEEVVDYVPGLSPTKLRDLPPIFDGYSDRVFKTAKLCFDELPGARSLLFTTAYELEHKAIDAFTSKLDIPVYAIGPLIPFEELSVQNDNKEPNYIQWLEEQPEGSVLYISQGSFLSVSEAQMEEIVKGLRESGVRFLWVARGGELKLKEALEGSLGVVVSWCDQLRVLCHKAVGGFWTHCGFNSTLEGIYSGVPMLAFPLFWDQILNAKMIVEDWRVGMRIERTKKNELLIGREEIKEVVKRFMDRESEEGKEMRRRACDLSEISRGAVAKSGSSNVNIDEFVRHITNTN

SEQ ID NO: 50055 - protein, 439 aa, Arabidopsis thaliana
  peptide (1)..(439): Ceres Seq. ID no. 15221127
MPYPGRGHINPMMNLCKRLVRRYPNLHVTFVVTEEWLGFIGPDPKPDRIHFSTLPNLIPSELVRAKDFIGFIDAVYTRLEEPFEKLLDSLNSPPPSVIFADTYVIWAVRVGRKRNIPVVSLWTMSATILSFFLHSDLLISHGHALFEPSEEEVVDYVPGLSPTKLRDLPPIFDGYSDRVFKTAKLCFDELPGARSLLFTTAYELEHKAIDAFTSKLDIPVYAIGPLIPFEELSVQNDNKEPNYIQWLEEQPEGSVLYISQGSFLSVSEAQMEEIVKGLRESGVRFLWVARGGELKLKEALEGSLGVVVSWCDQLRVLCHKAVGGFWTHCGFNSTLEGIYSGVPMLAFPLFWDQILNAKMIVEDWRVGMRIERTKKNELLIGREEIKEVVKRFMDRESEEGKEMRRRACDLSEISRGAVAKSGSSNVNIDEFVRHITNTN

SEQ ID NO: 50056 - DNA, 915 bp, Arabidopsis thaliana
  misc_feature (1)..(915): Ceres Seq. ID no. 13648346
  misc_feature (1)..(915): Ortholog of  Ceres SEQ ID NO 12610954 as cited in SEQ ID NO 55930
  misc_feature (1)..(915): Ortholog of  Ceres SEQ ID NO 12625335 as cited in SEQ ID NO 63326
  misc_feature (1)..(915): Ortholog of  Ceres SEQ ID NO 12566590 as cited in SEQ ID NO 0
gaaaacctcaagtcacacactcttcacctaaacagcatcaatggcgacttctctctccgtttctagattcatgtcctcctccgccaccgttatctccgtcgctaagccgttactttcccccaccgtatccttcaccgcgccgctctccttcacacgctctctcgctcctaatctctctctcaaattccgcaaccgccgcaccaattccgcctccgccaccaccagatccttcgctacgacacccgtcaccgcctccatttccgtcggagacaagctcccagactccactctctcctacctcgatccatccaccggagacgtcaaaacagtaaccgtctcatccctaaccgccgggaagaaaacaatcctattcgccgttcccggcgcattcacaccaacatgctcacaaaaacacgtccctggattcgtatccaaagccggagaactcagatctaaaggcatcgatgtaatcgcatgtatctccgtcaacgacgcgttcgtgatggaagcgtggaggaaagatcttggaattaacgatgaggtaatgttgctatccgatggaaatggcgaattcacagggaagcttggtgttgaattggatttgagggataagcctgtgggacttggagttaggtcaaggagatatgcgattttggctgatgatggtgttgtgaaagttctgaatcttgaagaaggaggtgcttttactaatagtagtgctgaggatatgcttaaagctctctgattcttatgattttctcatcaatttcgtcttcttctctgttttgaattttctttactctgttttgtgttgctgtttctttaaatctacgaatcattatcggatttgtaatggaataatgaagttagaggttctgttgtttgtgaacattttagaaaagcgttgtgtttagt

SEQ ID NO: 50057 - protein, 234 aa, Arabidopsis thaliana
  peptide (1)..(234): Ceres Seq. ID no. 13648347
MATSLSVSRFMSSSATVISVAKPLLSPTVSFTAPLSFTRSLAPNLSLKFRNRRTNSASATTRSFATTPVTASISVGDKLPDSTLSYLDPSTGDVKTVTVSSLTAGKKTILFAVPGAFTPTCSQKHVPGFVSKAGELRSKGIDVIACISVNDAFVMEAWRKDLGINDEVMLLSDGNGEFTGKLGVELDLRDKPVGLGVRSRRYAILADDGVVKVLNLEEGGAFTNSSAEDMLKAL

SEQ ID NO: 50058 - protein, 224 aa, Arabidopsis thaliana
  peptide (1)..(224): Ceres Seq. ID no. 13648348
MSSSATVISVAKPLLSPTVSFTAPLSFTRSLAPNLSLKFRNRRTNSASATTRSFATTPVTASISVGDKLPDSTLSYLDPSTGDVKTVTVSSLTAGKKTILFAVPGAFTPTCSQKHVPGFVSKAGELRSKGIDVIACISVNDAFVMEAWRKDLGINDEVMLLSDGNGEFTGKLGVELDLRDKPVGLGVRSRRYAILADDGVVKVLNLEEGGAFTNSSAEDMLKAL

SEQ ID NO: 50059 - DNA, 1784 bp, Arabidopsis thaliana
  misc_feature (1)..(1784): Ceres Seq. ID no. 13646633
  misc_feature (1)..(1784): Ortholog of  Ceres SEQ ID NO 15179007 as cited in SEQ ID NO 1038
  misc_feature (1)..(1784): Ortholog of  Ceres SEQ ID NO 13597146 as cited in SEQ ID NO 63311
gaaacgatcattttctaggaaaacgaacgaacagaggacaaatatattagataaacagagggaaacaagaacaaaaacgtttgcttcattctctaatggcagccaccacgagacggttgctttactctgtgtccaaaagattctctaccgccggagtgcggcggagctatggcggtctgccacaatcgaattccaaatctcctccgtcttcttctcaacgattgatggaattggaatctgaattcagtgcccacaattaccatcctgttccggttgtgttttctcgcgcgaatggctcaactatatgggaccctgaaggaaagagatacattgattttcttgcagcttactctgcagttaatcagggacattgtcatcctaagatcatgaaggcattgcaggaacaagtggagaagctcactttaagttcacgagcgttttacaacgataaattcccggtatttgctgagcgtctcacaaacatgttcggttatgatatggtgcttcctatgaacacgggtgctgaaggtgtcgaaactgctttgaaactagcaagaaaatggggtcatgaaaagaaaaatattcccaaagacgaggctatcattgtctcttgttgtggctgctttcatggacgtacattagcaattgtttccatgagttgtgacaatgatgctactcgtggattcgggccattgttgccagggaatcttaaagttgattttggtgatgcggattcacttgagaaaatctttaaagaaaagggagatagaatagcgggatttctattcgagcctattcaaggcgaagctggagttattattcctcccgacggttacttgaaagctgttagagaactctgcacaaaatacaatgttttgatgatagcggatgaagtacaaagcggtctggctagatccgggaagatgctagcttgtgattgggaagaaattcgtcctgacatggtgatacttgggaaagcattaggtggaggagtaattccagtaagtgcagtgcttgctgataaagacgtgatgcttcatataaaacctggtcaacacggaagcacatttggtggtaaccctttagctagtgctgtagctatggcttctttagacgttatcgtggaagaaaaactcgttgaaagatcagcaagtcttggagaggaactgaggattcaattgaatgaaatcaagaaacagtttccgaagtacataaaggaagtacgaggaagaggcttgtttaatgcgattgagttcaatagcgaaagcttgtccccggtttcagcttacgatatttgcttgagcttgaaggagagaggagtcttggctaaacctactcacaacactattgtccggttaactccaccactctctataagctctgatgaactccgagatggatctgaggctcttcacgatgtactcgagctcgatcttccaaatctgctgaaaatcaattccggtaaaactccggtttctcatataaccgagtgtgatcgctgtggaagaaacctctatgcttgaaccggtttgaaacttgattaggttctggtataattagattctttgtatcttgtgatttccataggacacagcaccggtttggtataagaaatatattaaagtataaggccgaaccggattgtaccgagcttggtagaaataactctggtttatttctggtttggcattaaataaaaccaacataaaataatatgatgcctgttttcataggtgttatacatgatatctcaacaaacaaataaatgttacataacaatatgt

SEQ ID NO: 50060 - protein, 475 aa, Arabidopsis thaliana
  peptide (1)..(475): Ceres Seq. ID no. 13646634
MAATTRRLLYSVSKRFSTAGVRRSYGGLPQSNSKSPPSSSQRLMELESEFSAHNYHPVPVVFSRANGSTIWDPEGKRYIDFLAAYSAVNQGHCHPKIMKALQEQVEKLTLSSRAFYNDKFPVFAERLTNMFGYDMVLPMNTGAEGVETALKLARKWGHEKKNIPKDEAIIVSCCGCFHGRTLAIVSMSCDNDATRGFGPLLPGNLKVDFGDADSLEKIFKEKGDRIAGFLFEPIQGEAGVIIPPDGYLKAVRELCTKYNVLMIADEVQSGLARSGKMLACDWEEIRPDMVILGKALGGGVIPVSAVLADKDVMLHIKPGQHGSTFGGNPLASAVAMASLDVIVEEKLVERSASLGEELRIQLNEIKKQFPKYIKEVRGRGLFNAIEFNSESLSPVSAYDICLSLKERGVLAKPTHNTIVRLTPPLSISSDELRDGSEALHDVLELDLPNLLKINSGKTPVSHITECDRCGRNLYA

SEQ ID NO: 50061 - protein, 432 aa, Arabidopsis thaliana
  peptide (1)..(432): Ceres Seq. ID no. 13646635
MELESEFSAHNYHPVPVVFSRANGSTIWDPEGKRYIDFLAAYSAVNQGHCHPKIMKALQEQVEKLTLSSRAFYNDKFPVFAERLTNMFGYDMVLPMNTGAEGVETALKLARKWGHEKKNIPKDEAIIVSCCGCFHGRTLAIVSMSCDNDATRGFGPLLPGNLKVDFGDADSLEKIFKEKGDRIAGFLFEPIQGEAGVIIPPDGYLKAVRELCTKYNVLMIADEVQSGLARSGKMLACDWEEIRPDMVILGKALGGGVIPVSAVLADKDVMLHIKPGQHGSTFGGNPLASAVAMASLDVIVEEKLVERSASLGEELRIQLNEIKKQFPKYIKEVRGRGLFNAIEFNSESLSPVSAYDICLSLKERGVLAKPTHNTIVRLTPPLSISSDELRDGSEALHDVLELDLPNLLKINSGKTPVSHITECDRCGRNLYA

SEQ ID NO: 50062 - protein, 378 aa, Arabidopsis thaliana
  peptide (1)..(378): Ceres Seq. ID no. 13646636
MKALQEQVEKLTLSSRAFYNDKFPVFAERLTNMFGYDMVLPMNTGAEGVETALKLARKWGHEKKNIPKDEAIIVSCCGCFHGRTLAIVSMSCDNDATRGFGPLLPGNLKVDFGDADSLEKIFKEKGDRIAGFLFEPIQGEAGVIIPPDGYLKAVRELCTKYNVLMIADEVQSGLARSGKMLACDWEEIRPDMVILGKALGGGVIPVSAVLADKDVMLHIKPGQHGSTFGGNPLASAVAMASLDVIVEEKLVERSASLGEELRIQLNEIKKQFPKYIKEVRGRGLFNAIEFNSESLSPVSAYDICLSLKERGVLAKPTHNTIVRLTPPLSISSDELRDGSEALHDVLELDLPNLLKINSGKTPVSHITECDRCGRNLYA

SEQ ID NO: 50063 - DNA, 1653 bp, Arabidopsis thaliana
  misc_feature (1)..(1653): Ceres Seq. ID no. 13588110
  misc_feature (1)..(1653): Ortholog of  Ceres SEQ ID NO 13502943 as cited in SEQ ID NO 65097
cagcttgcaagttctctctgaaccatagaactccaagcttgaactgtactctactcgtcgtttatatcttactcttttgtttcctcttaccagaaaaaataaataaacagcaattttttcatttttcgactcaaatcatgcaaaccatttcgcctgcgttctcgtgcgatctcaaatccgtaattcaaccgaatctaacggctaagaaagcgcgttactctcacgtaaatggaaagcgcgtgtctgttcgttgcagttacaggtctgagtcgtttagcttccctaacggtgttggctcaagccgagccgattggcaaagctcatgcgccatcttagccagtaaagtagtttcggctgagaattcaagctccgtcgccgtcgttaacggacacagtaacggctccgttgatttaagccttgttccgtcaaagtcgcagcacaacggaaagcctggattgattcagccgttaacgataacagatctatctcccgcgccgtctcatggatctactcttcgtgtcgcgtatcaaggagttccgggagcgtactccgaagcggccgccggaaaagcttacccaaactccgaagctattccttgtgatcaattcgacgttgcgtttcaggcggtggagctttggatcgccgatcgtgctgttctcccagttgagaactctctcggtggttcgattcatagaaattacgatcttctcctccgtcaccgtctccacatcgtcggagaagttcagatcccggttcaccactgtctcttagctcttcccggagttcgtacggattgcatcacgcgagtgatttcgcatcctcaagctctggctcagacggaaggatcgctcaacaaactcactccaaaagcagcgattgaagcgtttcacgacacagccgcggcggcggaatacatcgctgctaacaacctccacgacacggcggcggtagcgagcgcaagagcagctgagctctacggacttcagattctcgccgacgggatccaagacgacgcaggaaacgtcacgcgcttccttatgttggcgcgtgatccgatcattccccgtaccgatcgtccgtttaaaacgagtatcgttttcgcagctcaagaacataaaggaactagcgttttattcaaagtgctttccgcgtttgcgtttcgaaacattagtttgacgaaaatcgaatcgcggccgcatcagaattgtcccgttagagtcgtaggcgacgaaaacgttggaacatcgaagcactttgagtacacattctacgtcgacttcgaagcgtcgatggcggaggcgcgtgcacaaaacgcgttagcggaggtgcaagagtacacgtcattcctcagggtgctgggaagttacccaatggatatgacgccatggtccacgttacctagcgaagacgtatgacacaattaaaaaatttatctgaattttaaataacattatggtaaaattatcataagtaaaatacatggaaactaaagtagaatttgtagaactcgttttgcatgtgaagtgggaggataatattattttatttctcttaaaccaaatattttgtgtgtatgtatttgctactattggaacaagaccggtttgtagtttggttctgatgattacaattgaagatatttcttaagctaag

SEQ ID NO: 50064 - protein, 470 aa, Arabidopsis thaliana
  peptide (1)..(470): Ceres Seq. ID no. 15220851
ACKFSLNHRTPSLNCTLLVVYILLFCFLLPEKINKQQFFHFSTQIMQTISPAFSCDLKSVIQPNLTAKKARYSHVNGKRVSVRCSYRSESFSFPNGVGSSRADWQSSCAILASKVVSAENSSSVAVVNGHSNGSVDLSLVPSKSQHNGKPGLIQPLTITDLSPAPSHGSTLRVAYQGVPGAYSEAAAGKAYPNSEAIPCDQFDVAFQAVELWIADRAVLPVENSLGGSIHRNYDLLLRHRLHIVGEVQIPVHHCLLALPGVRTDCITRVISHPQALAQTEGSLNKLTPKAAIEAFHDTAAAAEYIAANNLHDTAAVASARAAELYGLQILADGIQDDAGNVTRFLMLARDPIIPRTDRPFKTSIVFAAQEHKGTSVLFKVLSAFAFRNISLTKIESRPHQNCPVRVVGDENVGTSKHFEYTFYVDFEASMAEARAQNALAEVQEYTSFLRVLGSYPMDMTPWSTLPSEDV

SEQ ID NO: 50065 - protein, 425 aa, Arabidopsis thaliana
  peptide (1)..(425): Ceres Seq. ID no. 15220852
MQTISPAFSCDLKSVIQPNLTAKKARYSHVNGKRVSVRCSYRSESFSFPNGVGSSRADWQSSCAILASKVVSAENSSSVAVVNGHSNGSVDLSLVPSKSQHNGKPGLIQPLTITDLSPAPSHGSTLRVAYQGVPGAYSEAAAGKAYPNSEAIPCDQFDVAFQAVELWIADRAVLPVENSLGGSIHRNYDLLLRHRLHIVGEVQIPVHHCLLALPGVRTDCITRVISHPQALAQTEGSLNKLTPKAAIEAFHDTAAAAEYIAANNLHDTAAVASARAAELYGLQILADGIQDDAGNVTRFLMLARDPIIPRTDRPFKTSIVFAAQEHKGTSVLFKVLSAFAFRNISLTKIESRPHQNCPVRVVGDENVGTSKHFEYTFYVDFEASMAEARAQNALAEVQEYTSFLRVLGSYPMDMTPWSTLPSEDV

SEQ ID NO: 50066 - DNA, 855 bp, Arabidopsis thaliana; identical to SEQ ID NO: 38540
  misc_feature (1)..(855): Ceres Seq. ID no. 13592318
  misc_feature (1)..(855): Ortholog of  Ceres SEQ ID NO 15170444 as cited in SEQ ID NO 52873
  misc_feature (1)..(855): Ortholog of  Ceres SEQ ID NO 13595847 as cited in SEQ ID NO 55845
  misc_feature (1)..(855): Ortholog of  Ceres SEQ ID NO 14314070 as cited in SEQ ID NO 56946
  misc_feature (1)..(855): Ortholog of  Ceres SEQ ID NO 12635868 as cited in SEQ ID NO 0

SEQ ID NO: 50067 - protein, 187 aa, Arabidopsis thaliana; identical to SEQ ID NO: 38541
  peptide (1)..(187): Ceres Seq. ID no. 13592319

SEQ ID NO: 50068 - protein, 160 aa, Arabidopsis thaliana; identical to SEQ ID NO: 38542
  peptide (1)..(160): Ceres Seq. ID no. 13592320

SEQ ID NO: 50069 - DNA, 1840 bp, Arabidopsis thaliana
  misc_feature (1)..(1840): Ceres Seq. ID no. 14302931
  misc_feature (1)..(1840): Ortholog of  Ceres SEQ ID NO 13599324 as cited in SEQ ID NO 0
ccccccccccccgaacaactaaactaattgacatttgacaataaaaagctgaactttattatgtatctctaggttttttccttgagagtttctctctttgaagtcatttacgtatatatatataaacccttgcaccattcttcttcgtcttgttaagcttttaagaatctctactcacattttctctgtaaaaatgggaactaggttccaatcattcttgctcgtgttcttgctttcatgtttaatcctcatatcaactgcctcgtgtgagcgaaatggtgatggaacgattagaattggattgaagaagaggaaactagaccggagcaacaggctagcttctcagctttttttgaaaaaccgagggtctcattggtctcccaaacactattttcgcctgaacgatgaaaatgcggatatggttccgctgaaaaactatttggatgctcaatactatggtgacattaccattggtactcctcctcagaagttcactgtgatctttgatactggtagctccaatctctggataccatctactaaatgttacctatcggttgcttgttatttccactccaagtacaaggctagccagtcatcgtcatatagaaagaacggaaaacccgcgtctatccgctatgggacgggtgctatttctggttactttagcaatgatgatgttaaagttggtgatattgttgtgaaagagcaggaattcatagaggctactagtgagcctggtataacattcttgctagcaaagtttgatggtatcctcggtttgggtttcaaagagatttctgtaggaaactcaactccggtttggtataacatggtagaaaaaggtttagttaaggaaccgattttttcgttctggcttaaccgtaacccgaaagatccagaaggcggtgagattgttttcggtggagtcgacccgaagcacttcaaaggagagcatacttttgttcctgtgacacataaaggttactggcagtttgacatgggtgatctccaaattgctggcaaaccaaccggatattgtgctaaaggttgttctgctattgctgattccggaacttctctgctcaccggtccatcgactgtcatcacgatgatcaatcacgcgataggagcacaaggaattgtaagccgtgaatgcaaggccgtggtggatcaatacggaaaaaccatgttgaattctcttctagctcaggaggatccgaagaaagtatgctcacaaattggagtctgcgcttatgatggtacacagagtgtgagtatggggatccagtcagttgtagacgatggaacatcgggtcttttaaaccaagcgatgtgcagtgcttgcgaaatggcagccgtgtggatggagagcgaattgactcagaatcaaacacaagaacgcatactcgcttatgctgctgagctatgtgaccatataccaacccaaaaccaacaatcagcagtggactgtgggagggtttcgtcgatgcctatagtcacattctcaattggtggcagaagctttgatctaactcctcaagactatatattcaagatcggggaaggagttgagtctcagtgcaccagcggtttcacggcaatggatattgctccgcctcgtggacctctctggatcttgggtgatatcttcatgggaccataccacacagtgttcgattatgggaaaggaagagttggattcgccaaagctgcttaaacaatatctcttctttaataccctcgttttttatatgatgtttgtcaatgtgtttgtaataacttaaaacatattgctatcctagaatggtatcatcttaatacagatttttatttggtt

SEQ ID NO: 50070 - protein, 508 aa, Arabidopsis thaliana; identical to SEQ ID NO: 37267
  peptide (1)..(508): Ceres Seq. ID no. 14302932

SEQ ID NO: 50071 - protein, 433 aa, Arabidopsis thaliana; identical to SEQ ID NO: 37268
  peptide (1)..(433): Ceres Seq. ID no. 14302933

SEQ ID NO: 50072 - protein, 295 aa, Arabidopsis thaliana; identical to SEQ ID NO: 37269
  peptide (1)..(295): Ceres Seq. ID no. 14302934

SEQ ID NO: 50073 - DNA, 1215 bp, Arabidopsis thaliana
  misc_feature (1)..(1215): Ceres Seq. ID no. 12605629
  misc_feature (1)..(1215): Ortholog of  Ceres SEQ ID NO 12609045 as cited in SEQ ID NO 51314
  misc_feature (1)..(1215): Ortholog of  Ceres SEQ ID NO 14316312 as cited in SEQ ID NO 60042
  misc_feature (1)..(1215): Ortholog of  Ceres SEQ ID NO 13598492 as cited in SEQ ID NO 63882
  misc_feature (1)..(1215): Ortholog of  Ceres SEQ ID NO 13657914 as cited in SEQ ID NO 66230
  misc_feature (1)..(1215): Ortholog of  Ceres SEQ ID NO 13595877 as cited in SEQ ID NO 67702
  misc_feature (1)..(1215): Ortholog of  Ceres SEQ ID NO 13654367 as cited in SEQ ID NO 67993
aaactcttaaaaaaagctctctttgtggatcacgaaactatacacaaattcacacataaaatttagaaaatatgggaggcacaaaattgacccatgtgaccaccactaaccctaataactccaacattcatggaccagtcgtagacgaagtagaaggccttattaaagtttacaaagatggccacgtggaacgatcccagctcttgccatgtgttgatccctcactacccctcgagctcggcgtgacttgctccgatgttgttatagacaagttgaccaacgtatgggcacgtctctatgtcccgatgaccacgaccaagtcgtcggtctctaagctccctttgattgtttacttccacggtggaggattctgcgtcggctcggcttcttggttgtgttaccacgagttcttggctagattgtccgctcgctcgcggtgcttggttatgtctgtaaattaccgtctagccccagagaaccctcttccagcagcttacgaagatggggtcaatgccattctttggctcaacaaagcaagaaacgataacttgtgggccaagcaatgtgactttggcagaatattcttggcaggagatagcgctggaggcaacatcgcgcagcaagtcgcggcaagattagcatcccccgaagatctagcactgaagatagaaggaaccatcctgatccaacctttctacagcggagaggagcgtacggagagtgagaggcgcgtggggaacgacaaaacagcggtgctgacactggcgtcgtccgacgcatggtggaggatgtctttgccacgtggtgcaaacagagagcatccttattgtaaacctgtgaagatgatcatcaagtcgtcgacggtgacaaggacgctggtgtgcgtggccgagatggatctgctcatggacagcaacatggagatgtgcgatggtaatgaggacgtgatcaagcgcgtgttgcacaaaggcgttggtcacgcgtttcatattctcggaaagtctcagcttgctcacaccacaactctggagatgttgtgccagatcgacgcttttatccaccactacgatcccttaaattagttctgtattagtatatattatttttcattgtagctcatagtatatgtttgtatcttaagtaccaaaaaggtttttgtgttgtatataatatagttactatactctttagggattcctacaagatgtaagtttt

SEQ ID NO: 50074 - protein, 336 aa, Arabidopsis thaliana
  peptide (1)..(336): Ceres Seq. ID no. 12605630
MGGTKLTHVTTTNPNNSNIHGPVVDEVEGLIKVYKDGHVERSQLLPCVDPSLPLELGVTCSDVVIDKLTNVWARLYVPMTTTKSSVSKLPLIVYFHGGGFCVGSASWLCYHEFLARLSARSRCLVMSVNYRLAPENPLPAAYEDGVNAILWLNKARNDNLWAKQCDFGRIFLAGDSAGGNIAQQVAARLASPEDLALKIEGTILIQPFYSGEERTESERRVGNDKTAVLTLASSDAWWRMSLPRGANREHPYCKPVKMIIKSSTVTRTLVCVAEMDLLMDSNMEMCDGNEDVIKRVLHKGVGHAFHILGKSQLAHTTTLEMLCQIDAFIHHYDPLN

SEQ ID NO: 50075 - protein, 258 aa, Arabidopsis thaliana
  peptide (1)..(258): Ceres Seq. ID no. 12605631
MTTTKSSVSKLPLIVYFHGGGFCVGSASWLCYHEFLARLSARSRCLVMSVNYRLAPENPLPAAYEDGVNAILWLNKARNDNLWAKQCDFGRIFLAGDSAGGNIAQQVAARLASPEDLALKIEGTILIQPFYSGEERTESERRVGNDKTAVLTLASSDAWWRMSLPRGANREHPYCKPVKMIIKSSTVTRTLVCVAEMDLLMDSNMEMCDGNEDVIKRVLHKGVGHAFHILGKSQLAHTTTLEMLCQIDAFIHHYDPLN

SEQ ID NO: 50076 - protein, 211 aa, Arabidopsis thaliana
  peptide (1)..(211): Ceres Seq. ID no. 12605632
MSVNYRLAPENPLPAAYEDGVNAILWLNKARNDNLWAKQCDFGRIFLAGDSAGGNIAQQVAARLASPEDLALKIEGTILIQPFYSGEERTESERRVGNDKTAVLTLASSDAWWRMSLPRGANREHPYCKPVKMIIKSSTVTRTLVCVAEMDLLMDSNMEMCDGNEDVIKRVLHKGVGHAFHILGKSQLAHTTTLEMLCQIDAFIHHYDPLN

SEQ ID NO: 50077 - DNA, 1095 bp, Arabidopsis thaliana
  misc_feature (1)..(1095): Ceres Seq. ID no. 13647906
  misc_feature (1)..(1095): Ortholog of  Ceres SEQ ID NO 15168436 as cited in SEQ ID NO 56974
gaataaacaaaatttgaggtttcgattttgcgattcggcgatttgcttctccgatgtcaatcccaccatcttcaggttcttcttcttcatcttcctcgtctcagtacacatacgcagctaattcttactattccgctccgtatcagcctccacagccttacgcggcggcgccttcgcctgctgtaccggcgcctgtggcatccattcccggagctacggtctatcctcagcctgttggaccggttcctgccgtctacgcttaccctcagtaccaacaggcacatcaattgttccaaagagatgcacagacaattacaccagaagctcttgagaatgtaaaagctgctttggcaagtagtgaaaccgaacacaaagcagaaactaaaaagagagccattcctcgtaaagctgctggacagtcttgggaggatcctactctttcagaatggccagaaaatgactatcgtctgttctgtggtgatcttgggaacgaagtgaatgatgatgttctttccaaagcatttgctagattccccaccttcaatatggccaaggtcattagagataagcggactggtaaaaccaagggttatgggtttgtgagtttcttaaatcctgcggatctagcagcagccttaaaagaaatgaatggtaagtatgttggaaatcgtccgataaaactacgaaagagtagctggaaagagagaacagatcaggaggctgctgaaagacaaaagcatcacagcaataagaagcaaaaaactgtgaagaagagcatacttcacaagtgacgatctcttttatttttgtggcttaaaatttccaaacctgttactcataaatataaatgaacaaacattatcattagttttgttgaaaacggtatggttatgtattgttgggctgctatgtttagctttagccccaaccggtggtatttactttatgaaaacgtgtgtccacaataggctcgagcacaaacttttcttacatctttttcactccattaaaacgttcaagtggtctgagcatattacaagaaaatcaatattactatttaaggatcgattataagaaagaagatgtatactatcc

SEQ ID NO: 50078 - protein, 245 aa, Arabidopsis thaliana
  peptide (1)..(245): Ceres Seq. ID no. 13647907
MSIPPSSGSSSSSSSSQYTYAANSYYSAPYQPPQPYAAAPSPAVPAPVASIPGATVYPQPVGPVPAVYAYPQYQQAHQLFQRDAQTITPEALENVKAALASSETEHKAETKKRAIPRKAAGQSWEDPTLSEWPENDYRLFCGDLGNEVNDDVLSKAFARFPTFNMAKVIRDKRTGKTKGYGFVSFLNPADLAAALKEMNGKYVGNRPIKLRKSSWKERTDQEAAERQKHHSNKKQKTVKKSILHK

SEQ ID NO: 50079 - DNA, 2490 bp, Arabidopsis thaliana
  misc_feature (1)..(2490): Ceres Seq. ID no. 12592510
  misc_feature (1)..(2490): Ortholog of  Ceres SEQ ID NO 12638191 as cited in SEQ ID NO 674
  misc_feature (1)..(2490): Ortholog of  Ceres SEQ ID NO 12583314 as cited in SEQ ID NO 56435
  misc_feature (1)..(2490): Ortholog of  Ceres SEQ ID NO 14303105 as cited in SEQ ID NO 66589
  misc_feature (1)..(2490): Ortholog of  Ceres SEQ ID NO 13584744 as cited in SEQ ID NO 69137
atgggtggtgaaaagtttggatttttgatttggattttatcgattccttgcttaatcttcctctgctatggatacgtaccagtggataattacctcatcaactgtggatcatcaaccaacgtcactgtcactagtcgagtgtttatctctgataaccttgcttcaaactttctaacctctcctaatgaaatcctcgccgccagtaatcgcaattcaaattcagatatttaccagacggcgagaatcttcaccggaatctctaagtacagattctccgttgctagaggccgtcactggattcgtctccatttcaatccttttcagtaccaaaacttccaaatggtctcagcaaaattctctgtttcttcagaaacacatgttcttttgagtgatttcactgtgagttccagagttatgaaggaatactctctgaatgtagctacggatcatctggagctcacgtttactccctcgggtgattcatttgcgtttctgaacgcgctcgaggttgtttcggttcctgatacgttgttcagtggtgatccttcctttgcaggcagtcctgggaagtttcagggcttgtcatggcaagctcttgagacggtttatagagtgaacatgggcggtccgcgtgttacgcctagtaacgatactctttcgagaatttgggagcctgattctgagtttctagttgagaagaatctagttaagagtgtgtctaagattgcatctgttgattatgttcctggttttgctacagaggagactgctcctagaactgtctatggtacttgcaccgagatgaattctgcggataacccgtctagcaacttcaatgtgacttgggatttcgatgttgacccgggttttcagtactttctacggtttcatttctgcgatatcgtgagtaaagctctaaaccagctttacttcaatctttatgtcgactctatggatgttgttgagaatcttgatctgagctcttatttatccaacactttgagtggtgcatacgcgatggattttgtcacaggatcagcaaaactgactaaaagaatccgtgtgagcatcggtcgatcgagtgttcacacggattaccctactgcgattctgaacggattagagatcatgaagatgaataactccaaaagtcagctcagtattggaacatttttgcccagtggttcaagttcaaccactaagaagaatgttggtatgatcattggtttaacgatcggctcattgcttgctttagtggttttaggaggtttctttgtgctgtacaagaaacgaggacgagaccaagatggtaattcaaagacttggattcctttgtcatccaatggaacaacttcatcctcaaatggaactacacttgcaagtatagcttccaattccagttatcgaattcctttggtagcagttaaagaggccacaaatagctttgatgagaatcgagcaattggagttggtggttttggtaaagtgtacaaaggagagcttcacgacggtacaaaagtagctgttaaaagagcgaatcctaagtctcagcaaggacttgcagagttcaggacagaaatcgaaatgttgtcacaattccgtcatcgccatttggtttctttgatcggatactgcgacgagaataacgagatgattctggtttacgaatatatggagaatggaacattgaagagtcacctttacggttcaggtcttcttagcttgagttggaagcaacgtcttgagatatgcattggatcagcaagaggattgcattatctccacaccggtgacgcgaaacccgtgattcacagagacgtcaaatccgccaacatattgcttgacgagaatctcatggctaaagttgcagactttggactgtctaagaccggaccggagatcgatcagactcatgtgagtaccgcggtcaaaggaagtttcggatatcttgatccagaatacttcagaagacaacagctcacagagaaatcagatgtttactcttttggagtggttatgttcgaggttctctgcgcgagacctgttatagacccgacacttactagagaaatggtgaatctagcggaatgggcaatgaaatggcagaagaaaggacagcttgaacacatcatcgacccgtcactgcggggtaagatcagacctgactcgcttagaaagttcggtgaaacaggggagaaatgtttagctgactatggagtcgatagaccatcaatgggagatgtgttgtggaatcttgaatacgctttgcagctacaagaagctgtcgttgatggtgatccagaagacagcacaaacatgatcggtgagttacctctacggttcaatgattacaaccatggagacacgagtgttaacttttctgtagctaaagagggacggtttgatgaagaagaatcgagtgttgatgatagttcaggtgtttccatgagtaaagttttctcgcagctgatcaaatctgagggacgttaa

SEQ ID NO: 50080 - protein, 829 aa, Arabidopsis thaliana
  peptide (1)..(829): Ceres Seq. ID no. 12592511
MGGEKFGFLIWILSIPCLIFLCYGYVPVDNYLINCGSSTNVTVTSRVFISDNLASNFLTSPNEILAASNRNSNSDIYQTARIFTGISKYRFSVARGRHWIRLHFNPFQYQNFQMVSAKFSVSSETHVLLSDFTVSSRVMKEYSLNVATDHLELTFTPSGDSFAFLNALEVVSVPDTLFSGDPSFAGSPGKFQGLSWQALETVYRVNMGGPRVTPSNDTLSRIWEPDSEFLVEKNLVKSVSKIASVDYVPGFATEETAPRTVYGTCTEMNSADNPSSNFNVTWDFDVDPGFQYFLRFHFCDIVSKALNQLYFNLYVDSMDVVENLDLSSYLSNTLSGAYAMDFVTGSAKLTKRIRVSIGRSSVHTDYPTAILNGLEIMKMNNSKSQLSIGTFLPSGSSSTTKKNVGMIIGLTIGSLLALVVLGGFFVLYKKRGRDQDGNSKTWIPLSSNGTTSSSNGTTLASIASNSSYRIPLVAVKEATNSFDENRAIGVGGFGKVYKGELHDGTKVAVKRANPKSQQGLAEFRTEIEMLSQFRHRHLVSLIGYCDENNEMILVYEYMENGTLKSHLYGSGLLSLSWKQRLEICIGSARGLHYLHTGDAKPVIHRDVKSANILLDENLMAKVADFGLSKTGPEIDQTHVSTAVKGSFGYLDPEYFRRQQLTEKSDVYSFGVVMFEVLCARPVIDPTLTREMVNLAEWAMKWQKKGQLEHIIDPSLRGKIRPDSLRKFGETGEKCLADYGVDRPSMGDVLWNLEYALQLQEAVVDGDPEDSTNMIGELPLRFNDYNHGDTSVNFSVAKEGRFDEEESSVDDSSGVSMSKVFSQLIKSEGR

SEQ ID NO: 50081 - protein, 716 aa, Arabidopsis thaliana
  peptide (1)..(716): Ceres Seq. ID no. 12592512
MVSAKFSVSSETHVLLSDFTVSSRVMKEYSLNVATDHLELTFTPSGDSFAFLNALEVVSVPDTLFSGDPSFAGSPGKFQGLSWQALETVYRVNMGGPRVTPSNDTLSRIWEPDSEFLVEKNLVKSVSKIASVDYVPGFATEETAPRTVYGTCTEMNSADNPSSNFNVTWDFDVDPGFQYFLRFHFCDIVSKALNQLYFNLYVDSMDVVENLDLSSYLSNTLSGAYAMDFVTGSAKLTKRIRVSIGRSSVHTDYPTAILNGLEIMKMNNSKSQLSIGTFLPSGSSSTTKKNVGMIIGLTIGSLLALVVLGGFFVLYKKRGRDQDGNSKTWIPLSSNGTTSSSNGTTLASIASNSSYRIPLVAVKEATNSFDENRAIGVGGFGKVYKGELHDGTKVAVKRANPKSQQGLAEFRTEIEMLSQFRHRHLVSLIGYCDENNEMILVYEYMENGTLKSHLYGSGLLSLSWKQRLEICIGSARGLHYLHTGDAKPVIHRDVKSANILLDENLMAKVADFGLSKTGPEIDQTHVSTAVKGSFGYLDPEYFRRQQLTEKSDVYSFGVVMFEVLCARPVIDPTLTREMVNLAEWAMKWQKKGQLEHIIDPSLRGKIRPDSLRKFGETGEKCLADYGVDRPSMGDVLWNLEYALQLQEAVVDGDPEDSTNMIGELPLRFNDYNHGDTSVNFSVAKEGRFDEEESSVDDSSGVSMSKVFSQLIKSEGR

SEQ ID NO: 50082 - protein, 691 aa, Arabidopsis thaliana
  peptide (1)..(691): Ceres Seq. ID no. 12592513
MKEYSLNVATDHLELTFTPSGDSFAFLNALEVVSVPDTLFSGDPSFAGSPGKFQGLSWQALETVYRVNMGGPRVTPSNDTLSRIWEPDSEFLVEKNLVKSVSKIASVDYVPGFATEETAPRTVYGTCTEMNSADNPSSNFNVTWDFDVDPGFQYFLRFHFCDIVSKALNQLYFNLYVDSMDVVENLDLSSYLSNTLSGAYAMDFVTGSAKLTKRIRVSIGRSSVHTDYPTAILNGLEIMKMNNSKSQLSIGTFLPSGSSSTTKKNVGMIIGLTIGSLLALVVLGGFFVLYKKRGRDQDGNSKTWIPLSSNGTTSSSNGTTLASIASNSSYRIPLVAVKEATNSFDENRAIGVGGFGKVYKGELHDGTKVAVKRANPKSQQGLAEFRTEIEMLSQFRHRHLVSLIGYCDENNEMILVYEYMENGTLKSHLYGSGLLSLSWKQRLEICIGSARGLHYLHTGDAKPVIHRDVKSANILLDENLMAKVADFGLSKTGPEIDQTHVSTAVKGSFGYLDPEYFRRQQLTEKSDVYSFGVVMFEVLCARPVIDPTLTREMVNLAEWAMKWQKKGQLEHIIDPSLRGKIRPDSLRKFGETGEKCLADYGVDRPSMGDVLWNLEYALQLQEAVVDGDPEDSTNMIGELPLRFNDYNHGDTSVNFSVAKEGRFDEEESSVDDSSGVSMSKVFSQLIKSEGR

SEQ ID NO: 50083 - DNA, 1084 bp, Arabidopsis thaliana
  misc_feature (1)..(1084): Ceres Seq. ID no. 13592597
  misc_feature (1)..(1084): Ortholog of  Ceres SEQ ID NO 14314434 as cited in SEQ ID NO 52401
  misc_feature (1)..(1084): Ortholog of  Ceres SEQ ID NO 14303939 as cited in SEQ ID NO 54286
  misc_feature (1)..(1084): Ortholog of  Ceres SEQ ID NO 14307760 as cited in SEQ ID NO 54741
  misc_feature (1)..(1084): Ortholog of  Ceres SEQ ID NO 14313391 as cited in SEQ ID NO 58556
  misc_feature (1)..(1084): Ortholog of  Ceres SEQ ID NO 14307540 as cited in SEQ ID NO 59670
  misc_feature (1)..(1084): Ortholog of  Ceres SEQ ID NO 15179003 as cited in SEQ ID NO 0
  misc_feature (1)..(1084): Ortholog of  Ceres SEQ ID NO 15179235 as cited in SEQ ID NO 0
aattctctttgaccaaaaaataatccaaagacttagaagaaaaacaagatcgggtctcgtcacggtccacggcgcagctttttcttcgtcttcttcaattattctattccctctgagagattctctctgcgtttcttagatcgagcgagggaagcgagagatcatggaaggtggagctgctctctacaatcctcgaactgtcgaagaagttttcaaggatttcaaaggtcgtcgtactgccattgtcaaagctctcaccaccgatgttcaagagttttaccaacaatgtgaccctgagaaggagaatctttgcttgtatgggttaccgaatgaagaatgggaagtgaatttaccagctgaagaagtgcctcctgagttaccagagccagctcttggtattaactttgctagggatgggctctctgaaaaggaatggctttcgcttgttgctattcacagtgacgcttggttactgtctgtctcgttttactttggctcaaggttttctttccacaaggaagagaggaagcgtttgttcaacatgatcaatgatgttcctactatatttgaagtagtgactggaatggctaaagcaaaggacaagtcatctgctgcaaatcaaaacggaaacaaatccaagtctaactctaaagttagaacttcagagggaaaaagctcaaagaccaagcagccaaaagaggaggacgaagaaatagatgaagatgatgaggatgaccacggggaaaccctttgtggagcctgtggagacagtgatggtgctgatgaattctggatctgctgtgacctttgtgagaagtggttccatggcaagtgtgtgaagatcactccagctagagctgagcatatcaaacaatacaagtgcccttcatgcagcaacaaaagagctcgagcttaaaaatgttgtattgtagagaatagcctgtagtgacaactctcactaccctcgatctgtctttatttggctagtcttttagctcgttattggccataacagcttgggcctatttctctgtataattggtttgattttgcaactgagaaaaaaaaggaaactctttaactg

SEQ ID NO: 50084 - protein, 250 aa, Arabidopsis thaliana
  peptide (1)..(250): Ceres Seq. ID no. 13592598
MEGGAALYNPRTVEEVFKDFKGRRTAIVKALTTDVQEFYQQCDPEKENLCLYGLPNEEWEVNLPAEEVPPELPEPALGINFARDGLSEKEWLSLVAIHSDAWLLSVSFYFGSRFSFHKEERKRLFNMINDVPTIFEVVTGMAKAKDKSSAANQNGNKSKSNSKVRTSEGKSSKTKQPKEEDEEIDEDDEDDHGETLCGACGDSDGADEFWICCDLCEKWFHGKCVKITPARAEHIKQYKCPSCSNKRARA

SEQ ID NO: 50085 - DNA, 1444 bp, Arabidopsis thaliana
  misc_feature (1)..(1444): Ceres Seq. ID no. 13592512
  misc_feature (1)..(1444): Ortholog of  Ceres SEQ ID NO 13598618 as cited in SEQ ID NO 65406
gattccctctattctcaatccacaccaaagactatatggcctcccattgctccatgagagtaatcctcctcagattctccaatggcgtctcttccagatccattctcaactccactaaccatcgtcttcttagtcttaccatgaccaacactctctcgtctctttcctcaatctctccccacactactacttcgcatttcacggctgcgtcacaacaatcagatgaccagaactgcttccgcaagcttcaactcagaaagatttcgatttcaactcctctttgtatgggtcgtcgttcttccaaaatcgctggtcgaaagggcgctcaagattcaaagaaggcgaagctatactgtagaattggcaaggaggttgtatctgctgtcaagaaagggggtccaaacccagtttcaaatacgactctagctactattcttgacaaagctaaagaactggatgtaccgaaagacattgtggagcgtaatattaagagggcttctgagaaggggcaagaagcttttatagagaagatttacgaggtatatggctacggtggtgttagtatggtagtcgaggtcttaacagacaaaattaatcgatcagtggcagctattagatcggttgttaaggattatgggggaaaaatggctgattcaggatctgtcatgttcaagtttaaaagagttagggtagtgaatataaaggtcaccgaagctgacaaagatcagctccttattattgctttagatgctggagcagaggatgttattgaacccccaacttatgaagatgatactgatgaagacagggaagagaggtactacaaaattgtaacttctaatgagaactactcaacaatattatcaaagctacgtgatgaaggagtgaacttcgagcctgacaatggctctgaactgctccctctgactacagttgaggtggatgatgaggccatggaattgaacaaagagctaatgcagaaactactagaacttgatgatgttgatgctgtttatatcgaccaaaaatgaaaagaatatacattacaggaagctccacttcaagatctgtgaattcacagctcacgagaaagttattatgtcaatctctgaactggttctgctgaactctgcatatattctgaagaaggaataatggtttttggtagacacttacatttcacttcttctagtttccagtttgaagccataaaatcaaaactattataaaagcccaaatcttataatgccgaagggtcttttaatctaaattttgggctgtttcgatttttgggaaattatgaatctaaacattattttagaaattatgagtgatactaggagtgattgtgggctactaccaaacgttattttagaaccacaaataaattcaaaacattattttagaaaaaaaaaaaaaaaaaaaactcgagggggggcccggt

SEQ ID NO: 50086 - protein, 342 aa, Arabidopsis thaliana
  peptide (1)..(342): Ceres Seq. ID no. 13592513
FPLFSIHTKDYMASHCSMRVILLRFSNGVSSRSILNSTNHRLLSLTMTNTLSSLSSISPHTTTSHFTAASQQSDDQNCFRKLQLRKISISTPLCMGRRSSKIAGRKGAQDSKKAKLYCRIGKEVVSAVKKGGPNPVSNTTLATILDKAKELDVPKDIVERNIKRASEKGQEAFIEKIYEVYGYGGVSMVVEVLTDKINRSVAAIRSVVKDYGGKMADSGSVMFKFKRVRVVNIKVTEADKDQLLIIALDAGAEDVIEPPTYEDDTDEDREERYYKIVTSNENYSTILSKLRDEGVNFEPDNGSELLPLTTVEVDDEAMELNKELMQKLLELDDVDAVYIDQK

SEQ ID NO: 50087 - protein, 331 aa, Arabidopsis thaliana
  peptide (1)..(331): Ceres Seq. ID no. 13592514
MASHCSMRVILLRFSNGVSSRSILNSTNHRLLSLTMTNTLSSLSSISPHTTTSHFTAASQQSDDQNCFRKLQLRKISISTPLCMGRRSSKIAGRKGAQDSKKAKLYCRIGKEVVSAVKKGGPNPVSNTTLATILDKAKELDVPKDIVERNIKRASEKGQEAFIEKIYEVYGYGGVSMVVEVLTDKINRSVAAIRSVVKDYGGKMADSGSVMFKFKRVRVVNIKVTEADKDQLLIIALDAGAEDVIEPPTYEDDTDEDREERYYKIVTSNENYSTILSKLRDEGVNFEPDNGSELLPLTTVEVDDEAMELNKELMQKLLELDDVDAVYIDQK

SEQ ID NO: 50088 - protein, 325 aa, Arabidopsis thaliana
  peptide (1)..(325): Ceres Seq. ID no. 13592515
MRVILLRFSNGVSSRSILNSTNHRLLSLTMTNTLSSLSSISPHTTTSHFTAASQQSDDQNCFRKLQLRKISISTPLCMGRRSSKIAGRKGAQDSKKAKLYCRIGKEVVSAVKKGGPNPVSNTTLATILDKAKELDVPKDIVERNIKRASEKGQEAFIEKIYEVYGYGGVSMVVEVLTDKINRSVAAIRSVVKDYGGKMADSGSVMFKFKRVRVVNIKVTEADKDQLLIIALDAGAEDVIEPPTYEDDTDEDREERYYKIVTSNENYSTILSKLRDEGVNFEPDNGSELLPLTTVEVDDEAMELNKELMQKLLELDDVDAVYIDQK

SEQ ID NO: 50089 - DNA, 1475 bp, Arabidopsis thaliana
  misc_feature (1)..(1475): Ceres Seq. ID no. 13592545
  misc_feature (1)..(1475): Ortholog of  Ceres SEQ ID NO 13657647 as cited in SEQ ID NO 66399
tcagctgctcgatctctctctgatcacaacaatcataagcgatgagaggagctagacccgatgaattcaattttagtacgaatccatcaacgccaaacactggtcagccgacaccgacgtaccccgccggtgttggcggcggcggcggtggaaggaaaaaaggcgttggcgtgaggacgtggttggtacttaactcgtcagggcaatcggagccgaaggaagaagggaaacactccatcatgcggcgaacgggattaccggcgcgtgatcttaggattctcgatccactgttgtcgtatccatctactgttttaggtagagagagagcgattgtcatcaatttggagcatatcaaggcaatcatcactgctcaagaagttttgttgcttaattccaaggatccttcggtctcaccctttattgatgagttgcagaggcggattctctgtcaccatcacgccactaaacctcaggaggagcagaactctgggggagagcctcatacgagggtagatcctgcccaaggagaagctggaacggaacaatcttctggggatcaagggagtgaagccaagaaggatgcgaagcaaagtcttgagaatcaagatggatcgaaggttcttccatttgagtttgttgctctggaagcctgtcttgaagctgcatcaagcagtttggaacatgaggccttaagattggagttagaggctcatccagccctggacaagcttacttccaagatcagtacccttaatttggagcgggttcgacagattaaaagcaggctggttgcaataactggacgtgttcagaaggtgagggatgagctagaacatctgctagacgatgatgaagatatggctgagatgtatcttacagagaagttagctcagaaacttgaggattcgtcaaattcctctatgaatgagagtgataccttcgaggttgatcttcctcaaggagatgaggatgacaggcatgctaacagagatggaaggtatcttcaagcaaatgatgctcacgagcttcttatgagtactcaaagtgcacttagcagaaatagccgtgggactcacacaagctcaacccggagtgccatgaccaacaaattagatgtggaagagcttgaaatgcttttggaagcatatttcgtgcagatcgatggtatactgaacaaactatcaacactaagggaatatgtggatgacacggaggactacatcaacataatgctagatgacaagcagaatcatcttctgcagatgggtgtgatgctaacaacagctactctggtgatgagcgcctttatcgcagttgctggtgtatttggtatgaatataaccatagagttgttcacggataataaacatggtccaagtagattcatttggactgtgattggaggttctatcggcagtatatgcctctacgttggtgccatcgggtggtgcaagtacaagcgccttcttgaatga

SEQ ID NO: 50090 - protein, 477 aa, Arabidopsis thaliana
  peptide (1)..(477): Ceres Seq. ID no. 13592546
MRGARPDEFNFSTNPSTPNTGQPTPTYPAGVGGGGGGRKKGVGVRTWLVLNSSGQSEPKEEGKHSIMRRTGLPARDLRILDPLLSYPSTVLGRERAIVINLEHIKAIITAQEVLLLNSKDPSVSPFIDELQRRILCHHHATKPQEEQNSGGEPHTRVDPAQGEAGTEQSSGDQGSEAKKDAKQSLENQDGSKVLPFEFVALEACLEAASSSLEHEALRLELEAHPALDKLTSKISTLNLERVRQIKSRLVAITGRVQKVRDELEHLLDDDEDMAEMYLTEKLAQKLEDSSNSSMNESDTFEVDLPQGDEDDRHANRDGRYLQANDAHELLMSTQSALSRNSRGTHTSSTRSAMTNKLDVEELEMLLEAYFVQIDGILNKLSTLREYVDDTEDYINIMLDDKQNHLLQMGVMLTTATLVMSAFIAVAGVFGMNITIELFTDNKHGPSRFIWTVIGGSIGSICLYVGAIGWCKYKRLLE

SEQ ID NO: 50091 - protein, 411 aa, Arabidopsis thaliana
  peptide (1)..(411): Ceres Seq. ID no. 13592547
MRRTGLPARDLRILDPLLSYPSTVLGRERAIVINLEHIKAIITAQEVLLLNSKDPSVSPFIDELQRRILCHHHATKPQEEQNSGGEPHTRVDPAQGEAGTEQSSGDQGSEAKKDAKQSLENQDGSKVLPFEFVALEACLEAASSSLEHEALRLELEAHPALDKLTSKISTLNLERVRQIKSRLVAITGRVQKVRDELEHLLDDDEDMAEMYLTEKLAQKLEDSSNSSMNESDTFEVDLPQGDEDDRHANRDGRYLQANDAHELLMSTQSALSRNSRGTHTSSTRSAMTNKLDVEELEMLLEAYFVQIDGILNKLSTLREYVDDTEDYINIMLDDKQNHLLQMGVMLTTATLVMSAFIAVAGVFGMNITIELFTDNKHGPSRFIWTVIGGSIGSICLYVGAIGWCKYKRLLE

SEQ ID NO: 50092 - DNA, 1980 bp, Arabidopsis thaliana; identical to SEQ ID NO: 49071
  misc_feature (1)..(1980): Ceres Seq. ID no. 13592092
  misc_feature (1)..(1980): Ortholog of  Ceres SEQ ID NO 14313167 as cited in SEQ ID NO 54354

SEQ ID NO: 50093 - protein, 541 aa, Arabidopsis thaliana; identical to SEQ ID NO: 49072
  peptide (1)..(541): Ceres Seq. ID no. 13592093

SEQ ID NO: 50094 - protein, 310 aa, Arabidopsis thaliana; identical to SEQ ID NO: 49073
  peptide (1)..(310): Ceres Seq. ID no. 13592094

SEQ ID NO: 50095 - DNA, 1712 bp, Arabidopsis thaliana
  misc_feature (1)..(1712): Ceres Seq. ID no. 13647719
  misc_feature (1)..(1712): Ortholog of  Ceres SEQ ID NO 13656435 as cited in SEQ ID NO 65853
ttttttttgactctcttcttcttcatcttcttcttcttcttcttcttcttcttcttcttcttcttcttcttcttcttcttcttcttcatattttccctatgatttggatctctaaaatcttcaatccccatgttctaatttaaaaaatcacaacactctctttatcatataccctattataaaccaaactttgatcctcgaatatattttattaaaaagataatattcgtgtttctcatgttggagtcataataaagaaacctttgtgttttaatttaatcccctccaagaaacctgaagattctaagaagctgccattaaaactaataaaggaagagagtccaaagaagaagaagaagaagagaaaatgtcacgtcttgacgacataccttcaagcccaggcaaattcaagatggagaaatcttcctacttgcatcgtctcagattccaatcttctctcacaaagtttgcatttttctccttcttcctcctctgtctcatctctctactcttcctccgatctccaccgtccattaacccttcttcaccgtccgatccatctcgccgttcactccgaaccaacacctacggaggaccagcttgggaaaaacgtctcagatcctcagctcgaatccgaacctcaacaaacaacggaatcacagttttagtaaccggagcagctggtttcgtcggaacacacgtctccgccgcattaaaacgccgcggagacggcgtaatcggcctcgacaacttcaacgattactacgatccatctctgaaacgagcaagacgagctttactcgagagaagtgggatcttcatcgtagaaggagacataaacgacgtcgaattactccgtaagctattcaagatcgtctccttcacacacgttatgcatttagcagctcaagctggtgtacggtacgcaatggaaaaccctagctcgtacgttcatagcaacatcgccggattcgtcaatctcctcgagatctgcaaatctgtgaatccacaacctgctatagtctgggcttcgtctagctccgtctacggactcaacaccaaagttccgttctcggagaaagataaaacagatcaaccggcgagtttatacgccgccactaaaaaagccggcgaagagatcgcacatacctacaaccacatctatggattatctctaaccggattaagatttttcaccgtgtatggaccttggggaagaccagacatggcgtatttcttcttcactaaagatattctaaaaggcaaatcgatttcgatattcgaatcggcgaatcacggaacggtggctagggatttcacttacatagacgatatagtgaagggatgtttagcggcgctagatacggcggagaagagtacagggagtggagggaagaagagaggtccggcgcaattgagagtgtttaacctcggaaacacgtcgccggtgccggtttcagatctggtgaggatattggagagacaattgaaagtgaaggcgaagaagaatttgattaagatgccacgaaacggtgacgttccgtttactcatgctaatattagtttagctcaacgtgagcttggttataaaccgactacggatttgcaaaccggtttgaagaagtttgtcagatggtatttgagttattactccggcgacaaaaaagccgccgctagatgatctttttttctggttgatgatgatcttttga

SEQ ID NO: 50096 - protein, 437 aa, Arabidopsis thaliana
  peptide (1)..(437): Ceres Seq. ID no. 13647720
MSRLDDIPSSPGKFKMEKSSYLHRLRFQSSLTKFAFFSFFLLCLISLLFLRSPPSINPSSPSDPSRRSLRTNTYGGPAWEKRLRSSARIRTSTNNGITVLVTGAAGFVGTHVSAALKRRGDGVIGLDNFNDYYDPSLKRARRALLERSGIFIVEGDINDVELLRKLFKIVSFTHVMHLAAQAGVRYAMENPSSYVHSNIAGFVNLLEICKSVNPQPAIVWASSSSVYGLNTKVPFSEKDKTDQPASLYAATKKAGEEIAHTYNHIYGLSLTGLRFFTVYGPWGRPDMAYFFFTKDILKGKSISIFESANHGTVARDFTYIDDIVKGCLAALDTAEKSTGSGGKKRGPAQLRVFNLGNTSPVPVSDLVRILERQLKVKAKKNLIKMPRNGDVPFTHANISLAQRELGYKPTTDLQTGLKKFVRWYLSYYSGDKKAAAR

SEQ ID NO: 50097 - protein, 422 aa, Arabidopsis thaliana
  peptide (1)..(422): Ceres Seq. ID no. 13647721
MEKSSYLHRLRFQSSLTKFAFFSFFLLCLISLLFLRSPPSINPSSPSDPSRRSLRTNTYGGPAWEKRLRSSARIRTSTNNGITVLVTGAAGFVGTHVSAALKRRGDGVIGLDNFNDYYDPSLKRARRALLERSGIFIVEGDINDVELLRKLFKIVSFTHVMHLAAQAGVRYAMENPSSYVHSNIAGFVNLLEICKSVNPQPAIVWASSSSVYGLNTKVPFSEKDKTDQPASLYAATKKAGEEIAHTYNHIYGLSLTGLRFFTVYGPWGRPDMAYFFFTKDILKGKSISIFESANHGTVARDFTYIDDIVKGCLAALDTAEKSTGSGGKKRGPAQLRVFNLGNTSPVPVSDLVRILERQLKVKAKKNLIKMPRNGDVPFTHANISLAQRELGYKPTTDLQTGLKKFVRWYLSYYSGDKKAAAR

SEQ ID NO: 50098 - protein, 262 aa, Arabidopsis thaliana
  peptide (1)..(262): Ceres Seq. ID no. 13647722
MHLAAQAGVRYAMENPSSYVHSNIAGFVNLLEICKSVNPQPAIVWASSSSVYGLNTKVPFSEKDKTDQPASLYAATKKAGEEIAHTYNHIYGLSLTGLRFFTVYGPWGRPDMAYFFFTKDILKGKSISIFESANHGTVARDFTYIDDIVKGCLAALDTAEKSTGSGGKKRGPAQLRVFNLGNTSPVPVSDLVRILERQLKVKAKKNLIKMPRNGDVPFTHANISLAQRELGYKPTTDLQTGLKKFVRWYLSYYSGDKKAAAR

SEQ ID NO: 50099 - DNA, 1710 bp, Arabidopsis thaliana; identical to SEQ ID NO: 47155
  misc_feature (1)..(1710): Ceres Seq. ID no. 13592321
  misc_feature (1)..(1710): Ortholog of  Ceres SEQ ID NO 15171476 as cited in SEQ ID NO 55569
  misc_feature (1)..(1710): Ortholog of  Ceres SEQ ID NO 14312069 as cited in SEQ ID NO 59191

SEQ ID NO: 50100 - protein, 507 aa, Arabidopsis thaliana; identical to SEQ ID NO: 47156
  peptide (1)..(507): Ceres Seq. ID no. 13592322

SEQ ID NO: 50101 - protein, 492 aa, Arabidopsis thaliana; identical to SEQ ID NO: 47157
  peptide (1)..(492): Ceres Seq. ID no. 13592323

SEQ ID NO: 50102 - protein, 404 aa, Arabidopsis thaliana; identical to SEQ ID NO: 47158
  peptide (1)..(404): Ceres Seq. ID no. 13592324

SEQ ID NO: 50103 - DNA, 1766 bp, Arabidopsis thaliana
  misc_feature (1)..(1766): Ceres Seq. ID no. 13648522
  misc_feature (1)..(1766): Ortholog of  Ceres SEQ ID NO 13660287 as cited in SEQ ID NO 67316
atctctcgtcttcaccattcttctcacttcttcttttctccttatatttcatttcttccacataactaaaaaaaaaggaattagcgatgaggggaggtgatggagaagaaggatcggagtcaagagttgcactgttgaaaagtcctcacacggcggaggaagacggtgaaggattgaaggatagaattttggttgagacaaaaaagctatggcaaatagttggtccggccatattcagtcgagtaacgacatattcgatgcttgtaatcactcaagctttcgctggtcatctcggcgatcttgaactcgccgccatatccatcgttaataacgtcaccgttggcttcaactttggcctcttgcttggaatggcgagtgcgttggaaacgctgtgtggacaagcgtttggagcgaagaaatatcatatgttgggagtttatatgcagcgttcttggattgttctcttcttttgctgtgtcttgttattaccaacttatattttcactactccggttcttaaatttcttggtcaaccggacgatatcgctgagctgtccggtgttgtcgccatttgggtcataccgcttcatttcgccttcactttgtcttttccccttcaacgtttccttcagtgccagctcaaaaaccgagtgactgcgtatgcggcagcggttgcattggtggttcatattttagtgtgttggttgttcgtggacgggcttaaactaggagtcgtggggactgtagctacgattagtatctcgtggtgggtcaatgttcttattctgttagtttactctacttgtggtggttgtccgcttacttggaccggcttatcctctgaagccttaaccggactttgggaattccttaaactctctgcttcttcaggcgtcatgctctgtttggagaattggtattatcggattttgattataatgactgggaatcttcaaaatgctcgaatcgccgttgactccttgtccatatgcatggcgataaatggttgggagatgatgatacctctcgctttcttcgccggaaccggtgtccgtgtggcgaacgaattaggagctggtaatggtaaaggagcaagatttgcgacgattgtatcggtaacacaatcgttgataatcggattgtttttttgggtgctaataatgcttctccataaccaaatcgcatggatcttctcttcgagtgtagccgtcttagacgccgtcaataaactctcacttctgctagctttcaccgttcttcttaacagcgttcaaccggttctttccggtgtggcggttggatcgggttggcaatcgtacgtggcatatataaacttgggatgttactattgcattggtgttccacttgggtttctcatgggctggggttttaaactcggtgtcatgggaatttggggtggtatgatttttggaggaaccgctgttcaaaccatgatcttaagttttatcacaatgagatgtgactgggaaaaagaggcgcagaaagcaagtgctcgtattaacaaatggtccaacacaataaaatgattcaagattttgttgaatcaactattaaataattttgcagcataatatggttttggaaaactggtgtatgttttgtatccaaatgtgatacaacatatttagagccggttcatagattacataggatcgctgcaattactgcaaaatggcctttgtgattttctttttatagcatgccttgtaatattattagataaaactgctttattttaatttagt

SEQ ID NO: 50104 - protein, 486 aa, Arabidopsis thaliana
  peptide (1)..(486): Ceres Seq. ID no. 13648523
MRGGDGEEGSESRVALLKSPHTAEEDGEGLKDRILVETKKLWQIVGPAIFSRVTTYSMLVITQAFAGHLGDLELAAISIVNNVTVGFNFGLLLGMASALETLCGQAFGAKKYHMLGVYMQRSWIVLFFCCVLLLPTYIFTTPVLKFLGQPDDIAELSGVVAIWVIPLHFAFTLSFPLQRFLQCQLKNRVTAYAAAVALVVHILVCWLFVDGLKLGVVGTVATISISWWVNVLILLVYSTCGGCPLTWTGLSSEALTGLWEFLKLSASSGVMLCLENWYYRILIIMTGNLQNARIAVDSLSICMAINGWEMMIPLAFFAGTGVRVANELGAGNGKGARFATIVSVTQSLIIGLFFWVLIMLLHNQIAWIFSSSVAVLDAVNKLSLLLAFTVLLNSVQPVLSGVAVGSGWQSYVAYINLGCYYCIGVPLGFLMGWGFKLGVMGIWGGMIFGGTAVQTMILSFITMRCDWEKEAQKASARINKWSNTIK

SEQ ID NO: 50105 - protein, 429 aa, Arabidopsis thaliana
  peptide (1)..(429): Ceres Seq. ID no. 13648524
MLVITQAFAGHLGDLELAAISIVNNVTVGFNFGLLLGMASALETLCGQAFGAKKYHMLGVYMQRSWIVLFFCCVLLLPTYIFTTPVLKFLGQPDDIAELSGVVAIWVIPLHFAFTLSFPLQRFLQCQLKNRVTAYAAAVALVVHILVCWLFVDGLKLGVVGTVATISISWWVNVLILLVYSTCGGCPLTWTGLSSEALTGLWEFLKLSASSGVMLCLENWYYRILIIMTGNLQNARIAVDSLSICMAINGWEMMIPLAFFAGTGVRVANELGAGNGKGARFATIVSVTQSLIIGLFFWVLIMLLHNQIAWIFSSSVAVLDAVNKLSLLLAFTVLLNSVQPVLSGVAVGSGWQSYVAYINLGCYYCIGVPLGFLMGWGFKLGVMGIWGGMIFGGTAVQTMILSFITMRCDWEKEAQKASARINKWSNTIK

SEQ ID NO: 50106 - protein, 392 aa, Arabidopsis thaliana
  peptide (1)..(392): Ceres Seq. ID no. 13648525
MASALETLCGQAFGAKKYHMLGVYMQRSWIVLFFCCVLLLPTYIFTTPVLKFLGQPDDIAELSGVVAIWVIPLHFAFTLSFPLQRFLQCQLKNRVTAYAAAVALVVHILVCWLFVDGLKLGVVGTVATISISWWVNVLILLVYSTCGGCPLTWTGLSSEALTGLWEFLKLSASSGVMLCLENWYYRILIIMTGNLQNARIAVDSLSICMAINGWEMMIPLAFFAGTGVRVANELGAGNGKGARFATIVSVTQSLIIGLFFWVLIMLLHNQIAWIFSSSVAVLDAVNKLSLLLAFTVLLNSVQPVLSGVAVGSGWQSYVAYINLGCYYCIGVPLGFLMGWGFKLGVMGIWGGMIFGGTAVQTMILSFITMRCDWEKEAQKASARINKWSNTIK

SEQ ID NO: 50107 - DNA, 1746 bp, Arabidopsis thaliana
  misc_feature (1)..(1746): Ceres Seq. ID no. 13647702
  misc_feature (1)..(1746): Ortholog of  Ceres SEQ ID NO 15175785 as cited in SEQ ID NO 56970
  misc_feature (1)..(1746): Ortholog of  Ceres SEQ ID NO 13597407 as cited in SEQ ID NO 64106
  misc_feature (1)..(1746): Ortholog of  Ceres SEQ ID NO 14303309 as cited in SEQ ID NO 67739
ggttagtctactcattaatcctcacaactctctatctctctctccccattctctatcataatgacaggtgccacaccggaaaaccgaacggccccgtcgccaccaccgatgaaacatgtgccggagtcagttctgccggctaaaccaccaaagaggaacaattatgcattcgcgtgtgctatcttagcttccatgacttctatcctccttggttatgatataggagtgatgagtggagcaatgatttatataaagagagatttgaagattaatgatttacaaatcgggattctcgctggaagcctcaacatctattcacttataggatcttgcgccgccggaagaacctctgactggattggtcggcgttacactatcgtgttggctggagccatattcttcgccggagctatccttatgggattgtcccctaactacgctttcctcatgttcggaaggttcatcgccggtatcggcgtcggatatgctctcatgatcgcaccagtttataccgccgaagtctctccggcatcttcccgcggcttcctcaattccttccccgaggtgtttatcaacgccggaattatgctcgggtacgtatcaaatctggctttctcgaacttgccgttgaaggtaggatggagactgatgctcggaatcggagccgtaccttccgtgatactcgctatcggcgttctcgctatgccggaatctccacggtggctcgttatgcaaggccgtctcggtgatgccaagcgcgttctggacaaaacctctgattcccccaccgaagcaactctccgtctcgaagacatcaaacacgccgctggtattcccgccgattgccacgacgacgtcgttcaggtgtcgaggaggaacagtcatggagaaggagtttggagagagcttttaatccgaccaacaccagccgtgcgtcgtgttatgatcgccgcaatcggaatccatttcttccagcaagcttccggtatcgacgcggtggttctcttctcaccgcgaattttcaaaaccgccggactcaaaaccgatcaccaacagcttctagcgactgtagcagtaggagtagtgaagacatcattcatactagtcgccactttcttactcgacagaatcgggagaagaccattgcttctaaccagcgtaggaggaatggtactatctctagcagcgttagggacttctctaacgattatagaccagtcagagaagaaagtgatgtgggctgtggttgtagctatagctacggtgatgacttatgtagctacgttttcgataggagctggaccgataacttgggtttatagctcggagatattcccgttgaggttgagatcacagggctcgagtatgggtgtggtggtgaacagagtgactagtggtgtgatctcgatatcgtttcttccaatgtcgaaagcgatgactactggtggagcgttttacttgtttggagggattgcgactgtggcttgggttttcttttacactttcttgccggagacgcaagggaggatgcttgaggatatggatgagcttttcagtggtttcaggtggagagattccaagagtaagcctaagggtaaccccgagaagacggtaccgaatcccgaggttgagattggatcaaacaagcagtggaaggaaggagacacacaaagttcgtaggaaatttgatcagatatgtaatttgtatggtatgtgggtttaatgataaaacgaacaaattagcgt

SEQ ID NO: 50108 - protein, 539 aa, Arabidopsis thaliana
  peptide (1)..(539): Ceres Seq. ID no. 13647703
MTGATPENRTAPSPPPMKHVPESVLPAKPPKRNNYAFACAILASMTSILLGYDIGVMSGAMIYIKRDLKINDLQIGILAGSLNIYSLIGSCAAGRTSDWIGRRYTIVLAGAIFFAGAILMGLSPNYAFLMFGRFIAGIGVGYALMIAPVYTAEVSPASSRGFLNSFPEVFINAGIMLGYVSNLAFSNLPLKVGWRLMLGIGAVPSVILAIGVLAMPESPRWLVMQGRLGDAKRVLDKTSDSPTEATLRLEDIKHAAGIPADCHDDVVQVSRRNSHGEGVWRELLIRPTPAVRRVMIAAIGIHFFQQASGIDAVVLFSPRIFKTAGLKTDHQQLLATVAVGVVKTSFILVATFLLDRIGRRPLLLTSVGGMVLSLAALGTSLTIIDQSEKKVMWAVVVAIATVMTYVATFSIGAGPITWVYSSEIFPLRLRSQGSSMGVVVNRVTSGVISISFLPMSKAMTTGGAFYLFGGIATVAWVFFYTFLPETQGRMLEDMDELFSGFRWRDSKSKPKGNPEKTVPNPEVEIGSNKQWKEGDTQSS

SEQ ID NO: 50109 - protein, 523 aa, Arabidopsis thaliana
  peptide (1)..(523): Ceres Seq. ID no. 13647704
MKHVPESVLPAKPPKRNNYAFACAILASMTSILLGYDIGVMSGAMIYIKRDLKINDLQIGILAGSLNIYSLIGSCAAGRTSDWIGRRYTIVLAGAIFFAGAILMGLSPNYAFLMFGRFIAGIGVGYALMIAPVYTAEVSPASSRGFLNSFPEVFINAGIMLGYVSNLAFSNLPLKVGWRLMLGIGAVPSVILAIGVLAMPESPRWLVMQGRLGDAKRVLDKTSDSPTEATLRLEDIKHAAGIPADCHDDVVQVSRRNSHGEGVWRELLIRPTPAVRRVMIAAIGIHFFQQASGIDAVVLFSPRIFKTAGLKTDHQQLLATVAVGVVKTSFILVATFLLDRIGRRPLLLTSVGGMVLSLAALGTSLTIIDQSEKKVMWAVVVAIATVMTYVATFSIGAGPITWVYSSEIFPLRLRSQGSSMGVVVNRVTSGVISISFLPMSKAMTTGGAFYLFGGIATVAWVFFYTFLPETQGRMLEDMDELFSGFRWRDSKSKPKGNPEKTVPNPEVEIGSNKQWKEGDTQSS

SEQ ID NO: 50110 - protein, 495 aa, Arabidopsis thaliana
  peptide (1)..(495): Ceres Seq. ID no. 13647705
MTSILLGYDIGVMSGAMIYIKRDLKINDLQIGILAGSLNIYSLIGSCAAGRTSDWIGRRYTIVLAGAIFFAGAILMGLSPNYAFLMFGRFIAGIGVGYALMIAPVYTAEVSPASSRGFLNSFPEVFINAGIMLGYVSNLAFSNLPLKVGWRLMLGIGAVPSVILAIGVLAMPESPRWLVMQGRLGDAKRVLDKTSDSPTEATLRLEDIKHAAGIPADCHDDVVQVSRRNSHGEGVWRELLIRPTPAVRRVMIAAIGIHFFQQASGIDAVVLFSPRIFKTAGLKTDHQQLLATVAVGVVKTSFILVATFLLDRIGRRPLLLTSVGGMVLSLAALGTSLTIIDQSEKKVMWAVVVAIATVMTYVATFSIGAGPITWVYSSEIFPLRLRSQGSSMGVVVNRVTSGVISISFLPMSKAMTTGGAFYLFGGIATVAWVFFYTFLPETQGRMLEDMDELFSGFRWRDSKSKPKGNPEKTVPNPEVEIGSNKQWKEGDTQSS

SEQ ID NO: 50111 - DNA, 1822 bp, Arabidopsis thaliana
  misc_feature (1)..(1822): Ceres Seq. ID no. 13588449
  misc_feature (1)..(1822): Ortholog of  Ceres SEQ ID NO 15177463 as cited in SEQ ID NO 0
gaatgcaatttcaaaaatttccaaatcctttgtaattaaattgagtgtaccaatctggagaaaagatacgagactctgttgcagagaaccaaatatgaagccaatcttcgatatcaacgaaacttttgagaagcagctgaaggatttaacttcaaatgtgaagtctatacaagacaacttgttagaggagatcatcacacccaacaccaaaacagagtacctccaacgttttctcatcgataggttcgacaaagagctcttcaagaaaaacgtaccgatcgtgtcatatgaagatattaagccttatctcgaccgtgtcgttaatggagagtcatccgatgttatatcggcccgaactatcactggattcttgctaagttctggaacttctggaggagcacaaaagatgatgccatggaacaacaagtacttggacaatttgacattcatctacgatcttcgtatgcaagttataaccaagcatgtgaaaggtgtggaagaaggaaaagggatgatgtttcttttcactaaacaagaatccatgactccttctggcttgcctgctcgagtcgcaaccagcagctatttcaagagtgactatttcaagaaccgtccatcgaactggtattactcgtacaccagccctgatgaagtcatcttatgccctaacaacaccgaaagtctatactgccatttgctctgtggcttagtccaaagagacgaggttgtgaggacgggttccatctttgcttcagtcatggtccgagctatcgaggtccttaagaattcttgggaggagttgtgttcaaacatccgatcgggccatctcagtaactgggtcacagacttgggttgtcaaaactctgtttctttggttcttggagggccacgtcctgaattagcagacactattgaagaaatatgcaaccaaaattcttggaaaggtatagtcaaaagactttggccaaacaccaaatatatcgaaaccgttgtcactggttcaatgggacagtacgttcccatgttgaactactattgtaacgacttgcctctcgtttcaacaacttacggttcttcggagactacctttgggatcaatctagatcctctgtgcaaacctgaagatgtttcttacactttcatgcccaacatgtcttactttgagttcataccaatggatggaggagacaagaacgatgtggttgacctagaagatgtgaaacttgggtgcacttatgaacccgttgtcacaaatttcgctggcttgtataggatgagagtgggagatattgttttggtgactggtttctacaacaacgcgcctcagtttaagtttgtaagaagagaaaacgtcgtcttaagcatcgattccgataaaactaacgaagaagatctgtttaaggctgtgagtcaagcgaagctcgtactcgagtcatcaggtctcgatctgaaagacttcaccagttatgctgacacctcaacatttccaggtcactacgtggtttacttggaagtagataccaaagagggagaggagaaggagacggcacagtttgagctcgatgaagaggcactctccacgtgttgtttggtaatggaggagtcgcttgataatgtttacaagagatgtcgattcaaagacggatcgatcgggcctctcgagataagagtggtgcgtcaaggaacgtttgattctctcatggacttcttcatctcacaaggtgcttccaccggtcaatacaagactcctagatgcattaagtcagggaaagccttgcaagtattggagacatgtgtggtagccaaattcttcagtatttga

SEQ ID NO: 50112 - protein, 606 aa, Arabidopsis thaliana
  peptide (1)..(606): Ceres Seq. ID no. 13588450
NAISKISKSFVIKLSVPIWRKDTRLCCREPNMKPIFDINETFEKQLKDLTSNVKSIQDNLLEEIITPNTKTEYLQRFLIDRFDKELFKKNVPIVSYEDIKPYLDRVVNGESSDVISARTITGFLLSSGTSGGAQKMMPWNNKYLDNLTFIYDLRMQVITKHVKGVEEGKGMMFLFTKQESMTPSGLPARVATSSYFKSDYFKNRPSNWYYSYTSPDEVILCPNNTESLYCHLLCGLVQRDEVVRTGSIFASVMVRAIEVLKNSWEELCSNIRSGHLSNWVTDLGCQNSVSLVLGGPRPELADTIEEICNQNSWKGIVKRLWPNTKYIETVVTGSMGQYVPMLNYYCNDLPLVSTTYGSSETTFGINLDPLCKPEDVSYTFMPNMSYFEFIPMDGGDKNDVVDLEDVKLGCTYEPVVTNFAGLYRMRVGDIVLVTGFYNNAPQFKFVRRENVVLSIDSDKTNEEDLFKAVSQAKLVLESSGLDLKDFTSYADTSTFPGHYVVYLEVDTKEGEEKETAQFELDEEALSTCCLVMEESLDNVYKRCRFKDGSIGPLEIRVVRQGTFDSLMDFFISQGASTGQYKTPRCIKSGKALQVLETCVVAKFFSI

SEQ ID NO: 50113 - protein, 575 aa, Arabidopsis thaliana
  peptide (1)..(575): Ceres Seq. ID no. 13588451
MKPIFDINETFEKQLKDLTSNVKSIQDNLLEEIITPNTKTEYLQRFLIDRFDKELFKKNVPIVSYEDIKPYLDRVVNGESSDVISARTITGFLLSSGTSGGAQKMMPWNNKYLDNLTFIYDLRMQVITKHVKGVEEGKGMMFLFTKQESMTPSGLPARVATSSYFKSDYFKNRPSNWYYSYTSPDEVILCPNNTESLYCHLLCGLVQRDEVVRTGSIFASVMVRAIEVLKNSWEELCSNIRSGHLSNWVTDLGCQNSVSLVLGGPRPELADTIEEICNQNSWKGIVKRLWPNTKYIETVVTGSMGQYVPMLNYYCNDLPLVSTTYGSSETTFGINLDPLCKPEDVSYTFMPNMSYFEFIPMDGGDKNDVVDLEDVKLGCTYEPVVTNFAGLYRMRVGDIVLVTGFYNNAPQFKFVRRENVVLSIDSDKTNEEDLFKAVSQAKLVLESSGLDLKDFTSYADTSTFPGHYVVYLEVDTKEGEEKETAQFELDEEALSTCCLVMEESLDNVYKRCRFKDGSIGPLEIRVVRQGTFDSLMDFFISQGASTGQYKTPRCIKSGKALQVLETCVVAKFFSI

SEQ ID NO: 50114 - protein, 471 aa, Arabidopsis thaliana
  peptide (1)..(471): Ceres Seq. ID no. 13588452
MMPWNNKYLDNLTFIYDLRMQVITKHVKGVEEGKGMMFLFTKQESMTPSGLPARVATSSYFKSDYFKNRPSNWYYSYTSPDEVILCPNNTESLYCHLLCGLVQRDEVVRTGSIFASVMVRAIEVLKNSWEELCSNIRSGHLSNWVTDLGCQNSVSLVLGGPRPELADTIEEICNQNSWKGIVKRLWPNTKYIETVVTGSMGQYVPMLNYYCNDLPLVSTTYGSSETTFGINLDPLCKPEDVSYTFMPNMSYFEFIPMDGGDKNDVVDLEDVKLGCTYEPVVTNFAGLYRMRVGDIVLVTGFYNNAPQFKFVRRENVVLSIDSDKTNEEDLFKAVSQAKLVLESSGLDLKDFTSYADTSTFPGHYVVYLEVDTKEGEEKETAQFELDEEALSTCCLVMEESLDNVYKRCRFKDGSIGPLEIRVVRQGTFDSLMDFFISQGASTGQYKTPRCIKSGKALQVLETCVVAKFFSI

SEQ ID NO: 50115 - DNA, 1534 bp, Arabidopsis thaliana
  misc_feature (1)..(1534): Ceres Seq. ID no. 13588453
  misc_feature (1)..(1534): Ortholog of  Ceres SEQ ID NO 14310443 as cited in SEQ ID NO 54695
  misc_feature (1)..(1534): Ortholog of  Ceres SEQ ID NO 13596354 as cited in SEQ ID NO 68027
gagaaagctacgaaagaaaaaaaaaacaatctagcaacagaagaagcttcgagaagacgatggcgacggagacgaacgagaatctgataaactccttcatcgagatcacttcttcatcaagagaagaagctaatttcttcctcgaaagtcacacttggaatctagacgctgccgtttcaactttcctcgataacgatgccgccgcagccgccgaaccaaaccctaccgggccaccaccaccttcttctactattgccggtgcacaatctccttctcaatctcactctcccgattacactccgtctgaaacctctccctctccttcccgatcacgatctgcttctccgtcttctcgcgctgctccctacggtctccgatcgagaggcggtgctggagagaataaagaaactgagaatccgtcgggaattcggagttctaggagtcgtcaacacgctgggaatatccgtacattcgccgatctgaaccgttctccggctgatggcgagggcagtgattcggatgaagctaatgagtattataccggtggacaaaagagtgggatgatggtacaagatcctaagaaagtgaaagatgttgatgaactttttgaccaagctaggcagtcagctgtagacagacctgttgaaccatcaagatcagcttctacaagcttcactggagctgcgcgtttgttgtctggtgaagctgtttcgtcttctcctcagcaacaacagcaagagcagcctcaaaggattatgcacaccatcactttctggttgaatggtttcactgttaatgatggtccgttaagagggttcagtgaccctgaaaacgcagcctttatgaatagcatctcaaggtcagagtgccccagcgaactcgaaccagcagataagaagatccctgttcatgtcgatctggtcaggcgtggagaaaatttcaccgaaccaccaaagcctaaaaatccattccaaggtgtaggaagaaccctaggagccagcggatctggttcaagttcagcaccacaagcttcatctgccccaatgaacgtagcaccagcaccatcaagagggctagttgtagatccagcagcaccgacaacctctatccagctcagattagcagacggaacacgccttgtctccaggttcaacaaccaccacactgtcagagatgtacgtgggtttatcgacgcttctagacccggtggctccaaagagtaccagttgctaaccatggggttccctcctaaacaattgacagaattggaccaaaccatcgagcaagctggtatagctaatgccgtcgtcatccagaaattctagacttacataactcatcccttcgatttatgtctctctttttttttttttgcttttgtgtttttgaacctgatcgttgactttagtctctaactatctggtcaacgctctagaggctttggattttcgtagatttatcaaactcttttcttcagatttattaataactttagcagtttagcttttgcataatttatttatttcttcaatcg

SEQ ID NO: 50116 - protein, 440 aa, Arabidopsis thaliana
  peptide (1)..(440): Ceres Seq. ID no. 13588454
ESYERKKKQSSNRRSFEKTMATETNENLINSFIEITSSSREEANFFLESHTWNLDAAVSTFLDNDAAAAAEPNPTGPPPPSSTIAGAQSPSQSHSPDYTPSETSPSPSRSRSASPSSRAAPYGLRSRGGAGENKETENPSGIRSSRSRQHAGNIRTFADLNRSPADGEGSDSDEANEYYTGGQKSGMMVQDPKKVKDVDELFDQARQSAVDRPVEPSRSASTSFTGAARLLSGEAVSSSPQQQQQEQPQRIMHTITFWLNGFTVNDGPLRGFSDPENAAFMNSISRSECPSELEPADKKIPVHVDLVRRGENFTEPPKPKNPFQGVGRTLGASGSGSSSAPQASSAPMNVAPAPSRGLVVDPAAPTTSIQLRLADGTRLVSRFNNHHTVRDVRGFIDASRPGGSKEYQLLTMGFPPKQLTELDQTIEQAGIANAVVIQKF

SEQ ID NO: 50117 - protein, 421 aa, Arabidopsis thaliana
  peptide (1)..(421): Ceres Seq. ID no. 13588455
MATETNENLINSFIEITSSSREEANFFLESHTWNLDAAVSTFLDNDAAAAAEPNPTGPPPPSSTIAGAQSPSQSHSPDYTPSETSPSPSRSRSASPSSRAAPYGLRSRGGAGENKETENPSGIRSSRSRQHAGNIRTFADLNRSPADGEGSDSDEANEYYTGGQKSGMMVQDPKKVKDVDELFDQARQSAVDRPVEPSRSASTSFTGAARLLSGEAVSSSPQQQQQEQPQRIMHTITFWLNGFTVNDGPLRGFSDPENAAFMNSISRSECPSELEPADKKIPVHVDLVRRGENFTEPPKPKNPFQGVGRTLGASGSGSSSAPQASSAPMNVAPAPSRGLVVDPAAPTTSIQLRLADGTRLVSRFNNHHTVRDVRGFIDASRPGGSKEYQLLTMGFPPKQLTELDQTIEQAGIANAVVIQKF

SEQ ID NO: 50118 - protein, 254 aa, Arabidopsis thaliana
  peptide (1)..(254): Ceres Seq. ID no. 13588456
MMVQDPKKVKDVDELFDQARQSAVDRPVEPSRSASTSFTGAARLLSGEAVSSSPQQQQQEQPQRIMHTITFWLNGFTVNDGPLRGFSDPENAAFMNSISRSECPSELEPADKKIPVHVDLVRRGENFTEPPKPKNPFQGVGRTLGASGSGSSSAPQASSAPMNVAPAPSRGLVVDPAAPTTSIQLRLADGTRLVSRFNNHHTVRDVRGFIDASRPGGSKEYQLLTMGFPPKQLTELDQTIEQAGIANAVVIQKF

SEQ ID NO: 50119 - DNA, 1606 bp, Arabidopsis thaliana; identical to SEQ ID NO: 46930
  misc_feature (1)..(1606): Ceres Seq. ID no. 13592120
  misc_feature (1)..(1606): Ortholog of  Ceres SEQ ID NO 12460981 as cited in SEQ ID NO 65146

SEQ ID NO: 50120 - protein, 433 aa, Arabidopsis thaliana; identical to SEQ ID NO: 46931
  peptide (1)..(433): Ceres Seq. ID no. 13592121

SEQ ID NO: 50121 - protein, 409 aa, Arabidopsis thaliana; identical to SEQ ID NO: 46932
  peptide (1)..(409): Ceres Seq. ID no. 13592122

SEQ ID NO: 50122 - protein, 341 aa, Arabidopsis thaliana; identical to SEQ ID NO: 46933
  peptide (1)..(341): Ceres Seq. ID no. 13592123

SEQ ID NO: 50123 - DNA, 1643 bp, Arabidopsis thaliana
  misc_feature (1)..(1643): Ceres Seq. ID no. 12591906
  misc_feature (1)..(1643): Ortholog of  Ceres SEQ ID NO 15226943 as cited in SEQ ID NO 53160
actcatcacaatagcgggaaactcatccggcttctggaaatttccgttttatccgattcgttctcacgagatgatggctcgttaccacaggagatcgatgatcttgtgcttagttctgctctcattaagcatatcgccgagccaaggcttcctagggacagaggaaaagatcaaatccgctgtcttttactcaccaaaacttgtgatgaatccaggatcagttgcaaatccttacttattcgacatcgatttcccaagaggtcatatcggcctcaaagctttcgatgctgaagtggttgacgaagcgggcaaacccgttcctctacacgagacctatctccaccattggattgtcgagccatactatgtacgtaaaggttccaagcttccacagagagaaatgttcaggaatcatggattttccagggaagatcctgaaagcaatcttgattccaagtcagatattattcttgtgaaaaatggagggttgtgcaggagtttaacactcagacatttctttggtttaggatcagaaacccgcgaaacctcgacgtatgttcctgatccctacgctattgaaatcggtaatcctgaggaaacacctgatggttatgaattcaaatggcttcttaacattcacgcgatagacaccagaggtgtggaagataagaaaggatgcatagaatgtttgtgtgatctgtataatgttaccattgatgagtatggtcgagctataaggcctggatacaaaggaggtttatactgctgctatgataagactcaatgtcgggtgaaaagcggatttgacaatggggagaaaacaagaactctgtatttgaagtataccgtgagatgggttgattgggacagctcggttttgcccgctaaggtttatattttcgatgttacagattcttgggaaagatcaaaaggagatagccaagaacatatttgccatgtggaatacgaggtgaaaccgtgcaaaaccaatggcgatggatgcgttgacgttaagaaaaagagcttagtgatgccatttgatgggtatattgtctacggggtagctcaccagcacgctggtggtatcggtggtgctctataccgagagaacggtgaagggatatgcgcttcaatgccgaagtatggcaatggagatgaacctggaaacgaagctggttacattgttggaatgtcgtcttgttatccagctgatccagtgaaagtgagctatggagagacattgactttggaatctaattacagtaatgccgttggtcataccggagttatgggactcttttacatcctcgttgctcagcagctgccggaaccagatagctccttgcctaataaacaacattttgaggcacctgcgagaagcttgagctttttagccatttttgcagtgacggtagttgtggctgttgtggttttaatagccgccgtgatataccggagacagaaacgggaagatggttaccaatcacttagtacttaaaaaagagcaaaaaccatgtcgactctatatatgtcttcaaagtgaattctgtttgtatacatagaataaaagattattttgttgtcatcttcctctgatgtgatatctctgtaatagttacgtgtaagaagaacttttctttctc

SEQ ID NO: 50124 - protein, 498 aa, Arabidopsis thaliana
  peptide (1)..(498): Ceres Seq. ID no. 12591907
LITIAGNSSGFWKFPFYPIRSHEMMARYHRRSMILCLVLLSLSISPSQGFLGTEEKIKSAVFYSPKLVMNPGSVANPYLFDIDFPRGHIGLKAFDAEVVDEAGKPVPLHETYLHHWIVEPYYVRKGSKLPQREMFRNHGFSREDPESNLDSKSDIILVKNGGLCRSLTLRHFFGLGSETRETSTYVPDPYAIEIGNPEETPDGYEFKWLLNIHAIDTRGVEDKKGCIECLCDLYNVTIDEYGRAIRPGYKGGLYCCYDKTQCRVKSGFDNGEKTRTLYLKYTVRWVDWDSSVLPAKVYIFDVTDSWERSKGDSQEHICHVEYEVKPCKTNGDGCVDVKKKSLVMPFDGYIVYGVAHQHAGGIGGALYRENGEGICASMPKYGNGDEPGNEAGYIVGMSSCYPADPVKVSYGETLTLESNYSNAVGHTGVMGLFYILVAQQLPEPDSSLPNKQHFEAPARSLSFLAIFAVTVVVAVVVLIAAVIYRRQKREDGYQSLST

SEQ ID NO: 50125 - protein, 475 aa, Arabidopsis thaliana
  peptide (1)..(475): Ceres Seq. ID no. 12591908
MMARYHRRSMILCLVLLSLSISPSQGFLGTEEKIKSAVFYSPKLVMNPGSVANPYLFDIDFPRGHIGLKAFDAEVVDEAGKPVPLHETYLHHWIVEPYYVRKGSKLPQREMFRNHGFSREDPESNLDSKSDIILVKNGGLCRSLTLRHFFGLGSETRETSTYVPDPYAIEIGNPEETPDGYEFKWLLNIHAIDTRGVEDKKGCIECLCDLYNVTIDEYGRAIRPGYKGGLYCCYDKTQCRVKSGFDNGEKTRTLYLKYTVRWVDWDSSVLPAKVYIFDVTDSWERSKGDSQEHICHVEYEVKPCKTNGDGCVDVKKKSLVMPFDGYIVYGVAHQHAGGIGGALYRENGEGICASMPKYGNGDEPGNEAGYIVGMSSCYPADPVKVSYGETLTLESNYSNAVGHTGVMGLFYILVAQQLPEPDSSLPNKQHFEAPARSLSFLAIFAVTVVVAVVVLIAAVIYRRQKREDGYQSLST

SEQ ID NO: 50126 - protein, 474 aa, Arabidopsis thaliana
  peptide (1)..(474): Ceres Seq. ID no. 12591909
MARYHRRSMILCLVLLSLSISPSQGFLGTEEKIKSAVFYSPKLVMNPGSVANPYLFDIDFPRGHIGLKAFDAEVVDEAGKPVPLHETYLHHWIVEPYYVRKGSKLPQREMFRNHGFSREDPESNLDSKSDIILVKNGGLCRSLTLRHFFGLGSETRETSTYVPDPYAIEIGNPEETPDGYEFKWLLNIHAIDTRGVEDKKGCIECLCDLYNVTIDEYGRAIRPGYKGGLYCCYDKTQCRVKSGFDNGEKTRTLYLKYTVRWVDWDSSVLPAKVYIFDVTDSWERSKGDSQEHICHVEYEVKPCKTNGDGCVDVKKKSLVMPFDGYIVYGVAHQHAGGIGGALYRENGEGICASMPKYGNGDEPGNEAGYIVGMSSCYPADPVKVSYGETLTLESNYSNAVGHTGVMGLFYILVAQQLPEPDSSLPNKQHFEAPARSLSFLAIFAVTVVVAVVVLIAAVIYRRQKREDGYQSLST

SEQ ID NO: 50127 - DNA, 1413 bp, Arabidopsis thaliana
  misc_feature (1)..(1413): Ceres Seq. ID no. 13588758
  misc_feature (1)..(1413): Ortholog of  Ceres SEQ ID NO 13597407 as cited in SEQ ID NO 64106
atggagacaagaaaagacgacatggagaaaaggaacgacaaatccgagccgttgctgctgccggagaatggatccgacgtctcagaagaagcatcatggatggtttatctaagcacgatcattgccgtttgcggttcctacgagtttggaacatgcgtgggatactccgctccaacacagtttgggattatggaagagcttaatttatcatattcccagttttcggttttcggatcgatattgaatatgggagcagtgctcggcgccattacatcggggaagatttctgatttcatcggtcggaaaggggccatgcggttgtcttcagtgatctctgccatcggctggctgataatttacttggccaagggtaacgtacctttggatttcggaagatttctaacgggttatggttgcggtaccctttcctttgtggtaccggtcttcatcgccgaaattagtccgagaaaattgagaggagccttagcgacgcttaaccagctctttatcgtaatcggattagcttctatgttcctcataggcgccgttgtaaattggagaactcttgcactaaccggagttgcaccgtgcgtggttctattctttgggacttggttcatccctgaatcacccagatggctggaaatggttggccgccacagtgattttgaaattgcgttgcaaaaactgaggggtcctcaggccaatatcacaagagaagccggggaaattcaggagtacttagcgagtcttgctcacctcccgaaagccacattgatggaccttattgacaaaaagaatattcgatttgtgatagttggagttggtttgatgtttttccaacaattcgttggaattaatggcgttatcttctacgcacaacaaatattcgtatcagcaggagcatccccaactcttggaagcattctatactcgatcgaacaagtcgttctcacagcactaggcgcaacattgctaattgatcggcttggaagaaggccacttcttatggcttcagctgttgggatgctgattggatgtttgctcatcggaaattcatttcttttgaaggctcatggtttagcacttgacatcattccggctctggcagttagtggtgtcttggtctacatcggttcgttctctattggaatgggtgcaatcccatgggttataatgtctgagatatttccaataaatttgaaaggaactgccggaggacttgtcactgtagtaaattggctaagttcatggcttgtctcattcactttcaactttctcatgatttggagccctcatggtacattttatgtgtatggtggggtatgtgtattggctattatcttcatagcaaaacttgttcctgaaactaaaggcagaaccttggaagagattcaagcaatgatgatgtaa

SEQ ID NO: 50128 - protein, 470 aa, Arabidopsis thaliana
  peptide (1)..(470): Ceres Seq. ID no. 13588759
METRKDDMEKRNDKSEPLLLPENGSDVSEEASWMVYLSTIIAVCGSYEFGTCVGYSAPTQFGIMEELNLSYSQFSVFGSILNMGAVLGAITSGKISDFIGRKGAMRLSSVISAIGWLIIYLAKGNVPLDFGRFLTGYGCGTLSFVVPVFIAEISPRKLRGALATLNQLFIVIGLASMFLIGAVVNWRTLALTGVAPCVVLFFGTWFIPESPRWLEMVGRHSDFEIALQKLRGPQANITREAGEIQEYLASLAHLPKATLMDLIDKKNIRFVIVGVGLMFFQQFVGINGVIFYAQQIFVSAGASPTLGSILYSIEQVVLTALGATLLIDRLGRRPLLMASAVGMLIGCLLIGNSFLLKAHGLALDIIPALAVSGVLVYIGSFSIGMGAIPWVIMSEIFPINLKGTAGGLVTVVNWLSSWLVSFTFNFLMIWSPHGTFYVYGGVCVLAIIFIAKLVPETKGRTLEEIQAMMM

SEQ ID NO: 50129 - protein, 463 aa, Arabidopsis thaliana
  peptide (1)..(463): Ceres Seq. ID no. 13588760
MEKRNDKSEPLLLPENGSDVSEEASWMVYLSTIIAVCGSYEFGTCVGYSAPTQFGIMEELNLSYSQFSVFGSILNMGAVLGAITSGKISDFIGRKGAMRLSSVISAIGWLIIYLAKGNVPLDFGRFLTGYGCGTLSFVVPVFIAEISPRKLRGALATLNQLFIVIGLASMFLIGAVVNWRTLALTGVAPCVVLFFGTWFIPESPRWLEMVGRHSDFEIALQKLRGPQANITREAGEIQEYLASLAHLPKATLMDLIDKKNIRFVIVGVGLMFFQQFVGINGVIFYAQQIFVSAGASPTLGSILYSIEQVVLTALGATLLIDRLGRRPLLMASAVGMLIGCLLIGNSFLLKAHGLALDIIPALAVSGVLVYIGSFSIGMGAIPWVIMSEIFPINLKGTAGGLVTVVNWLSSWLVSFTFNFLMIWSPHGTFYVYGGVCVLAIIFIAKLVPETKGRTLEEIQAMMM

SEQ ID NO: 50130 - protein, 437 aa, Arabidopsis thaliana
  peptide (1)..(437): Ceres Seq. ID no. 13588761
MVYLSTIIAVCGSYEFGTCVGYSAPTQFGIMEELNLSYSQFSVFGSILNMGAVLGAITSGKISDFIGRKGAMRLSSVISAIGWLIIYLAKGNVPLDFGRFLTGYGCGTLSFVVPVFIAEISPRKLRGALATLNQLFIVIGLASMFLIGAVVNWRTLALTGVAPCVVLFFGTWFIPESPRWLEMVGRHSDFEIALQKLRGPQANITREAGEIQEYLASLAHLPKATLMDLIDKKNIRFVIVGVGLMFFQQFVGINGVIFYAQQIFVSAGASPTLGSILYSIEQVVLTALGATLLIDRLGRRPLLMASAVGMLIGCLLIGNSFLLKAHGLALDIIPALAVSGVLVYIGSFSIGMGAIPWVIMSEIFPINLKGTAGGLVTVVNWLSSWLVSFTFNFLMIWSPHGTFYVYGGVCVLAIIFIAKLVPETKGRTLEEIQAMMM

SEQ ID NO: 50131 - DNA, 1439 bp, Arabidopsis thaliana
  misc_feature (1)..(1439): Ceres Seq. ID no. 13592666
  misc_feature (1)..(1439): Ortholog of  Ceres SEQ ID NO 12609146 as cited in SEQ ID NO 52118
  misc_feature (1)..(1439): Ortholog of  Ceres SEQ ID NO 13594056 as cited in SEQ ID NO 55691
  misc_feature (1)..(1439): Ortholog of  Ceres SEQ ID NO 13638136 as cited in SEQ ID NO 58644
  misc_feature (1)..(1439): Ortholog of  Ceres SEQ ID NO 13596868 as cited in SEQ ID NO 62806
  misc_feature (1)..(1439): Ortholog of  Ceres SEQ ID NO 12587035 as cited in SEQ ID NO 63605
  misc_feature (1)..(1439): Ortholog of  Ceres SEQ ID NO 14301886 as cited in SEQ ID NO 64201
  misc_feature (1)..(1439): Ortholog of  Ceres SEQ ID NO 13595885 as cited in SEQ ID NO 69265
  misc_feature (1)..(1439): Ortholog of  Ceres SEQ ID NO 12566239 as cited in SEQ ID NO 0
  misc_feature (1)..(1439): Ortholog of  Ceres SEQ ID NO 13599119 as cited in SEQ ID NO 0
  misc_feature (1)..(1439): Ortholog of  Ceres SEQ ID NO 15179992 as cited in SEQ ID NO 0
gatatttcaaaaagttagctggttcttcgtcataaatttctccagttttgtcaaaaacgaagaccacagcgagccctaaatcttgtcgggcgttgaatcttacaaatttgcaagtgattctcgtcatacctgtatcttcttcttcttcttcgttcttcttctggatttgattggtggacaaaggtagctgaatcagcttcagaattgaatttgatctttgtttgagacaagaagcattggtgtttggagcatttctgaggagttatgggatatctgaattctgttttgtcatcttcgagccaggttcactccgacgatggacctgttagcggtggtggcctcagtcagaacgggaagttcagctatggatatgcaagctctcccggtaaaagatcttctatggaggacttctatgaaactaggatcgacggcgttgaaggggaaatagttggtctatttggagtctttgatggacatggaggtgcacgtgcagctgaatatgtgaagcaaaatctcttcagtaacctgatcaggcatccaaagttcatctctgataccacagctgcaatagctgatgcatacaaccaaacagactcagagtttcttaaatcagaaaatagtcagaacagagatgctggttcaacggcgtcaacagccatcttagttggtgaccgtttacttgttgcaaatgtaggggactctagagctgtaatatgcagaggtggcaatgctattgctgtatcccgagatcacaagcctgatcaaagtgacgagcgccaaagaattgaggatgcaggaggatttgtcatgtgggctggaacatggagagttggaggagttcttgctgtttctcgtgcatttggcgataggttgttgaagcagtatgttgttgctgatccggagatacaggaggaaaaagttgatagctctctcgagtttctcattcttgcaagtgatggtctctgggacgttgtatctaacgaggaagccgtaggcatgatcaaggcgatagaagatcccgaggaaggtgcaaagagactgatgatggaagcttaccaaagaggaagtgcagacaacataacttgtgtcgtcgtacgtttcttttcagaccaagcaggaggaataggttccagcagcaccaatatcccaatagatcatggtatcgtacctgaccgaatctccggtgactcatcaacctagttctaacattggtaacatccttttcgggtttcgtgatctcaaaacaagtgaatctgggagattatatattgttataaaaaggtgaaaggttttcaagaatatacaaacaaaactctcacacgaacgttttttgctgtgtcgtgtatcttttgttgttgttatacatttgttacttgggtatgtagctatagagagaataaatgtattagtacaagttctgattcattctacattgtgtc

SEQ ID NO: 50132 - protein, 311 aa, Arabidopsis thaliana
  peptide (1)..(311): Ceres Seq. ID no. 13592667
MGYLNSVLSSSSQVHSDDGPVSGGGLSQNGKFSYGYASSPGKRSSMEDFYETRIDGVEGEIVGLFGVFDGHGGARAAEYVKQNLFSNLIRHPKFISDTTAAIADAYNQTDSEFLKSENSQNRDAGSTASTAILVGDRLLVANVGDSRAVICRGGNAIAVSRDHKPDQSDERQRIEDAGGFVMWAGTWRVGGVLAVSRAFGDRLLKQYVVADPEIQEEKVDSSLEFLILASDGLWDVVSNEEAVGMIKAIEDPEEGAKRLMMEAYQRGSADNITCVVVRFFSDQAGGIGSSSTNIPIDHGIVPDRISGDSST

SEQ ID NO: 50133 - protein, 266 aa, Arabidopsis thaliana
  peptide (1)..(266): Ceres Seq. ID no. 13592668
MEDFYETRIDGVEGEIVGLFGVFDGHGGARAAEYVKQNLFSNLIRHPKFISDTTAAIADAYNQTDSEFLKSENSQNRDAGSTASTAILVGDRLLVANVGDSRAVICRGGNAIAVSRDHKPDQSDERQRIEDAGGFVMWAGTWRVGGVLAVSRAFGDRLLKQYVVADPEIQEEKVDSSLEFLILASDGLWDVVSNEEAVGMIKAIEDPEEGAKRLMMEAYQRGSADNITCVVVRFFSDQAGGIGSSSTNIPIDHGIVPDRISGDSST

SEQ ID NO: 50134 - DNA, 1790 bp, Arabidopsis thaliana; identical to SEQ ID NO: 49263
  misc_feature (1)..(1790): Ceres Seq. ID no. 13592250
  misc_feature (1)..(1790): Ortholog of  Ceres SEQ ID NO 14311862 as cited in SEQ ID NO 51654
  misc_feature (1)..(1790): Ortholog of  Ceres SEQ ID NO 13597334 as cited in SEQ ID NO 64244
  misc_feature (1)..(1790): Ortholog of  Ceres SEQ ID NO 15224550 as cited in SEQ ID NO 0

SEQ ID NO: 50135 - protein, 422 aa, Arabidopsis thaliana; identical to SEQ ID NO: 49264
  peptide (1)..(422): Ceres Seq. ID no. 13592251

SEQ ID NO: 50136 - protein, 334 aa, Arabidopsis thaliana; identical to SEQ ID NO: 49265
  peptide (1)..(334): Ceres Seq. ID no. 13592252

SEQ ID NO: 50137 - protein, 290 aa, Arabidopsis thaliana; identical to SEQ ID NO: 49266
  peptide (1)..(290): Ceres Seq. ID no. 13592253

SEQ ID NO: 50138 - DNA, 1344 bp, Arabidopsis thaliana
  misc_feature (1)..(1344): Ceres Seq. ID no. 13647921
  misc_feature (1)..(1344): Ortholog of  Ceres SEQ ID NO 14310713 as cited in SEQ ID NO 53582
atctgagtcccggagaaatcgatcgtagctctctgtgcccttcgcttaaaaaaatatcgcttctctcgagaggggaaggaaagttcatttctttttgtccaattctttcaacttctcgttccaatcccctcaattctccgtttcaccgaacgcacttcgaacccttaattgctttttgcgggtcaagtttcgattcgagcgttttagggtttcgtatctgaatcggtcgacaagataaacccttttgtgggggtttcctctagatttcgaaaaaagagggatagctttcgtttggatggaaattctctgaaactaaactacatagtgatatggagacacaaattcatcaacttgagcaggaagcatataccgctgttttaagggcttttaaagcgcagtctgatgcgatttcttgggaaaaagaaagcttgataaccgaattgcgtaaagaattgagagtatctgatgatgaacatcgagagcttctcagtagggtcaataaggatgatactatccagaggataagagattggagacagggaggcgcaagccaaattactagacatgcaactattcagccttttgatgttcttcctagtcccactttctcagctgcccgaaagaaacagaaaacatttccatcttataatccatcaattggtgcgactggaaataggtcattcaataatcgtctggtatccagtggcatatcaggaaatgaatctgctgaagctctgatcggaagaaaagtgtggacaaaatggcctgaagataaccacttctatgaagcaattataacccagtacaatgcagatgagggtcggcatgctttggtgtatgatatacacgcagctaatgaaacgtgggaatgggttgatctcaaggagataccaccggaagacataagatgggatggggaggagagtggggtagctttaaacattggacatggaagtgcatccttccgtggcaacagaagaggccaaatccatggtggtagagggagaggaccaagaattcatcaaccaagaagggaacttgtaccgccaccaacacaacagaatggtagtggtgggcggagaacttcctctgatgatattgagttgttcaacacagactcgcttgtgaaggaggtggagagagttttcgattctacgcatcctgatccactcgagctcgacaaggccaagaaaatgctcaaggaacatgaacaggcactcattgctgccattgcaaggcttgctgatacttcggatggcgaaatggatggagatccaccatattcgcatgatcatccaatgccacagggatgagagaaaagctgtatgttactcaggattctgt

SEQ ID NO: 50139 - protein, 327 aa, Arabidopsis thaliana
  peptide (1)..(327): Ceres Seq. ID no. 13647922
METQIHQLEQEAYTAVLRAFKAQSDAISWEKESLITELRKELRVSDDEHRELLSRVNKDDTIQRIRDWRQGGASQITRHATIQPFDVLPSPTFSAARKKQKTFPSYNPSIGATGNRSFNNRLVSSGISGNESAEALIGRKVWTKWPEDNHFYEAIITQYNADEGRHALVYDIHAANETWEWVDLKEIPPEDIRWDGEESGVALNIGHGSASFRGNRRGQIHGGRGRGPRIHQPRRELVPPPTQQNGSGGRRTSSDDIELFNTDSLVKEVERVFDSTHPDPLELDKAKKMLKEHEQALIAAIARLADTSDGEMDGDPPYSHDHPMPQG

SEQ ID NO: 50140 - DNA, 5086 bp, Arabidopsis thaliana
  misc_feature (1)..(5086): Ceres Seq. ID no. 13609961
  misc_feature (1)..(5086): Ortholog of  Ceres SEQ ID NO 15224473 as cited in SEQ ID NO 66479
aaattgatctcatcttcaatcaaattcatcatcttcgatactcgtttcttctctctttggtttcatacagatcccaaatttctagggctcctagtcctttgatttcttcgactggaatcgcaattccccactacgtcaagctggacagacaccgaagggatcgccatgagagtggcggctacgaggattcctaccataaccaccgagcccatcccagaggtccatctcgtccctcagattcacgcttcgaagaggatgatgatgattttcgccgccaccgtcgtcgtcgtggaagcagccctagcaattatcgaattggaattgggggcggaggaggaggtaatggtggtcgacgctgggaagatgacactcctaaggattttgatggtcccggagatggaggtttccggcagatgaatggtcccccagatagagtagattttaagcctatgggtcctcaccatggtggaagttttcggcctatggggtttgcctacgatgatggttttcgtccaatgggtcctaacggtggtgtgggaggagaagggacacggtcaattgttggagctcggtataactatcccgcgaagtatcctccttcagagagtccagacaggaggagatttatcggtaaagcaatggagtctgattattctgtaagaccgactacaccgccggtccagcagcctctttccggtcagaaaagagggtatcctatctcagaccatggcagctttactggaactgatgtctctgatcgtagcagtacagtcaagctttttgttggatctgtaccaaggacagctacagaagaagaaatccgtccctatttcgaacagcatggaaatgttctggaggttgctctgatcaaggacaagagaactggacagcagcaaggtatgtcaatctccattttattaggaaatagtcgtgaattatactttttaaaatttcaggtctccctgaaaaggctgatgggaagcaaccccagtctcatcattggcctccaattgtttgcaacaattttcgggcttattgcttatgcttgccagcgtcttatctgtgttcgattctgtcacagaagaaggctacctgtgctaagaaagggtttatgtacttatgttgggcaaatagatttcgctacttgtgtgtattctagaactttagatgtgtttgaaaagtgtagaatttattgagggtgttttagagttggagttaatgtacagagaactgaattttgctgttgcctttatagtgggaattggttataagaacatcgctattttcctctcctattgaaattcattttctttactcttcctctagatggattgaagatgttgtgtatggtcttgacaggatgaatgtatttttttaagttggtagtttgataaggacatgaggttcaaaagatggtttcttgatttgccactcctgctggtcaaagatttggccgtctttctaattttatcatgttggaggtttggcgtcttcattttctttcatatcaatttatgggtgtgctgtctattggttaatgatggcattccttttacctttttggatgagtgatgctggaatgaatgcgtttctccttttcttttgttgatggcctgaggaactatgatggctatatttctttccactctctttgaatggcctgaaatgtgtgctttctgtatggtcgtccctctcaatttcttggatggcttgtgatgtgatataccatctctcgtcataggtgaatgaatgatttgtttagtagttcttatgtatgtattttgtatgttcccacgtctctattccttggatggcttgtgatgtgatataccatctctcgtcatagatgaatgaatattttgttgagtagctcttatgtctgtatggtggcccttgcagtgctgatcgatatttatgtggaagaaatgtttgatgatagattttttttgtatgctcccttttcgctaatcaagcctttgtgcttgcaaggtgcaactgttattttattattgaatttcctgttctactactccatttagttctgtctctattttgtcagtgtgaagaaatactagacgatgaatggtgtgtttgtacgtgcatagttatttataaattcttgactttccaagaagttattatttctataactgctacacctttgtggatggcagaacaaatgcatctgattgtggtgacataaacacttttgatcgcggttgaatgtactagattccatacaactctttcttcagccttgtgaaatattattatgttaggtggtgcaaacatatggaaggaacctgattgttttagtttcttagaatagtttctgatgttaatacagcatgttgacttcactctcttgcccttgatcaatcagcatcaggcaggggcctaattatgtattacatgaagcaatcgtattcttttctgaattagatttttttccaatgagttatcttgcccataactgtagttctttatttgaagtcttcaaatgcttgatgtatggtgacgaaaatgtgtatatgttttggttttgattatccgctactcatcaattattgagattcttacatactgaatccgttactttggacctatagttatgttttatgttgctaattaacttgtacatgtttctagattttctttcaaatggatcctgcttggacaaatgcagccaccctttgtctgaaaggccctcttgtagatatgttatctgcagatactgactgtgttcaattttttaatatttgtttttgccatattctccatttgaagacattaatttattctctccaacaactttacatcaatatttaagtggaggctgtcagacatgtcttatgattttcctactgaacttatgtgctttgagtagtacatcttgttactagtacaatttgatggtagaaggaaaagttgaaccctgaaacagatagcttaagtatcagtctttaatgcaggctgttgttttgtaaaatatgcaacttcgaaagatgcggatagagccatcagagcactgcacaatcagatcactcttcctgggggaactggtcctgttcaagttcgatatgctgacggggagagagaacgcataggcaccctagagtttaagctttttgttggttcactaaacaagcaagccactgaaaaagaagttgaggagatctttttacaatttggtcatgtggaagatgtctatctcatgcgggatgaatatagacagagtcgtggatgtgggtttgttaaatattcaagcaaagagacggcaatggcagctatcgatggtctcaacggaacttataccatgagaggttgcaatcagccattgattgttcggtttgctgagccaaagaggcctaaacctggcgagtcaagggaaatggcacctcctgttggacttggttcagggcctcgttttcaagcttcaggaccaaggcctacctctaactttggtgactctagtggggatgtaagccacacaaatccttggcgtccagctacttcacgaaacgtaggcccacctagtaacactgggatccgtggtgccggtagtgactttccccctaaaccaggtcaagcaacattgccttcaaatcagggtggcccgttaggtggttatggtgttcctccccttaaccctctcccagtccctggagtttcatcttctgccacattgcaacagcaaaatcgggcagctggccagcatataacaccattaaaaaaacctcttcacagtccacagggtctccctctccccctccgtccgcaaactaatttccctggggcccaggcacccttgcagaatccttatgcttatagcagccagttgcctacctctcagctgccaccacagcaaaacatcagtcgtgcaactgctcctcaaactcctttgaacattaatctacggccaacaactgtgtcttctgcaactgttcaatttccccctcgttcccagcagcaaccgctacaaaagatgcaacatcctccttctgagctagctcagctcttgtcgcagcaaactcagagtctacaagcaacattccaatcgtctcagcaagcaatttctcagctgcagcagcaggtgcagtctatgcagcaaccaaaccaaaatttaccactctcacagaatggccgagctggtaaacaacagtgggctggatctgcaattccaagagtggctagcaccactggttcgacaccagtgagctatgtgcaaacagctgcacctgcagtaagtcagagcgtaggttctgtcaaatgtacctggaccgagcatacctcgcctgatggatttaaatattattacaatggtctaacgggtgaaagcaagtgggaaaaacctgaggaaatgatagtgttcgaacgagagcaacagaaacagcaacaacatcaagagaagccaactatacagcagtcccagacccaattacagccgttgcagcaacaaccacaacaagttcagcagcaatatcagggccagcaattacagcagccgttttattcttcactgtatccaactccaggggccagccataatactcagtatccatcattgccagtaggtcaaaatagccagtttcctatgtcaggaattggtcagaatgctcaggattatgctcggacacatatacccgtgggagctgcttcaatgaatgatatatcaagaactcaacagagccgtcaatctccccaagaactcatgtggaagaataaagcttgaggtacatgagacgaggagctaaactatctcagtagctagatagaaatttctggaactaattagtcaaggagaggaaaagcagcaatggtagtgtccttagtctctgatttttttagttaaccccttcagttataatagataggcgatcgtagaccatctgcattctatcttttctctaatcagatatctcctcctttttcattttaagagctgccaaacaatggcctgttgtaacatagctagcgcaagttatgtctcatgttgtgttactagtagtaacttagctgggtaaaccaaactttgatccagattaggagtcatatataattatataaatagaatatgtacattcat

SEQ ID NO: 50141 - protein, 505 aa, Arabidopsis thaliana; identical to SEQ ID NO: 41238
  peptide (1)..(505): Ceres Seq. ID no. 13609962

SEQ ID NO: 50142 - protein, 483 aa, Arabidopsis thaliana; identical to SEQ ID NO: 41239
  peptide (1)..(483): Ceres Seq. ID no. 13609963

SEQ ID NO: 50143 - protein, 471 aa, Arabidopsis thaliana; identical to SEQ ID NO: 41240
  peptide (1)..(471): Ceres Seq. ID no. 13609964

SEQ ID NO: 50144 - DNA, 1234 bp, Arabidopsis thaliana
  misc_feature (1)..(1234): Ceres Seq. ID no. 13588117
  misc_feature (1)..(1234): Ortholog of  Ceres SEQ ID NO 14303324 as cited in SEQ ID NO 54563
  misc_feature (1)..(1234): Ortholog of  Ceres SEQ ID NO 14308575 as cited in SEQ ID NO 58782
tcagaacacaaaagtttggctacagttgtgttctgatagtgatgatcatgatcatcacatgaataagtagaagatatctcttaccttctccttcttctaataagatcagagttttggttcttatttctttgacctctcaaaacaatgggtagatcaccgtgttgtgacaaattgggtttgaagaaaggaccttggacaccagaggaggatcagaaacttttagcttatattgaagaacatggtcatggaagttggcgttcattgcctgagaaagctggtctccatcgatgcggaaagagttgtagactaagatggactaactacctaagacctgacatcaaaagaggcaaattcaacttacaagaagaacaaaccattatccaactccatgctctgttaggaaacagatggtcagcgattgctactcatttgccaaagagaacagacaacgagatcaagaactattggaacactcatttgaagaaacggttagtgaaaatggggattgatccagtgactcataaacccaaaaacgagactcctttatcttctcttggtctatccaagaacgcagctatacttagccacactgctcaatgggaaagtgcaaggcttgaagctgaagcaagactagctagagaatcaaagcttcttcatttacaacattaccaaaccaaaacatcatctcaacctcatcatcatcatggattcactcacaagtcattgttacctaattggacaacaaaaccacacgaagatcaacaacagcttgaatctccgacatctacagtgtcattctctgagatgaaggaatcaatcccggcgaagatagagtttgtcggatcatcaactggtgtgactctgatgaaagaacctgaacacgattggatcaattcaacgatgcacgagtttgaaactacgcagatgggagaaggaatcgaagaagggttcacgggtctcttgctcggtggtgattcaatcgaccggagtttctccggcgataaaaacgagacggccggcgagagtagtggtggtgactgcaactactatgaggacaacaagaactacttggacagcatttttaactttgtagatccttcaccgtcggattcaccgatgttctgaatctaagggttgatatttgttgggaatgtttttgattctttttttagtttctagtttttgtgcttaaactctgattagacaatttttaaactaatccaatttttgcgct

SEQ ID NO: 50145 - protein, 326 aa, Arabidopsis thaliana
  peptide (1)..(326): Ceres Seq. ID no. 13588118
MGRSPCCDKLGLKKGPWTPEEDQKLLAYIEEHGHGSWRSLPEKAGLHRCGKSCRLRWTNYLRPDIKRGKFNLQEEQTIIQLHALLGNRWSAIATHLPKRTDNEIKNYWNTHLKKRLVKMGIDPVTHKPKNETPLSSLGLSKNAAILSHTAQWESARLEAEARLARESKLLHLQHYQTKTSSQPHHHHGFTHKSLLPNWTTKPHEDQQQLESPTSTVSFSEMKESIPAKIEFVGSSTGVTLMKEPEHDWINSTMHEFETTQMGEGIEEGFTGLLLGGDSIDRSFSGDKNETAGESSGGDCNYYEDNKNYLDSIFNFVDPSPSDSPMF

SEQ ID NO: 50146 - protein, 208 aa, Arabidopsis thaliana
  peptide (1)..(208): Ceres Seq. ID no. 13588119
MGIDPVTHKPKNETPLSSLGLSKNAAILSHTAQWESARLEAEARLARESKLLHLQHYQTKTSSQPHHHHGFTHKSLLPNWTTKPHEDQQQLESPTSTVSFSEMKESIPAKIEFVGSSTGVTLMKEPEHDWINSTMHEFETTQMGEGIEEGFTGLLLGGDSIDRSFSGDKNETAGESSGGDCNYYEDNKNYLDSIFNFVDPSPSDSPMF

SEQ ID NO: 50147 - DNA, 1375 bp, Arabidopsis thaliana
  misc_feature (1)..(1375): Ceres Seq. ID no. 13588469
  misc_feature (1)..(1375): Ortholog of  Ceres SEQ ID NO 15225465 as cited in SEQ ID NO 53147
ggagaggaagatgttcgcttacaggactctgtttaggattgatcgtgtatttgggtttacgagtagatgttttcaatcgaaaccggaatatattagtatcctgagctttaggggaagtgagaagagtgccatggatggatataagaagcagaagatggtaaatttagtgtggagacccatctccactcaaacctcttcagttattgctgaagctggaaatgaagtccaagaagtagctcagtgtagcaaatcaagtgatgtttctaaggaagttattgaaggagagacagcttcagttgtttcagctggaaagcattcagtttctcttgaggttggggcttctttgattaagttcattagagggaaagaaggaacgacgcagatgaaacttgaagaggaaatgggagtgaagatcattcttccatcatcaaggaacaaagatcatatcagcattgaaggcggttcagtggattgtgtgactaaagcttcaaaaagaatagcaaccattatcgatgaggttgtaaggagtccaagtctcgactactcacactttgtatcacttccattagccatacatcctgagttagtggacaagctagtgaattttcagaattctatcctcgggatccatagcatagctagtgataagcaagacgaccaagctaatagagcaaccacaagtgtggcagttgatctaaaagctaatagtgaaacaaaccaggtcaatgtgggtatcaagagcataccaattgtcagttacccgcctaaggccaaatcaaagtcatctactttattggacttaggaattgaaaagtccatatttattaagccaagtacttttcacttgactgtggttatgctgaagttatggaacaaagatcgtgtcaatgcagcgtgtgatgttctgaagagtatatttcctagtgtgatggatgctttggataacaaaccagtattcattagacttaaaggattggattgtatgagaggaccattagacaagactcgtgttctctatgctcctgttgaagaaattggtgatgaaggccggcttttacgtgcttgtcgtatcctagattttaaagttattactgatgcatttgtgaaagctgggcttgttctcgagaaagatgcaaagcaaagcttgaagctgcatgtgaccgtgatgaatgcgaggcacaggaaaaggagaaagaacaataagaagaagatggagacgtttgatgcaagagagatacacaaacagtttggaaacgaagactggggagaatatctgatccaagaagctcatctctcacagcgttttgtgttcgaccagaacggttattaccgttgctgtggttcaataccatttccaggagaacagagagcctga

SEQ ID NO: 50148 - protein, 457 aa, Arabidopsis thaliana
  peptide (1)..(457): Ceres Seq. ID no. 13588470
ERKMFAYRTLFRIDRVFGFTSRCFQSKPEYISILSFRGSEKSAMDGYKKQKMVNLVWRPISTQTSSVIAEAGNEVQEVAQCSKSSDVSKEVIEGETASVVSAGKHSVSLEVGASLIKFIRGKEGTTQMKLEEEMGVKIILPSSRNKDHISIEGGSVDCVTKASKRIATIIDEVVRSPSLDYSHFVSLPLAIHPELVDKLVNFQNSILGIHSIASDKQDDQANRATTSVAVDLKANSETNQVNVGIKSIPIVSYPPKAKSKSSTLLDLGIEKSIFIKPSTFHLTVVMLKLWNKDRVNAACDVLKSIFPSVMDALDNKPVFIRLKGLDCMRGPLDKTRVLYAPVEEIGDEGRLLRACRILDFKVITDAFVKAGLVLEKDAKQSLKLHVTVMNARHRKRRKNNKKKMETFDAREIHKQFGNEDWGEYLIQEAHLSQRFVFDQNGYYRCCGSIPFPGEQRA

SEQ ID NO: 50149 - protein, 454 aa, Arabidopsis thaliana
  peptide (1)..(454): Ceres Seq. ID no. 13588471
MFAYRTLFRIDRVFGFTSRCFQSKPEYISILSFRGSEKSAMDGYKKQKMVNLVWRPISTQTSSVIAEAGNEVQEVAQCSKSSDVSKEVIEGETASVVSAGKHSVSLEVGASLIKFIRGKEGTTQMKLEEEMGVKIILPSSRNKDHISIEGGSVDCVTKASKRIATIIDEVVRSPSLDYSHFVSLPLAIHPELVDKLVNFQNSILGIHSIASDKQDDQANRATTSVAVDLKANSETNQVNVGIKSIPIVSYPPKAKSKSSTLLDLGIEKSIFIKPSTFHLTVVMLKLWNKDRVNAACDVLKSIFPSVMDALDNKPVFIRLKGLDCMRGPLDKTRVLYAPVEEIGDEGRLLRACRILDFKVITDAFVKAGLVLEKDAKQSLKLHVTVMNARHRKRRKNNKKKMETFDAREIHKQFGNEDWGEYLIQEAHLSQRFVFDQNGYYRCCGSIPFPGEQRA

SEQ ID NO: 50150 - protein, 414 aa, Arabidopsis thaliana
  peptide (1)..(414): Ceres Seq. ID no. 13588472
MDGYKKQKMVNLVWRPISTQTSSVIAEAGNEVQEVAQCSKSSDVSKEVIEGETASVVSAGKHSVSLEVGASLIKFIRGKEGTTQMKLEEEMGVKIILPSSRNKDHISIEGGSVDCVTKASKRIATIIDEVVRSPSLDYSHFVSLPLAIHPELVDKLVNFQNSILGIHSIASDKQDDQANRATTSVAVDLKANSETNQVNVGIKSIPIVSYPPKAKSKSSTLLDLGIEKSIFIKPSTFHLTVVMLKLWNKDRVNAACDVLKSIFPSVMDALDNKPVFIRLKGLDCMRGPLDKTRVLYAPVEEIGDEGRLLRACRILDFKVITDAFVKAGLVLEKDAKQSLKLHVTVMNARHRKRRKNNKKKMETFDAREIHKQFGNEDWGEYLIQEAHLSQRFVFDQNGYYRCCGSIPFPGEQRA

SEQ ID NO: 50151 - DNA, 640 bp, Arabidopsis thaliana; identical to SEQ ID NO: 38920
  misc_feature (1)..(640): Ceres Seq. ID no. 12652846
  misc_feature (1)..(640): Ortholog of  Ceres SEQ ID NO 15174406 as cited in SEQ ID NO 0

SEQ ID NO: 50152 - protein, 118 aa, Arabidopsis thaliana; identical to SEQ ID NO: 38921
  peptide (1)..(118): Ceres Seq. ID no. 12652847

SEQ ID NO: 50153 - protein, 114 aa, Arabidopsis thaliana; identical to SEQ ID NO: 38922
  peptide (1)..(114): Ceres Seq. ID no. 12652848

SEQ ID NO: 50154 - protein, 104 aa, Arabidopsis thaliana; identical to SEQ ID NO: 38923
  peptide (1)..(104): Ceres Seq. ID no. 12652849

SEQ ID NO: 50155 - DNA, 3798 bp, Arabidopsis thaliana; identical to SEQ ID NO: 45415
  misc_feature (1)..(3798): Ceres Seq. ID no. 13618884
  misc_feature (1)..(3798): Ortholog of  Ceres SEQ ID NO 13658778 as cited in SEQ ID NO 66511

SEQ ID NO: 50156 - protein, 1081 aa, Arabidopsis thaliana; identical to SEQ ID NO: 45416
  peptide (1)..(1081): Ceres Seq. ID no. 13618885

SEQ ID NO: 50157 - protein, 1048 aa, Arabidopsis thaliana; identical to SEQ ID NO: 45417
  peptide (1)..(1048): Ceres Seq. ID no. 13618886

SEQ ID NO: 50158 - protein, 857 aa, Arabidopsis thaliana; identical to SEQ ID NO: 45418
  peptide (1)..(857): Ceres Seq. ID no. 13618887

SEQ ID NO: 50159 - DNA, 923 bp, Arabidopsis thaliana
  misc_feature (1)..(923): Ceres Seq. ID no. 13647710
  misc_feature (1)..(923): Ortholog of  Ceres SEQ ID NO 14312124 as cited in SEQ ID NO 57290
agctcactagtcccccccccccccccgtccttcactctcatcattctttcttctttcaaaacatttccacaaacacaccaaactcacctgaaaccctatttccatttaccattcacactaatggcacgaccacaacaacgctttcgaggcgttagacagaggcattggggctcttgggtctccgaaattcgtcaccctctcttgaaaacaagaatctggctagggacgtttgagacagcggaggatgcagcaagggcctacgacgaggcggctaggctaatgtgtggcccgagagctcgtactaatttcccatacaaccctaatgccattcctacttcctcttccaagcttctatcagcaactcttaccgctaaactccacaaatgctacatggcttctcttcaaatgaccaagcaaacgcaaacacaaacgcaaacgcagaccgcaagatcacaatccgcggacagtgacggtgtgacggctaacgaaagtcatttgaacagaggagtaacggagacgacagagatcaagtgggaagatggaaatgcgaatatgcaacagaattttaggccattggaggaagatcatatcgagcaaatgattgaggagctgcttcactacggttccattgagctttgctctgttttaccaactcagacgctgtgagaaatggccttgtcgttttagcgtattcttttcatttttatttttgtttccacaaaaacggcgtcgtaagtgatgagagtagtagtgagagaaggctaatttcaagacattttgatctgaattggcctcttttgaaacactgattctagtttctataagagcaatcgatcatatgctatgttatgtatagtattataaaaaaatgttattttctgattaaaaaaaaaaaaaaaaaaactcgagggggggcccggttg

SEQ ID NO: 50160 - protein, 221 aa, Arabidopsis thaliana
  peptide (1)..(221): Ceres Seq. ID no. 13647711
SSLVPPPPPSFTLIILSSFKTFPQTHQTHLKPYFHLPFTLMARPQQRFRGVRQRHWGSWVSEIRHPLLKTRIWLGTFETAEDAARAYDEAARLMCGPRARTNFPYNPNAIPTSSSKLLSATLTAKLHKCYMASLQMTKQTQTQTQTQTARSQSADSDGVTANESHLNRGVTETTEIKWEDGNANMQQNFRPLEEDHIEQMIEELLHYGSIELCSVLPTQTL

SEQ ID NO: 50161 - protein, 181 aa, Arabidopsis thaliana
  peptide (1)..(181): Ceres Seq. ID no. 13647712
MARPQQRFRGVRQRHWGSWVSEIRHPLLKTRIWLGTFETAEDAARAYDEAARLMCGPRARTNFPYNPNAIPTSSSKLLSATLTAKLHKCYMASLQMTKQTQTQTQTQTARSQSADSDGVTANESHLNRGVTETTEIKWEDGNANMQQNFRPLEEDHIEQMIEELLHYGSIELCSVLPTQTL

SEQ ID NO: 50162 - protein, 128 aa, Arabidopsis thaliana
  peptide (1)..(128): Ceres Seq. ID no. 13647713
MCGPRARTNFPYNPNAIPTSSSKLLSATLTAKLHKCYMASLQMTKQTQTQTQTQTARSQSADSDGVTANESHLNRGVTETTEIKWEDGNANMQQNFRPLEEDHIEQMIEELLHYGSIELCSVLPTQTL

SEQ ID NO: 50163 - DNA, 833 bp, Arabidopsis thaliana; identical to SEQ ID NO: 48167
  misc_feature (1)..(833): Ceres Seq. ID no. 12591931
  misc_feature (1)..(833): Ortholog of  Ceres SEQ ID NO 14316367 as cited in SEQ ID NO 57626
  misc_feature (1)..(833): Ortholog of  Ceres SEQ ID NO 13664189 as cited in SEQ ID NO 66834
  misc_feature (1)..(833): Ortholog of  Ceres SEQ ID NO 13654321 as cited in SEQ ID NO 67850

SEQ ID NO: 50164 - protein, 192 aa, Arabidopsis thaliana; identical to SEQ ID NO: 48168
  peptide (1)..(192): Ceres Seq. ID no. 12591932

SEQ ID NO: 50165 - protein, 160 aa, Arabidopsis thaliana; identical to SEQ ID NO: 48169
  peptide (1)..(160): Ceres Seq. ID no. 12591933

SEQ ID NO: 50166 - protein, 132 aa, Arabidopsis thaliana; identical to SEQ ID NO: 48170
  peptide (1)..(132): Ceres Seq. ID no. 12591934

SEQ ID NO: 50167 - DNA, 1622 bp, Arabidopsis thaliana
  misc_feature (1)..(1622): Ceres Seq. ID no. 13647929
  misc_feature (1)..(1622): Ortholog of  Ceres SEQ ID NO 15176457 as cited in SEQ ID NO 55547
  misc_feature (1)..(1622): Ortholog of  Ceres SEQ ID NO 13594349 as cited in SEQ ID NO 58161
  misc_feature (1)..(1622): Ortholog of  Ceres SEQ ID NO 13663419 as cited in SEQ ID NO 66561
gattgacttgagaagaaccacaacaatgcctcgcctacaatgcctaacaatggcgacttcactaattctgctgcttcaagctctgagtttagtgagctcaactattctgtcccgggccgatcggatcacccgtttacccggtcaaccccgagtcgggtttcagcagtactcaggttatgtcactattgacgagaagaaacagagagctctgttttactacttggctgaagcagaaaccaaacccatctctaaacctctcgttctctggctcaatggaggacctggatgttcatcattaggtgttggtgcattctctgagaatggaccttttagaccaaagggatcaatcttggtgagaaatcaacacagctggaatcaagaggctaatatgttgtatctggagacacctgttggagttggattttcttatgcaaatgagagctcctcttatgagggtgtgaatgataagatcactgcaaaagacaatcttgtgttcttgcaaaaatggttcctcaaattccctcaatatctcaacagaagtctcttcatcactggtgaaagctatgctggccattatgttcctcagttggctcagcttatgattcagtacaacaagaagcacaatttgtttaatctcaaaggcattgctattggcaatccggttatggagtttgcaacggatttcaattcacgagcagagtatttctggtctcacgggttgatatcggatccaacttacaaattgttcacatcttcttgtaattactcgagatttttgagtgagtaccatagaggatcagtgtcgagtatgtgcactaaagtgctaagtcaagttggcatcgaaacaagtagattcatagacaaatatgacgttactcttgacgtctgcattccctctgtgctatctcaatccaaagtagttagccctcaacctcaacaagtgggagagacggtggatgtgtgtctagaagatgagacggtgaactatcttaaccggagagatgtgcaaaaagctctccacgctcggcttgtcggaactcgcaaatggactgtttgcagcgatgtgctggattacgaagtacttgatgtggaagtaccaacgataaatatcgtaggaagtcttgttaaagctggtgttccagtttttgtgtacagtggagatcaagactctgtgattccgttaaccggaagtagaacattagtgaagcgactggctgaagagttgggactaagaacaaccgtgccttatcgagtttggttcgcaggacaacaggttggtgggtggactcaagtttatgggaacacattggcgtttgccactgtgagaggagcagcccacgaggtaccattctcgcagcccgcgagagcgcttgtgttgtttaaagcattcttgggtggtcgtcctctccctgaagaattctaatgcgtttaccattttctgagcttgtaagtaaacattggtgaacaatgtcccaaaatggctatatttgattcacggcgagaaaaggaaatactacaaacattgtttgtagaatgtgtagaaatatcaatatgtattgttctttaagttttcaagatttttaaaagaaggatgtaaaaataaaaatctagtgtttaccgtc

SEQ ID NO: 50168 - protein, 473 aa, Arabidopsis thaliana
  peptide (1)..(473): Ceres Seq. ID no. 13647930
IDLRRTTTMPRLQCLTMATSLILLLQALSLVSSTILSRADRITRLPGQPRVGFQQYSGYVTIDEKKQRALFYYLAEAETKPISKPLVLWLNGGPGCSSLGVGAFSENGPFRPKGSILVRNQHSWNQEANMLYLETPVGVGFSYANESSSYEGVNDKITAKDNLVFLQKWFLKFPQYLNRSLFITGESYAGHYVPQLAQLMIQYNKKHNLFNLKGIAIGNPVMEFATDFNSRAEYFWSHGLISDPTYKLFTSSCNYSRFLSEYHRGSVSSMCTKVLSQVGIETSRFIDKYDVTLDVCIPSVLSQSKVVSPQPQQVGETVDVCLEDETVNYLNRRDVQKALHARLVGTRKWTVCSDVLDYEVLDVEVPTINIVGSLVKAGVPVFVYSGDQDSVIPLTGSRTLVKRLAEELGLRTTVPYRVWFAGQQVGGWTQVYGNTLAFATVRGAAHEVPFSQPARALVLFKAFLGGRPLPEEF

SEQ ID NO: 50169 - protein, 465 aa, Arabidopsis thaliana
  peptide (1)..(465): Ceres Seq. ID no. 13647931
MPRLQCLTMATSLILLLQALSLVSSTILSRADRITRLPGQPRVGFQQYSGYVTIDEKKQRALFYYLAEAETKPISKPLVLWLNGGPGCSSLGVGAFSENGPFRPKGSILVRNQHSWNQEANMLYLETPVGVGFSYANESSSYEGVNDKITAKDNLVFLQKWFLKFPQYLNRSLFITGESYAGHYVPQLAQLMIQYNKKHNLFNLKGIAIGNPVMEFATDFNSRAEYFWSHGLISDPTYKLFTSSCNYSRFLSEYHRGSVSSMCTKVLSQVGIETSRFIDKYDVTLDVCIPSVLSQSKVVSPQPQQVGETVDVCLEDETVNYLNRRDVQKALHARLVGTRKWTVCSDVLDYEVLDVEVPTINIVGSLVKAGVPVFVYSGDQDSVIPLTGSRTLVKRLAEELGLRTTVPYRVWFAGQQVGGWTQVYGNTLAFATVRGAAHEVPFSQPARALVLFKAFLGGRPLPEEF

SEQ ID NO: 50170 - protein, 457 aa, Arabidopsis thaliana
  peptide (1)..(457): Ceres Seq. ID no. 13647932
MATSLILLLQALSLVSSTILSRADRITRLPGQPRVGFQQYSGYVTIDEKKQRALFYYLAEAETKPISKPLVLWLNGGPGCSSLGVGAFSENGPFRPKGSILVRNQHSWNQEANMLYLETPVGVGFSYANESSSYEGVNDKITAKDNLVFLQKWFLKFPQYLNRSLFITGESYAGHYVPQLAQLMIQYNKKHNLFNLKGIAIGNPVMEFATDFNSRAEYFWSHGLISDPTYKLFTSSCNYSRFLSEYHRGSVSSMCTKVLSQVGIETSRFIDKYDVTLDVCIPSVLSQSKVVSPQPQQVGETVDVCLEDETVNYLNRRDVQKALHARLVGTRKWTVCSDVLDYEVLDVEVPTINIVGSLVKAGVPVFVYSGDQDSVIPLTGSRTLVKRLAEELGLRTTVPYRVWFAGQQVGGWTQVYGNTLAFATVRGAAHEVPFSQPARALVLFKAFLGGRPLPEEF

SEQ ID NO: 50171 - DNA, 1610 bp, Arabidopsis thaliana
  misc_feature (1)..(1610): Ceres Seq. ID no. 12591935
  misc_feature (1)..(1610): Ortholog of  Ceres SEQ ID NO 13592852 as cited in SEQ ID NO 20709
  misc_feature (1)..(1610): Ortholog of  Ceres SEQ ID NO 13532807 as cited in SEQ ID NO 53012
  misc_feature (1)..(1610): Ortholog of  Ceres SEQ ID NO 14313425 as cited in SEQ ID NO 54973
  misc_feature (1)..(1610): Ortholog of  Ceres SEQ ID NO 13663060 as cited in SEQ ID NO 60964
  misc_feature (1)..(1610): Ortholog of  Ceres SEQ ID NO 13656849 as cited in SEQ ID NO 65764
  misc_feature (1)..(1610): Ortholog of  Ceres SEQ ID NO 13500573 as cited in SEQ ID NO 67431
  misc_feature (1)..(1610): Ortholog of  Ceres SEQ ID NO 13656501 as cited in SEQ ID NO 69206
agctctaaaatggtaatgaacgagaaactagagagtcaacggtcatagcgttgaccaaatctctcactctcaccagccaaatctctccaacttcctctttctctccacccaaatctcgccggcgatcgtcactgacgaatctgattcgtccccaacactcaacgggaggtagaagaatggcgactcctgttgatccacctaatggaattaggaatcaagggaagcattacttctcaatgtggcaaacacttttcgagatcgataccaaatacgtgcctatcaaaccgataggccgaggcgcgtacggtgtggtttgctcttcggttaacagagagagtaatgagagagtggcgatcaagaagatccacaatgtgtttgagaataggattgatgcgttgaggactcttagggagctcaagcttctacgtcatcttcgacatgagaatgtggttgctcttaaagatgtaatgatggctaatcataagagaagctttaaggatgtttatcttgtttatgagcttatggatactgatcttcatcagattattaagtcttctcaagttctaagtaatgaccattgccaatacttcttgttccagttgcttcgagggctcaagtatattcattcagcaaacattctccatcgggatctgaaacccggtaacctccttgtgaatgcaaactgcgacttaaagatatgtgactttgggctagcgaggacgagcaacaccaaaggtcagttcatgactgaatatgttgtgactagatggtaccgagcaccagagctactcctctgttgtgacaactatggaacctccattgatgtctggtcagtcggttgcatattcgccgagcttcttggaagaaaaccagtattcccgggaacagaatgtctaaaccagattaaactcatcattaacattttgggtagccagagagaggaagatctcgagtttatagataacccaaaagccaaaagatacatagaatcactcccttactcaccagggatatcattctctcgtctttacccgggtgcaaatgttttagccattgatctgcttcagaaaatgctcgttcttgacccttcgaaaaggattagtgtcacggaagcgcttcaacatccttacatggcgcctttatatgacccgagtgcaaatcctcctgctcaagttcctattgatctcgatgtagatgaagacgaggatttgggagcagagatgataagagaattaatgtggaaggaaatgattcattatcatccagaagctgctaccataaacaacaatgaggtctctgagttttgagatcaagtcttttgcaggtactgttcagagagatctttcaacaacttaaacttatttattttcatgtttgcttcttgaaatgttgttaataatagtgtcgaagaagaagaacaataactttaaattatgtgatatgtttgtgtcatggagctttgttttgtttttggttacaagcttaagtgtctgtaacgtttgtacataagtgtatgtgtccttaaaacttcatactctgtctctgatcttattgttggtgatttttcttattgaagattttcgaatgttcaaagagcaaaccattggatt

SEQ ID NO: 50172 - protein, 376 aa, Arabidopsis thaliana
  peptide (1)..(376): Ceres Seq. ID no. 12591936
MATPVDPPNGIRNQGKHYFSMWQTLFEIDTKYVPIKPIGRGAYGVVCSSVNRESNERVAIKKIHNVFENRIDALRTLRELKLLRHLRHENVVALKDVMMANHKRSFKDVYLVYELMDTDLHQIIKSSQVLSNDHCQYFLFQLLRGLKYIHSANILHRDLKPGNLLVNANCDLKICDFGLARTSNTKGQFMTEYVVTRWYRAPELLLCCDNYGTSIDVWSVGCIFAELLGRKPVFPGTECLNQIKLIINILGSQREEDLEFIDNPKAKRYIESLPYSPGISFSRLYPGANVLAIDLLQKMLVLDPSKRISVTEALQHPYMAPLYDPSANPPAQVPIDLDVDEDEDLGAEMIRELMWKEMIHYHPEAATINNNEVSEF

SEQ ID NO: 50173 - protein, 356 aa, Arabidopsis thaliana
  peptide (1)..(356): Ceres Seq. ID no. 12591937
MWQTLFEIDTKYVPIKPIGRGAYGVVCSSVNRESNERVAIKKIHNVFENRIDALRTLRELKLLRHLRHENVVALKDVMMANHKRSFKDVYLVYELMDTDLHQIIKSSQVLSNDHCQYFLFQLLRGLKYIHSANILHRDLKPGNLLVNANCDLKICDFGLARTSNTKGQFMTEYVVTRWYRAPELLLCCDNYGTSIDVWSVGCIFAELLGRKPVFPGTECLNQIKLIINILGSQREEDLEFIDNPKAKRYIESLPYSPGISFSRLYPGANVLAIDLLQKMLVLDPSKRISVTEALQHPYMAPLYDPSANPPAQVPIDLDVDEDEDLGAEMIRELMWKEMIHYHPEAATINNNEVSEF

SEQ ID NO: 50174 - protein, 279 aa, Arabidopsis thaliana
  peptide (1)..(279): Ceres Seq. ID no. 12591938
MMANHKRSFKDVYLVYELMDTDLHQIIKSSQVLSNDHCQYFLFQLLRGLKYIHSANILHRDLKPGNLLVNANCDLKICDFGLARTSNTKGQFMTEYVVTRWYRAPELLLCCDNYGTSIDVWSVGCIFAELLGRKPVFPGTECLNQIKLIINILGSQREEDLEFIDNPKAKRYIESLPYSPGISFSRLYPGANVLAIDLLQKMLVLDPSKRISVTEALQHPYMAPLYDPSANPPAQVPIDLDVDEDEDLGAEMIRELMWKEMIHYHPEAATINNNEVSEF

SEQ ID NO: 50175 - DNA, 1349 bp, Arabidopsis thaliana; identical to SEQ ID NO: 38328
  misc_feature (1)..(1349): Ceres Seq. ID no. 13592504
  misc_feature (1)..(1349): Ortholog of  Ceres SEQ ID NO 14304678 as cited in SEQ ID NO 53747

SEQ ID NO: 50176 - protein, 327 aa, Arabidopsis thaliana; identical to SEQ ID NO: 38329
  peptide (1)..(327): Ceres Seq. ID no. 13592505

SEQ ID NO: 50177 - protein, 314 aa, Arabidopsis thaliana; identical to SEQ ID NO: 38330
  peptide (1)..(314): Ceres Seq. ID no. 13592506

SEQ ID NO: 50178 - DNA, 1046 bp, Arabidopsis thaliana
  misc_feature (1)..(1046): Ceres Seq. ID no. 13588127
  misc_feature (1)..(1046): Ortholog of  Ceres SEQ ID NO 14316539 as cited in SEQ ID NO 57567
ggttcttttgtatttaaatcggatcattctaattggtggagagacagactctggactctgaagaagcaaatggctgggatcaccagcaccgttggattcaacgccattctcgccggagccaccaaaacggtgtcgcatcctgttaaatctaagctctttggtcttcgactctgtgtacccgaattctcaattgtttctctttccccttatcatcatcgccgttgtcccgccatcacttgccgttacggaggcggtggtggcggaggctctagatttcccggcgataggagaggtaggcagaaagaatccgaggatgatgattcgcttgatatctcagctattaggtcagccactgttaggcttattgatgatcagcagaacatgattggtttagtttccaaagaagaagctgttcgaagagctgaagatgctgagcttgatctggtgattctttcgccggatgcagatcctccggttgttagaatgatggattacagtaaatacagatatgagcagcaaaagaggaaaaaggaacagcagaagaaaactactcgaatggacttgaaggagcttaaaatgggttataacatcgatcagcatgattattctgtacgcatgagagcagcccggaagttcttgcaagacggtgacaaggttaaagtgattgtgaacatgaaaggccgagaaaacgagttcagaaatattgctattgagctcctcagacgttttcagactgaaataggagagcttggtactgaggagagcaaaaactttcgggacagaaatttgtttattgtcttggtgccaaacaaggaagttattcggaaagtgcaagaaccacccccaaaaaagaagaaaaagccagcggatgataaagtttcagcagcaaatataactgcaacacaagatatatgatgcggaattgtctgatgtaaaatgttctgtgactttgataaatttctgtatagtttcttttttaatatgcttcttgcatttccatgtaattgtaaccatagaaatagattatttgaatgaagatcttcgtc

SEQ ID NO: 50179 - protein, 304 aa, Arabidopsis thaliana
  peptide (1)..(304): Ceres Seq. ID no. 13588128
GSFVFKSDHSNWWRDRLWTLKKQMAGITSTVGFNAILAGATKTVSHPVKSKLFGLRLCVPEFSIVSLSPYHHRRCPAITCRYGGGGGGGSRFPGDRRGRQKESEDDDSLDISAIRSATVRLIDDQQNMIGLVSKEEAVRRAEDAELDLVILSPDADPPVVRMMDYSKYRYEQQKRKKEQQKKTTRMDLKELKMGYNIDQHDYSVRMRAARKFLQDGDKVKVIVNMKGRENEFRNIAIELLRRFQTEIGELGTEESKNFRDRNLFIVLVPNKEVIRKVQEPPPKKKKKPADDKVSAANITATQDI

SEQ ID NO: 50180 - protein, 281 aa, Arabidopsis thaliana
  peptide (1)..(281): Ceres Seq. ID no. 13588129
MAGITSTVGFNAILAGATKTVSHPVKSKLFGLRLCVPEFSIVSLSPYHHRRCPAITCRYGGGGGGGSRFPGDRRGRQKESEDDDSLDISAIRSATVRLIDDQQNMIGLVSKEEAVRRAEDAELDLVILSPDADPPVVRMMDYSKYRYEQQKRKKEQQKKTTRMDLKELKMGYNIDQHDYSVRMRAARKFLQDGDKVKVIVNMKGRENEFRNIAIELLRRFQTEIGELGTEESKNFRDRNLFIVLVPNKEVIRKVQEPPPKKKKKPADDKVSAANITATQDI

SEQ ID NO: 50181 - protein, 177 aa, Arabidopsis thaliana
  peptide (1)..(177): Ceres Seq. ID no. 13588130
MIGLVSKEEAVRRAEDAELDLVILSPDADPPVVRMMDYSKYRYEQQKRKKEQQKKTTRMDLKELKMGYNIDQHDYSVRMRAARKFLQDGDKVKVIVNMKGRENEFRNIAIELLRRFQTEIGELGTEESKNFRDRNLFIVLVPNKEVIRKVQEPPPKKKKKPADDKVSAANITATQDI

SEQ ID NO: 50182 - DNA, 693 bp, Arabidopsis thaliana
  misc_feature (1)..(693): Ceres Seq. ID no. 13647933
  misc_feature (1)..(693): Ortholog of  Ceres SEQ ID NO 15172691 as cited in SEQ ID NO 56148
  misc_feature (1)..(693): Ortholog of  Ceres SEQ ID NO 15226850 as cited in SEQ ID NO 62501
gtcaagaacaaagacgattcgattgaattctccataagaggtccgacccgaattcgaaaacccgtaagaaccgaatcgaagatgagcaaggatggtttgagcaacgaccaagtctcatcaatgaaggaagcattcatgctattcgacacagacggcgacggcaaaatcgcaccgtcggagctcggaatcttaatgcgttcactcggcggcaatccaacagaatcacaactcaaattaatcataacgacggagaatctctcgtctccgttcgatttcaatcgattcctagatctaatggcgaaacatctgaaaacagagccgttcgatcgccagcttcgtgatgcgttcaaagtgcttgacaaggaaggtactggattcgttgctgtggcagatctgagacatatacttacgagtatcggtgagaaattgcagccgagtgagtttgatgagtggatcaaagaggttgatgttggatctgatggtaagatccggtatgaggattttattgctagaatggttgctaagtaagatctaaatctttgaaatttgaattttttggattagaacaatcttaggatttgttcagaaagtgttgaattcttaatgtaattgggaatttggtcttaattaagctgtgttatttgaaaaaaaaaaaaaaaaaaaactcgagggggggcccggtacccaatycgc

SEQ ID NO: 50183 - protein, 175 aa, Arabidopsis thaliana
  peptide (1)..(175): Ceres Seq. ID no. 15219505
VKNKDDSIEFSIRGPTRIRKPVRTESKMSKDGLSNDQVSSMKEAFMLFDTDGDGKIAPSELGILMRSLGGNPTESQLKLIITTENLSSPFDFNRFLDLMAKHLKTEPFDRQLRDAFKVLDKEGTGFVAVADLRHILTSIGEKLQPSEFDEWIKEVDVGSDGKIRYEDFIARMVAK

SEQ ID NO: 50184 - protein, 148 aa, Arabidopsis thaliana
  peptide (1)..(148): Ceres Seq. ID no. 15219506
MSKDGLSNDQVSSMKEAFMLFDTDGDGKIAPSELGILMRSLGGNPTESQLKLIITTENLSSPFDFNRFLDLMAKHLKTEPFDRQLRDAFKVLDKEGTGFVAVADLRHILTSIGEKLQPSEFDEWIKEVDVGSDGKIRYEDFIARMVAK

SEQ ID NO: 50185 - protein, 135 aa, Arabidopsis thaliana
  peptide (1)..(135): Ceres Seq. ID no. 15219507
MKEAFMLFDTDGDGKIAPSELGILMRSLGGNPTESQLKLIITTENLSSPFDFNRFLDLMAKHLKTEPFDRQLRDAFKVLDKEGTGFVAVADLRHILTSIGEKLQPSEFDEWIKEVDVGSDGKIRYEDFIARMVAK

SEQ ID NO: 50186 - DNA, 1915 bp, Arabidopsis thaliana
  misc_feature (1)..(1915): Ceres Seq. ID no. 15168753
  misc_feature (1)..(1915): Ortholog of  Ceres SEQ ID NO 12611963 as cited in SEQ ID NO 53414
gatttccttgttcggaatcggagaagaaggaagactagattcgatgtgttggtgaagaagatctcgactttgttcaaaattccaatttcgttcgcctcaaagatcattctctcatcttctcgactttgatgcgattgattaaatatggtggatacggttattcccggagatatggcttgtttggatgcagatttgttgcagcttcaggaaatgtcttcctttgttctcaattctaaacctggattcactcagaagctcttcgaccagtggctttctcttcccgaagctcagcgacaggttggatcattgcttaaggatgctgtagctggagctcctatcaatgttactggaagtgcatcgggttctaattctgccactataccatctatgtttcctgcgggaagcgctcctcctctttcaccaagaagttgtggttcaccccgtacaaccaaacagagagccccttctaacttaggttctactctcaaagtagtcaacgagcctgttaaagagcctatacctcagttttatttccaaaatggtcgccctccaccaagcgagattaaagagcaatgtatgtttagaatcaatcacttcttttatggtcacatggatggcttgcagatacaagaattcaagttagtcaccagagaaatctgcaagctcccatctttcttctccacttcccttttccggaagatcgatctcaacaatacaggttttgttactagagatgcatttattgatttttgggtaaacgggaacatgttgataatggatacaacgacccaaatcttcaagatcctaaagcagaaagatcagagtttcattgttaaggatgatttcaaaccactacttaaagaactgttggcgacgcatcctggcctagagttcctgcaatccacacctgaattccaagaaagatatgctgaaactgtcacctacagaatattttactacataaatagatctggcaatggtcgaattacatttagggagcttaaacggggaaacttaattgatgctatgctacatgctgatgaagaagaagatattaacaaagtgttgagatacttctcatatgagcatttctatgtcatatactgcaagttctgggagctggatacggatcacgatttcctgattgacaaagaaaatcttatgagatatggaaaccatgctcttacctaccggattgtcgacagaatattctcccaggttgctaggaagttcactagcaaagttgaagggaagatggggtatgaagactttgtctatttcattcttgcggaagaagataaatcgtcagtgcctagcctagaatattggtttaagtgcatagacttggatgcaaatgggattataacgcgaaatgagatgcaattcttttatgaagagcagttgcatagaatggagtgcatggcgcaagaggctgttcttttcgaggatatcttatgtcagatgattgatatgatcggacctgagaacgaaagccatataacgctgcatgaactgaaaggctcaaagctctctggaaacgtcttcaacatcctttttaatctaaacaaatttatggcatttgaaacccgggatccgttcctcattcgtcaggagcgcgagaacccgacattgacagactgggaccgttttgcacatagagagtatattcggctatcaatggaagaagatgttgaagatgcatccaatggaagtgctgaggtttgggatgactcgtcactggaggctcccttctgagttcaaagaggtagcaagtcaacaaaagaaaatcataatctctagaatggattttattttttaaaaaaggaaacaaaaaaacttagaagttgaaggttatggatatgttgttatttcatcatattagttaatcatgcaaaagagaaacagaaagtccctg

SEQ ID NO: 50187 - protein, 536 aa, Arabidopsis thaliana
  peptide (1)..(536): Ceres Seq. ID no. 15168754
MVDTVIPGDMACLDADLLQLQEMSSFVLNSKPGFTQKLFDQWLSLPEAQRQVGSLLKDAVAGAPINVTGSASGSNSATIPSMFPAGSAPPLSPRSCGSPRTTKQRAPSNLGSTLKVVNEPVKEPIPQFYFQNGRPPPSEIKEQCMFRINHFFYGHMDGLQIQEFKLVTREICKLPSFFSTSLFRKIDLNNTGFVTRDAFIDFWVNGNMLIMDTTTQIFKILKQKDQSFIVKDDFKPLLKELLATHPGLEFLQSTPEFQERYAETVTYRIFYYINRSGNGRITFRELKRGNLIDAMLHADEEEDINKVLRYFSYEHFYVIYCKFWELDTDHDFLIDKENLMRYGNHALTYRIVDRIFSQVARKFTSKVEGKMGYEDFVYFILAEEDKSSVPSLEYWFKCIDLDANGIITRNEMQFFYEEQLHRMECMAQEAVLFEDILCQMIDMIGPENESHITLHELKGSKLSGNVFNILFNLNKFMAFETRDPFLIRQERENPTLTDWDRFAHREYIRLSMEEDVEDASNGSAEVWDDSSLEAPF

SEQ ID NO: 50188 - protein, 527 aa, Arabidopsis thaliana
  peptide (1)..(527): Ceres Seq. ID no. 15168755
MACLDADLLQLQEMSSFVLNSKPGFTQKLFDQWLSLPEAQRQVGSLLKDAVAGAPINVTGSASGSNSATIPSMFPAGSAPPLSPRSCGSPRTTKQRAPSNLGSTLKVVNEPVKEPIPQFYFQNGRPPPSEIKEQCMFRINHFFYGHMDGLQIQEFKLVTREICKLPSFFSTSLFRKIDLNNTGFVTRDAFIDFWVNGNMLIMDTTTQIFKILKQKDQSFIVKDDFKPLLKELLATHPGLEFLQSTPEFQERYAETVTYRIFYYINRSGNGRITFRELKRGNLIDAMLHADEEEDINKVLRYFSYEHFYVIYCKFWELDTDHDFLIDKENLMRYGNHALTYRIVDRIFSQVARKFTSKVEGKMGYEDFVYFILAEEDKSSVPSLEYWFKCIDLDANGIITRNEMQFFYEEQLHRMECMAQEAVLFEDILCQMIDMIGPENESHITLHELKGSKLSGNVFNILFNLNKFMAFETRDPFLIRQERENPTLTDWDRFAHREYIRLSMEEDVEDASNGSAEVWDDSSLEAPF

SEQ ID NO: 50189 - protein, 514 aa, Arabidopsis thaliana
  peptide (1)..(514): Ceres Seq. ID no. 15168756
MSSFVLNSKPGFTQKLFDQWLSLPEAQRQVGSLLKDAVAGAPINVTGSASGSNSATIPSMFPAGSAPPLSPRSCGSPRTTKQRAPSNLGSTLKVVNEPVKEPIPQFYFQNGRPPPSEIKEQCMFRINHFFYGHMDGLQIQEFKLVTREICKLPSFFSTSLFRKIDLNNTGFVTRDAFIDFWVNGNMLIMDTTTQIFKILKQKDQSFIVKDDFKPLLKELLATHPGLEFLQSTPEFQERYAETVTYRIFYYINRSGNGRITFRELKRGNLIDAMLHADEEEDINKVLRYFSYEHFYVIYCKFWELDTDHDFLIDKENLMRYGNHALTYRIVDRIFSQVARKFTSKVEGKMGYEDFVYFILAEEDKSSVPSLEYWFKCIDLDANGIITRNEMQFFYEEQLHRMECMAQEAVLFEDILCQMIDMIGPENESHITLHELKGSKLSGNVFNILFNLNKFMAFETRDPFLIRQERENPTLTDWDRFAHREYIRLSMEEDVEDASNGSAEVWDDSSLEAPF

SEQ ID NO: 50190 - DNA, 1746 bp, Arabidopsis thaliana; identical to SEQ ID NO: 46031
  misc_feature (1)..(1746): Ceres Seq. ID no. 13591719
  misc_feature (1)..(1746): Ortholog of  Ceres SEQ ID NO 14311862 as cited in SEQ ID NO 51654
  misc_feature (1)..(1746): Ortholog of  Ceres SEQ ID NO 13597334 as cited in SEQ ID NO 64244

SEQ ID NO: 50191 - protein, 420 aa, Arabidopsis thaliana; identical to SEQ ID NO: 46032
  peptide (1)..(420): Ceres Seq. ID no. 13591720

SEQ ID NO: 50192 - protein, 396 aa, Arabidopsis thaliana; identical to SEQ ID NO: 46033
  peptide (1)..(396): Ceres Seq. ID no. 13591721

SEQ ID NO: 50193 - protein, 333 aa, Arabidopsis thaliana; identical to SEQ ID NO: 46034
  peptide (1)..(333): Ceres Seq. ID no. 13591722

SEQ ID NO: 50194 - DNA, 1636 bp, Arabidopsis thaliana; identical to SEQ ID NO: 49986
  misc_feature (1)..(1636): Ceres Seq. ID no. 13648342
  misc_feature (1)..(1636): Ortholog of  Ceres SEQ ID NO 15176851 as cited in SEQ ID NO 61348

SEQ ID NO: 50195 - protein, 447 aa, Arabidopsis thaliana; identical to SEQ ID NO: 49987
  peptide (1)..(447): Ceres Seq. ID no. 13648343

SEQ ID NO: 50196 - protein, 402 aa, Arabidopsis thaliana; identical to SEQ ID NO: 49988
  peptide (1)..(402): Ceres Seq. ID no. 13648344

SEQ ID NO: 50197 - protein, 317 aa, Arabidopsis thaliana; identical to SEQ ID NO: 49989
  peptide (1)..(317): Ceres Seq. ID no. 13648345

SEQ ID NO: 50198 - DNA, 2310 bp, Arabidopsis thaliana
  misc_feature (1)..(2310): Ceres Seq. ID no. 12591386
  misc_feature (1)..(2310): Ortholog of  Ceres SEQ ID NO 13595870 as cited in SEQ ID NO 62101
  misc_feature (1)..(2310): Ortholog of  Ceres SEQ ID NO 13590241 as cited in SEQ ID NO 63878
  misc_feature (1)..(2310): Ortholog of  Ceres SEQ ID NO 13657939 as cited in SEQ ID NO 66349
tccttcaattccaattcaaagctccttccttttttcacatctctcttcttcaaattcaatcatcataaaaatcgaatctttattcttcagagagcttcaatggcgaccacatcatcaaacccattactactttcttcaaatttcctcggttctcaaattataatctcagctccaacaccaaaaaccaccacaaagtctcttcctttctcagtaatctctcgaaaaagataccaaatttctcaatcggagaagctaatgaaatcgttaccatcacaagctgcgttagcagctctgttgttctcatcttcatctccacaagctttagcagttaacgaaccagttcaaccaccagcaccaaccattactgctgaagctcaatcaccaaatctgtcgacttttggtcaaaacgttttgatgacagcaccgaatccacaagctcaatcatcagatcttcctgatggaacacaatggcgatacagtgagtttctaaatgctgtgaagaaaggtaaagttgagagagtgaagtttagtaaagatggttctgttcttcagttaacagctgttgataatcgtcgtgctactgttattgttcctaatgatcctgatttgattgatatcttggcgatgaatggtgttgatatatctgtttctgaaggagaaggtggaaatgggttgtttgatttcattggtaatttgctttttcctttgttggcttttggagggttgttttatctctttagaggaggtcaaggaggtgctggtggtcctggaggtttaggaggtcctatggatttcggaagatcgaaatcgaagtttcaggaagtgcctgaaaccggtgtgacatttggtgatgttgctggagctgatcaagctaagcttgagttacaagaagttgttgatttcttgaagaatcctgataagtatactgcgttaggtgctaagattcctaaaggttgtttgttggttggtccaccgggtacggggaagacgcttttggctagagctgtggctggagaagctggagtgccgttcttttcgtgtgctgcttcggagtttgttgagctttttgttggtgtgggtgcttctagagttagggatttatttgagaaggcgaaatcgaaagctccttgtattgtgtttattgatgagattgatgctgttggtagacaaagaggagctgggatgggtggtggaaatgatgagagggaacagactattaatcagcttttgactgagatggatgggttttctggtaactctggtgtcattgtgttggctgccactaatagaccggatgttcttgactccgcgttgctgagacctggtagatttgaccggcaagtcacagtggataggcctgatgtagccggaagagttcagatccttaaggtgcattctagaggaaaagctattgggaaggatgttgattacgaaaaagttgcgaggagaactccgggtttcactggtgctgatttgcagaacctgatgaatgaagctgcgattcttgctgctagacgtgagcttaaggagataagcaaggatgaaatatctgatgctcttgagaggatcattgctggacctgaaaagaagaacgctgttgtctctgaggagaagaaaagacttgttgcttaccatgaggctgggcatgctttagttggtgcacttatgccggagtatgatccagtggccaagatatcgattattccacgtggccaagctggtgggctcacctttttcgctcctagcgaagagaggctagagtccggattgtatagcagaagctaccttgagaaccaaatggctgttgcacttggtggaagggttgcagaagaggtgatctttggagacgagaatgtgacaaccggagcatcaaatgatttcatgcaagtgtcgcgggtggctcgccaaatggttgagagattcgggttcagcaaaaagattggacaagttgcagttggtggagcaggaggaaaccctttcttgggtcaaagtatgtcatcgcagaaggattactcgatggcaacagcggatgtggttgatgcggaagtgagagagctcgttgagaaggcgtacgtgagagcgaaagagatcataacaacacaaattgatatcctacacaagcttgcacagctccttattgagaaagaaactgtggatggagaagagttcatgagtcttttcattgacggacaagccgagttatatgtttcttaaaatcaactaattggcttgtaataataccaattagcttcgatctatacatactgtatgttaatatacattgacatgttcagagacttttctttttct

SEQ ID NO: 50199 - protein, 737 aa, Arabidopsis thaliana
  peptide (1)..(737): Ceres Seq. ID no. 12591387
SFNSNSKLLPFFTSLFFKFNHHKNRIFILQRASMATTSSNPLLLSSNFLGSQIIISAPTPKTTTKSLPFSVISRKRYQISQSEKLMKSLPSQAALAALLFSSSSPQALAVNEPVQPPAPTITAEAQSPNLSTFGQNVLMTAPNPQAQSSDLPDGTQWRYSEFLNAVKKGKVERVKFSKDGSVLQLTAVDNRRATVIVPNDPDLIDILAMNGVDISVSEGEGGNGLFDFIGNLLFPLLAFGGLFYLFRGGQGGAGGPGGLGGPMDFGRSKSKFQEVPETGVTFGDVAGADQAKLELQEVVDFLKNPDKYTALGAKIPKGCLLVGPPGTGKTLLARAVAGEAGVPFFSCAASEFVELFVGVGASRVRDLFEKAKSKAPCIVFIDEIDAVGRQRGAGMGGGNDEREQTINQLLTEMDGFSGNSGVIVLAATNRPDVLDSALLRPGRFDRQVTVDRPDVAGRVQILKVHSRGKAIGKDVDYEKVARRTPGFTGADLQNLMNEAAILAARRELKEISKDEISDALERIIAGPEKKNAVVSEEKKRLVAYHEAGHALVGALMPEYDPVAKISIIPRGQAGGLTFFAPSEERLESGLYSRSYLENQMAVALGGRVAEEVIFGDENVTTGASNDFMQVSRVARQMVERFGFSKKIGQVAVGGAGGNPFLGQSMSSQKDYSMATADVVDAEVRELVEKAYVRAKEIITTQIDILHKLAQLLIEKETVDGEEFMSLFIDGQAELYVS

SEQ ID NO: 50200 - protein, 704 aa, Arabidopsis thaliana
  peptide (1)..(704): Ceres Seq. ID no. 12591388
MATTSSNPLLLSSNFLGSQIIISAPTPKTTTKSLPFSVISRKRYQISQSEKLMKSLPSQAALAALLFSSSSPQALAVNEPVQPPAPTITAEAQSPNLSTFGQNVLMTAPNPQAQSSDLPDGTQWRYSEFLNAVKKGKVERVKFSKDGSVLQLTAVDNRRATVIVPNDPDLIDILAMNGVDISVSEGEGGNGLFDFIGNLLFPLLAFGGLFYLFRGGQGGAGGPGGLGGPMDFGRSKSKFQEVPETGVTFGDVAGADQAKLELQEVVDFLKNPDKYTALGAKIPKGCLLVGPPGTGKTLLARAVAGEAGVPFFSCAASEFVELFVGVGASRVRDLFEKAKSKAPCIVFIDEIDAVGRQRGAGMGGGNDEREQTINQLLTEMDGFSGNSGVIVLAATNRPDVLDSALLRPGRFDRQVTVDRPDVAGRVQILKVHSRGKAIGKDVDYEKVARRTPGFTGADLQNLMNEAAILAARRELKEISKDEISDALERIIAGPEKKNAVVSEEKKRLVAYHEAGHALVGALMPEYDPVAKISIIPRGQAGGLTFFAPSEERLESGLYSRSYLENQMAVALGGRVAEEVIFGDENVTTGASNDFMQVSRVARQMVERFGFSKKIGQVAVGGAGGNPFLGQSMSSQKDYSMATADVVDAEVRELVEKAYVRAKEIITTQIDILHKLAQLLIEKETVDGEEFMSLFIDGQAELYVS

SEQ ID NO: 50201 - protein, 652 aa, Arabidopsis thaliana
  peptide (1)..(652): Ceres Seq. ID no. 12591389
MKSLPSQAALAALLFSSSSPQALAVNEPVQPPAPTITAEAQSPNLSTFGQNVLMTAPNPQAQSSDLPDGTQWRYSEFLNAVKKGKVERVKFSKDGSVLQLTAVDNRRATVIVPNDPDLIDILAMNGVDISVSEGEGGNGLFDFIGNLLFPLLAFGGLFYLFRGGQGGAGGPGGLGGPMDFGRSKSKFQEVPETGVTFGDVAGADQAKLELQEVVDFLKNPDKYTALGAKIPKGCLLVGPPGTGKTLLARAVAGEAGVPFFSCAASEFVELFVGVGASRVRDLFEKAKSKAPCIVFIDEIDAVGRQRGAGMGGGNDEREQTINQLLTEMDGFSGNSGVIVLAATNRPDVLDSALLRPGRFDRQVTVDRPDVAGRVQILKVHSRGKAIGKDVDYEKVARRTPGFTGADLQNLMNEAAILAARRELKEISKDEISDALERIIAGPEKKNAVVSEEKKRLVAYHEAGHALVGALMPEYDPVAKISIIPRGQAGGLTFFAPSEERLESGLYSRSYLENQMAVALGGRVAEEVIFGDENVTTGASNDFMQVSRVARQMVERFGFSKKIGQVAVGGAGGNPFLGQSMSSQKDYSMATADVVDAEVRELVEKAYVRAKEIITTQIDILHKLAQLLIEKETVDGEEFMSLFIDGQAELYVS

SEQ ID NO: 50202 - DNA, 2000 bp, Arabidopsis thaliana
  misc_feature (1)..(2000): Ceres Seq. ID no. 12591944
  misc_feature (1)..(2000): Ortholog of  Ceres SEQ ID NO 13594380 as cited in SEQ ID NO 58039
  misc_feature (1)..(2000): Ortholog of  Ceres SEQ ID NO 13597407 as cited in SEQ ID NO 64106
aatatcaaatcttgtcttcttcttcttcttcttcttctttttcttcttcttacatttgatttctctgtctgaattcgagaaccagatctactaattacctgagagaaaaaagatctgctctgtttgtctgaaacagacagaagtcaacaaatctttcatttgttttttagcaaatcaaagaaatggccggagggttcgtcagtcaaacgccgggtgttcggaactacaattacaaactgacaccgaaagtgtttgtgacatgtttcatcggtgcttttggtggtctcatcttcggatacgatctcgggatctcaggaggggtaacctcaatggagccattcttggaagagttcttcccttacgtctacaagaagatgaagagcgcacatgagaacgagtactgtcgatttgatagtcagcttctcactctcttcacttcgtctctctatgtggcggctttggtgtcttctctctttgcctccaccattactagagttttcggaaggaaatggtcgatgtttctcggtggtttcaccttcttcatcggttctgctttcaacggctttgcccaaaacatcgctatgcttctcattggtcgtatcctacttggtttcggagtcggattcgccaatcaatctgtaccggtttatttatcagaaatggctcctccgaatctaagaggagctttcaacaacgggtttcaagtagcgattatctttggtattgtggttgcaacgatcatcaattacttcaccgcacagatgaaaggaaacatcggatggagaatctctctcggattagcttgtgtccctgcagtgatgatcatgatcggagctctgatccttcccgacactcccaactctctcatcgaacgtggctacaccgaagaggccaaggaaatgcttcagtccatccgaggaaccaatgaagtcgatgaagagtttcaagatctcattgatgcaagtgaggagtccaagcaagtgaaacacccatggaagaacatcatgcttcctcgttacagaccacaattgatcatgacttgcttcattcctttctttcaacaacttaccggaatcaatgtcattaccttctacgccccggttttgttccaaaccctcgggttcggtagcaaagcttccctcctatcagctatggtaacgggtatcatcgagctcttgtgtaccttcgtctctgtttttacagtggataggtttggaagaagaatcttgttcctccaaggaggtatccagatgcttgtctctcagatcgctattggagccatgattggagtcaaatttggagtggctggaacaggaaacatagggaaaagtgatgccaatctaatcgtggcactgatctgcatctatgtagcgggtttcgcctggtcatggggaccgttgggatggttggttcctagtgagatatctccactagagatccgatcagcagctcaagccataaacgtttcggtcaacatgttcttcacattccttgtggctcagctcttcctcactatgctttgtcacatgaaattcggactattcttcttcttcgccttctttgttgtcataatgacaatattcatctacttgatgttgcctgagacaaagaatgtgccaatcgaagagatgaacagagtgtggaaggcacattggttctggggaaagtttattcctgatgaagctgtcaatatgggtgctgctgagatgcaacagaagtccgtatgatgatgatcaagaatgaagttttctttgggcaataaagatttatgagaaaagagaaagtgaataattcttgggatgaaataagaataattgtcaaaaatgccttacttcctaaaagaaagctgctctgtctttagcttcagagacttagctttcattgtttcttctttcttcttttttaatgtttctttgttgaaattgttatttggggcctaaagatgtaaaaacaaaaaaaagaacaaaattatttaaaaatggtttcttattttacatttc

SEQ ID NO: 50203 - protein, 514 aa, Arabidopsis thaliana
  peptide (1)..(514): Ceres Seq. ID no. 12591945
MAGGFVSQTPGVRNYNYKLTPKVFVTCFIGAFGGLIFGYDLGISGGVTSMEPFLEEFFPYVYKKMKSAHENEYCRFDSQLLTLFTSSLYVAALVSSLFASTITRVFGRKWSMFLGGFTFFIGSAFNGFAQNIAMLLIGRILLGFGVGFANQSVPVYLSEMAPPNLRGAFNNGFQVAIIFGIVVATIINYFTAQMKGNIGWRISLGLACVPAVMIMIGALILPDTPNSLIERGYTEEAKEMLQSIRGTNEVDEEFQDLIDASEESKQVKHPWKNIMLPRYRPQLIMTCFIPFFQQLTGINVITFYAPVLFQTLGFGSKASLLSAMVTGIIELLCTFVSVFTVDRFGRRILFLQGGIQMLVSQIAIGAMIGVKFGVAGTGNIGKSDANLIVALICIYVAGFAWSWGPLGWLVPSEISPLEIRSAAQAINVSVNMFFTFLVAQLFLTMLCHMKFGLFFFFAFFVVIMTIFIYLMLPETKNVPIEEMNRVWKAHWFWGKFIPDEAVNMGAAEMQQKSV

SEQ ID NO: 50204 - protein, 465 aa, Arabidopsis thaliana
  peptide (1)..(465): Ceres Seq. ID no. 12591946
MEPFLEEFFPYVYKKMKSAHENEYCRFDSQLLTLFTSSLYVAALVSSLFASTITRVFGRKWSMFLGGFTFFIGSAFNGFAQNIAMLLIGRILLGFGVGFANQSVPVYLSEMAPPNLRGAFNNGFQVAIIFGIVVATIINYFTAQMKGNIGWRISLGLACVPAVMIMIGALILPDTPNSLIERGYTEEAKEMLQSIRGTNEVDEEFQDLIDASEESKQVKHPWKNIMLPRYRPQLIMTCFIPFFQQLTGINVITFYAPVLFQTLGFGSKASLLSAMVTGIIELLCTFVSVFTVDRFGRRILFLQGGIQMLVSQIAIGAMIGVKFGVAGTGNIGKSDANLIVALICIYVAGFAWSWGPLGWLVPSEISPLEIRSAAQAINVSVNMFFTFLVAQLFLTMLCHMKFGLFFFFAFFVVIMTIFIYLMLPETKNVPIEEMNRVWKAHWFWGKFIPDEAVNMGAAEMQQKSV

SEQ ID NO: 50205 - protein, 450 aa, Arabidopsis thaliana
  peptide (1)..(450): Ceres Seq. ID no. 12591947
MKSAHENEYCRFDSQLLTLFTSSLYVAALVSSLFASTITRVFGRKWSMFLGGFTFFIGSAFNGFAQNIAMLLIGRILLGFGVGFANQSVPVYLSEMAPPNLRGAFNNGFQVAIIFGIVVATIINYFTAQMKGNIGWRISLGLACVPAVMIMIGALILPDTPNSLIERGYTEEAKEMLQSIRGTNEVDEEFQDLIDASEESKQVKHPWKNIMLPRYRPQLIMTCFIPFFQQLTGINVITFYAPVLFQTLGFGSKASLLSAMVTGIIELLCTFVSVFTVDRFGRRILFLQGGIQMLVSQIAIGAMIGVKFGVAGTGNIGKSDANLIVALICIYVAGFAWSWGPLGWLVPSEISPLEIRSAAQAINVSVNMFFTFLVAQLFLTMLCHMKFGLFFFFAFFVVIMTIFIYLMLPETKNVPIEEMNRVWKAHWFWGKFIPDEAVNMGAAEMQQKSV

SEQ ID NO: 50206 - DNA, 1178 bp, Arabidopsis thaliana
  misc_feature (1)..(1178): Ceres Seq. ID no. 13647949
  misc_feature (1)..(1178): Ortholog of  Ceres SEQ ID NO 14309076 as cited in SEQ ID NO 0
ggggacggaccgtgattggtcggtctctctcgttacggtgaggctgaggctgaggcggagattgagagagaccaaccatgatacgacgaatcaccgagagagcttctggtttcgctaagaatattccgattctcaaatcgtctcgatttcacggcgagtccctcgattcctccgtctcccctgttctcattcccggcgtccatgtcttccattgtcaggatgctgttgggattgtagctaaactatcagattgcatagcagcaaaaggtggcaacattcttggctacgatgtttttgttcctgaaaacaacaacgtcttctactctcgcagcgagtttatctttgatccggttaaatggccgagaagccaagtggatgaagattttcaaactattgcacaaagatacggtgccttgaattcagttgtgcgtgtgccttctattgatcctaagtataagatagctcttcttctttcaaaacaggatcattgtcttgtcgaaatgttgcataaatggcaggacgggaaactccctgtggatattacctgtgtgataagcaatcatgaaagagcttcaaacactcacgttatgcggtttcttgagaggcatggcatcccttatcattatgtatctacaactaaagagaataaaagagaagatgatattttggaattggttaaggacactgatttcctagttcttgctagatatatgcagattttatcgggtaactttttgaaaggttatggaaaggatgtaatcaacatccaccatggtctcttaccatcatttaagggtggatatcccgcaaaacaggcattcgacgctggtgtgaaactaattggagccactagtcactttgttaccgaggaacttgattcagggccaattattgaacaaatggttgagagtgtttcccaccgagacaacttaaggagctttgtccagaaatccgaggacctagagaaaaaatgcctcacgagagctataaaatcttactgcgaactaagggtattaccttatggtacaaacaagactgttgtattctagttaagaaagcaataactacgattctcatctgattctttgtttgaacatctcaagaaaaggtgatacgaatttctataaaaaaaaaaaaaaaaaaaaaaaaaaaaaaaaaaaccaaaaaaaaaaaaaaaa

SEQ ID NO: 50207 - protein, 323 aa, Arabidopsis thaliana
  peptide (1)..(323): Ceres Seq. ID no. 13647950
MIRRITERASGFAKNIPILKSSRFHGESLDSSVSPVLIPGVHVFHCQDAVGIVAKLSDCIAAKGGNILGYDVFVPENNNVFYSRSEFIFDPVKWPRSQVDEDFQTIAQRYGALNSVVRVPSIDPKYKIALLLSKQDHCLVEMLHKWQDGKLPVDITCVISNHERASNTHVMRFLERHGIPYHYVSTTKENKREDDILELVKDTDFLVLARYMQILSGNFLKGYGKDVINIHHGLLPSFKGGYPAKQAFDAGVKLIGATSHFVTEELDSGPIIEQMVESVSHRDNLRSFVQKSEDLEKKCLTRAIKSYCELRVLPYGTNKTVVF

SEQ ID NO: 50208 - protein, 182 aa, Arabidopsis thaliana
  peptide (1)..(182): Ceres Seq. ID no. 13647951
MLHKWQDGKLPVDITCVISNHERASNTHVMRFLERHGIPYHYVSTTKENKREDDILELVKDTDFLVLARYMQILSGNFLKGYGKDVINIHHGLLPSFKGGYPAKQAFDAGVKLIGATSHFVTEELDSGPIIEQMVESVSHRDNLRSFVQKSEDLEKKCLTRAIKSYCELRVLPYGTNKTVVF

SEQ ID NO: 50209 - DNA, 1183 bp, Arabidopsis thaliana
  misc_feature (1)..(1183): Ceres Seq. ID no. 13648569
  misc_feature (1)..(1183): Ortholog of  Ceres SEQ ID NO 12627215 as cited in SEQ ID NO 60976
  misc_feature (1)..(1183): Ortholog of  Ceres SEQ ID NO 13654980 as cited in SEQ ID NO 63094
  misc_feature (1)..(1183): Ortholog of  Ceres SEQ ID NO 12589584 as cited in SEQ ID NO 0
  misc_feature (1)..(1183): Ortholog of  Ceres SEQ ID NO 12635657 as cited in SEQ ID NO 0
  misc_feature (1)..(1183): Ortholog of  Ceres SEQ ID NO 12635879 as cited in SEQ ID NO 0
  misc_feature (1)..(1183): Ortholog of  Ceres SEQ ID NO 13599649 as cited in SEQ ID NO 0
gaaaaaacacactgcaattgagatcgatttcgactgtaagtgaactttgattgccgcgaagattactcaaatcgccggacacaagtttttcagtgaattccattggcatagaactcgagagaaagagacacagagagagagagagatctaacaagagtcaaagtttctgactttttcgcattctttttgagatcgagttctgtttttgttggcgtgtgagatgaattcttaagaaggaagaagaagaagaaggaaagatgcgtagagagatctcgtttttgctacagcccaggtgtcttcttcttctcgttgccctaacgattttcctcgtcttcgcgctcttcaacaccggaaaagatgaggagaagcaagtaattgaagatcatgaaatcaccaacagggtttttctcgatgttgatattgatggccaacgcttaggcaggattgttatcggactatatggcactgttgtacccaaaactgtagaaaatttcagggctttatgcacaggggagaagggtaaaacctcaagcggaaagcctttacattataagggaacaccatttcatcgtataatatctggatttgtaatccaaggaggagacattatccatggtgatggaaaaagtagtgactcaatctatggtggaacctttcctgacgaaaatttcaagatacagcattcacacgcaggtatggtagcaatggctaatacaggaccggattctaatggctcgcagttctttatcactactgttaaggctagctggttggaaggagaacatgtggtgttgggaaaggtgatacaaggaatggacaatgtattcgccattgaaggtggagctggaacttacagtggcaaacccaggaagaaagttgtgattgctgattctggagagatccctaaagacaaatgggatgaagagagatgacaaagacaaacctaagatacacagcactacgacaaatctggttctgttcctgtgagattctgtctctgtattttctttctatttatagttttgcacatgtgatgatctgaattctgaacgcaatgccactgtagttagtgtttaaagctgggcctggaagcatctgtagcttttcacttgaggtttttctagactttatttatatgatttttagttcactctacttcagttatgtagatatatttattatg

SEQ ID NO: 50210 - protein, 224 aa, Arabidopsis thaliana
  peptide (1)..(224): Ceres Seq. ID no. 13648570
MRREISFLLQPRCLLLLVALTIFLVFALFNTGKDEEKQVIEDHEITNRVFLDVDIDGQRLGRIVIGLYGTVVPKTVENFRALCTGEKGKTSSGKPLHYKGTPFHRIISGFVIQGGDIIHGDGKSSDSIYGGTFPDENFKIQHSHAGMVAMANTGPDSNGSQFFITTVKASWLEGEHVVLGKVIQGMDNVFAIEGGAGTYSGKPRKKVVIADSGEIPKDKWDEER

SEQ ID NO: 50211 - DNA, 1490 bp, Arabidopsis thaliana
  misc_feature (1)..(1490): Ceres Seq. ID no. 13648163
  misc_feature (1)..(1490): Ortholog of  Ceres SEQ ID NO 14316532 as cited in SEQ ID NO 57093
aatcaaccttgtgaaaaaaaaaaaaaacttttgattccctcttcttctaaaagccatgaaaccgattcaatctccttctggagtagcttcacctatgaagaaccgtttacgcaaacgtcctgacctaagcttaccactcccacaccgcgacgtcgctctcgccgtacctctccctctcccacctccttcttcctcttcatccgctccggcgtcttcctccgcgatctcaaccaacatctccgccgctaaaagcttatccgagctagaacgagtgaaccgaatcggaagcggagccggaggaacggtttacaaagtaatccacactccgacgtcacgtcctttcgctctcaaagtgatttacggaaaccacgaagataccgtgagacgtcagatctgtagagagatcgagatcttaagaagtgttgatcatccaaacgttgtgaaatgtcacgatatgtttgatcataacggtgagatccaggttttgcttgagtttatggatcaaggatctcttgaaggagctcatatatggcaagaacaggaattagctgatctctctcgtcagattcttagtggattagcttatcttcatcgtcgtcatatcgttcatcgtgatatcaaaccttcgaatcttcttataaactcagctaaaaatgtgaaaattgctgattttggtgtgagtaggatcttggcacaaacaatggatccttgtaattcatctgttggtactattgcttatatgagtcctgagaggattaatactgatttgaatcatggtcgttacgatggttatgctggagatgtttggagtttaggtgttagtatcttggagttttacttggggaggtttccttttgctgtgagtagacaaggtgattgggctagtcttatgtgtgctatttgtatgtctcagccacctgaagctccggctacggcgtctcaggagtttcgtcactttgtttcttgttgtttacagagtgatcctcctaagagatggtcagctcaacagcttttgcagcatcctttcatacttaaagctaccggtggtcctaatctccgtcaaatgttgccgccgcctcgtcctcttccttctgcctcttagtgtttctaccattttcgtctttcttgtttttcaatttttcgtagtttttcctgacatttttccataagttttgcataccccaagcaaagataatgagaagagtagaagaacaatgtggtttgtgattggggtatgagtcgtcaggaagaaactcagtttgtggttagggtttattgagtctttatcttatgctgctaagcttgatttgtcttatgggtaatgaagaatgttttgctagaaatggaaacaaaaaaatagacaagaagaattcttatggtttaagagtgattttagctggatttgcttatattattgtttatataaggaagtaaatggaggatctttcattggataattctcattaataaagcttcttcctttaattctc

SEQ ID NO: 50212 - protein, 348 aa, Arabidopsis thaliana
  peptide (1)..(348): Ceres Seq. ID no. 13648164
MKPIQSPSGVASPMKNRLRKRPDLSLPLPHRDVALAVPLPLPPPSSSSSAPASSSAISTNISAAKSLSELERVNRIGSGAGGTVYKVIHTPTSRPFALKVIYGNHEDTVRRQICREIEILRSVDHPNVVKCHDMFDHNGEIQVLLEFMDQGSLEGAHIWQEQELADLSRQILSGLAYLHRRHIVHRDIKPSNLLINSAKNVKIADFGVSRILAQTMDPCNSSVGTIAYMSPERINTDLNHGRYDGYAGDVWSLGVSILEFYLGRFPFAVSRQGDWASLMCAICMSQPPEAPATASQEFRHFVSCCLQSDPPKRWSAQQLLQHPFILKATGGPNLRQMLPPPRPLPSAS

SEQ ID NO: 50213 - protein, 335 aa, Arabidopsis thaliana
  peptide (1)..(335): Ceres Seq. ID no. 13648165
MKNRLRKRPDLSLPLPHRDVALAVPLPLPPPSSSSSAPASSSAISTNISAAKSLSELERVNRIGSGAGGTVYKVIHTPTSRPFALKVIYGNHEDTVRRQICREIEILRSVDHPNVVKCHDMFDHNGEIQVLLEFMDQGSLEGAHIWQEQELADLSRQILSGLAYLHRRHIVHRDIKPSNLLINSAKNVKIADFGVSRILAQTMDPCNSSVGTIAYMSPERINTDLNHGRYDGYAGDVWSLGVSILEFYLGRFPFAVSRQGDWASLMCAICMSQPPEAPATASQEFRHFVSCCLQSDPPKRWSAQQLLQHPFILKATGGPNLRQMLPPPRPLPSAS

SEQ ID NO: 50214 - protein, 215 aa, Arabidopsis thaliana
  peptide (1)..(215): Ceres Seq. ID no. 13648166
MFDHNGEIQVLLEFMDQGSLEGAHIWQEQELADLSRQILSGLAYLHRRHIVHRDIKPSNLLINSAKNVKIADFGVSRILAQTMDPCNSSVGTIAYMSPERINTDLNHGRYDGYAGDVWSLGVSILEFYLGRFPFAVSRQGDWASLMCAICMSQPPEAPATASQEFRHFVSCCLQSDPPKRWSAQQLLQHPFILKATGGPNLRQMLPPPRPLPSAS

SEQ ID NO: 50215 - DNA, 1757 bp, Arabidopsis thaliana
  misc_feature (1)..(1757): Ceres Seq. ID no. 15179687
  misc_feature (1)..(1757): Ortholog of  Ceres SEQ ID NO 15171438 as cited in SEQ ID NO 51665
  misc_feature (1)..(1757): Ortholog of  Ceres SEQ ID NO 15170804 as cited in SEQ ID NO 52653
  misc_feature (1)..(1757): Ortholog of  Ceres SEQ ID NO 15170203 as cited in SEQ ID NO 53291
  misc_feature (1)..(1757): Ortholog of  Ceres SEQ ID NO 14303083 as cited in SEQ ID NO 66573
aaatctaattttaaatctaccttttcttttgtttttttctctcctcacaaattactcaatttatagttgttaattttttgaggagaacaagaaggtggtagtattatttcaaaatgtttacggaagctgatagcattcctagggcaaaatatgccaacatgatgcattctgatccgaatctttcctccacgatgacccaacaaacagaggaagagtatggtatacgcaatagcagtgcatctgcggttggcacggggatgtatgatagaatgagttgtgaaggttctccaatgatgatgtctccttggaaccaagcaactccatttactcaaacacaatggtctactgtagaagaaaacctaccccaaaatggccttattggctcgcttgtccgtgaagaaggtcacatctattcattagcggccacaaaagatcttctttatactggctctgatagcaaaaacatacgtgtgtggaagaatctaaaggagttcagtgcattcaaatgtaacagtggattggttaaggccattgtgatttcaggggagaagattttcacaggtcaccaagacggaaagattcgagtttggaaagtctcccctaagaaccagagcttgcacaaacgttctggaacattaccaactttgaaagatatattcaaggcatctctcaaaccaagaaactatgttgaggtgaagaaacaccgcactgctctctggatcaaacacgccgatgctgtttcatgtttaagcctaaatgatgagcaagggttgttgtattctgcttcatgggaccggaccattaaggtgtggaggattgctgattcaaaatgtctagaatcaatcccagctcatgatgatgctgtaaactcggtggtatcaacaacggaagcgattgttttctctggatcagccgatgggacagtcaaggcatggaagagagaccaacaaggaaaatacacaaagcatacactaatgcaaacattaacaaagcaagaaagcgcagtcacagctttggctgtaagcaagaatggtgcggcagtgtactttggttcgagtgatggtttggtcaatttttgggagagggagaaacagttgaactacggtggtattctcaagggccacaagcttgctgttctttgcctagaagtggcagggagtcttgtttttagcggatctgctgataagacaatatgtgtgtggaagagagatggaaatattcatacatgcctctctgtactaacaggtcacacaggtcctgtgaaatgtttggcagtagaagcagaccgtgaagcctccgaacgtcgggacaaaaaatggattgtatatagtggaagcttggataagtcagtaaaagtatggggagtttcagaatctttcattgacatgaaccagatgagtatgatgcaacagcaacaacagcaacatgttatatcacattctgaaccattcatgtctgatggcagtttctcttcatcagctggtggagctagcagccatcgaagacactaatcatggtttgtgatttgaccatcaaataccaactgtgtctgaattattcatttgtttgttgttaaatttgaatggaaagaaaaagaaagaaaaatctagttatgatgcagtgttgtacaatatggaggtgaatttgaactaattttttctttttcttttttatcataaaggtttgttgtaatttttttatattttgtgatgaaaacctgtaactctatcaaacttcataataattaattttgttgc

SEQ ID NO: 50216 - protein, 465 aa, Arabidopsis thaliana
  peptide (1)..(465): Ceres Seq. ID no. 15179688
MFTEADSIPRAKYANMMHSDPNLSSTMTQQTEEEYGIRNSSASAVGTGMYDRMSCEGSPMMMSPWNQATPFTQTQWSTVEENLPQNGLIGSLVREEGHIYSLAATKDLLYTGSDSKNIRVWKNLKEFSAFKCNSGLVKAIVISGEKIFTGHQDGKIRVWKVSPKNQSLHKRSGTLPTLKDIFKASLKPRNYVEVKKHRTALWIKHADAVSCLSLNDEQGLLYSASWDRTIKVWRIADSKCLESIPAHDDAVNSVVSTTEAIVFSGSADGTVKAWKRDQQGKYTKHTLMQTLTKQESAVTALAVSKNGAAVYFGSSDGLVNFWEREKQLNYGGILKGHKLAVLCLEVAGSLVFSGSADKTICVWKRDGNIHTCLSVLTGHTGPVKCLAVEADREASERRDKKWIVYSGSLDKSVKVWGVSESFIDMNQMSMMQQQQQQHVISHSEPFMSDGSFSSSAGGASSHRRH

SEQ ID NO: 50217 - protein, 450 aa, Arabidopsis thaliana
  peptide (1)..(450): Ceres Seq. ID no. 15179689
MMHSDPNLSSTMTQQTEEEYGIRNSSASAVGTGMYDRMSCEGSPMMMSPWNQATPFTQTQWSTVEENLPQNGLIGSLVREEGHIYSLAATKDLLYTGSDSKNIRVWKNLKEFSAFKCNSGLVKAIVISGEKIFTGHQDGKIRVWKVSPKNQSLHKRSGTLPTLKDIFKASLKPRNYVEVKKHRTALWIKHADAVSCLSLNDEQGLLYSASWDRTIKVWRIADSKCLESIPAHDDAVNSVVSTTEAIVFSGSADGTVKAWKRDQQGKYTKHTLMQTLTKQESAVTALAVSKNGAAVYFGSSDGLVNFWEREKQLNYGGILKGHKLAVLCLEVAGSLVFSGSADKTICVWKRDGNIHTCLSVLTGHTGPVKCLAVEADREASERRDKKWIVYSGSLDKSVKVWGVSESFIDMNQMSMMQQQQQQHVISHSEPFMSDGSFSSSAGGASSHRRH

SEQ ID NO: 50218 - protein, 449 aa, Arabidopsis thaliana
  peptide (1)..(449): Ceres Seq. ID no. 15179690
MHSDPNLSSTMTQQTEEEYGIRNSSASAVGTGMYDRMSCEGSPMMMSPWNQATPFTQTQWSTVEENLPQNGLIGSLVREEGHIYSLAATKDLLYTGSDSKNIRVWKNLKEFSAFKCNSGLVKAIVISGEKIFTGHQDGKIRVWKVSPKNQSLHKRSGTLPTLKDIFKASLKPRNYVEVKKHRTALWIKHADAVSCLSLNDEQGLLYSASWDRTIKVWRIADSKCLESIPAHDDAVNSVVSTTEAIVFSGSADGTVKAWKRDQQGKYTKHTLMQTLTKQESAVTALAVSKNGAAVYFGSSDGLVNFWEREKQLNYGGILKGHKLAVLCLEVAGSLVFSGSADKTICVWKRDGNIHTCLSVLTGHTGPVKCLAVEADREASERRDKKWIVYSGSLDKSVKVWGVSESFIDMNQMSMMQQQQQQHVISHSEPFMSDGSFSSSAGGASSHRRH

SEQ ID NO: 50219 - DNA, 1859 bp, Arabidopsis thaliana; identical to SEQ ID NO: 50014
  misc_feature (1)..(1859): Ceres Seq. ID no. 12602423
  misc_feature (1)..(1859): Ortholog of  Ceres SEQ ID NO 15170885 as cited in SEQ ID NO 54326

SEQ ID NO: 50220 - protein, 504 aa, Arabidopsis thaliana; identical to SEQ ID NO: 50015
  peptide (1)..(504): Ceres Seq. ID no. 12602424

SEQ ID NO: 50221 - protein, 490 aa, Arabidopsis thaliana; identical to SEQ ID NO: 50016
  peptide (1)..(490): Ceres Seq. ID no. 12602425

SEQ ID NO: 50222 - protein, 403 aa, Arabidopsis thaliana; identical to SEQ ID NO: 50017
  peptide (1)..(403): Ceres Seq. ID no. 12602426

SEQ ID NO: 50223 - DNA, 922 bp, Arabidopsis thaliana
  misc_feature (1)..(922): Ceres Seq. ID no. 13588916
  misc_feature (1)..(922): Ortholog of  Ceres SEQ ID NO 14315042 as cited in SEQ ID NO 56959
  misc_feature (1)..(922): Ortholog of  Ceres SEQ ID NO 12608620 as cited in SEQ ID NO 60192
  misc_feature (1)..(922): Ortholog of  Ceres SEQ ID NO 15173077 as cited in SEQ ID NO 64566
  misc_feature (1)..(922): Ortholog of  Ceres SEQ ID NO 13662898 as cited in SEQ ID NO 66199
  misc_feature (1)..(922): Ortholog of  Ceres SEQ ID NO 13654314 as cited in SEQ ID NO 67914
gtctctctgtctctttctctttctctctctctcagaaactctttctccaaaaatggcagaggcaagtttctatatcggagtcataggaaatgtaatctccgtactagttttcctctcaccagtggagacgttttggaaaatagtgaagcggagatcaacggaggagtacaaaagcttgccgtacatttgcacgttgttaggatcatcgctatggacatattacggcatcgtcactcccggagaatatcttgtctccaccgttaatggctttggtgctcttgttgaaaccatctacgtttcactttttctcttttatgcccctcgacatctcaagctgaaaacagtggtagtggtagcgatgttgaacgtgttttttccaatcgcggcgattgtggcaacgagaagtgcgtttgaagatgagaagatgcgttctcaatcaataggtttcatatctgctggtctaaacattataatgtatggttctccactttcagcaatgaaaacagtagtgacaacaaagagcgtgaaatacatgccgttttggttgtcgtttttcctcttcttaaacggcgcgatttgggctgtctatgctttactccaacacgacgttttcttactcgtgccaaatggagtggggtttgtgtttgggacaatgcaactcatactttatggaatttacagaaatgccaaaccggttggtttaagcaacggtttaagtgagattgctcaagatgaagaggaaggcctcacatcacgtgttgaacctctcctctcttaaatcccttttttttttatgtcaagagcttgttaattaatttgggtcttataaatacaaatctttatattttttgttacattattgtggtgtgcgattttgtgtacgttatttttttggacaaaattagattaatttgaagatgtt

SEQ ID NO: 50224 - protein, 258 aa, Arabidopsis thaliana
  peptide (1)..(258): Ceres Seq. ID no. 13588917
SLCLFLFLSLSETLSPKMAEASFYIGVIGNVISVLVFLSPVETFWKIVKRRSTEEYKSLPYICTLLGSSLWTYYGIVTPGEYLVSTVNGFGALVETIYVSLFLFYAPRHLKLKTVVVVAMLNVFFPIAAIVATRSAFEDEKMRSQSIGFISAGLNIIMYGSPLSAMKTVVTTKSVKYMPFWLSFFLFLNGAIWAVYALLQHDVFLLVPNGVGFVFGTMQLILYGIYRNAKPVGLSNGLSEIAQDEEEGLTSRVEPLLS

SEQ ID NO: 50225 - protein, 241 aa, Arabidopsis thaliana
  peptide (1)..(241): Ceres Seq. ID no. 13588918
MAEASFYIGVIGNVISVLVFLSPVETFWKIVKRRSTEEYKSLPYICTLLGSSLWTYYGIVTPGEYLVSTVNGFGALVETIYVSLFLFYAPRHLKLKTVVVVAMLNVFFPIAAIVATRSAFEDEKMRSQSIGFISAGLNIIMYGSPLSAMKTVVTTKSVKYMPFWLSFFLFLNGAIWAVYALLQHDVFLLVPNGVGFVFGTMQLILYGIYRNAKPVGLSNGLSEIAQDEEEGLTSRVEPLLS

SEQ ID NO: 50226 - protein, 139 aa, Arabidopsis thaliana
  peptide (1)..(139): Ceres Seq. ID no. 13588919
MLNVFFPIAAIVATRSAFEDEKMRSQSIGFISAGLNIIMYGSPLSAMKTVVTTKSVKYMPFWLSFFLFLNGAIWAVYALLQHDVFLLVPNGVGFVFGTMQLILYGIYRNAKPVGLSNGLSEIAQDEEEGLTSRVEPLLS

SEQ ID NO: 50227 - DNA, 756 bp, Arabidopsis thaliana
  misc_feature (1)..(756): Ceres Seq. ID no. 13588920
  misc_feature (1)..(756): Ortholog of  Ceres SEQ ID NO 13598617 as cited in SEQ ID NO 65391
  misc_feature (1)..(756): Ortholog of  Ceres SEQ ID NO 13623093 as cited in SEQ ID NO 0
aaaattagcttccggttttatcttctcgaattcagaaaaaagcccttgtccaatatctctctactcgtacaacaatggcgtcgatggctgcaaccaccaatttcaccaaatctatgctctttccattctctcatgtttcaggaaatgcgagcttgaattcgcagagaagaacatggccaaagcagtacaagtctaaaaatggttacaggtctcttcgagtgaatggattatttggaggtggaaacaaagataataacagtgaagatggacaatcaaaggcaggaatatttggtaatatgcagaatatgtatgagactgtgaagaaagctcaaatggttgttcaagtggaagctgtacgtgttcaaaaagagttagctgccgcagaatttgatggttattgtgcaggcgagcttgtcaaggttacgttatcaggtaaccagcaaccaatccgtactgatattaccgaggcagcaatggaactaggttccgaaaaactatcacaacttgtcacagaagcatacaaggacgcacacgccaagagtgtggtggctatgaaagagagaatgagtgaccttgcgcagagcttaggaatgccaccgggtctcagcgaaggaatgaagtaagaagctgtttttgttgtttcatttcaactttcaggtatgagaggttcggctttttttgtttgtttgtatatcagtcaggcagaagcaaagagctttgtactctactcttatggaattatatataaaagattcg

SEQ ID NO: 50228 - protein, 182 aa, Arabidopsis thaliana
  peptide (1)..(182): Ceres Seq. ID no. 15220921
MASMAATTNFTKSMLFPFSHVSGNASLNSQRRTWPKQYKSKNGYRSLRVNGLFGGGNKDNNSEDGQSKAGIFGNMQNMYETVKKAQMVVQVEAVRVQKELAAAEFDGYCAGELVKVTLSGNQQPIRTDITEAAMELGSEKLSQLVTEAYKDAHAKSVVAMKERMSDLAQSLGMPPGLSEGMK

SEQ ID NO: 50229 - protein, 179 aa, Arabidopsis thaliana
  peptide (1)..(179): Ceres Seq. ID no. 15220922
MAATTNFTKSMLFPFSHVSGNASLNSQRRTWPKQYKSKNGYRSLRVNGLFGGGNKDNNSEDGQSKAGIFGNMQNMYETVKKAQMVVQVEAVRVQKELAAAEFDGYCAGELVKVTLSGNQQPIRTDITEAAMELGSEKLSQLVTEAYKDAHAKSVVAMKERMSDLAQSLGMPPGLSEGMK

SEQ ID NO: 50230 - protein, 169 aa, Arabidopsis thaliana
  peptide (1)..(169): Ceres Seq. ID no. 15220923
MLFPFSHVSGNASLNSQRRTWPKQYKSKNGYRSLRVNGLFGGGNKDNNSEDGQSKAGIFGNMQNMYETVKKAQMVVQVEAVRVQKELAAAEFDGYCAGELVKVTLSGNQQPIRTDITEAAMELGSEKLSQLVTEAYKDAHAKSVVAMKERMSDLAQSLGMPPGLSEGMK

SEQ ID NO: 50231 - DNA, 1730 bp, Arabidopsis thaliana
  misc_feature (1)..(1730): Ceres Seq. ID no. 12591398
  misc_feature (1)..(1730): Ortholog of  Ceres SEQ ID NO 13585587 as cited in SEQ ID NO 65515
atgtttcgttttccggtaagtcttggaggaggtccacgtgagaatctgaagccatcagatgagcagcatcaacgtgcggtggtgaatgaggttgactttttccgatcagcggagaagagagatagggtttcacgtgaagaacaaaacattatcgccgatgagactcatagggttcatgtcaaaagggagaattcacgtgttgatgatcatgacgatcgttctactgatcacatcaatattggacttaatcttctcactgcgaatacgggaagcgacgagtcaatggtggatgatggattgtctgtggatatggaagagaaacgtacaaagtgtgagaatgcacaacttcgcgaagagctaaagaaggcgagtgaagataatcaaagactaaagcaaatgctaagtcaaacaaccaacaacttcaattccttgcagatgcaacttgttgctgtcatgaggcaacaagaagatcatcatcacctagctacgaccgagaacaatgacaatgtaaagaaccgacatgaagtgcctgaaatggttccaagacagttcatcgatttgggaccgcattctgacgaagtgtcgtccgaggagaggacgacggttcggtcgggatctcctccctcgcttctagagaaatctagctcacgtcaaaacggaaagagagtgcttgtaagagaagaaagcccggaaaccgaatccaacggctggagaaaccctaacaaagttcctaaacaccatgcatcatccagcatttgcggtggcaatggcagtgaaaatgcaagtagcaaggtcattgagcaagcggccgccgaagccaccatgcgtaaagcccgtgtctcggttcgtgctcgatccgaagctcccatgttaagcgatggatgtcaatggagaaaatacggacaaaaaatggcgaaaggaaacccgtgccctcgagcttattaccgttgcacaatggctgttggatgtcctgttcgcaagcaagtgcaacgttgcgcggaagatagaaccattctcataacaacctacgaaggaaaccataaccatccattacctcctgcggctatgaacatggcttcaactacaacagcagccgcaagcatgcttctctcaggctccaccatgtcgaaccaagacggtttaatgaacccaacaaatctcttggctcgaaccatattaccgtgttcctcaagcatggctactatctcagcctctgcaccattcccaaccattacattagacctcacagagtcacccaacgggaacaatccaaccaataacccgctgatgcaattctctcaacggtctggtttggtggagttgaaccaatcggttttgcctcatatgatgggtcaggctttgtactacaaccaacagtctaagttttcgggtttacatatgccgtctcagccgctaaacgctggtgagagtgttagcgccgctactgccgcaatcgcctccaatcccaactttgccgcggctctagctgcagccataacttcgattatcaacggttcgaacaatcagcagaatgggaacaacaataacagtaatgttacaacgagcaacgttgacaataggcaataacatttttttataagttttagttagggactttttatcggtcgattttgttttgtttttcttttattacattattttttagttacggcttttttttgttttttcttttctttcccaaacaacaagtattgagagcaattcccccc

SEQ ID NO: 50232 - protein, 528 aa, Arabidopsis thaliana
  peptide (1)..(528): Ceres Seq. ID no. 12591399
MFRFPVSLGGGPRENLKPSDEQHQRAVVNEVDFFRSAEKRDRVSREEQNIIADETHRVHVKRENSRVDDHDDRSTDHINIGLNLLTANTGSDESMVDDGLSVDMEEKRTKCENAQLREELKKASEDNQRLKQMLSQTTNNFNSLQMQLVAVMRQQEDHHHLATTENNDNVKNRHEVPEMVPRQFIDLGPHSDEVSSEERTTVRSGSPPSLLEKSSSRQNGKRVLVREESPETESNGWRNPNKVPKHHASSSICGGNGSENASSKVIEQAAAEATMRKARVSVRARSEAPMLSDGCQWRKYGQKMAKGNPCPRAYYRCTMAVGCPVRKQVQRCAEDRTILITTYEGNHNHPLPPAAMNMASTTTAAASMLLSGSTMSNQDGLMNPTNLLARTILPCSSSMATISASAPFPTITLDLTESPNGNNPTNNPLMQFSQRSGLVELNQSVLPHMMGQALYYNQQSKFSGLHMPSQPLNAGESVSAATAAIASNPNFAAALAAAITSIINGSNNQQNGNNNNSNVTTSNVDNRQ

SEQ ID NO: 50233 - protein, 434 aa, Arabidopsis thaliana
  peptide (1)..(434): Ceres Seq. ID no. 12591400
MVDDGLSVDMEEKRTKCENAQLREELKKASEDNQRLKQMLSQTTNNFNSLQMQLVAVMRQQEDHHHLATTENNDNVKNRHEVPEMVPRQFIDLGPHSDEVSSEERTTVRSGSPPSLLEKSSSRQNGKRVLVREESPETESNGWRNPNKVPKHHASSSICGGNGSENASSKVIEQAAAEATMRKARVSVRARSEAPMLSDGCQWRKYGQKMAKGNPCPRAYYRCTMAVGCPVRKQVQRCAEDRTILITTYEGNHNHPLPPAAMNMASTTTAAASMLLSGSTMSNQDGLMNPTNLLARTILPCSSSMATISASAPFPTITLDLTESPNGNNPTNNPLMQFSQRSGLVELNQSVLPHMMGQALYYNQQSKFSGLHMPSQPLNAGESVSAATAAIASNPNFAAALAAAITSIINGSNNQQNGNNNNSNVTTSNVDNRQ

SEQ ID NO: 50234 - protein, 425 aa, Arabidopsis thaliana
  peptide (1)..(425): Ceres Seq. ID no. 12591401
MEEKRTKCENAQLREELKKASEDNQRLKQMLSQTTNNFNSLQMQLVAVMRQQEDHHHLATTENNDNVKNRHEVPEMVPRQFIDLGPHSDEVSSEERTTVRSGSPPSLLEKSSSRQNGKRVLVREESPETESNGWRNPNKVPKHHASSSICGGNGSENASSKVIEQAAAEATMRKARVSVRARSEAPMLSDGCQWRKYGQKMAKGNPCPRAYYRCTMAVGCPVRKQVQRCAEDRTILITTYEGNHNHPLPPAAMNMASTTTAAASMLLSGSTMSNQDGLMNPTNLLARTILPCSSSMATISASAPFPTITLDLTESPNGNNPTNNPLMQFSQRSGLVELNQSVLPHMMGQALYYNQQSKFSGLHMPSQPLNAGESVSAATAAIASNPNFAAALAAAITSIINGSNNQQNGNNNNSNVTTSNVDNRQ

SEQ ID NO: 50235 - DNA, 1390 bp, Arabidopsis thaliana
  misc_feature (1)..(1390): Ceres Seq. ID no. 12605710
  misc_feature (1)..(1390): Ortholog of  Ceres SEQ ID NO 15170968 as cited in SEQ ID NO 55267
gaaaacagaacctcgacattaacctaaacctaagagcaaagcaaatcgacggcgacgggaaaatagaaccgcagatctctgtctcctctctctctcgtaactgtttgttcgatggcaccgaagaaggcggaggaagtggtcgaaagccctcctgtttccagtgaagaagaagaatctggctcatctggagaagaatctgaatcttctgctgaagttccgaagaaagtcgagtcttcgcaaaagcctgaatctgactctgaaggcgaatctgaatcggagtccagttctgggcccgagcccgagtccgagcctgctaagacgatcaagctgaagcctgttgggactaaaccaattccagagacgtctggatctgccgcgactgtacctgagagttcaacggctaagcgtcctttgaaggaagctgctcctgaagctattaagaagcagaagacatcggacactgagcatgtgaagaagccgataactaatgatgaggttaagaagatttcttcagaggatgctaagaagatgtttcagagattgttcagtgagacggatgaaatcgctttgcttcaaggtattattgatttcacatctaccaaaggagatccttatgaggatattgatgctttttgcatttatgtgaagaaactgatcgatttcgatgctaccaaaaaccaaattgttactaaacttcagaggttgaagaagaagtttaataatgctgtgaagaattctcttaagaagggaaagactgaagatgatattgagtttgctaaagatcttgagcaaaaaggttttgaattgtccagaaagatttggggaagcaatggtgttttggttactggtaaatcatcaaggaagaaagttggaggaacacctgcaccgaaagagatgaagttagtagctcactctactcccaagaaacaacaagaagaagcgaagaaaccggaaagaacagaggcaaaggttgtgaacacaggtctctccattggtaaagagattgcatcgttcctcaatgcagataatgggagttcttgtggtttggatgaatccacattaactgcggtttgggcaaaggttgcggatggagctgagaagagagaagtggaggagaaatggaagaagcttaaggctaagcagtttgagctatgtttgcagaggtctggactcgtgaatgaaactgcaaagatgatattcaaagcctatgaatcttgagcggtttgtctttttacttttttagtatgcatctttgagtcttttttgtattgtgcattttagcttgtgaaactaatccttatgtaagtcttttttcgtattttctttatgcccctatgttggatgtttggtttgggtatatgacccttttatttattactcttgttcggtt

SEQ ID NO: 50236 - protein, 368 aa, Arabidopsis thaliana
  peptide (1)..(368): Ceres Seq. ID no. 12605711
MAPKKAEEVVESPPVSSEEEESGSSGEESESSAEVPKKVESSQKPESDSEGESESESSSGPEPESEPAKTIKLKPVGTKPIPETSGSAATVPESSTAKRPLKEAAPEAIKKQKTSDTEHVKKPITNDEVKKISSEDAKKMFQRLFSETDEIALLQGIIDFTSTKGDPYEDIDAFCIYVKKLIDFDATKNQIVTKLQRLKKKFNNAVKNSLKKGKTEDDIEFAKDLEQKGFELSRKIWGSNGVLVTGKSSRKKVGGTPAPKEMKLVAHSTPKKQQEEAKKPERTEAKVVNTGLSIGKEIASFLNADNGSSCGLDESTLTAVWAKVADGAEKREVEEKWKKLKAKQFELCLQRSGLVNETAKMIFKAYES

SEQ ID NO: 50237 - protein, 229 aa, Arabidopsis thaliana
  peptide (1)..(229): Ceres Seq. ID no. 12605712
MFQRLFSETDEIALLQGIIDFTSTKGDPYEDIDAFCIYVKKLIDFDATKNQIVTKLQRLKKKFNNAVKNSLKKGKTEDDIEFAKDLEQKGFELSRKIWGSNGVLVTGKSSRKKVGGTPAPKEMKLVAHSTPKKQQEEAKKPERTEAKVVNTGLSIGKEIASFLNADNGSSCGLDESTLTAVWAKVADGAEKREVEEKWKKLKAKQFELCLQRSGLVNETAKMIFKAYES

SEQ ID NO: 50238 - DNA, 1869 bp, Arabidopsis thaliana; identical to SEQ ID NO: 45919
  misc_feature (1)..(1869): Ceres Seq. ID no. 13591695
  misc_feature (1)..(1869): Ortholog of  Ceres SEQ ID NO 13597376 as cited in SEQ ID NO 64002
  misc_feature (1)..(1869): Ortholog of  Ceres SEQ ID NO 13503573 as cited in SEQ ID NO 65402
  misc_feature (1)..(1869): Ortholog of  Ceres SEQ ID NO 13659615 as cited in SEQ ID NO 67248

SEQ ID NO: 50239 - protein, 419 aa, Arabidopsis thaliana; identical to SEQ ID NO: 45920
  peptide (1)..(419): Ceres Seq. ID no. 13591696

SEQ ID NO: 50240 - protein, 403 aa, Arabidopsis thaliana; identical to SEQ ID NO: 45921
  peptide (1)..(403): Ceres Seq. ID no. 13591697

SEQ ID NO: 50241 - protein, 370 aa, Arabidopsis thaliana; identical to SEQ ID NO: 45922
  peptide (1)..(370): Ceres Seq. ID no. 13591698

SEQ ID NO: 50242 - DNA, 813 bp, Arabidopsis thaliana
  misc_feature (1)..(813): Ceres Seq. ID no. 13647966
  misc_feature (1)..(813): Ortholog of  Ceres SEQ ID NO 12608262 as cited in SEQ ID NO 57800
gagagaagataatgagctccttggggttttcagttggaacttgttctcctccaagtgagaaaagaaaatgcagatttcttgtgaataatagcttaaacaaagcagaggctattaacttgagaaacaagcaaaaagtttcttctgatcctgagttaagttttgcccaattatcctcatgtggtagaagagaagcaattattggttttggtttctctattggcttgcttgataatgtttctgcattagccgaaacaacttcttgtgaattctctgtgtctccttctggtcttgctttttgtgataaagttgttggttatggtcctgaagctgttaaagggcaactaatcaaggcacattatgtagggaagttggagaatgggaaagtctttgataatagctataatcgagggaaacctcttactttccgaattggtgttggtgaggtgataaaaggttgggatcaaggaatccttggctctgatggaattcctcctatgcttactggtgggaaacgaacattgaggattcctccagaactcgcgtatggtgatcgaggcgcaggttgcaaaggaggctcatgccttattcctccagcttcggttcttctctttgacattgagtacataggtaaagcttgagagagcttttttgcttttgctttgccttttctgagccatatcatactcttgtttgaatcatccttatagaagaaaaaaatatgtctattattttttctactatgtaatcaagtgaatatctcagctttttctatcaaaaaaaaaaaaaaaaaaaactcgagggggggcccggtac

SEQ ID NO: 50243 - protein, 211 aa, Arabidopsis thaliana
  peptide (1)..(211): Ceres Seq. ID no. 13647967
EKIMSSLGFSVGTCSPPSEKRKCRFLVNNSLNKAEAINLRNKQKVSSDPELSFAQLSSCGRREAIIGFGFSIGLLDNVSALAETTSCEFSVSPSGLAFCDKVVGYGPEAVKGQLIKAHYVGKLENGKVFDNSYNRGKPLTFRIGVGEVIKGWDQGILGSDGIPPMLTGGKRTLRIPPELAYGDRGAGCKGGSCLIPPASVLLFDIEYIGKA

SEQ ID NO: 50244 - protein, 208 aa, Arabidopsis thaliana
  peptide (1)..(208): Ceres Seq. ID no. 13647968
MSSLGFSVGTCSPPSEKRKCRFLVNNSLNKAEAINLRNKQKVSSDPELSFAQLSSCGRREAIIGFGFSIGLLDNVSALAETTSCEFSVSPSGLAFCDKVVGYGPEAVKGQLIKAHYVGKLENGKVFDNSYNRGKPLTFRIGVGEVIKGWDQGILGSDGIPPMLTGGKRTLRIPPELAYGDRGAGCKGGSCLIPPASVLLFDIEYIGKA

SEQ ID NO: 50245 - DNA, 1694 bp, Arabidopsis thaliana; identical to SEQ ID NO: 44789
  misc_feature (1)..(1694): Ceres Seq. ID no. 12455338
  misc_feature (1)..(1694): Ortholog of  Ceres SEQ ID NO 15177043 as cited in SEQ ID NO 57425

SEQ ID NO: 50246 - protein, 460 aa, Arabidopsis thaliana; identical to SEQ ID NO: 44790
  peptide (1)..(460): Ceres Seq. ID no. 12455339

SEQ ID NO: 50247 - protein, 445 aa, Arabidopsis thaliana; identical to SEQ ID NO: 44791
  peptide (1)..(445): Ceres Seq. ID no. 12455340

SEQ ID NO: 50248 - protein, 337 aa, Arabidopsis thaliana; identical to SEQ ID NO: 44792
  peptide (1)..(337): Ceres Seq. ID no. 12455341

SEQ ID NO: 50249 - DNA, 1501 bp, Arabidopsis thaliana
  misc_feature (1)..(1501): Ceres Seq. ID no. 12591410
  misc_feature (1)..(1501): Ortholog of  Ceres SEQ ID NO 15177674 as cited in SEQ ID NO 52629
  misc_feature (1)..(1501): Ortholog of  Ceres SEQ ID NO 13596541 as cited in SEQ ID NO 62372
agatatctgaaatttccctcgatttgattagtgggatcaccaataccaagataaaatctgaagtttagttcattgactcaatagtatttgagtcttggggctcgaaatgattttgattttgatttcttaccgatcttcgagtttccaaagctaagcacttttatcaaatttagggtctttttacttttccaaattatatttttctgtttttggggacgaatttggctttctttctatataacccgcgagcgagacagagaccttgaccctcacctaaacctcaaaaaccaaattttgaccccaaaagccatctcttttagcaatcagattactttgaaactttctctgggtatctgagatttcttcattatttatataaatcatctaatcgaaatctactgcgacgatcggcgaagaatcggaaacacaaaaatggggtgttgcgcgagcaatacagctggtggttcaaaggctaatcggatctcacgctggcgatctacaggcattgttggtctccgcgactccaaattgaagacatttcctgatgaagtgattgaaatggagagagcagtgcgaacacttgatctaacacacaataagattgctgatgttcctggagaaatcagcaagttaatcaatatgcagcgtctgttaatagctgataatctagttgagcgccttccggggaatctagggaagcttcaatctctcaaagttttgatgcttgatggaaaccgcatcagctgtttgcctgatgaattgggccagttggtaaggcttgagcaactatcaatctcaagaaatatgctcatatacttgcccgatactattggtagtctccgcaatctactgctgttgaatgtctcaaataacagattgaaatcccttcctgaatcagtagggagctgtgcttctttagaagaagtacaggctaatgataacgttgttgaagagcttcctgcatcactctgcaatctgattcagttaaagtcgctttccttagacaataatcaagtgaaccagattccagatggattgctgatacattgcaagagtctgcaaaacctttctttgcataacaatcctatttccatggatcagtttcagctgatggaaggataccaagactttgaagagaggagaaagaagaaatttgataagcaaatcgattcgaatgtgatgatgggctctaaagcacttgatgtaggcgttgataaatgaaaactgtcttcacatctccttactttgtcggttcggtgaatgaggatcatcgtttcgtgtaagaaatattgttgtaaaactctctctctctctttctctcgtctgcaagatttagaatctctgttactgtcacaccaattcttatgaacacatacatatgtacgtttgtatactctatcaaggcgtgtctgtatatgtatatgtgcgtgtgtgtatacaaatcatataggcagaccgattcttggctttggcccttatattgagatgacgattctacttc

SEQ ID NO: 50250 - protein, 262 aa, Arabidopsis thaliana
  peptide (1)..(262): Ceres Seq. ID no. 12591411
MGCCASNTAGGSKANRISRWRSTGIVGLRDSKLKTFPDEVIEMERAVRTLDLTHNKIADVPGEISKLINMQRLLIADNLVERLPGNLGKLQSLKVLMLDGNRISCLPDELGQLVRLEQLSISRNMLIYLPDTIGSLRNLLLLNVSNNRLKSLPESVGSCASLEEVQANDNVVEELPASLCNLIQLKSLSLDNNQVNQIPDGLLIHCKSLQNLSLHNNPISMDQFQLMEGYQDFEERRKKKFDKQIDSNVMMGSKALDVGVDK

SEQ ID NO: 50251 - protein, 220 aa, Arabidopsis thaliana
  peptide (1)..(220): Ceres Seq. ID no. 12591412
MERAVRTLDLTHNKIADVPGEISKLINMQRLLIADNLVERLPGNLGKLQSLKVLMLDGNRISCLPDELGQLVRLEQLSISRNMLIYLPDTIGSLRNLLLLNVSNNRLKSLPESVGSCASLEEVQANDNVVEELPASLCNLIQLKSLSLDNNQVNQIPDGLLIHCKSLQNLSLHNNPISMDQFQLMEGYQDFEERRKKKFDKQIDSNVMMGSKALDVGVDK

SEQ ID NO: 50252 - protein, 193 aa, Arabidopsis thaliana
  peptide (1)..(193): Ceres Seq. ID no. 12591413
MQRLLIADNLVERLPGNLGKLQSLKVLMLDGNRISCLPDELGQLVRLEQLSISRNMLIYLPDTIGSLRNLLLLNVSNNRLKSLPESVGSCASLEEVQANDNVVEELPASLCNLIQLKSLSLDNNQVNQIPDGLLIHCKSLQNLSLHNNPISMDQFQLMEGYQDFEERRKKKFDKQIDSNVMMGSKALDVGVDK

SEQ ID NO: 50253 - DNA, 781 bp, Arabidopsis thaliana
  misc_feature (1)..(781): Ceres Seq. ID no. 12602329
  misc_feature (1)..(781): Ortholog of  Ceres SEQ ID NO 15174142 as cited in SEQ ID NO 64367
ctggagaagccttcacttttcgtccaagccgctaaaaatgaagcacaacaacgttatcccgagctcacactttcgcaagcactggcagaattatgtcaagacttggtttaaccagcctgccaggaagacaaggagacgtgttgctagacagaagaaggctgtgaagatcttccctcgtcccacctctggtcctctccgacctgttgttcatggtcagacacttaagtacaacatgaaagttagagctggaaaaggattcactcttgaagagcttaaggttgctggtatcccaaagaagttggctccaacaatcggaatttctgttgatcaccgacgcaagaaccgttctttggagggtcttcagtccaatgtccaaaggttaaagacttacaaggctaagttggtggtgttccctcgccgttcccgtcaagtcaaggctggtgattctactccagaggagcttgccaatgctactcaagttcaaggtgattacatgccaattgccagtgtcaaggcagctatggagctagttaagctgactgcagatttgaaggcgttcaaggcttacgataagattcgtttggagcgcacaaacgcacgtcatgctggtgccagagccaagagggctgccgaggctgagaaagaagagaagaagtaaaattcgttgctttatagagcttaatcattcttgaattcttgttcttctggtttttgattttgtgcacgactctgttttctttttggtgcggtttatcaatacatagatctcaaaggtttctgg

SEQ ID NO: 50254 - protein, 218 aa, Arabidopsis thaliana
  peptide (1)..(218): Ceres Seq. ID no. 12602330
WRSLHFSSKPLKMKHNNVIPSSHFRKHWQNYVKTWFNQPARKTRRRVARQKKAVKIFPRPTSGPLRPVVHGQTLKYNMKVRAGKGFTLEELKVAGIPKKLAPTIGISVDHRRKNRSLEGLQSNVQRLKTYKAKLVVFPRRSRQVKAGDSTPEELANATQVQGDYMPIASVKAAMELVKLTADLKAFKAYDKIRLERTNARHAGARAKRAAEAEKEEKK

SEQ ID NO: 50255 - protein, 206 aa, Arabidopsis thaliana
  peptide (1)..(206): Ceres Seq. ID no. 12602331
MKHNNVIPSSHFRKHWQNYVKTWFNQPARKTRRRVARQKKAVKIFPRPTSGPLRPVVHGQTLKYNMKVRAGKGFTLEELKVAGIPKKLAPTIGISVDHRRKNRSLEGLQSNVQRLKTYKAKLVVFPRRSRQVKAGDSTPEELANATQVQGDYMPIASVKAAMELVKLTADLKAFKAYDKIRLERTNARHAGARAKRAAEAEKEEKK

SEQ ID NO: 50256 - protein, 141 aa, Arabidopsis thaliana
  peptide (1)..(141): Ceres Seq. ID no. 12602332
MKVRAGKGFTLEELKVAGIPKKLAPTIGISVDHRRKNRSLEGLQSNVQRLKTYKAKLVVFPRRSRQVKAGDSTPEELANATQVQGDYMPIASVKAAMELVKLTADLKAFKAYDKIRLERTNARHAGARAKRAAEAEKEEKK

SEQ ID NO: 50257 - DNA, 1589 bp, Arabidopsis thaliana
  misc_feature (1)..(1589): Ceres Seq. ID no. 13588147
  misc_feature (1)..(1589): Ortholog of  Ceres SEQ ID NO 14315257 as cited in SEQ ID NO 52552
  misc_feature (1)..(1589): Ortholog of  Ceres SEQ ID NO 13597574 as cited in SEQ ID NO 64677
  misc_feature (1)..(1589): Ortholog of  Ceres SEQ ID NO 13597843 as cited in SEQ ID NO 64850
  misc_feature (1)..(1589): Ortholog of  Ceres SEQ ID NO 13597678 as cited in SEQ ID NO 65375
  misc_feature (1)..(1589): Ortholog of  Ceres SEQ ID NO 13596180 as cited in SEQ ID NO 67941
  misc_feature (1)..(1589): Ortholog of  Ceres SEQ ID NO 13591190 as cited in SEQ ID NO 68044
  misc_feature (1)..(1589): Ortholog of  Ceres SEQ ID NO 13595961 as cited in SEQ ID NO 68223
  misc_feature (1)..(1589): Ortholog of  Ceres SEQ ID NO 14313563 as cited in SEQ ID NO 68700
gacgtgcttattaccactagcgagcgttatcgcttcgcagattcagtcaaaaacaagaaacaggagcttgtcttctccccgagattagaagaaggactaacatgaaatttgagcttgttttcatcccctatcccggaatcggtcatctccgatcaacggtagaaatggcaaagctactagtggaccgtgaaactcgtctctctatctccgttatcatccttcctttcatttccgaaggcgaagtcggtgcttccgattacatcgcagccctctccgcctcatccaacaaccgcctccgctacgaagttatctccgccgtagatcaaccaaccatcgagatgacgacaattgaaatccatatgaagaaccaagaaccaaaggtgagaagcaccgttgcaaaactccttgaagactattcgtctaaaccggactcgccgaagatcgctggctttgttctagacatgttttgcacttcgatggtagatgtagcgaacgagtttggtttcccgagttatatgttttacacctccagtgccgggattctctcagttacatatcatgttcaaatgttgtgcgatgagaacaagtacgatgttagtgaaaatgattatgcagactcggaagctgtgttgaactttccgagtttgagtcgtccttatccggtgaagtgtcttcctcacgctctggcagctaatatgtggctcccggtgtttgtaaaccaagcgagaaagtttagggagatgaaaggtattttggtaaatactgttgctgagcttgaaccttatgtgttaaagtttctttctagtagtgatactcctcctgtttatcctgttggaccattgttgcatcttgagaaccaacgtgatgattctaaggacgagaaacggttggagattatacggtggttggatcagcaaccaccaagttcggttgtgtttctctgctttgggagcatgggaggcttcggtgaggaacaagtaagagagatcgcaatcgcgttagagcgaagtgggcaccggtttctctggtctcttcgtcgcgcatctccgaatatattcaaagaacttccaggagagtttactaatctagaggaagttctcccggaaggattctttgatcgaacgaaagatataggtaaagtgattggatgggctccacaagtagccgttcttgcgaatccggctataggaggtttcgtaactcattgcgggtggaattctacgctagagagtctttggtttggtgttccaacagctgcatggccgttatacgcagagcagaagttcaatgctttcttaatggtggaggagcttggattggcggtggagataaggaagtattggcgaggtgaacatttggcgggattaccgacggctactgtgacagcggaggagatagagaaagcaatcatgtgtctaatggaacaagatagtgacgtgaggaaaagagtgaaggatatgagcgagaaatgccatgtggctttaatggatggtggatcgtcgcgtactgcgttgcaaaagtttattgaagaggttgcgaagaatatagtttcactagataaggaatttgagcatgtagctcttaaatga

SEQ ID NO: 50258 - protein, 495 aa, Arabidopsis thaliana
  peptide (1)..(495): Ceres Seq. ID no. 13588148
MKFELVFIPYPGIGHLRSTVEMAKLLVDRETRLSISVIILPFISEGEVGASDYIAALSASSNNRLRYEVISAVDQPTIEMTTIEIHMKNQEPKVRSTVAKLLEDYSSKPDSPKIAGFVLDMFCTSMVDVANEFGFPSYMFYTSSAGILSVTYHVQMLCDENKYDVSENDYADSEAVLNFPSLSRPYPVKCLPHALAANMWLPVFVNQARKFREMKGILVNTVAELEPYVLKFLSSSDTPPVYPVGPLLHLENQRDDSKDEKRLEIIRWLDQQPPSSVVFLCFGSMGGFGEEQVREIAIALERSGHRFLWSLRRASPNIFKELPGEFTNLEEVLPEGFFDRTKDIGKVIGWAPQVAVLANPAIGGFVTHCGWNSTLESLWFGVPTAAWPLYAEQKFNAFLMVEELGLAVEIRKYWRGEHLAGLPTATVTAEEIEKAIMCLMEQDSDVRKRVKDMSEKCHVALMDGGSSRTALQKFIEEVAKNIVSLDKEFEHVALK

SEQ ID NO: 50259 - protein, 474 aa, Arabidopsis thaliana
  peptide (1)..(474): Ceres Seq. ID no. 13588149
MAKLLVDRETRLSISVIILPFISEGEVGASDYIAALSASSNNRLRYEVISAVDQPTIEMTTIEIHMKNQEPKVRSTVAKLLEDYSSKPDSPKIAGFVLDMFCTSMVDVANEFGFPSYMFYTSSAGILSVTYHVQMLCDENKYDVSENDYADSEAVLNFPSLSRPYPVKCLPHALAANMWLPVFVNQARKFREMKGILVNTVAELEPYVLKFLSSSDTPPVYPVGPLLHLENQRDDSKDEKRLEIIRWLDQQPPSSVVFLCFGSMGGFGEEQVREIAIALERSGHRFLWSLRRASPNIFKELPGEFTNLEEVLPEGFFDRTKDIGKVIGWAPQVAVLANPAIGGFVTHCGWNSTLESLWFGVPTAAWPLYAEQKFNAFLMVEELGLAVEIRKYWRGEHLAGLPTATVTAEEIEKAIMCLMEQDSDVRKRVKDMSEKCHVALMDGGSSRTALQKFIEEVAKNIVSLDKEFEHVALK

SEQ ID NO: 50260 - protein, 416 aa, Arabidopsis thaliana
  peptide (1)..(416): Ceres Seq. ID no. 13588150
MTTIEIHMKNQEPKVRSTVAKLLEDYSSKPDSPKIAGFVLDMFCTSMVDVANEFGFPSYMFYTSSAGILSVTYHVQMLCDENKYDVSENDYADSEAVLNFPSLSRPYPVKCLPHALAANMWLPVFVNQARKFREMKGILVNTVAELEPYVLKFLSSSDTPPVYPVGPLLHLENQRDDSKDEKRLEIIRWLDQQPPSSVVFLCFGSMGGFGEEQVREIAIALERSGHRFLWSLRRASPNIFKELPGEFTNLEEVLPEGFFDRTKDIGKVIGWAPQVAVLANPAIGGFVTHCGWNSTLESLWFGVPTAAWPLYAEQKFNAFLMVEELGLAVEIRKYWRGEHLAGLPTATVTAEEIEKAIMCLMEQDSDVRKRVKDMSEKCHVALMDGGSSRTALQKFIEEVAKNIVSLDKEFEHVALK

SEQ ID NO: 50261 - DNA, 1371 bp, Arabidopsis thaliana
  misc_feature (1)..(1371): Ceres Seq. ID no. 12591422
  misc_feature (1)..(1371): Ortholog of  Ceres SEQ ID NO 14309314 as cited in SEQ ID NO 0
aaccagagccatcatcatccttccaatggctattacttgagaactcttctgattaaacatagcaacaacaacaactcttcttctcctctctttctcacttcaatttagcgatggctgcaactgcaatctcttctctttccttcccagctttgggtcaatcggacaagatctccaatttcgcatcttctcgtcctctcgcctccgcaattcgcatctgcacaaagttttctcgcctttctttgaattcgcgttccacttcgaaatctcttattcactgcatgtccaatgttaccgccgatgtgcctcctgtatcagagacaaagtcgaaattcctaaaagcttacaagcgacccatcccgagtatctacaacacggttttgcaggagctcattgtccagcagcatttgatgaggtataagaagacttatcgttatgatcctgtttttgcccttggatttgtcactgtatatgatcagctcatggaaggatatccgagtgatcaagaccgagatgccatttttaaggcttacattgaagccttgaatgaggatcctaagcaataccgaattgatgctcagaagatggaggaatgggcacgaagtcagacttctgcttcactagttgacttttcctctaaagaaggagatattgaagcagttcttaaggacattgcaggaagagctggtagtaaggaggggtttagttacagcaggttcttcgctgttgggctctttcgtttgcttgagcttgcaagtgctactgatccaactgtcttggacaagctttgtgcatccctaaatatcaacaagaaaagcgtggatcgggacctggatgtgtatcgtaacctgctttcaaagcttgtccaagccaaggaattgcttaaggagtatgtcgagagggagaagaagaagcaaggagaaagagcccaatctcagaaggctaacgaaacaatctccaagtgtctgggagatactctatataacccatctttcttggttgaacggaaatcttagaaaatcatttgtgacttctttttttgttttcttagcaacaactatgcccaagaacatatatatctcatttctaagaacatttcagacgtgtatatgtttgctttttttcctttcaattacatgagtttacataaccnccgnaaactaaattacagataattagttacagcaggttcttcgctgttgggctctttcgtttgcttgagcttgcaagtgctactgatccaactgtcttggacaagctttgtgcatccctaaatatcaacaagaaaagcgtggatcgggacctggatgtgtatcgtaacctgctttcaaagcttgtccaagccaaggaattgcttaaggagtatgtcgagag

SEQ ID NO: 50262 - protein, 300 aa, Arabidopsis thaliana
  peptide (1)..(300): Ceres Seq. ID no. 12591423
MAATAISSLSFPALGQSDKISNFASSRPLASAIRICTKFSRLSLNSRSTSKSLIHCMSNVTADVPPVSETKSKFLKAYKRPIPSIYNTVLQELIVQQHLMRYKKTYRYDPVFALGFVTVYDQLMEGYPSDQDRDAIFKAYIEALNEDPKQYRIDAQKMEEWARSQTSASLVDFSSKEGDIEAVLKDIAGRAGSKEGFSYSRFFAVGLFRLLELASATDPTVLDKLCASLNINKKSVDRDLDVYRNLLSKLVQAKELLKEYVEREKKKQGERAQSQKANETISKCLGDTLYNPSFLVERKS

SEQ ID NO: 50263 - protein, 244 aa, Arabidopsis thaliana
  peptide (1)..(244): Ceres Seq. ID no. 12591424
MSNVTADVPPVSETKSKFLKAYKRPIPSIYNTVLQELIVQQHLMRYKKTYRYDPVFALGFVTVYDQLMEGYPSDQDRDAIFKAYIEALNEDPKQYRIDAQKMEEWARSQTSASLVDFSSKEGDIEAVLKDIAGRAGSKEGFSYSRFFAVGLFRLLELASATDPTVLDKLCASLNINKKSVDRDLDVYRNLLSKLVQAKELLKEYVEREKKKQGERAQSQKANETISKCLGDTLYNPSFLVERKS

SEQ ID NO: 50264 - protein, 201 aa, Arabidopsis thaliana
  peptide (1)..(201): Ceres Seq. ID no. 12591425
MRYKKTYRYDPVFALGFVTVYDQLMEGYPSDQDRDAIFKAYIEALNEDPKQYRIDAQKMEEWARSQTSASLVDFSSKEGDIEAVLKDIAGRAGSKEGFSYSRFFAVGLFRLLELASATDPTVLDKLCASLNINKKSVDRDLDVYRNLLSKLVQAKELLKEYVEREKKKQGERAQSQKANETISKCLGDTLYNPSFLVERKS

SEQ ID NO: 50265 - DNA, 1182 bp, Arabidopsis thaliana
  misc_feature (1)..(1182): Ceres Seq. ID no. 13588151
  misc_feature (1)..(1182): Ortholog of  Ceres SEQ ID NO 15176219 as cited in SEQ ID NO 58640
  misc_feature (1)..(1182): Ortholog of  Ceres SEQ ID NO 14303413 as cited in SEQ ID NO 59769
acaaaacctcttagagagcattcactttcaagaagaaaaaaacaagcagacaagaaaatgggatgtttcggaccatcaaaggcttcaagaacaagaaacaatgaacatgacaagatgacacgacaaaacccctctcatcaacctcaaaccatgagagctgaagaagttctgttgcagattcctagatgtagagtccatctcataggcgaatccgaggcggtggagcttgcctctggtgatttcaagctcgttaaggtctcagacaacggtgtaactctagctatgatcgtgagaatcggacatgaccttcagtggccagtgattagagatgagccagtggtaaaacttgacgcccgtgattacctcttcactctcccggttaaagacggtgatccacttagctacggggtcactttctctggcgatgacagagacgtagccctcgtgaacagtctgaagttgcttgaccaattcttgagtgagaattcttgtttctcgtctacggcttcgagtaaggttaacaatggaatcgactggcaagagtttgcgccgaggattgaagattacaacaacgttgttgctaaggctattgctggaggaacaggacatatcattagaggaatctttagtctcagtaatgcttactctaaccaggttcacaagggaggcgacataatgattacaaaggctgaggagagccagagaaatggaagttacaacaatggaaactccagtggtaatgagaagaaaaatgggatcaacacacaccttcaacgagtgaggaagctgtcaaaggcgactgagaatctgagcaagacgatgttgaatggtgcgggagttgtgagcggctctgtgatggtccctatgatgaagtcgaaaccagggatggccttcttttcgatggttccaggggaggtcctcttagcttcacttgatgcccttaataaaatactagatgcaactgaagctgcagagagacaaactctatctgcaacatccagggctgctaccagaatggtcagtgagaggtttggagataacgcaggggaggccaccggagatgttctagcaacagcgggccacgcagctggaactgcctggaatgttctcaagatccgtaagactttctatccttcatcttctcttacatcaggaatcgtcaaaaatgctccaagaaagtga

SEQ ID NO: 50266 - protein, 393 aa, Arabidopsis thaliana
  peptide (1)..(393): Ceres Seq. ID no. 13588152
TKPLREHSLSRRKKQADKKMGCFGPSKASRTRNNEHDKMTRQNPSHQPQTMRAEEVLLQIPRCRVHLIGESEAVELASGDFKLVKVSDNGVTLAMIVRIGHDLQWPVIRDEPVVKLDARDYLFTLPVKDGDPLSYGVTFSGDDRDVALVNSLKLLDQFLSENSCFSSTASSKVNNGIDWQEFAPRIEDYNNVVAKAIAGGTGHIIRGIFSLSNAYSNQVHKGGDIMITKAEESQRNGSYNNGNSSGNEKKNGINTHLQRVRKLSKATENLSKTMLNGAGVVSGSVMVPMMKSKPGMAFFSMVPGEVLLASLDALNKILDATEAAERQTLSATSRAATRMVSERFGDNAGEATGDVLATAGHAAGTAWNVLKIRKTFYPSSSLTSGIVKNAPRK

SEQ ID NO: 50267 - protein, 374 aa, Arabidopsis thaliana
  peptide (1)..(374): Ceres Seq. ID no. 13588153
MGCFGPSKASRTRNNEHDKMTRQNPSHQPQTMRAEEVLLQIPRCRVHLIGESEAVELASGDFKLVKVSDNGVTLAMIVRIGHDLQWPVIRDEPVVKLDARDYLFTLPVKDGDPLSYGVTFSGDDRDVALVNSLKLLDQFLSENSCFSSTASSKVNNGIDWQEFAPRIEDYNNVVAKAIAGGTGHIIRGIFSLSNAYSNQVHKGGDIMITKAEESQRNGSYNNGNSSGNEKKNGINTHLQRVRKLSKATENLSKTMLNGAGVVSGSVMVPMMKSKPGMAFFSMVPGEVLLASLDALNKILDATEAAERQTLSATSRAATRMVSERFGDNAGEATGDVLATAGHAAGTAWNVLKIRKTFYPSSSLTSGIVKNAPRK

SEQ ID NO: 50268 - protein, 355 aa, Arabidopsis thaliana
  peptide (1)..(355): Ceres Seq. ID no. 13588154
MTRQNPSHQPQTMRAEEVLLQIPRCRVHLIGESEAVELASGDFKLVKVSDNGVTLAMIVRIGHDLQWPVIRDEPVVKLDARDYLFTLPVKDGDPLSYGVTFSGDDRDVALVNSLKLLDQFLSENSCFSSTASSKVNNGIDWQEFAPRIEDYNNVVAKAIAGGTGHIIRGIFSLSNAYSNQVHKGGDIMITKAEESQRNGSYNNGNSSGNEKKNGINTHLQRVRKLSKATENLSKTMLNGAGVVSGSVMVPMMKSKPGMAFFSMVPGEVLLASLDALNKILDATEAAERQTLSATSRAATRMVSERFGDNAGEATGDVLATAGHAAGTAWNVLKIRKTFYPSSSLTSGIVKNAPRK

SEQ ID NO: 50269 - DNA, 1217 bp, Arabidopsis thaliana
  misc_feature (1)..(1217): Ceres Seq. ID no. 13593610
  misc_feature (1)..(1217): Ortholog of  Ceres SEQ ID NO 12605597 as cited in SEQ ID NO 20378
  misc_feature (1)..(1217): Ortholog of  Ceres SEQ ID NO 13494050 as cited in SEQ ID NO 20553
  misc_feature (1)..(1217): Ortholog of  Ceres SEQ ID NO 15177308 as cited in SEQ ID NO 52713
gcaaaagccagaacagcttttaaattgcaatggtctcttcggttttatccatccctccacaaacttgtctacttccacgattacccatctctgattctgtcaattgcaaatcgaaaatcgtgtactgtctctccacaagtgtccgaggaagctccgtcaagagacaatccacggccagaactcgcagtttcactgagacaaatcgtcgaacaccttccgtgcaatccaaacatgaattctgggaagatccagatgatggtagcgacagtgaaaacgaatatgaaggagaagaagaagatggtattgggaatgatttagataacgagagtgattgggaagatgactcgagagtacaaaagcttactactacagacaactacgaggaagagcttgcaaaagaggttgaacaacttcttgaacctgaagaaagagtaattcttcagcaaaatgagaaaccaaatctcaagatgatctcaacaaagagttggaagccacttcagacacttgctctgtcaatgcagattcagttaatggataatcttattgaaaacggactagacattgatgatgttgacaaggacaaccaaaccgctcttcacaaagcaatcattggtaaaaaagaagcggtgattagtcatcttttgaggaaaggagctaatccgcatcttcaagatcgggacggtgcagctccgattcattatgcagttcaagttggagccttgcagactgtaaaactactattcaagtacaatgtagacgtcaatgttgcagataatgaaggatggactccgttacatatagctgtacaaagccgaaatcgagacattacaaagatattgttgaccaatggtgctgataaaacaagacgaacaaaggatgggaaattagctttggacttggctctgtgctttggaagagatttcaagtcatatgatctggtcaagctattgaagattatgcccaccggggatatatagaaagagctggtgagattttgaatgatcaggttgagattactaaactgcatttgccattgcttggtttgattgtaatctacaccggtataagtggttaaggtagaagaaacccgattgagtttgtaattactgcttttatatattcgtggatgaacttgttattcgggtgtgtgtatcataatgtgcataacaaagatacacattgttatgtcatatatattaaattacaagcattgcaag

SEQ ID NO: 50270 - protein, 315 aa, Arabidopsis thaliana
  peptide (1)..(315): Ceres Seq. ID no. 15221226
MVSSVLSIPPQTCLLPRLPISDSVNCKSKIVYCLSTSVRGSSVKRQSTARTRSFTETNRRTPSVQSKHEFWEDPDDGSDSENEYEGEEEDGIGNDLDNESDWEDDSRVQKLTTTDNYEEELAKEVEQLLEPEERVILQQNEKPNLKMISTKSWKPLQTLALSMQIQLMDNLIENGLDIDDVDKDNQTALHKAIIGKKEAVISHLLRKGANPHLQDRDGAAPIHYAVQVGALQTVKLLFKYNVDVNVADNEGWTPLHIAVQSRNRDITKILLTNGADKTRRTKDGKLALDLALCFGRDFKSYDLVKLLKIMPTGDI

SEQ ID NO: 50271 - protein, 169 aa, Arabidopsis thaliana
  peptide (1)..(169): Ceres Seq. ID no. 15221227
MISTKSWKPLQTLALSMQIQLMDNLIENGLDIDDVDKDNQTALHKAIIGKKEAVISHLLRKGANPHLQDRDGAAPIHYAVQVGALQTVKLLFKYNVDVNVADNEGWTPLHIAVQSRNRDITKILLTNGADKTRRTKDGKLALDLALCFGRDFKSYDLVKLLKIMPTGDI

SEQ ID NO: 50272 - DNA, 1568 bp, Arabidopsis thaliana; identical to SEQ ID NO: 47266
  misc_feature (1)..(1568): Ceres Seq. ID no. 12591434
  misc_feature (1)..(1568): Ortholog of  Ceres SEQ ID NO 13597041 as cited in SEQ ID NO 63502

SEQ ID NO: 50273 - protein, 456 aa, Arabidopsis thaliana; identical to SEQ ID NO: 47267
  peptide (1)..(456): Ceres Seq. ID no. 12591435

SEQ ID NO: 50274 - protein, 364 aa, Arabidopsis thaliana; identical to SEQ ID NO: 47268
  peptide (1)..(364): Ceres Seq. ID no. 12591436

SEQ ID NO: 50275 - DNA, 1616 bp, Arabidopsis thaliana; identical to SEQ ID NO: 47055
  misc_feature (1)..(1616): Ceres Seq. ID no. 12575638
  misc_feature (1)..(1616): Ortholog of  Ceres SEQ ID NO 13648575 as cited in SEQ ID NO 20407

SEQ ID NO: 50276 - protein, 499 aa, Arabidopsis thaliana; identical to SEQ ID NO: 47056
  peptide (1)..(499): Ceres Seq. ID no. 12575639

SEQ ID NO: 50277 - protein, 400 aa, Arabidopsis thaliana; identical to SEQ ID NO: 47057
  peptide (1)..(400): Ceres Seq. ID no. 12575640

SEQ ID NO: 50278 - protein, 375 aa, Arabidopsis thaliana; identical to SEQ ID NO: 47058
  peptide (1)..(375): Ceres Seq. ID no. 12575641

SEQ ID NO: 50279 - DNA, 1424 bp, Arabidopsis thaliana
  misc_feature (1)..(1424): Ceres Seq. ID no. 12606113
  misc_feature (1)..(1424): Ortholog of  Ceres SEQ ID NO 14312893 as cited in SEQ ID NO 57030
accaatcaaaaatgtctttgctctctcctcttcctctgctccactcattctcctccaccgtcgccacaaaatccaccgcctctagaatcactgccacgccgtcgaaaatccgcttctctgtcataaacgccacgtcggagaatggaaacagcggtggtagtaaaaacgatcgtgatgaggatccatcttttaacccatttggtttcgttacagacaatccgtctagccggagtgcaattcagttaccagagtctccggcggaagacggtaatgtcggccaaatgctctacaggactgaagataaaggtaaagagtatggctcaactatcaaatctgggaagcttagatggtttgtgagagagactggatcaaaggagagtcgtcgaggaaccattgtatttgttcatggagctcctactcagtcttttagctacagaactgtcatgtctgagttgtcagatgctggatttcattgctttgcacctgactggataggattcggattcagtgacaaaccgcagcctggatacggttttaattacacagaaaaagagtaccatgaggcgtttgataaactgcttgaagtgctagaggtcaaatctcctttctttcttgttgttcagggatttcttgtaggttcatatggtttaacttgggctttgaaaaatccaagcaaggttgagaaactcgcgatccttaatagtccgctgaccgtttcatccccagttcccggattatttaagcagctgaggattcccctgtttggtgaattcacctgccaaaatgctatcttggccgagcggttcattgaaggaggtagcccctacgtcctgaagaatgagaaagctgatgtgtatcgtctaccatatttgtcaagcggagggcctggctttgccttgctcgagactgcgaagaagatcaactttggagacacattgagtcaaattgcaaatgggttttcatcaggcagctgggataaacctacgcttctggcttggggaatagctgataaatatctgcctcagtctatagcagaggaatttgagaaacagaacccccaaaatgttaagcttcgactcatcgaaggtgctgggcatttgcctcaagaagactggccagagaaagtagttgctgccctccgagcatttttctgacttccaaatacaacaaaaaaggacagaggtactgttttggtggggtgtttagagtcttacctctttgatggatgtgtgcaaagcttcacattgctctttggagaggctagaagcagtctgcaacgggtggattctggcctgcgaaaaaaataaactagaattaatcgtacagcatgtaaacccgtttcttctgtcgtcaaatgtacagaaaacaaaagtggatactttgtgaatcaaatgagtggttacatagatgctttacttcatttc

SEQ ID NO: 50280 - protein, 383 aa, Arabidopsis thaliana
  peptide (1)..(383): Ceres Seq. ID no. 12606114
QSKMSLLSPLPLLHSFSSTVATKSTASRITATPSKIRFSVINATSENGNSGGSKNDRDEDPSFNPFGFVTDNPSSRSAIQLPESPAEDGNVGQMLYRTEDKGKEYGSTIKSGKLRWFVRETGSKESRRGTIVFVHGAPTQSFSYRTVMSELSDAGFHCFAPDWIGFGFSDKPQPGYGFNYTEKEYHEAFDKLLEVLEVKSPFFLVVQGFLVGSYGLTWALKNPSKVEKLAILNSPLTVSSPVPGLFKQLRIPLFGEFTCQNAILAERFIEGGSPYVLKNEKADVYRLPYLSSGGPGFALLETAKKINFGDTLSQIANGFSSGSWDKPTLLAWGIADKYLPQSIAEEFEKQNPQNVKLRLIEGAGHLPQEDWPEKVVAALRAFF

SEQ ID NO: 50281 - protein, 380 aa, Arabidopsis thaliana
  peptide (1)..(380): Ceres Seq. ID no. 12606115
MSLLSPLPLLHSFSSTVATKSTASRITATPSKIRFSVINATSENGNSGGSKNDRDEDPSFNPFGFVTDNPSSRSAIQLPESPAEDGNVGQMLYRTEDKGKEYGSTIKSGKLRWFVRETGSKESRRGTIVFVHGAPTQSFSYRTVMSELSDAGFHCFAPDWIGFGFSDKPQPGYGFNYTEKEYHEAFDKLLEVLEVKSPFFLVVQGFLVGSYGLTWALKNPSKVEKLAILNSPLTVSSPVPGLFKQLRIPLFGEFTCQNAILAERFIEGGSPYVLKNEKADVYRLPYLSSGGPGFALLETAKKINFGDTLSQIANGFSSGSWDKPTLLAWGIADKYLPQSIAEEFEKQNPQNVKLRLIEGAGHLPQEDWPEKVVAALRAFF

SEQ ID NO: 50282 - protein, 290 aa, Arabidopsis thaliana
  peptide (1)..(290): Ceres Seq. ID no. 12606116
MLYRTEDKGKEYGSTIKSGKLRWFVRETGSKESRRGTIVFVHGAPTQSFSYRTVMSELSDAGFHCFAPDWIGFGFSDKPQPGYGFNYTEKEYHEAFDKLLEVLEVKSPFFLVVQGFLVGSYGLTWALKNPSKVEKLAILNSPLTVSSPVPGLFKQLRIPLFGEFTCQNAILAERFIEGGSPYVLKNEKADVYRLPYLSSGGPGFALLETAKKINFGDTLSQIANGFSSGSWDKPTLLAWGIADKYLPQSIAEEFEKQNPQNVKLRLIEGAGHLPQEDWPEKVVAALRAFF

SEQ ID NO: 50283 - DNA, 1077 bp, Arabidopsis thaliana
  misc_feature (1)..(1077): Ceres Seq. ID no. 12605757
  misc_feature (1)..(1077): Ortholog of  Ceres SEQ ID NO 14314511 as cited in SEQ ID NO 52424
gtctccttctccgtgtccttctctctctctctctcgaagttcatcaatggctcttcatccacaccttcaagactccaagaatttcagagacttttgcggaatcgacggccagatttcgccggaattaggatttaaccgctcagagaatctccatgatcaatctcagcatcctccatatattcctccatttcatgttgctggttttgcaccgggaccggtggttcaaattgatggttctgatggtggtaatggagctgactttgagtggaactatggtcttggtcttgaaccaagacgtgagaggataaaggaacaagatttcttggaaaacaattctcagatatcttctattgattttttgcaagctcggtctgtatcaaccggattgggtctgtctcttgacaatgctcgtgtcgcttcttctgatggctctgcgttgttgtcgcttgttggagacgatattgatcgcgagttacagcggcaagatgcagatatcgataggtttctcaagattcagggggatcagttacggcatgctatcctcgacaagatcaagaggggtcaacagaaaacggtgtcactaatggaggaaaaagttgttcagaaactccgtgagaaagatgaggagctagagaggataaaccgaaagaacaaggaactcgaggtgcgaatggaacagctgacaatggaagctgaggcatggcagcaacgtgcaaagtacaacgagaatatgattgctgcactcaactacaatcttgaccgagctcaaggtcggccaagagatagcattgaaggatgtggagacagtgaagtagatgacacagcttcttgcttcaatgggagagacaacagcaacaataacacgaagacgatgatgatgtgcaggttttgtggagtgagagaaatgtgtatgttgttgttgccatgtaatcatatgtgtttgtgtaaggagtgtgagaggaagcttagctcttgtcctttgtgtcagtcttctaagtttctaggtatggaagtatacatgtgattgtgatttgactaaactaatgtctaattagttaacaaacgaactttatttgt

SEQ ID NO: 50284 - protein, 340 aa, Arabidopsis thaliana
  peptide (1)..(340): Ceres Seq. ID no. 12605758
SPSPCPSLSLSRSSSMALHPHLQDSKNFRDFCGIDGQISPELGFNRSENLHDQSQHPPYIPPFHVAGFAPGPVVQIDGSDGGNGADFEWNYGLGLEPRRERIKEQDFLENNSQISSIDFLQARSVSTGLGLSLDNARVASSDGSALLSLVGDDIDRELQRQDADIDRFLKIQGDQLRHAILDKIKRGQQKTVSLMEEKVVQKLREKDEELERINRKNKELEVRMEQLTMEAEAWQQRAKYNENMIAALNYNLDRAQGRPRDSIEGCGDSEVDDTASCFNGRDNSNNNTKTMMMCRFCGVREMCMLLLPCNHMCLCKECERKLSSCPLCQSSKFLGMEVYM

SEQ ID NO: 50285 - protein, 325 aa, Arabidopsis thaliana
  peptide (1)..(325): Ceres Seq. ID no. 12605759
MALHPHLQDSKNFRDFCGIDGQISPELGFNRSENLHDQSQHPPYIPPFHVAGFAPGPVVQIDGSDGGNGADFEWNYGLGLEPRRERIKEQDFLENNSQISSIDFLQARSVSTGLGLSLDNARVASSDGSALLSLVGDDIDRELQRQDADIDRFLKIQGDQLRHAILDKIKRGQQKTVSLMEEKVVQKLREKDEELERINRKNKELEVRMEQLTMEAEAWQQRAKYNENMIAALNYNLDRAQGRPRDSIEGCGDSEVDDTASCFNGRDNSNNNTKTMMMCRFCGVREMCMLLLPCNHMCLCKECERKLSSCPLCQSSKFLGMEVYM

SEQ ID NO: 50286 - DNA, 1893 bp, Arabidopsis thaliana
  misc_feature (1)..(1893): Ceres Seq. ID no. 13588159
  misc_feature (1)..(1893): Ortholog of  Ceres SEQ ID NO 12350565 as cited in SEQ ID NO 1194
atggagagtaatatgcaaaacttgttggagaaattgaggcctcttgtgggtgcaagggcttgggattattgtgttctttggagactaaacgaagaccaaaggtttgtgaagtggatgggatgttgttgtggtgggacagaactcatagcggagaatggaacagaagagtttagctacggaggttgtagggatgttatgtttcatcatcctcggaccaaatcttgtgaatttctttcccatcttccagcttccatacctcttgattccgggatatatgcggagactcttctgactaaccagactggttggttgagtgagagctcagaaccaagttttatgcaggaaacaatctgtactagggttttgattcctataccgggaggactagtggagctctttgcgaccagacatgtcgctgaagatcagaacgtggtggattttgtaatgggacattgcaacatgttgatggacgattctgtaacgataaacatgatggtagcagacgaggtcgaatcgaagccgtacgggatgttatccggtgacatccagcaaaagggttccaaagaagaagatatgatgaatctcccttcgtcttacgatatctctgctgatcagatccgactcaatttcttgcctcagatgagtgattacgagacacaacacttgaagatgaagagtgattatcatcatcaagccttggggtatctcccagagaatggtaacaaggaaatgatgggtatgaacccatttaacacggtggaagaagatgggattccagtgattggagagcctagcttgcttgtgaatgaacagcaagttgttaacgataaggatatgaatgagaacggtagggtggattcagggtcggattgcagcgaccagattgatgatgaagatgatccaaagtacaagaagaagtcaggaaaaggatctcaagccaagaacctgatggctgagagacggaggaggaagaagctaaacgataggctttatgctctccggtcgcttgttcccaggataaccaagttggacagggcgtcgattcttggcgatgcaatcaactacgttaaggagttgcagaatgaggcaaaggagcttcaagacgagcttgaagagaactcagagactgaggatggatctaataggccacaaggagggatgagcctgaacgggacagtggtcactgggtttcacccggggctttcatgtaactccaacgttcctagcgtgaagcaagatgttgatcttgagaattccaatgataaaggacaagaaatggagccacaggtggacgtggctcagttagatggcagagagtttttcgtaaaggtgatttgcgaatacaaaccaggaggcttcacaaggctaatggaggcactggattctcttggactagaagtcacaaatgctaacacgactcgctacctcagcctggtctccaatgtcttcaaagtcgagaaaaatgataacgagatggtccaagctgaacacgtaaggaactcgttgctggaaataacccggaacacatctagaggatggcaagatgatcagatggctacaggctctatgcaaaacgaaaagaacgaagttgattatcaacactatgatgatcaccagcatcacaatggtcatcatcacccatttgatcaccagatgaatcagagcgctcatcatcatcaccaccaccaacacatcaaccattaccacaaccaataaggaccaattccccaaagctataaagatgtctgctttacaagcaaaagaaacattctgcatcaacaaactttgaagatcttttcatttcaagatatataaggataaaaggaatgtcagttcgagaacagttcctgtatccaataccaggaataaaccaaagcgaaacaactttcccct

SEQ ID NO: 50287 - protein, 571 aa, Arabidopsis thaliana
  peptide (1)..(571): Ceres Seq. ID no. 15220853
MESNMQNLLEKLRPLVGARAWDYCVLWRLNEDQRFVKWMGCCCGGTELIAENGTEEFSYGGCRDVMFHHPRTKSCEFLSHLPASIPLDSGIYAETLLTNQTGWLSESSEPSFMQETICTRVLIPIPGGLVELFATRHVAEDQNVVDFVMGHCNMLMDDSVTINMMVADEVESKPYGMLSGDIQQKGSKEEDMMNLPSSYDISADQIRLNFLPQMSDYETQHLKMKSDYHHQALGYLPENGNKEMMGMNPFNTVEEDGIPVIGEPSLLVNEQQVVNDKDMNENGRVDSGSDCSDQIDDEDDPKYKKKSGKGSQAKNLMAERRRRKKLNDRLYALRSLVPRITKLDRASILGDAINYVKELQNEAKELQDELEENSETEDGSNRPQGGMSLNGTVVTGFHPGLSCNSNVPSVKQDVDLENSNDKGQEMEPQVDVAQLDGREFFVKVICEYKPGGFTRLMEALDSLGLEVTNANTTRYLSLVSNVFKVEKNDNEMVQAEHVRNSLLEITRNTSRGWQDDQMATGSMQNEKNEVDYQHYDDHQHHNGHHHPFDHQMNQSAHHHHHHQHINHYHNQ

SEQ ID NO: 50288 - protein, 567 aa, Arabidopsis thaliana
  peptide (1)..(567): Ceres Seq. ID no. 15220854
MQNLLEKLRPLVGARAWDYCVLWRLNEDQRFVKWMGCCCGGTELIAENGTEEFSYGGCRDVMFHHPRTKSCEFLSHLPASIPLDSGIYAETLLTNQTGWLSESSEPSFMQETICTRVLIPIPGGLVELFATRHVAEDQNVVDFVMGHCNMLMDDSVTINMMVADEVESKPYGMLSGDIQQKGSKEEDMMNLPSSYDISADQIRLNFLPQMSDYETQHLKMKSDYHHQALGYLPENGNKEMMGMNPFNTVEEDGIPVIGEPSLLVNEQQVVNDKDMNENGRVDSGSDCSDQIDDEDDPKYKKKSGKGSQAKNLMAERRRRKKLNDRLYALRSLVPRITKLDRASILGDAINYVKELQNEAKELQDELEENSETEDGSNRPQGGMSLNGTVVTGFHPGLSCNSNVPSVKQDVDLENSNDKGQEMEPQVDVAQLDGREFFVKVICEYKPGGFTRLMEALDSLGLEVTNANTTRYLSLVSNVFKVEKNDNEMVQAEHVRNSLLEITRNTSRGWQDDQMATGSMQNEKNEVDYQHYDDHQHHNGHHHPFDHQMNQSAHHHHHHQHINHYHNQ

SEQ ID NO: 50289 - protein, 533 aa, Arabidopsis thaliana
  peptide (1)..(533): Ceres Seq. ID no. 15220855
MGCCCGGTELIAENGTEEFSYGGCRDVMFHHPRTKSCEFLSHLPASIPLDSGIYAETLLTNQTGWLSESSEPSFMQETICTRVLIPIPGGLVELFATRHVAEDQNVVDFVMGHCNMLMDDSVTINMMVADEVESKPYGMLSGDIQQKGSKEEDMMNLPSSYDISADQIRLNFLPQMSDYETQHLKMKSDYHHQALGYLPENGNKEMMGMNPFNTVEEDGIPVIGEPSLLVNEQQVVNDKDMNENGRVDSGSDCSDQIDDEDDPKYKKKSGKGSQAKNLMAERRRRKKLNDRLYALRSLVPRITKLDRASILGDAINYVKELQNEAKELQDELEENSETEDGSNRPQGGMSLNGTVVTGFHPGLSCNSNVPSVKQDVDLENSNDKGQEMEPQVDVAQLDGREFFVKVICEYKPGGFTRLMEALDSLGLEVTNANTTRYLSLVSNVFKVEKNDNEMVQAEHVRNSLLEITRNTSRGWQDDQMATGSMQNEKNEVDYQHYDDHQHHNGHHHPFDHQMNQSAHHHHHHQHINHYHNQ

SEQ ID NO: 50290 - DNA, 2104 bp, Arabidopsis thaliana
  misc_feature (1)..(2104): Ceres Seq. ID no. 13588160
  misc_feature (1)..(2104): Ortholog of  Ceres SEQ ID NO 13532807 as cited in SEQ ID NO 53012
  misc_feature (1)..(2104): Ortholog of  Ceres SEQ ID NO 13663060 as cited in SEQ ID NO 60964
  misc_feature (1)..(2104): Ortholog of  Ceres SEQ ID NO 13500573 as cited in SEQ ID NO 67431
  misc_feature (1)..(2104): Ortholog of  Ceres SEQ ID NO 13656501 as cited in SEQ ID NO 69206
aggagaagaacatggtctccaactccgaaggacaaaaccgagagacgcggcgagaaagacggtgacttgacgtggtctatgggtggtggtgggaatctcgtcgacggtgttcgtcgatggctttttcagcgaccttcttcttcttcttcttcttcttcttccaacaataataataataatcacgaacaacccattttcaattcttcttctttctcttcttcctctaaccccaatcattccgctaactctggagagcttattattgaagaagatctcgatttctctggtctaacgcttattaacgttcctaaacgtaatcatttacctatggatcctcacaagaagggtgaaactgaattcttcacggagtatggagaagctaacaggtatcagattcaagaggttgttggcaaaggaagttatggtgttgtggcttctgctgttgactcacacactggagagagagttgcgatcaagaagatcaacgatgtgtttgagcatgtctccgatgctactaggattctcagagagatcaaattgcttcggttgcttcgtcatcctgatgttgtggagattaaacacatcatgttacctccttctcgcagagaattccgcgatatttatgttgtctttgagttgatggaatctgatcttcatcaagtgatcaaggcgaatgatgatttgactcctgagcattatcagtttttcttgtaccagcttcttcgtggtctgaaatatgttcacgcagctaatgtgtttcatcgggatttgaaaccgaagaacattctagctaatgctgattgcaaattgaagatctgtgattttgggctggctcgcgtttcttttaacgatgccccaaccgctatattttggactgattatgtagctactcggtggtatcgtgcccctgaactctgtggatcgtttttctccaaatatacccctgcgattgatatctggagtgtcggttgcatttttgcggaaatgcttttgggtaagcctttgtttcccgggaaaaacgttgtgcaccaattggatctaatgactgactttcttggtactccacctcctgagtcaatatcaaggattagaaatgaaaaggcgaggagatatcttagcagcatgaggaaaaaacaaccagtccctttctctcataaattccctaaagctgatcctttggctctccgccttctggaacgcctgcttgcctttgatccgaaagatcgtgcatcagctgaagatgcactagctgatccatatttcagtggtttgtcaaattcagagcgtgaaccaacaacacagccaatttcaaagcttgaatttgactttgagagaaagaagttagttaaagatgatgtcagagaattaatttaccgagagatattggaatatcatcctcagatgttggaggaataccttcgtggtggtgatcagcttagctttatgtacccaagtggggtagaccgatttaaaaggcaatttgctcatcttgaagaaaatcaaggtaaaccaggagcagcaggaggaggaagaagtactgcacttcacagacatcatgcttccttgccaagagagagagttcctgctccaaatggtgaaactgcagaagaaagcagtgatgttgagagaagagcagcagctgctgtggcttcaaccttggaatccgaggaagcagacaatggaggaggttacagtgctcgtaacctcatgaagagtgcaagcatcagcggttctaaatgcattggtgtccaatctaaaactgacaaagaggataccatagctgaggaagaagataatgaaacagttgcagagcttactgataaagttgcttctcttcacaattcttaaaaatgatttagttattttttttcttttcttttcttttttcacgaaagttttctggtgaaaagaaattggtttctccattcatccacatctatcttcgtggttgggtttgatttgttgtatttaatagttttgggggtttgatgaaactttaaataaaaacatcgatctccatgtaatttttttgtttctctcttttctttaaacactcatattttgaaattatttatatactattcagtattcactttgcttcagt

SEQ ID NO: 50291 - protein, 615 aa, Arabidopsis thaliana
  peptide (1)..(615): Ceres Seq. ID no. 15220856
RRRTWSPTPKDKTERRGEKDGDLTWSMGGGGNLVDGVRRWLFQRPSSSSSSSSSNNNNNNHEQPIFNSSSFSSSSNPNHSANSGELIIEEDLDFSGLTLINVPKRNHLPMDPHKKGETEFFTEYGEANRYQIQEVVGKGSYGVVASAVDSHTGERVAIKKINDVFEHVSDATRILREIKLLRLLRHPDVVEIKHIMLPPSRREFRDIYVVFELMESDLHQVIKANDDLTPEHYQFFLYQLLRGLKYVHAANVFHRDLKPKNILANADCKLKICDFGLARVSFNDAPTAIFWTDYVATRWYRAPELCGSFFSKYTPAIDIWSVGCIFAEMLLGKPLFPGKNVVHQLDLMTDFLGTPPPESISRIRNEKARRYLSSMRKKQPVPFSHKFPKADPLALRLLERLLAFDPKDRASAEDALADPYFSGLSNSEREPTTQPISKLEFDFERKKLVKDDVRELIYREILEYHPQMLEEYLRGGDQLSFMYPSGVDRFKRQFAHLEENQGKPGAAGGGRSTALHRHHASLPRERVPAPNGETAEESSDVERRAAAAVASTLESEEADNGGGYSARNLMKSASISGSKCIGVQSKTDKEDTIAEEEDNETVAELTDKVASLHNS

SEQ ID NO: 50292 - protein, 589 aa, Arabidopsis thaliana
  peptide (1)..(589): Ceres Seq. ID no. 15220857
MGGGGNLVDGVRRWLFQRPSSSSSSSSSNNNNNNHEQPIFNSSSFSSSSNPNHSANSGELIIEEDLDFSGLTLINVPKRNHLPMDPHKKGETEFFTEYGEANRYQIQEVVGKGSYGVVASAVDSHTGERVAIKKINDVFEHVSDATRILREIKLLRLLRHPDVVEIKHIMLPPSRREFRDIYVVFELMESDLHQVIKANDDLTPEHYQFFLYQLLRGLKYVHAANVFHRDLKPKNILANADCKLKICDFGLARVSFNDAPTAIFWTDYVATRWYRAPELCGSFFSKYTPAIDIWSVGCIFAEMLLGKPLFPGKNVVHQLDLMTDFLGTPPPESISRIRNEKARRYLSSMRKKQPVPFSHKFPKADPLALRLLERLLAFDPKDRASAEDALADPYFSGLSNSEREPTTQPISKLEFDFERKKLVKDDVRELIYREILEYHPQMLEEYLRGGDQLSFMYPSGVDRFKRQFAHLEENQGKPGAAGGGRSTALHRHHASLPRERVPAPNGETAEESSDVERRAAAAVASTLESEEADNGGGYSARNLMKSASISGSKCIGVQSKTDKEDTIAEEEDNETVAELTDKVASLHNS

SEQ ID NO: 50293 - protein, 506 aa, Arabidopsis thaliana
  peptide (1)..(506): Ceres Seq. ID no. 15220858
MDPHKKGETEFFTEYGEANRYQIQEVVGKGSYGVVASAVDSHTGERVAIKKINDVFEHVSDATRILREIKLLRLLRHPDVVEIKHIMLPPSRREFRDIYVVFELMESDLHQVIKANDDLTPEHYQFFLYQLLRGLKYVHAANVFHRDLKPKNILANADCKLKICDFGLARVSFNDAPTAIFWTDYVATRWYRAPELCGSFFSKYTPAIDIWSVGCIFAEMLLGKPLFPGKNVVHQLDLMTDFLGTPPPESISRIRNEKARRYLSSMRKKQPVPFSHKFPKADPLALRLLERLLAFDPKDRASAEDALADPYFSGLSNSEREPTTQPISKLEFDFERKKLVKDDVRELIYREILEYHPQMLEEYLRGGDQLSFMYPSGVDRFKRQFAHLEENQGKPGAAGGGRSTALHRHHASLPRERVPAPNGETAEESSDVERRAAAAVASTLESEEADNGGGYSARNLMKSASISGSKCIGVQSKTDKEDTIAEEEDNETVAELTDKVASLHNS

SEQ ID NO: 50294 - DNA, 1728 bp, Arabidopsis thaliana
  misc_feature (1)..(1728): Ceres Seq. ID no. 13588930
  misc_feature (1)..(1728): Ortholog of  Ceres SEQ ID NO 13593925 as cited in SEQ ID NO 59489
  misc_feature (1)..(1728): Ortholog of  Ceres SEQ ID NO 13657610 as cited in SEQ ID NO 66165
  misc_feature (1)..(1728): Ortholog of  Ceres SEQ ID NO 13598312 as cited in SEQ ID NO 68448
  misc_feature (1)..(1728): Ortholog of  Ceres SEQ ID NO 13596100 as cited in SEQ ID NO 68573
tatcccacaacaatctttgctacattttcatgcatttttaatcactcctctttctaactccaataaaaacacaataatggatcttcttgttatgctcctctctcttctcgtctcttatctcatcttcaagatctggaaacgcatagactccaagagagaccaaaactgctacatcttggactaccaatgtcacaaaccttccgatgatcgtatggtgaacactcaattcagcggtgatatcatccttcgaaacaaacaccttcggctcaacgagtacaagttcctcctcaaagccatcgttagttccggtatcggagagcaaacttacgcaccaaggctcttctttgagggccgtgaacagcgtcctacgctacaggatgggctctcggagatggaagagttttacatagacaccatcgagaaagtccttaagagaaacaaaatttcaccttcggagattgacatcctcgtagtcaacgtctcaatgctcaattcaacgccttcactatctgcaagaatcattaaccattacaaaatgagagaagacataaaagtcttcaacttgacggcgatgggatgtagcgcgagtgttatctccatagatattgtcaaaaacatcttcaaaacatacaagaacaagcttgctcttgtcgtgacctcagagtcacttagtcctaactggtacagcggaaacaaccggtccatgattcttgccaactgtttgttccgctctggtggctgcgctgttctcttgacgaacaagcgtagtctgagcaggagagccatgttcaagctaaggtgtttggtaaggacgcaccatggagccagagacgattcattcaacgcctgtgtccaaaaagaagacgagctaggacatatcggtgtccacttagacaagactcttccaaaagcagcgactcgtgctttcatagacaacctcaaagtcatcactcccaagattcttccggtaacagagcttttaaggtttatgttgtgtcttcttctcaagaagcttcgtagcagccctagcaaaggctcgacgaacgtgactcaggcagctccaaaggcaggggttaaagcagggattaacttcaagaccggtattgaccatttctgcattcacactggaggtaaagcggttatcgacgcgatcggttacagcctcgacttaaacgagtacgatcttgaaccggcgaggatgacgttacaccggtttggaaacacgtcagcgagtagcttgtggtatgttttggggtatatggaggcaaagaagaggctgaagagaggagatagagtgttcatgatcagctttggggcaggtttcaagtgcaatagttgcgtttgggaagttgtgagagatcttaacgttggagaagctgtagggaatgtgtggaatcattgcattaatcaatacccaccaaaatcgattttgaatccgtttttcgagaagtatggttggattcatgaagaagaagatcctgatactttcaagatgcccgaaggatttatgtgaatgttttcttgggaatcattgtaaacatacatatacagttacttcaaactgcaaatcccacaaaaggtgactatatagtttattttcctctttctttcttttattttatttaatgtggattctgaattgctacattttactctctctttctttctttttctttttttctaattggatgggaaagaaaatatgaatgacaaagatactgcgatata

SEQ ID NO: 50295 - protein, 503 aa, Arabidopsis thaliana
  peptide (1)..(503): Ceres Seq. ID no. 13588931
IPQQSLLHFHAFLITPLSNSNKNTIMDLLVMLLSLLVSYLIFKIWKRIDSKRDQNCYILDYQCHKPSDDRMVNTQFSGDIILRNKHLRLNEYKFLLKAIVSSGIGEQTYAPRLFFEGREQRPTLQDGLSEMEEFYIDTIEKVLKRNKISPSEIDILVVNVSMLNSTPSLSARIINHYKMREDIKVFNLTAMGCSASVISIDIVKNIFKTYKNKLALVVTSESLSPNWYSGNNRSMILANCLFRSGGCAVLLTNKRSLSRRAMFKLRCLVRTHHGARDDSFNACVQKEDELGHIGVHLDKTLPKAATRAFIDNLKVITPKILPVTELLRFMLCLLLKKLRSSPSKGSTNVTQAAPKAGVKAGINFKTGIDHFCIHTGGKAVIDAIGYSLDLNEYDLEPARMTLHRFGNTSASSLWYVLGYMEAKKRLKRGDRVFMISFGAGFKCNSCVWEVVRDLNVGEAVGNVWNHCINQYPPKSILNPFFEKYGWIHEEEDPDTFKMPEGFM

SEQ ID NO: 50296 - protein, 478 aa, Arabidopsis thaliana
  peptide (1)..(478): Ceres Seq. ID no. 13588932
MDLLVMLLSLLVSYLIFKIWKRIDSKRDQNCYILDYQCHKPSDDRMVNTQFSGDIILRNKHLRLNEYKFLLKAIVSSGIGEQTYAPRLFFEGREQRPTLQDGLSEMEEFYIDTIEKVLKRNKISPSEIDILVVNVSMLNSTPSLSARIINHYKMREDIKVFNLTAMGCSASVISIDIVKNIFKTYKNKLALVVTSESLSPNWYSGNNRSMILANCLFRSGGCAVLLTNKRSLSRRAMFKLRCLVRTHHGARDDSFNACVQKEDELGHIGVHLDKTLPKAATRAFIDNLKVITPKILPVTELLRFMLCLLLKKLRSSPSKGSTNVTQAAPKAGVKAGINFKTGIDHFCIHTGGKAVIDAIGYSLDLNEYDLEPARMTLHRFGNTSASSLWYVLGYMEAKKRLKRGDRVFMISFGAGFKCNSCVWEVVRDLNVGEAVGNVWNHCINQYPPKSILNPFFEKYGWIHEEEDPDTFKMPEGFM

SEQ ID NO: 50297 - protein, 473 aa, Arabidopsis thaliana
  peptide (1)..(473): Ceres Seq. ID no. 13588933
MLLSLLVSYLIFKIWKRIDSKRDQNCYILDYQCHKPSDDRMVNTQFSGDIILRNKHLRLNEYKFLLKAIVSSGIGEQTYAPRLFFEGREQRPTLQDGLSEMEEFYIDTIEKVLKRNKISPSEIDILVVNVSMLNSTPSLSARIINHYKMREDIKVFNLTAMGCSASVISIDIVKNIFKTYKNKLALVVTSESLSPNWYSGNNRSMILANCLFRSGGCAVLLTNKRSLSRRAMFKLRCLVRTHHGARDDSFNACVQKEDELGHIGVHLDKTLPKAATRAFIDNLKVITPKILPVTELLRFMLCLLLKKLRSSPSKGSTNVTQAAPKAGVKAGINFKTGIDHFCIHTGGKAVIDAIGYSLDLNEYDLEPARMTLHRFGNTSASSLWYVLGYMEAKKRLKRGDRVFMISFGAGFKCNSCVWEVVRDLNVGEAVGNVWNHCINQYPPKSILNPFFEKYGWIHEEEDPDTFKMPEGFM

SEQ ID NO: 50298 - DNA, 2198 bp, Arabidopsis thaliana
  misc_feature (1)..(2198): Ceres Seq. ID no. 13647994
  misc_feature (1)..(2198): Ortholog of  Ceres SEQ ID NO 15180650 as cited in SEQ ID NO 0
aactttattccgacgctaaccaacagattcacgaaaccctataaatacttagaaatccctaatcctcctctaaatccctaacttcttcccctacactctctcacacaattttctcgagaaattttccaatttcctttcgatttcgcccagaaatttcggtaactttcagattctgttcagaacgaagaaacttgttatttttggctacttctctccgattctgttcttcttgtagtagctgatcgcattccatgggtacttctcagagtcgtgaagatcgaatcagcgaatcggatacagaatccgattcagattactatgaagaagaagacgaggatcaatacgatgacgcgaagaagcaaggatcatcatctgtttctggtacaagaccgtctgattcttcttcttcttcaggaccaactgattcatcgtctctcgatattgagcagaagctaaaagccttgaagttgaaatacccatcttcttcttccgtaacacccaagatgaagaacgctgtgaagctttaccgccatatcgggggaaacacacccaaagcgaaatggatcgtttcggataagatgacatcatacaagtttgtgaaaacttcgtcagtggatggagaagatattgatgattatgatgattgtgaagaatcaggtgaaggaggtgagtctttttggtttctgggtgttggtactaaggttaaagctagggtttctacggatatgcagttgaaaatgtttggggatcaacgtagggttgactttgttagtaatggtgtttgggctttgaagttcttgacggatgaggattataggaagtttgttactaggtttcaggactatctgtttgagaatgtgtataagatcagggcaagtgaggagaatagagttaaagtgtatggtaaagatttcattgggtgggctaatcctgaggctgctgatgattctatgtgggaggatgctgaagctccacctgaggaagaggaaactcaggggaagaggaatacggatttgacggaagagtttgaagaggtggctaatggtggagtgcagagtttgactttgggagcgttggataattcgttcttggtgaatgattatggggttcaggtttataggaatatggagcgtggtattcatgggaaaggtgtgtgcgtgagatttgattctggaaactcaaagttcggatcagggtcaagccagacaacaccgaacaaggctcttttgatgagggcagagactaatatgatgctgatgagtccagctaaacaagggaaacctaactccactggtgttaagcagctcgatatagagtcagggaagattgttactgaatggaaatttgagaaagacgggactgaaatcacgatgagagacataacaaatgataccaaagggtcgcagctagatccatcagagtcaacgtttttgggattggatgacaataggctgtgtcaatgggacatgagggataggagaggtatagtgcagaacattgactctcccatcttggaatggactcaaggccatcagttctctagaggaacaaatttccagtgctttgcaactactggagatgggtcaatcgttgtgggatcacttgacggaaagataagactttactcaaagacctcaatgagaatggcaaaaacggcttttccagggctcggttcaccaattacacatgtggacgtttcttatgatgggaaatggatactgggcaccacagatacgtacttggttcttatttgcacccttttcacagacaaaaatggtctgacaaaaacaggctttagcggaagaatgggaaacaaaataccagcccctaggctgctgaagctaacaccactagattcacacttggcaggaaaagataataagtttcatggcggtcacttctcatgggtaactgagagtggaaagcaagagagacacatagtagcaacagtggggaaattcagtgtgatatgggacttggagcgggtgaagaacagtgcacacgaatgctataggaaccaacaaggactcaagagctgttactgctacaagatcttgttgaaggatgagtcaattgttgagagccgattcatgcacgataacttctccttctccggtaacaaatcgccagaagcaccgcttgtggttgccacgcctttgaaagtcagctccatcagcctctctggaaaacgactttaa

SEQ ID NO: 50299 - protein, 648 aa, Arabidopsis thaliana
  peptide (1)..(648): Ceres Seq. ID no. 13647995
MGTSQSREDRISESDTESDSDYYEEEDEDQYDDAKKQGSSSVSGTRPSDSSSSSGPTDSSSLDIEQKLKALKLKYPSSSSVTPKMKNAVKLYRHIGGNTPKAKWIVSDKMTSYKFVKTSSVDGEDIDDYDDCEESGEGGESFWFLGVGTKVKARVSTDMQLKMFGDQRRVDFVSNGVWALKFLTDEDYRKFVTRFQDYLFENVYKIRASEENRVKVYGKDFIGWANPEAADDSMWEDAEAPPEEEETQGKRNTDLTEEFEEVANGGVQSLTLGALDNSFLVNDYGVQVYRNMERGIHGKGVCVRFDSGNSKFGSGSSQTTPNKALLMRAETNMMLMSPAKQGKPNSTGVKQLDIESGKIVTEWKFEKDGTEITMRDITNDTKGSQLDPSESTFLGLDDNRLCQWDMRDRRGIVQNIDSPILEWTQGHQFSRGTNFQCFATTGDGSIVVGSLDGKIRLYSKTSMRMAKTAFPGLGSPITHVDVSYDGKWILGTTDTYLVLICTLFTDKNGLTKTGFSGRMGNKIPAPRLLKLTPLDSHLAGKDNKFHGGHFSWVTESGKQERHIVATVGKFSVIWDLERVKNSAHECYRNQQGLKSCYCYKILLKDESIVESRFMHDNFSFSGNKSPEAPLVVATPLKVSSISLSGKRL

SEQ ID NO: 50300 - protein, 564 aa, Arabidopsis thaliana
  peptide (1)..(564): Ceres Seq. ID no. 13647996
MKNAVKLYRHIGGNTPKAKWIVSDKMTSYKFVKTSSVDGEDIDDYDDCEESGEGGESFWFLGVGTKVKARVSTDMQLKMFGDQRRVDFVSNGVWALKFLTDEDYRKFVTRFQDYLFENVYKIRASEENRVKVYGKDFIGWANPEAADDSMWEDAEAPPEEEETQGKRNTDLTEEFEEVANGGVQSLTLGALDNSFLVNDYGVQVYRNMERGIHGKGVCVRFDSGNSKFGSGSSQTTPNKALLMRAETNMMLMSPAKQGKPNSTGVKQLDIESGKIVTEWKFEKDGTEITMRDITNDTKGSQLDPSESTFLGLDDNRLCQWDMRDRRGIVQNIDSPILEWTQGHQFSRGTNFQCFATTGDGSIVVGSLDGKIRLYSKTSMRMAKTAFPGLGSPITHVDVSYDGKWILGTTDTYLVLICTLFTDKNGLTKTGFSGRMGNKIPAPRLLKLTPLDSHLAGKDNKFHGGHFSWVTESGKQERHIVATVGKFSVIWDLERVKNSAHECYRNQQGLKSCYCYKILLKDESIVESRFMHDNFSFSGNKSPEAPLVVATPLKVSSISLSGKRL

SEQ ID NO: 50301 - protein, 539 aa, Arabidopsis thaliana
  peptide (1)..(539): Ceres Seq. ID no. 13647997
MTSYKFVKTSSVDGEDIDDYDDCEESGEGGESFWFLGVGTKVKARVSTDMQLKMFGDQRRVDFVSNGVWALKFLTDEDYRKFVTRFQDYLFENVYKIRASEENRVKVYGKDFIGWANPEAADDSMWEDAEAPPEEEETQGKRNTDLTEEFEEVANGGVQSLTLGALDNSFLVNDYGVQVYRNMERGIHGKGVCVRFDSGNSKFGSGSSQTTPNKALLMRAETNMMLMSPAKQGKPNSTGVKQLDIESGKIVTEWKFEKDGTEITMRDITNDTKGSQLDPSESTFLGLDDNRLCQWDMRDRRGIVQNIDSPILEWTQGHQFSRGTNFQCFATTGDGSIVVGSLDGKIRLYSKTSMRMAKTAFPGLGSPITHVDVSYDGKWILGTTDTYLVLICTLFTDKNGLTKTGFSGRMGNKIPAPRLLKLTPLDSHLAGKDNKFHGGHFSWVTESGKQERHIVATVGKFSVIWDLERVKNSAHECYRNQQGLKSCYCYKILLKDESIVESRFMHDNFSFSGNKSPEAPLVVATPLKVSSISLSGKRL

SEQ ID NO: 50302 - DNA, 1627 bp, Arabidopsis thaliana
  misc_feature (1)..(1627): Ceres Seq. ID no. 13588164
  misc_feature (1)..(1627): Ortholog of  Ceres SEQ ID NO 13596554 as cited in SEQ ID NO 62818
atctctactttgacccgaccagcgaaagtgtaaattgaaagatagatagaaagaaagagccaactttaaaagcttagcggttgatttcgaaatctcgtcgccggcgcgtggagtcttttcgtcggacaacaacaagagaaaagagatttgtggtgttcttctgcttagaattgttgttttccatctccggcagtgagatttggtggagaattttgatttgtgatcgatggttaaggaaacagagtactacgatgtgctcggagttagcccaactgctacagaatctgagattaagaaagcttactacataaaggcacgccaagttcatcctgataagaaccctaatgatcctcaagctgcacacaatttccaggtcttgggagaggcctatcaagtgctaagtgattcaggacaacgccaagcttatgatgcatgtggcaagtcaggaatctcaactgatgcaatcatcgatcctgctgcaatatttgcaatgctatttggcagcgaactttttgaagggtacataggacagcttgctatggcatctatggcttcacttgatatcttcacggaaggggatcagtttgataccaaaaagatacaagaaaaattgaggattgttcagaaagaaagagaagacaagcttgctcagattctgaaagaccgactcaacgaatatgtaataaacaaagacgaatttatcagtaatgctgaagctgaagtagcaagactctcaaatgcagcttatggtgtggatatgttgaatacaattgggtatatatatgtaagacaagcagcaaaagagctagggaagaaagctatttatctcggagtaccattcattgctgaatggtttaggaacaaaggtcacttcatcaaatctcaattaacagctgcaacaggcgcatatgcgttgttccagttgcaggaggaaatgaaaaggcagctaaatactgaaggaaattatactgaggaggaacttgaggaataccttcaggcccataaaagagtgatgattgattcactgtggaagctcaatgtcgctgatatcgaagccactctttgtcgtgtttgtcagctggttcttcaagatccagaagccaaaagagaggagcttcgtacaagagcaagaggtttaaaagctctggggaggatctttcagagagccaaaacagctagtgagagtgatcctttagaaaatagtgaacctcaaaagttaaacggaaatggaaagaaccacgatgaggatacttctacatcaccaaaatccagtgaagcatctcactccacctctggtcctcaggaaccacaaagcccctacgtggaagaattcaaacttggagatgaacaattcaactattacttcccacgaccagcgccacctcctggcgcagggaaatactcttcctctggctatgattgattcaggtgagatcggggcatatatatatcagtcttagcatatttctattgcagttgtgtaccattatgtaaaattattccttttttcttttggttttggcttgttagaagaaaatgattgatgttgaaagcacatataaaagctcttttgtgataatgtatccatgtaaattattatgaaggtataatgacttagagtataaac

SEQ ID NO: 50303 - protein, 398 aa, Arabidopsis thaliana
  peptide (1)..(398): Ceres Seq. ID no. 13588165
MVKETEYYDVLGVSPTATESEIKKAYYIKARQVHPDKNPNDPQAAHNFQVLGEAYQVLSDSGQRQAYDACGKSGISTDAIIDPAAIFAMLFGSELFEGYIGQLAMASMASLDIFTEGDQFDTKKIQEKLRIVQKEREDKLAQILKDRLNEYVINKDEFISNAEAEVARLSNAAYGVDMLNTIGYIYVRQAAKELGKKAIYLGVPFIAEWFRNKGHFIKSQLTAATGAYALFQLQEEMKRQLNTEGNYTEEELEEYLQAHKRVMIDSLWKLNVADIEATLCRVCQLVLQDPEAKREELRTRARGLKALGRIFQRAKTASESDPLENSEPQKLNGNGKNHDEDTSTSPKSSEASHSTSGPQEPQSPYVEEFKLGDEQFNYYFPRPAPPPGAGKYSSSGYD

SEQ ID NO: 50304 - protein, 310 aa, Arabidopsis thaliana
  peptide (1)..(310): Ceres Seq. ID no. 13588166
MLFGSELFEGYIGQLAMASMASLDIFTEGDQFDTKKIQEKLRIVQKEREDKLAQILKDRLNEYVINKDEFISNAEAEVARLSNAAYGVDMLNTIGYIYVRQAAKELGKKAIYLGVPFIAEWFRNKGHFIKSQLTAATGAYALFQLQEEMKRQLNTEGNYTEEELEEYLQAHKRVMIDSLWKLNVADIEATLCRVCQLVLQDPEAKREELRTRARGLKALGRIFQRAKTASESDPLENSEPQKLNGNGKNHDEDTSTSPKSSEASHSTSGPQEPQSPYVEEFKLGDEQFNYYFPRPAPPPGAGKYSSSGYD

SEQ ID NO: 50305 - protein, 294 aa, Arabidopsis thaliana
  peptide (1)..(294): Ceres Seq. ID no. 13588167
MASMASLDIFTEGDQFDTKKIQEKLRIVQKEREDKLAQILKDRLNEYVINKDEFISNAEAEVARLSNAAYGVDMLNTIGYIYVRQAAKELGKKAIYLGVPFIAEWFRNKGHFIKSQLTAATGAYALFQLQEEMKRQLNTEGNYTEEELEEYLQAHKRVMIDSLWKLNVADIEATLCRVCQLVLQDPEAKREELRTRARGLKALGRIFQRAKTASESDPLENSEPQKLNGNGKNHDEDTSTSPKSSEASHSTSGPQEPQSPYVEEFKLGDEQFNYYFPRPAPPPGAGKYSSSGYD

SEQ ID NO: 50306 - DNA, 1088 bp, Arabidopsis thaliana
  misc_feature (1)..(1088): Ceres Seq. ID no. 13588934
  misc_feature (1)..(1088): Ortholog of  Ceres SEQ ID NO 15179926 as cited in SEQ ID NO 57010
  misc_feature (1)..(1088): Ortholog of  Ceres SEQ ID NO 14316075 as cited in SEQ ID NO 60059
tcttccaaaaaagacaaaaaaattcttcccatcttcttcctcctaacaggcagaggatgatgatgatgatcttcatcaagattctcttgaacccaaaataatcgtcggaaagaacttgtttctgtatataattgcatacacttggtgaatctttttaaaagcaaaaaggaaaaaaaatgaatgatttattctctagttcgttcaagaagtacacggacctgaagcaacaggcccaaatggatgatattgagtcaggtaaagagacgatgaacctcgataagttctttgaggatgtcgaaaatgtcaaagatgacatgaaaggcgtagagactctttacaagagtcttcattattctaacgaagagtgcaaaactgtacacaatgccaagaaggtgaaggaactccgagcaaagatggatggagatgtcgctcaggtcctcaagagagtcaagatgatcaaacaaaagcttgaggcgcttgaaaaagcaaatgctaatagccgtaatgtctctggttgtggccctggctcttccaccgataggaccaggacgtctgttgttagtggactcgggaaaaagcttaaggacttgatggatagttttcaaggtctgcgtgcgcggatgaacgctgagtataaagaaaccgtagagcgcagatatttcacgataaccggagaacaggcagacgaacagacgattgagaacttgatttcgagtggtgaaagcgagaattttcttcagaaagcaatacaagaacaagggagaggccaaatattagacactatatcagagattcaagagagacacgacgcggtcaaagagatagagaagaatcttatagagcttcaccaagtgttcttagacatggcggctctggtggaatcacaaggtcagcaactaaatgacatagaaagccacgtctcgaaggcgagctcgttcgtgagaagagggacagaccagcttcaagatgcaagagaataccaaaagagctcgaggaaatggacttgttatgccattcttctcttcatagtcgttttcgctttgcttctcataccagccttacctcatatcatgctcatgttgaagtga

SEQ ID NO: 50307 - protein, 303 aa, Arabidopsis thaliana
  peptide (1)..(303): Ceres Seq. ID no. 13588935
MNDLFSSSFKKYTDLKQQAQMDDIESGKETMNLDKFFEDVENVKDDMKGVETLYKSLHYSNEECKTVHNAKKVKELRAKMDGDVAQVLKRVKMIKQKLEALEKANANSRNVSGCGPGSSTDRTRTSVVSGLGKKLKDLMDSFQGLRARMNAEYKETVERRYFTITGEQADEQTIENLISSGESENFLQKAIQEQGRGQILDTISEIQERHDAVKEIEKNLIELHQVFLDMAALVESQGQQLNDIESHVSKASSFVRRGTDQLQDAREYQKSSRKWTCYAILLFIVVFALLLIPALPHIMLMLK

SEQ ID NO: 50308 - protein, 283 aa, Arabidopsis thaliana
  peptide (1)..(283): Ceres Seq. ID no. 13588936
MDDIESGKETMNLDKFFEDVENVKDDMKGVETLYKSLHYSNEECKTVHNAKKVKELRAKMDGDVAQVLKRVKMIKQKLEALEKANANSRNVSGCGPGSSTDRTRTSVVSGLGKKLKDLMDSFQGLRARMNAEYKETVERRYFTITGEQADEQTIENLISSGESENFLQKAIQEQGRGQILDTISEIQERHDAVKEIEKNLIELHQVFLDMAALVESQGQQLNDIESHVSKASSFVRRGTDQLQDAREYQKSSRKWTCYAILLFIVVFALLLIPALPHIMLMLK

SEQ ID NO: 50309 - protein, 273 aa, Arabidopsis thaliana
  peptide (1)..(273): Ceres Seq. ID no. 13588937
MNLDKFFEDVENVKDDMKGVETLYKSLHYSNEECKTVHNAKKVKELRAKMDGDVAQVLKRVKMIKQKLEALEKANANSRNVSGCGPGSSTDRTRTSVVSGLGKKLKDLMDSFQGLRARMNAEYKETVERRYFTITGEQADEQTIENLISSGESENFLQKAIQEQGRGQILDTISEIQERHDAVKEIEKNLIELHQVFLDMAALVESQGQQLNDIESHVSKASSFVRRGTDQLQDAREYQKSSRKWTCYAILLFIVVFALLLIPALPHIMLMLK

SEQ ID NO: 50310 - DNA, 1075 bp, Arabidopsis thaliana
  misc_feature (1)..(1075): Ceres Seq. ID no. 13648098
  misc_feature (1)..(1075): Ortholog of  Ceres SEQ ID NO 14315013 as cited in SEQ ID NO 57760
  misc_feature (1)..(1075): Ortholog of  Ceres SEQ ID NO 13598248 as cited in SEQ ID NO 64224
tgaagggtcagagttcctaaacatgttggatccattttgttgcgaacatctttaagatccgataaaagacttgtttgagagatctcaaggaagaagaagaaggggggaagcagataacatgtctgcgattgtttgcgggaagagatctctgttcgaggacttagccgccgcttctcctcccgtctccaagaaactccgttgcttttcttcatcttcttcgtctcgtttttctcctccgattcctccttcttcctcacttcttctcgatcacctcgccgcgattttccccgatatggataagcagattcttgagagggcaatcgaggaatgtggagatgaccttgattcagccattagatgtttgaatcagcttcgtttagaatctgccaataagaattctgattctgctacaaaccaatctcctgttgtaatccaggaaccaaatgttgaacctcaacagcaaggatcagccaaggaggaaccaaatgtcttgaacttggatggtacagagtgggttgagctttttgttagggaaatgatgaatgcttctgacatgaaagacgccaaagcccgtgctgcaagagcattggaagctttggagaagtcaattaatgcacgtactggtactgacgcaatgcaaaatctccaacaggaaaacatgatgctgaagcagcaattagaagctattgtacaggaaaacagtttactgaaacgagcggtagtgacacagcagaagcggcaaagagaatcggaagaccaaagtcaggaattgcagcatctgaggcagctagtcactcaataccaggaacagttgagaactttagaggtgaataactatgctctgacgcttcatctgaaacaagctcagcaaaacagttccatcccggggcggtaccatccagacgtcttctaatactttgtgaggccctcgtatcattttgtttccagtgtatttttctctgttggtttgtgactatttatatatattcggggaatcaaaactgtgttcttttgttgttgttgttgttgttgttattgttgtatatattctctttcgagttcaatgatggattcc

SEQ ID NO: 50311 - protein, 264 aa, Arabidopsis thaliana
  peptide (1)..(264): Ceres Seq. ID no. 13648099
MSAIVCGKRSLFEDLAAASPPVSKKLRCFSSSSSSRFSPPIPPSSSLLLDHLAAIFPDMDKQILERAIEECGDDLDSAIRCLNQLRLESANKNSDSATNQSPVVIQEPNVEPQQQGSAKEEPNVLNLDGTEWVELFVREMMNASDMKDAKARAARALEALEKSINARTGTDAMQNLQQENMMLKQQLEAIVQENSLLKRAVVTQQKRQRESEDQSQELQHLRQLVTQYQEQLRTLEVNNYALTLHLKQAQQNSSIPGRYHPDVF

SEQ ID NO: 50312 - protein, 206 aa, Arabidopsis thaliana
  peptide (1)..(206): Ceres Seq. ID no. 13648100
MDKQILERAIEECGDDLDSAIRCLNQLRLESANKNSDSATNQSPVVIQEPNVEPQQQGSAKEEPNVLNLDGTEWVELFVREMMNASDMKDAKARAARALEALEKSINARTGTDAMQNLQQENMMLKQQLEAIVQENSLLKRAVVTQQKRQRESEDQSQELQHLRQLVTQYQEQLRTLEVNNYALTLHLKQAQQNSSIPGRYHPDVF

SEQ ID NO: 50313 - DNA, 930 bp, Arabidopsis thaliana; identical to SEQ ID NO: 44764
  misc_feature (1)..(930): Ceres Seq. ID no. 13503816
  misc_feature (1)..(930): Ortholog of  Ceres SEQ ID NO 13661928 as cited in SEQ ID NO 61155

SEQ ID NO: 50314 - protein, 217 aa, Arabidopsis thaliana; identical to SEQ ID NO: 44765
  peptide (1)..(217): Ceres Seq. ID no. 13503817

SEQ ID NO: 50315 - protein, 178 aa, Arabidopsis thaliana; identical to SEQ ID NO: 44766
  peptide (1)..(178): Ceres Seq. ID no. 13503818

SEQ ID NO: 50316 - protein, 172 aa, Arabidopsis thaliana; identical to SEQ ID NO: 44767
  peptide (1)..(172): Ceres Seq. ID no. 13503819

SEQ ID NO: 50317 - DNA, 909 bp, Arabidopsis thaliana
  misc_feature (1)..(909): Ceres Seq. ID no. 13647730
  misc_feature (1)..(909): Ortholog of  Ceres SEQ ID NO 13639267 as cited in SEQ ID NO 59777
  misc_feature (1)..(909): Ortholog of  Ceres SEQ ID NO 12624280 as cited in SEQ ID NO 61587
gtcaattattcgaattgggaaaacatctaaagctgaggagaagataaatccgatctaggtctcttcttccccaatctctctgtgtctctctcgatcgaagaaagaagacaatggacaaaggcaaagcagtgatgggtactggtcggagatgggccgtcgaattctccgatcaatctactgttccatcttcccgtgacatcctcgatccacctggcttctctcgtgcctctcaggaacaggatgattcagcaaacagccgccaaaagaaagacgctgaagctacttggaaacttcagaaagcgtgggaagtagcgcaatctccatttaagaatttgatgatgatgggtttcatgatgtggatggctggaaacacagttcatctttttagtattggtattactttctctgctctttggcagcctatcagtgctcttcagagtgttggaaagatttttgagccattcaaggataacaaagtggaactacttatgccgaaattagtgttccttgccctaaaccttggagggctagctttgggtgtctggaagcttaacactttggggcttcttccaacacatgcatcagattgggtttcatctctaccccctcctcaggaagttgaacactcgggcggaggatttgttttccactgatgaatcagcgtctcttgtattttaaaataatccgctaaaaccgcgcgacgacgacaacacttttgtgagataactgcaacagttacttaagtgatatgaacctccctcatcttatgatattcttgtagcattttcaaaactcagaaaccatagtttttacactttttagtatgatgctcattgttcatcataactatgaatgtattattggcactgaaaaaaaaaaaaaaaaaaaactcgagggggggcccggtac

SEQ ID NO: 50318 - protein, 180 aa, Arabidopsis thaliana
  peptide (1)..(180): Ceres Seq. ID no. 13647731
MDKGKAVMGTGRRWAVEFSDQSTVPSSRDILDPPGFSRASQEQDDSANSRQKKDAEATWKLQKAWEVAQSPFKNLMMMGFMMWMAGNTVHLFSIGITFSALWQPISALQSVGKIFEPFKDNKVELLMPKLVFLALNLGGLALGVWKLNTLGLLPTHASDWVSSLPPPQEVEHSGGGFVFH

SEQ ID NO: 50319 - protein, 173 aa, Arabidopsis thaliana
  peptide (1)..(173): Ceres Seq. ID no. 13647732
MGTGRRWAVEFSDQSTVPSSRDILDPPGFSRASQEQDDSANSRQKKDAEATWKLQKAWEVAQSPFKNLMMMGFMMWMAGNTVHLFSIGITFSALWQPISALQSVGKIFEPFKDNKVELLMPKLVFLALNLGGLALGVWKLNTLGLLPTHASDWVSSLPPPQEVEHSGGGFVFH

SEQ ID NO: 50320 - protein, 105 aa, Arabidopsis thaliana
  peptide (1)..(105): Ceres Seq. ID no. 13647733
MMMGFMMWMAGNTVHLFSIGITFSALWQPISALQSVGKIFEPFKDNKVELLMPKLVFLALNLGGLALGVWKLNTLGLLPTHASDWVSSLPPPQEVEHSGGGFVFH

SEQ ID NO: 50321 - DNA, 1611 bp, Arabidopsis thaliana
  misc_feature (1)..(1611): Ceres Seq. ID no. 12591451
  misc_feature (1)..(1611): Ortholog of  Ceres SEQ ID NO 15175681 as cited in SEQ ID NO 55458
atgaatttcacagaatcaatgaacgttgtgcacgccagaatccaacaacttgaaccagagaatgcagcaaagatctttggttatctcttgttgatgcaagaaaatggcaaccgcgacatgatccgtctcgcgttctgtcctgattctgttatgtgttctgtcatcaattgcgttaaatacgagttagctaggaattctcatcattaccacagccctccttctgatcacattcctactcccaaatttggatcattcaccggttcatcgcctctttcggtttcggtttctcctcccatgaaaaccggtttttgggagaattcaaccgagatggataccttgcagaacaatcttcagttcttgaattttgaggatcctttgaccagccctgaattctctaacgggttcttctctcaagaacgtcaatgtttgcctttgcgaactagccgaagatccccgagtttacccgagttcccggtaaaaatctgccattacttcaacaaagggttctgcaaacacggcaacaactgtaggtacttccacgggcagattataccggagagggagagttttgctcagatgtttaatccaaacaacaacctaagtgacgaagagcatgttgtttcccctgtatctcttgagaagctagaaggtgagatcattgagttactcaagttaagaagaggagctccaatctccatagcttcattgccaatgatgtactacgaaaaatacggtaggactcttcaagctgaaggatatctcactgagtcacaaagacatggcaaagctggctatagtctcaccaagcttcttgctcgcttgaagaacacgattcgcctcgtcgacaggcctcatgggcaacattcagttatattagcagaggatgcatcaaagtttgtggaatacactggagagagaaatgaacatggagcaatccttgctggttctagacagatttacttaacgtttccggcagagagtagtttcactgaacatgatgtctcaatctacttcacctcatatggacatgtggaagatgtgaggattccttgccagcagaaaagaatgtatggatttgtaacatttgcttcctcagaaacagttaaacacattcttgctaaaggcaatcctcatttcatttgcaatgcacgtgttctagtcaagccttaccgggaaaaatcacgctctagtcgatacctcgacaattacaagcctctacacggcatgcgatatggctctaaatttattgagagagacatagagatgaacacattgccaccgcgggttagtgagagctcaagaatgaggaagccatttcttagtgagcctgaacaatcagtttctaagtccttacctactaattactcctacctcggcttctcctcggatgacttcaagttaacatcaaatgcggagcaagaggaacaagcagaacggttgagctacctactggactatttgaacacggaagataatgtcatgaacataaccactaactacagagacaatgatcggagaactcattgtgaatcgttggacagtcaagtcctgaatctacccgagagtccgttttcttccctttcggggaaggagatttcaacggttacatag

SEQ ID NO: 50322 - protein, 536 aa, Arabidopsis thaliana
  peptide (1)..(536): Ceres Seq. ID no. 12591452
MNFTESMNVVHARIQQLEPENAAKIFGYLLLMQENGNRDMIRLAFCPDSVMCSVINCVKYELARNSHHYHSPPSDHIPTPKFGSFTGSSPLSVSVSPPMKTGFWENSTEMDTLQNNLQFLNFEDPLTSPEFSNGFFSQERQCLPLRTSRRSPSLPEFPVKICHYFNKGFCKHGNNCRYFHGQIIPERESFAQMFNPNNNLSDEEHVVSPVSLEKLEGEIIELLKLRRGAPISIASLPMMYYEKYGRTLQAEGYLTESQRHGKAGYSLTKLLARLKNTIRLVDRPHGQHSVILAEDASKFVEYTGERNEHGAILAGSRQIYLTFPAESSFTEHDVSIYFTSYGHVEDVRIPCQQKRMYGFVTFASSETVKHILAKGNPHFICNARVLVKPYREKSRSSRYLDNYKPLHGMRYGSKFIERDIEMNTLPPRVSESSRMRKPFLSEPEQSVSKSLPTNYSYLGFSSDDFKLTSNAEQEEQAERLSYLLDYLNTEDNVMNITTNYRDNDRRTHCESLDSQVLNLPESPFSSLSGKEISTVT

SEQ ID NO: 50323 - protein, 530 aa, Arabidopsis thaliana
  peptide (1)..(530): Ceres Seq. ID no. 12591453
MNVVHARIQQLEPENAAKIFGYLLLMQENGNRDMIRLAFCPDSVMCSVINCVKYELARNSHHYHSPPSDHIPTPKFGSFTGSSPLSVSVSPPMKTGFWENSTEMDTLQNNLQFLNFEDPLTSPEFSNGFFSQERQCLPLRTSRRSPSLPEFPVKICHYFNKGFCKHGNNCRYFHGQIIPERESFAQMFNPNNNLSDEEHVVSPVSLEKLEGEIIELLKLRRGAPISIASLPMMYYEKYGRTLQAEGYLTESQRHGKAGYSLTKLLARLKNTIRLVDRPHGQHSVILAEDASKFVEYTGERNEHGAILAGSRQIYLTFPAESSFTEHDVSIYFTSYGHVEDVRIPCQQKRMYGFVTFASSETVKHILAKGNPHFICNARVLVKPYREKSRSSRYLDNYKPLHGMRYGSKFIERDIEMNTLPPRVSESSRMRKPFLSEPEQSVSKSLPTNYSYLGFSSDDFKLTSNAEQEEQAERLSYLLDYLNTEDNVMNITTNYRDNDRRTHCESLDSQVLNLPESPFSSLSGKEISTVT

SEQ ID NO: 50324 - protein, 505 aa, Arabidopsis thaliana
  peptide (1)..(505): Ceres Seq. ID no. 12591454
MQENGNRDMIRLAFCPDSVMCSVINCVKYELARNSHHYHSPPSDHIPTPKFGSFTGSSPLSVSVSPPMKTGFWENSTEMDTLQNNLQFLNFEDPLTSPEFSNGFFSQERQCLPLRTSRRSPSLPEFPVKICHYFNKGFCKHGNNCRYFHGQIIPERESFAQMFNPNNNLSDEEHVVSPVSLEKLEGEIIELLKLRRGAPISIASLPMMYYEKYGRTLQAEGYLTESQRHGKAGYSLTKLLARLKNTIRLVDRPHGQHSVILAEDASKFVEYTGERNEHGAILAGSRQIYLTFPAESSFTEHDVSIYFTSYGHVEDVRIPCQQKRMYGFVTFASSETVKHILAKGNPHFICNARVLVKPYREKSRSSRYLDNYKPLHGMRYGSKFIERDIEMNTLPPRVSESSRMRKPFLSEPEQSVSKSLPTNYSYLGFSSDDFKLTSNAEQEEQAERLSYLLDYLNTEDNVMNITTNYRDNDRRTHCESLDSQVLNLPESPFSSLSGKEISTVT

SEQ ID NO: 50325 - DNA, 1169 bp, Arabidopsis thaliana
  misc_feature (1)..(1169): Ceres Seq. ID no. 12592588
  misc_feature (1)..(1169): Ortholog of  Ceres SEQ ID NO 12609185 as cited in SEQ ID NO 55761
  misc_feature (1)..(1169): Ortholog of  Ceres SEQ ID NO 12615291 as cited in SEQ ID NO 62444
accactcaatatgttatatccgataacaaaaaacaatcacagagagaaaaaccaatggcttgtattcacatcgaatcatcacatccacctgcatggaagacacactctgtccaagagaacaaaccaacaaatgctgatgatatatcgaacacaaccttaccagaacaccacgacggtggcgacgggggaatccaagaaacgtgggccgcgattggagattctggcggcagaggaggaggctatttcgccggagagagtaggaagaagctggagaagaagaagagccaagtgttgcttgagggatacgcgttggatgatcaagatgatttgacgagagccaagagtttgacggatgatgatcttgaggagcttaaaggttgtttagatctagggtttggttttagttacgatgagatccctgagctttgcaacactttgcctgcgttagagctttgttactccatgagccagaagttcttagatgataagcaacaaaaccaccacaagtcccaggaggaagatgattcgtcgccaccaccgaccacgaccgctccaattgcaaattggaagatctctagccctggtgatgatccagatgatgtaaaagctagactcaaatattgggcacaaactgttgcttgcaccgtacggttgtgcagctgaactagaatcgattttcatctttgaaccagagaaagaccgtctttgcaagaatgaagtctctgccattgttcgctgagaatagacctgcaaatgtgtctgtggataaactgttctcctgactgttgtgattgagtgcaatgtggttgcttaacatatgacatctgaattagggttcttgtcctctcatatgcagtgatgagatttagacacagaaatcaatctccaactgtttttttgaagacctctgtttttggctgaggcttatatgatgaggttttgcttcaatcacaagatgtcaacaaagaaagcacatgacccttcttttatgttcttttacatgtgattcttatctttttgtcccgtggctaggaaagaatcagaaactttttgtggtcataagttgtgaacacacttaaacgtgtcgtgtacgatagggcaaaaatcctttcacatgttctttttacgtatacaaatgtctaataatgacccaatagaatttattactc

SEQ ID NO: 50326 - protein, 220 aa, Arabidopsis thaliana
  peptide (1)..(220): Ceres Seq. ID no. 12592589
TTQYVISDNKKQSQREKPMACIHIESSHPPAWKTHSVQENKPTNADDISNTTLPEHHDGGDGGIQETWAAIGDSGGRGGGYFAGESRKKLEKKKSQVLLEGYALDDQDDLTRAKSLTDDDLEELKGCLDLGFGFSYDEIPELCNTLPALELCYSMSQKFLDDKQQNHHKSQEEDDSSPPPTTTAPIANWKISSPGDDPDDVKARLKYWAQTVACTVRLCS

SEQ ID NO: 50327 - protein, 202 aa, Arabidopsis thaliana
  peptide (1)..(202): Ceres Seq. ID no. 12592590
MACIHIESSHPPAWKTHSVQENKPTNADDISNTTLPEHHDGGDGGIQETWAAIGDSGGRGGGYFAGESRKKLEKKKSQVLLEGYALDDQDDLTRAKSLTDDDLEELKGCLDLGFGFSYDEIPELCNTLPALELCYSMSQKFLDDKQQNHHKSQEEDDSSPPPTTTAPIANWKISSPGDDPDDVKARLKYWAQTVACTVRLCS

SEQ ID NO: 50328 - DNA, 1793 bp, Arabidopsis thaliana
  misc_feature (1)..(1793): Ceres Seq. ID no. 13588172
  misc_feature (1)..(1793): Ortholog of  Ceres SEQ ID NO 14301482 as cited in SEQ ID NO 63355
tcatcttccacatctcaaggagacacccaaaaagaaaaaccaaacctttgaagaacgaaaagggttattaaaaaagcaacaaactttgagagtaacaaagaaaaagtagttatcatggcggcattggaggagctaaagaagaagctgtctccattgtttgatgctgagaagggtttttcttcatcttcatctttggatccaaacgattcatatttattatctgatggtgggactgtgaatttacttagtagatcatatggagtttataattttaacgagctcgggttacaaaaatgtacatcttctcatgtggatgagtctgaaagttccgagacgacgtatcaatgtgcttctcacgaaatgcgggtttttggagctataggaagcggagctagcagcgttgttcaacgagctattcatatccctaatcatagaattttagcgttgaagaagattaatatctttgaaagggagaaaaggcagcaattgcttacagagatacggacattgtgtgaagctccttgtcatgaaggacttgtggattttcacggagcgttttatagtccagactcgggacaaatcagcatagctcttgaatatatgaatggaggatctcttgctgatattttaaaagtaacaaagaagatacctgagccggttctttcatcattgttccacaaacttttgcaaggattgagctacttgcatggagtgagacatcttgttcatagagacattaaacctgctaatttgcttataaatctcaaaggggaaccgaagataaccgattttggcataagtgctggccttgagaattcaatggctatgtgtgctacttttgttggaactgtcacctacatgtcaccagagaggataaggaatgacagttattcttatccagctgatatatggagccttggtctcgctctttttgaatgcggcactggagagtttccgtatatagctaatgaagggcctgttaatcttatgttgcagatattggatgatccttcaccaacaccaccaaaacaagaattctcaccagagttctgttccttcattgatgcttgcctccagaaggatccagatgctcgaccaacagctgaccagctcttgtcacacccttttattacaaaacacgagaaggaaagagtagatttggcgacttttgttcaaagcatctttgatccaactcagagattgaaagatttagctgatatgctcaccatacattattactccctctttgatggatttgatgatctttggcaccacgcaaaatcgctctacactgaaacttcagttttcagtttctctgggaaacataacacaggatcaactgaaatcttctcagcattatcagacattcgtaacacattaacaggagatttaccgagtgagaaacttgttcatgtcgttgagaagcttcattgcaaaccttgcggcagtggtggagtcataattcgtgctgttggatcgtttattgttggaaatcagtttctgatctgtggtgatggagtccaagcagaagggcttccgagtttcaaagatcttggcttcgatgtcgcaagtagacgtgttggccgatttcaagaacagtttgttgttgaatctggtgatcttattggaaagtattttcttgctaagcaagagctttatattacaaacttagattagataaacacacatgagaaaacgtttgttctctactgtactataatgtaactatgaacttgtttaattactaacatatgtaattgtatttgtttaaggttcataaaaagtgccggaat

SEQ ID NO: 50329 - protein, 520 aa, Arabidopsis thaliana
  peptide (1)..(520): Ceres Seq. ID no. 13588173
MAALEELKKKLSPLFDAEKGFSSSSSLDPNDSYLLSDGGTVNLLSRSYGVYNFNELGLQKCTSSHVDESESSETTYQCASHEMRVFGAIGSGASSVVQRAIHIPNHRILALKKINIFEREKRQQLLTEIRTLCEAPCHEGLVDFHGAFYSPDSGQISIALEYMNGGSLADILKVTKKIPEPVLSSLFHKLLQGLSYLHGVRHLVHRDIKPANLLINLKGEPKITDFGISAGLENSMAMCATFVGTVTYMSPERIRNDSYSYPADIWSLGLALFECGTGEFPYIANEGPVNLMLQILDDPSPTPPKQEFSPEFCSFIDACLQKDPDARPTADQLLSHPFITKHEKERVDLATFVQSIFDPTQRLKDLADMLTIHYYSLFDGFDDLWHHAKSLYTETSVFSFSGKHNTGSTEIFSALSDIRNTLTGDLPSEKLVHVVEKLHCKPCGSGGVIIRAVGSFIVGNQFLICGDGVQAEGLPSFKDLGFDVASRRVGRFQEQFVVESGDLIGKYFLAKQELYITNLD

SEQ ID NO: 50330 - protein, 438 aa, Arabidopsis thaliana
  peptide (1)..(438): Ceres Seq. ID no. 13588174
MRVFGAIGSGASSVVQRAIHIPNHRILALKKINIFEREKRQQLLTEIRTLCEAPCHEGLVDFHGAFYSPDSGQISIALEYMNGGSLADILKVTKKIPEPVLSSLFHKLLQGLSYLHGVRHLVHRDIKPANLLINLKGEPKITDFGISAGLENSMAMCATFVGTVTYMSPERIRNDSYSYPADIWSLGLALFECGTGEFPYIANEGPVNLMLQILDDPSPTPPKQEFSPEFCSFIDACLQKDPDARPTADQLLSHPFITKHEKERVDLATFVQSIFDPTQRLKDLADMLTIHYYSLFDGFDDLWHHAKSLYTETSVFSFSGKHNTGSTEIFSALSDIRNTLTGDLPSEKLVHVVEKLHCKPCGSGGVIIRAVGSFIVGNQFLICGDGVQAEGLPSFKDLGFDVASRRVGRFQEQFVVESGDLIGKYFLAKQELYITNLD

SEQ ID NO: 50331 - protein, 358 aa, Arabidopsis thaliana
  peptide (1)..(358): Ceres Seq. ID no. 13588175
MNGGSLADILKVTKKIPEPVLSSLFHKLLQGLSYLHGVRHLVHRDIKPANLLINLKGEPKITDFGISAGLENSMAMCATFVGTVTYMSPERIRNDSYSYPADIWSLGLALFECGTGEFPYIANEGPVNLMLQILDDPSPTPPKQEFSPEFCSFIDACLQKDPDARPTADQLLSHPFITKHEKERVDLATFVQSIFDPTQRLKDLADMLTIHYYSLFDGFDDLWHHAKSLYTETSVFSFSGKHNTGSTEIFSALSDIRNTLTGDLPSEKLVHVVEKLHCKPCGSGGVIIRAVGSFIVGNQFLICGDGVQAEGLPSFKDLGFDVASRRVGRFQEQFVVESGDLIGKYFLAKQELYITNLD

SEQ ID NO: 50332 - DNA, 1773 bp, Arabidopsis thaliana
  misc_feature (1)..(1773): Ceres Seq. ID no. 13588176
  misc_feature (1)..(1773): Ortholog of  Ceres SEQ ID NO 15170501 as cited in SEQ ID NO 52774
  misc_feature (1)..(1773): Ortholog of  Ceres SEQ ID NO 14314168 as cited in SEQ ID NO 59439
atggtgaagcacgagattctcaactacagcgaggatgaagaagaaaattactcagacgaaggagattggggagactggaaagctgatgataatggtatagaaggaggagaggaggaggaggaggatgatggtgacgactcggaatctgattttctgtgtttgttttgtgattctcacttcgtttcctgtgatttactcttcgaacactgtcgtctaagccacggattcgactttcatggagttagaaaggaattgaagctcgatttctactcttcttttaagctcatcaactatattcgctcacaggtggctgagaacatgtgtttcagttggaagattgaagctgatgattacaaagatgttaagtttccttgggatgaagagaagtatctgaagcctttttggcaggaggattcacttttgtactcgtttgcagatgatgaggaagatgaagaagtcacgtttgacagagaggaagtgatggaggaattgcagaagcttggggatttaagcattgatgtcgaggctttaggggaaagctcaatgtcgaacagtgataaatgcaatataaatggaagtaaggatgtaacttcgctctcaaactgcaatggcctaaagcaaagttctgcggatgatttgatagtcaatgggaaagatgcagaaccaaaggtttgtgatggaaggctagttaataggaacatcagaaaggtgaatgagaactattttggatcttatagttcgtttggcattcacagggagatgctaagtgataaggttagaacagaagcataccgagatgcacttttgaagaatcctactctcttgaatggctctgttgtaatggatgttggttgtggaactgggatattgagtctttttgctgctaaagctggggcttcaagggtagttgcagttgaagctagtgagaagatggccaaagataacaaagtattcaatgataacgagcataatggggtacttgaagttgcacactcaatggtagaagagctagataaatcgatacagattcagcctcatagtgttgatgtgttagtcagcgaatggatgggatactgccttttatatgagtcaatgctcagttctgtgctctatgcaagagatcggtggttgaaacctggaggtgcaatcctccctgacacggccactatgtttgttgcgggatttggaaaaggtgcaacaagtcttcctttctgggaagatgtctatggctttgacatgtcttcaattgggaaggagatacatgacgacactactcgacttcccattgttgacgttatagcggagcgtgatttagtgacacagcctacccttcttcagacatttgacctggctaccatgaaaccggatgaagtagatttcacagcaacggcaacgctggagcccactgagtcagaagcaaaaactaggttgtgccatggtgttgtgttgtggtttgacacaggtttcaccagtaggttctgtaaggaaaacccaaccgtactatccacatcaccctacactcccccaacacactgggctcagacaatcttaacttttcaagaaccaatctcagtggcaccggcctcggttctgtctggtaatgacagaagagaagccatcggaaccgaagagtgtcccgcctcaagcattcatctgcgtgtgagtgttgcacgagcacatgagcatcgcagcatagacatctcgttagaggctactgggctgagctcaaagggtcagaagcgtcactggccggttcagatatttaatctatga

SEQ ID NO: 50333 - protein, 590 aa, Arabidopsis thaliana
  peptide (1)..(590): Ceres Seq. ID no. 13588177
MVKHEILNYSEDEEENYSDEGDWGDWKADDNGIEGGEEEEEDDGDDSESDFLCLFCDSHFVSCDLLFEHCRLSHGFDFHGVRKELKLDFYSSFKLINYIRSQVAENMCFSWKIEADDYKDVKFPWDEEKYLKPFWQEDSLLYSFADDEEDEEVTFDREEVMEELQKLGDLSIDVEALGESSMSNSDKCNINGSKDVTSLSNCNGLKQSSADDLIVNGKDAEPKVCDGRLVNRNIRKVNENYFGSYSSFGIHREMLSDKVRTEAYRDALLKNPTLLNGSVVMDVGCGTGILSLFAAKAGASRVVAVEASEKMAKDNKVFNDNEHNGVLEVAHSMVEELDKSIQIQPHSVDVLVSEWMGYCLLYESMLSSVLYARDRWLKPGGAILPDTATMFVAGFGKGATSLPFWEDVYGFDMSSIGKEIHDDTTRLPIVDVIAERDLVTQPTLLQTFDLATMKPDEVDFTATATLEPTESEAKTRLCHGVVLWFDTGFTSRFCKENPTVLSTSPYTPPTHWAQTILTFQEPISVAPASVLSGNDRREAIGTEECPASSIHLRVSVARAHEHRSIDISLEATGLSSKGQKRHWPVQIFNL

SEQ ID NO: 50334 - protein, 484 aa, Arabidopsis thaliana
  peptide (1)..(484): Ceres Seq. ID no. 13588178
MCFSWKIEADDYKDVKFPWDEEKYLKPFWQEDSLLYSFADDEEDEEVTFDREEVMEELQKLGDLSIDVEALGESSMSNSDKCNINGSKDVTSLSNCNGLKQSSADDLIVNGKDAEPKVCDGRLVNRNIRKVNENYFGSYSSFGIHREMLSDKVRTEAYRDALLKNPTLLNGSVVMDVGCGTGILSLFAAKAGASRVVAVEASEKMAKDNKVFNDNEHNGVLEVAHSMVEELDKSIQIQPHSVDVLVSEWMGYCLLYESMLSSVLYARDRWLKPGGAILPDTATMFVAGFGKGATSLPFWEDVYGFDMSSIGKEIHDDTTRLPIVDVIAERDLVTQPTLLQTFDLATMKPDEVDFTATATLEPTESEAKTRLCHGVVLWFDTGFTSRFCKENPTVLSTSPYTPPTHWAQTILTFQEPISVAPASVLSGNDRREAIGTEECPASSIHLRVSVARAHEHRSIDISLEATGLSSKGQKRHWPVQIFNL

SEQ ID NO: 50335 - protein, 430 aa, Arabidopsis thaliana
  peptide (1)..(430): Ceres Seq. ID no. 13588179
MEELQKLGDLSIDVEALGESSMSNSDKCNINGSKDVTSLSNCNGLKQSSADDLIVNGKDAEPKVCDGRLVNRNIRKVNENYFGSYSSFGIHREMLSDKVRTEAYRDALLKNPTLLNGSVVMDVGCGTGILSLFAAKAGASRVVAVEASEKMAKDNKVFNDNEHNGVLEVAHSMVEELDKSIQIQPHSVDVLVSEWMGYCLLYESMLSSVLYARDRWLKPGGAILPDTATMFVAGFGKGATSLPFWEDVYGFDMSSIGKEIHDDTTRLPIVDVIAERDLVTQPTLLQTFDLATMKPDEVDFTATATLEPTESEAKTRLCHGVVLWFDTGFTSRFCKENPTVLSTSPYTPPTHWAQTILTFQEPISVAPASVLSGNDRREAIGTEECPASSIHLRVSVARAHEHRSIDISLEATGLSSKGQKRHWPVQIFNL

SEQ ID NO: 50336 - DNA, 814 bp, Arabidopsis thaliana
  misc_feature (1)..(814): Ceres Seq. ID no. 13647738
  misc_feature (1)..(814): Ortholog of  Ceres SEQ ID NO 13595495 as cited in SEQ ID NO 56624
  misc_feature (1)..(814): Ortholog of  Ceres SEQ ID NO 12608406 as cited in SEQ ID NO 58017
  misc_feature (1)..(814): Ortholog of  Ceres SEQ ID NO 13599397 as cited in SEQ ID NO 0
ggaagtaagctttgtctcgtcggaatctgatggagaagaagaagaagaaaggcgatgatgaattgaactcgaaaccgccgttaatggcgttgaaccatgtgtcaaggctttgtaaagacgtcaaaaagtctctcgagttctacacaaaggtattagggttcgtggagatagagcgtccagcttctttcgacttcgacggtgcgtggcttttcaactacggcgttgggatccacttggtgcaggccaaggaccaagataagttaccttctgacacggaccatttggacccaatggataaccacatctctttccagtgtgaagatatggaagctttggagaagaggctgaaggaggtgaaggtaaagtacatcaagaggacggtgggtgatgagaaagatgcagctatcgaccagctcttcttcaatgaccctgacggctttatggttgaaatctgtaactgcgagaatctcgaacttgtcccgcgccattcagccgacgccatacgcctcccagaagaccgacatgcacctcctgttgccctccctgactcctccaaccgtaggatgccccagcccaattcttaatactatttagactcgtttcgtctctagttagtactgtgttgtgctcagctcctactctattagttaatgtttgtttgggacaccaagtccttccaaccatgagtgctagtaggctggccattttggtttttgtttagattcggtttggttcagttttaataaatctctggctgaactctaaaaaaaaaaaagaaaaaaaaaaaaaaaaaaaactcgagggggggcccggt

SEQ ID NO: 50337 - protein, 184 aa, Arabidopsis thaliana
  peptide (1)..(184): Ceres Seq. ID no. 13647739
MEKKKKKGDDELNSKPPLMALNHVSRLCKDVKKSLEFYTKVLGFVEIERPASFDFDGAWLFNYGVGIHLVQAKDQDKLPSDTDHLDPMDNHISFQCEDMEALEKRLKEVKVKYIKRTVGDEKDAAIDQLFFNDPDGFMVEICNCENLELVPRHSADAIRLPEDRHAPPVALPDSSNRRMPQPNS

SEQ ID NO: 50338 - protein, 166 aa, Arabidopsis thaliana
  peptide (1)..(166): Ceres Seq. ID no. 13647740
MALNHVSRLCKDVKKSLEFYTKVLGFVEIERPASFDFDGAWLFNYGVGIHLVQAKDQDKLPSDTDHLDPMDNHISFQCEDMEALEKRLKEVKVKYIKRTVGDEKDAAIDQLFFNDPDGFMVEICNCENLELVPRHSADAIRLPEDRHAPPVALPDSSNRRMPQPNS

SEQ ID NO: 50339 - protein, 97 aa, Arabidopsis thaliana
  peptide (1)..(97): Ceres Seq. ID no. 13647741
MDNHISFQCEDMEALEKRLKEVKVKYIKRTVGDEKDAAIDQLFFNDPDGFMVEICNCENLELVPRHSADAIRLPEDRHAPPVALPDSSNRRMPQPNS

SEQ ID NO: 50340 - DNA, 3250 bp, Arabidopsis thaliana; identical to SEQ ID NO: 44314
  misc_feature (1)..(3250): Ceres Seq. ID no. 13509447
  misc_feature (1)..(3250): Ortholog of  Ceres SEQ ID NO 15177692 as cited in SEQ ID NO 52664
  misc_feature (1)..(3250): Ortholog of  Ceres SEQ ID NO 14303959 as cited in SEQ ID NO 53709

SEQ ID NO: 50341 - protein, 934 aa, Arabidopsis thaliana; identical to SEQ ID NO: 44315
  peptide (1)..(934): Ceres Seq. ID no. 13509448

SEQ ID NO: 50342 - protein, 903 aa, Arabidopsis thaliana; identical to SEQ ID NO: 44316
  peptide (1)..(903): Ceres Seq. ID no. 13509449

SEQ ID NO: 50343 - protein, 878 aa, Arabidopsis thaliana; identical to SEQ ID NO: 44317
  peptide (1)..(878): Ceres Seq. ID no. 13509450

SEQ ID NO: 50344 - DNA, 1297 bp, Arabidopsis thaliana
  misc_feature (1)..(1297): Ceres Seq. ID no. 13588192
  misc_feature (1)..(1297): Ortholog of  Ceres SEQ ID NO 14302255 as cited in SEQ ID NO 65021
gacagcaacaagtacaagagagagagagaaagaatcaaaaacatctgtcgcggagagagagagaaagagagaaagagaaaaatgtcgatggctttgcttttgacatcgccggctatgaagcagaagccggcggtgataacttctcctcgccgtggttcttctccttctcgtcgtcttcgagtttcttgtgttaccacaaaccctgctaggaagaaaaacgaaacatgcaatcattttcgacctatcaaagaagtaaataaccaattaacacacacaataccacaggagaagcttgagatcttcaaatcaatggaaaattgggcagaacaaaaactactaccttatctcaaaccggtagaagattcatggcaaccacaagacttcttacctgcgccagagaacgacgacgaattctacgaccgagtaaaagagatcagagaaagaacaaaagagatacctgacgattactttgtagttcttgtgggagatatgatcacagaagaagcacttccaacgtatcaaacgacgttaaacacactagacggtgttaaggatgaaaccggtgggagtttatcgccgtgggctgtgtggattagagcctggacggcggaggaaaaccgtcacggtgacttactcaacaagtatctttatctaactggtcgtgttgatatgcgacatgttgagaagactatacaatatcttattggttctggtatggattcgaaatttgagaacaatccatacaatggattcatctacacatcattccaagagcgagcaacattcatctctcacggcaacacggctaggctagccacaacatacggcgatgttaccctcgcgaagatctgcggcacaatcgctgccgacgagaagcgacacgagacggcgtacacgaagatagtggagaagctattcgagatcgaccctgacggatctgttcaggcgttagcgagtatgatgaagaaacggatcacaatgccggctcatcttatgcacgacggaagagataacgatttgtttgatcattacgccgccgtggcgcagcggattggagtttacacggcggcggattacgctgggatacttgagtttctgttgcggcggtggaaggtggagagtttgggattggggttatcaggagaaggaaggagagcacaggagtacttgtgcaccttgccgcagaggatcaagaggttagaggaaagagctaatgatagggtcaaacttgtgtcaaaaccttctgtttcgtttagctgggtttttggtagagatgtgaaactatagatagatattt

SEQ ID NO: 50345 - protein, 428 aa, Arabidopsis thaliana
  peptide (1)..(428): Ceres Seq. ID no. 13588193
DSNKYKRERERIKNICRGEREKERKRKMSMALLLTSPAMKQKPAVITSPRRGSSPSRRLRVSCVTTNPARKKNETCNHFRPIKEVNNQLTHTIPQEKLEIFKSMENWAEQKLLPYLKPVEDSWQPQDFLPAPENDDEFYDRVKEIRERTKEIPDDYFVVLVGDMITEEALPTYQTTLNTLDGVKDETGGSLSPWAVWIRAWTAEENRHGDLLNKYLYLTGRVDMRHVEKTIQYLIGSGMDSKFENNPYNGFIYTSFQERATFISHGNTARLATTYGDVTLAKICGTIAADEKRHETAYTKIVEKLFEIDPDGSVQALASMMKKRITMPAHLMHDGRDNDLFDHYAAVAQRIGVYTAADYAGILEFLLRRWKVESLGLGLSGEGRRAQEYLCTLPQRIKRLEERANDRVKLVSKPSVSFSWVFGRDVKL

SEQ ID NO: 50346 - protein, 401 aa, Arabidopsis thaliana
  peptide (1)..(401): Ceres Seq. ID no. 13588194
MSMALLLTSPAMKQKPAVITSPRRGSSPSRRLRVSCVTTNPARKKNETCNHFRPIKEVNNQLTHTIPQEKLEIFKSMENWAEQKLLPYLKPVEDSWQPQDFLPAPENDDEFYDRVKEIRERTKEIPDDYFVVLVGDMITEEALPTYQTTLNTLDGVKDETGGSLSPWAVWIRAWTAEENRHGDLLNKYLYLTGRVDMRHVEKTIQYLIGSGMDSKFENNPYNGFIYTSFQERATFISHGNTARLATTYGDVTLAKICGTIAADEKRHETAYTKIVEKLFEIDPDGSVQALASMMKKRITMPAHLMHDGRDNDLFDHYAAVAQRIGVYTAADYAGILEFLLRRWKVESLGLGLSGEGRRAQEYLCTLPQRIKRLEERANDRVKLVSKPSVSFSWVFGRDVKL

SEQ ID NO: 50347 - protein, 399 aa, Arabidopsis thaliana
  peptide (1)..(399): Ceres Seq. ID no. 13588195
MALLLTSPAMKQKPAVITSPRRGSSPSRRLRVSCVTTNPARKKNETCNHFRPIKEVNNQLTHTIPQEKLEIFKSMENWAEQKLLPYLKPVEDSWQPQDFLPAPENDDEFYDRVKEIRERTKEIPDDYFVVLVGDMITEEALPTYQTTLNTLDGVKDETGGSLSPWAVWIRAWTAEENRHGDLLNKYLYLTGRVDMRHVEKTIQYLIGSGMDSKFENNPYNGFIYTSFQERATFISHGNTARLATTYGDVTLAKICGTIAADEKRHETAYTKIVEKLFEIDPDGSVQALASMMKKRITMPAHLMHDGRDNDLFDHYAAVAQRIGVYTAADYAGILEFLLRRWKVESLGLGLSGEGRRAQEYLCTLPQRIKRLEERANDRVKLVSKPSVSFSWVFGRDVKL

SEQ ID NO: 50348 - DNA, 1756 bp, Arabidopsis thaliana
  misc_feature (1)..(1756): Ceres Seq. ID no. 14311195
  misc_feature (1)..(1756): Ortholog of  Ceres SEQ ID NO 14314480 as cited in SEQ ID NO 52362
  misc_feature (1)..(1756): Ortholog of  Ceres SEQ ID NO 13593854 as cited in SEQ ID NO 53403
  misc_feature (1)..(1756): Ortholog of  Ceres SEQ ID NO 12581680 as cited in SEQ ID NO 55019
  misc_feature (1)..(1756): Ortholog of  Ceres SEQ ID NO 15172112 as cited in SEQ ID NO 59632
gaaaagaaagatcattagtttctgaggggataaccatttttttttcttcttaaaaagttttttttttgtcaattggtcttcttcttcctcatccgctcgcttatatttaatttaataataataaaaatcggtgttcatttttatataaaagtataaattttgtgtttggttgatccatccgtagtcgtagtagatctacaagctctgaaattccacgcccacatctcctccgtcctcttgagatccttctcttcattcattttcttgctcaacttgagttgcttccaacatcttgcaagattgtctttgagttcattcaggtcttgaagaagagcactcttttaagctgtgtgaaacttgcgccgttcctgtgaagaactacttttggcattgcagatttcagagagctgtgatttgtgctatcttaaaaacggacaagttctatgttgtggcggatgagatgagggatgctatctgggttgatgaattttctgaatgcctgtctctggccacggtcagatcagcaggctcgttctgcctcagattctggtggccgccaagagggtttgctctggttcagagactccggccagcacgtctttggtgacttctccatggccgtcgttcaagccaacagcttgctagaggaccagagccagctcgagtctggctctcttagctcccacgactctggtccctttggcacctttgttggcgtctacgacggccacggtgggcctgagacatctcgcttcatcaatgatcatatgttccaccacctcaagaggtttactgcagagcaacagtgtatgtcatcagaagtgataaaaaaagcgttccaagccactgaagaaggcttcttatccatagttacaaatcaatttcaaactagacctcagatagccacagtgggatcatgctgtcttgtaagtgtcatctgcgatgggaagctatacgtggccaacgcaggggactcacgggccgttctgggacgagtcatgagggtaacaggtgaagctcatgccactcagctctcagcagagcacaacgcatctatagagtcagtgagacgggaacttcaggccctgcatccggatcatccagatattgtggttctgaaacataacgtctggcgagtaaaaggcatcattcaggtttcaagatccattggtgatgtgtatttgaaaaggtcagagttcaacagggaaccactgtatgcaaaattccggctgaggtcaccgttcagcaagccattactgagtgcagagccggcgatcacggtgcatacactggagccgcacgatcagttcattatatgtgcatcagatggactgtgggaacatatgagcaaccaagaagcagtagacatagtccagaatcatccgcgaaacgggatagcaaagaggtggtgaaagtagcgctacaagaagcggcaaagaagagagagatgagatactcagacctgaaaaagatagacagaggagtgaggagacatttccacgatgacataacagtgattgttgtcttctttgatacaaacctagtgagcagaggaagtatgttgagaggaccagccgtgtcagtgagaggagcgggtgtgaatctacctcacaacaccctggcgccttgcaccacgcccactcaagctgctgctgctggcgcctcctgactattgaatttttacggtgtccttaaaattctttccaagatccttcctgtaactatatataaatatatatatttgattattattatc

SEQ ID NO: 50349 - protein, 314 aa, Arabidopsis thaliana
  peptide (1)..(314): Ceres Seq. ID no. 14311196
MLSGLMNFLNACLWPRSDQQARSASDSGGRQEGLLWFRDSGQHVFGDFSMAVVQANSLLEDQSQLESGSLSSHDSGPFGTFVGVYDGHGGPETSRFINDHMFHHLKRFTAEQQCMSSEVIKKAFQATEEGFLSIVTNQFQTRPQIATVGSCCLVSVICDGKLYVANAGDSRAVLGRVMRVTGEAHATQLSAEHNASIESVRRELQALHPDHPDIVVLKHNVWRVKGIIQVSRSIGDVYLKRSEFNREPLYAKFRLRSPFSKPLLSAEPAITVHTLEPHDQFIICASDGLWEHMSNQEAVDIVQNHPRNGIAKRW

SEQ ID NO: 50350 - protein, 309 aa, Arabidopsis thaliana
  peptide (1)..(309): Ceres Seq. ID no. 14311197
MNFLNACLWPRSDQQARSASDSGGRQEGLLWFRDSGQHVFGDFSMAVVQANSLLEDQSQLESGSLSSHDSGPFGTFVGVYDGHGGPETSRFINDHMFHHLKRFTAEQQCMSSEVIKKAFQATEEGFLSIVTNQFQTRPQIATVGSCCLVSVICDGKLYVANAGDSRAVLGRVMRVTGEAHATQLSAEHNASIESVRRELQALHPDHPDIVVLKHNVWRVKGIIQVSRSIGDVYLKRSEFNREPLYAKFRLRSPFSKPLLSAEPAITVHTLEPHDQFIICASDGLWEHMSNQEAVDIVQNHPRNGIAKRW

SEQ ID NO: 50351 - protein, 265 aa, Arabidopsis thaliana
  peptide (1)..(265): Ceres Seq. ID no. 14311198
MAVVQANSLLEDQSQLESGSLSSHDSGPFGTFVGVYDGHGGPETSRFINDHMFHHLKRFTAEQQCMSSEVIKKAFQATEEGFLSIVTNQFQTRPQIATVGSCCLVSVICDGKLYVANAGDSRAVLGRVMRVTGEAHATQLSAEHNASIESVRRELQALHPDHPDIVVLKHNVWRVKGIIQVSRSIGDVYLKRSEFNREPLYAKFRLRSPFSKPLLSAEPAITVHTLEPHDQFIICASDGLWEHMSNQEAVDIVQNHPRNGIAKRW

SEQ ID NO: 50352 - DNA, 1304 bp, Arabidopsis thaliana
  misc_feature (1)..(1304): Ceres Seq. ID no. 13592677
  misc_feature (1)..(1304): Ortholog of  Ceres SEQ ID NO 13595414 as cited in SEQ ID NO 56539
aaaactcttgttcctcttcctcttcaacgtgaacacttctatttctcagagaacattcacctatatgtctttcttcaaggagaagtcttcctctttccagatttagatgaacactcttcagatgccttgtgccttattgatccagattcgaagtacccaactttactctctagacctttttcatggcagccactcccacacacttctctgtctcccatgatcctttttcttccacgtctctccttaatctccaaactcaagcgatctttggtcccaatcacagtttaaagacaacccagttgagaattccagcttctttcagaagaaaagctacaaacttgcaagtgatggcttcaggaaagacacctggactgactcaggaagctaatggggttgcaattgatagacaaaacaacactgatgtatttgacgacatgaaacagcggttcctggccttcaagaagcttaagtacatggatgactttgaacactacaaaaatctggcagatgctcaagctccaaagtttctggtgattgcttgtgcagactctagagtttgtccttctgctgtcctgggattccaaccgggtgacgcattcactgttcgtaacattgcaaatttagtacctccatatgagtctggacctactgaaaccaaagctgctctagagttctctgtgaatactcttaatgtggaaaacatcttagtcattggtcatagccggtgtggaggaattcaagctttaatgaaaatggaagacgaaggagattccagaagtttcatacacaactgggtagttgtgggaaagaaggcaaaggaaagcacaaaagctgttgcttcaaacctccattttgatcatcagtgccaacattgtgaaaaggcatcgataaatcattcattagaaaggctgcttgggtacccgtggatagaagagaaagtgcggcaaggttcactgtctctccatggtggatactataattttgttgattgtacgttcgagaaatggacagtggattatgcagcaagcagaggtaagaagaaggaaggcagtggaatcgctgttaaagaccggtcagtttggtcttgacttacgactatctcaatcttcatagagttttttttcataatttatagagaaacatcaaaccccttttggttgggattatcatgtgtttgttccacttgtgtgttgaagtcattttccttcttctgtcttattgaggcagggactaatgtttgttttatctttcagttgtttcgtttaaattccacatttgtgcaatgaactggttggtgtttcttt

SEQ ID NO: 50353 - protein, 301 aa, Arabidopsis thaliana; identical to SEQ ID NO: 27493
  peptide (1)..(301): Ceres Seq. ID no. 13592678

SEQ ID NO: 50354 - protein, 246 aa, Arabidopsis thaliana; identical to SEQ ID NO: 27494
  peptide (1)..(246): Ceres Seq. ID no. 13592679

SEQ ID NO: 50355 - protein, 217 aa, Arabidopsis thaliana; identical to SEQ ID NO: 27495
  peptide (1)..(217): Ceres Seq. ID no. 13592680

SEQ ID NO: 50356 - DNA, 1367 bp, Arabidopsis thaliana
  misc_feature (1)..(1367): Ceres Seq. ID no. 13588196
  misc_feature (1)..(1367): Ortholog of  Ceres SEQ ID NO 12636774 as cited in SEQ ID NO 372
  misc_feature (1)..(1367): Ortholog of  Ceres SEQ ID NO 12578315 as cited in SEQ ID NO 62451
  misc_feature (1)..(1367): Ortholog of  Ceres SEQ ID NO 12617090 as cited in SEQ ID NO 64005
  misc_feature (1)..(1367): Ortholog of  Ceres SEQ ID NO 13597439 as cited in SEQ ID NO 64081
  misc_feature (1)..(1367): Ortholog of  Ceres SEQ ID NO 13597233 as cited in SEQ ID NO 64370
  misc_feature (1)..(1367): Ortholog of  Ceres SEQ ID NO 13584577 as cited in SEQ ID NO 65298
atatgtatgaagcagctttttgtgaatgaatcttcgaaataggttaaagaaacaaaaatggagaccaaagaattcgactcttacagtgagcgcaaagctttcgacgagacgaaaacaggtgtgaaaggtctcattgatgctcacatcactgagattcctcgaattttctgtctccctcaaggttccttatccgacaagaaaccttttgtttctaccactgattttgcgatccctatcatcgacttcgaaggcctccacgtctcccgtgaagatatcgttgggaagatcaaagacgctgcatcgaattggggattcttccaggtgatcaatcatggtgttcctttaaacgttcttcaagagattcaagatggagttcgtaggtttcatgaggaagctcctgaggttaagaaaacctacttcactcgtgacgccactaaaagatttgtctacaatagtaatttcgatctctatagttcttcttcatgtgttaactggagagactctttcgcttgttacatggctcctgatcctccaaaccctgaggatctccctgtggcttgcagggttgctatgttcgaatactcaaagcatatgatgagattaggtgatttgctctttgagcttctctcagaagctcttggtttgagatctgataagcttaaaagcatggattgcatgaagggtttgcttttgctctgccattattatcctccatgtccacaacctgatctaaccatcggcacaaataatcattcagacaactccttcctcaccattcttctccaggaccaaatcggtggtcttcaaatctttcatcaagactgttgggtcgatgtctctcctattccaggggctctagtcatcaacatgggagatttcttgcagctaataacgaatgacaaagtcataagtgtggagcacagggtgctagcgaacagggcagctacaccgaggatatcagtagctagctttttcagcacaagtatgcgtccgaattcaactgtttatggaccaatcaaagagcttctctctgaagaaaacccttcaaaatacagagtcatcgacttgaaagaatacacagagggatacttcaagaaaggcctcgatggaacatcgtatctgtcgcattacaagatatgaaagaaaaaaacaattgaaagagtaaatcatctcaagtttattgtaagatattggttcgtttcatgcatctattgggttcaggtactagtccaattgtcagatcttgacaaataagtaaaccatttcctttgtaccaaaaacaaaaacaacaaagaaaggtgtgtgtgtgtgtgtgtgtataattttagtgaatgctttaaattgggaataaaggttcaaacttgatc

SEQ ID NO: 50357 - protein, 360 aa, Arabidopsis thaliana
  peptide (1)..(360): Ceres Seq. ID no. 13588197
METKEFDSYSERKAFDETKTGVKGLIDAHITEIPRIFCLPQGSLSDKKPFVSTTDFAIPIIDFEGLHVSREDIVGKIKDAASNWGFFQVINHGVPLNVLQEIQDGVRRFHEEAPEVKKTYFTRDATKRFVYNSNFDLYSSSSCVNWRDSFACYMAPDPPNPEDLPVACRVAMFEYSKHMMRLGDLLFELLSEALGLRSDKLKSMDCMKGLLLLCHYYPPCPQPDLTIGTNNHSDNSFLTILLQDQIGGLQIFHQDCWVDVSPIPGALVINMGDFLQLITNDKVISVEHRVLANRAATPRISVASFFSTSMRPNSTVYGPIKELLSEENPSKYRVIDLKEYTEGYFKKGLDGTSYLSHYKI

SEQ ID NO: 50358 - protein, 207 aa, Arabidopsis thaliana
  peptide (1)..(207): Ceres Seq. ID no. 13588198
MAPDPPNPEDLPVACRVAMFEYSKHMMRLGDLLFELLSEALGLRSDKLKSMDCMKGLLLLCHYYPPCPQPDLTIGTNNHSDNSFLTILLQDQIGGLQIFHQDCWVDVSPIPGALVINMGDFLQLITNDKVISVEHRVLANRAATPRISVASFFSTSMRPNSTVYGPIKELLSEENPSKYRVIDLKEYTEGYFKKGLDGTSYLSHYKI

SEQ ID NO: 50359 - protein, 189 aa, Arabidopsis thaliana
  peptide (1)..(189): Ceres Seq. ID no. 13588199
MFEYSKHMMRLGDLLFELLSEALGLRSDKLKSMDCMKGLLLLCHYYPPCPQPDLTIGTNNHSDNSFLTILLQDQIGGLQIFHQDCWVDVSPIPGALVINMGDFLQLITNDKVISVEHRVLANRAATPRISVASFFSTSMRPNSTVYGPIKELLSEENPSKYRVIDLKEYTEGYFKKGLDGTSYLSHYKI

SEQ ID NO: 50360 - DNA, 1807 bp, Arabidopsis thaliana; identical to SEQ ID NO: 47004
  misc_feature (1)..(1807): Ceres Seq. ID no. 13591791
  misc_feature (1)..(1807): Ortholog of  Ceres SEQ ID NO 14313228 as cited in SEQ ID NO 67057
  misc_feature (1)..(1807): Ortholog of  Ceres SEQ ID NO 13584744 as cited in SEQ ID NO 69137

SEQ ID NO: 50361 - protein, 489 aa, Arabidopsis thaliana; identical to SEQ ID NO: 47005
  peptide (1)..(489): Ceres Seq. ID no. 13591792

SEQ ID NO: 50362 - protein, 359 aa, Arabidopsis thaliana; identical to SEQ ID NO: 47006
  peptide (1)..(359): Ceres Seq. ID no. 13591793

SEQ ID NO: 50363 - protein, 342 aa, Arabidopsis thaliana; identical to SEQ ID NO: 47007
  peptide (1)..(342): Ceres Seq. ID no. 13591794

SEQ ID NO: 50364 - DNA, 2063 bp, Arabidopsis thaliana
  misc_feature (1)..(2063): Ceres Seq. ID no. 13647742
  misc_feature (1)..(2063): Ortholog of  Ceres SEQ ID NO 14311361 as cited in SEQ ID NO 54033
aaaaaaaatataaattaaataaagaatcccataaatatctctctatcgaactctctctgcttttacaaatctcagaatctccttcagcgaattcacatctcagctgcttttgaatccgccgtaactaaaaacaatcctccttttctcgattcgttaaactatggccccgccggcaggacaaacggcggcggtggctgaagcggctggcgccgatggtgctccaccgcagcagcagcgtggatttggttccacgatttccggcatcgttagaatcgccgtcttttggtattttgcttctaagttcttttctcctaagcagaaacctatggatcccactgctccgtctcagctcatgactaatctcttccacaagggcgaatcattggatatgtggttttatctatcagagcaggagaagttcaatgactttggcaatgatcgtgcgctatattggcatgagacgaatataccttatgctgtatggacaccagagagtattaggaccaagtcacttacgtattatccatctgagacactacagaataatggaagtctgtatgctcatatcttttttgctcgatctggatttcccattgaccccactgatcctgaatatcaacctcttaatagttttagtaggacgcatgctgtggcgacttactttccaaagcagaaaaaaaataagaagaagagtctcttgggcagtcccaaagactctgatgaatccgaacctgaagttgagaaagttggagataagaaatcagatcccaaggaagaggtccctgtggaatggatatccctctggaaacctaatgtcacgattaacctggttgatgattttactcactattcacagaatggtgtaccaccaaacattgctcctcacttactggtagaaccgaccacaggaaattactatcctacaatttacttcaatgagttttggctgctaagggacaagttcattccagtcaatgagacagtctcagaactaccactaaatctggaaataagtcccataagcatgatgaagtggcaactgtttcagcaagttgatcaatctttccagatgcagcgtagctatggaagcatgcttgacggtgaatctgacgaactaaagaaggtgtttttggaaggaaatccctatcttttggggatcacgatgtttgtttcgatgcttcattcagtgttcgacttcctggcattcaaaaatgatatccaattctggaacaaaaataaatctatggaagggctgtctgcaaagtctgttgtactgaactttatctgtcagtttgtcatcttcctctacttgcttgacaacgacacttcatggatgatactggctagttccggagtcggtgtctgcattgagttctggaaaatagggaaagccatgcgcatagaggttgatcgaagtggaatgattccaaggttgaggttccatgatcgtgaatcgtatgcaagcaataaaaccaaggagtatgatgacattgccatcaaattcttatcctatgtgctcctcctccttgtcattggcttgtccatatattctctcgcttatgaacgccacaagagctggtattcttggatactatcttcactaacaagctgtgtctacatgttcggtttcatcatgatgtgtcctcagctattcatcaactacaagcttaaatcagtggcacatttaccatggagacagatgacttacaagttcctcaacaccattatcgacgatctctttgcctttgtcatcaaaatgccgattttacatcgactttctgtattcagagatgatgtgatattcttgatatacttataccaaaggtgggtttacccagtggataagacacgtgtgaacgagttcggttttggaggtgaggatgaaactgcagagaagaagttgatcactgagaaagaagaagaagacaagaaaacaaactaatctcttctcttcttcaaattttattacagttcagttatagtgtcttaatttatttttgttctcacttttggaaattgttttgttcaagtttaatgtcaaccctcaagacacattattaagc

SEQ ID NO: 50365 - protein, 593 aa, Arabidopsis thaliana
  peptide (1)..(593): Ceres Seq. ID no. 13647743
MAPPAGQTAAVAEAAGADGAPPQQQRGFGSTISGIVRIAVFWYFASKFFSPKQKPMDPTAPSQLMTNLFHKGESLDMWFYLSEQEKFNDFGNDRALYWHETNIPYAVWTPESIRTKSLTYYPSETLQNNGSLYAHIFFARSGFPIDPTDPEYQPLNSFSRTHAVATYFPKQKKNKKKSLLGSPKDSDESEPEVEKVGDKKSDPKEEVPVEWISLWKPNVTINLVDDFTHYSQNGVPPNIAPHLLVEPTTGNYYPTIYFNEFWLLRDKFIPVNETVSELPLNLEISPISMMKWQLFQQVDQSFQMQRSYGSMLDGESDELKKVFLEGNPYLLGITMFVSMLHSVFDFLAFKNDIQFWNKNKSMEGLSAKSVVLNFICQFVIFLYLLDNDTSWMILASSGVGVCIEFWKIGKAMRIEVDRSGMIPRLRFHDRESYASNKTKEYDDIAIKFLSYVLLLLVIGLSIYSLAYERHKSWYSWILSSLTSCVYMFGFIMMCPQLFINYKLKSVAHLPWRQMTYKFLNTIIDDLFAFVIKMPILHRLSVFRDDVIFLIYLYQRWVYPVDKTRVNEFGFGGEDETAEKKLITEKEEEDKKTN

SEQ ID NO: 50366 - protein, 538 aa, Arabidopsis thaliana
  peptide (1)..(538): Ceres Seq. ID no. 13647744
MDPTAPSQLMTNLFHKGESLDMWFYLSEQEKFNDFGNDRALYWHETNIPYAVWTPESIRTKSLTYYPSETLQNNGSLYAHIFFARSGFPIDPTDPEYQPLNSFSRTHAVATYFPKQKKNKKKSLLGSPKDSDESEPEVEKVGDKKSDPKEEVPVEWISLWKPNVTINLVDDFTHYSQNGVPPNIAPHLLVEPTTGNYYPTIYFNEFWLLRDKFIPVNETVSELPLNLEISPISMMKWQLFQQVDQSFQMQRSYGSMLDGESDELKKVFLEGNPYLLGITMFVSMLHSVFDFLAFKNDIQFWNKNKSMEGLSAKSVVLNFICQFVIFLYLLDNDTSWMILASSGVGVCIEFWKIGKAMRIEVDRSGMIPRLRFHDRESYASNKTKEYDDIAIKFLSYVLLLLVIGLSIYSLAYERHKSWYSWILSSLTSCVYMFGFIMMCPQLFINYKLKSVAHLPWRQMTYKFLNTIIDDLFAFVIKMPILHRLSVFRDDVIFLIYLYQRWVYPVDKTRVNEFGFGGEDETAEKKLITEKEEEDKKTN

SEQ ID NO: 50367 - protein, 529 aa, Arabidopsis thaliana
  peptide (1)..(529): Ceres Seq. ID no. 13647745
MTNLFHKGESLDMWFYLSEQEKFNDFGNDRALYWHETNIPYAVWTPESIRTKSLTYYPSETLQNNGSLYAHIFFARSGFPIDPTDPEYQPLNSFSRTHAVATYFPKQKKNKKKSLLGSPKDSDESEPEVEKVGDKKSDPKEEVPVEWISLWKPNVTINLVDDFTHYSQNGVPPNIAPHLLVEPTTGNYYPTIYFNEFWLLRDKFIPVNETVSELPLNLEISPISMMKWQLFQQVDQSFQMQRSYGSMLDGESDELKKVFLEGNPYLLGITMFVSMLHSVFDFLAFKNDIQFWNKNKSMEGLSAKSVVLNFICQFVIFLYLLDNDTSWMILASSGVGVCIEFWKIGKAMRIEVDRSGMIPRLRFHDRESYASNKTKEYDDIAIKFLSYVLLLLVIGLSIYSLAYERHKSWYSWILSSLTSCVYMFGFIMMCPQLFINYKLKSVAHLPWRQMTYKFLNTIIDDLFAFVIKMPILHRLSVFRDDVIFLIYLYQRWVYPVDKTRVNEFGFGGEDETAEKKLITEKEEEDKKTN

SEQ ID NO: 50368 - DNA, 1478 bp, Arabidopsis thaliana
  misc_feature (1)..(1478): Ceres Seq. ID no. 12592132
  misc_feature (1)..(1478): Ortholog of  Ceres SEQ ID NO 13595861 as cited in SEQ ID NO 58153
  misc_feature (1)..(1478): Ortholog of  Ceres SEQ ID NO 13584292 as cited in SEQ ID NO 63687
aaagtagccgcctcatcctcctcgtctcttctcgttagctctctcaatgaggagcccgatttagggtttcctccattggttatatcaattcgatcatctccacaaagctctcgaagactctttcggtgatctcatcttcttcttcttgtttagcctcctggaggttactttgtttgttactagttccaaaacatgccgaaagagaggaaagaacggtccgtatctcttgataagtataaacgatcgccactgtgttgtgaggcaagccttgctttgaagccgagtgagaaacaagttaaagaatgggaagaggctcgttgtcctgtttgtatggaacatcctcacaatgggattcttctcatttgttcttcttatgaaaatggttgtcgaccttacatgtgcgacactagccatcggcattctaactgtttcgatcagttccgcaaagcttctaaagagaaaccttctttgtctttacttcgtgaggaagaggaaagtaatgaaccaactgagatggaagatgtggattcagactcaactgctgtaaatctattaggagaagctgcatctgagataacagttgtggatttaagtgatggtgagagaggagaagaagaagtagaagaagaagaagaagaagtagtagtagaagaagaagaagaaggaattgtaacaacagaagaagatcaagaaaaaaacaaaccacaaaagcttacttgtccgttatgtcgtggacatataaaagaatgggtagttgttaaagcagctcgatgtttcatgaactcaaaacatagaagctgttcttgtgagacttgtgatttcagtggaagctattccgatctgagaaagcacgcaaggcttctacatccaggagttaggccatcagaagcagatccagagagacagagaagctggaggaggctagaaaggcagagcgatttaggggatttacttagcacactccaatcttcttttggaggagatgaaataagtaacgatgatgggtttctatttgctgatactcgcttgcttacagtgtactttctcatccgcgtgtttagaccagaatcgagtggctcaaggagtagtagctggtctggtacatctagagctaggacacatacaagtgggagaagaagatcttcaagacctgcaagtctttggggagagagctatgaaggtaatacaggaacatcacctagagatgaggagaataatcaatcttctgatgaacaagtgtctggaactcggagacgtcgttctagaagaagaactgtcattgatgatgatgatgaagaagaagaaccgtgatgctctgcagtttggaaatttggtctttggagtttatgataaaatgggggaaaccttgtagtaataaccccacttatgaaaccctattatgtaaaatttctttggagattgaaaaaagtttctactattgggaaacaaaatgttcaatatttcattaccgtttaaat

SEQ ID NO: 50369 - protein, 372 aa, Arabidopsis thaliana
  peptide (1)..(372): Ceres Seq. ID no. 12592133
MPKERKERSVSLDKYKRSPLCCEASLALKPSEKQVKEWEEARCPVCMEHPHNGILLICSSYENGCRPYMCDTSHRHSNCFDQFRKASKEKPSLSLLREEEESNEPTEMEDVDSDSTAVNLLGEAASEITVVDLSDGERGEEEVEEEEEEVVVEEEEEGIVTTEEDQEKNKPQKLTCPLCRGHIKEWVVVKAARCFMNSKHRSCSCETCDFSGSYSDLRKHARLLHPGVRPSEADPERQRSWRRLERQSDLGDLLSTLQSSFGGDEISNDDGFLFADTRLLTVYFLIRVFRPESSGSRSSSWSGTSRARTHTSGRRRSSRPASLWGESYEGNTGTSPRDEENNQSSDEQVSGTRRRRSRRRTVIDDDDEEEEP

SEQ ID NO: 50370 - protein, 326 aa, Arabidopsis thaliana
  peptide (1)..(326): Ceres Seq. ID no. 12592134
MEHPHNGILLICSSYENGCRPYMCDTSHRHSNCFDQFRKASKEKPSLSLLREEEESNEPTEMEDVDSDSTAVNLLGEAASEITVVDLSDGERGEEEVEEEEEEVVVEEEEEGIVTTEEDQEKNKPQKLTCPLCRGHIKEWVVVKAARCFMNSKHRSCSCETCDFSGSYSDLRKHARLLHPGVRPSEADPERQRSWRRLERQSDLGDLLSTLQSSFGGDEISNDDGFLFADTRLLTVYFLIRVFRPESSGSRSSSWSGTSRARTHTSGRRRSSRPASLWGESYEGNTGTSPRDEENNQSSDEQVSGTRRRRSRRRTVIDDDDEEEEP

SEQ ID NO: 50371 - protein, 304 aa, Arabidopsis thaliana
  peptide (1)..(304): Ceres Seq. ID no. 12592135
MCDTSHRHSNCFDQFRKASKEKPSLSLLREEEESNEPTEMEDVDSDSTAVNLLGEAASEITVVDLSDGERGEEEVEEEEEEVVVEEEEEGIVTTEEDQEKNKPQKLTCPLCRGHIKEWVVVKAARCFMNSKHRSCSCETCDFSGSYSDLRKHARLLHPGVRPSEADPERQRSWRRLERQSDLGDLLSTLQSSFGGDEISNDDGFLFADTRLLTVYFLIRVFRPESSGSRSSSWSGTSRARTHTSGRRRSSRPASLWGESYEGNTGTSPRDEENNQSSDEQVSGTRRRRSRRRTVIDDDDEEEEP

SEQ ID NO: 50372 - DNA, 1665 bp, Arabidopsis thaliana
  misc_feature (1)..(1665): Ceres Seq. ID no. 12575446
  misc_feature (1)..(1665): Ortholog of  Ceres SEQ ID NO 14306538 as cited in SEQ ID NO 53117
tttgtaaagtttttttttttcccaaatagtactttttttttgtttggccttcttatagaaagaagaactcaaagcacagagagaagatgagcgaagaacaaccacacgccaatctagcggttcccgcgtttaaaactgagaaagagcccataacgcaaacacgaaatggtcaaagtagcgtttggcgtttcggtggaagtgataaggcagcgaaagcatccaccgtaacgcttagaggtgtcatctacatgctcttcgacaactgcggcaaagacgtcaataagaccattttacccctcggccacggtgacccttccgtctacccttgcttccgtacctgtatcgaagctgaagacgccgtcgtcgacgtccttcgctccggcaaaggcaattcttacggtcccggagctgggattctccccgcaagacgagccgttgctgattatatgaaccgagatcttccgcacaagttaacgcctgaagatatttttctgaccgctggatgcaaccaagggatagagatcgtgttcgaatcgttggctcgaccaaacgcaaacatcttgctcccacgtcctggcttccctcactacgacgctcgtgctgcttacagtggtctcgaggttcgcaagtttgatcttcttcccgagaaagaatgggagattgatcttgaaggtatcgaagccattgcagacgagaacactgtggctatggttgtaattaaccccaacaatccctgtggaaatgtctactctcacgaccatctcaaaaaggttgcagagacggctaggaagctcgggataatggtgatctcagacgaagtatatgaccgaactatattcggagacaatccatttgtttcaatggggaagtttgcttcgatagtccctgtattgacactagcaggcatatctaagggatgggttgttcctggatggaaaattggctggatcgccttgaatgatcccgagggcgttttcgagaccaccaaggtgttacaatccatcaaacagaatcttgacgtaactcctgaccctgccacaataattcaggctgcacttccagcgatcctggagaaagcggacaaaaacttctttgcaaagaagaacaagatactcaaacataatgttgatttggtgtgtgataggctcaaggacatcccctgtgtcgtctgtcccaagaaacctgagtcttgcacttacttattgacaaagttggagctgtcactgatggataatatcaaggacgatatagatttttgcgtaaaactggccagagaggagaatctcgtgtttctaccaggggatgctctgggtttgaagaactggatgaggataaccatcggagtcgaagctcatatgcttgaggatgcacttgagagactgaagggtttctgtacacgtcatgccaagaagacagagacagaaactgagtcacttcaagctttgaaactgagtgataataatctcgaaatgtaaaacagaagaggatgtgtgtgcccaaaagaatattcttatgatagataattttgattcttgcttttccatttgatttcccaaagtatttgattatctacattaataaaaactatggttatttgtcaaatagcaatattgggaacataaatgaaggatctagcatccatgaaagagaatttctttgtttttg

SEQ ID NO: 50373 - protein, 462 aa, Arabidopsis thaliana
  peptide (1)..(462): Ceres Seq. ID no. 12575447
MSEEQPHANLAVPAFKTEKEPITQTRNGQSSVWRFGGSDKAAKASTVTLRGVIYMLFDNCGKDVNKTILPLGHGDPSVYPCFRTCIEAEDAVVDVLRSGKGNSYGPGAGILPARRAVADYMNRDLPHKLTPEDIFLTAGCNQGIEIVFESLARPNANILLPRPGFPHYDARAAYSGLEVRKFDLLPEKEWEIDLEGIEAIADENTVAMVVINPNNPCGNVYSHDHLKKVAETARKLGIMVISDEVYDRTIFGDNPFVSMGKFASIVPVLTLAGISKGWVVPGWKIGWIALNDPEGVFETTKVLQSIKQNLDVTPDPATIIQAALPAILEKADKNFFAKKNKILKHNVDLVCDRLKDIPCVVCPKKPESCTYLLTKLELSLMDNIKDDIDFCVKLAREENLVFLPGDALGLKNWMRITIGVEAHMLEDALERLKGFCTRHAKKTETETESLQALKLSDNNLEM

SEQ ID NO: 50374 - protein, 408 aa, Arabidopsis thaliana
  peptide (1)..(408): Ceres Seq. ID no. 12575448
MLFDNCGKDVNKTILPLGHGDPSVYPCFRTCIEAEDAVVDVLRSGKGNSYGPGAGILPARRAVADYMNRDLPHKLTPEDIFLTAGCNQGIEIVFESLARPNANILLPRPGFPHYDARAAYSGLEVRKFDLLPEKEWEIDLEGIEAIADENTVAMVVINPNNPCGNVYSHDHLKKVAETARKLGIMVISDEVYDRTIFGDNPFVSMGKFASIVPVLTLAGISKGWVVPGWKIGWIALNDPEGVFETTKVLQSIKQNLDVTPDPATIIQAALPAILEKADKNFFAKKNKILKHNVDLVCDRLKDIPCVVCPKKPESCTYLLTKLELSLMDNIKDDIDFCVKLAREENLVFLPGDALGLKNWMRITIGVEAHMLEDALERLKGFCTRHAKKTETETESLQALKLSDNNLEM

SEQ ID NO: 50375 - protein, 342 aa, Arabidopsis thaliana
  peptide (1)..(342): Ceres Seq. ID no. 12575449
MNRDLPHKLTPEDIFLTAGCNQGIEIVFESLARPNANILLPRPGFPHYDARAAYSGLEVRKFDLLPEKEWEIDLEGIEAIADENTVAMVVINPNNPCGNVYSHDHLKKVAETARKLGIMVISDEVYDRTIFGDNPFVSMGKFASIVPVLTLAGISKGWVVPGWKIGWIALNDPEGVFETTKVLQSIKQNLDVTPDPATIIQAALPAILEKADKNFFAKKNKILKHNVDLVCDRLKDIPCVVCPKKPESCTYLLTKLELSLMDNIKDDIDFCVKLAREENLVFLPGDALGLKNWMRITIGVEAHMLEDALERLKGFCTRHAKKTETETESLQALKLSDNNLEM

SEQ ID NO: 50376 - DNA, 1590 bp, Arabidopsis thaliana
  misc_feature (1)..(1590): Ceres Seq. ID no. 13588942
  misc_feature (1)..(1590): Ortholog of  Ceres SEQ ID NO 13495341 as cited in SEQ ID NO 68785
gaacttcccactcatagcaaaatgttagctcagtcgcacttcttctctaagtccttcgatctgattccgccacagtctccggcgttgcggtctgcaaatccttctcttcgtatctcttcttcttatagtaacagccgcttatcctttctttcttcttctgcaattgctgttcccgtctcccgccgtcggttttgcctgactatggcttcaaactcaaaacggcctaacataagcaacgagtctccttcggaacttagcgacactgagctggatcgattcgccgctgtgggaaatgcattagctgacgcttccggcgaggttatcagaaagtatttccggaagaaattcgacattgttgataaagatgatatgagccctgttacaatcgctgatcaaatggctgaagaggcaatggtttccattatattccagaatctcccttctcatgctatatatggtgaggagaagggttggagatgcaaagaggaatctgcagactatgtttgggttttggacccaatcgacggaacaaagagctttattacagggaaacccgtgtttggtacgctgattgctctgctctacaaaggtaaaccgattctaggactgattgatcagcctattctaaaagagagatggataggaatgaatggaagaagaactaaactaaacggggaggatatctcaacgcgatcttgccccaaattatcacaagcatatttatacaccactagcccacatcttttcagtgaagaggcagaaaaggcatattctcgagttagagacaaggtgaaagtgcccttatacggctgtgattgttatgcttacgctctcctggcttctggatttgtcgatcttgttattgaatccggtctaaagccatatgatttccttgctctggtgcctgtaatagaaggcgctggaggtaccataaccgattggactggtaaacgatttctgtgggaagcttcatccagtgcagttgcgacaagctttaatgtagttgcagcaggagattcagacattcatcagcaggctttggagtcacttgagtggcattgaaaagattcgctggagaggattatcaaggtactattcaggaaaagcgagatcattcatatgtatctcagatgtaaaatgccttgaggatctgaagaaaccaacccaaacttttgatgacgatgatgatgatgaggcttacaagaagaggaagaagaagaacaagcaatcatcttcatcttcattttctgcagctattaacagcaatgtgaatttctcaaactacccttgtcgaagggtctctagtagcacccactgttcctcaccttgtgttgcttaggaaaaaagaagcttacactttctcaatttatttagtagctcctttggtttttattctcaacccaacactgaaaacacaaacttcagttcagtgtgtgggggcgtcattcatatccaatttttgattttctttactgtttttatgtcttttttttgtggttatctttttttcttgcgcaaattatgtagatttggatgtgtttgttccaatttgcttattgggacaaaaatgttggaaatcctttcgaatgt

SEQ ID NO: 50377 - protein, 353 aa, Arabidopsis thaliana
  peptide (1)..(353): Ceres Seq. ID no. 13588943
ELPTHSKMLAQSHFFSKSFDLIPPQSPALRSANPSLRISSSYSNSRLSFLSSSAIAVPVSRRRFCLTMASNSKRPNISNESPSELSDTELDRFAAVGNALADASGEVIRKYFRKKFDIVDKDDMSPVTIADQMAEEAMVSIIFQNLPSHAIYGEEKGWRCKEESADYVWVLDPIDGTKSFITGKPVFGTLIALLYKGKPILGLIDQPILKERWIGMNGRRTKLNGEDISTRSCPKLSQAYLYTTSPHLFSEEAEKAYSRVRDKVKVPLYGCDCYAYALLASGFVDLVIESGLKPYDFLALVPVIEGAGGTITDWTGKRFLWEASSSAVATSFNVVAAGDSDIHQQALESLEWH

SEQ ID NO: 50378 - protein, 346 aa, Arabidopsis thaliana
  peptide (1)..(346): Ceres Seq. ID no. 13588944
MLAQSHFFSKSFDLIPPQSPALRSANPSLRISSSYSNSRLSFLSSSAIAVPVSRRRFCLTMASNSKRPNISNESPSELSDTELDRFAAVGNALADASGEVIRKYFRKKFDIVDKDDMSPVTIADQMAEEAMVSIIFQNLPSHAIYGEEKGWRCKEESADYVWVLDPIDGTKSFITGKPVFGTLIALLYKGKPILGLIDQPILKERWIGMNGRRTKLNGEDISTRSCPKLSQAYLYTTSPHLFSEEAEKAYSRVRDKVKVPLYGCDCYAYALLASGFVDLVIESGLKPYDFLALVPVIEGAGGTITDWTGKRFLWEASSSAVATSFNVVAAGDSDIHQQALESLEWH

SEQ ID NO: 50379 - protein, 286 aa, Arabidopsis thaliana
  peptide (1)..(286): Ceres Seq. ID no. 13588945
MASNSKRPNISNESPSELSDTELDRFAAVGNALADASGEVIRKYFRKKFDIVDKDDMSPVTIADQMAEEAMVSIIFQNLPSHAIYGEEKGWRCKEESADYVWVLDPIDGTKSFITGKPVFGTLIALLYKGKPILGLIDQPILKERWIGMNGRRTKLNGEDISTRSCPKLSQAYLYTTSPHLFSEEAEKAYSRVRDKVKVPLYGCDCYAYALLASGFVDLVIESGLKPYDFLALVPVIEGAGGTITDWTGKRFLWEASSSAVATSFNVVAAGDSDIHQQALESLEWH

SEQ ID NO: 50380 - DNA, 1835 bp, Arabidopsis thaliana
  misc_feature (1)..(1835): Ceres Seq. ID no. 13588200
  misc_feature (1)..(1835): Ortholog of  Ceres SEQ ID NO 13597407 as cited in SEQ ID NO 64106
tcacaactcttctttacccacttttcttatatctgctttccaaaacagagaaaccccaagaaaagaaaaagaaaaaagaaaagagaagaaagaagcaggaggagactttttggaatggagagacaaaagagcatggaaaaagggttactcaggaagagcttaagcatacgtgagagaaagttccctaacgaagacgctttcttagaatccggtttatcgaggaagtctccgcgagaggtcaagaaacctcaaaacgacgatggtgaatgtcgtgttaccgcctctgttttcctcagcacctttgttgccgtatcaggctccttctgtaccggttgtggcgttggtttttcatcgggtgcacaagcagggattaccaaagatttatctctctccgttgcagaatactcaatgttcgggtcgatcttgacattaggaggcttgatcggtgcagtattcagcggtaaagtcgctgatgtcttgggaagaaaacggacgatgttgttttgcgaattcttctgtatcacaggctggctttgtgtagcattggctcagaatgcaatgtggctggactgtggaagattgttacttggaatcggcgttggtatatttagctacgtgattccggtgtatatagccgaaattgcacctaaacatgtccgaggatcgtttgtgttcgccaatcagttgatgcaaaattgcggaatttcactcttcttcatcattggcaattttattccatggagactactaacagtagtcggattggtgccatgtgtgttccacgtcttttgtttatttttcatccccgaatctccaagatggctggcgaagttaggtcgtgataaagaatgccgatcttcgttgcaacgccttaggggatctgacgtcgatatttctcgtgaagcaaacacaattagagataccattgacatgacagaaaacggtggtgaaactaagatgtctgaattgtttcagagacgatacgcatatccgttaattatcggagttggtttaatgtttttgcaacaattgtgtgggagctccggtgttacctattatgctagtagcctcttcaacaaaggaggatttccaagtgctattggcacatccgtaatagccacaattatggttccaaaagcaatgctggcaacagtcctagtcgataaaatggggaggagaacgctcctaatggcttcttgttctgcaatgggtttgagtgctttgctcttaagtgtttcttacggtttccagtcgtttggcattcttccagaactcactcccatcttcacttgcatcggcgtcttgggtcacattgtgtcatttgccatgggaatgggaggactaccatggattataatggctgagatatttccgatgaatgtgaaagtgtcagctgggaccttagttactgtaaccaattggttatttggttggattatcacatacactttcaattttatgctagaatggaatgcatcaggaatgttcctcatcttctcaatggtctccgccagttcgatcgtatttatatactttttggtacctgagacaaaaggccgatcacttgaagaaatacaagcactgctcaacaactctgtgcaataatatcatttttctttttctttttgggtaaatgatcatatatataagtcgattgttgttatttggtgtgagtttgaatgtgatccgtgtgcgtatcaaattttggatgggaaatttgaaacagtaaaaatttgtatattcctcgtttgggaaaaatgtatgttttggttagttatatgcaaaaatgttgttgaagaagtttatacataaaaagttaaatacaaaaagatggt

SEQ ID NO: 50381 - protein, 534 aa, Arabidopsis thaliana
  peptide (1)..(534): Ceres Seq. ID no. 13588201
SQLFFTHFSYICFPKQRNPKKRKRKKKREERSRRRLFGMERQKSMEKGLLRKSLSIRERKFPNEDAFLESGLSRKSPREVKKPQNDDGECRVTASVFLSTFVAVSGSFCTGCGVGFSSGAQAGITKDLSLSVAEYSMFGSILTLGGLIGAVFSGKVADVLGRKRTMLFCEFFCITGWLCVALAQNAMWLDCGRLLLGIGVGIFSYVIPVYIAEIAPKHVRGSFVFANQLMQNCGISLFFIIGNFIPWRLLTVVGLVPCVFHVFCLFFIPESPRWLAKLGRDKECRSSLQRLRGSDVDISREANTIRDTIDMTENGGETKMSELFQRRYAYPLIIGVGLMFLQQLCGSSGVTYYASSLFNKGGFPSAIGTSVIATIMVPKAMLATVLVDKMGRRTLLMASCSAMGLSALLLSVSYGFQSFGILPELTPIFTCIGVLGHIVSFAMGMGGLPWIIMAEIFPMNVKVSAGTLVTVTNWLFGWIITYTFNFMLEWNASGMFLIFSMVSASSIVFIYFLVPETKGRSLEEIQALLNNSVQ

SEQ ID NO: 50382 - protein, 496 aa, Arabidopsis thaliana
  peptide (1)..(496): Ceres Seq. ID no. 13588202
MERQKSMEKGLLRKSLSIRERKFPNEDAFLESGLSRKSPREVKKPQNDDGECRVTASVFLSTFVAVSGSFCTGCGVGFSSGAQAGITKDLSLSVAEYSMFGSILTLGGLIGAVFSGKVADVLGRKRTMLFCEFFCITGWLCVALAQNAMWLDCGRLLLGIGVGIFSYVIPVYIAEIAPKHVRGSFVFANQLMQNCGISLFFIIGNFIPWRLLTVVGLVPCVFHVFCLFFIPESPRWLAKLGRDKECRSSLQRLRGSDVDISREANTIRDTIDMTENGGETKMSELFQRRYAYPLIIGVGLMFLQQLCGSSGVTYYASSLFNKGGFPSAIGTSVIATIMVPKAMLATVLVDKMGRRTLLMASCSAMGLSALLLSVSYGFQSFGILPELTPIFTCIGVLGHIVSFAMGMGGLPWIIMAEIFPMNVKVSAGTLVTVTNWLFGWIITYTFNFMLEWNASGMFLIFSMVSASSIVFIYFLVPETKGRSLEEIQALLNNSVQ

SEQ ID NO: 50383 - protein, 490 aa, Arabidopsis thaliana
  peptide (1)..(490): Ceres Seq. ID no. 13588203
MEKGLLRKSLSIRERKFPNEDAFLESGLSRKSPREVKKPQNDDGECRVTASVFLSTFVAVSGSFCTGCGVGFSSGAQAGITKDLSLSVAEYSMFGSILTLGGLIGAVFSGKVADVLGRKRTMLFCEFFCITGWLCVALAQNAMWLDCGRLLLGIGVGIFSYVIPVYIAEIAPKHVRGSFVFANQLMQNCGISLFFIIGNFIPWRLLTVVGLVPCVFHVFCLFFIPESPRWLAKLGRDKECRSSLQRLRGSDVDISREANTIRDTIDMTENGGETKMSELFQRRYAYPLIIGVGLMFLQQLCGSSGVTYYASSLFNKGGFPSAIGTSVIATIMVPKAMLATVLVDKMGRRTLLMASCSAMGLSALLLSVSYGFQSFGILPELTPIFTCIGVLGHIVSFAMGMGGLPWIIMAEIFPMNVKVSAGTLVTVTNWLFGWIITYTFNFMLEWNASGMFLIFSMVSASSIVFIYFLVPETKGRSLEEIQALLNNSVQ

SEQ ID NO: 50384 - DNA, 1544 bp, Arabidopsis thaliana
  misc_feature (1)..(1544): Ceres Seq. ID no. 12591491
  misc_feature (1)..(1544): Ortholog of  Ceres SEQ ID NO 13598326 as cited in SEQ ID NO 68812
gaaccgcttctccccggcttgacccttgtcgtactcgtcgatggctccggtgaagcagaagaagaagaataagaagaagcctctggataaggcgaagaagttggcgaagaataaagagaagaagagagtcaacgcagtgccattggatccggaggctatcgactgcgactggtgggatactttctggctccgaaactcttctccctcagtcccctcagacgaagactatgcgttcaagcacttctttagggcttctaagacaacttttagctacatttgctcgctcgtcagggaggaccttatctctagacctccctctggtctcatcaacatcgagggaaggcttcttagtgttgagaaacaagtcgccattgctcttcgaaggttagcttccggtgattctcaggtctccgttggtgctgcctttggtgttggccagtccactgtttctcaggttacatggagattcatcgaggcactcgaagaacgtgccaagcatcatcttagatggccagattctgaccgaattgaagagatcaagtcaaagttcgaggagatgtacggtctccccaattgctgcggagccattgacactacgcacatcatcatgactctcccggctgtgcaagcatcagatgactggtgtgaccaggagaagaactacagcatgttcttacaaggagtctttgatcacgagatgagatttctcaacatggttaccggctggcctggcggcatgaccgtctccaagcttctcaagttctctggcttcttcaaactctgtgaaaacgctcagattttagacggcaatcctaaaactctatcccaaggagcccagattagagaatacgttgttggagggatcagttacccgcttcttccctggcttataactcctcacgacagcgatcatccctctgattccatggtggcgttcaacgaaaggcatgagaaggtgaggtcagtcgcagctactgcctttcaacagcttaaaggaagctggaggattctgagcaaagttatgtggagaccagacaggaggaagctacctagtataatactggtgtgttgtttgttgcataacatcattatcgactgtggggattatcttcaagaagatgttcctttgtctggtcatcacgactccggttatgcagaccggtactgcaagcagaccgagccgcttggtagtgagctcagaggatgtctgactgagcatttgcttaggtgaggatcttaaccttgggaattggacatcttcatctcttctctaaggccgtactaagcccgttagaccattcagcatcagtttagtggtagcccgagacatatcggacaaaagcaatgttatgaaacttttcttcaggtatcaacaccagattaacatcatgccagttggacctacaaaaatagattcatccttaagtgtgattaccatactttgtgaactactaatcttttgagaggagtggactatatccccaacggaactgtttgttttggcaatgtaaatgttatttttttaataataattggtgttttct

SEQ ID NO: 50385 - protein, 396 aa, Arabidopsis thaliana
  peptide (1)..(396): Ceres Seq. ID no. 12591492
MAPVKQKKKNKKKPLDKAKKLAKNKEKKRVNAVPLDPEAIDCDWWDTFWLRNSSPSVPSDEDYAFKHFFRASKTTFSYICSLVREDLISRPPSGLINIEGRLLSVEKQVAIALRRLASGDSQVSVGAAFGVGQSTVSQVTWRFIEALEERAKHHLRWPDSDRIEEIKSKFEEMYGLPNCCGAIDTTHIIMTLPAVQASDDWCDQEKNYSMFLQGVFDHEMRFLNMVTGWPGGMTVSKLLKFSGFFKLCENAQILDGNPKTLSQGAQIREYVVGGISYPLLPWLITPHDSDHPSDSMVAFNERHEKVRSVAATAFQQLKGSWRILSKVMWRPDRRKLPSIILVCCLLHNIIIDCGDYLQEDVPLSGHHDSGYADRYCKQTEPLGSELRGCLTEHLLR

SEQ ID NO: 50386 - protein, 224 aa, Arabidopsis thaliana; identical to SEQ ID NO: 47604
  peptide (1)..(224): Ceres Seq. ID no. 12591493

SEQ ID NO: 50387 - protein, 207 aa, Arabidopsis thaliana; identical to SEQ ID NO: 47605
  peptide (1)..(207): Ceres Seq. ID no. 12591494

SEQ ID NO: 50388 - DNA, 1292 bp, Arabidopsis thaliana
  misc_feature (1)..(1292): Ceres Seq. ID no. 13648143
  misc_feature (1)..(1292): Ortholog of  Ceres SEQ ID NO 13656177 as cited in SEQ ID NO 64997
gagaaaggagtgctgattaaagatgaaggaaactgcaagtctggcagcgagaacatggggacagtgaaacaaagctgccatgagaagggctgcagcgatgaaaaacaaaccggggaaataaatcttgcttcggaggaagagacagatgatcaagattgctcctcgggatgttgtgtgaacgagggaacagtgaaacaaagcttcgatgagaagaagcattctgtgttggtggagaaggaaggtttggacatggaagctggtttctgttgtgatgccaagctggtttgttgtggaaacacagaaggtgaagtgaaggagcaatgtcgtctggagataaagaaagaagaacattgcaagtctggttgctgcggcgaggaaaaacaaaccggagaaatcactctggtttcagaggaagagacagagagcacgaattgttccacgggttgttgtgtggacaaagaagaagtgacacaaacctgtcatgagaagcctgctagcttggtggtatcaggcttggaagtgaagaaggatgagcattgtgagagctcacacagagccgtcaaggtagagacctgttgcaaagtgaagattccagaggcttgcgcatcaaaatgtagggacagagcgaagcgtcacagtggtaaaagctgttgcaggagttatgcaaaagagttatgcagccaccgccatcatcatcaccaccaccaccaccatcaccatgtgagtgcttgatggagattgattgaataacttaaactcttgatgcatccatctattcacattacgtttagtctcattccgtgaatgccgaaataaaaaacaaaatgttccagcaaaggcagtttattagattaagcaactgtgttattcatannanaaaaaaaaaaaaaaaaaaaaaaaaaaaaaaaaaaaaaaaaaaaaaaaaaaaaaaaaaaaaaaaaaaaaaaaaaaaaaaaaaaaaaaaaaaaaaaaaaaaaaaaaaaacccgggggggggcccggaaacaaaatcccccaaaaagggggggaaaaaaaaatcccggggccgcgtttaaaaaagggggaaagggaaaaaaccgggggtaaacaaaataaaaccccttgaaaaaaaacccccttttcccaagggggaaaaaaaaaaaaaagccccaaacaaacccccttcccaaaaattgccaaacctgaaggggaaaaggcaaatttaaacggtaaaaaatttgaaaaaaatccggaaaaaattttggaaaaacaacccatttttaaaaaaaaaaggcaaaaacggaaaaatccctt

SEQ ID NO: 50389 - protein, 243 aa, Arabidopsis thaliana
  peptide (1)..(243): Ceres Seq. ID no. 13648144
EKGVLIKDEGNCKSGSENMGTVKQSCHEKGCSDEKQTGEINLASEEETDDQDCSSGCCVNEGTVKQSFDEKKHSVLVEKEGLDMEAGFCCDAKLVCCGNTEGEVKEQCRLEIKKEEHCKSGCCGEEKQTGEITLVSEEETESTNCSTGCCVDKEEVTQTCHEKPASLVVSGLEVKKDEHCESSHRAVKVETCCKVKIPEACASKCRDRAKRHSGKSCCRSYAKELCSHRHHHHHHHHHHHVSA

SEQ ID NO: 50390 - protein, 225 aa, Arabidopsis thaliana
  peptide (1)..(225): Ceres Seq. ID no. 13648145
MGTVKQSCHEKGCSDEKQTGEINLASEEETDDQDCSSGCCVNEGTVKQSFDEKKHSVLVEKEGLDMEAGFCCDAKLVCCGNTEGEVKEQCRLEIKKEEHCKSGCCGEEKQTGEITLVSEEETESTNCSTGCCVDKEEVTQTCHEKPASLVVSGLEVKKDEHCESSHRAVKVETCCKVKIPEACASKCRDRAKRHSGKSCCRSYAKELCSHRHHHHHHHHHHHVSA

SEQ ID NO: 50391 - protein, 160 aa, Arabidopsis thaliana
  peptide (1)..(160): Ceres Seq. ID no. 13648146
MEAGFCCDAKLVCCGNTEGEVKEQCRLEIKKEEHCKSGCCGEEKQTGEITLVSEEETESTNCSTGCCVDKEEVTQTCHEKPASLVVSGLEVKKDEHCESSHRAVKVETCCKVKIPEACASKCRDRAKRHSGKSCCRSYAKELCSHRHHHHHHHHHHHVSA

SEQ ID NO: 50392 - DNA, 1570 bp, Arabidopsis thaliana
  misc_feature (1)..(1570): Ceres Seq. ID no. 13647746
  misc_feature (1)..(1570): Ortholog of  Ceres SEQ ID NO 13654451 as cited in SEQ ID NO 67881
aaacccagaccaaaaataatattctctcgattttttccagagcgtatattcaaattcttccaacaaaagtaaaaattaatctgattctctctactactactactactacgatgggtgagaaaaaggaagaaacggcgacgaaacctcaaggagagaagaaacctaccgatggtggaatcaccaccgtcgttatgaagcttgatatgcattgtgaaggttgcggcaaaaaaatcaaacgcatcttcaaacatttcaaaggtgtggaagatgtgaagattgattataagagtaacaaattgacggtgatcggaaacgtagatccagtggaagttcgtgataaagtggccgacaaaattaagagaccagtcgaacttgtctctacagtagcgccgccgaagaaagagacacctccttcatcaggcggtgcagagaagaagccttctccggcagcggaggagaaaccggctgagaagaaaccagccgccgttgagaaacccggtgagaaaaaagaagagaagaagaaagaggaaggagagaagaaagcttctcctccaccaccacctaaagagagtactgtggttttgaagaccaagttacattgtgaaggttgcgaacacaaaatcaaaagaatagtcaacaaaattaaaggggttaattcggttgctattgatagtgccaaggatttggttatagttaaggggatcattgacgtgaaacaactcactccttatcttaacgagaagcttaaacgcacggtggaagttgttccggccaaaaaggatgacggagcaccagtggcagctgcagcggcggctccagctggcggtgagaagaaggacaaagttgctggtgaaaagaaagagattaaagatgttggagaaaagaaagtcgacggtggtggtgagaagaagaaagaagttgctgttggcggcggtggaggaggagggggagggggaggagacggtggtgctatggatgtgaagaaatcggagtataacggttacggttatcctccacagccgatgtattactacccagaaggacaagtatacggtcaacaacattacatgatgcaaggtcaatcatcgcagtcgtatgtacaagaaccgtattcgaaccaaggatacgtgcaagaatcgtatatgaaccaaggttacggtcaagggtatggacaagaagcaccaccaccaccatatatgaaccaacaaggttacgcagatccttatggtcacatgcgtgcgcctgagttgtttagtgatgagaatccaaatgggtgttctgtgatgtgagtaaaacaaatggggaggaaaatgtaaataactaaaacaatatagggtgagaatgttagctatgacaaaaatggtatactacgaaagcacggaaacttccgagtccggtaatctaaaccggctggattggccggttagaaccggtttttgagaggcgtggattggttggttggtttatttcttttatataggtactataattttgtatcgtaatcatcttctgttttataanaaaaaaaaagaaaaaaaaaaaaaaaaaaaaactcgagggggggcccggt

SEQ ID NO: 50393 - protein, 428 aa, Arabidopsis thaliana
  peptide (1)..(428): Ceres Seq. ID no. 13647747
TQTKNNILSIFSRAYIQILPTKVKINLILSTTTTTTMGEKKEETATKPQGEKKPTDGGITTVVMKLDMHCEGCGKKIKRIFKHFKGVEDVKIDYKSNKLTVIGNVDPVEVRDKVADKIKRPVELVSTVAPPKKETPPSSGGAEKKPSPAAEEKPAEKKPAAVEKPGEKKEEKKKEEGEKKASPPPPPKESTVVLKTKLHCEGCEHKIKRIVNKIKGVNSVAIDSAKDLVIVKGIIDVKQLTPYLNEKLKRTVEVVPAKKDDGAPVAAAAAAPAGGEKKDKVAGEKKEIKDVGEKKVDGGGEKKKEVAVGGGGGGGGGGGDGGAMDVKKSEYNGYGYPPQPMYYYPEGQVYGQQHYMMQGQSSQSYVQEPYSNQGYVQESYMNQGYGQGYGQEAPPPPYMNQQGYADPYGHMRAPELFSDENPNGCSVM

SEQ ID NO: 50394 - protein, 392 aa, Arabidopsis thaliana
  peptide (1)..(392): Ceres Seq. ID no. 13647748
MGEKKEETATKPQGEKKPTDGGITTVVMKLDMHCEGCGKKIKRIFKHFKGVEDVKIDYKSNKLTVIGNVDPVEVRDKVADKIKRPVELVSTVAPPKKETPPSSGGAEKKPSPAAEEKPAEKKPAAVEKPGEKKEEKKKEEGEKKASPPPPPKESTVVLKTKLHCEGCEHKIKRIVNKIKGVNSVAIDSAKDLVIVKGIIDVKQLTPYLNEKLKRTVEVVPAKKDDGAPVAAAAAAPAGGEKKDKVAGEKKEIKDVGEKKVDGGGEKKKEVAVGGGGGGGGGGGDGGAMDVKKSEYNGYGYPPQPMYYYPEGQVYGQQHYMMQGQSSQSYVQEPYSNQGYVQESYMNQGYGQGYGQEAPPPPYMNQQGYADPYGHMRAPELFSDENPNGCSVM

SEQ ID NO: 50395 - protein, 365 aa, Arabidopsis thaliana
  peptide (1)..(365): Ceres Seq. ID no. 13647749
MKLDMHCEGCGKKIKRIFKHFKGVEDVKIDYKSNKLTVIGNVDPVEVRDKVADKIKRPVELVSTVAPPKKETPPSSGGAEKKPSPAAEEKPAEKKPAAVEKPGEKKEEKKKEEGEKKASPPPPPKESTVVLKTKLHCEGCEHKIKRIVNKIKGVNSVAIDSAKDLVIVKGIIDVKQLTPYLNEKLKRTVEVVPAKKDDGAPVAAAAAAPAGGEKKDKVAGEKKEIKDVGEKKVDGGGEKKKEVAVGGGGGGGGGGGDGGAMDVKKSEYNGYGYPPQPMYYYPEGQVYGQQHYMMQGQSSQSYVQEPYSNQGYVQESYMNQGYGQGYGQEAPPPPYMNQQGYADPYGHMRAPELFSDENPNGCSVM

SEQ ID NO: 50396 - DNA, 664 bp, Arabidopsis thaliana
  misc_feature (1)..(664): Ceres Seq. ID no. 12602318
  misc_feature (1)..(664): Ortholog of  Ceres SEQ ID NO 13597679 as cited in SEQ ID NO 65073
aacttacaagcaaaatggacaaaagatggagtctcaaaggtatgactgctcttgtgaccggtggagccagtggaatcggttatgccatagtagaagagttggctggttttggagctagaatccatgtatgtgacatctctgaagctaagctcaatcaaagtttaagcgaatgggaaaagaaaggttttcaagtaagtggctcagtttgtgatgtagcctctcgtcccgagagagaagaactgatgcaaaccgtctcctcgcagttcgatggcaaactcaacattcttgtaagcaatgtgggcgtaatccgctcaaagccaacaacagaatataccgaagacgatttcgcttttcatatatcatcaaacgtggaagctgcttaccattttagccagctttcacatcctctcctaaaggcttcaggctatggaagcatcatctttgtttcctctattgcaggggttatatcttttgacgctggatccatttatggtctaacaaaaggagctttgattcagctagctaaaaatttggcatgtgaatgggcaaaagacggcataagagccaacgctgttgcgcctaatgtcatcaatactcctctgtctcatcttatcttgaggacgtcagtttcaagaggcattgttgagtaggactccacttggtc

SEQ ID NO: 50397 - protein, 215 aa, Arabidopsis thaliana
  peptide (1)..(215): Ceres Seq. ID no. 12602319
LTSKMDKRWSLKGMTALVTGGASGIGYAIVEELAGFGARIHVCDISEAKLNQSLSEWEKKGFQVSGSVCDVASRPEREELMQTVSSQFDGKLNILVSNVGVIRSKPTTEYTEDDFAFHISSNVEAAYHFSQLSHPLLKASGYGSIIFVSSIAGVISFDAGSIYGLTKGALIQLAKNLACEWAKDGIRANAVAPNVINTPLSHLILRTSVSRGIVE

SEQ ID NO: 50398 - protein, 211 aa, Arabidopsis thaliana
  peptide (1)..(211): Ceres Seq. ID no. 12602320
MDKRWSLKGMTALVTGGASGIGYAIVEELAGFGARIHVCDISEAKLNQSLSEWEKKGFQVSGSVCDVASRPEREELMQTVSSQFDGKLNILVSNVGVIRSKPTTEYTEDDFAFHISSNVEAAYHFSQLSHPLLKASGYGSIIFVSSIAGVISFDAGSIYGLTKGALIQLAKNLACEWAKDGIRANAVAPNVINTPLSHLILRTSVSRGIVE

SEQ ID NO: 50399 - protein, 202 aa, Arabidopsis thaliana
  peptide (1)..(202): Ceres Seq. ID no. 12602321
MTALVTGGASGIGYAIVEELAGFGARIHVCDISEAKLNQSLSEWEKKGFQVSGSVCDVASRPEREELMQTVSSQFDGKLNILVSNVGVIRSKPTTEYTEDDFAFHISSNVEAAYHFSQLSHPLLKASGYGSIIFVSSIAGVISFDAGSIYGLTKGALIQLAKNLACEWAKDGIRANAVAPNVINTPLSHLILRTSVSRGIVE

SEQ ID NO: 50400 - DNA, 1041 bp, Arabidopsis thaliana
  misc_feature (1)..(1041): Ceres Seq. ID no. 12591497
  misc_feature (1)..(1041): Ortholog of  Ceres SEQ ID NO 13655992 as cited in SEQ ID NO 65504
  misc_feature (1)..(1041): Ortholog of  Ceres SEQ ID NO 13587581 as cited in SEQ ID NO 0
atggcgatcaagacaaagactagtctaattccaagttgttcatcacctgaggatctaaaacgcgttttgcaaacgctaggttcgagctggggagatgtagttgaagatctggagcgtcttgaggttgttccgttaaaaggagctatgactaacgaggtttatcagattaattggcctactttaaacggtgaagatgttcatcggaaagttcttgttcggatctacggtgacggcgttgaccttttctttaacagaggtgatgaaatcaaaacgtttgagtgtatgtctcatcatggttatggtcctaagcttcttggtcgtttctctgatggtcgtcttgaagaattcatacacgccagaactctttctgcagatgatcttcgtgtagcagaaacatctgatttcatcgctgcgaagctaagagagtttcataagcttgatatgcctggtccaaagaacgttcttctctgggaaagacttaggacttggcttaaggaggctaagaacttggcttcacctatagagatggataagtatcggttggaaggtttggaaaatgaaatcaatttgttggaagagagacttactcgggatgatcaagagattggtttctgtcacaacgatcttcagtatggaaatgtcatgattgatgaagtaaccaatgccattaccatcatagactatgagtattcgagtttcaacccaattgcttatgacattgcaaaccacttttgtgagatggctgctaattaccattcagacactcctcatgttctggactacactctatatccaggagaaggagaaaggagaaggttcattagcacatatcttggctctacagggaatgcaacaagtgataaagaagtagagaggttattgaaagatgcagagagctacactttagcaaaccatatcttctggggactatggggaatcatctcgggacatgtgaacaagattgagttcgattacatggaatatgcaaggcagagatttgaacagtactggcttagaaagcctttgcttcttgaaggatga

SEQ ID NO: 50401 - protein, 346 aa, Arabidopsis thaliana
  peptide (1)..(346): Ceres Seq. ID no. 12591498
MAIKTKTSLIPSCSSPEDLKRVLQTLGSSWGDVVEDLERLEVVPLKGAMTNEVYQINWPTLNGEDVHRKVLVRIYGDGVDLFFNRGDEIKTFECMSHHGYGPKLLGRFSDGRLEEFIHARTLSADDLRVAETSDFIAAKLREFHKLDMPGPKNVLLWERLRTWLKEAKNLASPIEMDKYRLEGLENEINLLEERLTRDDQEIGFCHNDLQYGNVMIDEVTNAITIIDYEYSSFNPIAYDIANHFCEMAANYHSDTPHVLDYTLYPGEGERRRFISTYLGSTGNATSDKEVERLLKDAESYTLANHIFWGLWGIISGHVNKIEFDYMEYARQRFEQYWLRKPLLLEG

SEQ ID NO: 50402 - protein, 298 aa, Arabidopsis thaliana
  peptide (1)..(298): Ceres Seq. ID no. 12591499
MTNEVYQINWPTLNGEDVHRKVLVRIYGDGVDLFFNRGDEIKTFECMSHHGYGPKLLGRFSDGRLEEFIHARTLSADDLRVAETSDFIAAKLREFHKLDMPGPKNVLLWERLRTWLKEAKNLASPIEMDKYRLEGLENEINLLEERLTRDDQEIGFCHNDLQYGNVMIDEVTNAITIIDYEYSSFNPIAYDIANHFCEMAANYHSDTPHVLDYTLYPGEGERRRFISTYLGSTGNATSDKEVERLLKDAESYTLANHIFWGLWGIISGHVNKIEFDYMEYARQRFEQYWLRKPLLLEG

SEQ ID NO: 50403 - protein, 252 aa, Arabidopsis thaliana
  peptide (1)..(252): Ceres Seq. ID no. 12591500
MSHHGYGPKLLGRFSDGRLEEFIHARTLSADDLRVAETSDFIAAKLREFHKLDMPGPKNVLLWERLRTWLKEAKNLASPIEMDKYRLEGLENEINLLEERLTRDDQEIGFCHNDLQYGNVMIDEVTNAITIIDYEYSSFNPIAYDIANHFCEMAANYHSDTPHVLDYTLYPGEGERRRFISTYLGSTGNATSDKEVERLLKDAESYTLANHIFWGLWGIISGHVNKIEFDYMEYARQRFEQYWLRKPLLLEG

SEQ ID NO: 50404 - DNA, 1970 bp, Arabidopsis thaliana
  misc_feature (1)..(1970): Ceres Seq. ID no. 13588950
  misc_feature (1)..(1970): Ortholog of  Ceres SEQ ID NO 14313228 as cited in SEQ ID NO 67057
atgggttgtgaggtttcaaagttatctgcactttgttgtgtttcagagtctggaagatcgaatcctgatgttacaggcttagatgaggaagggagaggtgaatcgaatgatttgcctcaatttcgtgagttctctatagagactataaggaacgcaacttcaggatttgcagcagagaatatagtttcagagcatggtgagagagctcctaatgttgtctataaaggcaagcttgagaatcaaagacgtattgctgtcaaaaggtttaaccggaaatcttggcctgattctcgtcaattcttggaagaagccaaagctgttggtcaattacggaatcataggatggcaaatctacttgggtgttgttatgaagatgaagagagactacttattgcagagtttatgcctaatgaaactttggcaaaacatcttttccactgggagtcacagccaatgaagtgggcgatgcgactgagagtagctttgcatattgctcaggcgctagagtattgtaccagcaaaggacgtgcactttaccatgacctaaatgcttatagagttctctttgatgatgatgcaaatccaagactttcatgctttggtttgatgaaaaacagtagagatggaaagagttatagcactaacctggcattcactcctcccgagtatctgaggacaggtcgcgtgacacctgaaagtgtaatatacagctttggaactctattacttgaccttctgagtggaaagcatatacctccaagccatgcgttggacctcatacgggacaggaacattcagatgctgatggattcaggtttggaaggtcaattttcgagtgacgatggaactgaattaataaggttagcttcaagatgcttgcaatatgaaccccgagagcggcctaacccaaaatctttagtctctgcaatgattcctcttcagaaagatcttgagattgcttctcatcaattgttgggcgtacctaacagtgccacaacgacagctctttcacctcttggcgaagcatgcctaagatcagatctaactgccatacatgagatcattgagaagcttggatataaggatgacgagggtgcaaccacagagctttctttccagatgtggaccgaccagatgcaggacacattggtcttcaagaaaaagggggattctgcattccgacataaagactttgcaaaggccatcgaatgctattctcagttcatcgaggtaggtacaatgggttccccaactgttcatgcaagacagagtctgtgttacctaatgaatgatatgcctagagaagcactaaacaatgcaatgcaagcacaagtcatatctcctgcttggcatatcgcatcgtatctccaagctgtagctttgtcagctctaggacaagagaacgaagcacacactgctctaaaagacggtgcaatgcttgaaagcaaaagaaaccctttgtgattataagcaacacaaagaggagaaactggagtacaagagaaatataaccatcctttacgctaacccatacacccgaagaaccactgtcgcaacattgtatttaagatcaaagcataacaagtctacagcgattgttcctttccgaagccttgatcatcacatcacattactggttagtctggtttttatttcagtttagtgctccattttgcaagatccgcggttcaagccactgtgattattcgattacagcgagtggactgtgtttattgttgttgtttaagttcaatggtgcagacgtgtttcgtatcatagagaagaaaagaagtgtctatggagatatgatgacaaaacttaaaaatgtatgattgtgacattgtgtattattcgctttaatgtaattcaatgtttgtattattgtatagaatgaagtatgaacctctctctgctataatgttattcccctccttttttttcttgaattttgcaaatgttgaaacgcttat

SEQ ID NO: 50405 - protein, 487 aa, Arabidopsis thaliana
  peptide (1)..(487): Ceres Seq. ID no. 13588951
MGCEVSKLSALCCVSESGRSNPDVTGLDEEGRGESNDLPQFREFSIETIRNATSGFAAENIVSEHGERAPNVVYKGKLENQRRIAVKRFNRKSWPDSRQFLEEAKAVGQLRNHRMANLLGCCYEDEERLLIAEFMPNETLAKHLFHWESQPMKWAMRLRVALHIAQALEYCTSKGRALYHDLNAYRVLFDDDANPRLSCFGLMKNSRDGKSYSTNLAFTPPEYLRTGRVTPESVIYSFGTLLLDLLSGKHIPPSHALDLIRDRNIQMLMDSGLEGQFSSDDGTELIRLASRCLQYEPRERPNPKSLVSAMIPLQKDLEIASHQLLGVPNSATTTALSPLGEACLRSDLTAIHEIIEKLGYKDDEGATTELSFQMWTDQMQDTLVFKKKGDSAFRHKDFAKAIECYSQFIEVGTMGSPTVHARQSLCYLMNDMPREALNNAMQAQVISPAWHIASYLQAVALSALGQENEAHTALKDGAMLESKRNPL

SEQ ID NO: 50406 - protein, 373 aa, Arabidopsis thaliana
  peptide (1)..(373): Ceres Seq. ID no. 13588952
MANLLGCCYEDEERLLIAEFMPNETLAKHLFHWESQPMKWAMRLRVALHIAQALEYCTSKGRALYHDLNAYRVLFDDDANPRLSCFGLMKNSRDGKSYSTNLAFTPPEYLRTGRVTPESVIYSFGTLLLDLLSGKHIPPSHALDLIRDRNIQMLMDSGLEGQFSSDDGTELIRLASRCLQYEPRERPNPKSLVSAMIPLQKDLEIASHQLLGVPNSATTTALSPLGEACLRSDLTAIHEIIEKLGYKDDEGATTELSFQMWTDQMQDTLVFKKKGDSAFRHKDFAKAIECYSQFIEVGTMGSPTVHARQSLCYLMNDMPREALNNAMQAQVISPAWHIASYLQAVALSALGQENEAHTALKDGAMLESKRNPL

SEQ ID NO: 50407 - protein, 353 aa, Arabidopsis thaliana
  peptide (1)..(353): Ceres Seq. ID no. 13588953
MPNETLAKHLFHWESQPMKWAMRLRVALHIAQALEYCTSKGRALYHDLNAYRVLFDDDANPRLSCFGLMKNSRDGKSYSTNLAFTPPEYLRTGRVTPESVIYSFGTLLLDLLSGKHIPPSHALDLIRDRNIQMLMDSGLEGQFSSDDGTELIRLASRCLQYEPRERPNPKSLVSAMIPLQKDLEIASHQLLGVPNSATTTALSPLGEACLRSDLTAIHEIIEKLGYKDDEGATTELSFQMWTDQMQDTLVFKKKGDSAFRHKDFAKAIECYSQFIEVGTMGSPTVHARQSLCYLMNDMPREALNNAMQAQVISPAWHIASYLQAVALSALGQENEAHTALKDGAMLESKRNPL

SEQ ID NO: 50408 - DNA, 1752 bp, Arabidopsis thaliana
  misc_feature (1)..(1752): Ceres Seq. ID no. 13648147
  misc_feature (1)..(1752): Ortholog of  Ceres SEQ ID NO 15179918 as cited in SEQ ID NO 57077
gataaaccatattaagaactagcttatagataaggatatggcctttacgaacgtttgcctatggacgctactcgccttcatgctgacttggacagtgttctacgtcacaaacagggggaagaaggcgacgcagttggcggatgcggtggttgaagagcgagaagacggtgctactgacgttatcatcgttggggctggagtaggcggctcggctctcgcatatgctcttgctaaggacgggcgtcgagtccatgtaatagagagggacctgagagaaccagagagaatcatgggtgagtttatgcaaccaggaggacgactcatgctctctaagcttggtcttgaagattgtttggagggaatagatgcccaaaaagccacgggcatgacagtttataaggacggaaaagaagcagtcgcatcttttcccgtggacaacaacaattttccttttgatccttcggctcgatcttttcacaatggccgattcgtccaacgattgcggcaaaaggcttcttctcttcccaatgtgcgcctggaagaaggaacggtgaagtctttgatagaagaaaaaggagtgatcaaaggagtgacatacaaaaatagcgcaggcgaagaaacaacagccttggcacctctcactgtagtatgcgacggttgctactcaaaccttcgccggtctcttaatgacaacaatgcggaggttctgtcataccaagttggttttatctcaaagaactgtcagcttgaagaacccgaaaagttaaagttgataatgtctaaaccctccttcaccatgttgtatcaaatcagcagcaccgacgttcgttgtgtttttgaagttctccccaacaacattccttctatttcaaatggtgaaatggctactttcgtgaagaacactattgctcctcaggtacctttaaaactccgcaaaatatttttgaaagggattgatgaaggagaacatataaaagccatgccaacaaagaagatgacagctactttgagcgagaagaaaggagtgattttattgggagatgcattcaacatgcgtcatccagcaatcgcatctggaatgatggttttattatctgacattctcattctacgccgtcttctccagccattaagcaaccttggcaatgcgcaaaaaatctcacaagttatcaagtccttttatgatatccgcaagccaatgtcagcgacagttaacacgttaggaaatgcattctctcaagtgctagttgcatcgacggacgaagcaaaagaggcaatgagacaaggttgctatgattacctctctagtggtgggtttcgcacgtcagggatgatggctttgctaggcggcatgaaccctcgtccgatctctctcatctatcatctatgtgctatcactctatcctccattggccatctactctctccatttccctctccccttcgcatttggcatagccttcgactttttggtttggctatgaaaatgttggttccccatctcaaggctgaaggagttagccaaatgttgtttccagtcaacgccgccgcgtatagcaaaagctatatggctgcaacggctctctaaaacactggtgctttaaactgcaaaatataacacatatataaatcacgaatctttgtgattctgcatatattgtgttctacaattattctcatataaatgaaaattgttctacgtaaaagtaaaaagaaggaattgtaatactaataaaacgagtttttaattct

SEQ ID NO: 50409 - protein, 516 aa, Arabidopsis thaliana
  peptide (1)..(516): Ceres Seq. ID no. 13648148
MAFTNVCLWTLLAFMLTWTVFYVTNRGKKATQLADAVVEEREDGATDVIIVGAGVGGSALAYALAKDGRRVHVIERDLREPERIMGEFMQPGGRLMLSKLGLEDCLEGIDAQKATGMTVYKDGKEAVASFPVDNNNFPFDPSARSFHNGRFVQRLRQKASSLPNVRLEEGTVKSLIEEKGVIKGVTYKNSAGEETTALAPLTVVCDGCYSNLRRSLNDNNAEVLSYQVGFISKNCQLEEPEKLKLIMSKPSFTMLYQISSTDVRCVFEVLPNNIPSISNGEMATFVKNTIAPQVPLKLRKIFLKGIDEGEHIKAMPTKKMTATLSEKKGVILLGDAFNMRHPAIASGMMVLLSDILILRRLLQPLSNLGNAQKISQVIKSFYDIRKPMSATVNTLGNAFSQVLVASTDEAKEAMRQGCYDYLSSGGFRTSGMMALLGGMNPRPISLIYHLCAITLSSIGHLLSPFPSPLRIWHSLRLFGLAMKMLVPHLKAEGVSQMLFPVNAAAYSKSYMAATAL

SEQ ID NO: 50410 - protein, 502 aa, Arabidopsis thaliana
  peptide (1)..(502): Ceres Seq. ID no. 13648149
MLTWTVFYVTNRGKKATQLADAVVEEREDGATDVIIVGAGVGGSALAYALAKDGRRVHVIERDLREPERIMGEFMQPGGRLMLSKLGLEDCLEGIDAQKATGMTVYKDGKEAVASFPVDNNNFPFDPSARSFHNGRFVQRLRQKASSLPNVRLEEGTVKSLIEEKGVIKGVTYKNSAGEETTALAPLTVVCDGCYSNLRRSLNDNNAEVLSYQVGFISKNCQLEEPEKLKLIMSKPSFTMLYQISSTDVRCVFEVLPNNIPSISNGEMATFVKNTIAPQVPLKLRKIFLKGIDEGEHIKAMPTKKMTATLSEKKGVILLGDAFNMRHPAIASGMMVLLSDILILRRLLQPLSNLGNAQKISQVIKSFYDIRKPMSATVNTLGNAFSQVLVASTDEAKEAMRQGCYDYLSSGGFRTSGMMALLGGMNPRPISLIYHLCAITLSSIGHLLSPFPSPLRIWHSLRLFGLAMKMLVPHLKAEGVSQMLFPVNAAAYSKSYMAATAL

SEQ ID NO: 50411 - protein, 432 aa, Arabidopsis thaliana
  peptide (1)..(432): Ceres Seq. ID no. 13648150
MGEFMQPGGRLMLSKLGLEDCLEGIDAQKATGMTVYKDGKEAVASFPVDNNNFPFDPSARSFHNGRFVQRLRQKASSLPNVRLEEGTVKSLIEEKGVIKGVTYKNSAGEETTALAPLTVVCDGCYSNLRRSLNDNNAEVLSYQVGFISKNCQLEEPEKLKLIMSKPSFTMLYQISSTDVRCVFEVLPNNIPSISNGEMATFVKNTIAPQVPLKLRKIFLKGIDEGEHIKAMPTKKMTATLSEKKGVILLGDAFNMRHPAIASGMMVLLSDILILRRLLQPLSNLGNAQKISQVIKSFYDIRKPMSATVNTLGNAFSQVLVASTDEAKEAMRQGCYDYLSSGGFRTSGMMALLGGMNPRPISLIYHLCAITLSSIGHLLSPFPSPLRIWHSLRLFGLAMKMLVPHLKAEGVSQMLFPVNAAAYSKSYMAATAL

SEQ ID NO: 50412 - DNA, 1650 bp, Arabidopsis thaliana
  misc_feature (1)..(1650): Ceres Seq. ID no. 13588592
  misc_feature (1)..(1650): Ortholog of  Ceres SEQ ID NO 13657822 as cited in SEQ ID NO 60754
aaatttatcggagcctccctccaaaattcaacaatggccacttctttaatgtctctgtcttcttcatttcttcaacctctgaaactcaaaaccctagcacaacccagaaacactgacttatctaccaccagaaaaatcataacaacatgcgattcccaaaacaacactggtaagtcaaaccccagcagcagaaaccctaatttccagaaacggcgaaactcctccaagtatgggacttctagaaggtcgatcctcaagaaatcgtttttacaagagcaagttactttcaccgcacgggtctctgatgacccccacgtggcaattatcggtggaggaatggcgggtttggtctgcgcattgaacctggaagctcgtggcgtccagtccacagttttcgatacggggatacatgggttaggaggaagacttggaacaagaattattgaaccacagggactaattttcgatcacgctgctcaattcttcaccgcggatgattctcggtttatcaaattggtcgatgggtggttagagaaaggacttgttcgagagtggaaaggtgccgtgggagagcttgaaattggaggtagcttctcacagtttccctcatcatcacctccaagatacattgctgctaatggcatgcgatctctcgctgattctttgctattagagagtcaaatggtgaatctggtaaggccttgttggatcagtaagttggaaccacttaatggtatgtggcatttaagtgagaatggaacacctcgtggtcagtttgatgtcatagttattgctcataatggtaaatgcgccaatcgcttgctttcagcatcaggcttgcccctagtggctaaacagatgaagaaactggatttgagttcaatatgggcgctattagcagcttttgatgatcctcttcccacagtgaactttgagggagcgtttgtgaaaggagttgaatcactgtcttggatgggaaataactctgcaaagcttggaaatggcagaactccaccacattgttggacttttttcagtactgcggcatatgggaaacagaacaaagttcctcaggaaaacatcccaacggtcacggcagagaaagttaaagccgggatgcttcaaggtgtggaaatcgcattggggttgcctgaaggctcacttcctaaaccggtttatacacgtctccagctatggggagcagctttgccgaagaacactcctgcagttccatgtatatttgatccacaaggccgtgctggtatatgcggtgattggcttctcggttctaacttagaatctgcagctataagcggtgcagccttaggaaaccatattgcggaattcttacagaacggtgaagctaatccagaagaatttgcaatcggtttacatgataggttaagtcctcttgctggccatgatattggtcagtttcctggtttaacatcagtgggagaaaaggaagaagctaatgcatatcagctgctgtgaatacatcagtctactgttacttgacgaaaaagctaagaagttttgcaaattaagcttacagtgatatcagtttctacttagaggctcaccattttcagcctccttcttcattggtgacaaaaccacagccgatttgaggtgctatatgaaacaaac

SEQ ID NO: 50413 - protein, 497 aa, Arabidopsis thaliana
  peptide (1)..(497): Ceres Seq. ID no. 13588593
KFIGASLQNSTMATSLMSLSSSFLQPLKLKTLAQPRNTDLSTTRKIITTCDSQNNTGKSNPSSRNPNFQKRRNSSKYGTSRRSILKKSFLQEQVTFTARVSDDPHVAIIGGGMAGLVCALNLEARGVQSTVFDTGIHGLGGRLGTRIIEPQGLIFDHAAQFFTADDSRFIKLVDGWLEKGLVREWKGAVGELEIGGSFSQFPSSSPPRYIAANGMRSLADSLLLESQMVNLVRPCWISKLEPLNGMWHLSENGTPRGQFDVIVIAHNGKCANRLLSASGLPLVAKQMKKLDLSSIWALLAAFDDPLPTVNFEGAFVKGVESLSWMGNNSAKLGNGRTPPHCWTFFSTAAYGKQNKVPQENIPTVTAEKVKAGMLQGVEIALGLPEGSLPKPVYTRLQLWGAALPKNTPAVPCIFDPQGRAGICGDWLLGSNLESAAISGAALGNHIAEFLQNGEANPEEFAIGLHDRLSPLAGHDIGQFPGLTSVGEKEEANAYQLL

SEQ ID NO: 50414 - protein, 486 aa, Arabidopsis thaliana
  peptide (1)..(486): Ceres Seq. ID no. 13588594
MATSLMSLSSSFLQPLKLKTLAQPRNTDLSTTRKIITTCDSQNNTGKSNPSSRNPNFQKRRNSSKYGTSRRSILKKSFLQEQVTFTARVSDDPHVAIIGGGMAGLVCALNLEARGVQSTVFDTGIHGLGGRLGTRIIEPQGLIFDHAAQFFTADDSRFIKLVDGWLEKGLVREWKGAVGELEIGGSFSQFPSSSPPRYIAANGMRSLADSLLLESQMVNLVRPCWISKLEPLNGMWHLSENGTPRGQFDVIVIAHNGKCANRLLSASGLPLVAKQMKKLDLSSIWALLAAFDDPLPTVNFEGAFVKGVESLSWMGNNSAKLGNGRTPPHCWTFFSTAAYGKQNKVPQENIPTVTAEKVKAGMLQGVEIALGLPEGSLPKPVYTRLQLWGAALPKNTPAVPCIFDPQGRAGICGDWLLGSNLESAAISGAALGNHIAEFLQNGEANPEEFAIGLHDRLSPLAGHDIGQFPGLTSVGEKEEANAYQLL

SEQ ID NO: 50415 - protein, 481 aa, Arabidopsis thaliana
  peptide (1)..(481): Ceres Seq. ID no. 13588595
MSLSSSFLQPLKLKTLAQPRNTDLSTTRKIITTCDSQNNTGKSNPSSRNPNFQKRRNSSKYGTSRRSILKKSFLQEQVTFTARVSDDPHVAIIGGGMAGLVCALNLEARGVQSTVFDTGIHGLGGRLGTRIIEPQGLIFDHAAQFFTADDSRFIKLVDGWLEKGLVREWKGAVGELEIGGSFSQFPSSSPPRYIAANGMRSLADSLLLESQMVNLVRPCWISKLEPLNGMWHLSENGTPRGQFDVIVIAHNGKCANRLLSASGLPLVAKQMKKLDLSSIWALLAAFDDPLPTVNFEGAFVKGVESLSWMGNNSAKLGNGRTPPHCWTFFSTAAYGKQNKVPQENIPTVTAEKVKAGMLQGVEIALGLPEGSLPKPVYTRLQLWGAALPKNTPAVPCIFDPQGRAGICGDWLLGSNLESAAISGAALGNHIAEFLQNGEANPEEFAIGLHDRLSPLAGHDIGQFPGLTSVGEKEEANAYQLL

SEQ ID NO: 50416 - DNA, 1543 bp, Arabidopsis thaliana
  misc_feature (1)..(1543): Ceres Seq. ID no. 12591501
  misc_feature (1)..(1543): Ortholog of  Ceres SEQ ID NO 13661195 as cited in SEQ ID NO 61007
gtgttttccagaaggaacacatgatgatgatatataaatcgccataaaacagcaaagagacaaacgaatagcagtcaccagagctacctctttaacgcttaaaggcctctcctttaaaatctcccggataattcttccaagtataaacccgtcgactcattcattcacgggtttcgtttctttcttctggaaaaggtttttggctgtgaagaagatgtttctccacagcagttttagagatggattgtcattgtctcttggtatcatcagtgttatcagttggggtgttgctgagatacctcagattatgactaattacagtgagaaatccactgaaggtctctctattaccttcttaacaacgtggatgattggggatatcttcaatcttcttggctgcttgatggaaccagctactcttccaacacaattctacatggcactgttgtatacagtgactacatcagttctctatgttcaatctatatattacggccatatctacccgcggttgaaaaacagaagagatcagatggttgaagcagaacgtatatcaaacataatcagcgatgttaaaattccgggcagatggagaaatagctctgatactactacttgtggtggtcaaaccacacctatcactatgattcctgggagtcaacgaactagttttaccggaagagaactattttacacgtcggcaagatctttgtcgagtagtcatacaccaccagctggatctgtcttagctcagagaatggctcgtggttacagtgaaccaactcttgaagagcccttgcttcctgaggatgtcacgcatccttccaccaaatcattgctttgcgtggtctcggtgttcttgtttcttggaacattcaaccttcccaatttgctaagtgaatcaagaactatggctttgggtgagggagatagagtatttgtagttcgagcagcaagaaagcttttgcaggtcactagcagcaacgtagcagaacatagcggtggagaaagcagcagaattggaatgtttttgggttgggcaatggcagccatatacatgggtggaaggcttccccaaatatgtctcaatatgaggagagggcatgttgagggattgaatccattgatgttcttctttgcattagttggcaatatgacttatgttgcaagcatactcgtgaacagtgtcgaatggttaaaacttgcaccgaatctaccatggcttgttgatgcaggaggatgtgttgtgcttgattttcttattctgcttcagtttttccacttccgctgtcgcaaagacaaagatactgacaagaagaagcatgaaaccgcagaagctgtctaaggcttgtgactacttcaacaaggcgtcaaagagatacaattttgatttgatctgaccagcaagattcatctcattctaattagttctttctttaatcggattgagttttcaatttttgtgctgatgaaactactcttggattttgagttttaataatataaagttgtttcaactccttagatatgaatgacttgcccc

SEQ ID NO: 50417 - protein, 376 aa, Arabidopsis thaliana
  peptide (1)..(376): Ceres Seq. ID no. 12591502
MFLHSSFRDGLSLSLGIISVISWGVAEIPQIMTNYSEKSTEGLSITFLTTWMIGDIFNLLGCLMEPATLPTQFYMALLYTVTTSVLYVQSIYYGHIYPRLKNRRDQMVEAERISNIISDVKIPGRWRNSSDTTTCGGQTTPITMIPGSQRTSFTGRELFYTSARSLSSSHTPPAGSVLAQRMARGYSEPTLEEPLLPEDVTHPSTKSLLCVVSVFLFLGTFNLPNLLSESRTMALGEGDRVFVVRAARKLLQVTSSNVAEHSGGESSRIGMFLGWAMAAIYMGGRLPQICLNMRRGHVEGLNPLMFFFALVGNMTYVASILVNSVEWLKLAPNLPWLVDAGGCVVLDFLILLQFFHFRCRKDKDTDKKKHETAEAV

SEQ ID NO: 50418 - protein, 345 aa, Arabidopsis thaliana
  peptide (1)..(345): Ceres Seq. ID no. 12591503
MTNYSEKSTEGLSITFLTTWMIGDIFNLLGCLMEPATLPTQFYMALLYTVTTSVLYVQSIYYGHIYPRLKNRRDQMVEAERISNIISDVKIPGRWRNSSDTTTCGGQTTPITMIPGSQRTSFTGRELFYTSARSLSSSHTPPAGSVLAQRMARGYSEPTLEEPLLPEDVTHPSTKSLLCVVSVFLFLGTFNLPNLLSESRTMALGEGDRVFVVRAARKLLQVTSSNVAEHSGGESSRIGMFLGWAMAAIYMGGRLPQICLNMRRGHVEGLNPLMFFFALVGNMTYVASILVNSVEWLKLAPNLPWLVDAGGCVVLDFLILLQFFHFRCRKDKDTDKKKHETAEAV

SEQ ID NO: 50419 - protein, 325 aa, Arabidopsis thaliana
  peptide (1)..(325): Ceres Seq. ID no. 12591504
MIGDIFNLLGCLMEPATLPTQFYMALLYTVTTSVLYVQSIYYGHIYPRLKNRRDQMVEAERISNIISDVKIPGRWRNSSDTTTCGGQTTPITMIPGSQRTSFTGRELFYTSARSLSSSHTPPAGSVLAQRMARGYSEPTLEEPLLPEDVTHPSTKSLLCVVSVFLFLGTFNLPNLLSESRTMALGEGDRVFVVRAARKLLQVTSSNVAEHSGGESSRIGMFLGWAMAAIYMGGRLPQICLNMRRGHVEGLNPLMFFFALVGNMTYVASILVNSVEWLKLAPNLPWLVDAGGCVVLDFLILLQFFHFRCRKDKDTDKKKHETAEAV

SEQ ID NO: 50420 - DNA, 1710 bp, Arabidopsis thaliana; identical to SEQ ID NO: 44104
  misc_feature (1)..(1710): Ceres Seq. ID no. 12488449
  misc_feature (1)..(1710): Ortholog of  Ceres SEQ ID NO 13594536 as cited in SEQ ID NO 51382
  misc_feature (1)..(1710): Ortholog of  Ceres SEQ ID NO 15172549 as cited in SEQ ID NO 57185

SEQ ID NO: 50421 - protein, 504 aa, Arabidopsis thaliana; identical to SEQ ID NO: 44105
  peptide (1)..(504): Ceres Seq. ID no. 12488450

SEQ ID NO: 50422 - protein, 480 aa, Arabidopsis thaliana; identical to SEQ ID NO: 44106
  peptide (1)..(480): Ceres Seq. ID no. 12488451

SEQ ID NO: 50423 - protein, 432 aa, Arabidopsis thaliana; identical to SEQ ID NO: 44107
  peptide (1)..(432): Ceres Seq. ID no. 12488452

SEQ ID NO: 50424 - DNA, 809 bp, Arabidopsis thaliana
  misc_feature (1)..(809): Ceres Seq. ID no. 13588817
  misc_feature (1)..(809): Ortholog of  Ceres SEQ ID NO 13598613 as cited in SEQ ID NO 65582
  misc_feature (1)..(809): Ortholog of  Ceres SEQ ID NO 12635635 as cited in SEQ ID NO 0
agttggactgaaggagaaagaacggcggagaaggagattacggcgatagtgtttgatctgtcatctatggaagcggtagaaaaacccgaagaaacaatcccagggaattcttcaagattagctggaaatcccaactggggaacagcaactgttgttggagtatttgcaggattgctatatggagggagcaaagaagcttctgcttctgtgagcaaagatgcagaagtgatgttgaagatgggtagtacacaggataagcgtgaacaacacaggttgatgcgagatgcaatggagaaaaggttcatccgagtaactcgtggctccctcattggagggatgcgtcttggaatgttcactgcttccttctttagtctacaaaactttttagctgagacccgaggagtgcatgatgttttcaatgtggttggagctggttcagctactgctgcagtttttggcctaatcatgccggggtctcttgcttggcgtgcgcggaatgtgttgcttggttcagttcttggagccacagtgtgcttccctcttgggtgggtacaactgaagctcatgaagaaagcaaacgaaggcaataacgttgacacaggccaccacggtgaggtcacgagtggtgttggtgcagccattgagagactcgaacaacagttgagaaaataaagaagggaacgcgcacagttttgtatgctaaattcgcttctctgaagcaaatgagaataagataccaaacagaaacagtgtgttcttgtgtaattgcaacaattttcgaatatacaaaaatatcaaaacattgatgg

SEQ ID NO: 50425 - protein, 223 aa, Arabidopsis thaliana
  peptide (1)..(223): Ceres Seq. ID no. 13588818
SWTEGERTAEKEITAIVFDLSSMEAVEKPEETIPGNSSRLAGNPNWGTATVVGVFAGLLYGGSKEASASVSKDAEVMLKMGSTQDKREQHRLMRDAMEKRFIRVTRGSLIGGMRLGMFTASFFSLQNFLAETRGVHDVFNVVGAGSATAAVFGLIMPGSLAWRARNVLLGSVLGATVCFPLGWVQLKLMKKANEGNNVDTGHHGEVTSGVGAAIERLEQQLRK

SEQ ID NO: 50426 - protein, 201 aa, Arabidopsis thaliana
  peptide (1)..(201): Ceres Seq. ID no. 13588819
MEAVEKPEETIPGNSSRLAGNPNWGTATVVGVFAGLLYGGSKEASASVSKDAEVMLKMGSTQDKREQHRLMRDAMEKRFIRVTRGSLIGGMRLGMFTASFFSLQNFLAETRGVHDVFNVVGAGSATAAVFGLIMPGSLAWRARNVLLGSVLGATVCFPLGWVQLKLMKKANEGNNVDTGHHGEVTSGVGAAIERLEQQLRK

SEQ ID NO: 50427 - protein, 147 aa, Arabidopsis thaliana
  peptide (1)..(147): Ceres Seq. ID no. 13588820
MLKMGSTQDKREQHRLMRDAMEKRFIRVTRGSLIGGMRLGMFTASFFSLQNFLAETRGVHDVFNVVGAGSATAAVFGLIMPGSLAWRARNVLLGSVLGATVCFPLGWVQLKLMKKANEGNNVDTGHHGEVTSGVGAAIERLEQQLRK

SEQ ID NO: 50428 - DNA, 1765 bp, Arabidopsis thaliana
  misc_feature (1)..(1765): Ceres Seq. ID no. 13588825
  misc_feature (1)..(1765): Ortholog of  Ceres SEQ ID NO 14311854 as cited in SEQ ID NO 51455
  misc_feature (1)..(1765): Ortholog of  Ceres SEQ ID NO 14313097 as cited in SEQ ID NO 58902
ccttttatctgtagatttttttgcagtaaaaaaaagaaaaaacagaaacatttttaactatttatctcttcttcttcatctccttcgtccttgaagcttaaactagcgcactccagtaaaagcagaggagaagagaagagagacggcgcagagtagcattgacatgcgaaatgtgcctctcagaattcttatcctacgcctgtttcaatttcttctccaccatgaaagttttctgattgctctttcctcagaaattttgaagcttcgtagtttcttctgcattcctcgcaatgcattggattacgagattctctgctttcttctccgccgcattagccatgattctcctttctccttcgctccaatccttttctccggcggcagctatccgatcatctcacccctacgccgacgaattcaaaccccaacaaaactccgattactcctccttcagagaatctccaatgttccgtaacgccgaacaatgcagatcttccggcgaagattccggcgtctgtaaccctaatctcgtccacgtagccatcactctcgacatcgattacctccgtggctcaatcgcagccgtcaattcgatcctccagcactcaatgtgccctcaaagcgtcttcttccacttcctcgtctcctccgagtctcaaaacctagaatctctgattcgttctactttccccaaattgacgaatctcaaaatttactattttgcccctgagaccgtacagtctttgatttcatcttccgtgagacaagccctagagcaaccgttgaattacgccagaaattacttggcggatctgctcgagccttgcgttaagcgagtcatctacttggattcggatctcgtcgtcgtcgatgatatcgtcaagctttggaaaacgggtttaggccagagaacaatcggagctccggagtattgtcacgcgaatttcacgaaatacttcaccggaggtttttggtcagataagaggtttaacgggacgttcaaagggaggaacccttgttacttcaatactggtgtaatggtgattgatttgaagaagtggagacaatttaggttcacgaaacgaattgagaaatggatggagattcagaagatagagaggatttatgagcttggttctcttcctccgtttcttctggtatttgctggtcatgtagctccgatttcacatcggtggaatcaacatgggcttggtggtgataatgttagaggtagttgccgtgatttgcattctggtcctgtgagtttgcttcactggtcaggtagtggtaagccatggttaagactcgattccaagcttccatgtcctttagacacattgtgggcaccttatgatttgtataaacactcccattgatgccaatttcgagttcgacatattcatggtcatggggactaaaccgaagatagcagagttgcaatggtggttttcaactggaaacaactatgttgaagattgagtaaaccctgccggaacagagtgctatagtagtgttgcttcggacagttcaaccagaccgtagacacaatttagaagagtgaacttcgttttaagtgttgtaccggcggttaaatatgttcttgtgggaagaaaaaaaataaaaatatagttaggtcattcacacatagctcaggttaaagcgtttttgttgtttatgattggtcctataagtaattttgtgcagactctagtccttactttggttctcaaaagtctttagaaatctatggttaaagattttacct

SEQ ID NO: 50429 - protein, 361 aa, Arabidopsis thaliana
  peptide (1)..(361): Ceres Seq. ID no. 13588826
MHWITRFSAFFSAALAMILLSPSLQSFSPAAAIRSSHPYADEFKPQQNSDYSSFRESPMFRNAEQCRSSGEDSGVCNPNLVHVAITLDIDYLRGSIAAVNSILQHSMCPQSVFFHFLVSSESQNLESLIRSTFPKLTNLKIYYFAPETVQSLISSSVRQALEQPLNYARNYLADLLEPCVKRVIYLDSDLVVVDDIVKLWKTGLGQRTIGAPEYCHANFTKYFTGGFWSDKRFNGTFKGRNPCYFNTGVMVIDLKKWRQFRFTKRIEKWMEIQKIERIYELGSLPPFLLVFAGHVAPISHRWNQHGLGGDNVRGSCRDLHSGPVSLLHWSGSGKPWLRLDSKLPCPLDTLWAPYDLYKHSH

SEQ ID NO: 50430 - protein, 345 aa, Arabidopsis thaliana
  peptide (1)..(345): Ceres Seq. ID no. 13588827
MILLSPSLQSFSPAAAIRSSHPYADEFKPQQNSDYSSFRESPMFRNAEQCRSSGEDSGVCNPNLVHVAITLDIDYLRGSIAAVNSILQHSMCPQSVFFHFLVSSESQNLESLIRSTFPKLTNLKIYYFAPETVQSLISSSVRQALEQPLNYARNYLADLLEPCVKRVIYLDSDLVVVDDIVKLWKTGLGQRTIGAPEYCHANFTKYFTGGFWSDKRFNGTFKGRNPCYFNTGVMVIDLKKWRQFRFTKRIEKWMEIQKIERIYELGSLPPFLLVFAGHVAPISHRWNQHGLGGDNVRGSCRDLHSGPVSLLHWSGSGKPWLRLDSKLPCPLDTLWAPYDLYKHSH

SEQ ID NO: 50431 - protein, 303 aa, Arabidopsis thaliana
  peptide (1)..(303): Ceres Seq. ID no. 13588828
MFRNAEQCRSSGEDSGVCNPNLVHVAITLDIDYLRGSIAAVNSILQHSMCPQSVFFHFLVSSESQNLESLIRSTFPKLTNLKIYYFAPETVQSLISSSVRQALEQPLNYARNYLADLLEPCVKRVIYLDSDLVVVDDIVKLWKTGLGQRTIGAPEYCHANFTKYFTGGFWSDKRFNGTFKGRNPCYFNTGVMVIDLKKWRQFRFTKRIEKWMEIQKIERIYELGSLPPFLLVFAGHVAPISHRWNQHGLGGDNVRGSCRDLHSGPVSLLHWSGSGKPWLRLDSKLPCPLDTLWAPYDLYKHSH

SEQ ID NO: 50432 - DNA, 1659 bp, Arabidopsis thaliana
  misc_feature (1)..(1659): Ceres Seq. ID no. 12591509
  misc_feature (1)..(1659): Ortholog of  Ceres SEQ ID NO 13503610 as cited in SEQ ID NO 62416
  misc_feature (1)..(1659): Ortholog of  Ceres SEQ ID NO 13657610 as cited in SEQ ID NO 66165
  misc_feature (1)..(1659): Ortholog of  Ceres SEQ ID NO 13598312 as cited in SEQ ID NO 68448
  misc_feature (1)..(1659): Ortholog of  Ceres SEQ ID NO 13596100 as cited in SEQ ID NO 68573
atgaatgagaatcacattcaaagtgatcacatgaacaacaccattcatgtaacaaacaaaaaactcccaaacttcctcttatccgtacgtctcaaatatgttaaacttggttaccattacctaatctcgaatgccgtctacattctcatactccccgtcggcctcctcgccgcaacctcctcctcctttagtctcaccgatctcacactcttatacaaccaccttctcaaattccacttcctctcttccactctcttcgccgctcttcttatctttctaaccaccctctacttcacaactcgtcctcgcagaatctttctcctcgatttcgcttgttacaaacccgactcttctctaatatgcacacgagaaacgttcatggaccggtctcagcgtgtcggtatcttcacagaagacaacctcgctttccaacaaaagatcctcgaacgttccggtcttggacaaaagacttacttcccggaggctctcttacgtgtcccgcctaatccttgtatgtctgaagcaaggaaagaagccgagacggttatgtttggagctatagacgcagtgcttgagaaaaccggagtgaatcctaaggatattgggatacttgtcgtgaattgtagcttgtttaatccgacgccttcgttatcggctatgatcgtgaataaatataagctcagaggaaacgttttgagctataaccttggtggaatgggttgtagtgctggtcttatctccattgatctcgctaaacagcttcttcaggttcaaccaaattcatatgcactagtagtgagcacagagaacataaccctaaactggtatttaggcaacgaccgatcaatgcttctctcaaactgcatcttccgaatgggtggcgccgccgttctcctctctaaccgctcctccgaccgctgccgctccaaataccaactcatccacaccgtccgtacacacaaaggatctgacgacaacgcctttaactgcgtttaccaacgcgaagacaacgacgacaacaaacaaatcggtgtctcactttccaaaaacctaatggctatagctggagaagctctcaagacgaacataaccactctgggaccgctagttctaccaatgtctgaacaacttctctttttcgcaacactagtggcgcgaaaagtctttaatgtgaagaaaataaaaccttatattcctgatttcaagctagctttcgagcacttctgcatccacgcgggaggcagagcagtgctcgatgagattgagaagaatttggatttatctgagtggcatatggaaccttcgaggatgactttgaaccggtttggaaatacttcgagtagctcgctttggtatgagcttgcgtatagtgaggctaaaggaaggattaagagaggagataggacttggcagattgcttttggatccggttttaagtgtaatagtgcggtttggagagctttgagaactatcgatccgtccaaggagaagaagaagaagactaatccttggattgatgagattcatgagtttcccgtgccggttccaaggacatctccggtgacatcttcctcggaatctcgatagttaacttttttaaattttctttcatgtataatactatggttcacatcacatctatctcaaaatcttcaatcc

SEQ ID NO: 50433 - protein, 528 aa, Arabidopsis thaliana
  peptide (1)..(528): Ceres Seq. ID no. 12591510
MNENHIQSDHMNNTIHVTNKKLPNFLLSVRLKYVKLGYHYLISNAVYILILPVGLLAATSSSFSLTDLTLLYNHLLKFHFLSSTLFAALLIFLTTLYFTTRPRRIFLLDFACYKPDSSLICTRETFMDRSQRVGIFTEDNLAFQQKILERSGLGQKTYFPEALLRVPPNPCMSEARKEAETVMFGAIDAVLEKTGVNPKDIGILVVNCSLFNPTPSLSAMIVNKYKLRGNVLSYNLGGMGCSAGLISIDLAKQLLQVQPNSYALVVSTENITLNWYLGNDRSMLLSNCIFRMGGAAVLLSNRSSDRCRSKYQLIHTVRTHKGSDDNAFNCVYQREDNDDNKQIGVSLSKNLMAIAGEALKTNITTLGPLVLPMSEQLLFFATLVARKVFNVKKIKPYIPDFKLAFEHFCIHAGGRAVLDEIEKNLDLSEWHMEPSRMTLNRFGNTSSSSLWYELAYSEAKGRIKRGDRTWQIAFGSGFKCNSAVWRALRTIDPSKEKKKKTNPWIDEIHEFPVPVPRTSPVTSSSESR

SEQ ID NO: 50434 - protein, 518 aa, Arabidopsis thaliana
  peptide (1)..(518): Ceres Seq. ID no. 12591511
MNNTIHVTNKKLPNFLLSVRLKYVKLGYHYLISNAVYILILPVGLLAATSSSFSLTDLTLLYNHLLKFHFLSSTLFAALLIFLTTLYFTTRPRRIFLLDFACYKPDSSLICTRETFMDRSQRVGIFTEDNLAFQQKILERSGLGQKTYFPEALLRVPPNPCMSEARKEAETVMFGAIDAVLEKTGVNPKDIGILVVNCSLFNPTPSLSAMIVNKYKLRGNVLSYNLGGMGCSAGLISIDLAKQLLQVQPNSYALVVSTENITLNWYLGNDRSMLLSNCIFRMGGAAVLLSNRSSDRCRSKYQLIHTVRTHKGSDDNAFNCVYQREDNDDNKQIGVSLSKNLMAIAGEALKTNITTLGPLVLPMSEQLLFFATLVARKVFNVKKIKPYIPDFKLAFEHFCIHAGGRAVLDEIEKNLDLSEWHMEPSRMTLNRFGNTSSSSLWYELAYSEAKGRIKRGDRTWQIAFGSGFKCNSAVWRALRTIDPSKEKKKKTNPWIDEIHEFPVPVPRTSPVTSSSESR

SEQ ID NO: 50435 - protein, 402 aa, Arabidopsis thaliana
  peptide (1)..(402): Ceres Seq. ID no. 12591512
MDRSQRVGIFTEDNLAFQQKILERSGLGQKTYFPEALLRVPPNPCMSEARKEAETVMFGAIDAVLEKTGVNPKDIGILVVNCSLFNPTPSLSAMIVNKYKLRGNVLSYNLGGMGCSAGLISIDLAKQLLQVQPNSYALVVSTENITLNWYLGNDRSMLLSNCIFRMGGAAVLLSNRSSDRCRSKYQLIHTVRTHKGSDDNAFNCVYQREDNDDNKQIGVSLSKNLMAIAGEALKTNITTLGPLVLPMSEQLLFFATLVARKVFNVKKIKPYIPDFKLAFEHFCIHAGGRAVLDEIEKNLDLSEWHMEPSRMTLNRFGNTSSSSLWYELAYSEAKGRIKRGDRTWQIAFGSGFKCNSAVWRALRTIDPSKEKKKKTNPWIDEIHEFPVPVPRTSPVTSSSESR

SEQ ID NO: 50436 - DNA, 1653 bp, Arabidopsis thaliana
  misc_feature (1)..(1653): Ceres Seq. ID no. 13593518
  misc_feature (1)..(1653): Ortholog of  Ceres SEQ ID NO 13657240 as cited in SEQ ID NO 66177
gaggagatagaagagtagggcaaagctctttcgattaaaaaaaaaaaaaaacacttcaagagattacttatggcggaagaggcgatactagggttccttcagaacaatgaacagatcactgattcgggtcaattctctgccgagttcaacatcgaccacaacgaactcgtcaatgtcatcaaaagtctccatggttttcgttacatcgatgttcaggacattaaaaaggagacatggattctgactgatgaagggaagaaatatgcggcagaagggtcaccagaggttcaacttttcttagctgttcctgaagaaggcagcatatcaaaagatgagctccagaaaaagttagctcctgcagtcttcaagatcggctgttctcaagctggaaaaaacaagtgggtggaaatgggaaagcaagtctcgaggaaggttaaagatgtagaagataaagtgaaaggccagcttttacaaatacaacaagggaaggaatttgacaaagaaagtatcaattctcttaaagccagaaaactcatagtaccacagatatggaaggggtattccgtaaagaaaggtcctaattatgctcccgagagaaagaaagtggctaccgatttgactcgagaaaatcttcaaaactggaaagagttagagtttaaggagtataacttcaaagctaaaggagcgcctgttgacgctgggcatcttcacgctcttctcaaggtgcggaagcagtttaaagacatatttgttcagatggggtttgaggagatgccaacaaacaactatgtggagagcagcttctggaattttgatgctttgttccagcctcagcagcaccctgctcgtgattctcatgacaccttctttctaaaagttccctctactacaagaacacttccggaagattatgttgagagggtgaaacgtgttcatgagtctggtggttatggatcaagagggtataattatgattggaaaagagaagaagcaaacaagaatcttcttcgtacccacacaacggctgtctcatctaggatgctttatgcactagcacagaaaccttttgtgcccaagaagtacttttcgattgaccgtgtcttcagaaacgaggctgttgatcggacccaccttgcagagttccatcaaattgaaggtttgatatgtgatcggggccttacacttggagacctgattggtgtattagaagacttcttctcacgcttagggatgtcgaaattgcgtttcaagccagcttacaacccttacacagagccaagcatggagattttcagctaccatgaaggtttagggaagtgggtggagattggaaactctgggatgttcagacccgaaatgcttctaccgatgggtctccccgaggatgttagagtcatcgcttggggtctctctcttgaaagaccaacaatgatattatacggtatcgacaacatccgagatttgtttggacacaaggtggatctcgatcttattaaacggaatccgatctgccgaattggaatctaagtgatatattttgattgtctttttgattcaagatactctatttggttatctcttggtattttcaattctacctttggttactggactttacaattccatcttaaacgtgtgtacactcttaattgc

SEQ ID NO: 50437 - protein, 485 aa, Arabidopsis thaliana
  peptide (1)..(485): Ceres Seq. ID no. 13593519
MAEEAILGFLQNNEQITDSGQFSAEFNIDHNELVNVIKSLHGFRYIDVQDIKKETWILTDEGKKYAAEGSPEVQLFLAVPEEGSISKDELQKKLAPAVFKIGCSQAGKNKWVEMGKQVSRKVKDVEDKVKGQLLQIQQGKEFDKESINSLKARKLIVPQIWKGYSVKKGPNYAPERKKVATDLTRENLQNWKELEFKEYNFKAKGAPVDAGHLHALLKVRKQFKDIFVQMGFEEMPTNNYVESSFWNFDALFQPQQHPARDSHDTFFLKVPSTTRTLPEDYVERVKRVHESGGYGSRGYNYDWKREEANKNLLRTHTTAVSSRMLYALAQKPFVPKKYFSIDRVFRNEAVDRTHLAEFHQIEGLICDRGLTLGDLIGVLEDFFSRLGMSKLRFKPAYNPYTEPSMEIFSYHEGLGKWVEIGNSGMFRPEMLLPMGLPEDVRVIAWGLSLERPTMILYGIDNIRDLFGHKVDLDLIKRNPICRIGI

SEQ ID NO: 50438 - protein, 372 aa, Arabidopsis thaliana
  peptide (1)..(372): Ceres Seq. ID no. 13593520
MGKQVSRKVKDVEDKVKGQLLQIQQGKEFDKESINSLKARKLIVPQIWKGYSVKKGPNYAPERKKVATDLTRENLQNWKELEFKEYNFKAKGAPVDAGHLHALLKVRKQFKDIFVQMGFEEMPTNNYVESSFWNFDALFQPQQHPARDSHDTFFLKVPSTTRTLPEDYVERVKRVHESGGYGSRGYNYDWKREEANKNLLRTHTTAVSSRMLYALAQKPFVPKKYFSIDRVFRNEAVDRTHLAEFHQIEGLICDRGLTLGDLIGVLEDFFSRLGMSKLRFKPAYNPYTEPSMEIFSYHEGLGKWVEIGNSGMFRPEMLLPMGLPEDVRVIAWGLSLERPTMILYGIDNIRDLFGHKVDLDLIKRNPICRIGI

SEQ ID NO: 50439 - protein, 256 aa, Arabidopsis thaliana
  peptide (1)..(256): Ceres Seq. ID no. 13593521
MGFEEMPTNNYVESSFWNFDALFQPQQHPARDSHDTFFLKVPSTTRTLPEDYVERVKRVHESGGYGSRGYNYDWKREEANKNLLRTHTTAVSSRMLYALAQKPFVPKKYFSIDRVFRNEAVDRTHLAEFHQIEGLICDRGLTLGDLIGVLEDFFSRLGMSKLRFKPAYNPYTEPSMEIFSYHEGLGKWVEIGNSGMFRPEMLLPMGLPEDVRVIAWGLSLERPTMILYGIDNIRDLFGHKVDLDLIKRNPICRIGI

SEQ ID NO: 50440 - DNA, 1892 bp, Arabidopsis thaliana
  misc_feature (1)..(1892): Ceres Seq. ID no. 13592622
  misc_feature (1)..(1892): Ortholog of  Ceres SEQ ID NO 14311191 as cited in SEQ ID NO 52591
aacgaaggacccagaagtgaagacgatactctccctcccttcccttgttcaatttctttctttgttctcatcattaaatttctttgacccaaagtttcaatctttttcagtttctggaatctcttgcttcgatcgaatcactctcatgtctaacgaagactctcttccgcctttcactttgtttggtttggatgatgtcgaaaattacggtctggtcactgaagcagacaattcgttacctttagatatacacaatcaggtttttcaacttgtggagaagggaaaccaatcattcaaagagtctcgctttgaagaggctattagcagttattcaaaggccaattctattaaacctcttgaccctattgttcttggcaatagaagtgctgcttatataagatttggccaatatctgaagcagagatctgcatcaatttctgaatataaacctctgaatggttttgatatgtcgatgcttggtgaacttgctcttaaggatgctgataagctaatgagtcttcagagcagtttagtgaagtcatatattacaaaggcttgtgccctcatgttgctagaaagatatgaggtagcccgtgacactatcctctcaggtctacagattgatccctttagcggtcctctacgatccaatcttcaggaattggagaaagtgatgcctaattcgatgcgtaaaacccatggaatggctgagcggtctgatgattttgattgcactgtttgcctgaaattgctgtacgaacctgctacaactccatgtgggcatacattctgccgatcatgcctctttcagtcaatggatcgcggcaacaaatgtccactatgtcgaactgtcatttttatgactccaagaacatgcgctgtcagtgtgacactgaataacatcatagagaaaaactttccagaggagtatgctgaaaggaaatcagagcaagacactctggtccacctaggcaatgaaagtatgccccttttcgtcatggatgtgataatcccctgtcagaagttgtctcttcatatatttgaaccacgatatcgactaatggtgagaagaataatggaaggaaatcatcggatgggaatggtagctcttgattcggcgacaggttctccagtggatgttgcttgcgaagttgaaatcacagagtgtgatccactcccggatggacgttttgtcctggagctggaaagccatagaaggtgccgcattgtaaaagcttgggatcaagatggatatcgtgttgcagaggttgaatgggtgaaagatataccaccacaaagcgagcaagggaaagcagatctgcgggaactgacgaccagcgcagcatcatttgctcggtcatggctagatagagcaaaggaagcagctagacaaggagacagaagaagacttgaaatacttctaaatgttgaatctatgataccaacgcctcaagatcccgagcgcttcagtttctggcttgctacactgacagataggagaccttcagaaagattggaactacttcggcttcaggatactggagagagaataaagcgcggtttgatatatctccgatcagtagaaagaggatgcagaatgcaatgaactggcagcatgatggcattgtattgccggttaaactacagagataaacttgggacctgttcataagaaggttgacaaaacatttattcatgattaaaggaatacataagatagagatccttgtaggatcgctgtcatcctttgtcggatccattgttgtagattttgtttgcgactgtattttatttaattaccatattcttcattatgcaactgtagcaagaagaaacaaaaaaaacaaaacaaaaatatgtaagattcttgacaagataatatcccttttcgg

SEQ ID NO: 50441 - protein, 534 aa, Arabidopsis thaliana
  peptide (1)..(534): Ceres Seq. ID no. 13592623
TKDPEVKTILSLPSLVQFLSLFSSLNFFDPKFQSFSVSGISCFDRITLMSNEDSLPPFTLFGLDDVENYGLVTEADNSLPLDIHNQVFQLVEKGNQSFKESRFEEAISSYSKANSIKPLDPIVLGNRSAAYIRFGQYLKQRSASISEYKPLNGFDMSMLGELALKDADKLMSLQSSLVKSYITKACALMLLERYEVARDTILSGLQIDPFSGPLRSNLQELEKVMPNSMRKTHGMAERSDDFDCTVCLKLLYEPATTPCGHTFCRSCLFQSMDRGNKCPLCRTVIFMTPRTCAVSVTLNNIIEKNFPEEYAERKSEQDTLVHLGNESMPLFVMDVIIPCQKLSLHIFEPRYRLMVRRIMEGNHRMGMVALDSATGSPVDVACEVEITECDPLPDGRFVLELESHRRCRIVKAWDQDGYRVAEVEWVKDIPPQSEQGKADLRELTTSAASFARSWLDRAKEAARQGDRRRLEILLNVESMIPTPQDPERFSFWLATLTDRRPSERLELLRLQDTGERIKRGLIYLRSVERGCRMQ

SEQ ID NO: 50442 - protein, 486 aa, Arabidopsis thaliana
  peptide (1)..(486): Ceres Seq. ID no. 13592624
MSNEDSLPPFTLFGLDDVENYGLVTEADNSLPLDIHNQVFQLVEKGNQSFKESRFEEAISSYSKANSIKPLDPIVLGNRSAAYIRFGQYLKQRSASISEYKPLNGFDMSMLGELALKDADKLMSLQSSLVKSYITKACALMLLERYEVARDTILSGLQIDPFSGPLRSNLQELEKVMPNSMRKTHGMAERSDDFDCTVCLKLLYEPATTPCGHTFCRSCLFQSMDRGNKCPLCRTVIFMTPRTCAVSVTLNNIIEKNFPEEYAERKSEQDTLVHLGNESMPLFVMDVIIPCQKLSLHIFEPRYRLMVRRIMEGNHRMGMVALDSATGSPVDVACEVEITECDPLPDGRFVLELESHRRCRIVKAWDQDGYRVAEVEWVKDIPPQSEQGKADLRELTTSAASFARSWLDRAKEAARQGDRRRLEILLNVESMIPTPQDPERFSFWLATLTDRRPSERLELLRLQDTGERIKRGLIYLRSVERGCRMQ

SEQ ID NO: 50443 - protein, 379 aa, Arabidopsis thaliana
  peptide (1)..(379): Ceres Seq. ID no. 13592625
MSMLGELALKDADKLMSLQSSLVKSYITKACALMLLERYEVARDTILSGLQIDPFSGPLRSNLQELEKVMPNSMRKTHGMAERSDDFDCTVCLKLLYEPATTPCGHTFCRSCLFQSMDRGNKCPLCRTVIFMTPRTCAVSVTLNNIIEKNFPEEYAERKSEQDTLVHLGNESMPLFVMDVIIPCQKLSLHIFEPRYRLMVRRIMEGNHRMGMVALDSATGSPVDVACEVEITECDPLPDGRFVLELESHRRCRIVKAWDQDGYRVAEVEWVKDIPPQSEQGKADLRELTTSAASFARSWLDRAKEAARQGDRRRLEILLNVESMIPTPQDPERFSFWLATLTDRRPSERLELLRLQDTGERIKRGLIYLRSVERGCRMQ

SEQ ID NO: 50444 - DNA, 878 bp, Arabidopsis thaliana
  misc_feature (1)..(878): Ceres Seq. ID no. 13588723
  misc_feature (1)..(878): Ortholog of  Ceres SEQ ID NO 15177067 as cited in SEQ ID NO 52085
  misc_feature (1)..(878): Ortholog of  Ceres SEQ ID NO 14309480 as cited in SEQ ID NO 0
  misc_feature (1)..(878): Ortholog of  Ceres SEQ ID NO 14312472 as cited in SEQ ID NO 0
gggtaggggaattttgctcttcgtcttgctatttcagatgtataataacatgggacctcaaccggggatgccaagacctccaggaaaccctgagcctggtccatttggtaatcctttcactggagctggctcgggttttatccgtggtggtttgggagcgtatggggagagaattttaggatcgagctctgagtatgttcagagcaatataagccggtacttctctgatccgcaatactatttccaagtgaatgatcaatatgtgaggaataaactgaaggttgttctgtttcctttcctacaccggggacactggaccagaatatctgaaccagttggtggtaggctctcatacaagcctccaatatatgatatcaatgctccagacttgtacattccctttatggcatttggtacctacgttgttcttgctggtctttcattgggacttaatggaaagtttacaccggaagctttgaattggctgtttgtgaaaggattggttggttggtttttgcaagtaatgctcctgaaagtaacacttctatcacttggtagtggagaggcaccattactagatattgtggcatacggagggtatgcttttgctggtctgtgtcttgcgggctttgccaaaataatgtggggatactcgtactacgcgttgatgccatggacttgtctatgcactgggattttcttggtgaagacgatgaaacgtgttctgtttgctgaagtaagaagttacgattcgagcaaacatcactaccttcttctgtttttagccttggtccagttcccacttttgatatggcttggtaacattagtgttaattggcttctttgaaatgaaaaagacgtttttgtgaattcttatt

SEQ ID NO: 50445 - protein, 281 aa, Arabidopsis thaliana
  peptide (1)..(281): Ceres Seq. ID no. 13588724
GRGILLFVLLFQMYNNMGPQPGMPRPPGNPEPGPFGNPFTGAGSGFIRGGLGAYGERILGSSSEYVQSNISRYFSDPQYYFQVNDQYVRNKLKVVLFPFLHRGHWTRISEPVGGRLSYKPPIYDINAPDLYIPFMAFGTYVVLAGLSLGLNGKFTPEALNWLFVKGLVGWFLQVMLLKVTLLSLGSGEAPLLDIVAYGGYAFAGLCLAGFAKIMWGYSYYALMPWTCLCTGIFLVKTMKRVLFAEVRSYDSSKHHYLLLFLALVQFPLLIWLGNISVNWLL

SEQ ID NO: 50446 - protein, 269 aa, Arabidopsis thaliana; identical to SEQ ID NO: 36555
  peptide (1)..(269): Ceres Seq. ID no. 13588725

SEQ ID NO: 50447 - protein, 265 aa, Arabidopsis thaliana; identical to SEQ ID NO: 36556
  peptide (1)..(265): Ceres Seq. ID no. 13588726

SEQ ID NO: 50448 - DNA, 3293 bp, Arabidopsis thaliana
  misc_feature (1)..(3293): Ceres Seq. ID no. 13647822
  misc_feature (1)..(3293): Ortholog of  Ceres SEQ ID NO 13646569 as cited in SEQ ID NO 20745
acctaatctctcctcctctccttctctctattttgccggaatacatatgatcgagtgaaacggcggacaaagctgtcgtgttgagtactaattcgccgtcgtttttctcagtgaaggagtggtgagagatgtcgagtctcgaagatatcaagaacgagactgttgatctggaaaaaattccgattgaggaagttttccagcagctaaaatgttcaagggaaggattgacaacgcaggaaggggaggacaggattcagatctttggccccaacaagctcgaagagaaaaaggaaagcaaacttctgaagtttttggggtttatgtggaatccactttcatgggtcatggaaatggctgcaatcatggccattgctttggccaacggtgatggtaggcctccggattggcaggattttgttggtattatctgtctgttggttatcaactctaccatcagttttatcgaagaaaacaatgctggtaatgctgctgctgctcttatggctggtcttgctcctaaaaccaaggttcttagggatggaaagtggagtgaacaagaagctgctattcttgtcccaggagatattgttagcattaaattaggagacattatcccagctgatgcccgtctacttgaaggtgatcctttaaaggttgaccaatctgctctaactggagagtcccttcctgtaaccaagcacccgggtcaagaagttttctctggttcaacctgcaaacaaggagaaatcgaggcggttgttattgccactggggttcataccttcttcggtaaagctgctcaccttgtggacagcactaaccaagttggacatttccagaaggttcttacagccattgggaacttctgtatctgttccattgctatcggtatggtgattgagatcatcgtcatgtatccgatccaacgccgaaagtacagagatggaattgacaaccttttggtcctcttgatcggtggtatccccattgctatgcctacagtcttgtccgtgaccatggctattgggtctcacaggttgtctcagcaaggtgccatcaccaagcgtatgactgccattgaagagatggcaggaatggatgtcctgtgcagtgacaaaaccgggacactaaccctcaacaaattgagtgtggacaaaaacttggtcgaggttttctgcaagggtgtggagaaagatcaagtcctattatttgcagctatggcttccagggttgagaaccaggatgccattgatgcagccatggttgggatgcttgctgatccaaaggaggctagagctggaatcagggaagttcacttccttccattcaaccctgtggataagagaactgctttgacttacattgacggcagtggtaactggcacagagtcagtaaaggtgctcctgagcagatcctcgaacttgccaaagccagcaatgatcttagcaagaaggtgctctccattattgacaagtatgctgagcgtggtcttaggtcgttggctgttgctcgccaggtggtgccagagaaaacaaaggaaagcccaggtgcgccatgggaatttgttggcttgttgccactttttgatcccccaagacatgacagtgctgaaacaattcgacgggctttgaatcttggtgttaacgtcaagatgatcactggtgaccaacttgctattggtaaggaaactggtcgcagacttggaatgggaacaaacatgtatccatcttcggctcttcttggtacacacaaagacgcaaacctcgcatccattcctgttgaggagttgattgaaaaggctgatggatttgccggagtcttcccagagcacaaatacgaaattgtgaaaaagttgcaggagaggaagcatattgttggaatgactggtgatggtgtcaatgatgcccctgctctaaagaaagctgatatcggtattgctgttgctgatgctacagatgctgctcgtggtgcttcagatatcgtgctcactgagcctggactcagcgttattatcagtgctgttctcaccagcagagctattttccagagaatgaagaactatactatctatgcagtctcaatcaccatccgtattgtgtttggtttcatgcttattgctttgatatgggaatttgacttctcagccttcatggttctgatcattgccattcttaacgacggtaccatcatgacaatctcaaaggacagagttaagccatctcccacacctgatagctggaaacttaaagaaatttttgctactggagtcgttctaggaggctaccaggccatcatgactgttattttcttctgggcggcgcacaagactgactttttctcggacacattcggtgtgaggtccattagggacaataaccacgagctaatgggtgcggtgtacttacaagttagtatcattagtcaagctctgatcttcgtcacaagatcaaggagttggtcttttgttgaacgtcctggagcattgctgatgattgctttcctcattgcacaactgattgctactttgattgcggtttacgccaactgggaatttgcaaagattaggggtattggatggggatgggctggtgtgatctggctatacagtattgtcacatacttcccattggacgttttcaagtttgccattcgatacatcttgagcggaaaggcgtggctcaacttgtttgagaacaagacggctttcacgatgaagaaagattacggaaaagaagagagagaggctcaatgggcacttgctcaaaggacacttcacggtttacagccaaaagaagctgttaacatcttccctgagaaaggaagttacagagaattgtctgagatcgctgagcaagctaagagaagagctgagatcgctaggcttagggagctgcacacactcaagggacatgtggaatcagtcgtgaagctaaagggcttggacattgaaactcccagtcactacactgtgtagtaaaaccaaacatatgactgatcttcgatcctctcatgttttgtcttcttcttcttctttttttcttcaccacctcttatgattattattcacatagggagagatctttgtttattgccataactcttcccaaaccttattgttagtgttcttgtttctcaaatatgtacttttgcataatttgctcttttgaagaaacaaggcatgcctttgtgtttggcatttggcacatgcacattctcttctttgctcttattccatgagcctatgtaatcttaatcttcttctttttcgtaatccaacttttcttccggcttc

SEQ ID NO: 50449 - protein, 948 aa, Arabidopsis thaliana
  peptide (1)..(948): Ceres Seq. ID no. 13647823
MSSLEDIKNETVDLEKIPIEEVFQQLKCSREGLTTQEGEDRIQIFGPNKLEEKKESKLLKFLGFMWNPLSWVMEMAAIMAIALANGDGRPPDWQDFVGIICLLVINSTISFIEENNAGNAAAALMAGLAPKTKVLRDGKWSEQEAAILVPGDIVSIKLGDIIPADARLLEGDPLKVDQSALTGESLPVTKHPGQEVFSGSTCKQGEIEAVVIATGVHTFFGKAAHLVDSTNQVGHFQKVLTAIGNFCICSIAIGMVIEIIVMYPIQRRKYRDGIDNLLVLLIGGIPIAMPTVLSVTMAIGSHRLSQQGAITKRMTAIEEMAGMDVLCSDKTGTLTLNKLSVDKNLVEVFCKGVEKDQVLLFAAMASRVENQDAIDAAMVGMLADPKEARAGIREVHFLPFNPVDKRTALTYIDGSGNWHRVSKGAPEQILELAKASNDLSKKVLSIIDKYAERGLRSLAVARQVVPEKTKESPGAPWEFVGLLPLFDPPRHDSAETIRRALNLGVNVKMITGDQLAIGKETGRRLGMGTNMYPSSALLGTHKDANLASIPVEELIEKADGFAGVFPEHKYEIVKKLQERKHIVGMTGDGVNDAPALKKADIGIAVADATDAARGASDIVLTEPGLSVIISAVLTSRAIFQRMKNYTIYAVSITIRIVFGFMLIALIWEFDFSAFMVLIIAILNDGTIMTISKDRVKPSPTPDSWKLKEIFATGVVLGGYQAIMTVIFFWAAHKTDFFSDTFGVRSIRDNNHELMGAVYLQVSIISQALIFVTRSRSWSFVERPGALLMIAFLIAQLIATLIAVYANWEFAKIRGIGWGWAGVIWLYSIVTYFPLDVFKFAIRYILSGKAWLNLFENKTAFTMKKDYGKEEREAQWALAQRTLHGLQPKEAVNIFPEKGSYRELSEIAEQAKRRAEIARLRELHTLKGHVESVVKLKGLDIETPSHYTV

SEQ ID NO: 50450 - protein, 884 aa, Arabidopsis thaliana
  peptide (1)..(884): Ceres Seq. ID no. 13647824
MWNPLSWVMEMAAIMAIALANGDGRPPDWQDFVGIICLLVINSTISFIEENNAGNAAAALMAGLAPKTKVLRDGKWSEQEAAILVPGDIVSIKLGDIIPADARLLEGDPLKVDQSALTGESLPVTKHPGQEVFSGSTCKQGEIEAVVIATGVHTFFGKAAHLVDSTNQVGHFQKVLTAIGNFCICSIAIGMVIEIIVMYPIQRRKYRDGIDNLLVLLIGGIPIAMPTVLSVTMAIGSHRLSQQGAITKRMTAIEEMAGMDVLCSDKTGTLTLNKLSVDKNLVEVFCKGVEKDQVLLFAAMASRVENQDAIDAAMVGMLADPKEARAGIREVHFLPFNPVDKRTALTYIDGSGNWHRVSKGAPEQILELAKASNDLSKKVLSIIDKYAERGLRSLAVARQVVPEKTKESPGAPWEFVGLLPLFDPPRHDSAETIRRALNLGVNVKMITGDQLAIGKETGRRLGMGTNMYPSSALLGTHKDANLASIPVEELIEKADGFAGVFPEHKYEIVKKLQERKHIVGMTGDGVNDAPALKKADIGIAVADATDAARGASDIVLTEPGLSVIISAVLTSRAIFQRMKNYTIYAVSITIRIVFGFMLIALIWEFDFSAFMVLIIAILNDGTIMTISKDRVKPSPTPDSWKLKEIFATGVVLGGYQAIMTVIFFWAAHKTDFFSDTFGVRSIRDNNHELMGAVYLQVSIISQALIFVTRSRSWSFVERPGALLMIAFLIAQLIATLIAVYANWEFAKIRGIGWGWAGVIWLYSIVTYFPLDVFKFAIRYILSGKAWLNLFENKTAFTMKKDYGKEEREAQWALAQRTLHGLQPKEAVNIFPEKGSYRELSEIAEQAKRRAEIARLRELHTLKGHVESVVKLKGLDIETPSHYTV

SEQ ID NO: 50451 - protein, 876 aa, Arabidopsis thaliana
  peptide (1)..(876): Ceres Seq. ID no. 13647825
MEMAAIMAIALANGDGRPPDWQDFVGIICLLVINSTISFIEENNAGNAAAALMAGLAPKTKVLRDGKWSEQEAAILVPGDIVSIKLGDIIPADARLLEGDPLKVDQSALTGESLPVTKHPGQEVFSGSTCKQGEIEAVVIATGVHTFFGKAAHLVDSTNQVGHFQKVLTAIGNFCICSIAIGMVIEIIVMYPIQRRKYRDGIDNLLVLLIGGIPIAMPTVLSVTMAIGSHRLSQQGAITKRMTAIEEMAGMDVLCSDKTGTLTLNKLSVDKNLVEVFCKGVEKDQVLLFAAMASRVENQDAIDAAMVGMLADPKEARAGIREVHFLPFNPVDKRTALTYIDGSGNWHRVSKGAPEQILELAKASNDLSKKVLSIIDKYAERGLRSLAVARQVVPEKTKESPGAPWEFVGLLPLFDPPRHDSAETIRRALNLGVNVKMITGDQLAIGKETGRRLGMGTNMYPSSALLGTHKDANLASIPVEELIEKADGFAGVFPEHKYEIVKKLQERKHIVGMTGDGVNDAPALKKADIGIAVADATDAARGASDIVLTEPGLSVIISAVLTSRAIFQRMKNYTIYAVSITIRIVFGFMLIALIWEFDFSAFMVLIIAILNDGTIMTISKDRVKPSPTPDSWKLKEIFATGVVLGGYQAIMTVIFFWAAHKTDFFSDTFGVRSIRDNNHELMGAVYLQVSIISQALIFVTRSRSWSFVERPGALLMIAFLIAQLIATLIAVYANWEFAKIRGIGWGWAGVIWLYSIVTYFPLDVFKFAIRYILSGKAWLNLFENKTAFTMKKDYGKEEREAQWALAQRTLHGLQPKEAVNIFPEKGSYRELSEIAEQAKRRAEIARLRELHTLKGHVESVVKLKGLDIETPSHYTV

SEQ ID NO: 50452 - DNA, 1316 bp, Arabidopsis thaliana
  misc_feature (1)..(1316): Ceres Seq. ID no. 13592351
  misc_feature (1)..(1316): Ortholog of  Ceres SEQ ID NO 13638402 as cited in SEQ ID NO 60300
  misc_feature (1)..(1316): Ortholog of  Ceres SEQ ID NO 12618349 as cited in SEQ ID NO 64838
  misc_feature (1)..(1316): Ortholog of  Ceres SEQ ID NO 15176161 as cited in SEQ ID NO 0
gagcttaagccaaagatctctcattgacctttgcttcttcatcttcttctccgatcacagtttctctctttctggattccaccattcttctctttgtcgtctatgtgacctattctcgattcgatccatggaataatctctgtccgaagaagatctctcattccccttcaaaagcagacagattcgaaactttcccccaaattcgtggaaatcttgtgttagggtttgggttattctcaaatagaatcaatcagatcgttttttctttttgttagaagaagatgaagatagcggccaatggccggtttttcacaatcggactcgtagcgtcatggtattcatcgaacatcggagttttattgctgaacaagtacttgttaagcaactatggattcaagtatccgatcttcctcaccatgtgtcacatgacggcttgttctcttctcagctacgttgctattgcttggatgaagatggttccgatgcaaacgatccgatctcgagttcagtttcttaagatcgctgcgttaagtctcgttttctgtgtgtcggtggtttttgggaatatctctcttcggtttcttcctgtatcgtttaatcaagcgattggtgctacgacgccgtttttcaccgccgtgtttgcttatctgattacttttaagagagaagcttggttgacttacttcactctcgtccctgttgttaccggtgttgtcattgccagtgggaaacatccttgggatttgcctgagcttgatcacttcatgatatgtagtttatatgctgctcaaattagactagaagttgttcttttatgcgtgcatagtgtgaatcctagtgagccaagtttccacctgtttggattcattatgtgcattgcagctacagctgcaagagcacttaaatcagttcttcaaggaattttgctttcttcagaaggggagaagctaaattccatgaacctcctcctttacatggctcccatagctgttgtgttcctccttcctgctacacttatcatggaaaaaaatgttgttggcattacaattgcacttgccagagacgattttagaatcgtttggtatctgctattcaattcggcgctagcttattttgtgaacttgaccaatttcttagtcacgaaacacaccagcgctctgactctccaggtgctaggaaacgccaaaggtgcagtagcagtggtggtatcaatcctgatattcaggaatcctgtctcagtgactggaatgttaggttactcgctcactgtctgtggagttatcctctacagcgaagccaagaaacgaagcaaataa

SEQ ID NO: 50453 - protein, 344 aa, Arabidopsis thaliana
  peptide (1)..(344): Ceres Seq. ID no. 13592352
MKIAANGRFFTIGLVASWYSSNIGVLLLNKYLLSNYGFKYPIFLTMCHMTACSLLSYVAIAWMKMVPMQTIRSRVQFLKIAALSLVFCVSVVFGNISLRFLPVSFNQAIGATTPFFTAVFAYLITFKREAWLTYFTLVPVVTGVVIASGKHPWDLPELDHFMICSLYAAQIRLEVVLLCVHSVNPSEPSFHLFGFIMCIAATAARALKSVLQGILLSSEGEKLNSMNLLLYMAPIAVVFLLPATLIMEKNVVGITIALARDDFRIVWYLLFNSALAYFVNLTNFLVTKHTSALTLQVLGNAKGAVAVVVSILIFRNPVSVTGMLGYSLTVCGVILYSEAKKRSK

SEQ ID NO: 50454 - protein, 299 aa, Arabidopsis thaliana
  peptide (1)..(299): Ceres Seq. ID no. 13592353
MCHMTACSLLSYVAIAWMKMVPMQTIRSRVQFLKIAALSLVFCVSVVFGNISLRFLPVSFNQAIGATTPFFTAVFAYLITFKREAWLTYFTLVPVVTGVVIASGKHPWDLPELDHFMICSLYAAQIRLEVVLLCVHSVNPSEPSFHLFGFIMCIAATAARALKSVLQGILLSSEGEKLNSMNLLLYMAPIAVVFLLPATLIMEKNVVGITIALARDDFRIVWYLLFNSALAYFVNLTNFLVTKHTSALTLQVLGNAKGAVAVVVSILIFRNPVSVTGMLGYSLTVCGVILYSEAKKRSK

SEQ ID NO: 50455 - protein, 296 aa, Arabidopsis thaliana
  peptide (1)..(296): Ceres Seq. ID no. 13592354
MTACSLLSYVAIAWMKMVPMQTIRSRVQFLKIAALSLVFCVSVVFGNISLRFLPVSFNQAIGATTPFFTAVFAYLITFKREAWLTYFTLVPVVTGVVIASGKHPWDLPELDHFMICSLYAAQIRLEVVLLCVHSVNPSEPSFHLFGFIMCIAATAARALKSVLQGILLSSEGEKLNSMNLLLYMAPIAVVFLLPATLIMEKNVVGITIALARDDFRIVWYLLFNSALAYFVNLTNFLVTKHTSALTLQVLGNAKGAVAVVVSILIFRNPVSVTGMLGYSLTVCGVILYSEAKKRSK

SEQ ID NO: 50456 - DNA, 755 bp, Arabidopsis thaliana
  misc_feature (1)..(755): Ceres Seq. ID no. 13588210
  misc_feature (1)..(755): Ortholog of  Ceres SEQ ID NO 15172691 as cited in SEQ ID NO 56148
  misc_feature (1)..(755): Ortholog of  Ceres SEQ ID NO 15174297 as cited in SEQ ID NO 0
gacgaatcgtctcacaaactctttcgtttttccctttttctccaatcacagaaaagaaaagaaaaaacaatggcggatcagctcacagacgatcagatctcagaattcaaggaagccttcagcttattcgacaaggatggtgatggttgcattaccacaaaggagcttggtaccgtgatgcgttccctcggtcaaaacccaaccgaagctgagcttcaggacatgatcaacgaagttgatgcggatggtaacggaaccattgatttcccggagttcttgaacctaatggctaggaaaatgaaggacactgactctgaggaagaactcaaggaagctttcagagttttcgacaaagaccagaacggtttcatctcagctgctgaattgagacatgtgatgactaacctcggcgagaagcttactgatgaagaagttgatgagatgattaaggaagctgatgttgatggtgatggtcagatcaactacgaagagtttgtgaaggttatgatggctaagtgaggattgaaacaacttcttcggctttctccttttttttttttgactaccttcttatgtaatttcataaagaatgttccttcgctttgttctaaaatttcattcatggctggtttttgctggttaaaaagacaggaatgttatgtgtttttaccttttgtctaaatgactcattgttcatgttattgacaggttcagaacctgattcttgaaatataacagtaatgagatcttcttct

SEQ ID NO: 50457 - protein, 172 aa, Arabidopsis thaliana
  peptide (1)..(172): Ceres Seq. ID no. 13588211
DESSHKLFRFSLFLQSQKRKEKTMADQLTDDQISEFKEAFSLFDKDGDGCITTKELGTVMRSLGQNPTEAELQDMINEVDADGNGTIDFPEFLNLMARKMKDTDSEEELKEAFRVFDKDQNGFISAAELRHVMTNLGEKLTDEEVDEMIKEADVDGDGQINYEEFVKVMMAK

SEQ ID NO: 50458 - protein, 149 aa, Arabidopsis thaliana; identical to SEQ ID NO: 29417
  peptide (1)..(149): Ceres Seq. ID no. 13588212

SEQ ID NO: 50459 - protein, 113 aa, Arabidopsis thaliana; identical to SEQ ID NO: 29418
  peptide (1)..(113): Ceres Seq. ID no. 13588213

SEQ ID NO: 50460 - DNA, 2271 bp, Arabidopsis thaliana; identical to SEQ ID NO: 48862
  misc_feature (1)..(2271): Ceres Seq. ID no. 12601691
  misc_feature (1)..(2271): Ortholog of  Ceres SEQ ID NO 15226175 as cited in SEQ ID NO 0

SEQ ID NO: 50461 - protein, 550 aa, Arabidopsis thaliana; identical to SEQ ID NO: 48863
  peptide (1)..(550): Ceres Seq. ID no. 12601692

SEQ ID NO: 50462 - protein, 379 aa, Arabidopsis thaliana; identical to SEQ ID NO: 48864
  peptide (1)..(379): Ceres Seq. ID no. 12601693

SEQ ID NO: 50463 - protein, 342 aa, Arabidopsis thaliana; identical to SEQ ID NO: 48865
  peptide (1)..(342): Ceres Seq. ID no. 12601694

SEQ ID NO: 50464 - DNA, 1084 bp, Arabidopsis thaliana; identical to SEQ ID NO: 50083
  misc_feature (1)..(1084): Ceres Seq. ID no. 13592597
  misc_feature (1)..(1084): Ortholog of  Ceres SEQ ID NO 14314434 as cited in SEQ ID NO 52401
  misc_feature (1)..(1084): Ortholog of  Ceres SEQ ID NO 14303939 as cited in SEQ ID NO 54286
  misc_feature (1)..(1084): Ortholog of  Ceres SEQ ID NO 14307760 as cited in SEQ ID NO 54741
  misc_feature (1)..(1084): Ortholog of  Ceres SEQ ID NO 14313391 as cited in SEQ ID NO 58556
  misc_feature (1)..(1084): Ortholog of  Ceres SEQ ID NO 14307540 as cited in SEQ ID NO 59670
  misc_feature (1)..(1084): Ortholog of  Ceres SEQ ID NO 15179003 as cited in SEQ ID NO 0
  misc_feature (1)..(1084): Ortholog of  Ceres SEQ ID NO 15179235 as cited in SEQ ID NO 0

SEQ ID NO: 50465 - protein, 250 aa, Arabidopsis thaliana; identical to SEQ ID NO: 50084
  peptide (1)..(250): Ceres Seq. ID no. 13592598

SEQ ID NO: 50466 - DNA, 1701 bp, Arabidopsis thaliana; identical to SEQ ID NO: 47853
  misc_feature (1)..(1701): Ceres Seq. ID no. 12562851
  misc_feature (1)..(1701): Ortholog of  Ceres SEQ ID NO 13664178 as cited in SEQ ID NO 61247
  misc_feature (1)..(1701): Ortholog of  Ceres SEQ ID NO 15179290 as cited in SEQ ID NO 0

SEQ ID NO: 50467 - protein, 446 aa, Arabidopsis thaliana; identical to SEQ ID NO: 47854
  peptide (1)..(446): Ceres Seq. ID no. 12562852

SEQ ID NO: 50468 - protein, 356 aa, Arabidopsis thaliana; identical to SEQ ID NO: 47855
  peptide (1)..(356): Ceres Seq. ID no. 12562853

SEQ ID NO: 50469 - protein, 347 aa, Arabidopsis thaliana; identical to SEQ ID NO: 47856
  peptide (1)..(347): Ceres Seq. ID no. 12562854

SEQ ID NO: 50470 - DNA, 1651 bp, Arabidopsis thaliana
  misc_feature (1)..(1651): Ceres Seq. ID no. 12602386
  misc_feature (1)..(1651): Ortholog of  Ceres SEQ ID NO 15170698 as cited in SEQ ID NO 58326
  misc_feature (1)..(1651): Ortholog of  Ceres SEQ ID NO 14302279 as cited in SEQ ID NO 68864
taatattaacaaataaataaaagataaaaaaatcttcgagggaacattcagaaaccctaacttcaacgggaactcaaaaatcagaatctccagatcgagagcttaaaaagtcgatttcaattcccctttaagattttttgcttttggaatgtagtgtgaagaagaaaccctagttttttctcacttgaattctctgccttctttagtaatgtcaagtgagcagcgagaaggttcgcaagagacgacgacgacgacggtggaaggtaacggaacaattgcaggtcagaattctcattcggcggctcccacgacattgagagctacctctacgatggtttcttgccagagactaaggctaaaccctaacaacgagcatagacccgatagttatgaagatctgcagcttgatttcccaaactcggtatattctagtctggagaagtacttgcctccgaatatgctcgtctcgaatcgtgatgagaaaatcaaattcatgactgatattatgcttaggcatcttcctcatggagagcgttccagagctcaaaggcacagtgactataggctgaagattacaacaaattatcagccacttcacaaggagttgtatactctagttcccacagtatgtttcgttcctgctttccttaaggcgataaatgaaaacacagaggaaagcttcagaaatataatatctgaaccgtctcctggtgttttcgtctttgacatgctccagcctagcttttgtgagatgatgctagccgagatagacaattttgaaaggtgggtgggtgagaccaaattccggataatgagaccaaacaccatgaataaatacggtgctgtgcttgacgactttggtctagacaccatgcttgacaaactcatggaggggtttatacgtcccatctctaaagtattcttcagtgatgtgggtggagcaactctggactctcaccatggttttgttgttgaatatgggaaagatagggatgttgatttaggctttcatgtggatgattcagaagtaacgctgaatgtttgtttgggtaatcaatttgtgggaggggagctatttttcagaggcacacggtgtgaaaaacatgtgaacacagcaacaaaggcagatgaaacatatgattattgtcatatacctggacaagctgtgcttcaccgtggccgccaccgccatggtgccagagccacaacatgcgggcatcgggtcaatatgcttctatggtgcagaagttctgtatttagagagctcaaaactcatcacaaggatttctccagctggtgtggagagtgcttttgtgaaaagagagatgagaaagtgcggtcgattgatgctctaagaaagaaattgtttaaaccacgtcaaacccaagcttgatggaacactagcaagatgagcaattgatgaaacattagtaagataagcaataacatatattggatgacattaaaacttgagatcaagccctgaagaattgctcctgttttaagctgacttaaaactgagcctatgtagaaatcatttgagttatatgggtctctgtttatcgtttctcagactctttgataaaatatgtacatgaaagaatctagtctcaacttcacttgtgtactacaaggagtcatattgttgtcc

SEQ ID NO: 50471 - protein, 394 aa, Arabidopsis thaliana
  peptide (1)..(394): Ceres Seq. ID no. 12602387
MSSEQREGSQETTTTTVEGNGTIAGQNSHSAAPTTLRATSTMVSCQRLRLNPNNEHRPDSYEDLQLDFPNSVYSSLEKYLPPNMLVSNRDEKIKFMTDIMLRHLPHGERSRAQRHSDYRLKITTNYQPLHKELYTLVPTVCFVPAFLKAINENTEESFRNIISEPSPGVFVFDMLQPSFCEMMLAEIDNFERWVGETKFRIMRPNTMNKYGAVLDDFGLDTMLDKLMEGFIRPISKVFFSDVGGATLDSHHGFVVEYGKDRDVDLGFHVDDSEVTLNVCLGNQFVGGELFFRGTRCEKHVNTATKADETYDYCHIPGQAVLHRGRHRHGARATTCGHRVNMLLWCRSSVFRELKTHHKDFSSWCGECFCEKRDEKVRSIDALRKKLFKPRQTQA

SEQ ID NO: 50472 - protein, 353 aa, Arabidopsis thaliana
  peptide (1)..(353): Ceres Seq. ID no. 12602388
MVSCQRLRLNPNNEHRPDSYEDLQLDFPNSVYSSLEKYLPPNMLVSNRDEKIKFMTDIMLRHLPHGERSRAQRHSDYRLKITTNYQPLHKELYTLVPTVCFVPAFLKAINENTEESFRNIISEPSPGVFVFDMLQPSFCEMMLAEIDNFERWVGETKFRIMRPNTMNKYGAVLDDFGLDTMLDKLMEGFIRPISKVFFSDVGGATLDSHHGFVVEYGKDRDVDLGFHVDDSEVTLNVCLGNQFVGGELFFRGTRCEKHVNTATKADETYDYCHIPGQAVLHRGRHRHGARATTCGHRVNMLLWCRSSVFRELKTHHKDFSSWCGECFCEKRDEKVRSIDALRKKLFKPRQTQA

SEQ ID NO: 50473 - protein, 311 aa, Arabidopsis thaliana
  peptide (1)..(311): Ceres Seq. ID no. 12602389
MLVSNRDEKIKFMTDIMLRHLPHGERSRAQRHSDYRLKITTNYQPLHKELYTLVPTVCFVPAFLKAINENTEESFRNIISEPSPGVFVFDMLQPSFCEMMLAEIDNFERWVGETKFRIMRPNTMNKYGAVLDDFGLDTMLDKLMEGFIRPISKVFFSDVGGATLDSHHGFVVEYGKDRDVDLGFHVDDSEVTLNVCLGNQFVGGELFFRGTRCEKHVNTATKADETYDYCHIPGQAVLHRGRHRHGARATTCGHRVNMLLWCRSSVFRELKTHHKDFSSWCGECFCEKRDEKVRSIDALRKKLFKPRQTQA

SEQ ID NO: 50474 - DNA, 1795 bp, Arabidopsis thaliana; identical to SEQ ID NO: 49580
  misc_feature (1)..(1795): Ceres Seq. ID no. 12606328
  misc_feature (1)..(1795): Ortholog of  Ceres SEQ ID NO 13597269 as cited in SEQ ID NO 63932

SEQ ID NO: 50475 - protein, 517 aa, Arabidopsis thaliana; identical to SEQ ID NO: 49581
  peptide (1)..(517): Ceres Seq. ID no. 12606329

SEQ ID NO: 50476 - protein, 483 aa, Arabidopsis thaliana; identical to SEQ ID NO: 49582
  peptide (1)..(483): Ceres Seq. ID no. 12606330

SEQ ID NO: 50477 - protein, 465 aa, Arabidopsis thaliana; identical to SEQ ID NO: 49583
  peptide (1)..(465): Ceres Seq. ID no. 12606331

SEQ ID NO: 50478 - DNA, 1867 bp, Arabidopsis thaliana
  misc_feature (1)..(1867): Ceres Seq. ID no. 13593702
  misc_feature (1)..(1867): Ortholog of  Ceres SEQ ID NO 15176081 as cited in SEQ ID NO 65838
  misc_feature (1)..(1867): Ortholog of  Ceres SEQ ID NO 13660287 as cited in SEQ ID NO 67316
gacatcctcaagcgataacaccacaaacaaaacaacaaaccaaaaaaaaaaaaaagagagagagagagagcaaatctccatcatcatcatggactcgtctccaaacgacggcgtacaccaaccgcttctccatcctcaaccatctccatctccgccggagtcaaccaacggcgagctagaaactgtcctctccgacgtagaaactcctctgtttctccgcctacgtaaagccaccataatcgaatcaaagcttctctttaacctcgctgcaccagccgtcatcgtctacatgattaactacctcatgtccatgtctactcaaatcttctccggccatctcggtaacctcgaactcgccgccgcttctcttggtaacaccggtattcaagtcttcgcttacggtctcatgctaggcatggggagtgcagtggagacgttatgtggtcaagcgtacggtggtagaaaatacgagatgcttggagtttatctccaaagatcaaccgtattactaacactcaccggcctcctccttactttaatctacgttttctccgaaccaatccttctcttcctcggtgaatctcccgcaatcgcttcggccgcatcgctcttcgtctacggtcttatccctcaaatctttgcctacgcagcgaactttccaatacaaaaatttctccaatcacaaagcatagtagctccaagtgcttatatctcaacggctacgctctttgttcaccttcttttaagttggctcgcggtttacaagcttggtatgggacttcttggtgcgtcgcttgtgcttagcttgtcgtggtggattatagtcgtggctcagtttgtttatattgtgacgagtgagaggtgtcgtgagacgtggagaggttttagtgttcaagctttctcgggtttgtggagtttctttaaactctccgccgcttctgccgtgatgctttgccttgagacttggtattttcagattctcgttcttcttgccggacttctcgagaatcctgaacttgctcttgattcactctctatttgcatgacgatttcagggtgggtgttcatgatatctgttggattcaatgcagcgataagtgtaagagtgagcaatgaacttggagctgggaaccctaaatcagcagctttttctgtgatcatcgttaacatttattcgttaatcacttgtgtgatcctagccattgttattttagcgtgccgcgatgttttaagctatgctttcactgagggtaaagaagtctcggacgctgtttctgatctctgtccgcttcttgccgtaacacttgtccttaacggaatccaacctgtcctctctggtgtggcggttggatgcggttggcaaacgtttgtggcgaaggttaacgttggatgttactacattattggaattcctcttggggctctctttgggttttactttaacttcggtgccaagggtatatggacggggatgatcggtggtacggttatacaaacgtttattttggcgtgggtcacgtttagaacagattggacaaaagaagtggaagaagcttccaaaaggttggacaaatggagcaacaagaaacaagaagttgttcctgaatgatgcaggttgatgaaagtttggtatccaaggaaccgattagattcatcggtaaaccgatgcaaatgctcaaagtaacatgtgagctggtaaaaaaggatatggatcaaccttttaaacttctacaactcaattttaagttttttgtgttcttgtttaaaatgttagaggtaggttatgtatttttgtatgccaagattataatagttactgcgttattttttattgatttatatatatatgcatgtctttgattggatt

SEQ ID NO: 50479 - protein, 535 aa, Arabidopsis thaliana
  peptide (1)..(535): Ceres Seq. ID no. 15221232
TSSSDNTTNKTTNQKKKKEREREQISIIIMDSSPNDGVHQPLLHPQPSPSPPESTNGELETVLSDVETPLFLRLRKATIIESKLLFNLAAPAVIVYMINYLMSMSTQIFSGHLGNLELAAASLGNTGIQVFAYGLMLGMGSAVETLCGQAYGGRKYEMLGVYLQRSTVLLTLTGLLLTLIYVFSEPILLFLGESPAIASAASLFVYGLIPQIFAYAANFPIQKFLQSQSIVAPSAYISTATLFVHLLLSWLAVYKLGMGLLGASLVLSLSWWIIVVAQFVYIVTSERCRETWRGFSVQAFSGLWSFFKLSAASAVMLCLETWYFQILVLLAGLLENPELALDSLSICMTISGWVFMISVGFNAAISVRVSNELGAGNPKSAAFSVIIVNIYSLITCVILAIVILACRDVLSYAFTEGKEVSDAVSDLCPLLAVTLVLNGIQPVLSGVAVGCGWQTFVAKVNVGCYYIIGIPLGALFGFYFNFGAKGIWTGMIGGTVIQTFILAWVTFRTDWTKEVEEASKRLDKWSNKKQEVVPE

SEQ ID NO: 50480 - protein, 506 aa, Arabidopsis thaliana
  peptide (1)..(506): Ceres Seq. ID no. 15221233
MDSSPNDGVHQPLLHPQPSPSPPESTNGELETVLSDVETPLFLRLRKATIIESKLLFNLAAPAVIVYMINYLMSMSTQIFSGHLGNLELAAASLGNTGIQVFAYGLMLGMGSAVETLCGQAYGGRKYEMLGVYLQRSTVLLTLTGLLLTLIYVFSEPILLFLGESPAIASAASLFVYGLIPQIFAYAANFPIQKFLQSQSIVAPSAYISTATLFVHLLLSWLAVYKLGMGLLGASLVLSLSWWIIVVAQFVYIVTSERCRETWRGFSVQAFSGLWSFFKLSAASAVMLCLETWYFQILVLLAGLLENPELALDSLSICMTISGWVFMISVGFNAAISVRVSNELGAGNPKSAAFSVIIVNIYSLITCVILAIVILACRDVLSYAFTEGKEVSDAVSDLCPLLAVTLVLNGIQPVLSGVAVGCGWQTFVAKVNVGCYYIIGIPLGALFGFYFNFGAKGIWTGMIGGTVIQTFILAWVTFRTDWTKEVEEASKRLDKWSNKKQEVVPE

SEQ ID NO: 50481 - protein, 439 aa, Arabidopsis thaliana
  peptide (1)..(439): Ceres Seq. ID no. 15221234
MINYLMSMSTQIFSGHLGNLELAAASLGNTGIQVFAYGLMLGMGSAVETLCGQAYGGRKYEMLGVYLQRSTVLLTLTGLLLTLIYVFSEPILLFLGESPAIASAASLFVYGLIPQIFAYAANFPIQKFLQSQSIVAPSAYISTATLFVHLLLSWLAVYKLGMGLLGASLVLSLSWWIIVVAQFVYIVTSERCRETWRGFSVQAFSGLWSFFKLSAASAVMLCLETWYFQILVLLAGLLENPELALDSLSICMTISGWVFMISVGFNAAISVRVSNELGAGNPKSAAFSVIIVNIYSLITCVILAIVILACRDVLSYAFTEGKEVSDAVSDLCPLLAVTLVLNGIQPVLSGVAVGCGWQTFVAKVNVGCYYIIGIPLGALFGFYFNFGAKGIWTGMIGGTVIQTFILAWVTFRTDWTKEVEEASKRLDKWSNKKQEVVPE

SEQ ID NO: 50482 - DNA, 1881 bp, Arabidopsis thaliana
  misc_feature (1)..(1881): Ceres Seq. ID no. 13592686
  misc_feature (1)..(1881): Ortholog of  Ceres SEQ ID NO 12465151 as cited in SEQ ID NO 67782
gaagagagagagatatagagacactgaaagcaaagaccaaaaaagaaaaattaaaaagagagagaggaaaatggagagcgacgaagcagcagcagtgtctcctcaagcaacgacaccgagcggaggaaccggagcttctgggccgaagaagagaggtcggaaacctaaaaccaaggaagattctcagacgccgtcgtctcagcaacagagcgatgttaaaatgaaagaaagtgggaagaaaacgcagcagtcgccgagtgttgacgagaagtactctcagtggaaaggtctcgtccccattctctacgactggctcgctaaccataacctcgtctggccttcactctcttgcagatggggtccgcagcttgagcaagcaacctacaagaatcgccagcgtctgtacctctcagagcaaactgatggaagtgtgcccaatactttggtcatagcaaattgtgaagttgttaagccaagggttgctgcagcagagcacatttctcagttcaatgaagaagcacgttctccatttgtgaagaagtacaagaccatcattcaccctggagaggttaacagaatcagggaactcccacagaatagtaagattgttgctactcacaccgacagtcctgatgttctcatttgggatgttgaaacccaaccaaaccgtcatgctgtgcttggagctgcaaattcccgtccagatttgatactaactgggcaccaagataatgctgaatttgctcttgccatgtgcccaacggaaccctttgtgctctccggaggcaaggacaagtcagttgttttgtggagtatccaagatcacatcacaacgattgggacagattccaaatcatctggatctatcatcaaacagactggtgaaggtactgataagaatgagagtcctactgttggcccacgaggtgtatatcatggccatgaagatacagttgaagatgtggcattcagcccgacgagtgcacaagaattctgcagtgttggtgatgattcttgccttatactatgggatgcgagaactggcacaaaccctgtcacgaaggttgaaaaagcgcatgatgctgatcttcattgtgttgattggaatcctcatgacgacaatctgatcctgacagggtcagcagacaacactgtccggttgtttgatcgtaggaagcttaccgctaatggagttggttcgcctatttacaaatttgagggacacaaagctgctgttctttgtgttcagtggtctcctgataagtcatccgtctttgggagctctgcagaagatggtctcttgaacatctgggattatgacagggtcagtaagaagtctgatcgtgcagctaaaagccccgctgggctcttcttccagcatgctggtcacagggacaaagttgttgatttccactggaatgcttcagacccttggactattgtcagtgtttctgatgactgtgagactactggtggaggtggaacattgcagatatggcggatgagtgacttgatttacagaccagaagaagaagtcgtggcagaattggagaagttcaagtcgcatgttatgacttgtgcctccaagccttaagagtaaagaaaacccattgtctatctatctatcgcctatggtaaactaatgcgggttttagcgaggagtcttggtttttgtaaggctggtttgtcttttgagatattggtggtagcttttaggacctttccatatcagttaggggtacatggttctggttcatgatcctgtttcatcagactcttaggtgctgttttgttcaactgagatgttaatcaaatcggaccaactttatgtgttttggtttaaggtttcaatacttggcctgaacctaatgattccttctc

SEQ ID NO: 50483 - protein, 530 aa, Arabidopsis thaliana
  peptide (1)..(530): Ceres Seq. ID no. 13592687
KRERYRDTESKDQKRKIKKRERKMESDEAAAVSPQATTPSGGTGASGPKKRGRKPKTKEDSQTPSSQQQSDVKMKESGKKTQQSPSVDEKYSQWKGLVPILYDWLANHNLVWPSLSCRWGPQLEQATYKNRQRLYLSEQTDGSVPNTLVIANCEVVKPRVAAAEHISQFNEEARSPFVKKYKTIIHPGEVNRIRELPQNSKIVATHTDSPDVLIWDVETQPNRHAVLGAANSRPDLILTGHQDNAEFALAMCPTEPFVLSGGKDKSVVLWSIQDHITTIGTDSKSSGSIIKQTGEGTDKNESPTVGPRGVYHGHEDTVEDVAFSPTSAQEFCSVGDDSCLILWDARTGTNPVTKVEKAHDADLHCVDWNPHDDNLILTGSADNTVRLFDRRKLTANGVGSPIYKFEGHKAAVLCVQWSPDKSSVFGSSAEDGLLNIWDYDRVSKKSDRAAKSPAGLFFQHAGHRDKVVDFHWNASDPWTIVSVSDDCETTGGGGTLQIWRMSDLIYRPEEEVVAELEKFKSHVMTCASKP

SEQ ID NO: 50484 - protein, 507 aa, Arabidopsis thaliana
  peptide (1)..(507): Ceres Seq. ID no. 13592688
MESDEAAAVSPQATTPSGGTGASGPKKRGRKPKTKEDSQTPSSQQQSDVKMKESGKKTQQSPSVDEKYSQWKGLVPILYDWLANHNLVWPSLSCRWGPQLEQATYKNRQRLYLSEQTDGSVPNTLVIANCEVVKPRVAAAEHISQFNEEARSPFVKKYKTIIHPGEVNRIRELPQNSKIVATHTDSPDVLIWDVETQPNRHAVLGAANSRPDLILTGHQDNAEFALAMCPTEPFVLSGGKDKSVVLWSIQDHITTIGTDSKSSGSIIKQTGEGTDKNESPTVGPRGVYHGHEDTVEDVAFSPTSAQEFCSVGDDSCLILWDARTGTNPVTKVEKAHDADLHCVDWNPHDDNLILTGSADNTVRLFDRRKLTANGVGSPIYKFEGHKAAVLCVQWSPDKSSVFGSSAEDGLLNIWDYDRVSKKSDRAAKSPAGLFFQHAGHRDKVVDFHWNASDPWTIVSVSDDCETTGGGGTLQIWRMSDLIYRPEEEVVAELEKFKSHVMTCASKP

SEQ ID NO: 50485 - protein, 457 aa, Arabidopsis thaliana
  peptide (1)..(457): Ceres Seq. ID no. 13592689
MKESGKKTQQSPSVDEKYSQWKGLVPILYDWLANHNLVWPSLSCRWGPQLEQATYKNRQRLYLSEQTDGSVPNTLVIANCEVVKPRVAAAEHISQFNEEARSPFVKKYKTIIHPGEVNRIRELPQNSKIVATHTDSPDVLIWDVETQPNRHAVLGAANSRPDLILTGHQDNAEFALAMCPTEPFVLSGGKDKSVVLWSIQDHITTIGTDSKSSGSIIKQTGEGTDKNESPTVGPRGVYHGHEDTVEDVAFSPTSAQEFCSVGDDSCLILWDARTGTNPVTKVEKAHDADLHCVDWNPHDDNLILTGSADNTVRLFDRRKLTANGVGSPIYKFEGHKAAVLCVQWSPDKSSVFGSSAEDGLLNIWDYDRVSKKSDRAAKSPAGLFFQHAGHRDKVVDFHWNASDPWTIVSVSDDCETTGGGGTLQIWRMSDLIYRPEEEVVAELEKFKSHVMTCASKP

SEQ ID NO: 50486 - DNA, 1542 bp, Arabidopsis thaliana
  misc_feature (1)..(1542): Ceres Seq. ID no. 13592362
  misc_feature (1)..(1542): Ortholog of  Ceres SEQ ID NO 13581273 as cited in SEQ ID NO 54551
  misc_feature (1)..(1542): Ortholog of  Ceres SEQ ID NO 13594209 as cited in SEQ ID NO 59089
  misc_feature (1)..(1542): Ortholog of  Ceres SEQ ID NO 14306857 as cited in SEQ ID NO 60035
  misc_feature (1)..(1542): Ortholog of  Ceres SEQ ID NO 14307960 as cited in SEQ ID NO 66187
  misc_feature (1)..(1542): Ortholog of  Ceres SEQ ID NO 13502874 as cited in SEQ ID NO 66298
  misc_feature (1)..(1542): Ortholog of  Ceres SEQ ID NO 12614124 as cited in SEQ ID NO 68392
gaaaagaagcaatcaacaagaaaatggacctcacccaaatcctactcctctcctttctctttctcactatctccatcaaactcttgctcacaaaatctaaccggaaacctaatcttcctccttctccggcttaccctttaccggttatcggccacctccacctcctcaagcaaccggtccaccgaacattccactccatctctaagtcccttggaaatgctccaatcttccacctccgcctgggaaaccgcctcgtttacgtcatctcctcacactccatagccgaagaatgtttcaccaaaaacgacgtcgttcttgcgaaccgtcctgatatcatcatggccaaacacgtcggctataactttaccaatatgattgcagcatcttacggcgaccactggaggaatctccgccgcatcgccgccgtcgagatattttcttctcatagaatcagtaccttttcttctatccgtaaagacgagatccgacggctcataacacatctctctagagactccttgcacggatttgttgaagtggagttgaaatcgttattaaccaacttggcattcaacaacatcatcatgatggtagccggaaaacgatattacggtaccggtacagaagacaatgatgaagccaagctcgtgagggaacttatagcggagataatggccggcgccggttctggaaatttggctgattatcttccgtccataaattgggtcacaaactttgagaaccagaccaaaatcttggggaatcgactcgatagagtcctgcaaaaactggttgatgagaaacgtgcagagaaagaaaagggtcaaactttgatcgatcatttgctttctttccaagaaaccgaacccgagtactatactgatgtcatcatcaaaggaatcatactggctttggttcttgcggggacagatacatcttcagtgacgttggaatgggcaatgtcaaatttgctgaaccatccagagatacttgagaaagcgagagcggagatcgatgataaaatcggttcagaccggttagttgaagaatcagatattgtaaatctccattatctccaaaacattgtgtcagaaacattacgtttgtatcctgcggttccactactactccctcatttctcatcggatgaatgtaaagtggcgggctacgatatgccacgtcgcacgttgttattaacaaacgtatgggcgatgcatagagatccaggtttatgggaagagccagagaggttcaagccggagaggttcgagaaagaaggagaggctcgaaagctaatgccgtttgggatgggacgacgagcttgtcctggagctgagcttgggaagcggttagtgagccttgctcttgggtgcttgattcagtctttcgagtgggagagagttggtgcagaacttgtggacatgactgaaggcgaagggatcactatgcctaaagctactccgttgcgagctatgtgcaaggcacgtgccattgttggtaaaacgatataattgacgtatgtaggatctattgtgtagaaac

SEQ ID NO: 50487 - protein, 502 aa, Arabidopsis thaliana
  peptide (1)..(502): Ceres Seq. ID no. 13592363
KEAINKKMDLTQILLLSFLFLTISIKLLLTKSNRKPNLPPSPAYPLPVIGHLHLLKQPVHRTFHSISKSLGNAPIFHLRLGNRLVYVISSHSIAEECFTKNDVVLANRPDIIMAKHVGYNFTNMIAASYGDHWRNLRRIAAVEIFSSHRISTFSSIRKDEIRRLITHLSRDSLHGFVEVELKSLLTNLAFNNIIMMVAGKRYYGTGTEDNDEAKLVRELIAEIMAGAGSGNLADYLPSINWVTNFENQTKILGNRLDRVLQKLVDEKRAEKEKGQTLIDHLLSFQETEPEYYTDVIIKGIILALVLAGTDTSSVTLEWAMSNLLNHPEILEKARAEIDDKIGSDRLVEESDIVNLHYLQNIVSETLRLYPAVPLLLPHFSSDECKVAGYDMPRRTLLLTNVWAMHRDPGLWEEPERFKPERFEKEGEARKLMPFGMGRRACPGAELGKRLVSLALGCLIQSFEWERVGAELVDMTEGEGITMPKATPLRAMCKARAIVGKTI

SEQ ID NO: 50488 - protein, 495 aa, Arabidopsis thaliana
  peptide (1)..(495): Ceres Seq. ID no. 13592364
MDLTQILLLSFLFLTISIKLLLTKSNRKPNLPPSPAYPLPVIGHLHLLKQPVHRTFHSISKSLGNAPIFHLRLGNRLVYVISSHSIAEECFTKNDVVLANRPDIIMAKHVGYNFTNMIAASYGDHWRNLRRIAAVEIFSSHRISTFSSIRKDEIRRLITHLSRDSLHGFVEVELKSLLTNLAFNNIIMMVAGKRYYGTGTEDNDEAKLVRELIAEIMAGAGSGNLADYLPSINWVTNFENQTKILGNRLDRVLQKLVDEKRAEKEKGQTLIDHLLSFQETEPEYYTDVIIKGIILALVLAGTDTSSVTLEWAMSNLLNHPEILEKARAEIDDKIGSDRLVEESDIVNLHYLQNIVSETLRLYPAVPLLLPHFSSDECKVAGYDMPRRTLLLTNVWAMHRDPGLWEEPERFKPERFEKEGEARKLMPFGMGRRACPGAELGKRLVSLALGCLIQSFEWERVGAELVDMTEGEGITMPKATPLRAMCKARAIVGKTI

SEQ ID NO: 50489 - protein, 390 aa, Arabidopsis thaliana
  peptide (1)..(390): Ceres Seq. ID no. 13592365
MAKHVGYNFTNMIAASYGDHWRNLRRIAAVEIFSSHRISTFSSIRKDEIRRLITHLSRDSLHGFVEVELKSLLTNLAFNNIIMMVAGKRYYGTGTEDNDEAKLVRELIAEIMAGAGSGNLADYLPSINWVTNFENQTKILGNRLDRVLQKLVDEKRAEKEKGQTLIDHLLSFQETEPEYYTDVIIKGIILALVLAGTDTSSVTLEWAMSNLLNHPEILEKARAEIDDKIGSDRLVEESDIVNLHYLQNIVSETLRLYPAVPLLLPHFSSDECKVAGYDMPRRTLLLTNVWAMHRDPGLWEEPERFKPERFEKEGEARKLMPFGMGRRACPGAELGKRLVSLALGCLIQSFEWERVGAELVDMTEGEGITMPKATPLRAMCKARAIVGKTI

SEQ ID NO: 50490 - DNA, 1278 bp, Arabidopsis thaliana
  misc_feature (1)..(1278): Ceres Seq. ID no. 13648210
  misc_feature (1)..(1278): Ortholog of  Ceres SEQ ID NO 13638849 as cited in SEQ ID NO 52046
  misc_feature (1)..(1278): Ortholog of  Ceres SEQ ID NO 13599613 as cited in SEQ ID NO 0
  misc_feature (1)..(1278): Ortholog of  Ceres SEQ ID NO 15179570 as cited in SEQ ID NO 0
atcctcacgtcactctttctctctaaaactccataaagctcaaactttttctcattctctctctaaagctaaaatctttttcacactcttcttcatgttcaagcaatgggaaacctctgttctttgtttactccgccaaaacccgtgaagaaaagaaaacccatcacaaaaagacaatcttctatcggagcttcttcttccgggtcgggtcttaatagtaaccgttggaacaaccgggtcagatcatcttcttctagaagagacaacaagttcgaagatgctttgattcaagaacatgctcttgctgctgctgctgttttgttccgacagcaaaacggtggtggaggatcgttgccgtttgatcggtcggcttcacaacgttatcaaggttcttgttcgaagaagaaccagttgcctcgaagctcgagttcgaggtcaaggtcttctacagatcctctgttacaacctcatcagtttcttaatcagggtataaagctagatgacttggaaacaaaccattttgtccttgttcatggaggtagttttggcgcttggtgttggtataaaaccattgcacttcttgaggaagatggttttaaagttaccgctatagacttagcaggttgcggtattaactcgattaatataaatggcatcgctagtttgtcacaatatgtcaagccacttaccgatattcttgaaaagcttcccataggagagaaggtgatattggtcggtcacgattttggtggagcatgtatatcttatgctatggaactctttccttcaaagatttcgaaagcggttttcctcgctgcagcgatgttaacaaatggtcaaagtacactcgatatgttctccttgaaggccggtcagaacgatttaatgagaaaagctcagatatttatctacacaaatggtaatgaaaaccctccaaccgcaattgacttagacaaatctcttctcaaagaccttttgttcaaccaaagcccttcgaaggacgttgcattggcttctgtatcaatgaggtcaattccatttgcgccggttcttgaaaaactctctctttcggatgctaactacggatcagttagacggtactatatagagacgttagaagacaatgctataccagtgactcttcaagaaaacatgatcaatagtagtcctcctgaaaaggtttatcggttaaaaggcgccgaccatgctcctttcttttccaaaccacaagctttgcataaacttctgcttgagatcgccagaattagccctgcttaa

SEQ ID NO: 50491 - protein, 390 aa, Arabidopsis thaliana
  peptide (1)..(390): Ceres Seq. ID no. 15219531
MGNLCSLFTPPKPVKKRKPITKRQSSIGASSSGSGLNSNRWNNRVRSSSSRRDNKFEDALIQEHALAAAAVLFRQQNGGGGSLPFDRSASQRYQGSCSKKNQLPRSSSSRSRSSTDPLLQPHQFLNQGIKLDDLETNHFVLVHGGSFGAWCWYKTIALLEEDGFKVTAIDLAGCGINSININGIASLSQYVKPLTDILEKLPIGEKVILVGHDFGGACISYAMELFPSKISKAVFLAAAMLTNGQSTLDMFSLKAGQNDLMRKAQIFIYTNGNENPPTAIDLDKSLLKDLLFNQSPSKDVALASVSMRSIPFAPVLEKLSLSDANYGSVRRYYIETLEDNAIPVTLQENMINSSPPEKVYRLKGADHAPFFSKPQALHKLLLEIARISPA

SEQ ID NO: 50492 - DNA, 1678 bp, Arabidopsis thaliana
  misc_feature (1)..(1678): Ceres Seq. ID no. 12602001
  misc_feature (1)..(1678): Ortholog of  Ceres SEQ ID NO 13594209 as cited in SEQ ID NO 59089
  misc_feature (1)..(1678): Ortholog of  Ceres SEQ ID NO 12614124 as cited in SEQ ID NO 68392
acattttcacatcaaaatcacattccttccatggccttcttctccatgatctccattctccttggctttgttatctcctccttcatcttcatcttcttcttcaagaaacttctctccttctccagaaagaacatgtctgaagtctccactctcccctctgttccagtggtaccagggtttcctgttattgggaacttgctgcaactaaaagagaagaaacctcacaagactttcactagatggtcagagatttatggtcctatttactctataaagatgggttcttcttctcttattgtcctcaattctactgagactgccaaagaggccatggtgacgcggttttcgtctatctcaacgaggaagttgtcaaatgcgttgacagtccttacttgtgacaaatctatggttgctactagtgattatgatgatttccacaagttggtgaaacggtgtctcttgaacggtcttttgggtgctaatgcacagaaacgaaaaagacattacagagatgcactcattgaaaatgtgtcttccaagttgcatgcccatcctagggaccatccacaagaacctgtaaacttcagagctatatttgagcatgagcttttcggtgtagcattgaagcaagcttttgggaaagatgtggaatccatttatgttaaagaactcggtgtgactttgtcgaaagacgagatcttcaaggttttagtacatgacatgatggaaggtgcaattgatgttgattggagagacttcttcccatacttgaaatggattccaaataaaagttttgaagcaagaatccagcaaaagcataaacgtagactcgcggtgatgaatgctctgattcaagatcgactgaagcagaatggttcagaatcggatgatgattgctatctcaacttcttgatgtcggaagcgaaaacactaaccaaggagcaaattgctatcttggtttgggagacgattatcgagacagctgacactactttggttacaactgaatgggccatctatgagctcgctaagcatccaagtgtccaagatcgtctgtgcaaagaaatccaaaatgtctgcggaggagaaaagttcaaagaagagcaattgtctcaagttccttatctcaatggagtctttcatgaaacgcttaggaaatacagtcctgctcctctagttcccattcgctacgcccacgaggatacgcaaatcggaggctatcatgtccctgcaggaagtgagattgcaataaacatatatggatgcaacatggataagaagcgttgggagagaccagaggactggtggccggagcggtttcttgatgatggcaaatatgaaacgtcagatcttcacaagacaatggcgtttggagcgggaaagagggtttgtgctggtgctcttcaagcatctctcatggcaggcattgctattggaagattagtgcaagaattcgagtggaagcttagagatggcgaagaagagaatgtggatacatatggcttgacctctcagaagctttatcctcttatggctattatcaatccaaggcgttcttaagacagaaatctcttctttcttttgttagtttttaaccttgtatcaacttttatttgtaacaaatgctgttttgtagtactatttatgttttactgtgttatattttactatcctctga

SEQ ID NO: 50493 - protein, 519 aa, Arabidopsis thaliana
  peptide (1)..(519): Ceres Seq. ID no. 12602002
TFSHQNHIPSMAFFSMISILLGFVISSFIFIFFFKKLLSFSRKNMSEVSTLPSVPVVPGFPVIGNLLQLKEKKPHKTFTRWSEIYGPIYSIKMGSSSLIVLNSTETAKEAMVTRFSSISTRKLSNALTVLTCDKSMVATSDYDDFHKLVKRCLLNGLLGANAQKRKRHYRDALIENVSSKLHAHPRDHPQEPVNFRAIFEHELFGVALKQAFGKDVESIYVKELGVTLSKDEIFKVLVHDMMEGAIDVDWRDFFPYLKWIPNKSFEARIQQKHKRRLAVMNALIQDRLKQNGSESDDDCYLNFLMSEAKTLTKEQIAILVWETIIETADTTLVTTEWAIYELAKHPSVQDRLCKEIQNVCGGEKFKEEQLSQVPYLNGVFHETLRKYSPAPLVPIRYAHEDTQIGGYHVPAGSEIAINIYGCNMDKKRWERPEDWWPERFLDDGKYETSDLHKTMAFGAGKRVCAGALQASLMAGIAIGRLVQEFEWKLRDGEEENVDTYGLTSQKLYPLMAIINPRRS

SEQ ID NO: 50494 - protein, 509 aa, Arabidopsis thaliana
  peptide (1)..(509): Ceres Seq. ID no. 12602003
MAFFSMISILLGFVISSFIFIFFFKKLLSFSRKNMSEVSTLPSVPVVPGFPVIGNLLQLKEKKPHKTFTRWSEIYGPIYSIKMGSSSLIVLNSTETAKEAMVTRFSSISTRKLSNALTVLTCDKSMVATSDYDDFHKLVKRCLLNGLLGANAQKRKRHYRDALIENVSSKLHAHPRDHPQEPVNFRAIFEHELFGVALKQAFGKDVESIYVKELGVTLSKDEIFKVLVHDMMEGAIDVDWRDFFPYLKWIPNKSFEARIQQKHKRRLAVMNALIQDRLKQNGSESDDDCYLNFLMSEAKTLTKEQIAILVWETIIETADTTLVTTEWAIYELAKHPSVQDRLCKEIQNVCGGEKFKEEQLSQVPYLNGVFHETLRKYSPAPLVPIRYAHEDTQIGGYHVPAGSEIAINIYGCNMDKKRWERPEDWWPERFLDDGKYETSDLHKTMAFGAGKRVCAGALQASLMAGIAIGRLVQEFEWKLRDGEEENVDTYGLTSQKLYPLMAIINPRRS

SEQ ID NO: 50495 - protein, 504 aa, Arabidopsis thaliana
  peptide (1)..(504): Ceres Seq. ID no. 12602004
MISILLGFVISSFIFIFFFKKLLSFSRKNMSEVSTLPSVPVVPGFPVIGNLLQLKEKKPHKTFTRWSEIYGPIYSIKMGSSSLIVLNSTETAKEAMVTRFSSISTRKLSNALTVLTCDKSMVATSDYDDFHKLVKRCLLNGLLGANAQKRKRHYRDALIENVSSKLHAHPRDHPQEPVNFRAIFEHELFGVALKQAFGKDVESIYVKELGVTLSKDEIFKVLVHDMMEGAIDVDWRDFFPYLKWIPNKSFEARIQQKHKRRLAVMNALIQDRLKQNGSESDDDCYLNFLMSEAKTLTKEQIAILVWETIIETADTTLVTTEWAIYELAKHPSVQDRLCKEIQNVCGGEKFKEEQLSQVPYLNGVFHETLRKYSPAPLVPIRYAHEDTQIGGYHVPAGSEIAINIYGCNMDKKRWERPEDWWPERFLDDGKYETSDLHKTMAFGAGKRVCAGALQASLMAGIAIGRLVQEFEWKLRDGEEENVDTYGLTSQKLYPLMAIINPRRS

SEQ ID NO: 50496 - DNA, 3416 bp, Arabidopsis thaliana
  misc_feature (1)..(3416): Ceres Seq. ID no. 13578878
  misc_feature (1)..(3416): Ortholog of  Ceres SEQ ID NO 14303870 as cited in SEQ ID NO 53632
cgtcttcacttaccttctctctacactcacaccatctcacaaccctaatctctcccacacaagagagatagagagaaacaatgaaactttttcttctccttctttttcttctccacatttctcataccttcaccgcaagccgaccaatctccgagttccgtgctctcctctcactcaaaacctctctcaccggcgccggagatgacaaaaactcgcctctctcttcctggaaagtctcaacaagcttctgtacatggattggtgtcacgtgcgatgtatctcgccgtcacgtgacttctcttgatctctccggtctcaacctctccggtactctttccccagatgtttctcatttacgtcttcttcagaatctatcactcgctgaaaatctaatctccggtccgattccgccggaaatctcgagcctttccggtcttcgtcacttaaatctctcgaacaatgtcttcaacggttcgtttcccgatgagatttcttctggattggtgaatctccgagttcttgatgtctacaacaacaatctaaccggagatttaccggtttccgtcaccaatctgactcagctccggcaccttcacctcggtggtaactacttcgctggaaagatcccgccttcgtacggaagctggccagttattgagtatctagcggtttccggcaacgagcttgtcgggaaaatccctccagagatcggaaacctaacgactctccgggagctttacatcggctactacaacgctttcgaagacggtcttcctccagagatcggaaatctatcggagctagtcagattcgacggagctaattgcggattaaccggtgagattccgccggagattgggaagcttcagaaactcgatacgcttttcttgcaagtgaatgtcttctccggtccattaacttgggagctaggaacgctatcgagtttaaaatcaatggatttgtctaacaacatgttcaccggagagattccagcgagtttcgcagagttgaagaatctcacgcttttgaatctcttccgtaacaaacttcacggcgagataccggagttcatcggagatttgccggagcttgaagtgttacagctttgggagaacaatttcaccggaagcatcccgcagaaattaggagaaaacggtaaactaaatctcgtcgatctctcttccaataagctgaccggaactttaccgccgaacatgtgctccggtaacaagttagaaactttaatcactcttggaaactttctctttggttcaatccctgattctcttggtaaatgtgagtctttgacccggatccgaatgggtgagaatttcctgaacgggtcaatcccaaaaggactattcggattacccaaattaactcaagtggagctccaagataattatctctccggagagttaccagtcgccggaggtgtctctgttaatcttggtcagatcagtttatcaaacaaccagctctcaggtccattacctccggcgatcgggaacttcaccggcgttcagaaacttcttcttgatggaaacaagttccaaggtcctattccttcagaggtagggaagcttcagcagctctcgaagattgatttcagccacaacttgttctccggtcgaatcgcgccggagattagtcgttgcaagctcttaacgtttgttgatctgagcagaaacgagctctccggtgaaatcccaaatgagatcactgctatgaagatattgaattacttgaacctgtcgagaaaccatctggttggatcaatccctggttcaatctcgtcaatgcagagcttaacatctcttgatttctcttacaacaacctctccggtttagttccgggaacaggacaattcagttacttcaactacacatcgttcttgggtaatcctgatctctgtggtccttatcttggtccttgtaaagacggtgttgctaaaggaggtcaccagagtcatagtaaaggacctttatcagcttctatgaagttattgcttgttcttggactacttgtttgttcgattgcgttcgcggtagtagccataatcaaagctagatcattgaaaaaggcgagtgagtcacgggcttggaggttaacagctttccagagactagacttcacgtgtgacgatgtcttggattctctcaaagaagacaacattataggcaaaggaggagctggtattgtctataaaggcgtaatgcctaatggtgatctagtcgcggttaaaagactcgctgcaatgtctcgtggatcttcccatgatcacggcttcaacgcagagattcaaaccttaggaaggataagacacagacacatagtgaggcttctcggattttgctcaaaccacgagacgaatctacttgtctatgagtacatgcctaatggtagtctcggtgaggtgcttcacggtaagaaaggaggacacttgcattgggacacacgttacaagattgctcttgaagctgctaaaggactctgttaccttcatcacgattgttctccattgatcgttcacagagatgtcaaatcaaacaacatcctccttgattcaaactttgaagctcatgttgctgactttggtctcgctaaattccttcaagattccggtacttctgaatgtatgtctgcaatcgctggctcttacggctacatagctccagagtatgcgtatacgttgaaggtagatgagaagagcgatgtgtatagtttcggtgtggttcttttggaactcgtcaccggaagaaaacctgtcggagaatttggagacggtgtcgatatagtgcaatgggttcgtaaaatgactgattcgaacaaggattcggttctgaaagtattggatccgagactttcttcgattccgattcatgaagtgacgcacgtcttctatgtagcgatgctctgtgtagaagaacaagctgttgagaggccgactatgagagaagttgttcagattctcactgagatcccgaagttgccaccgtcgaaggatcagccgatgacggaatcagcgccggagagtgagctttcgccgaagtctggtgttcaaagtccgccggatctactcaatctatgagagttttctgattcacggcggttaatttagggtaccggtataaggggtaaatttgtcttttcataaatgttattagcgatgagatttggttgttaatttactttaatccctcttagtacggtttgtgctttggtccggtttagtaggtttttttttgaaagaaggttgtttaaactctttttaagtgtgtttcattttccttttttatgtttttaatcggtattcggctttatttagtttgtaatttgtgttaatgaaaatgtacagttttttttttttgaaggaatttcaaaatatcttgaaaagagtgaaatgtgtaatgtg

SEQ ID NO: 50497 - protein, 1003 aa, Arabidopsis thaliana
  peptide (1)..(1003): Ceres Seq. ID no. 13578879
MKLFLLLLFLLHISHTFTASRPISEFRALLSLKTSLTGAGDDKNSPLSSWKVSTSFCTWIGVTCDVSRRHVTSLDLSGLNLSGTLSPDVSHLRLLQNLSLAENLISGPIPPEISSLSGLRHLNLSNNVFNGSFPDEISSGLVNLRVLDVYNNNLTGDLPVSVTNLTQLRHLHLGGNYFAGKIPPSYGSWPVIEYLAVSGNELVGKIPPEIGNLTTLRELYIGYYNAFEDGLPPEIGNLSELVRFDGANCGLTGEIPPEIGKLQKLDTLFLQVNVFSGPLTWELGTLSSLKSMDLSNNMFTGEIPASFAELKNLTLLNLFRNKLHGEIPEFIGDLPELEVLQLWENNFTGSIPQKLGENGKLNLVDLSSNKLTGTLPPNMCSGNKLETLITLGNFLFGSIPDSLGKCESLTRIRMGENFLNGSIPKGLFGLPKLTQVELQDNYLSGELPVAGGVSVNLGQISLSNNQLSGPLPPAIGNFTGVQKLLLDGNKFQGPIPSEVGKLQQLSKIDFSHNLFSGRIAPEISRCKLLTFVDLSRNELSGEIPNEITAMKILNYLNLSRNHLVGSIPGSISSMQSLTSLDFSYNNLSGLVPGTGQFSYFNYTSFLGNPDLCGPYLGPCKDGVAKGGHQSHSKGPLSASMKLLLVLGLLVCSIAFAVVAIIKARSLKKASESRAWRLTAFQRLDFTCDDVLDSLKEDNIIGKGGAGIVYKGVMPNGDLVAVKRLAAMSRGSSHDHGFNAEIQTLGRIRHRHIVRLLGFCSNHETNLLVYEYMPNGSLGEVLHGKKGGHLHWDTRYKIALEAAKGLCYLHHDCSPLIVHRDVKSNNILLDSNFEAHVADFGLAKFLQDSGTSECMSAIAGSYGYIAPEYAYTLKVDEKSDVYSFGVVLLELVTGRKPVGEFGDGVDIVQWVRKMTDSNKDSVLKVLDPRLSSIPIHEVTHVFYVAMLCVEEQAVERPTMREVVQILTEIPKLPPSKDQPMTESAPESELSPKSGVQSPPDLLNL

SEQ ID NO: 50498 - protein, 712 aa, Arabidopsis thaliana
  peptide (1)..(712): Ceres Seq. ID no. 13578880
MDLSNNMFTGEIPASFAELKNLTLLNLFRNKLHGEIPEFIGDLPELEVLQLWENNFTGSIPQKLGENGKLNLVDLSSNKLTGTLPPNMCSGNKLETLITLGNFLFGSIPDSLGKCESLTRIRMGENFLNGSIPKGLFGLPKLTQVELQDNYLSGELPVAGGVSVNLGQISLSNNQLSGPLPPAIGNFTGVQKLLLDGNKFQGPIPSEVGKLQQLSKIDFSHNLFSGRIAPEISRCKLLTFVDLSRNELSGEIPNEITAMKILNYLNLSRNHLVGSIPGSISSMQSLTSLDFSYNNLSGLVPGTGQFSYFNYTSFLGNPDLCGPYLGPCKDGVAKGGHQSHSKGPLSASMKLLLVLGLLVCSIAFAVVAIIKARSLKKASESRAWRLTAFQRLDFTCDDVLDSLKEDNIIGKGGAGIVYKGVMPNGDLVAVKRLAAMSRGSSHDHGFNAEIQTLGRIRHRHIVRLLGFCSNHETNLLVYEYMPNGSLGEVLHGKKGGHLHWDTRYKIALEAAKGLCYLHHDCSPLIVHRDVKSNNILLDSNFEAHVADFGLAKFLQDSGTSECMSAIAGSYGYIAPEYAYTLKVDEKSDVYSFGVVLLELVTGRKPVGEFGDGVDIVQWVRKMTDSNKDSVLKVLDPRLSSIPIHEVTHVFYVAMLCVEEQAVERPTMREVVQILTEIPKLPPSKDQPMTESAPESELSPKSGVQSPPDLLNL

SEQ ID NO: 50499 - protein, 706 aa, Arabidopsis thaliana
  peptide (1)..(706): Ceres Seq. ID no. 13578881
MFTGEIPASFAELKNLTLLNLFRNKLHGEIPEFIGDLPELEVLQLWENNFTGSIPQKLGENGKLNLVDLSSNKLTGTLPPNMCSGNKLETLITLGNFLFGSIPDSLGKCESLTRIRMGENFLNGSIPKGLFGLPKLTQVELQDNYLSGELPVAGGVSVNLGQISLSNNQLSGPLPPAIGNFTGVQKLLLDGNKFQGPIPSEVGKLQQLSKIDFSHNLFSGRIAPEISRCKLLTFVDLSRNELSGEIPNEITAMKILNYLNLSRNHLVGSIPGSISSMQSLTSLDFSYNNLSGLVPGTGQFSYFNYTSFLGNPDLCGPYLGPCKDGVAKGGHQSHSKGPLSASMKLLLVLGLLVCSIAFAVVAIIKARSLKKASESRAWRLTAFQRLDFTCDDVLDSLKEDNIIGKGGAGIVYKGVMPNGDLVAVKRLAAMSRGSSHDHGFNAEIQTLGRIRHRHIVRLLGFCSNHETNLLVYEYMPNGSLGEVLHGKKGGHLHWDTRYKIALEAAKGLCYLHHDCSPLIVHRDVKSNNILLDSNFEAHVADFGLAKFLQDSGTSECMSAIAGSYGYIAPEYAYTLKVDEKSDVYSFGVVLLELVTGRKPVGEFGDGVDIVQWVRKMTDSNKDSVLKVLDPRLSSIPIHEVTHVFYVAMLCVEEQAVERPTMREVVQILTEIPKLPPSKDQPMTESAPESELSPKSGVQSPPDLLNL

SEQ ID NO: 50500 - DNA, 1444 bp, Arabidopsis thaliana; identical to SEQ ID NO: 50085
  misc_feature (1)..(1444): Ceres Seq. ID no. 13592512
  misc_feature (1)..(1444): Ortholog of  Ceres SEQ ID NO 13598618 as cited in SEQ ID NO 65406

SEQ ID NO: 50501 - protein, 342 aa, Arabidopsis thaliana; identical to SEQ ID NO: 50086
  peptide (1)..(342): Ceres Seq. ID no. 13592513

SEQ ID NO: 50502 - protein, 331 aa, Arabidopsis thaliana; identical to SEQ ID NO: 50087
  peptide (1)..(331): Ceres Seq. ID no. 13592514

SEQ ID NO: 50503 - protein, 325 aa, Arabidopsis thaliana; identical to SEQ ID NO: 50088
  peptide (1)..(325): Ceres Seq. ID no. 13592515

SEQ ID NO: 50504 - DNA, 1843 bp, Arabidopsis thaliana
  misc_feature (1)..(1843): Ceres Seq. ID no. 12639038
  misc_feature (1)..(1843): Ortholog of  Ceres SEQ ID NO 15176563 as cited in SEQ ID NO 58992
gacgacggttctccgagagagagattttttaaaaatcaaattgcaacagaagagagataaaaggaagaaccctaatcgatttcgcgctctgattcgttctactttttccactgattaatctcaaaaaatggcgagtgagagttcgcaatcttcctcgccgtcgtcatctcaacctccgtcatctgtaccttctccgtcgccgggtaacaacgtcggcgatacgtttataggaagtttcatcagtctaatttctaagtacgagatccgttacgaaggcattctctaccatctcaacgttcaggactcgacgctaggtctaaaaaacgtaagatcatgtggaacggaggggaggaagaaagatgggccgcaaattccgccatgtgataaagtttacgattacattctttttcgtggaagtgacatcaaggatctccaagttaacccatctccatctgctcaatcaagacaagagattcaaagtgaacaagacgtcaatcagtcccctcactctaggccagctatgactatgagctctccgatttctggctatgatagcggttatggtttggggagaggatcacaatggatcaatacacctgctttgagtagtaaaccggttcctgtcacacaacattcatcagtccctttaagcttccagcctccttcagctaatgctggaagtttgacagaatcaccagtgagcttaattgattcaactcaaagtaatgctggttcctcgatgcccattccttcttttgtgcaaggtaacaaatttgcttccagtggtgtccctcttggtatgatgcagaagccagtttcatcctcctcgaccatacccaatggtccgcagattattgattatttttcttcaccaatcatggggttagtggatgattcatcacaggttgttactcgttcacctgacgtctcttccaatcaatcatactcttccaacccttctcctcttggtcaaacacaactccatactccacctggccttgcttcagtatcctctaacctttctccaccttctgaagcgcagctttctgctccaaatattcagaaaatttaccccagtgcaccccaggctattggtaaagttgtctatgaccctcagtctaatcatcctcaccgatctatacctcatgagttacctgctgtggcttctaattcagctcctgtgattcctggtccattgtcaaaatcgcctgagtcatttttcgatatggatccgtcactgcaatctaggcagcagatggtatataggggtcaagagatgtttgctgcaactaacccggcatcagcgaatgtgccatcacaaagttttgctcccagaaatcatgcaccattgctgcctcttccagtttcagctcatcagtctcggatccctagttctagcattgagtacactgaagaatttgattttgaagcaatgaatgagaagttcaagaagagtgaactatggggttatcttggaagaaataaccagaggaatcaaaatgattatggggaagaaactgcgattgagccaaacgcagaagggaagcctgcatataacaaggatgacttttttgacacaatctcgtgcaatcaacttgaccgtgtggcaagaagcggacaacagcacaaccagtttcccgaacacatgagacaagttcctgaggcatttggtaataattttcaaaggccacctccactacaaccaggtcagggtgcatatctcgctgcacaaaccaattacagaggcggataccataataacaacaacaacaactactactcaaactcgggttatggttactactctggtgggagaggccgaggcagaaacacacatttctga

SEQ ID NO: 50505 - protein, 571 aa, Arabidopsis thaliana
  peptide (1)..(571): Ceres Seq. ID no. 12639039
MASESSQSSSPSSSQPPSSVPSPSPGNNVGDTFIGSFISLISKYEIRYEGILYHLNVQDSTLGLKNVRSCGTEGRKKDGPQIPPCDKVYDYILFRGSDIKDLQVNPSPSAQSRQEIQSEQDVNQSPHSRPAMTMSSPISGYDSGYGLGRGSQWINTPALSSKPVPVTQHSSVPLSFQPPSANAGSLTESPVSLIDSTQSNAGSSMPIPSFVQGNKFASSGVPLGMMQKPVSSSSTIPNGPQIIDYFSSPIMGLVDDSSQVVTRSPDVSSNQSYSSNPSPLGQTQLHTPPGLASVSSNLSPPSEAQLSAPNIQKIYPSAPQAIGKVVYDPQSNHPHRSIPHELPAVASNSAPVIPGPLSKSPESFFDMDPSLQSRQQMVYRGQEMFAATNPASANVPSQSFAPRNHAPLLPLPVSAHQSRIPSSSIEYTEEFDFEAMNEKFKKSELWGYLGRNNQRNQNDYGEETAIEPNAEGKPAYNKDDFFDTISCNQLDRVARSGQQHNQFPEHMRQVPEAFGNNFQRPPPLQPGQGAYLAAQTNYRGGYHNNNNNNYYSNSGYGYYSGGRGRGRNTHF

SEQ ID NO: 50506 - protein, 440 aa, Arabidopsis thaliana
  peptide (1)..(440): Ceres Seq. ID no. 12639040
MTMSSPISGYDSGYGLGRGSQWINTPALSSKPVPVTQHSSVPLSFQPPSANAGSLTESPVSLIDSTQSNAGSSMPIPSFVQGNKFASSGVPLGMMQKPVSSSSTIPNGPQIIDYFSSPIMGLVDDSSQVVTRSPDVSSNQSYSSNPSPLGQTQLHTPPGLASVSSNLSPPSEAQLSAPNIQKIYPSAPQAIGKVVYDPQSNHPHRSIPHELPAVASNSAPVIPGPLSKSPESFFDMDPSLQSRQQMVYRGQEMFAATNPASANVPSQSFAPRNHAPLLPLPVSAHQSRIPSSSIEYTEEFDFEAMNEKFKKSELWGYLGRNNQRNQNDYGEETAIEPNAEGKPAYNKDDFFDTISCNQLDRVARSGQQHNQFPEHMRQVPEAFGNNFQRPPPLQPGQGAYLAAQTNYRGGYHNNNNNNYYSNSGYGYYSGGRGRGRNTHF

SEQ ID NO: 50507 - protein, 438 aa, Arabidopsis thaliana
  peptide (1)..(438): Ceres Seq. ID no. 12639041
MSSPISGYDSGYGLGRGSQWINTPALSSKPVPVTQHSSVPLSFQPPSANAGSLTESPVSLIDSTQSNAGSSMPIPSFVQGNKFASSGVPLGMMQKPVSSSSTIPNGPQIIDYFSSPIMGLVDDSSQVVTRSPDVSSNQSYSSNPSPLGQTQLHTPPGLASVSSNLSPPSEAQLSAPNIQKIYPSAPQAIGKVVYDPQSNHPHRSIPHELPAVASNSAPVIPGPLSKSPESFFDMDPSLQSRQQMVYRGQEMFAATNPASANVPSQSFAPRNHAPLLPLPVSAHQSRIPSSSIEYTEEFDFEAMNEKFKKSELWGYLGRNNQRNQNDYGEETAIEPNAEGKPAYNKDDFFDTISCNQLDRVARSGQQHNQFPEHMRQVPEAFGNNFQRPPPLQPGQGAYLAAQTNYRGGYHNNNNNNYYSNSGYGYYSGGRGRGRNTHF

SEQ ID NO: 50508 - DNA, 1461 bp, Arabidopsis thaliana
  misc_feature (1)..(1461): Ceres Seq. ID no. 13647758
  misc_feature (1)..(1461): Ortholog of  Ceres SEQ ID NO 14303487 as cited in SEQ ID NO 54521
  misc_feature (1)..(1461): Ortholog of  Ceres SEQ ID NO 14316302 as cited in SEQ ID NO 55232
  misc_feature (1)..(1461): Ortholog of  Ceres SEQ ID NO 14308274 as cited in SEQ ID NO 55597
  misc_feature (1)..(1461): Ortholog of  Ceres SEQ ID NO 13659710 as cited in SEQ ID NO 60808
gaagctaacaacattcacaaggagagagaaacaataaagggcaaggaaaaagatcaaacctttttctttctttctttctcctgctctctgcaatttagaagaagatcgaagaatttgtttgttgtttatcttcttctataaaaacaaaccgtggggtctgttttcatttctggccttgcgattccgataaaactctcagcttctcattcaatccacaatccaaatccacttctcgaacatatatataattctatatttttgagagacagtttactttttctccttctctctccctctttctctttctctgtctctttggcttttctcctcctgttctcatggaagcttcacccaatgatcgacttcattttggcaaaatgggtttcgggtgtaagcattacaagaggagatgccaaatcagagctccatgttgcaacgaagtcttcgattgtcgccattgtcacaacgagagcactagcacattgcgcaatatctacgaccgtcacgatcttgttcgtcaagacgttaaacaagtgatttgttctgtttgcgatacagagcagccggcagctcaagtttgttcgaattgtggtgtcaacatgggagaatattttgcagcatctgcatattctatgatgatgatactgaaaaacaacagtttcattgcgatgactgtggaatttgcagagttggtgggcgtgagaatttcttccattgcaagaagtgtggatcttgttatgcggttggtctgcgcaacaaccatcgctgcgttgagaattcaatgcgtcatcactgtcccatttgttacgagtacctttttgactctctaaaggacacaaatgtgatgaaatgcgggcacacaatgcacgtagaatgctacaacgagatgatcaaacgtgacaagttttgttgtccaatttgctcgaggtcagtgattgatatgtctaaaacatggcagagactcgatgaagagatcgaagccactgctatgccttcagattaccgtgacaagaaggtttggatactttgcaacgattgtaacgacacaacagaagtgcacttccacataatcggacagaaatgtggacattgcagatcatacaacacacgagcgattgcgcctcctgttcttcctcaatgacaaaaccaagatcttcccatgtattgcctccagaaagcaagcaagaactttttgttgctaaaaaaactgaggcatagattgatgatcataacaaagaaagaaaaagaaaaagattgatgatcaatttgatcattggtcacaaaagcaaaacacacatttgtcttcttcatttgatttgttgttgttcttatactgttacatttttccatttgtgtttgggtgttggaaatgcgaggattatgtataatatactctatattcttgatccaggaaaagttacctggataataaaaaaaaaaaagaaaaaaaaaaaaaaaaaa

SEQ ID NO: 50509 - protein, 163 aa, Arabidopsis thaliana
  peptide (1)..(163): Ceres Seq. ID no. 13647759
MEASPNDRLHFGKMGFGCKHYKRRCQIRAPCCNEVFDCRHCHNESTSTLRNIYDRHDLVRQDVKQVICSVCDTEQPAAQVCSNCGVNMGEYFAASAYSMMMILKNNSFIAMTVEFAELVGVRISSIARSVDLVMRLVCATTIAALRIQCVITVPFVTSTFLTL

SEQ ID NO: 50510 - protein, 150 aa, Arabidopsis thaliana
  peptide (1)..(150): Ceres Seq. ID no. 13647760
MGFGCKHYKRRCQIRAPCCNEVFDCRHCHNESTSTLRNIYDRHDLVRQDVKQVICSVCDTEQPAAQVCSNCGVNMGEYFAASAYSMMMILKNNSFIAMTVEFAELVGVRISSIARSVDLVMRLVCATTIAALRIQCVITVPFVTSTFLTL

SEQ ID NO: 50511 - protein, 119 aa, Arabidopsis thaliana
  peptide (1)..(119): Ceres Seq. ID no. 13647761
MRHHCPICYEYLFDSLKDTNVMKCGHTMHVECYNEMIKRDKFCCPICSRSVIDMSKTWQRLDEEIEATAMPSDYRDKKVWILCNDCNDTTEVHFHIIGQKCGHCRSYNTRAIAPPVLPQ

SEQ ID NO: 50512 - DNA, 3293 bp, Arabidopsis thaliana; identical to SEQ ID NO: 50448
  misc_feature (1)..(3293): Ceres Seq. ID no. 13647822
  misc_feature (1)..(3293): Ortholog of  Ceres SEQ ID NO 13646569 as cited in SEQ ID NO 20745

SEQ ID NO: 50513 - protein, 948 aa, Arabidopsis thaliana; identical to SEQ ID NO: 50449
  peptide (1)..(948): Ceres Seq. ID no. 13647823

SEQ ID NO: 50514 - protein, 884 aa, Arabidopsis thaliana; identical to SEQ ID NO: 50450
  peptide (1)..(884): Ceres Seq. ID no. 13647824

SEQ ID NO: 50515 - protein, 876 aa, Arabidopsis thaliana; identical to SEQ ID NO: 50451
  peptide (1)..(876): Ceres Seq. ID no. 13647825

SEQ ID NO: 50516 - DNA, 1687 bp, Arabidopsis thaliana
  misc_feature (1)..(1687): Ceres Seq. ID no. 13592394
  misc_feature (1)..(1687): Ortholog of  Ceres SEQ ID NO 13594209 as cited in SEQ ID NO 59089
  misc_feature (1)..(1687): Ortholog of  Ceres SEQ ID NO 14307995 as cited in SEQ ID NO 63970
  misc_feature (1)..(1687): Ortholog of  Ceres SEQ ID NO 15170163 as cited in SEQ ID NO 66262
  misc_feature (1)..(1687): Ortholog of  Ceres SEQ ID NO 13502874 as cited in SEQ ID NO 66298
  misc_feature (1)..(1687): Ortholog of  Ceres SEQ ID NO 12614124 as cited in SEQ ID NO 68392
gaaacagagcatttatccattagaaaaaaaaaaaaaagaaaaaaagaatggcaatctctttactcttgtctttttctcatcgcctttgcttcgttaatcttcctcggaaaaaagatccaacgatctaaatggaattttcctcccagccctcctaagtttccggtcatcggaaacttacatcaacttggagaattgcctcacaggtcacttcaacgtctagccgaaaaaatcggagatgttatgcttattcacttagggtttgtccctgtaactgttatctcatcgaaagaagcagctgaagaagtgcttagaactcatgacctaaactgttgcagcaggcctaatcttgttgggacgaggctactttctcggggttttaaagatgttggttttactccatacggtgaagagtggaaggagcggcgtaagttcttggtgcgtgagtttttctctttgaaaaaggttcagtctttcggttatatcagagaggaagaatgtaactttcttgtcaagaaactgttggaatcagccgtggatcaatctccggttgatttgagcaaaacccttttttggctaaccgcgagtgtcatgtttagagttgcttttggacagagtttccacgagagcgagttcatcgataaagacaaggtcgatgagcttgtgtttgaagccgagaccgctcaagctagtttcacttgctctgatttcttccctattgctggacttggttggctcgttgactgtatttccgggcaacacaagaggctcaaagatgttttcttcaagctggatgctctgtttcaatgttggatgtcatgcagaaacaacgtaaagatgattccttgaagctcacaatcaataacatcaaaggaattctaacgaatatatttctcggagggatagacaccggagctcttactatgatatgggcaatgacggagctcgctagaaacccggaagtgatgaagaaagttcaaggcgagatccgagaccgccttggcagaaataaagagagaatcaccgaagaagatatcaataaagttccttacttgaacctagtgatcaaggaaacattcagattacaccatccagttcctcttcttctcccaagggaaacaatggctcacatcaaggttcaaggctatgatattcctcccaagagacggatcttggtcaacgcttgggcgataggaagagatccaaaactctggactaacccggaagagtttaaccccgagagatttatcaatagtcctgtggattataggggacaacatttcgagctcttaccgtttgggtctggacgaaggatatgtcccgggatatcgatgggtatggctactgtagaattgggactcttgaacttactttacttcttcgactggaagttgcctgatgggatgacacataaagatatcgatactgaagaagttggcactcttacaatcgtcaagaaagtaccactaaaacttcttccagttcgatttcagtgatcaaaccaaactccaaactttgaagatgttttgaataaaaatactatgcaaagtatgtaaccctagcttctctaatgtatgtgaagtacgttttccagtaaaatactaagttaaaatttcatatctttactaaaacatgtactgtgtttcctgtgtttcatatctttggaaaataattataaataaatttttct

SEQ ID NO: 50517 - protein, 281 aa, Arabidopsis thaliana
  peptide (1)..(281): Ceres Seq. ID no. 13592395
ETEHLSIRKKKKRKKEWQSLYSCLFLIAFASLIFLGKKIQRSKWNFPPSPPKFPVIGNLHQLGELPHRSLQRLAEKIGDVMLIHLGFVPVTVISSKEAAEEVLRTHDLNCCSRPNLVGTRLLSRGFKDVGFTPYGEEWKERRKFLVREFFSLKKVQSFGYIREEECNFLVKKLLESAVDQSPVDLSKTLFWLTASVMFRVAFGQSFHESEFIDKDKVDELVFEAETAQASFTCSDFFPIAGLGWLVDCISGQHKRLKDVFFKLDALFQCWMSCRNNVKMIP

SEQ ID NO: 50518 - protein, 229 aa, Arabidopsis thaliana
  peptide (1)..(229): Ceres Seq. ID no. 13592396
MLDVMQKQRKDDSLKLTINNIKGILTNIFLGGIDTGALTMIWAMTELARNPEVMKKVQGEIRDRLGRNKERITEEDINKVPYLNLVIKETFRLHHPVPLLLPRETMAHIKVQGYDIPPKRRILVNAWAIGRDPKLWTNPEEFNPERFINSPVDYRGQHFELLPFGSGRRICPGISMGMATVELGLLNLLYFFDWKLPDGMTHKDIDTEEVGTLTIVKKVPLKLLPVRFQ

SEQ ID NO: 50519 - protein, 225 aa, Arabidopsis thaliana
  peptide (1)..(225): Ceres Seq. ID no. 13592397
MQKQRKDDSLKLTINNIKGILTNIFLGGIDTGALTMIWAMTELARNPEVMKKVQGEIRDRLGRNKERITEEDINKVPYLNLVIKETFRLHHPVPLLLPRETMAHIKVQGYDIPPKRRILVNAWAIGRDPKLWTNPEEFNPERFINSPVDYRGQHFELLPFGSGRRICPGISMGMATVELGLLNLLYFFDWKLPDGMTHKDIDTEEVGTLTIVKKVPLKLLPVRFQ

SEQ ID NO: 50520 - DNA, 1055 bp, Arabidopsis thaliana
  misc_feature (1)..(1055): Ceres Seq. ID no. 13592398
  misc_feature (1)..(1055): Ortholog of  Ceres SEQ ID NO 13502952 as cited in SEQ ID NO 62271
  misc_feature (1)..(1055): Ortholog of  Ceres SEQ ID NO 13502973 as cited in SEQ ID NO 68052
  misc_feature (1)..(1055): Ortholog of  Ceres SEQ ID NO 13596000 as cited in SEQ ID NO 68188
  misc_feature (1)..(1055): Ortholog of  Ceres SEQ ID NO 15179420 as cited in SEQ ID NO 0
gtccaacttttaaaccaacaaaaatgctgaatgtacttcgaaattctaacctgacccttgccgttttgatttgctttgtcttgatagcttcaaagctatgttccgtcgattcctctgtgtatgacccacacaaaaccctgaagcagcggttcgagaagtggcttaaaacccacagcaaattatatggaggaagggatgagtggatgctacggtttgggatatatcagtctaacgtccagttgattgactacatcaactccctccacttgccctttaagctaacggataatagatttgcagatatgaccaattctgagtttaaggcccattttctcgggttgaacacgtcttccttgaggttacacaagaagcagagaccagtttgtgacccagcaggcaatgtcccggacgctgtggactggaggactcaaggtgctgtgactcctatcagaaatcaaggaaaatgcggaggttgctgggcattctctgcagtagcagctattgaaggcatcaacaagattaaaacagggaatttagtgtctctctcagaacaacaactcatagattgtgatgtcggcacttacaacaaaggctgtagtggcggattaatggaaacagcatttgaattcatcaaaaccaatggtggactcgccacggagaccgactacccatacacaggcatagagggtacctgcgaccaagaaaaatccaaaaataaggtagttacgatacaaggataccaaaaggtagcccaaaacgaggcgagcctacaaatcgctgcagctcaacagccagtatcagttggaatcgatgctggtgggtttatctttcagctctactcctccggtgttttcacaaattactgtggaacaaatctcaaccatggagtgactgttgttggatatggagtagaaggcgatcaaaagtactggatcgtaaagaattcatggggaactggctggggtgaagaaggctacatacggatggagcgtggtgtaagtgaagacacgggtaaatgtggtattgctatgatggcaagctatcccttgcagtga

SEQ ID NO: 50521 - protein, 350 aa, Arabidopsis thaliana
  peptide (1)..(350): Ceres Seq. ID no. 13592399
PTFKPTKMLNVLRNSNLTLAVLICFVLIASKLCSVDSSVYDPHKTLKQRFEKWLKTHSKLYGGRDEWMLRFGIYQSNVQLIDYINSLHLPFKLTDNRFADMTNSEFKAHFLGLNTSSLRLHKKQRPVCDPAGNVPDAVDWRTQGAVTPIRNQGKCGGCWAFSAVAAIEGINKIKTGNLVSLSEQQLIDCDVGTYNKGCSGGLMETAFEFIKTNGGLATETDYPYTGIEGTCDQEKSKNKVVTIQGYQKVAQNEASLQIAAAQQPVSVGIDAGGFIFQLYSSGVFTNYCGTNLNHGVTVVGYGVEGDQKYWIVKNSWGTGWGEEGYIRMERGVSEDTGKCGIAMMASYPLQ

SEQ ID NO: 50522 - protein, 343 aa, Arabidopsis thaliana
  peptide (1)..(343): Ceres Seq. ID no. 13592400
MLNVLRNSNLTLAVLICFVLIASKLCSVDSSVYDPHKTLKQRFEKWLKTHSKLYGGRDEWMLRFGIYQSNVQLIDYINSLHLPFKLTDNRFADMTNSEFKAHFLGLNTSSLRLHKKQRPVCDPAGNVPDAVDWRTQGAVTPIRNQGKCGGCWAFSAVAAIEGINKIKTGNLVSLSEQQLIDCDVGTYNKGCSGGLMETAFEFIKTNGGLATETDYPYTGIEGTCDQEKSKNKVVTIQGYQKVAQNEASLQIAAAQQPVSVGIDAGGFIFQLYSSGVFTNYCGTNLNHGVTVVGYGVEGDQKYWIVKNSWGTGWGEEGYIRMERGVSEDTGKCGIAMMASYPLQ

SEQ ID NO: 50523 - protein, 283 aa, Arabidopsis thaliana
  peptide (1)..(283): Ceres Seq. ID no. 13592401
MLRFGIYQSNVQLIDYINSLHLPFKLTDNRFADMTNSEFKAHFLGLNTSSLRLHKKQRPVCDPAGNVPDAVDWRTQGAVTPIRNQGKCGGCWAFSAVAAIEGINKIKTGNLVSLSEQQLIDCDVGTYNKGCSGGLMETAFEFIKTNGGLATETDYPYTGIEGTCDQEKSKNKVVTIQGYQKVAQNEASLQIAAAQQPVSVGIDAGGFIFQLYSSGVFTNYCGTNLNHGVTVVGYGVEGDQKYWIVKNSWGTGWGEEGYIRMERGVSEDTGKCGIAMMASYPLQ

SEQ ID NO: 50524 - DNA, 2278 bp, Arabidopsis thaliana
  misc_feature (1)..(2278): Ceres Seq. ID no. 13588547
  misc_feature (1)..(2278): Ortholog of  Ceres SEQ ID NO 14312594 as cited in SEQ ID NO 58686
  misc_feature (1)..(2278): Ortholog of  Ceres SEQ ID NO 13597706 as cited in SEQ ID NO 65326
tacttgctccttttacatttcaacgaacaaaacacatgtatacatagaaagaaacgcaaatacgcagatataataaatggcgactggtcgatacatcgttgaggttgagaagggaaagcaaggcgttgatggaggaagtccatcggtcggtccagtgtaccggagtatctatgctaaagacggttttcctgaaccgcctgatgatctcgtcagtgcatgggatattttccgtttatctgtggagaaatctccaaataatcctatgcttggtcgtagagaaatagttgatggaaaagctgggaaatatgtatggcaaacttacaaagaagtacataatgtagtgattaagcttggaaactctatcagaactattggagttggaaaaggagataaatgcggtatttatggcgccaatagtcctgaatggattataagcatggaggcttgcaatgctcatggactctactgtgtacctttatatgacactctaggtgctggagcaatagaattcatcatttgtcatgctgaggtctcacttgcttttgctgaggagaacaagatttctgagttattgaagacagctccaaaatcaactaaatatttgaagtatattgtgagctttggtgaggttacaaataatcagagagtagaagctgagaggcacagattaacaatatattcatgggaccaattcttgaagctaggcgagggtaaacattatgaattaccagagaagaggagaagcgatgtttgcaccataatgtatacaagtggcacaactggtgatcctaaaggagtattgcttacaaatgagagcattattcatctccttgaaggtgttaaaaaattgcttaaaactattgatgaagagttaaccagtaaagatgtatatctctcatatctacctctggctcatatcttcgatcgtgtgattgaggagctgtgtatttatgaagcagcctctatcggattctggcgaggggatgttaagatattgatagaagacattgctgcattgaaaccgactgttttctgcgctgttcctcgcgttctagagagaatatacaccggtcttcagcagaaactttctgatggtggttttgtaaagaagaaattattcaactttgcattcaaatacaaacataaaaacatggagaaagggcagcctcatgaacaagcatctccaatagctgacaaaattgtatttaaaaaggtaaaagaagggttgggaggaaacgtgcgtcttatcctctcaggagcagctcctcttgcagctcacatcgaatctttccttcgagttgtcgcgtgtgctcatgttttgcaaggatacggtctaacagagagttgtggtgggacttttgtgtccattccaaacgagctttcaatgcttggaacggttggtccaccggttccaaacgttgacataaggctagagtcagttccagagatgggttatgacgctcttgcaagcaatccacgtggagagatttgcatcaggggaaagactttgttctctggatactacaaacgtgaagatctcactcaagaagtcttcattgatggatggcttcacactggtgatgtcggtgagtggcaaccagatggagccatgaagatcatcgaccgtaagaagaacatctttaaactgtctcaaggagaatacgttgccgttgagaacttggagaacatatacagtcatgtcgccgccattgaatcgatatgggtatatggaaacagctatgagtcttacttagtggctgtggtatgtccaagcaagatccagatcgagcattgggccaaagaacacaaagtttcaggagactttgagtctatctgccgaaaccaaaagactaaagagtttgtccttggagagttcaacagagtagccaaagacaaaaagctgaagggatttgagctgatcaaaggtgttcatttggacacagtcccgttcgacatggaaagagatctcatcactccttcttacaagatgaaaagacctcagcttctcaagtactatcagaaagagattgatgaaatgtataagaaaaacagagaagtgcagctacgagtgtaaagaaaggaagttgttggacaaatctctcaggtttatatgtttctcttatcactctaattcatattgttatatgtctctatgctgtgttaatatcgaagggtttttttctttctttgcttgtaaacaaccaaatcttttattgttcttaacattctcctgttttatgtatttgtattgatattttaataaagttctctgtccact

SEQ ID NO: 50525 - protein, 665 aa, Arabidopsis thaliana
  peptide (1)..(665): Ceres Seq. ID no. 13588548
MATGRYIVEVEKGKQGVDGGSPSVGPVYRSIYAKDGFPEPPDDLVSAWDIFRLSVEKSPNNPMLGRREIVDGKAGKYVWQTYKEVHNVVIKLGNSIRTIGVGKGDKCGIYGANSPEWIISMEACNAHGLYCVPLYDTLGAGAIEFIICHAEVSLAFAEENKISELLKTAPKSTKYLKYIVSFGEVTNNQRVEAERHRLTIYSWDQFLKLGEGKHYELPEKRRSDVCTIMYTSGTTGDPKGVLLTNESIIHLLEGVKKLLKTIDEELTSKDVYLSYLPLAHIFDRVIEELCIYEAASIGFWRGDVKILIEDIAALKPTVFCAVPRVLERIYTGLQQKLSDGGFVKKKLFNFAFKYKHKNMEKGQPHEQASPIADKIVFKKVKEGLGGNVRLILSGAAPLAAHIESFLRVVACAHVLQGYGLTESCGGTFVSIPNELSMLGTVGPPVPNVDIRLESVPEMGYDALASNPRGEICIRGKTLFSGYYKREDLTQEVFIDGWLHTGDVGEWQPDGAMKIIDRKKNIFKLSQGEYVAVENLENIYSHVAAIESIWVYGNSYESYLVAVVCPSKIQIEHWAKEHKVSGDFESICRNQKTKEFVLGEFNRVAKDKKLKGFELIKGVHLDTVPFDMERDLITPSYKMKRPQLLKYYQKEIDEMYKKNREVQLRV

SEQ ID NO: 50526 - protein, 603 aa, Arabidopsis thaliana
  peptide (1)..(603): Ceres Seq. ID no. 13588549
MLGRREIVDGKAGKYVWQTYKEVHNVVIKLGNSIRTIGVGKGDKCGIYGANSPEWIISMEACNAHGLYCVPLYDTLGAGAIEFIICHAEVSLAFAEENKISELLKTAPKSTKYLKYIVSFGEVTNNQRVEAERHRLTIYSWDQFLKLGEGKHYELPEKRRSDVCTIMYTSGTTGDPKGVLLTNESIIHLLEGVKKLLKTIDEELTSKDVYLSYLPLAHIFDRVIEELCIYEAASIGFWRGDVKILIEDIAALKPTVFCAVPRVLERIYTGLQQKLSDGGFVKKKLFNFAFKYKHKNMEKGQPHEQASPIADKIVFKKVKEGLGGNVRLILSGAAPLAAHIESFLRVVACAHVLQGYGLTESCGGTFVSIPNELSMLGTVGPPVPNVDIRLESVPEMGYDALASNPRGEICIRGKTLFSGYYKREDLTQEVFIDGWLHTGDVGEWQPDGAMKIIDRKKNIFKLSQGEYVAVENLENIYSHVAAIESIWVYGNSYESYLVAVVCPSKIQIEHWAKEHKVSGDFESICRNQKTKEFVLGEFNRVAKDKKLKGFELIKGVHLDTVPFDMERDLITPSYKMKRPQLLKYYQKEIDEMYKKNREVQLRV

SEQ ID NO: 50527 - protein, 545 aa, Arabidopsis thaliana
  peptide (1)..(545): Ceres Seq. ID no. 13588550
MEACNAHGLYCVPLYDTLGAGAIEFIICHAEVSLAFAEENKISELLKTAPKSTKYLKYIVSFGEVTNNQRVEAERHRLTIYSWDQFLKLGEGKHYELPEKRRSDVCTIMYTSGTTGDPKGVLLTNESIIHLLEGVKKLLKTIDEELTSKDVYLSYLPLAHIFDRVIEELCIYEAASIGFWRGDVKILIEDIAALKPTVFCAVPRVLERIYTGLQQKLSDGGFVKKKLFNFAFKYKHKNMEKGQPHEQASPIADKIVFKKVKEGLGGNVRLILSGAAPLAAHIESFLRVVACAHVLQGYGLTESCGGTFVSIPNELSMLGTVGPPVPNVDIRLESVPEMGYDALASNPRGEICIRGKTLFSGYYKREDLTQEVFIDGWLHTGDVGEWQPDGAMKIIDRKKNIFKLSQGEYVAVENLENIYSHVAAIESIWVYGNSYESYLVAVVCPSKIQIEHWAKEHKVSGDFESICRNQKTKEFVLGEFNRVAKDKKLKGFELIKGVHLDTVPFDMERDLITPSYKMKRPQLLKYYQKEIDEMYKKNREVQLRV

SEQ ID NO: 50528 - DNA, 1754 bp, Arabidopsis thaliana
  misc_feature (1)..(1754): Ceres Seq. ID no. 12602207
  misc_feature (1)..(1754): Ortholog of  Ceres SEQ ID NO 15175523 as cited in SEQ ID NO 0
gtcaaaagaatctgcgaaaaataagagagagagagagagaaacaggatcattcattatgcccgccttatctcactacagatcagtatcatctctaccgtccgttgaccgatcattccttctcatccaacgactcaggatccacggcagctcttcttccttccctgaatcttctccttctgcgtctattctctccggcgcagatccgttgaagtgtacggtctctggtggatctcttgctaaatggatcaccgggatttcagctggatccgccttagggtttctctattggtcctctggttcttctgattccatctctggtttgtttggtgggagtaatttattgtccttcgctgatagttcaacgccttctgtttgtggtgtaaaagtcggcgatctgaaaccgagatcgtttattccgaaattgtcgttgcctggttacagctctggattcatcttcggagatgcgtatagaaggaagatcttcttcaattacgagaaacgtttgagattacaaagtcctcctgaaaaggttttcgagtactttgcatctgttcgaacagataaaggagaaatactaatgaaaccggcagatttgatgagggcaattgtccccgtgtttcctccatcagaatctcatctagtaagagaaggatatttgactggggagagaaatcctggtgaacttagatgctctccttccgagttcttcatgctctttgatgttgataatgatggtcttatatccttcaaagagtatatattctttgtgacattactcagcattcctgaatcaagcttcgcagtggctttcaaaatgtttgatactgacaacaacggggagattgacaaagaagagtttaagacagtgatgagtctgatgcgatctcagcatagacaaggagttggccacagagatggccttcgaacagggttacatatgaccggttctgtcgaggatggaggattggtagaatacttctttgggaaagatggcagtcaaaaactgaaacacgacaaattcactaagtttatgaaagatctaactgaagagatgctgaggctggagtttgcacattatgactataaacgaagaggaagtatatcggccaaagattttgcattgtcgatggttgcagcggctgatgcaagccatttgagcaagctgcttgatagagttgagagtctgagcgaacacccgcatctccgggacatgcgtatctcactgaaggaattcaaacagtttgatgagctacgtagtaaacttggaccattctctctagcgctttttgcttatggcaaagctaatggtttacttacaatgaaagatttcaaacgagccgcctctcaggtatgtggaataacattgtcagacaatgtgatagaaattgcgtttcatgtgtttgactcgaatcaagatgggaatttgagtgtggatgagtttttgcgggttctgcatcgaagagagagggacgtggcacagccaattgcaaaaggattgtctcggtacttctcagatggatggaagggttctaagaactgttcctcatcgtgaagactcttcttcctctttggggcttaccgatgaaactcgaagactattttttgaggctcttgggttcatacgagtgagcccagagattttatgattactccacgctggcattgtaagaaagaaatctgaataaatctgtgtatagtttgatcgacctatgaacttttttgttttgttttgttaatgataaatggtaattgc

SEQ ID NO: 50529 - protein, 516 aa, Arabidopsis thaliana
  peptide (1)..(516): Ceres Seq. ID no. 12602208
QKNLRKIRERERETGSFIMPALSHYRSVSSLPSVDRSFLLIQRLRIHGSSSSFPESSPSASILSGADPLKCTVSGGSLAKWITGISAGSALGFLYWSSGSSDSISGLFGGSNLLSFADSSTPSVCGVKVGDLKPRSFIPKLSLPGYSSGFIFGDAYRRKIFFNYEKRLRLQSPPEKVFEYFASVRTDKGEILMKPADLMRAIVPVFPPSESHLVREGYLTGERNPGELRCSPSEFFMLFDVDNDGLISFKEYIFFVTLLSIPESSFAVAFKMFDTDNNGEIDKEEFKTVMSLMRSQHRQGVGHRDGLRTGLHMTGSVEDGGLVEYFFGKDGSQKLKHDKFTKFMKDLTEEMLRLEFAHYDYKRRGSISAKDFALSMVAAADASHLSKLLDRVESLSEHPHLRDMRISLKEFKQFDELRSKLGPFSLALFAYGKANGLLTMKDFKRAASQVCGITLSDNVIEIAFHVFDSNQDGNLSVDEFLRVLHRRERDVAQPIAKGLSRYFSDGWKGSKNCSSS

SEQ ID NO: 50530 - protein, 498 aa, Arabidopsis thaliana
  peptide (1)..(498): Ceres Seq. ID no. 12602209
MPALSHYRSVSSLPSVDRSFLLIQRLRIHGSSSSFPESSPSASILSGADPLKCTVSGGSLAKWITGISAGSALGFLYWSSGSSDSISGLFGGSNLLSFADSSTPSVCGVKVGDLKPRSFIPKLSLPGYSSGFIFGDAYRRKIFFNYEKRLRLQSPPEKVFEYFASVRTDKGEILMKPADLMRAIVPVFPPSESHLVREGYLTGERNPGELRCSPSEFFMLFDVDNDGLISFKEYIFFVTLLSIPESSFAVAFKMFDTDNNGEIDKEEFKTVMSLMRSQHRQGVGHRDGLRTGLHMTGSVEDGGLVEYFFGKDGSQKLKHDKFTKFMKDLTEEMLRLEFAHYDYKRRGSISAKDFALSMVAAADASHLSKLLDRVESLSEHPHLRDMRISLKEFKQFDELRSKLGPFSLALFAYGKANGLLTMKDFKRAASQVCGITLSDNVIEIAFHVFDSNQDGNLSVDEFLRVLHRRERDVAQPIAKGLSRYFSDGWKGSKNCSSS

SEQ ID NO: 50531 - protein, 324 aa, Arabidopsis thaliana
  peptide (1)..(324): Ceres Seq. ID no. 12602210
MKPADLMRAIVPVFPPSESHLVREGYLTGERNPGELRCSPSEFFMLFDVDNDGLISFKEYIFFVTLLSIPESSFAVAFKMFDTDNNGEIDKEEFKTVMSLMRSQHRQGVGHRDGLRTGLHMTGSVEDGGLVEYFFGKDGSQKLKHDKFTKFMKDLTEEMLRLEFAHYDYKRRGSISAKDFALSMVAAADASHLSKLLDRVESLSEHPHLRDMRISLKEFKQFDELRSKLGPFSLALFAYGKANGLLTMKDFKRAASQVCGITLSDNVIEIAFHVFDSNQDGNLSVDEFLRVLHRRERDVAQPIAKGLSRYFSDGWKGSKNCSSS

SEQ ID NO: 50532 - DNA, 1426 bp, Arabidopsis thaliana
  misc_feature (1)..(1426): Ceres Seq. ID no. 13588381
  misc_feature (1)..(1426): Ortholog of  Ceres SEQ ID NO 13659033 as cited in SEQ ID NO 66372
  misc_feature (1)..(1426): Ortholog of  Ceres SEQ ID NO 12625899 as cited in SEQ ID NO 69079
atgaaaccttcatcaccaatttcactcactagttcttcaattgctagaaaagctcgtttttctccttacctcttcacactcttagccttcattcttttcgtctctgtcctctatggtgaagattttatgtgcatctttggacagctcgagcctaacttcgtcctcccgccttctcgaacacccgaaaagaataagaaatcggagaagcttgcgtttgctattggtaaaacagaggaaagctgtgacgttttcagcgggaaatgggtgagagatgaagtctcccgaccactgtatgaggaatgggagtgtccgtacattcaacctcagcttacatgtcaagaacacggccgtcccgacaaagactaccagttttggcggtggcagcctaatcactgcgatcttccctcgttcaacgcgtcactgatgctggagacattaagagggaagaggatgatgtatgtaggagactcgttaaaccgtggaatgtttgtatcaatgatttgtcttcttcatcgtcttattcctgaagatcagaaatcaattaaaaccaatggttccctcactgtcttcactgccaaggagtataacgcgacgatagagttctattgggcaccgtttcttctagaatcgaattcagacgatgcaattgtccatagaatatcggatagggttgtgagaaaaggatcaattaacaaacatggtcgtcactggaaaggagtcgatataatcatcttcaacacttatctgtggtggatgactggattgaagatgaacatcttagaggtttctgatattgggggtatatataggcaaggatcgtttgatgataaagagaagaatatcgtagaggtttcgactgaagatgcgtaccggatgggtatgaagagtatgttgagatgggtgaagaacaacatggatcgtaagaaaactagggtcttcttcactagcatgtctccaacgcatgccaaggggatagattggggaggtgaaccgggtcagaattgctataatcagacaacacttatagaagatccaagctactggggatcagattgtaggaaaagcataatgaaagtgattggagaagtgtttggaagatcgaaaacaccgataacgttactgaacataacgcaaatgtcgaattacaggaaagatgcacatacgtcgatatacaagaagcagtggagtccacttacagcggagcagctggagaatccaacgagctatgcggattgtgtacattggtgcttgcctggccttcaagatacttggaatgagcttctctttgctaaacttttctatacttgagataagagaaaacatttttttcctttgaagacgacagcgctttttgagtttggaaagagatcttgtggagaaattgtaaaatttagtcattgaattgatattgtcttttttggttgtg

SEQ ID NO: 50533 - protein, 435 aa, Arabidopsis thaliana
  peptide (1)..(435): Ceres Seq. ID no. 13588382
MKPSSPISLTSSSIARKARFSPYLFTLLAFILFVSVLYGEDFMCIFGQLEPNFVLPPSRTPEKNKKSEKLAFAIGKTEESCDVFSGKWVRDEVSRPLYEEWECPYIQPQLTCQEHGRPDKDYQFWRWQPNHCDLPSFNASLMLETLRGKRMMYVGDSLNRGMFVSMICLLHRLIPEDQKSIKTNGSLTVFTAKEYNATIEFYWAPFLLESNSDDAIVHRISDRVVRKGSINKHGRHWKGVDIIIFNTYLWWMTGLKMNILEVSDIGGIYRQGSFDDKEKNIVEVSTEDAYRMGMKSMLRWVKNNMDRKKTRVFFTSMSPTHAKGIDWGGEPGQNCYNQTTLIEDPSYWGSDCRKSIMKVIGEVFGRSKTPITLLNITQMSNYRKDAHTSIYKKQWSPLTAEQLENPTSYADCVHWCLPGLQDTWNELLFAKLFYT

SEQ ID NO: 50534 - protein, 393 aa, Arabidopsis thaliana
  peptide (1)..(393): Ceres Seq. ID no. 13588383
MCIFGQLEPNFVLPPSRTPEKNKKSEKLAFAIGKTEESCDVFSGKWVRDEVSRPLYEEWECPYIQPQLTCQEHGRPDKDYQFWRWQPNHCDLPSFNASLMLETLRGKRMMYVGDSLNRGMFVSMICLLHRLIPEDQKSIKTNGSLTVFTAKEYNATIEFYWAPFLLESNSDDAIVHRISDRVVRKGSINKHGRHWKGVDIIIFNTYLWWMTGLKMNILEVSDIGGIYRQGSFDDKEKNIVEVSTEDAYRMGMKSMLRWVKNNMDRKKTRVFFTSMSPTHAKGIDWGGEPGQNCYNQTTLIEDPSYWGSDCRKSIMKVIGEVFGRSKTPITLLNITQMSNYRKDAHTSIYKKQWSPLTAEQLENPTSYADCVHWCLPGLQDTWNELLFAKLFYT

SEQ ID NO: 50535 - protein, 294 aa, Arabidopsis thaliana
  peptide (1)..(294): Ceres Seq. ID no. 13588384
MLETLRGKRMMYVGDSLNRGMFVSMICLLHRLIPEDQKSIKTNGSLTVFTAKEYNATIEFYWAPFLLESNSDDAIVHRISDRVVRKGSINKHGRHWKGVDIIIFNTYLWWMTGLKMNILEVSDIGGIYRQGSFDDKEKNIVEVSTEDAYRMGMKSMLRWVKNNMDRKKTRVFFTSMSPTHAKGIDWGGEPGQNCYNQTTLIEDPSYWGSDCRKSIMKVIGEVFGRSKTPITLLNITQMSNYRKDAHTSIYKKQWSPLTAEQLENPTSYADCVHWCLPGLQDTWNELLFAKLFYT

SEQ ID NO: 50536 - DNA, 949 bp, Arabidopsis thaliana
  misc_feature (1)..(949): Ceres Seq. ID no. 13648157
  misc_feature (1)..(949): Ortholog of  Ceres SEQ ID NO 12614051 as cited in SEQ ID NO 67827
gacgattttcaattaactctcttcttttttttttttttggtttttcatttaagtctattcaatcatggaaaccggtttaaacatcttaaagctatcgctatgcgtcagcctagtcgtggttggatcatatgctcaggctcccgcaccatggaatccatctaatgggtttcgtccggggacatgtgaccactacgagtgtcccacctataaattggtagaggccggatacggctttgagatccgcatgtacgacgctgccctatggatatctactagtcctatcccctccctatccatgactcaagccaccaaaaccggtttccgacgattaaataggtacatagaaggagataacaagagcaacgtgaagatgaacatgacagctccggtgatcgcacaagcaacgcctggaagatcagtctacacggtctcactctacctcccgaagaagaaccaacagaacccacctcaggccgatgatctccacgtgcggtctacgaaaccaacctacgtagccgtgagacagatcggtggctacgtgtcgaacaatgtagccaaggaagaagctgcggctctgatggaaagcctccgggattctaactggattttgcccatcgagaagagcaaaggaaagtcgccggcgtatttactcgctgtttataacccgccgtctcataccacggctagggtgattaatgagatcatggttccgtttaacatgtaatgatcatgttaatgacgccctcacgatttgattgttacgtagcaattggattagaagaggtggtttagaaccgatactgtaacagcagcttgcagcttctggtttaaccggtataaattgtatctctggttaagtggtgattaatattgttattttgtaaaggtgggaaaaactataaccaaaaagtttgataaaaagataaaaaataataactaaaattatcgt

SEQ ID NO: 50537 - protein, 219 aa, Arabidopsis thaliana; identical to SEQ ID NO: 49851
  peptide (1)..(219): Ceres Seq. ID no. 13648158

SEQ ID NO: 50538 - protein, 159 aa, Arabidopsis thaliana; identical to SEQ ID NO: 49852
  peptide (1)..(159): Ceres Seq. ID no. 13648159

SEQ ID NO: 50539 - protein, 142 aa, Arabidopsis thaliana; identical to SEQ ID NO: 49853
  peptide (1)..(142): Ceres Seq. ID no. 13648160

SEQ ID NO: 50540 - DNA, 938 bp, Arabidopsis thaliana
  misc_feature (1)..(938): Ceres Seq. ID no. 12606069
  misc_feature (1)..(938): Ortholog of  Ceres SEQ ID NO 13637457 as cited in SEQ ID NO 53156
  misc_feature (1)..(938): Ortholog of  Ceres SEQ ID NO 13658653 as cited in SEQ ID NO 66616
gaaaaaatttctccaacagatcctttaaggagggatcaaaggggagtgattgcagagattttggggccgcccttcttactagacagcgttaagcttgtcggagccaggactatcaaaatcgactatcgatttccatttcgttttcattgaaatcgcatctgcatcttcttcaatccaatctctgagctcgttatcaccaccaccaccgtctttcctctccgataccggtgcggaagtcttgtcccaaaatgtctatcaggaggcctcaaatccctcggcttcttcttcaaaacgtctcttgcatgagaaacgcgcagcagattctaagacacgtgaatgtatctcttcatgacggtggtgcacttgtcttaactggaacaaacggatccggtaaatcaactttcttgagaatgttagctggattctcaaaaccctctgcaggagaaatcctttggaatggtcacgacatcacacagtcaggaatctttcaacaatacaaactccaactcaactggatctctttaaaagacgccatcaaagagagattcacagtactcgataatgtccaatggtttgagcttctcgagaataaaatcggcaaagctcaacccgcgttggagctaatggggttagggagactggtgaaagagaaatcgagaatgttatcgatgggtcagaggaaaagattgcaacttgcgaggctcctcgctatcgatagaccgatatggcttttggatgaaccatccgttgctttggatgatgaaggtgttagattgctcgagtatattatcgcagagcataggaaaaaaggagggattgtgattgtcgcgactcatcttccgatagacattgaagatgctatgatcttgaggcttcctcctaggtttccaaggaaaatgactttgattgatatgcttgatcgtgcagacatttcttag

SEQ ID NO: 50541 - protein, 229 aa, Arabidopsis thaliana
  peptide (1)..(229): Ceres Seq. ID no. 12606070
MSIRRPQIPRLLLQNVSCMRNAQQILRHVNVSLHDGGALVLTGTNGSGKSTFLRMLAGFSKPSAGEILWNGHDITQSGIFQQYKLQLNWISLKDAIKERFTVLDNVQWFELLENKIGKAQPALELMGLGRLVKEKSRMLSMGQRKRLQLARLLAIDRPIWLLDEPSVALDDEGVRLLEYIIAEHRKKGGIVIVATHLPIDIEDAMILRLPPRFPRKMTLIDMLDRADIS

SEQ ID NO: 50542 - protein, 211 aa, Arabidopsis thaliana
  peptide (1)..(211): Ceres Seq. ID no. 12606071
MRNAQQILRHVNVSLHDGGALVLTGTNGSGKSTFLRMLAGFSKPSAGEILWNGHDITQSGIFQQYKLQLNWISLKDAIKERFTVLDNVQWFELLENKIGKAQPALELMGLGRLVKEKSRMLSMGQRKRLQLARLLAIDRPIWLLDEPSVALDDEGVRLLEYIIAEHRKKGGIVIVATHLPIDIEDAMILRLPPRFPRKMTLIDMLDRADIS

SEQ ID NO: 50543 - protein, 175 aa, Arabidopsis thaliana
  peptide (1)..(175): Ceres Seq. ID no. 12606072
MLAGFSKPSAGEILWNGHDITQSGIFQQYKLQLNWISLKDAIKERFTVLDNVQWFELLENKIGKAQPALELMGLGRLVKEKSRMLSMGQRKRLQLARLLAIDRPIWLLDEPSVALDDEGVRLLEYIIAEHRKKGGIVIVATHLPIDIEDAMILRLPPRFPRKMTLIDMLDRADIS

SEQ ID NO: 50544 - DNA, 1943 bp, Arabidopsis thaliana
  misc_feature (1)..(1943): Ceres Seq. ID no. 13588865
  misc_feature (1)..(1943): Ortholog of  Ceres SEQ ID NO 12613725 as cited in SEQ ID NO 68196
aacacttacaagttttacaacaaacgtaatatataaaacattactaattattacaagaaacaatcagaaacatcatggaggagcaaagcaagaacaagatcagtgaagaagaaaaacaactccatgggagaccaaatcgaccaaagggaggattaattaccatgcccttcatcttcgcgaacgagatatgtgaaaaattagcggtggtggggtttcacgcaaacatgataagttacttaacaacacagcttcaccttcccttaaccaaagcagccaacactctcacaaacttcgccgggacatcgagtcttactcctctccttggtgcctttatcgccgactctttcgccggccgattttggaccatcacttttgcttccatcatctaccaaatcgggatgacgttgcttacgatatcggcaataataccaacgctaaggccaccaccatgtaaaggagaagaggtttgtgtagtagctgacacagcacaattgagtatactttacgtagctcttcttcttggagctctcgggtcgggtgggatccgaccatgtgttgttgcttttggtgctgatcagttcgacgagtcggatcctaatcaaaccaccaaaacttggaactacttcaactggtactacttttgcatgggtgcagcagttttactggcggtgacggttcttgtgtggatccaagataacgttgggtggggtctaggtttaggcattccgacagtagctatgttcttatccgttattgcttttgtcggcggttttcaactttaccgtcacttggttcccgcgggtagtccatttacccgcttgatccaagtgggagtcgcggcatttcgcaaaaggaaactgaggatggtttctgatccctctcttctctattttaacgacgagattgatgcacctatctccttaggtggtaaactcacccacaccaaacacatgagtttcttggacaaggcggcaatagtaacggaggaagacaatttaaaaccgggtcaaatcccaaaccattggaggctaagcacagtccatcgagtcgaagaactcaaatccgtcatccgaatgggtccaatcggagcatccgggattctcctaatcacagcctatgctcaacaaggaaccttctcattacaacaagccaaaaccatgaaccgtcacctaacaaactccttccaaatcccagccggttcaatgtccgtcttcacaaccgtcgctatgcttaccacaatcatcttctacgaccgcgtcttcgtcaaagtcgctcgcaaattcaccggtctcgaaagaggcatcacgttcctccaccgtatgggaatcggattcgtaatctcgataatcgccacgttagttgccggattcgtcgaagtaaagcgaaagagcgtcgcgattgagcacggtctcctcgataaacctcacacgattgttccaatctcgtttctttggttgattcctcaatatggtctccatggagtcgctgaagctttcatgtccatcggacatttagagttcttctacgatcaggcaccggagagtatgaggagcacggcaacggcgcttttttggatggcgatttcgatcggaaactatgtgagcactttgctggtgactttggttcataaattcagtgctaaaccggatgggagcaattggttaccggataacaatttgaaccgagggaggcttgagtatttttactggttgattactgtgttacaagctgttaatcttgtgtattatctatggtgcgccaagatttatacgtataaaccggttcaggttcatcatagcaaggaagatagtagtccggttaaggaggaattgcagttgtcaaataggagtttagttgatgaatgagtcttggcgttggatgtgtaatgtaaaattactaaattagtatagttgtaatatgtacttatcaatccaataaattag

SEQ ID NO: 50545 - protein, 596 aa, Arabidopsis thaliana
  peptide (1)..(596): Ceres Seq. ID no. 15220914
MEEQSKNKISEEEKQLHGRPNRPKGGLITMPFIFANEICEKLAVVGFHANMISYLTTQLHLPLTKAANTLTNFAGTSSLTPLLGAFIADSFAGRFWTITFASIIYQIGMTLLTISAIIPTLRPPPCKGEEVCVVADTAQLSILYVALLLGALGSGGIRPCVVAFGADQFDESDPNQTTKTWNYFNWYYFCMGAAVLLAVTVLVWIQDNVGWGLGLGIPTVAMFLSVIAFVGGFQLYRHLVPAGSPFTRLIQVGVAAFRKRKLRMVSDPSLLYFNDEIDAPISLGGKLTHTKHMSFLDKAAIVTEEDNLKPGQIPNHWRLSTVHRVEELKSVIRMGPIGASGILLITAYAQQGTFSLQQAKTMNRHLTNSFQIPAGSMSVFTTVAMLTTIIFYDRVFVKVARKFTGLERGITFLHRMGIGFVISIIATLVAGFVEVKRKSVAIEHGLLDKPHTIVPISFLWLIPQYGLHGVAEAFMSIGHLEFFYDQAPESMRSTATALFWMAISIGNYVSTLLVTLVHKFSAKPDGSNWLPDNNLNRGRLEYFYWLITVLQAVNLVYYLWCAKIYTYKPVQVHHSKEDSSPVKEELQLSNRSLVDE

SEQ ID NO: 50546 - protein, 567 aa, Arabidopsis thaliana
  peptide (1)..(567): Ceres Seq. ID no. 15220915
MPFIFANEICEKLAVVGFHANMISYLTTQLHLPLTKAANTLTNFAGTSSLTPLLGAFIADSFAGRFWTITFASIIYQIGMTLLTISAIIPTLRPPPCKGEEVCVVADTAQLSILYVALLLGALGSGGIRPCVVAFGADQFDESDPNQTTKTWNYFNWYYFCMGAAVLLAVTVLVWIQDNVGWGLGLGIPTVAMFLSVIAFVGGFQLYRHLVPAGSPFTRLIQVGVAAFRKRKLRMVSDPSLLYFNDEIDAPISLGGKLTHTKHMSFLDKAAIVTEEDNLKPGQIPNHWRLSTVHRVEELKSVIRMGPIGASGILLITAYAQQGTFSLQQAKTMNRHLTNSFQIPAGSMSVFTTVAMLTTIIFYDRVFVKVARKFTGLERGITFLHRMGIGFVISIIATLVAGFVEVKRKSVAIEHGLLDKPHTIVPISFLWLIPQYGLHGVAEAFMSIGHLEFFYDQAPESMRSTATALFWMAISIGNYVSTLLVTLVHKFSAKPDGSNWLPDNNLNRGRLEYFYWLITVLQAVNLVYYLWCAKIYTYKPVQVHHSKEDSSPVKEELQLSNRSLVDE

SEQ ID NO: 50547 - protein, 546 aa, Arabidopsis thaliana
  peptide (1)..(546): Ceres Seq. ID no. 15220916
MISYLTTQLHLPLTKAANTLTNFAGTSSLTPLLGAFIADSFAGRFWTITFASIIYQIGMTLLTISAIIPTLRPPPCKGEEVCVVADTAQLSILYVALLLGALGSGGIRPCVVAFGADQFDESDPNQTTKTWNYFNWYYFCMGAAVLLAVTVLVWIQDNVGWGLGLGIPTVAMFLSVIAFVGGFQLYRHLVPAGSPFTRLIQVGVAAFRKRKLRMVSDPSLLYFNDEIDAPISLGGKLTHTKHMSFLDKAAIVTEEDNLKPGQIPNHWRLSTVHRVEELKSVIRMGPIGASGILLITAYAQQGTFSLQQAKTMNRHLTNSFQIPAGSMSVFTTVAMLTTIIFYDRVFVKVARKFTGLERGITFLHRMGIGFVISIIATLVAGFVEVKRKSVAIEHGLLDKPHTIVPISFLWLIPQYGLHGVAEAFMSIGHLEFFYDQAPESMRSTATALFWMAISIGNYVSTLLVTLVHKFSAKPDGSNWLPDNNLNRGRLEYFYWLITVLQAVNLVYYLWCAKIYTYKPVQVHHSKEDSSPVKEELQLSNRSLVDE

SEQ ID NO: 50548 - DNA, 1369 bp, Arabidopsis thaliana
  misc_feature (1)..(1369): Ceres Seq. ID no. 13647766
  misc_feature (1)..(1369): Ortholog of  Ceres SEQ ID NO 14304502 as cited in SEQ ID NO 53212
cccccaaaatctttgggtttttattcttttaaacttctttatgggattttggtgcaagaaagaagaaaatgtttcagagattcaccttctttctaacagctcttctcattccatgtattctaattatccttagcccttcatatgccctcaaggaaggagaaacatgcatcgtgagcaagaattgtgatcggggattacactgtgaatcgtgtctcgccagcgatagtttccgacctagatgctcccgaatgcaacccattaacccgaccaccaaggtaaaagggttgccttacaacaagtactcatggtaacaacccacaattcatttgctcgaatgggtgcaaaatcaggcactggctctatgattcttgcaccttccaaccaacaagattcaatcacaagccaactccttaatggtgttagagggtttatgcttgacttgtacgacttccaaaacgatatatggctttgccattcttacggtggaaattgtttcaattacaccgcattccaacccgcggttaacattttaaaggagtttcaagtgtttctagacaagaacaaggatgttgttgtaacgcttatcctcgaggactatgtgaaatctcctaatggtttaaccagagtgtttgatgcatccggattacgaaacttcatgtttccggtatcaagaatgcctaaaaacggagaagattggcctactcttgatgatatgatatgtcagaaccaacgattgcttgttttcacgtctaatcctcaaaaagaagcgtcggagggaattgcgtttatgtggagatacatgatagagaatcaatatggagatggagggatgaaggctggagtgtgtaccaatagaccggaatcagttgcaatgggagatagatcaagatcacttattctagtcaattattttccggatactgcagatgtgatcggatcttgtaagcagaactctgctcctcttcttgacaccgtcaaaaactgtcaagaagcctcgggaaaacgttggcctaacttcattgcagtcgatttctacaagagaagcgatggtggaggagctccaaaagcagtggatgttgcaaacggtcatgcagtttgcggctgcgaagatatagccgcttgtaaagagaacatgccatatgggacgtgtgagaagcaagaagagaagaaaccggaatcaaacctaatgatgatagcaaaacttaccgcggaagcgactaaaggctatggccacccatctaccaaaccgaccctacttgggctttctgtgtttgttgtaacctttgtctcacttctctcaactttttgactcaaatgatttactttatacaaaaaaaaaaaaaaaaaaactcgagggggggcccggtac

SEQ ID NO: 50549 - protein, 334 aa, Arabidopsis thaliana
  peptide (1)..(334): Ceres Seq. ID no. 15219476
MVTTHNSFARMGAKSGTGSMILAPSNQQDSITSQLLNGVRGFMLDLYDFQNDIWLCHSYGGNCFNYTAFQPAVNILKEFQVFLDKNKDVVVTLILEDYVKSPNGLTRVFDASGLRNFMFPVSRMPKNGEDWPTLDDMICQNQRLLVFTSNPQKEASEGIAFMWRYMIENQYGDGGMKAGVCTNRPESVAMGDRSRSLILVNYFPDTADVIGSCKQNSAPLLDTVKNCQEASGKRWPNFIAVDFYKRSDGGGAPKAVDVANGHAVCGCEDIAACKENMPYGTCEKQEEKKPESNLMMIAKLTAEATKGYGHPSTKPTLLGLSVFVVTFVSLLSTF

SEQ ID NO: 50550 - protein, 324 aa, Arabidopsis thaliana
  peptide (1)..(324): Ceres Seq. ID no. 15219477
MGAKSGTGSMILAPSNQQDSITSQLLNGVRGFMLDLYDFQNDIWLCHSYGGNCFNYTAFQPAVNILKEFQVFLDKNKDVVVTLILEDYVKSPNGLTRVFDASGLRNFMFPVSRMPKNGEDWPTLDDMICQNQRLLVFTSNPQKEASEGIAFMWRYMIENQYGDGGMKAGVCTNRPESVAMGDRSRSLILVNYFPDTADVIGSCKQNSAPLLDTVKNCQEASGKRWPNFIAVDFYKRSDGGGAPKAVDVANGHAVCGCEDIAACKENMPYGTCEKQEEKKPESNLMMIAKLTAEATKGYGHPSTKPTLLGLSVFVVTFVSLLSTF

SEQ ID NO: 50551 - protein, 315 aa, Arabidopsis thaliana
  peptide (1)..(315): Ceres Seq. ID no. 15219478
MILAPSNQQDSITSQLLNGVRGFMLDLYDFQNDIWLCHSYGGNCFNYTAFQPAVNILKEFQVFLDKNKDVVVTLILEDYVKSPNGLTRVFDASGLRNFMFPVSRMPKNGEDWPTLDDMICQNQRLLVFTSNPQKEASEGIAFMWRYMIENQYGDGGMKAGVCTNRPESVAMGDRSRSLILVNYFPDTADVIGSCKQNSAPLLDTVKNCQEASGKRWPNFIAVDFYKRSDGGGAPKAVDVANGHAVCGCEDIAACKENMPYGTCEKQEEKKPESNLMMIAKLTAEATKGYGHPSTKPTLLGLSVFVVTFVSLLSTF

SEQ ID NO: 50552 - DNA, 1766 bp, Arabidopsis thaliana; identical to SEQ ID NO: 42339
  misc_feature (1)..(1766): Ceres Seq. ID no. 13592405
  misc_feature (1)..(1766): Ortholog of  Ceres SEQ ID NO 15171618 as cited in SEQ ID NO 59968

SEQ ID NO: 50553 - protein, 246 aa, Arabidopsis thaliana; identical to SEQ ID NO: 42340
  peptide (1)..(246): Ceres Seq. ID no. 15221095
  misc_feature (66)..(66): Xaa is any aa, unknown or other
  misc_feature (72)..(72): Xaa is any aa, unknown or other
  misc_feature (120)..(120): Xaa is any aa, unknown or other
  misc_feature (125)..(125): Xaa is any aa, unknown or other
  misc_feature (127)..(127): Xaa is any aa, unknown or other
  misc_feature (136)..(136): Xaa is any aa, unknown or other
  misc_feature (146)..(146): Xaa is any aa, unknown or other

SEQ ID NO: 50554 - protein, 240 aa, Arabidopsis thaliana; identical to SEQ ID NO: 42341
  peptide (1)..(240): Ceres Seq. ID no. 15221096
  misc_feature (60)..(60): Xaa is any aa, unknown or other
  misc_feature (66)..(66): Xaa is any aa, unknown or other
  misc_feature (114)..(114): Xaa is any aa, unknown or other
  misc_feature (119)..(119): Xaa is any aa, unknown or other
  misc_feature (121)..(121): Xaa is any aa, unknown or other
  misc_feature (130)..(130): Xaa is any aa, unknown or other
  misc_feature (140)..(140): Xaa is any aa, unknown or other

SEQ ID NO: 50555 - protein, 234 aa, Arabidopsis thaliana; identical to SEQ ID NO: 42342
  peptide (1)..(234): Ceres Seq. ID no. 15221097
  misc_feature (54)..(54): Xaa is any aa, unknown or other
  misc_feature (60)..(60): Xaa is any aa, unknown or other
  misc_feature (108)..(108): Xaa is any aa, unknown or other
  misc_feature (113)..(113): Xaa is any aa, unknown or other
  misc_feature (115)..(115): Xaa is any aa, unknown or other
  misc_feature (124)..(124): Xaa is any aa, unknown or other
  misc_feature (134)..(134): Xaa is any aa, unknown or other

SEQ ID NO: 50556 - DNA, 875 bp, Arabidopsis thaliana
  misc_feature (1)..(875): Ceres Seq. ID no. 13647767
  misc_feature (1)..(875): Ortholog of  Ceres SEQ ID NO 13585222 as cited in SEQ ID NO 68696
gggagtgagattgaaatttctggcggctctttcaaaggaaaattgtagattgtattcaaatacgttgaggaagaaagaaggcgacaaagaggaagacgaagaagaaagttgtagaaagtaatggtgttgtgggagttagctctaggaacagcttacttcttggggattaggcggacttaccggctcgcattgaagacccagcgtcggcttgttagccctaagcatccaaggattcgagattttatgcatcggaggacttatcaaatctttgatatggcacttagggtccacaagaacatacaacagagagacatggatattggtcggaatcttggaaactggattctccgggggcttgaccggatgaagccatcggctcaggttctactaccaaagaatacagagccaagcatagacaaggcgaaaagagtattacaatcaacccgtcttaaaccacatgttaacacgcagactcctcagaaccgtgaggttgataggaacttgttcatgtccttgaggaactttcggtccaaataccccattgcttcgatgatgatgatcaaacctccaagatccacgggaactactactcagtacaggccttacagtgttggtgaatccagtctgattaaaccaatttatgctagaggcgggttcaacagcgtcatcaggaaggacattttgcagtggatggtgcagaagagataaagccgccaaaattcatcaaaggcccttctgtttcttagattacaacatactcagaaggaaacacttgtctcaaccgtatcactttgtatgagtttttaataaccggtggattgataggaaaatctcctggacaactaaaaattgtgactagtattacttacttgact

SEQ ID NO: 50557 - protein, 195 aa, Arabidopsis thaliana
  peptide (1)..(195): Ceres Seq. ID no. 13647768
MVLWELALGTAYFLGIRRTYRLALKTQRRLVSPKHPRIRDFMHRRTYQIFDMALRVHKNIQQRDMDIGRNLGNWILRGLDRMKPSAQVLLPKNTEPSIDKAKRVLQSTRLKPHVNTQTPQNREVDRNLFMSLRNFRSKYPIASMMMIKPPRSTGTTTQYRPYSVGESSLIKPIYARGGFNSVIRKDILQWMVQKR

SEQ ID NO: 50558 - protein, 154 aa, Arabidopsis thaliana
  peptide (1)..(154): Ceres Seq. ID no. 13647769
MHRRTYQIFDMALRVHKNIQQRDMDIGRNLGNWILRGLDRMKPSAQVLLPKNTEPSIDKAKRVLQSTRLKPHVNTQTPQNREVDRNLFMSLRNFRSKYPIASMMMIKPPRSTGTTTQYRPYSVGESSLIKPIYARGGFNSVIRKDILQWMVQKR

SEQ ID NO: 50559 - protein, 144 aa, Arabidopsis thaliana
  peptide (1)..(144): Ceres Seq. ID no. 13647770
MALRVHKNIQQRDMDIGRNLGNWILRGLDRMKPSAQVLLPKNTEPSIDKAKRVLQSTRLKPHVNTQTPQNREVDRNLFMSLRNFRSKYPIASMMMIKPPRSTGTTTQYRPYSVGESSLIKPIYARGGFNSVIRKDILQWMVQKR

SEQ ID NO: 50560 - DNA, 1567 bp, Arabidopsis thaliana
  misc_feature (1)..(1567): Ceres Seq. ID no. 12559635
  misc_feature (1)..(1567): Ortholog of  Ceres SEQ ID NO 12617253 as cited in SEQ ID NO 64065
agaaagcatttgatcttcaaactcttgggttcttctctgattgaaaatgagcttatcatcgccaaccagtgcttgtagctcgtccagatgttactcctcgggattatcgtttccgattggatttggatcgaatcccatcaatgtgggattggtttgttacccaaaaagatacagtattgctgctcggaagttcgtagtggcttgctcctcctcctcttccgatccacttttggttaaggctgcaaaagggcaagccataagtcgtcctccagcttggatgatgaggcaagcaggaaggtatatggctgtttaccaaaagctcgccaagaaacatccgtccttcagagagagatcagagaacactgatctaatagtggaaatctctttgcagccttggcaagcattcagaccagacggtgtcatcattttctctgacatcctcacccctttacctgcattcggtgtcccttttgatattgaagaggtaaaaggtcctgtaatccaatctcctatccgaactgaagaagatatgaagagattacatcccattgatttcgagaaactacagtttgttggagattctctcaagattttgagacgagaggttggggaacatgctgcggtgttgggtttcgttggagcgccttggacaattgcaacatatattgttgaaggaggaacaactcgaacatatacagtcataaagaatatgtgccacactgcaccagatgtattgagagctctattatctcatttaaccaaggccattaccgagtatgtggtttaccaagttgagcacggagctcactgcatacaaatattcgattcctggggtggccaactgactccggagatgtgggagcgctggtccaaaccatacattgaagagatcatacatgctgtaaagaaaagatgtccagatacgccgatagttttctacatcaatggaaatggtggccttcttgagcgaatgaaaggaactggagctgatgttattggacttgactggactgtagatatggctgatggaaggaggcgattgggaagcgaggtaagtgtgcagggaaatgttgatccagcttacctattctctccgcttcctgctttgaccgaagaaattgaaagagttgtgaagtgtgctggaccaaaagggcatattctcaatctaggacacggtgtcttggtagggacaccagaggaagccgtggctcatttctttgaaaccgctagaaacttggattaccaaacacttttccaaaatcatgttcctgcagaaaaagctgaacctgaattggttgtctgagaaatggaatgagagaaaaagttccatgtctgacccttaatcgatgctagagttggtaacttgctatgagatatatgcgaagctgtccagtttttgtttggcttgcttgaggatttccaatcttctggaccaagctctgcttaacgtttaacaatgtattgagttgctcctaggcttcaaatgttgctgcttcttttggagatatgactctggttaaagtttaaccaaacattcatttatctggttaatctcaaacctttgcta

SEQ ID NO: 50561 - protein, 418 aa, Arabidopsis thaliana; identical to SEQ ID NO: 49697
  peptide (1)..(418): Ceres Seq. ID no. 12559636

SEQ ID NO: 50562 - protein, 341 aa, Arabidopsis thaliana; identical to SEQ ID NO: 49698
  peptide (1)..(341): Ceres Seq. ID no. 12559637

SEQ ID NO: 50563 - protein, 340 aa, Arabidopsis thaliana; identical to SEQ ID NO: 49699
  peptide (1)..(340): Ceres Seq. ID no. 12559638

SEQ ID NO: 50564 - DNA, 638 bp, Arabidopsis thaliana
  misc_feature (1)..(638): Ceres Seq. ID no. 14307581
  misc_feature (1)..(638): Ortholog of  Ceres SEQ ID NO 15179062 as cited in SEQ ID NO 0
ggtcacatttctttaactttaaaaactcttccgtttcgccgaagcttcttcaatggcgatttctctcgccaccgcctatatctctccatgttttacaccggaatcgtctagttccgcttcaccatcacgaactctttcctccgtacgattaccttctcagattcgccgattcggaagtgttcaatcgccgtcttcgtctactcgcttcgctccactcactgtaagagcagcaaagaagcaaactttcaactcttttgatgatttgttgcagaattctgataaacctgtacttgtagacttctatgctacttggtgtggtccatgtcagcttatggtacctatactcaatgaagtgagtgaaacactgaaagatataattgcagttgtgaaaattgatactgagaagtacccaagtcttgctaacaaataccagattgaggctttgcccacattcatcttattcaaagacggcaaactctgggaccgtttcgagggtgccttgccagcgaaccaactcgttgagcgtattgagaattctttgcaagtgaaacagtaggtttgagaaaccaagaaaacttgtcatctatgaacaatctgttgtgacataagccattgttgattgtttgctcggtataatc

SEQ ID NO: 50565 - protein, 167 aa, Arabidopsis thaliana
  peptide (1)..(167): Ceres Seq. ID no. 14307582
MAISLATAYISPCFTPESSSSASPSRTLSSVRLPSQIRRFGSVQSPSSSTRFAPLTVRAAKKQTFNSFDDLLQNSDKPVLVDFYATWCGPCQLMVPILNEVSETLKDIIAVVKIDTEKYPSLANKYQIEALPTFILFKDGKLWDRFEGALPANQLVERIENSLQVKQ

SEQ ID NO: 50566 - DNA, 1727 bp, Arabidopsis thaliana; identical to SEQ ID NO: 45624
  misc_feature (1)..(1727): Ceres Seq. ID no. 12559251
  misc_feature (1)..(1727): Ortholog of  Ceres SEQ ID NO 14302216 as cited in SEQ ID NO 66456

SEQ ID NO: 50567 - protein, 343 aa, Arabidopsis thaliana; identical to SEQ ID NO: 45625
  peptide (1)..(343): Ceres Seq. ID no. 12559252

SEQ ID NO: 50568 - protein, 329 aa, Arabidopsis thaliana; identical to SEQ ID NO: 45626
  peptide (1)..(329): Ceres Seq. ID no. 12559253

SEQ ID NO: 50569 - protein, 273 aa, Arabidopsis thaliana; identical to SEQ ID NO: 45627
  peptide (1)..(273): Ceres Seq. ID no. 12559254

SEQ ID NO: 50570 - DNA, 1647 bp, Arabidopsis thaliana
  misc_feature (1)..(1647): Ceres Seq. ID no. 13592448
  misc_feature (1)..(1647): Ortholog of  Ceres SEQ ID NO 13639636 as cited in SEQ ID NO 60184
atggacttgcaactgaaacaatggagaagtcagcagcagaatgagtcagaagaacaaggctctgctgcaactaagatatcaaactttttctttgatcagattcagtcccaaactgctacttctgctgctgcggctcctcttcctctctttgtccctgaacccacttcttcctcttctttctcttgcttctctcctgactcttctaattcttcttcttcttccaggttcctcaagatgggaaacttcttcagctgggcacagtggcaagaacttgagctacaagcactgatctatagatacatgttggctggtgcttctgttcctcaagagcttctcttacctattaagaaaagtctcctccatcaatctcctatgcatttccttcaccatcctcttcaacatagttttcctcatcaccaaccttcttggtattggggaagaggagcaatggatcctgagccagggaggtgtaagagaactgacggcaagaaatggagatgttcaagggatgttgtagcgggccacaagtattgtgaccgccacattcaccgtggaagaaaccgttcaagaaagcctgtggaaaccgccacaaccaccatcacaacgacagccacaacaaccgcatcttcttttgtcttaggtgaggagcttggtcatggaccaaacaacaaccacttcttctcctctggttcatctcaacctctccaccttagtcatcaacaaagttgttcttcagagatgaaacaagaaagcaacaacaacaagaggccatatgaagctaacagtggattcagcaatggaagatcagacgatggtcacatcttgaggcatttctttgacgattggccacgatcatcagactctacctccagtccaatgagctcatccacttgtcatctttcaatctccatgcccggtaacaacacgtcctcagatgtttctctaaaactttccacaggcaatgaagaagaagaagagaacatgagaaataacaacaatgagagggagcaaatgaattggtggagcaatggagggaatcaccacaacaatatgggaggaccattagctgaggctttgaggtcagcttcttcgacgtcaagtgttcttcatcagatgggaatctctactcaagaaatgaagtatgtgaagccattgagcttattgggtaatgcgctgaagaccaaagtgtcagtccctggtcggtttctgggtttagatgttggtgataagtatgttggattagctatctcagatccttcaaatatggttgcttctccattgagtgttttgctcagaaagaaatcaaacattgacctgatggctacagatttccagaacctggtcaaagcattttctgtgtcgggattagtcgttggttatccatttggcaaactgaacaatgtagaggatgttgtcactgtgaatcttttcattgaggaacttcgtaagaccgaaaaactcaaggatgtgaaatacacatattgggacgagcgattatcatcaaagaccgttgaactgatgttgaagcccttgaatttgcatcctgttcaagagaagacaatgttggacaagttagccgcagtagttatacttcaggagtatttagattacgcgaacaggtatgtaaacactgagccagcagagtaa

SEQ ID NO: 50571 - protein, 548 aa, Arabidopsis thaliana
  peptide (1)..(548): Ceres Seq. ID no. 15221106
MDLQLKQWRSQQQNESEEQGSAATKISNFFFDQIQSQTATSAAAAPLPLFVPEPTSSSSFSCFSPDSSNSSSSSRFLKMGNFFSWAQWQELELQALIYRYMLAGASVPQELLLPIKKSLLHQSPMHFLHHPLQHSFPHHQPSWYWGRGAMDPEPGRCKRTDGKKWRCSRDVVAGHKYCDRHIHRGRNRSRKPVETATTTITTTATTTASSFVLGEELGHGPNNNHFFSSGSSQPLHLSHQQSCSSEMKQESNNNKRPYEANSGFSNGRSDDGHILRHFFDDWPRSSDSTSSPMSSSTCHLSISMPGNNTSSDVSLKLSTGNEEEEENMRNNNNEREQMNWWSNGGNHHNNMGGPLAEALRSASSTSSVLHQMGISTQEMKYVKPLSLLGNALKTKVSVPGRFLGLDVGDKYVGLAISDPSNMVASPLSVLLRKKSNIDLMATDFQNLVKAFSVSGLVVGYPFGKLNNVEDVVTVNLFIEELRKTEKLKDVKYTYWDERLSSKTVELMLKPLNLHPVQEKTMLDKLAAVVILQEYLDYANRYVNTEPAE

SEQ ID NO: 50572 - protein, 470 aa, Arabidopsis thaliana
  peptide (1)..(470): Ceres Seq. ID no. 15221107
MGNFFSWAQWQELELQALIYRYMLAGASVPQELLLPIKKSLLHQSPMHFLHHPLQHSFPHHQPSWYWGRGAMDPEPGRCKRTDGKKWRCSRDVVAGHKYCDRHIHRGRNRSRKPVETATTTITTTATTTASSFVLGEELGHGPNNNHFFSSGSSQPLHLSHQQSCSSEMKQESNNNKRPYEANSGFSNGRSDDGHILRHFFDDWPRSSDSTSSPMSSSTCHLSISMPGNNTSSDVSLKLSTGNEEEEENMRNNNNEREQMNWWSNGGNHHNNMGGPLAEALRSASSTSSVLHQMGISTQEMKYVKPLSLLGNALKTKVSVPGRFLGLDVGDKYVGLAISDPSNMVASPLSVLLRKKSNIDLMATDFQNLVKAFSVSGLVVGYPFGKLNNVEDVVTVNLFIEELRKTEKLKDVKYTYWDERLSSKTVELMLKPLNLHPVQEKTMLDKLAAVVILQEYLDYANRYVNTEPAE

SEQ ID NO: 50573 - protein, 448 aa, Arabidopsis thaliana
  peptide (1)..(448): Ceres Seq. ID no. 15221108
MLAGASVPQELLLPIKKSLLHQSPMHFLHHPLQHSFPHHQPSWYWGRGAMDPEPGRCKRTDGKKWRCSRDVVAGHKYCDRHIHRGRNRSRKPVETATTTITTTATTTASSFVLGEELGHGPNNNHFFSSGSSQPLHLSHQQSCSSEMKQESNNNKRPYEANSGFSNGRSDDGHILRHFFDDWPRSSDSTSSPMSSSTCHLSISMPGNNTSSDVSLKLSTGNEEEEENMRNNNNEREQMNWWSNGGNHHNNMGGPLAEALRSASSTSSVLHQMGISTQEMKYVKPLSLLGNALKTKVSVPGRFLGLDVGDKYVGLAISDPSNMVASPLSVLLRKKSNIDLMATDFQNLVKAFSVSGLVVGYPFGKLNNVEDVVTVNLFIEELRKTEKLKDVKYTYWDERLSSKTVELMLKPLNLHPVQEKTMLDKLAAVVILQEYLDYANRYVNTEPAE

SEQ ID NO: 50574 - DNA, 1384 bp, Arabidopsis thaliana
  misc_feature (1)..(1384): Ceres Seq. ID no. 13588389
  misc_feature (1)..(1384): Ortholog of  Ceres SEQ ID NO 13598513 as cited in SEQ ID NO 64102
gaccaaaacacacacacactcactctcaatatctagtttttcccttgtttctgatcagtgtgatcacgtagagtgccttgaaggagaagaaagaaacaaaaacaaaggaaaatgggatacctttttcaagaaaccttaagctctaaccctaaaactccaattgttgttgatgatgataacgagttgggtttgatggccgtgagacttgccaacgccgccgcctttcctatggttctcaaagccgccctcgagcttggtgtctttgacactctctacgccgcagcctctcgcaccgactcattcctctcaccctatgaaatagcaagtaagctaccaactacacctcgtaaccctgaagcgccggttttgttggaccgcatgcttcgtctactcgctagctactccatggtcaagtgtggtaaggccttatccggaaagggcgagagggtctacagagccgagccgatttgcaggttcttcttgaaggataacattcaagatattggatcccttgcttctcaagtcatcgtcaatttcgacagcgtcttccttaatacctgggcacagttgaaagatgtggtgctagaaggaggagatgcgtttggtcgcgcacatggtggtatgaaactctttgactatatgggtacagatgagagattcagcaagctctttaaccagaccggattcacaatcgcggtcgttaagaaggcccttgaagtctatgaaggcttcaaaggtgtgaaagttttagttgatgttggaggaggagttggtaacactcttggtgttgttacttctaaatatcccaatattaagggtatcaactttgatctaacctgtgccttggcacaagcaccttcttatcccggtgtggagcatgttgccggagatatgtttgtggatgtcccaaccggagatgccatgatcttgaaacgtatacttcatgattggaccgacgaagattgtgtcaagattcttaagaattgttggaaatcactacctgaaaacggtaaagtggttgttatagaattagtcactcctgatgaggcagagaatggtgacatcaatgcgaacattgcctttgacatggacatgttaatgttcacccaatgttctggtggaaaagagcgatcaagagctgagtttgaagctttagctgcagcttctggcttcacccattgcaagttcgtttgccaagcttatcactgctggattattgaattctgtaaataaaatgtgtgatacaaatctaaatcgtcgtttctagtatttttcttttttgttgatatgtgattatcgttgttatttcttattttcatatttgtttgaaatggtcatgcatgtctttgtcttcaagcaatctagcaataaaaataaggtttta

SEQ ID NO: 50575 - protein, 373 aa, Arabidopsis thaliana
  peptide (1)..(373): Ceres Seq. ID no. 13588390
MGYLFQETLSSNPKTPIVVDDDNELGLMAVRLANAAAFPMVLKAALELGVFDTLYAAASRTDSFLSPYEIASKLPTTPRNPEAPVLLDRMLRLLASYSMVKCGKALSGKGERVYRAEPICRFFLKDNIQDIGSLASQVIVNFDSVFLNTWAQLKDVVLEGGDAFGRAHGGMKLFDYMGTDERFSKLFNQTGFTIAVVKKALEVYEGFKGVKVLVDVGGGVGNTLGVVTSKYPNIKGINFDLTCALAQAPSYPGVEHVAGDMFVDVPTGDAMILKRILHDWTDEDCVKILKNCWKSLPENGKVVVIELVTPDEAENGDINANIAFDMDMLMFTQCSGGKERSRAEFEALAAASGFTHCKFVCQAYHCWIIEFCK

SEQ ID NO: 50576 - protein, 346 aa, Arabidopsis thaliana
  peptide (1)..(346): Ceres Seq. ID no. 13588391
MAVRLANAAAFPMVLKAALELGVFDTLYAAASRTDSFLSPYEIASKLPTTPRNPEAPVLLDRMLRLLASYSMVKCGKALSGKGERVYRAEPICRFFLKDNIQDIGSLASQVIVNFDSVFLNTWAQLKDVVLEGGDAFGRAHGGMKLFDYMGTDERFSKLFNQTGFTIAVVKKALEVYEGFKGVKVLVDVGGGVGNTLGVVTSKYPNIKGINFDLTCALAQAPSYPGVEHVAGDMFVDVPTGDAMILKRILHDWTDEDCVKILKNCWKSLPENGKVVVIELVTPDEAENGDINANIAFDMDMLMFTQCSGGKERSRAEFEALAAASGFTHCKFVCQAYHCWIIEFCK

SEQ ID NO: 50577 - protein, 334 aa, Arabidopsis thaliana
  peptide (1)..(334): Ceres Seq. ID no. 13588392
MVLKAALELGVFDTLYAAASRTDSFLSPYEIASKLPTTPRNPEAPVLLDRMLRLLASYSMVKCGKALSGKGERVYRAEPICRFFLKDNIQDIGSLASQVIVNFDSVFLNTWAQLKDVVLEGGDAFGRAHGGMKLFDYMGTDERFSKLFNQTGFTIAVVKKALEVYEGFKGVKVLVDVGGGVGNTLGVVTSKYPNIKGINFDLTCALAQAPSYPGVEHVAGDMFVDVPTGDAMILKRILHDWTDEDCVKILKNCWKSLPENGKVVVIELVTPDEAENGDINANIAFDMDMLMFTQCSGGKERSRAEFEALAAASGFTHCKFVCQAYHCWIIEFCK

SEQ ID NO: 50578 - DNA, 1252 bp, Arabidopsis thaliana
  misc_feature (1)..(1252): Ceres Seq. ID no. 14304403
  misc_feature (1)..(1252): Ortholog of  Ceres SEQ ID NO 12588828 as cited in SEQ ID NO 1280
acaatcaaccactttccttttttcattcgtctcaatttctctcatgacgagtagtagtggaagcctcaaactagagatccacactgatgacaagacgccgggaaagtggagcgtaccgctcggcgatgatgttttccgaaggttcttgagcgggggaggaggctcggagaaggctgtgttcggtgaggggtctctttttagcccgtttttgttcgggaagtactttgatccgtcagacgcctttccgttgtgggaatttgaagctgaggttttgctggcgagccttaggagcttaggacagtgtagagtcgattggtctcatacggatcaagcttatgtccttaaatccgatatccccggtacgtacgtctttccacaccacaattctcttatttattttcattcggaaaacgtttatttctgctttagtaaaaaataaaataggatatatcgaacttaaaaaaaagaaaagtaaatcttcgttcaaatgatttgttatacatcataacgatcaaaactgaatatgtgaactgatgaatggttgatatagtacaaatatgaacagaacctaagtttctttaaaagtgaacgtgaaccaatctcaaaacgtaactcattcaaatttaggatttcttttgtcaattttactttaaatatcaaaatgatcgaaccacaacttgaattggacactagttataatgatggtaacgagaaagatgaaatggttcgcaaaattttcaaataataatgtatcttttaaaatggtataaaataaggaaaaaaaaaactgattaaatttttggtacttgtatattagtggtggggaaaaataacgtgcaggtgtacgtggacattaacggaagagtgatggagattagtggccaatggaacagcaacaagaaagcggcgaccaacagtgactggagaagcggccggtggtgggaacatggctatgtccgccgtctcgagctccctagcgatgccgacgccaaatactctgaagctttcctctctaacaacgacgattactctttcttagagatccgaatccctaagataaattctaagaacaagttttaatctgatcatgtcgccttgacgagttttaactttagattcttttcgtaattttgttttctttagttaactattattatagatatgaaattctgtggtagagacacaatggatgaatgatatgttatatatacatactataaaatatatcaaatataacatatcgattataaac

SEQ ID NO: 50579 - protein, 145 aa, Arabidopsis thaliana
  peptide (1)..(145): Ceres Seq. ID no. 14304404
QSTTFLFSFVSISLMTSSSGSLKLEIHTDDKTPGKWSVPLGDDVFRRFLSGGGGSEKAVFGEGSLFSPFLFGKYFDPSDAFPLWEFEAEVLLASLRSLGQCRVDWSHTDQAYVLKSDIPGTYVFPHHNSLIYFHSENVYFCFSKK

SEQ ID NO: 50580 - protein, 131 aa, Arabidopsis thaliana
  peptide (1)..(131): Ceres Seq. ID no. 14304405
MTSSSGSLKLEIHTDDKTPGKWSVPLGDDVFRRFLSGGGGSEKAVFGEGSLFSPFLFGKYFDPSDAFPLWEFEAEVLLASLRSLGQCRVDWSHTDQAYVLKSDIPGTYVFPHHNSLIYFHSENVYFCFSKK

SEQ ID NO: 50581 - DNA, 749 bp, Arabidopsis thaliana
  misc_feature (1)..(749): Ceres Seq. ID no. 13593511
  misc_feature (1)..(749): Ortholog of  Ceres SEQ ID NO 14316390 as cited in SEQ ID NO 60116
gaagagttgaagaaaatcacagaaagccttagcacagagaagagagattgaagaagtcatggatgtttcaggaagcttgaattgcgttgttgtggcggtagatggaagcgaggtgagtatggaagctctgaggtgggctctagacaacctcaagctctcttcgtcttcttccgattcatcattcgtcgtgctccacgtccagccgtcgccttctgtagccgccggcgtgagtcccggcaccatacctttcggtggtcccagtggtcttgaggttcctgctttcactgctgcaatcgagcaacaccagaagcggatcaccgacaccatcctcgaacacgctagtcaaatttgtgctgaaaaatctgtgaatgtgaaaacacaagtggttattggggatcccaagtataaaatctgcgaagctgtagagaatttgcatgctgatcttcttgtcatgggctcccgggcttatggccgcattaagagaatgtttctgggaagtgtaagcaactactgcaccaaccacgcccattgtcctgttgtgataatcaaaccaaaagaggattcttctgcataaagaggatatatatgtacatatgcaaagggatatcaagaccatctgtaatcttttgaagttttgtgaatgtatagaagtcaagcaggaattatcccggattacttctcaaataagtggtgtgaatgtaaactaataagaggtacagagaacattgattggctcagtatatgtgttg

SEQ ID NO: 50582 - protein, 171 aa, Arabidopsis thaliana
  peptide (1)..(171): Ceres Seq. ID no. 13593512
MDVSGSLNCVVVAVDGSEVSMEALRWALDNLKLSSSSSDSSFVVLHVQPSPSVAAGVSPGTIPFGGPSGLEVPAFTAAIEQHQKRITDTILEHASQICAEKSVNVKTQVVIGDPKYKICEAVENLHADLLVMGSRAYGRIKRMFLGSVSNYCTNHAHCPVVIIKPKEDSSA

SEQ ID NO: 50583 - protein, 151 aa, Arabidopsis thaliana
  peptide (1)..(151): Ceres Seq. ID no. 13593513
MEALRWALDNLKLSSSSSDSSFVVLHVQPSPSVAAGVSPGTIPFGGPSGLEVPAFTAAIEQHQKRITDTILEHASQICAEKSVNVKTQVVIGDPKYKICEAVENLHADLLVMGSRAYGRIKRMFLGSVSNYCTNHAHCPVVIIKPKEDSSA

SEQ ID NO: 50584 - DNA, 1431 bp, Arabidopsis thaliana
  misc_feature (1)..(1431): Ceres Seq. ID no. 13588866
  misc_feature (1)..(1431): Ortholog of  Ceres SEQ ID NO 15176966 as cited in SEQ ID NO 67332
ggtcgacgtcgatggggatgagaagtagtggagaatccgctcacattgggattcgtcattcttcttctaaaacccgcaaaatttctccatttctaccaaaaatatccaacttttacttttctttcctgtgaaattatctgctcaaatctttggttcctgacggagatggcggcgatttcaggcatctcctctggtacgttgacgatttcacggcctttggttactcttcgacgctctagagccgccgtttcgtacagctcctctcaccgattgcttcatcatcttcctctctcttctcgtcgtctgctattaaggaacaatcatcgagtccaagcaacgattttgcaagacgatgaagagaaagtggtggtggaggaatcgtttaaagccgagacttctactggtacagaaccacttgaggagccaaatatgagttcttcttcaactagtgcttttgagacatggatcatcaagcttgagcaaggagtgaatgttttccttacagactcggttattaagatacttgacactttgtatcgtgaccgaacatatgcaaggttctttgttcttgagacaattgctagagtgccttattttgcgtttatgtctgtgctacatatgtatgagacctttggttggtggaggagagcagattatttgaaagtacactttgctgagagctggaatgaaatgcatcacttgctcataatggaagaattgggtggaaattcttggtggtttgatcgttttctggctcagcacatagcaaccttctactacttcatgacagtgttcttgtatatcttaagccctagaatggcatatcacttttcggaatgtgtggagagtcatgcatatgagacttatgataaatttctcaaggccagtggagaggagttgaagaatatgcctgcaccggatatcgcagtaaaatactatacgggaggtgacttgtacttatttgatgagttccaaacatcaagaactcccaatactcgaagaccagtaatagaaaatctatacgatgtgtttgtgaacataagagatgatgaagcagaacactgcaagacaatgagagcttgtcagactctaggcagtctgcgttctccacactccattttagaagatgatgatactgaagaagaatcagggtgtgttgttcctgaggaggctcattgcgaaggtattgtagactgcctcaagaaatccattacaagttaataaattagaaagtaaactaaaaaagattatttgtatcagctcatgaacaatagatataatcccatatacttgggaataaaggaataatgtgaaattcccatcgttgtgctagtgtgtgagagaatcaaataccctaatgatgtaaatgtactttgatgagcttaagtcgttgtagaccattttatccatactactagcctttgtggttgc

SEQ ID NO: 50585 - protein, 351 aa, Arabidopsis thaliana
  peptide (1)..(351): Ceres Seq. ID no. 15220917
MAAISGISSGTLTISRPLVTLRRSRAAVSYSSSHRLLHHLPLSSRRLLLRNNHRVQATILQDDEEKVVVEESFKAETSTGTEPLEEPNMSSSSTSAFETWIIKLEQGVNVFLTDSVIKILDTLYRDRTYARFFVLETIARVPYFAFMSVLHMYETFGWWRRADYLKVHFAESWNEMHHLLIMEELGGNSWWFDRFLAQHIATFYYFMTVFLYILSPRMAYHFSECVESHAYETYDKFLKASGEELKNMPAPDIAVKYYTGGDLYLFDEFQTSRTPNTRRPVIENLYDVFVNIRDDEAEHCKTMRACQTLGSLRSPHSILEDDDTEEESGCVVPEEAHCEGIVDCLKKSITS

SEQ ID NO: 50586 - protein, 263 aa, Arabidopsis thaliana
  peptide (1)..(263): Ceres Seq. ID no. 15220918
MSSSSTSAFETWIIKLEQGVNVFLTDSVIKILDTLYRDRTYARFFVLETIARVPYFAFMSVLHMYETFGWWRRADYLKVHFAESWNEMHHLLIMEELGGNSWWFDRFLAQHIATFYYFMTVFLYILSPRMAYHFSECVESHAYETYDKFLKASGEELKNMPAPDIAVKYYTGGDLYLFDEFQTSRTPNTRRPVIENLYDVFVNIRDDEAEHCKTMRACQTLGSLRSPHSILEDDDTEEESGCVVPEEAHCEGIVDCLKKSITS

SEQ ID NO: 50587 - protein, 205 aa, Arabidopsis thaliana
  peptide (1)..(205): Ceres Seq. ID no. 15220919
MSVLHMYETFGWWRRADYLKVHFAESWNEMHHLLIMEELGGNSWWFDRFLAQHIATFYYFMTVFLYILSPRMAYHFSECVESHAYETYDKFLKASGEELKNMPAPDIAVKYYTGGDLYLFDEFQTSRTPNTRRPVIENLYDVFVNIRDDEAEHCKTMRACQTLGSLRSPHSILEDDDTEEESGCVVPEEAHCEGIVDCLKKSITS

SEQ ID NO: 50588 - DNA, 1583 bp, Arabidopsis thaliana
  misc_feature (1)..(1583): Ceres Seq. ID no. 13647889
  misc_feature (1)..(1583): Ortholog of  Ceres SEQ ID NO 14303137 as cited in SEQ ID NO 53594
  misc_feature (1)..(1583): Ortholog of  Ceres SEQ ID NO 13585454 as cited in SEQ ID NO 65280
  misc_feature (1)..(1583): Ortholog of  Ceres SEQ ID NO 14307889 as cited in SEQ ID NO 67245
tcactagtccccccccccccatccatttatcaagagaagaaaaaaaatctgaattccaattcgaagaagaagaagaagaagaaaggagatgactatggggaatttcttaaagagatttggaagtggaaaaagcagaagcagtagaaatatgactctgggaacgacgtcgtctcaatctcatgaaccatcaccgtcggatccttcactctcccttgccgataataccaacgccaccaagaagaagtacgctctcatccctgaccgcttctcttccctcgaccaggtatcaaaagctctaagagaagctggtcttgaatcatccaatctcattctcggagttgatttcacaaagagcaacgagtggactgggaaaacttctttcgatagaaaatgtctgcacgcgctcggcgaaacttcgaatccatatgaaaaggcgatttttgtaatcggccaaacgttggctccttttgatgaagacaatctcatcccttgtttcggctttggcgattcaacaactcatgacgaggaagtgttcggtttccatagcgacaattctccatgtcatggcttcgaagaggtcttagcatgttacaggagaattgcacccaacttgcgtctatcagggccaacgtcgtatggaccgctcatcgatgctgctgtcgacattgtggagaagaacaacggacaattccatgttctggtgattgttgcagatggacaggtaacgagaggtacggatatggccgagggagaactcagtcaacaagagaaaacaaccatcgacgcgattgtaaatgcaagctcgtatgctttgtcgattgttttagtcggtgttggagacggaccatgggaagacatgaggaagttcgatgataagatccctaagcgtgaattcgacaactttcagtttgtgaatttcacagagattatgacgagaaactcaccagagtctgccaaagaaactgcttttgctctagctgctctaatggagattccctttcagtatcaagcagccatcgaactccgcttactcgggaagcagacgggcttagcgaagacaatagttccgaggccaccaccaattccgtacacacctccaactaatgctgaactaccatcaactgcatcacctgcatcacctgaacaaacccagagttgcccgatttgtctgactaaccgaaaagacgtggctttcagctgtggccacatgacttgtggagattgcggatccaaaatatcaaattgcccgatctgtcgagtaaggatcacgaaccggctaaagctttacacatgatcaatggccacgaactttttttctgaccacggctttacacgtgatcaatgccaacaaactttatctctgcacataacaaatcgcttgcacatagccatctcctttgtagaatctacaatttggtttgccaagtgtttctgacaatgttccacaatcagcgtgtaccatgtaattctgtatgtactgtaaaacattaactttgcaaacaagaatgaagaagcaatgtacaaattacaaaaaaaaaaaaaaaaaaaactcgagggggggcccggtacccaattcgccctat

SEQ ID NO: 50589 - protein, 401 aa, Arabidopsis thaliana
  peptide (1)..(401): Ceres Seq. ID no. 15220528
MTMGNFLKRFGSGKSRSSRNMTLGTTSSQSHEPSPSDPSLSLADNTNATKKKYALIPDRFSSLDQVSKALREAGLESSNLILGVDFTKSNEWTGKTSFDRKCLHALGETSNPYEKAIFVIGQTLAPFDEDNLIPCFGFGDSTTHDEEVFGFHSDNSPCHGFEEVLACYRRIAPNLRLSGPTSYGPLIDAAVDIVEKNNGQFHVLVIVADGQVTRGTDMAEGELSQQEKTTIDAIVNASSYALSIVLVGVGDGPWEDMRKFDDKIPKREFDNFQFVNFTEIMTRNSPESAKETAFALAALMEIPFQYQAAIELRLLGKQTGLAKTIVPRPPPIPYTPPTNAELPSTASPASPEQTQSCPICLTNRKDVAFSCGHMTCGDCGSKISNCPICRVRITNRLKLYT

SEQ ID NO: 50590 - protein, 399 aa, Arabidopsis thaliana
  peptide (1)..(399): Ceres Seq. ID no. 15220529
MGNFLKRFGSGKSRSSRNMTLGTTSSQSHEPSPSDPSLSLADNTNATKKKYALIPDRFSSLDQVSKALREAGLESSNLILGVDFTKSNEWTGKTSFDRKCLHALGETSNPYEKAIFVIGQTLAPFDEDNLIPCFGFGDSTTHDEEVFGFHSDNSPCHGFEEVLACYRRIAPNLRLSGPTSYGPLIDAAVDIVEKNNGQFHVLVIVADGQVTRGTDMAEGELSQQEKTTIDAIVNASSYALSIVLVGVGDGPWEDMRKFDDKIPKREFDNFQFVNFTEIMTRNSPESAKETAFALAALMEIPFQYQAAIELRLLGKQTGLAKTIVPRPPPIPYTPPTNAELPSTASPASPEQTQSCPICLTNRKDVAFSCGHMTCGDCGSKISNCPICRVRITNRLKLYT

SEQ ID NO: 50591 - protein, 381 aa, Arabidopsis thaliana
  peptide (1)..(381): Ceres Seq. ID no. 15220530
MTLGTTSSQSHEPSPSDPSLSLADNTNATKKKYALIPDRFSSLDQVSKALREAGLESSNLILGVDFTKSNEWTGKTSFDRKCLHALGETSNPYEKAIFVIGQTLAPFDEDNLIPCFGFGDSTTHDEEVFGFHSDNSPCHGFEEVLACYRRIAPNLRLSGPTSYGPLIDAAVDIVEKNNGQFHVLVIVADGQVTRGTDMAEGELSQQEKTTIDAIVNASSYALSIVLVGVGDGPWEDMRKFDDKIPKREFDNFQFVNFTEIMTRNSPESAKETAFALAALMEIPFQYQAAIELRLLGKQTGLAKTIVPRPPPIPYTPPTNAELPSTASPASPEQTQSCPICLTNRKDVAFSCGHMTCGDCGSKISNCPICRVRITNRLKLYT

SEQ ID NO: 50592 - DNA, 1681 bp, Arabidopsis thaliana
  misc_feature (1)..(1681): Ceres Seq. ID no. 13588234
  misc_feature (1)..(1681): Ortholog of  Ceres SEQ ID NO 15176803 as cited in SEQ ID NO 52778
  misc_feature (1)..(1681): Ortholog of  Ceres SEQ ID NO 14302283 as cited in SEQ ID NO 68688
atatcattcatgggcccctacgcattactcggtaccaatctcgctctctctctctaagtcttgaaactctatcaagaatctcaagccaccattttttcttcatcttcataaagagaaagagagagatcctcttgtttggcaagaacccaatttgagttctaagtcctgatttgctttgctcttttctttccttgatttcattctatataaagtcaacggaaagatatacatatatagttttcttccgattctagggttttcatatttcctctaaattttcatggtcaaagaagaaaatctaagaaacaatcgaaccagcaagagaaagaagacttcaatatcaacatctctctctctcttatattataagatctcgagttgagtcatcatcatcgtcaatggctttgaaaaacatccgcaacaattcaccaattgaagaacaagagaaaggtttaaacttcatcaagattcactaagacccactaagagccaactcaagactaaacggagcaaggttttgccaaaaaccaaaaaaaaaaaaaaaaaagattcaagaaccatctcgtaaatcaagatttctccaaggaaaatcagataggtcataatggatctatccctggctccgacaacaacaacaagttccgaccaagaacaagacagagaccaagaattaacctccaacatcggagcaagcagcagctccggtcccagcggaaacaacaacaaccttccgatgatgatgattccacctccggagaaagaacacatgttcgacaaagtggtaacaccaagcgacgtcggaaaactcaacagactcgtgatccctaaacaacacgctgagaggtatttccctctagactcctcaaacaaccaaaacggcacgcttttgaacttccaagacagaaacggcaagatgtggagattccgttactcgtattggaactctagccagagctacgttatgaccaaaggatggagccgtttcgtcaaagagaaaaagctcgatgcaggagacattgtctctttccaacgaggcatcggagatgagtcagaaagatccaaactttacatagattggaggcatagacccgacatgagcctcgttcaagcacatcagtttggtaattttggtttcaatttcaatttcccgaccacttctcaatattccaacagatttcatccattgccagaatataactccgtcccgattcaccggggcttaaacatcggaaatcaccaacgttcctattataacacccagcgtcaagagttcgtagggtatggttatgggaatttagctggaaggtgttactacacgggatcaccgttggatcataggaacattgttggatcagagccgttggttatagactcagtccctgtggttcccgggagattaactccggtgatgttaccgccgcttcctccgcctccttctacggcgggaaagagactaaggctctttggggtgaatatggaatgtggcaatgactataatcaacaagaagagtcatggttggtgccacgtggcgaaattggtgcatcttcttcttcttcttcagctctacgactaaatttatcgactgatcatgatgatgataatgatgatggtgatgatggcgatgatgatcaatttgctaagaaagggaagtcttcactttctctcaatttcaatccatga

SEQ ID NO: 50593 - protein, 358 aa, Arabidopsis thaliana
  peptide (1)..(358): Ceres Seq. ID no. 13588235
MDLSLAPTTTTSSDQEQDRDQELTSNIGASSSSGPSGNNNNLPMMMIPPPEKEHMFDKVVTPSDVGKLNRLVIPKQHAERYFPLDSSNNQNGTLLNFQDRNGKMWRFRYSYWNSSQSYVMTKGWSRFVKEKKLDAGDIVSFQRGIGDESERSKLYIDWRHRPDMSLVQAHQFGNFGFNFNFPTTSQYSNRFHPLPEYNSVPIHRGLNIGNHQRSYYNTQRQEFVGYGYGNLAGRCYYTGSPLDHRNIVGSEPLVIDSVPVVPGRLTPVMLPPLPPPPSTAGKRLRLFGVNMECGNDYNQQEESWLVPRGEIGASSSSSSALRLNLSTDHDDDNDDGDDGDDDQFAKKGKSSLSLNFNP

SEQ ID NO: 50594 - protein, 315 aa, Arabidopsis thaliana
  peptide (1)..(315): Ceres Seq. ID no. 13588236
MMMIPPPEKEHMFDKVVTPSDVGKLNRLVIPKQHAERYFPLDSSNNQNGTLLNFQDRNGKMWRFRYSYWNSSQSYVMTKGWSRFVKEKKLDAGDIVSFQRGIGDESERSKLYIDWRHRPDMSLVQAHQFGNFGFNFNFPTTSQYSNRFHPLPEYNSVPIHRGLNIGNHQRSYYNTQRQEFVGYGYGNLAGRCYYTGSPLDHRNIVGSEPLVIDSVPVVPGRLTPVMLPPLPPPPSTAGKRLRLFGVNMECGNDYNQQEESWLVPRGEIGASSSSSSALRLNLSTDHDDDNDDGDDGDDDQFAKKGKSSLSLNFNP

SEQ ID NO: 50595 - protein, 314 aa, Arabidopsis thaliana
  peptide (1)..(314): Ceres Seq. ID no. 13588237
MMIPPPEKEHMFDKVVTPSDVGKLNRLVIPKQHAERYFPLDSSNNQNGTLLNFQDRNGKMWRFRYSYWNSSQSYVMTKGWSRFVKEKKLDAGDIVSFQRGIGDESERSKLYIDWRHRPDMSLVQAHQFGNFGFNFNFPTTSQYSNRFHPLPEYNSVPIHRGLNIGNHQRSYYNTQRQEFVGYGYGNLAGRCYYTGSPLDHRNIVGSEPLVIDSVPVVPGRLTPVMLPPLPPPPSTAGKRLRLFGVNMECGNDYNQQEESWLVPRGEIGASSSSSSALRLNLSTDHDDDNDDGDDGDDDQFAKKGKSSLSLNFNP

SEQ ID NO: 50596 - DNA, 1422 bp, Arabidopsis thaliana
  misc_feature (1)..(1422): Ceres Seq. ID no. 13588409
  misc_feature (1)..(1422): Ortholog of  Ceres SEQ ID NO 14313743 as cited in SEQ ID NO 59555
aaaacccaaaaccaaacaatccaaacaaaaaacaaagctgcaagctttttgctctctctctctgctttcatggcgtcttttactaacctctctcttctcctcctctttctcttcaccgctacactcatcaccagccaacaaagcgacgacgacgaaaatgcgtcaccacaactcgctctagacccgtcggagcaagaagcggtctaccgagttctcgactcagtcaactcagccatctcatggcgaaccatcttccccgacgacatctgcgcttcaccacctgacggcgtcgtttgcgataacctctacgcttctcaaaacggcgtcgcaacgtctgttcacgtcacggagttccatttaggctacctctcggattacactcaaaaccctccttgctcttctaatgccacgcttgatcctctcctctttactgctttcaaacaccttcgtaagcttttcttctacaaatgcttcaccgacgctcgtgcctcgttgccgttaacagtcccggaggatttcggctctgttctcgaagagttggtgttcatcgaaaacccatctctcgtcggcgagatcggagccatgatcggtaatttcacaaagctgagaagattagttcttaccggtaacgggtttcacgggtcaattccgggtcaaatcggcgatttggtgagtctagaggagattacactctccagaaacagcttgaccggtgggtttccggcgaacgcaacgtctcgtctgaagaatctaaaagttctagactttagccataactttatcaacggaaacgcccctgattccatcggagacttgacagagcttctcaagctagacctcagcttcaatgagttcaccggagaggtcccttccggcgtcggaaatttgaaaaagctcgtatttttagacttgagttacaaccgtttcgggaatttcggcgttcctctgtttctagcggagatgtccagtttgagagaggttcatctgagtgggaacaagctcggtggtcgtataccggcgatttggaagaatctcgagggtatttcggggattggattctcaaggatgggtcttgaaggaaacatcccagcttcaatgggttcgagtcttaaaaatctctgctttctagctcttgacaacaacaatctcgacggacaaatcccggaggagtttgggtttctggactctgctcgtgaaatcaatctagagaacaataacctcaccggaaaagctccattctccgacagtttcagagatagaatcgggaaaaagctcaaactgagcgggaatgtaaatctccaagtcaagaattccgatcctcatctcgccggaagagctctatattcatcggcgagaaaggttttacctttgatttacttcccggcgactttattggctctttacatttcaataacacagtga

SEQ ID NO: 50597 - protein, 473 aa, Arabidopsis thaliana
  peptide (1)..(473): Ceres Seq. ID no. 13588410
KTQNQTIQTKNKAASFLLSLSAFMASFTNLSLLLLFLFTATLITSQQSDDDENASPQLALDPSEQEAVYRVLDSVNSAISWRTIFPDDICASPPDGVVCDNLYASQNGVATSVHVTEFHLGYLSDYTQNPPCSSNATLDPLLFTAFKHLRKLFFYKCFTDARASLPLTVPEDFGSVLEELVFIENPSLVGEIGAMIGNFTKLRRLVLTGNGFHGSIPGQIGDLVSLEEITLSRNSLTGGFPANATSRLKNLKVLDFSHNFINGNAPDSIGDLTELLKLDLSFNEFTGEVPSGVGNLKKLVFLDLSYNRFGNFGVPLFLAEMSSLREVHLSGNKLGGRIPAIWKNLEGISGIGFSRMGLEGNIPASMGSSLKNLCFLALDNNNLDGQIPEEFGFLDSAREINLENNNLTGKAPFSDSFRDRIGKKLKLSGNVNLQVKNSDPHLAGRALYSSARKVLPLIYFPATLLALYISITQ

SEQ ID NO: 50598 - protein, 450 aa, Arabidopsis thaliana
  peptide (1)..(450): Ceres Seq. ID no. 13588411
MASFTNLSLLLLFLFTATLITSQQSDDDENASPQLALDPSEQEAVYRVLDSVNSAISWRTIFPDDICASPPDGVVCDNLYASQNGVATSVHVTEFHLGYLSDYTQNPPCSSNATLDPLLFTAFKHLRKLFFYKCFTDARASLPLTVPEDFGSVLEELVFIENPSLVGEIGAMIGNFTKLRRLVLTGNGFHGSIPGQIGDLVSLEEITLSRNSLTGGFPANATSRLKNLKVLDFSHNFINGNAPDSIGDLTELLKLDLSFNEFTGEVPSGVGNLKKLVFLDLSYNRFGNFGVPLFLAEMSSLREVHLSGNKLGGRIPAIWKNLEGISGIGFSRMGLEGNIPASMGSSLKNLCFLALDNNNLDGQIPEEFGFLDSAREINLENNNLTGKAPFSDSFRDRIGKKLKLSGNVNLQVKNSDPHLAGRALYSSARKVLPLIYFPATLLALYISITQ

SEQ ID NO: 50599 - protein, 279 aa, Arabidopsis thaliana
  peptide (1)..(279): Ceres Seq. ID no. 13588412
MIGNFTKLRRLVLTGNGFHGSIPGQIGDLVSLEEITLSRNSLTGGFPANATSRLKNLKVLDFSHNFINGNAPDSIGDLTELLKLDLSFNEFTGEVPSGVGNLKKLVFLDLSYNRFGNFGVPLFLAEMSSLREVHLSGNKLGGRIPAIWKNLEGISGIGFSRMGLEGNIPASMGSSLKNLCFLALDNNNLDGQIPEEFGFLDSAREINLENNNLTGKAPFSDSFRDRIGKKLKLSGNVNLQVKNSDPHLAGRALYSSARKVLPLIYFPATLLALYISITQ

SEQ ID NO: 50600 - DNA, 3666 bp, Arabidopsis thaliana
  misc_feature (1)..(3666): Ceres Seq. ID no. 13611878
  misc_feature (1)..(3666): Ortholog of  Ceres SEQ ID NO 13595870 as cited in SEQ ID NO 62101
  misc_feature (1)..(3666): Ortholog of  Ceres SEQ ID NO 13590241 as cited in SEQ ID NO 63878
  misc_feature (1)..(3666): Ortholog of  Ceres SEQ ID NO 13660597 as cited in SEQ ID NO 67655
  misc_feature (1)..(3666): Ortholog of  Ceres SEQ ID NO 15179308 as cited in SEQ ID NO 0
atggttgatacgagacgtagctcttctgcttccaagcgtttttgtgctgcaacaagttcatcctcacgtcctaccaaacgatccaaggcggcggcggaaccggcatcgtcttcgtcggcgagtgaggtgccgattgataatcaagcaccggtttcggatcctggatcaatatctggagacccggaacttagaacttctgatccgcagagtaacgatgcggagaggccagttactaccaccgatgtgccggcgatggagaccgacacaaatccagaacttgaaggcttggtgacgcctacacctgcaggtgaagtggtggtggaagctgagaaatcgaaatcctcaaagaagcggattgctaaggctccttgggccaagcttctttctcagtttcctcagaaccctcatcttgtcatgagaggctctgtgtttactgttggacggcgagcctgcgatttatgtatcagagatcattctatgcccaatgttctatgtgaactaaggcagtctgagcacggaggtccatcagttgcatcgctggagataatagggaatggagtacttgttcaggtcaatggcaagatttaccaaaggagtacttgtgttcatctacggggtggcgatgaaattatcttcaccacccctgggaaacatgcttatgtatccttttacaagttctttgaaaatgttcagatatttcagcctcttaaagatgaaaatctagctgctccagacagaacttcttccttgagcctttttgaagcgcagagtgcccctctgaaagggcttcacgttgagacaagagcaagagactcttcatctgttgatggaactgcctctttattggcgtctatatcaaagttacaaaatgtcccttttctaccacctactgctaaaagtgtcaaaaggcagcaaaattcagaggtccctgtgttaccttctagctgcgatgattttattctggatgttgacttgaacgatgctgatagtaataatgatcatgctgctattgcttcaatggagaaaactgttgcttcgacttcttgtgctgccaacgatgaccatgatgcagatgggaatggaatggatccttttcaagaacctgaggctggaaatattcctgatcctgcttatgaaattagaccaattttgagtttacttggggatccttctgaatttgatttaaggggtagcatttccaaaatactggtggatgaacgaagggaagtgagggaaatgccgaaagaatatgaacgtccatcagcttcggtattaactagacgtcaagcgcataaggatagtctgcgaggaggaatactcaatcctcaggacatagaagtttcttttgagaacttcccatatttcttaagtggcacaactaaggatgttttgatgatatccacatatgcccatataaagtatggaaaggaatatgcagagtatgcatcagatttgccaacagcgtgtccccgtatcttactctctggaccatctggctctgagatatatcaggaaatgttagcaaaagcgcttgcgaaacaatgtggggccaaattgatgattgttgactctctcttgttacctgggcataagaaaccaatttcaagtgtagaggctggtataacaggtggatcaacattgagctctcaggctgttcggaggcaagaagtatcaactgcaacctctaaaagttacaccttcaaagcaggtgatcgagtaaggtttttaggcccttcaacttcttctcttgcttctctccgagctccacctaggggaccggcaacaggttttcaaggaaaagtactccttgcgtttgaaggcaatggatcttcaaaaatcggggttagatttgatagatcgataccagatggcaatgatcttggtggtctatgcgaagaagaccatggttttttttgtactgcgagttctcttcggttagaaagttcttccagtgacgatgctgataaacttgccattaatgaaatctttgaggtagcttttaatgaaagtgaaagagggtcattgatattgttcctcaaagacattgagaaatctgtgtcggggaacactgatgtgtatataactttgaagagcaagcttgagaatttaccggagaatattgttgtcatagcttcgcaaacccagttggacaaccgaaaggaaaaatcccaccctggaggtttcttgttcacaaagtttggcagcaaccagacagcactgctggaccttgcatttccggatacttttggtggtagactgcaggataggaacacagaaatgcctaaagcagtgaaacaaatcactaggctatttccaaacaaagtgaccatccaattacctgaggatgaagcttcgctggtcgactggaaggataaacttgaacgtgatactgagatcctgaaggctcaagctaatattacaagcatccgtgcggtccttagcaaaaatcagctagtctgccctgacattgaaatcttgtgcatcaaagatcaaacccttccttctgatagtgtggagaaagtggttggctttgctttcaatcaccatcttatgaactgctcagaacctacagtcaaggacaacaagcttatcatctcggcagaaagcatcacatatggcctgcagctgttgcatgagattcaaaacgaaaacaagagcacaaagaaatctctgaaagatgttgttacagagaatgaattcgagaaaaaactactatcagacgtcattcctccaagtgatatcggtgtttctttcagtgatattggggctttggaaaatgtgaaagataccttgaaggagttggtgatgcttcctcttcaaagacccgaattgtttggcaaaggtcaacttacaaagcctacaaagggtatactattgtttggaccgcctggtacggggaagacaatgctggcaaaagctgtagcaaccgaggctggggcaaactttatcaatatttcaatgtccagcattacttcaaagtggtttggtgagggagagaagtacgttaaagctgttttctctttagcaagtaagatagctccaagcgtcatttttgttgatgaggttgatagcatgctgggaagacgtgagaatccaggagaacatgaagctatgcgtaagatgaagaacgaattcatgataaactgggacggcttacgcacaaaggataaagaaagggttttagtattggctgctaccaacagaccatttgaccttgacgaagcagtaattagacggcttccccgaaggttgatggttaatctgccggattcagcaaacagatcgaagatcttgagcgtgattttggcgaaagaagagatggcagaagacgtagacttagaagcaatagcaaatatgacagatgggtactcagggagtgacttaaagaatctttgcgtgaccgcggcacatcttcctatccgagagattcttgaaaaagaaaagaaggagagaagtgtggctcaagccgaaaaccgagcaatgccacagctatatagcagtacagacgttagacccttgaacatgaatgatttcaaaaccgcacatgatcaggtatgtgcgagtgtggcgtctgattcatcgaacatgaatgagctccagcaatggaacgagctctatggagaaggaggctcgaggaagaagacatcactgagttacttcatgtaa

SEQ ID NO: 50601 - protein, 1221 aa, Arabidopsis thaliana
  peptide (1)..(1221): Ceres Seq. ID no. 13611879
MVDTRRSSSASKRFCAATSSSSRPTKRSKAAAEPASSSSASEVPIDNQAPVSDPGSISGDPELRTSDPQSNDAERPVTTTDVPAMETDTNPELEGLVTPTPAGEVVVEAEKSKSSKKRIAKAPWAKLLSQFPQNPHLVMRGSVFTVGRRACDLCIRDHSMPNVLCELRQSEHGGPSVASLEIIGNGVLVQVNGKIYQRSTCVHLRGGDEIIFTTPGKHAYVSFYKFFENVQIFQPLKDENLAAPDRTSSLSLFEAQSAPLKGLHVETRARDSSSVDGTASLLASISKLQNVPFLPPTAKSVKRQQNSEVPVLPSSCDDFILDVDLNDADSNNDHAAIASMEKTVASTSCAANDDHDADGNGMDPFQEPEAGNIPDPAYEIRPILSLLGDPSEFDLRGSISKILVDERREVREMPKEYERPSASVLTRRQAHKDSLRGGILNPQDIEVSFENFPYFLSGTTKDVLMISTYAHIKYGKEYAEYASDLPTACPRILLSGPSGSEIYQEMLAKALAKQCGAKLMIVDSLLLPGHKKPISSVEAGITGGSTLSSQAVRRQEVSTATSKSYTFKAGDRVRFLGPSTSSLASLRAPPRGPATGFQGKVLLAFEGNGSSKIGVRFDRSIPDGNDLGGLCEEDHGFFCTASSLRLESSSSDDADKLAINEIFEVAFNESERGSLILFLKDIEKSVSGNTDVYITLKSKLENLPENIVVIASQTQLDNRKEKSHPGGFLFTKFGSNQTALLDLAFPDTFGGRLQDRNTEMPKAVKQITRLFPNKVTIQLPEDEASLVDWKDKLERDTEILKAQANITSIRAVLSKNQLVCPDIEILCIKDQTLPSDSVEKVVGFAFNHHLMNCSEPTVKDNKLIISAESITYGLQLLHEIQNENKSTKKSLKDVVTENEFEKKLLSDVIPPSDIGVSFSDIGALENVKDTLKELVMLPLQRPELFGKGQLTKPTKGILLFGPPGTGKTMLAKAVATEAGANFINISMSSITSKWFGEGEKYVKAVFSLASKIAPSVIFVDEVDSMLGRRENPGEHEAMRKMKNEFMINWDGLRTKDKERVLVLAATNRPFDLDEAVIRRLPRRLMVNLPDSANRSKILSVILAKEEMAEDVDLEAIANMTDGYSGSDLKNLCVTAAHLPIREILEKEKKERSVAQAENRAMPQLYSSTDVRPLNMNDFKTAHDQVCASVASDSSNMNELQQWNELYGEGGSRKKTSLSYFM

SEQ ID NO: 50602 - protein, 1137 aa, Arabidopsis thaliana
  peptide (1)..(1137): Ceres Seq. ID no. 13611880
METDTNPELEGLVTPTPAGEVVVEAEKSKSSKKRIAKAPWAKLLSQFPQNPHLVMRGSVFTVGRRACDLCIRDHSMPNVLCELRQSEHGGPSVASLEIIGNGVLVQVNGKIYQRSTCVHLRGGDEIIFTTPGKHAYVSFYKFFENVQIFQPLKDENLAAPDRTSSLSLFEAQSAPLKGLHVETRARDSSSVDGTASLLASISKLQNVPFLPPTAKSVKRQQNSEVPVLPSSCDDFILDVDLNDADSNNDHAAIASMEKTVASTSCAANDDHDADGNGMDPFQEPEAGNIPDPAYEIRPILSLLGDPSEFDLRGSISKILVDERREVREMPKEYERPSASVLTRRQAHKDSLRGGILNPQDIEVSFENFPYFLSGTTKDVLMISTYAHIKYGKEYAEYASDLPTACPRILLSGPSGSEIYQEMLAKALAKQCGAKLMIVDSLLLPGHKKPISSVEAGITGGSTLSSQAVRRQEVSTATSKSYTFKAGDRVRFLGPSTSSLASLRAPPRGPATGFQGKVLLAFEGNGSSKIGVRFDRSIPDGNDLGGLCEEDHGFFCTASSLRLESSSSDDADKLAINEIFEVAFNESERGSLILFLKDIEKSVSGNTDVYITLKSKLENLPENIVVIASQTQLDNRKEKSHPGGFLFTKFGSNQTALLDLAFPDTFGGRLQDRNTEMPKAVKQITRLFPNKVTIQLPEDEASLVDWKDKLERDTEILKAQANITSIRAVLSKNQLVCPDIEILCIKDQTLPSDSVEKVVGFAFNHHLMNCSEPTVKDNKLIISAESITYGLQLLHEIQNENKSTKKSLKDVVTENEFEKKLLSDVIPPSDIGVSFSDIGALENVKDTLKELVMLPLQRPELFGKGQLTKPTKGILLFGPPGTGKTMLAKAVATEAGANFINISMSSITSKWFGEGEKYVKAVFSLASKIAPSVIFVDEVDSMLGRRENPGEHEAMRKMKNEFMINWDGLRTKDKERVLVLAATNRPFDLDEAVIRRLPRRLMVNLPDSANRSKILSVILAKEEMAEDVDLEAIANMTDGYSGSDLKNLCVTAAHLPIREILEKEKKERSVAQAENRAMPQLYSSTDVRPLNMNDFKTAHDQVCASVASDSSNMNELQQWNELYGEGGSRKKTSLSYFM

SEQ ID NO: 50603 - protein, 1083 aa, Arabidopsis thaliana
  peptide (1)..(1083): Ceres Seq. ID no. 13611881
MRGSVFTVGRRACDLCIRDHSMPNVLCELRQSEHGGPSVASLEIIGNGVLVQVNGKIYQRSTCVHLRGGDEIIFTTPGKHAYVSFYKFFENVQIFQPLKDENLAAPDRTSSLSLFEAQSAPLKGLHVETRARDSSSVDGTASLLASISKLQNVPFLPPTAKSVKRQQNSEVPVLPSSCDDFILDVDLNDADSNNDHAAIASMEKTVASTSCAANDDHDADGNGMDPFQEPEAGNIPDPAYEIRPILSLLGDPSEFDLRGSISKILVDERREVREMPKEYERPSASVLTRRQAHKDSLRGGILNPQDIEVSFENFPYFLSGTTKDVLMISTYAHIKYGKEYAEYASDLPTACPRILLSGPSGSEIYQEMLAKALAKQCGAKLMIVDSLLLPGHKKPISSVEAGITGGSTLSSQAVRRQEVSTATSKSYTFKAGDRVRFLGPSTSSLASLRAPPRGPATGFQGKVLLAFEGNGSSKIGVRFDRSIPDGNDLGGLCEEDHGFFCTASSLRLESSSSDDADKLAINEIFEVAFNESERGSLILFLKDIEKSVSGNTDVYITLKSKLENLPENIVVIASQTQLDNRKEKSHPGGFLFTKFGSNQTALLDLAFPDTFGGRLQDRNTEMPKAVKQITRLFPNKVTIQLPEDEASLVDWKDKLERDTEILKAQANITSIRAVLSKNQLVCPDIEILCIKDQTLPSDSVEKVVGFAFNHHLMNCSEPTVKDNKLIISAESITYGLQLLHEIQNENKSTKKSLKDVVTENEFEKKLLSDVIPPSDIGVSFSDIGALENVKDTLKELVMLPLQRPELFGKGQLTKPTKGILLFGPPGTGKTMLAKAVATEAGANFINISMSSITSKWFGEGEKYVKAVFSLASKIAPSVIFVDEVDSMLGRRENPGEHEAMRKMKNEFMINWDGLRTKDKERVLVLAATNRPFDLDEAVIRRLPRRLMVNLPDSANRSKILSVILAKEEMAEDVDLEAIANMTDGYSGSDLKNLCVTAAHLPIREILEKEKKERSVAQAENRAMPQLYSSTDVRPLNMNDFKTAHDQVCASVASDSSNMNELQQWNELYGEGGSRKKTSLSYFM

SEQ ID NO: 50604 - DNA, 1253 bp, Arabidopsis thaliana
  misc_feature (1)..(1253): Ceres Seq. ID no. 15179691
  misc_feature (1)..(1253): Ortholog of  Ceres SEQ ID NO 13623732 as cited in SEQ ID NO 0
gttcaatcatcatcatcactcatctgtcaaattaaaccactccactcgaccactccaattcaaaactcgccattgatacacgagagatagagagagagatttgtgtgagagaaatccatggcggaatcttgcagagtgaggaggataaagctaggaagccaaggcctagaggtatcggcgcaaggccttggttgcatgggactcaccggtcattacggtgcttccaagccggaaactgaagccatcgctctcatccaccacgctattcactccggtgttactttccttgacacttctgacatgtatggtcctgaaaccaatgaaattctcctcggaaaggctcttaaggatggtgtgagggagaaagtggagcttgcgaccaaatttggaatcagttatgcagagggaaacagagagattaagggagatcctgcttatgttagagctgcctgtgaggctagtttaaagagactagatgttacctgcattgatctgtattatcagcatcggattgatactcgtgttcctattgaaatcactatgggagaactgaagaagctaattgaagagggtaaaataaagtacataggtttgtctgaggcctctgcctcaactatcagaagagcgcatactgttcacccaatcaccgccgtgcagttagagtggtccttgtggacaagagacgtggaagaagaaattgtcccaacctgcagggaacttggaattgggattgtttcttacagtcctctaggaagaggtttctttgcatcaggacctaagcttgttgagaacctagacaataatgacttcagaaaggctctaccaagattccaacaggaaaacttggatcacaacaagattctctatgagaaagtttctgcaatgtctgagaagaaagggtgcactcccgcacaactagccctcgcttgggttcaccaccagggagatgatgtttgtcccattccaggaaccactaagattgaaaacctcaaccagaacattagagctttatcagtgaaactcactcctgaagagatgtctgagcttgagaccattgcccaaccagagtctgtgaaaggagaaagatacatggccacagtgccaaccttcaaaaactccgacactccaccattgtcttcttggaatgctgtgtaaaactgtctgagagtttctctggccaaaggatgatttatgtatagaatatgttattttcttctacccatcttatatatacggtgaccattctctgtaag

SEQ ID NO: 50605 - protein, 345 aa, Arabidopsis thaliana
  peptide (1)..(345): Ceres Seq. ID no. 15179692
MAESCRVRRIKLGSQGLEVSAQGLGCMGLTGHYGASKPETEAIALIHHAIHSGVTFLDTSDMYGPETNEILLGKALKDGVREKVELATKFGISYAEGNREIKGDPAYVRAACEASLKRLDVTCIDLYYQHRIDTRVPIEITMGELKKLIEEGKIKYIGLSEASASTIRRAHTVHPITAVQLEWSLWTRDVEEEIVPTCRELGIGIVSYSPLGRGFFASGPKLVENLDNNDFRKALPRFQQENLDHNKILYEKVSAMSEKKGCTPAQLALAWVHHQGDDVCPIPGTTKIENLNQNIRALSVKLTPEEMSELETIAQPESVKGERYMATVPTFKNSDTPPLSSWNAV

SEQ ID NO: 50606 - protein, 319 aa, Arabidopsis thaliana
  peptide (1)..(319): Ceres Seq. ID no. 15179693
MGLTGHYGASKPETEAIALIHHAIHSGVTFLDTSDMYGPETNEILLGKALKDGVREKVELATKFGISYAEGNREIKGDPAYVRAACEASLKRLDVTCIDLYYQHRIDTRVPIEITMGELKKLIEEGKIKYIGLSEASASTIRRAHTVHPITAVQLEWSLWTRDVEEEIVPTCRELGIGIVSYSPLGRGFFASGPKLVENLDNNDFRKALPRFQQENLDHNKILYEKVSAMSEKKGCTPAQLALAWVHHQGDDVCPIPGTTKIENLNQNIRALSVKLTPEEMSELETIAQPESVKGERYMATVPTFKNSDTPPLSSWNAV

SEQ ID NO: 50607 - protein, 284 aa, Arabidopsis thaliana
  peptide (1)..(284): Ceres Seq. ID no. 15179694
MYGPETNEILLGKALKDGVREKVELATKFGISYAEGNREIKGDPAYVRAACEASLKRLDVTCIDLYYQHRIDTRVPIEITMGELKKLIEEGKIKYIGLSEASASTIRRAHTVHPITAVQLEWSLWTRDVEEEIVPTCRELGIGIVSYSPLGRGFFASGPKLVENLDNNDFRKALPRFQQENLDHNKILYEKVSAMSEKKGCTPAQLALAWVHHQGDDVCPIPGTTKIENLNQNIRALSVKLTPEEMSELETIAQPESVKGERYMATVPTFKNSDTPPLSSWNAV

SEQ ID NO: 50608 - DNA, 1647 bp, Arabidopsis thaliana
  misc_feature (1)..(1647): Ceres Seq. ID no. 13592410
  misc_feature (1)..(1647): Ortholog of  Ceres SEQ ID NO 15176887 as cited in SEQ ID NO 58804
  misc_feature (1)..(1647): Ortholog of  Ceres SEQ ID NO 15174867 as cited in SEQ ID NO 67357
atgtttaaaccccaacatatgtatgacagggaatttggtaccggcaacggctacagcaacgggaacggctacaccaatggaaacggccacaccaacggaaacggcaattacaacggcaatggccacgttaatggtaacggaaaagctaacggagccaaggtggtaaagatgaaaccaatggacagtgagttgctgagagagcaaggtcacataatggttgattttattgctgattattacaaaaaccttcaagactcgcctcaagatttccctgttctgtcccaagttcagcctggttatctccgtgacatgttgcctgattcagcacctgaacgacctgaatcgttaaaagaacttctcgacgatgtttcgaagaagataatgccggggataactcattggcaaagcccgagttactttgcatactatgcatcaagcacgagtgtggctggattcttaggagagatgcttaacgccggcctgagcgtcgtcggttttacctggctcacttctcctgccgctactgagctcgaaatcatcgttcttgattggcttgctaaattgctacaactccccgaccattttctctccacaggaaatggaggaggagtaatccaagggacaggatgtgaagcagtgcttgtggtagtattagctgctagagacagaattctgaagaaagttggcaaaacattacttcctcaacttgttgtctatggctctgaccaaacccattctagtttccgaaaagcttgtctgattggtgggatacatgaagaaaacattaggctgctcaaaactgattcttccacaaactatggaatgcctccagaatcacttgaggaagctatttctcatgatctcgctaagggttttatccctttcttcatttgtgccactgttggcacaacgtcttcagcagcggttgatcctttggtcccattggggaacatcgcaaagaaatatgggatatggttgcatgtggatgcagcttatgcagggaatgcatgtatatgtccagaatatcgaaaatttattgacgggattgaaaacgcagactcctttaacatgaatgctcataaatggttatttgctaatcaaacttgttcacctctttgggttaaggatcgatactctctcattgatgctctcaaaacaaatcccgagtatctagaattcaaggtttccaaaaaagatacggtcgtaaattataaagattggcaaatttctctctctcggagattcagatcactgaagttatggatggttttacggctctatggttccgagaacttaagaaactttataagagaccatgtcaatctcgctaagcattttgaagattatgtagctcaagatccaagttttgaggttgtcactactcggtacttttcactcgtttgctttcgccttgcgccagttgacggcgatgaagaccaatgtaacgaacgtaaccgtgaactgcttgcggctgttaactccactggcaagatattcatctctcacacggctctatctggaaaattcgttttacgatttgctgttggtgcaccgttaacggaagagaagcatgtcactgaagcatggcagattatacagaaacatgcctccaaatttacacgcaacgaccattattaataatatttc

SEQ ID NO: 50609 - protein, 545 aa, Arabidopsis thaliana
  peptide (1)..(545): Ceres Seq. ID no. 15221098
MFKPQHMYDREFGTGNGYSNGNGYTNGNGHTNGNGNYNGNGHVNGNGKANGAKVVKMKPMDSELLREQGHIMVDFIADYYKNLQDSPQDFPVLSQVQPGYLRDMLPDSAPERPESLKELLDDVSKKIMPGITHWQSPSYFAYYASSTSVAGFLGEMLNAGLSVVGFTWLTSPAATELEIIVLDWLAKLLQLPDHFLSTGNGGGVIQGTGCEAVLVVVLAARDRILKKVGKTLLPQLVVYGSDQTHSSFRKACLIGGIHEENIRLLKTDSSTNYGMPPESLEEAISHDLAKGFIPFFICATVGTTSSAAVDPLVPLGNIAKKYGIWLHVDAAYAGNACICPEYRKFIDGIENADSFNMNAHKWLFANQTCSPLWVKDRYSLIDALKTNPEYLEFKVSKKDTVVNYKDWQISLSRRFRSLKLWMVLRLYGSENLRNFIRDHVNLAKHFEDYVAQDPSFEVVTTRYFSLVCFRLAPVDGDEDQCNERNRELLAAVNSTGKIFISHTALSGKFVLRFAVGAPLTEEKHVTEAWQIIQKHASKFTRNDHY

SEQ ID NO: 50610 - protein, 539 aa, Arabidopsis thaliana
  peptide (1)..(539): Ceres Seq. ID no. 15221099
MYDREFGTGNGYSNGNGYTNGNGHTNGNGNYNGNGHVNGNGKANGAKVVKMKPMDSELLREQGHIMVDFIADYYKNLQDSPQDFPVLSQVQPGYLRDMLPDSAPERPESLKELLDDVSKKIMPGITHWQSPSYFAYYASSTSVAGFLGEMLNAGLSVVGFTWLTSPAATELEIIVLDWLAKLLQLPDHFLSTGNGGGVIQGTGCEAVLVVVLAARDRILKKVGKTLLPQLVVYGSDQTHSSFRKACLIGGIHEENIRLLKTDSSTNYGMPPESLEEAISHDLAKGFIPFFICATVGTTSSAAVDPLVPLGNIAKKYGIWLHVDAAYAGNACICPEYRKFIDGIENADSFNMNAHKWLFANQTCSPLWVKDRYSLIDALKTNPEYLEFKVSKKDTVVNYKDWQISLSRRFRSLKLWMVLRLYGSENLRNFIRDHVNLAKHFEDYVAQDPSFEVVTTRYFSLVCFRLAPVDGDEDQCNERNRELLAAVNSTGKIFISHTALSGKFVLRFAVGAPLTEEKHVTEAWQIIQKHASKFTRNDHY

SEQ ID NO: 50611 - protein, 489 aa, Arabidopsis thaliana
  peptide (1)..(489): Ceres Seq. ID no. 15221100
MKPMDSELLREQGHIMVDFIADYYKNLQDSPQDFPVLSQVQPGYLRDMLPDSAPERPESLKELLDDVSKKIMPGITHWQSPSYFAYYASSTSVAGFLGEMLNAGLSVVGFTWLTSPAATELEIIVLDWLAKLLQLPDHFLSTGNGGGVIQGTGCEAVLVVVLAARDRILKKVGKTLLPQLVVYGSDQTHSSFRKACLIGGIHEENIRLLKTDSSTNYGMPPESLEEAISHDLAKGFIPFFICATVGTTSSAAVDPLVPLGNIAKKYGIWLHVDAAYAGNACICPEYRKFIDGIENADSFNMNAHKWLFANQTCSPLWVKDRYSLIDALKTNPEYLEFKVSKKDTVVNYKDWQISLSRRFRSLKLWMVLRLYGSENLRNFIRDHVNLAKHFEDYVAQDPSFEVVTTRYFSLVCFRLAPVDGDEDQCNERNRELLAAVNSTGKIFISHTALSGKFVLRFAVGAPLTEEKHVTEAWQIIQKHASKFTRNDHY

SEQ ID NO: 50612 - DNA, 1159 bp, Arabidopsis thaliana
  misc_feature (1)..(1159): Ceres Seq. ID no. 13588871
  misc_feature (1)..(1159): Ortholog of  Ceres SEQ ID NO 13596048 as cited in SEQ ID NO 68476
  misc_feature (1)..(1159): Ortholog of  Ceres SEQ ID NO 12589137 as cited in SEQ ID NO 0
gaagagagaaagattacaagaaacaaatatggtagatcaaaataaagcatttggttgggcggccaacgacgaatcgggcgtcctctctccatttcatttctctagaagagaaaatggtgagaacgatgtaacagtgaagatcttgttctgtggtgtttgtcactctgatcttcataccatcaagaaccattggggattctctcgttaccccattattcccgggcatgaaatcgttggaatagcaacaaaagttgggaagaatgtgacaaagtttaaagaaggagaccgagtaggagtaggcgtaataatcggttcatgccaatcatgtgaatcatgtaaccaagacttagaaaactattgtcctaaagtcgttttcacatacaactctcgttcctctgacggaaccagcagaaaccaaggtggttattccgacgtaattgttgtcgatcaccgctttgtcctaagcattcccgatggtttaccaagcgattcaggcgcgccgctgctctgtgctggaatcactgtgtacagtcccatgaagtattatggcatgactaaagaatcagggaaacgtttaggtgtgaatggacttggtggacttggtcatatcgctgttaagattggtaaagcctttggtttaagagttactgtgattagtaggtcatcagaaaaagagagagaagcaattgatcggcttggtgctgattcgtttcttgttacaacggattctcaaaagatgaaggaagcggttggaactatggatttcattatcgatacggtatcagcagaacatgctctattaccgttgtttagtttgcttaaagtgaatggaaagcttgtggctttaggcttaccggagaagccactcgacctgccaattttctctctagttctcggaaggaaaatggtgggaggaagtcagattggagggatgaaggagacacaagagatgcttgagttctgtgccaagcataaaatcgtttcggatattgagctcataaagatgagtgatatcaactctgcgatggaccgtttggctaaatctgatgtcaggtaccggttcgtgatcgatgtggccaactctttactccctgagtcgtcagctgagattttaacggagcaggtggaccatggagtctcgatcacgtctagattctga

SEQ ID NO: 50613 - protein, 385 aa, Arabidopsis thaliana
  peptide (1)..(385): Ceres Seq. ID no. 13588872
KRERLQETNMVDQNKAFGWAANDESGVLSPFHFSRRENGENDVTVKILFCGVCHSDLHTIKNHWGFSRYPIIPGHEIVGIATKVGKNVTKFKEGDRVGVGVIIGSCQSCESCNQDLENYCPKVVFTYNSRSSDGTSRNQGGYSDVIVVDHRFVLSIPDGLPSDSGAPLLCAGITVYSPMKYYGMTKESGKRLGVNGLGGLGHIAVKIGKAFGLRVTVISRSSEKEREAIDRLGADSFLVTTDSQKMKEAVGTMDFIIDTVSAEHALLPLFSLLKVNGKLVALGLPEKPLDLPIFSLVLGRKMVGGSQIGGMKETQEMLEFCAKHKIVSDIELIKMSDINSAMDRLAKSDVRYRFVIDVANSLLPESSAEILTEQVDHGVSITSRF

SEQ ID NO: 50614 - protein, 376 aa, Arabidopsis thaliana
  peptide (1)..(376): Ceres Seq. ID no. 13588873
MVDQNKAFGWAANDESGVLSPFHFSRRENGENDVTVKILFCGVCHSDLHTIKNHWGFSRYPIIPGHEIVGIATKVGKNVTKFKEGDRVGVGVIIGSCQSCESCNQDLENYCPKVVFTYNSRSSDGTSRNQGGYSDVIVVDHRFVLSIPDGLPSDSGAPLLCAGITVYSPMKYYGMTKESGKRLGVNGLGGLGHIAVKIGKAFGLRVTVISRSSEKEREAIDRLGADSFLVTTDSQKMKEAVGTMDFIIDTVSAEHALLPLFSLLKVNGKLVALGLPEKPLDLPIFSLVLGRKMVGGSQIGGMKETQEMLEFCAKHKIVSDIELIKMSDINSAMDRLAKSDVRYRFVIDVANSLLPESSAEILTEQVDHGVSITSRF

SEQ ID NO: 50615 - protein, 207 aa, Arabidopsis thaliana
  peptide (1)..(207): Ceres Seq. ID no. 13588874
MKYYGMTKESGKRLGVNGLGGLGHIAVKIGKAFGLRVTVISRSSEKEREAIDRLGADSFLVTTDSQKMKEAVGTMDFIIDTVSAEHALLPLFSLLKVNGKLVALGLPEKPLDLPIFSLVLGRKMVGGSQIGGMKETQEMLEFCAKHKIVSDIELIKMSDINSAMDRLAKSDVRYRFVIDVANSLLPESSAEILTEQVDHGVSITSRF

SEQ ID NO: 50616 - DNA, 2001 bp, Arabidopsis thaliana
  misc_feature (1)..(2001): Ceres Seq. ID no. 13647912
  misc_feature (1)..(2001): Ortholog of  Ceres SEQ ID NO 13660912 as cited in SEQ ID NO 67504
gcatggsccatttctcatctatgkagattctcatctctctacctcctcctcattttctcctcttgattcactaattcttcttcttcttcttcttttcagacatgactcttccttatcgtttctcttctgttagaaaccactcacttctacttaagacttctcatctctacacacccagatcagctcttgattgtttctcacccaaggaatctcctttcttcaagaagaacactgcccaattcctttctcctcagaaacgcacttctcttcctctgaaacttgtctgccctttagctagtttctcttcttatgcggattctgagggagaagagcaacaccatgctgatcaaccgatacagaaccctcacgaatcttctaccgtttcaaacgaatcagatgggaaaggtaatgcagaagctactggagacttttctggaatggctcaagcctttcacatttcttccacaacagcaagggcaatctctatagtcatcgccttctctgctctcacccttycmatcttcatgaagtccctgggacaaggactggctctcaagaccaagcttctctcttacgcaacactactctttggtttctacatggcctggrncatcggagctaatgatgtcgcaaatgccatggggacttctgttggatctggagccttgacaatccggcaagctgtgatgacagctgcagttctcgaattctcaggtgctcttttgatgggaactcacgtgactagcacgatgcagaaaggaattctcatggctaatgtgttccaagggaaagatatgttgctctttgctggtctcctctcttccttagctgcagctggaacttggttacaggtagcttcttactatggatggccagtatcaacaactcactgtatcgtcggatcaatggttgggtttgggcttgtatatggaggagctggtgccgttttctggagttccctagctaaagtagcttcatcttgggtcatctctcctatactgggagctcttgtctccttcctagtctacaaatgcatcaggagatttgtttacagtgcaccaaacccaggacaagcagcggctgctgccgctcccgtcgctgtatttgtaggtgtggccagtatctcctcagccgcattgcctctaagtaagatctttccaatagctctatcacaagccttagcctgtggagtagcaggagccatagtattcgacagaatcatccgcaaacagctcggtcacctcctagctaaaacaaaatcaccagaaacatctcaaaaccaacccaaaaccattggtttcctctccgatatcgcaggaccaacaggtacacaactcgaaatagtctacggaatctttggctatatgcaagtcctctccgcttgcttcatgtcattcgctcacggaggcaacgacgtctccaacgcaatcggaccattagccgccgcattaagcattctccaaaacggagcagctgcaggaggagccgagatcgttatcccaatggatgttctcgcttggggaggattcggaatcgttgctggtctcacaatgtggggatacagagtcatcgcaacgatagggaagaagatcactgagctaacaccaacaagaggattcgctgcggaattcgccgccgcgtcggttgttttgtttgcttcgaaattagggcttccgatttctgcgactcatacacttgttggtgctgtgatgggtgttggtttcgctagagggcttratagtgtgagagctgagactgtgagagagatcgttgcttcgtggcttgtcaccattcccgttggtgctacactcgccgttatctacacttggattttcaccaagatcttatcttttgtattgtgagtttctgtttcttttggttttgttatacgaagaacatgaaattgatcttcttcttctatgttcgtttgaatgattcgagtttgaaaaaaccctaaagttatcatctttcgattttttcacccatcggtgaagtatgatc

SEQ ID NO: 50617 - protein, 586 aa, Arabidopsis thaliana
  peptide (1)..(586): Ceres Seq. ID no. 15219502
  misc_feature (139)..(139): Xaa is any aa, unknown or other
  misc_feature (170)..(170): Xaa is any aa, unknown or other
  misc_feature (546)..(546): Xaa is any aa, unknown or other
MTLPYRFSSVRNHSLLLKTSHLYTPRSALDCFSPKESPFFKKNTAQFLSPQKRTSLPLKLVCPLASFSSYADSEGEEQHHADQPIQNPHESSTVSNESDGKGNAEATGDFSGMAQAFHISSTTARAISIVIAFSALTLXIFMKSLGQGLALKTKLLSYATLLFGFYMAWXIGANDVANAMGTSVGSGALTIRQAVMTAAVLEFSGALLMGTHVTSTMQKGILMANVFQGKDMLLFAGLLSSLAAAGTWLQVASYYGWPVSTTHCIVGSMVGFGLVYGGAGAVFWSSLAKVASSWVISPILGALVSFLVYKCIRRFVYSAPNPGQAAAAAAPVAVFVGVASISSAALPLSKIFPIALSQALACGVAGAIVFDRIIRKQLGHLLAKTKSPETSQNQPKTIGFLSDIAGPTGTQLEIVYGIFGYMQVLSACFMSFAHGGNDVSNAIGPLAAALSILQNGAAAGGAEIVIPMDVLAWGGFGIVAGLTMWGYRVIATIGKKITELTPTRGFAAEFAAASVVLFASKLGLPISATHTLVGAVMGVGFARGLXSVRAETVREIVASWLVTIPVGATLAVIYTWIFTKILSFVL

SEQ ID NO: 50618 - protein, 474 aa, Arabidopsis thaliana
  peptide (1)..(474): Ceres Seq. ID no. 15219503
  misc_feature (27)..(27): Xaa is any aa, unknown or other
  misc_feature (58)..(58): Xaa is any aa, unknown or other
  misc_feature (434)..(434): Xaa is any aa, unknown or other
MAQAFHISSTTARAISIVIAFSALTLXIFMKSLGQGLALKTKLLSYATLLFGFYMAWXIGANDVANAMGTSVGSGALTIRQAVMTAAVLEFSGALLMGTHVTSTMQKGILMANVFQGKDMLLFAGLLSSLAAAGTWLQVASYYGWPVSTTHCIVGSMVGFGLVYGGAGAVFWSSLAKVASSWVISPILGALVSFLVYKCIRRFVYSAPNPGQAAAAAAPVAVFVGVASISSAALPLSKIFPIALSQALACGVAGAIVFDRIIRKQLGHLLAKTKSPETSQNQPKTIGFLSDIAGPTGTQLEIVYGIFGYMQVLSACFMSFAHGGNDVSNAIGPLAAALSILQNGAAAGGAEIVIPMDVLAWGGFGIVAGLTMWGYRVIATIGKKITELTPTRGFAAEFAAASVVLFASKLGLPISATHTLVGAVMGVGFARGLXSVRAETVREIVASWLVTIPVGATLAVIYTWIFTKILSFVL

SEQ ID NO: 50619 - protein, 445 aa, Arabidopsis thaliana
  peptide (1)..(445): Ceres Seq. ID no. 15219504
  misc_feature (29)..(29): Xaa is any aa, unknown or other
  misc_feature (405)..(405): Xaa is any aa, unknown or other
MKSLGQGLALKTKLLSYATLLFGFYMAWXIGANDVANAMGTSVGSGALTIRQAVMTAAVLEFSGALLMGTHVTSTMQKGILMANVFQGKDMLLFAGLLSSLAAAGTWLQVASYYGWPVSTTHCIVGSMVGFGLVYGGAGAVFWSSLAKVASSWVISPILGALVSFLVYKCIRRFVYSAPNPGQAAAAAAPVAVFVGVASISSAALPLSKIFPIALSQALACGVAGAIVFDRIIRKQLGHLLAKTKSPETSQNQPKTIGFLSDIAGPTGTQLEIVYGIFGYMQVLSACFMSFAHGGNDVSNAIGPLAAALSILQNGAAAGGAEIVIPMDVLAWGGFGIVAGLTMWGYRVIATIGKKITELTPTRGFAAEFAAASVVLFASKLGLPISATHTLVGAVMGVGFARGLXSVRAETVREIVASWLVTIPVGATLAVIYTWIFTKILSFVL

SEQ ID NO: 50620 - DNA, 3302 bp, Arabidopsis thaliana
  misc_feature (1)..(3302): Ceres Seq. ID no. 13588242
  misc_feature (1)..(3302): Ortholog of  Ceres SEQ ID NO 14306557 as cited in SEQ ID NO 53442
atgccgctcagactcgagatcaagagaaaattagcgcaaaggtctgagagagttaaatctgtggatcttcatcctacagaaccatggattcttgcaagtttgtattctggaaccttgtgtatttggaactaccagacgcaggtgatggcaaaatcctttgaggtgactgaattaccagttcggtcagccaagtttgtagcacgaaagcaatgggttgtcgcaggagctgatgatatgtatatccgtgtatacaattacaacaccatggacaaggttaaagtgtttgaggctcattcagactacattaggtgtgtggctgttcatccaacccttccatatgtgctgtcatcttctgatgatatgctcataaagctttgggactgggaaaagggttgggcttgcactcagatattcgagggacactcacactatgtgatgcaagtcacatttaatccaaaagacaccaacacttttgccagtgcatcccttgatcgtaccataaagatttggaatcttggttccccagacccaaattttacattggatgcccatcagaaaggagtaaattgtgtagattatttcaccggtggtgataagccctatttaattaccggctctgatgatcacactgctaaggtctgggactaccaaacaaaaagttgtgtacagaccctggaggggcacacacacaatgtatctgcagtatgtttccatccagagcttccaattataatcacaggttctgaagatggcaccgttcgcatttggcatgcaaccacatacaggctagagaacacattgaattatggccttgagagagtctgggcaattggttacattaaaagttcacgccgggttgtgatcggatatgatgaaggaaccatcatggttaaacttggacgagaaattcctgtcgctagcatggacaataccggaaaaatcatatgggctaagcataatgaaattcaaactgcaaacatcaaaagtattggtgcagattacgaggttactgatggagaaaggttgcccttgagtgttaaagagttggggacctgtgatctttatccacaaagcttgaagcacaaccctaatgggaggtttgtcgtagtctgtggtgacggagaatatataatctacacggctttggcttggagaaataggtcatttggttctggactggaatttgtttggtcatccgagggggagtgtgcggttagagaaagctcatcaaagattaaaatatttagcaaaaatttccaggaaaagaggagtatccgccctactttttcagctgagaagatctttggaggaaccttgttagctatgtgttcaagtgatttcatctgcttttatgattgggctgaatgtaggctgattcaacgtattgacgtcactgtaaagaatctatattgggctgacagtggtgatttagtagccattgctagtgacacatcattctacatcttgaaattcaaccgcgacttagttacctcacattttgatagcggaagacctactgaggaagaaggtgttgaggatgcttttgaggttctccatgaaaatgatgaacgtgttaggacaggtatatgggttggtgactgtttcatttacaacaactcttcctggaagcttaactactgtgttggaggcgaggtaaccacaatgtatcatttggaccgcccaatgtatttgttgggatatcttgcaagtcaaagtcgggttttcttggtagacaaagaattcaatgttatagggtacaccttgttgctaagcctgattgagtacaagactcttgtgatgcggggtgatttagacaaagccagtgaaatcttacctacaattcctaaagatcagcataacagtgttgctcatttcttggagtcacggggaatgattgaagatgctctggaaattgcaacagatcctgactacagatttgagttggccatacaactgggtagacttgaaattgcacaggaaatcgctgtggaagtacagagcgaatctaagtggaaacaattaggagagttagctatgtcctccggaaagctgcaaatggctgaggaatgcatgaagtatgcgatggatttgagtggtttgttacttctttattcttctctgggagatgctgaaggtgtaacaaaacttgcaacacttgctaaagaacaagggaagaacaatgtcgcctttctttgcctattcatgctgggtaaactggaagattgtttgcagttattggtggagagtaaccggataccagaagctgctctgatggcacgatcatatcttccgagcaaagtttctgagatagtagctctttggaggaaagatctcagcaaggttaattcaaaagcagcagaatctttggctgatcctgaggagtactcaaatctttttgaagattggcaagttgctctttctgtggaagctaaagctgtagagacaaggggagtttacacaggtgcaaaagattatcctagccatgctgataaatcttccatgaccctcgtggaagccttccgaaacttgcaagttgaggaagaggaatcacttgaaaatggagatatggatcacgaggaggtagtagcagaagaaaatggaaatgaacaaaggaatgaggatgatgtagcggagcatgtagaggagcatcatgaagagaaagaagcagaagaagaagagggaattgttgatggagactctacggatggagctgtacttgttaatggaagtgaggctgacgaagagtggggtacgaataatgaaggaaacccatcagcctaatagcaagtcggtcaaggccaatgttgaaaagtctgaaaattttgtctctgtgcttacaccgcgtcagtagagtttacagtttatgggaatggtgaaagttccagcaacaatggagagaggtgagagaactttcattcttttactgaggattgaaaggtcaaatccgagcagcctggaaccacattttgaaaccattttgtaataaaagtttgaatttcttaagaaaatgaaaatcgagtaggactcagttctttgctggagagactggaagatttagatgaaagagaggctgatgagtttttaagcaagtgtggtcgttcctttttgtcttttgcactcacagggaggtttattattattatcatatggttttttttttttttttttcctacaaatatctacttagatttcatcagattgttttttttttttccttttcttttgtctggcctgtaacatgattttttcacttttcatcgttgcatatataattcttttgaagacttgatctctaaaaatat

SEQ ID NO: 50621 - protein, 926 aa, Arabidopsis thaliana
  peptide (1)..(926): Ceres Seq. ID no. 13588243
MPLRLEIKRKLAQRSERVKSVDLHPTEPWILASLYSGTLCIWNYQTQVMAKSFEVTELPVRSAKFVARKQWVVAGADDMYIRVYNYNTMDKVKVFEAHSDYIRCVAVHPTLPYVLSSSDDMLIKLWDWEKGWACTQIFEGHSHYVMQVTFNPKDTNTFASASLDRTIKIWNLGSPDPNFTLDAHQKGVNCVDYFTGGDKPYLITGSDDHTAKVWDYQTKSCVQTLEGHTHNVSAVCFHPELPIIITGSEDGTVRIWHATTYRLENTLNYGLERVWAIGYIKSSRRVVIGYDEGTIMVKLGREIPVASMDNTGKIIWAKHNEIQTANIKSIGADYEVTDGERLPLSVKELGTCDLYPQSLKHNPNGRFVVVCGDGEYIIYTALAWRNRSFGSGLEFVWSSEGECAVRESSSKIKIFSKNFQEKRSIRPTFSAEKIFGGTLLAMCSSDFICFYDWAECRLIQRIDVTVKNLYWADSGDLVAIASDTSFYILKFNRDLVTSHFDSGRPTEEEGVEDAFEVLHENDERVRTGIWVGDCFIYNNSSWKLNYCVGGEVTTMYHLDRPMYLLGYLASQSRVFLVDKEFNVIGYTLLLSLIEYKTLVMRGDLDKASEILPTIPKDQHNSVAHFLESRGMIEDALEIATDPDYRFELAIQLGRLEIAQEIAVEVQSESKWKQLGELAMSSGKLQMAEECMKYAMDLSGLLLLYSSLGDAEGVTKLATLAKEQGKNNVAFLCLFMLGKLEDCLQLLVESNRIPEAALMARSYLPSKVSEIVALWRKDLSKVNSKAAESLADPEEYSNLFEDWQVALSVEAKAVETRGVYTGAKDYPSHADKSSMTLVEAFRNLQVEEEESLENGDMDHEEVVAEENGNEQRNEDDVAEHVEEHHEEKEAEEEEGIVDGDSTDGAVLVNGSEADEEWGTNNEGNPSA

SEQ ID NO: 50622 - protein, 878 aa, Arabidopsis thaliana
  peptide (1)..(878): Ceres Seq. ID no. 13588244
MAKSFEVTELPVRSAKFVARKQWVVAGADDMYIRVYNYNTMDKVKVFEAHSDYIRCVAVHPTLPYVLSSSDDMLIKLWDWEKGWACTQIFEGHSHYVMQVTFNPKDTNTFASASLDRTIKIWNLGSPDPNFTLDAHQKGVNCVDYFTGGDKPYLITGSDDHTAKVWDYQTKSCVQTLEGHTHNVSAVCFHPELPIIITGSEDGTVRIWHATTYRLENTLNYGLERVWAIGYIKSSRRVVIGYDEGTIMVKLGREIPVASMDNTGKIIWAKHNEIQTANIKSIGADYEVTDGERLPLSVKELGTCDLYPQSLKHNPNGRFVVVCGDGEYIIYTALAWRNRSFGSGLEFVWSSEGECAVRESSSKIKIFSKNFQEKRSIRPTFSAEKIFGGTLLAMCSSDFICFYDWAECRLIQRIDVTVKNLYWADSGDLVAIASDTSFYILKFNRDLVTSHFDSGRPTEEEGVEDAFEVLHENDERVRTGIWVGDCFIYNNSSWKLNYCVGGEVTTMYHLDRPMYLLGYLASQSRVFLVDKEFNVIGYTLLLSLIEYKTLVMRGDLDKASEILPTIPKDQHNSVAHFLESRGMIEDALEIATDPDYRFELAIQLGRLEIAQEIAVEVQSESKWKQLGELAMSSGKLQMAEECMKYAMDLSGLLLLYSSLGDAEGVTKLATLAKEQGKNNVAFLCLFMLGKLEDCLQLLVESNRIPEAALMARSYLPSKVSEIVALWRKDLSKVNSKAAESLADPEEYSNLFEDWQVALSVEAKAVETRGVYTGAKDYPSHADKSSMTLVEAFRNLQVEEEESLENGDMDHEEVVAEENGNEQRNEDDVAEHVEEHHEEKEAEEEEGIVDGDSTDGAVLVNGSEADEEWGTNNEGNPSA

SEQ ID NO: 50623 - protein, 848 aa, Arabidopsis thaliana
  peptide (1)..(848): Ceres Seq. ID no. 13588245
MYIRVYNYNTMDKVKVFEAHSDYIRCVAVHPTLPYVLSSSDDMLIKLWDWEKGWACTQIFEGHSHYVMQVTFNPKDTNTFASASLDRTIKIWNLGSPDPNFTLDAHQKGVNCVDYFTGGDKPYLITGSDDHTAKVWDYQTKSCVQTLEGHTHNVSAVCFHPELPIIITGSEDGTVRIWHATTYRLENTLNYGLERVWAIGYIKSSRRVVIGYDEGTIMVKLGREIPVASMDNTGKIIWAKHNEIQTANIKSIGADYEVTDGERLPLSVKELGTCDLYPQSLKHNPNGRFVVVCGDGEYIIYTALAWRNRSFGSGLEFVWSSEGECAVRESSSKIKIFSKNFQEKRSIRPTFSAEKIFGGTLLAMCSSDFICFYDWAECRLIQRIDVTVKNLYWADSGDLVAIASDTSFYILKFNRDLVTSHFDSGRPTEEEGVEDAFEVLHENDERVRTGIWVGDCFIYNNSSWKLNYCVGGEVTTMYHLDRPMYLLGYLASQSRVFLVDKEFNVIGYTLLLSLIEYKTLVMRGDLDKASEILPTIPKDQHNSVAHFLESRGMIEDALEIATDPDYRFELAIQLGRLEIAQEIAVEVQSESKWKQLGELAMSSGKLQMAEECMKYAMDLSGLLLLYSSLGDAEGVTKLATLAKEQGKNNVAFLCLFMLGKLEDCLQLLVESNRIPEAALMARSYLPSKVSEIVALWRKDLSKVNSKAAESLADPEEYSNLFEDWQVALSVEAKAVETRGVYTGAKDYPSHADKSSMTLVEAFRNLQVEEEESLENGDMDHEEVVAEENGNEQRNEDDVAEHVEEHHEEKEAEEEEGIVDGDSTDGAVLVNGSEADEEWGTNNEGNPSA

SEQ ID NO: 50624 - DNA, 1604 bp, Arabidopsis thaliana
  misc_feature (1)..(1604): Ceres Seq. ID no. 13648518
  misc_feature (1)..(1604): Ortholog of  Ceres SEQ ID NO 14314359 as cited in SEQ ID NO 51039
  misc_feature (1)..(1604): Ortholog of  Ceres SEQ ID NO 14316184 as cited in SEQ ID NO 54517
  misc_feature (1)..(1604): Ortholog of  Ceres SEQ ID NO 15226529 as cited in SEQ ID NO 55005
  misc_feature (1)..(1604): Ortholog of  Ceres SEQ ID NO 12616225 as cited in SEQ ID NO 68930
agctctcattttctctctcatcttcaaccttaactctcttttctctctactctttctttggacgaatctgtctattgtttgtaagttttcaaggaaggtaaagaaacagagagatctaacttcgtctgcagggtttaagcagaggttggtttgtggattcttcgatttcttcttcagatttagtctacaatgaagtgagaatttctaaagataaacaaagaaaaacttgagactttagcaagatggagactgtgagaccaatggttgttgctcctaagggtaacaaactcagacgcaagtttgctaaagttcttaacattcataagctaacgggtgttgctccagaaggagaaatgaagaagataaagttcgattccaaaaccgctaagttgtctgagtcgttctacaagcttgaggaagagtatgagagaagtcagggattggaagctcttcttgcgaagctttttgctacggtttcttcgatcaaagcggcttatgcgcagttacagcattctcagtctccgtatgactctatcgggattcaaaaagcagataacttggtagtcgccgagcttaagactttgtctgagctgaaacaatgtttcatgaagaaacaagtggatccaaatcccgaaagaactctggttctcgcggagattcaagagctgaggagtctattgaaaacgtatgagataatggggaagaagctggagtctcagtacaagcttaaagactcagagattatatttctgagagagaaacttgatgaatcgatgaaacagaacaagttgacagagaagagacttaaccaaagcggacaactttgcaatccacttgacaatcttcacctatctgcgctaaatccaacacatttcgttacttatctgcaccacacagtcaagtccaccagaggtttcgtcaagctaatgatcgaacaaatgaaactcgctggatgggatatttcatcagctgctaattcgatccatcccggtgtgttctactacaagcaagaccacaagtgtttcactttcgaacactttgtctccaatgtgatgttcgaagcgtttcatctaccgtacttctcaacttcaagcgagtcaagaagctacaagaagaagaaacagagcaatgcagatagagaaatgttctttgaaaggtttaaagaactcaggtcgatgaaagcgaaagattatctaaccgcgaggcctaaatcaagattcgctaggttctgtcgagccaagtacttgcagcttatacatccaaagatggagcaagctttcttcggacatttgcatttgagaaaccaagtttctgctggtgaattcccggagacgagcttattctctggatttcttgaaatggcgaaacgaatttggcttttgcattgcttggctctctcttttgaacgtgaagctgagatctttcgagtacctaaaggttgtagattctctgaagtgtatatgaagagtgtagcagaagaagcgtttttcccggcggcggagagttcgccggagtctgagccacgtgtcgcgttcacggttgttccagggtttagaattgggaagacttcaatacaatgcgaggtctatctctcgctttcatga

SEQ ID NO: 50625 - protein, 453 aa, Arabidopsis thaliana
  peptide (1)..(453): Ceres Seq. ID no. 13648519
METVRPMVVAPKGNKLRRKFAKVLNIHKLTGVAPEGEMKKIKFDSKTAKLSESFYKLEEEYERSQGLEALLAKLFATVSSIKAAYAQLQHSQSPYDSIGIQKADNLVVAELKTLSELKQCFMKKQVDPNPERTLVLAEIQELRSLLKTYEIMGKKLESQYKLKDSEIIFLREKLDESMKQNKLTEKRLNQSGQLCNPLDNLHLSALNPTHFVTYLHHTVKSTRGFVKLMIEQMKLAGWDISSAANSIHPGVFYYKQDHKCFTFEHFVSNVMFEAFHLPYFSTSSESRSYKKKKQSNADREMFFERFKELRSMKAKDYLTARPKSRFARFCRAKYLQLIHPKMEQAFFGHLHLRNQVSAGEFPETSLFSGFLEMAKRIWLLHCLALSFEREAEIFRVPKGCRFSEVYMKSVAEEAFFPAAESSPESEPRVAFTVVPGFRIGKTSIQCEVYLSLS

SEQ ID NO: 50626 - protein, 447 aa, Arabidopsis thaliana
  peptide (1)..(447): Ceres Seq. ID no. 13648520
MVVAPKGNKLRRKFAKVLNIHKLTGVAPEGEMKKIKFDSKTAKLSESFYKLEEEYERSQGLEALLAKLFATVSSIKAAYAQLQHSQSPYDSIGIQKADNLVVAELKTLSELKQCFMKKQVDPNPERTLVLAEIQELRSLLKTYEIMGKKLESQYKLKDSEIIFLREKLDESMKQNKLTEKRLNQSGQLCNPLDNLHLSALNPTHFVTYLHHTVKSTRGFVKLMIEQMKLAGWDISSAANSIHPGVFYYKQDHKCFTFEHFVSNVMFEAFHLPYFSTSSESRSYKKKKQSNADREMFFERFKELRSMKAKDYLTARPKSRFARFCRAKYLQLIHPKMEQAFFGHLHLRNQVSAGEFPETSLFSGFLEMAKRIWLLHCLALSFEREAEIFRVPKGCRFSEVYMKSVAEEAFFPAAESSPESEPRVAFTVVPGFRIGKTSIQCEVYLSLS

SEQ ID NO: 50627 - protein, 416 aa, Arabidopsis thaliana
  peptide (1)..(416): Ceres Seq. ID no. 13648521
MKKIKFDSKTAKLSESFYKLEEEYERSQGLEALLAKLFATVSSIKAAYAQLQHSQSPYDSIGIQKADNLVVAELKTLSELKQCFMKKQVDPNPERTLVLAEIQELRSLLKTYEIMGKKLESQYKLKDSEIIFLREKLDESMKQNKLTEKRLNQSGQLCNPLDNLHLSALNPTHFVTYLHHTVKSTRGFVKLMIEQMKLAGWDISSAANSIHPGVFYYKQDHKCFTFEHFVSNVMFEAFHLPYFSTSSESRSYKKKKQSNADREMFFERFKELRSMKAKDYLTARPKSRFARFCRAKYLQLIHPKMEQAFFGHLHLRNQVSAGEFPETSLFSGFLEMAKRIWLLHCLALSFEREAEIFRVPKGCRFSEVYMKSVAEEAFFPAAESSPESEPRVAFTVVPGFRIGKTSIQCEVYLSLS

SEQ ID NO: 50628 - DNA, 1212 bp, Arabidopsis thaliana; identical to SEQ ID NO: 49998
  misc_feature (1)..(1212): Ceres Seq. ID no. 13592406
  misc_feature (1)..(1212): Ortholog of  Ceres SEQ ID NO 15175368 as cited in SEQ ID NO 60071
  misc_feature (1)..(1212): Ortholog of  Ceres SEQ ID NO 13528157 as cited in SEQ ID NO 60102
  misc_feature (1)..(1212): Ortholog of  Ceres SEQ ID NO 15225423 as cited in SEQ ID NO 64689

SEQ ID NO: 50629 - protein, 279 aa, Arabidopsis thaliana; identical to SEQ ID NO: 49999
  peptide (1)..(279): Ceres Seq. ID no. 13592407

SEQ ID NO: 50630 - protein, 262 aa, Arabidopsis thaliana; identical to SEQ ID NO: 50000
  peptide (1)..(262): Ceres Seq. ID no. 13592408

SEQ ID NO: 50631 - protein, 217 aa, Arabidopsis thaliana; identical to SEQ ID NO: 50001
  peptide (1)..(217): Ceres Seq. ID no. 13592409

SEQ ID NO: 50632 - DNA, 1357 bp, Arabidopsis thaliana
  misc_feature (1)..(1357): Ceres Seq. ID no. 14304311
  misc_feature (1)..(1357): Ortholog of  Ceres SEQ ID NO 15168500 as cited in SEQ ID NO 57041
gacccttctgttaccgcttttacgttcgactccagattcctcctttgccggaatattccatacgtaagagatattgaaatcgccgatgatggaaagttcgattccgtctgagaacggctccgttacctctgatcgtgatagatcggctctaatattcctaggaactggatgttcaagcgcggtacctaacgcaatgtgcttgatccagcgatctgataatccctgctatgtttgttcccagtctctttcaatcccgcctgagaaaaatcctaattacagggggaatacttcactgctcattgattattgccaaagtgatggcaaacataaatacattcaaatcgatgttggcaagactttcagagaacaagtccttcgttggtttactcttcacaagattcctcaagttgattctataattttgactcatgaacatgctgatgcagtacttggcctggatgatatacgttcagtgcaaccatttagtcctactaatgatattgatcctactccaatttttgtaagccaatatgctatggaaagccttgctgtgaagttcccgtatttggttcagaagaaacttaaagaaggccaagaagttaggcgagtagcacagctagattggagagtaattgaagaagattgtgagaagccatttgtagcttcaggtttatcattcacgccacttccagtgatgcatggagaagactatgtatgtcttggcttcctttttggtgaaaaatcaagagtggcttatatatccgatgtttcacggtttcctccaaacaccgagtatgctatatcaaaatctggtggtggacaattggatctccttattttggatacattatataagacaggatcccacaacactcacttatgtttcccgcagacactagacacaatcaaaagactgagtccaaaaagggctcttctgattggaatgactcacgagtttgatcatcacaaggacaacgagtttcttgaagaatggtctaaaagggaagggatttcagtaaaactcgctcatgatggcttgagagtcccaatagacctatgaagaggtgaaaatgattacttggctttctcattaacgaaactaagatcattgccttattttttatctgacttctgattcactcaatgaggaagcttgtaggtctccttgtgttatagagagatagagagcggagtgaaacggttttgttcaagatgcataatgctcgcatggcttcatatcaacattatcactaatgtttttgtttcttcttcaagttttagctaggatttctgactaaacgacgattttttaatattatcagatatacatgttaaaataaaaacaaagaaacaagac

SEQ ID NO: 50633 - protein, 324 aa, Arabidopsis thaliana
  peptide (1)..(324): Ceres Seq. ID no. 14304312
MMESSIPSENGSVTSDRDRSALIFLGTGCSSAVPNAMCLIQRSDNPCYVCSQSLSIPPEKNPNYRGNTSLLIDYCQSDGKHKYIQIDVGKTFREQVLRWFTLHKIPQVDSIILTHEHADAVLGLDDIRSVQPFSPTNDIDPTPIFVSQYAMESLAVKFPYLVQKKLKEGQEVRRVAQLDWRVIEEDCEKPFVASGLSFTPLPVMHGEDYVCLGFLFGEKSRVAYISDVSRFPPNTEYAISKSGGGQLDLLILDTLYKTGSHNTHLCFPQTLDTIKRLSPKRALLIGMTHEFDHHKDNEFLEEWSKREGISVKLAHDGLRVPIDL

SEQ ID NO: 50634 - protein, 323 aa, Arabidopsis thaliana
  peptide (1)..(323): Ceres Seq. ID no. 14304313
MESSIPSENGSVTSDRDRSALIFLGTGCSSAVPNAMCLIQRSDNPCYVCSQSLSIPPEKNPNYRGNTSLLIDYCQSDGKHKYIQIDVGKTFREQVLRWFTLHKIPQVDSIILTHEHADAVLGLDDIRSVQPFSPTNDIDPTPIFVSQYAMESLAVKFPYLVQKKLKEGQEVRRVAQLDWRVIEEDCEKPFVASGLSFTPLPVMHGEDYVCLGFLFGEKSRVAYISDVSRFPPNTEYAISKSGGGQLDLLILDTLYKTGSHNTHLCFPQTLDTIKRLSPKRALLIGMTHEFDHHKDNEFLEEWSKREGISVKLAHDGLRVPIDL

SEQ ID NO: 50635 - protein, 288 aa, Arabidopsis thaliana
  peptide (1)..(288): Ceres Seq. ID no. 14304314
MCLIQRSDNPCYVCSQSLSIPPEKNPNYRGNTSLLIDYCQSDGKHKYIQIDVGKTFREQVLRWFTLHKIPQVDSIILTHEHADAVLGLDDIRSVQPFSPTNDIDPTPIFVSQYAMESLAVKFPYLVQKKLKEGQEVRRVAQLDWRVIEEDCEKPFVASGLSFTPLPVMHGEDYVCLGFLFGEKSRVAYISDVSRFPPNTEYAISKSGGGQLDLLILDTLYKTGSHNTHLCFPQTLDTIKRLSPKRALLIGMTHEFDHHKDNEFLEEWSKREGISVKLAHDGLRVPIDL

SEQ ID NO: 50636 - DNA, 1752 bp, Arabidopsis thaliana; identical to SEQ ID NO: 50408
  misc_feature (1)..(1752): Ceres Seq. ID no. 13648147
  misc_feature (1)..(1752): Ortholog of  Ceres SEQ ID NO 15179918 as cited in SEQ ID NO 57077

SEQ ID NO: 50637 - protein, 516 aa, Arabidopsis thaliana; identical to SEQ ID NO: 50409
  peptide (1)..(516): Ceres Seq. ID no. 13648148

SEQ ID NO: 50638 - protein, 502 aa, Arabidopsis thaliana; identical to SEQ ID NO: 50410
  peptide (1)..(502): Ceres Seq. ID no. 13648149

SEQ ID NO: 50639 - protein, 432 aa, Arabidopsis thaliana; identical to SEQ ID NO: 50411
  peptide (1)..(432): Ceres Seq. ID no. 13648150

SEQ ID NO: 50640 - DNA, 2121 bp, Arabidopsis thaliana; identical to SEQ ID NO: 24365
  misc_feature (1)..(2121): Ceres Seq. ID no. 12601883
  misc_feature (1)..(2121): Ortholog of  Ceres SEQ ID NO 15179194 as cited in SEQ ID NO 0

SEQ ID NO: 50641 - protein, 181 aa, Arabidopsis thaliana; identical to SEQ ID NO: 24366
  peptide (1)..(181): Ceres Seq. ID no. 12601884

SEQ ID NO: 50642 - protein, 177 aa, Arabidopsis thaliana; identical to SEQ ID NO: 24367
  peptide (1)..(177): Ceres Seq. ID no. 12601885

SEQ ID NO: 50643 - protein, 162 aa, Arabidopsis thaliana; identical to SEQ ID NO: 24368
  peptide (1)..(162): Ceres Seq. ID no. 12601886

SEQ ID NO: 50644 - DNA, 1415 bp, Arabidopsis thaliana
  misc_feature (1)..(1415): Ceres Seq. ID no. 13588571
  misc_feature (1)..(1415): Ortholog of  Ceres SEQ ID NO 13597805 as cited in SEQ ID NO 64186
gaacgacgacgaatcttcgtcttccccttgttcttcttcttcctcttcattttactttctcttcccgatttctctctgtccgattcaccttttcctccgatctcggtctccttagattccggaataatcccctcaaggcttggcttagtaatcgtcgttttctccgccatgagttccaatacggcgtcgtccagcgcgggggcagccggatcgggagattcttccgccgctaggaagaattcaaagcgacccaagtattcgaagttcacacagcaggagcttccagcttgcaagccaattctaacccctggttgggtcatttcgacatttttgatagtcagtgttatctttattccccttggagttatctcccttttcgcttcccaggatgttgtggagatcgttgatcggtatgatactgagtgcattccggcacctgctaggactaacaaggttgcatatattcaaggagatggagataaagtttgtaaccgggatcttaaagtgacaaagcgtatgaagcaacctatctatgtttattaccaacttgagaatttctaccagaatcaccgaaggtatgtaaaaagtcgaagtgattcacagttgagaagtacaaaatacgagaatcaaataagtgcatgcaagcctgaggatgatgttggtgggcagccgattgtgccgtgtggtctaattgcttggagtctttttaacgacacatacgcgttatcaagaaacaatgtaagcctagctgtgaacaaaaaaggcattgcatggaagagtgacaaggaacacaagtttgggaacaaggtcttccccaagaattttcaaaaggggaatatcacaggtggtgctactttagatccaagaataccgcttagtgaacaagaagatctcattgtgtggatgagaaccgcagcattgccaacatttagaaaactttacggaaagatagagtctgacctcgagatgggtgacaccatacacgttaagctgaacaacaactacaacacgtacagcttcaatggaaagaagaagcttgttttgtcaaccactagttggctgggtgggaagaacgatttccttggcattgcttacctgacagttggcgggatctgtttcattttggccctcgcatttaccatcatgtaccttgtgaaacccaggcgtcttggagatccgtcctacttgtcatggaatagaaatcctggaggtcggtaacaagcttggaaagggagagagagagctctaatctgcgtgtgtaaatcttatccatccatgtacacatacaatgtaatttttgcttacatactatgtaatccttgcttgcaaaatggtttcttcggtgagagcttaaatcccacataatactttgttgttgttgttccaaaccagtctaatatattacttttgtcccc

SEQ ID NO: 50645 - protein, 405 aa, Arabidopsis thaliana
  peptide (1)..(405): Ceres Seq. ID no. 13588572
ERRRIFVFPLFFFFLFILLSLPDFSLSDSPFPPISVSLDSGIIPSRLGLVIVVFSAMSSNTASSSAGAAGSGDSSAARKNSKRPKYSKFTQQELPACKPILTPGWVISTFLIVSVIFIPLGVISLFASQDVVEIVDRYDTECIPAPARTNKVAYIQGDGDKVCNRDLKVTKRMKQPIYVYYQLENFYQNHRRYVKSRSDSQLRSTKYENQISACKPEDDVGGQPIVPCGLIAWSLFNDTYALSRNNVSLAVNKKGIAWKSDKEHKFGNKVFPKNFQKGNITGGATLDPRIPLSEQEDLIVWMRTAALPTFRKLYGKIESDLEMGDTIHVKLNNNYNTYSFNGKKKLVLSTTSWLGGKNDFLGIAYLTVGGICFILALAFTIMYLVKPRRLGDPSYLSWNRNPGGR

SEQ ID NO: 50646 - protein, 349 aa, Arabidopsis thaliana
  peptide (1)..(349): Ceres Seq. ID no. 13588573
MSSNTASSSAGAAGSGDSSAARKNSKRPKYSKFTQQELPACKPILTPGWVISTFLIVSVIFIPLGVISLFASQDVVEIVDRYDTECIPAPARTNKVAYIQGDGDKVCNRDLKVTKRMKQPIYVYYQLENFYQNHRRYVKSRSDSQLRSTKYENQISACKPEDDVGGQPIVPCGLIAWSLFNDTYALSRNNVSLAVNKKGIAWKSDKEHKFGNKVFPKNFQKGNITGGATLDPRIPLSEQEDLIVWMRTAALPTFRKLYGKIESDLEMGDTIHVKLNNNYNTYSFNGKKKLVLSTTSWLGGKNDFLGIAYLTVGGICFILALAFTIMYLVKPRRLGDPSYLSWNRNPGGR

SEQ ID NO: 50647 - protein, 233 aa, Arabidopsis thaliana
  peptide (1)..(233): Ceres Seq. ID no. 13588574
MKQPIYVYYQLENFYQNHRRYVKSRSDSQLRSTKYENQISACKPEDDVGGQPIVPCGLIAWSLFNDTYALSRNNVSLAVNKKGIAWKSDKEHKFGNKVFPKNFQKGNITGGATLDPRIPLSEQEDLIVWMRTAALPTFRKLYGKIESDLEMGDTIHVKLNNNYNTYSFNGKKKLVLSTTSWLGGKNDFLGIAYLTVGGICFILALAFTIMYLVKPRRLGDPSYLSWNRNPGGR

SEQ ID NO: 50648 - DNA, 1287 bp, Arabidopsis thaliana; identical to SEQ ID NO: 22141
  misc_feature (1)..(1287): Ceres Seq. ID no. 13588473
  misc_feature (1)..(1287): Ortholog of  Ceres SEQ ID NO 15176835 as cited in SEQ ID NO 1046
  misc_feature (1)..(1287): Ortholog of  Ceres SEQ ID NO 14315403 as cited in SEQ ID NO 59259

SEQ ID NO: 50649 - protein, 346 aa, Arabidopsis thaliana; identical to SEQ ID NO: 22142
  peptide (1)..(346): Ceres Seq. ID no. 13588474

SEQ ID NO: 50650 - protein, 336 aa, Arabidopsis thaliana; identical to SEQ ID NO: 22143
  peptide (1)..(336): Ceres Seq. ID no. 13588475

SEQ ID NO: 50651 - DNA, 1889 bp, Arabidopsis thaliana
  misc_feature (1)..(1889): Ceres Seq. ID no. 12591570
  misc_feature (1)..(1889): Ortholog of  Ceres SEQ ID NO 14302588 as cited in SEQ ID NO 0
acacacttacatacaacaatggcttcgtcatctacaagtatctctctccttctcttcgtctctttccttcttcttctcgttaactcgcgtgcagagaatgcgtccagtggatcggatctcgacgaagaattggctttcctcgccgcggaggaatccaaggaacaaagccacggcggcggttcgtaccacgaggaggagcacgatcatcagcaccgagacttcgagaattacgatgatctcgagcaaggaggcggcgagtttcatcacggcgatcacggttacgaggaggagccgttaccaccagtcgacgagaaagacgtggcggttctgaccaaggacaatttcaccgagttcgtcggcaacaatagcttcgcgatggtggagttttacgctccgtggtgcggcgcttgtcaggctttgactccggagtacgccgcggctgcgacggagttgaaaggccttgcggcgctcgcgaagatcgacgcgacggaggaaggggatttggctcagaagtacgagattcagggcttccccaccgttttcttgtttgtcgacggagaaatgcgcaagacctacgaaggtgaaagaacaaaggatggtattgtgacttggctgaagaagaaggccagtcctagcatccacaacatcactactaaagaggaggctgaacgtgttttgtccgctgaacctaaacttgtctttggttttctcaactcattagtggggtcagagagtgaggagctcgcggctgcgtccagactggaagacgatctcagtttttaccaaactgcaagccctgatattgcaaagctatttgaaattgaaacccaagtcaagcgtcctgccttagttttactgaaaaaggaggaagagaaacttgcccgttttgatggaaacttcactaaaacggctatagcagagtttgtgtcagccaacaaagtcccattggtgatcaacttcacaagggaaggtgcatcactgattttcgagagctcagtgaaaaaccaactcattctttttgccaaggcaaatgaatcagagaagcaccttcccactctgagggaggtggcaaagtccttcaagggaaagtttgttttcgtttatgtgcaaatggacaatgaagattatggagaagcagtttctggattctttggtgttaccggcgctgcccccaaggttcttgtatacactggtaatgaagatatgaggaagtttattctggacggtgaattgaccgtaaataacattaagacacttgcggaagatttcctagcagacaaactgaagcctttctacaagtcagatccactaccggaaaataacgatggtgatgttaaggtcattgtgggaaacaattttgatgagattgttcttgacgagtcaaaggatgttcttctcgagatatatgctccttggtgtggccactgccaatcatttgagccgatttacaacaagcttggaaagtatttaaaaggcattgactcgttagttgtagcaaagatggatggtaccagcaatgagcatcctagagcaaaggctgatgggttcccaacaatcctgttcttccctggtggaaacaaaagcttcgatccgatcgctgtggatgttgaccgtacagtagtggaactgtacaaattcctgaagaagcacgcatcaatcccatttaaacttgagaaaccggcgacacctgaaccggtgatctcgaccatgaaatctgatgagaagatcgagggtgatagttccaaggatgagttgtgatgatcggaacagagtgtgtaacaaggctatagatgatgactcttctataaatgatagaaaatgttttgccctttgtttttttccattgttgtatgctatgaaatgaataattaaagaagttttggtttctc

SEQ ID NO: 50652 - protein, 585 aa, Arabidopsis thaliana
  peptide (1)..(585): Ceres Seq. ID no. 12591571
THLHTTMASSSTSISLLLFVSFLLLLVNSRAENASSGSDLDEELAFLAAEESKEQSHGGGSYHEEEHDHQHRDFENYDDLEQGGGEFHHGDHGYEEEPLPPVDEKDVAVLTKDNFTEFVGNNSFAMVEFYAPWCGACQALTPEYAAAATELKGLAALAKIDATEEGDLAQKYEIQGFPTVFLFVDGEMRKTYEGERTKDGIVTWLKKKASPSIHNITTKEEAERVLSAEPKLVFGFLNSLVGSESEELAAASRLEDDLSFYQTASPDIAKLFEIETQVKRPALVLLKKEEEKLARFDGNFTKTAIAEFVSANKVPLVINFTREGASLIFESSVKNQLILFAKANESEKHLPTLREVAKSFKGKFVFVYVQMDNEDYGEAVSGFFGVTGAAPKVLVYTGNEDMRKFILDGELTVNNIKTLAEDFLADKLKPFYKSDPLPENNDGDVKVIVGNNFDEIVLDESKDVLLEIYAPWCGHCQSFEPIYNKLGKYLKGIDSLVVAKMDGTSNEHPRAKADGFPTILFFPGGNKSFDPIAVDVDRTVVELYKFLKKHASIPFKLEKPATPEPVISTMKSDEKIEGDSSKDEL

SEQ ID NO: 50653 - protein, 579 aa, Arabidopsis thaliana
  peptide (1)..(579): Ceres Seq. ID no. 12591572
MASSSTSISLLLFVSFLLLLVNSRAENASSGSDLDEELAFLAAEESKEQSHGGGSYHEEEHDHQHRDFENYDDLEQGGGEFHHGDHGYEEEPLPPVDEKDVAVLTKDNFTEFVGNNSFAMVEFYAPWCGACQALTPEYAAAATELKGLAALAKIDATEEGDLAQKYEIQGFPTVFLFVDGEMRKTYEGERTKDGIVTWLKKKASPSIHNITTKEEAERVLSAEPKLVFGFLNSLVGSESEELAAASRLEDDLSFYQTASPDIAKLFEIETQVKRPALVLLKKEEEKLARFDGNFTKTAIAEFVSANKVPLVINFTREGASLIFESSVKNQLILFAKANESEKHLPTLREVAKSFKGKFVFVYVQMDNEDYGEAVSGFFGVTGAAPKVLVYTGNEDMRKFILDGELTVNNIKTLAEDFLADKLKPFYKSDPLPENNDGDVKVIVGNNFDEIVLDESKDVLLEIYAPWCGHCQSFEPIYNKLGKYLKGIDSLVVAKMDGTSNEHPRAKADGFPTILFFPGGNKSFDPIAVDVDRTVVELYKFLKKHASIPFKLEKPATPEPVISTMKSDEKIEGDSSKDEL

SEQ ID NO: 50654 - protein, 460 aa, Arabidopsis thaliana
  peptide (1)..(460): Ceres Seq. ID no. 12591573
MVEFYAPWCGACQALTPEYAAAATELKGLAALAKIDATEEGDLAQKYEIQGFPTVFLFVDGEMRKTYEGERTKDGIVTWLKKKASPSIHNITTKEEAERVLSAEPKLVFGFLNSLVGSESEELAAASRLEDDLSFYQTASPDIAKLFEIETQVKRPALVLLKKEEEKLARFDGNFTKTAIAEFVSANKVPLVINFTREGASLIFESSVKNQLILFAKANESEKHLPTLREVAKSFKGKFVFVYVQMDNEDYGEAVSGFFGVTGAAPKVLVYTGNEDMRKFILDGELTVNNIKTLAEDFLADKLKPFYKSDPLPENNDGDVKVIVGNNFDEIVLDESKDVLLEIYAPWCGHCQSFEPIYNKLGKYLKGIDSLVVAKMDGTSNEHPRAKADGFPTILFFPGGNKSFDPIAVDVDRTVVELYKFLKKHASIPFKLEKPATPEPVISTMKSDEKIEGDSSKDEL

SEQ ID NO: 50655 - DNA, 1184 bp, Arabidopsis thaliana
  misc_feature (1)..(1184): Ceres Seq. ID no. 13592432
  misc_feature (1)..(1184): Ortholog of  Ceres SEQ ID NO 12562215 as cited in SEQ ID NO 20489
  misc_feature (1)..(1184): Ortholog of  Ceres SEQ ID NO 13595548 as cited in SEQ ID NO 51024
  misc_feature (1)..(1184): Ortholog of  Ceres SEQ ID NO 13582350 as cited in SEQ ID NO 56734
  misc_feature (1)..(1184): Ortholog of  Ceres SEQ ID NO 12476493 as cited in SEQ ID NO 58163
  misc_feature (1)..(1184): Ortholog of  Ceres SEQ ID NO 14313459 as cited in SEQ ID NO 62395
  misc_feature (1)..(1184): Ortholog of  Ceres SEQ ID NO 13597295 as cited in SEQ ID NO 63743
  misc_feature (1)..(1184): Ortholog of  Ceres SEQ ID NO 12617090 as cited in SEQ ID NO 64005
  misc_feature (1)..(1184): Ortholog of  Ceres SEQ ID NO 13597439 as cited in SEQ ID NO 64081
  misc_feature (1)..(1184): Ortholog of  Ceres SEQ ID NO 13597233 as cited in SEQ ID NO 64370
  misc_feature (1)..(1184): Ortholog of  Ceres SEQ ID NO 13599438 as cited in SEQ ID NO 0
  misc_feature (1)..(1184): Ortholog of  Ceres SEQ ID NO 13623850 as cited in SEQ ID NO 0
  misc_feature (1)..(1184): Ortholog of  Ceres SEQ ID NO 14309162 as cited in SEQ ID NO 0
gaactcacacatttagcatcatcaaggatcgaaaacattaagtagctagttaagagagagagagagagatggagatgaacattaagtttccagttatagacttgtctaagctcaatggtgaagagagagaccaaaccatggctttgatcgacgatgcttgtcaaaactggggcttcttcgagctggtgaaccatggactaccatatgatctaatggacaacattgagaggatgacaaaggaacactacaagaaacatatggaacaaaagttcaaagaaatgcttcgttccaaaggtttagataccctcgagaccgaagttgaagatgtcgattgggaaagcactttctacctccatcatctccctcaatctaacctatacgacatccctgatatgtcaaatgaataccgattggcaatgaaggattttgggaagaggcttgagattctagctgaagagctattggacttgttgtgtgagaatctagggttggagaaagggtacttgaagaaggtgtttcatgggacaacgggtccaacttttgcgacaaagcttagcaactatccaccatgtcctaaaccagagatgatcaaagggcttagggctcacacagatgcaggaggcctcattttgctgtttcaagatgataaggtcagtggtctccagcttcttaaagatggtgattgggttgatgttcctcctctcaagcattccattgtcatcaaccttggtgaccaacttgaggtgataacaaacgggaagtacaagagtgtaatgcaccgtgtgatgacccagaaagaaggaaacaggatgtctatcgcgtcgttttacaaccccggaagcgatgctgagatctctccggcaacatctcttgtggataaagactcaaaatacccaagctttgtgtttgatgactacatgaaactctatgccggactcaagtttcaggccaaggagccacggttcgaggcgatgaaaaatgctgaagcagctgcggatttgaatccggtggctgtggttgagacattctaaatggatgtgggatcttctacgaaagctaaaagtatatgatgataaaaagatgtgtggtaatgtcaataaaaggattggggttgatgttagtaaaatcaataactaagtgatgaatattatgtgttaagcgtgggagtgagtgactatttatgc

SEQ ID NO: 50656 - protein, 320 aa, Arabidopsis thaliana
  peptide (1)..(320): Ceres Seq. ID no. 13592433
MEMNIKFPVIDLSKLNGEERDQTMALIDDACQNWGFFELVNHGLPYDLMDNIERMTKEHYKKHMEQKFKEMLRSKGLDTLETEVEDVDWESTFYLHHLPQSNLYDIPDMSNEYRLAMKDFGKRLEILAEELLDLLCENLGLEKGYLKKVFHGTTGPTFATKLSNYPPCPKPEMIKGLRAHTDAGGLILLFQDDKVSGLQLLKDGDWVDVPPLKHSIVINLGDQLEVITNGKYKSVMHRVMTQKEGNRMSIASFYNPGSDAEISPATSLVDKDSKYPSFVFDDYMKLYAGLKFQAKEPRFEAMKNAEAAADLNPVAVVETF

SEQ ID NO: 50657 - protein, 318 aa, Arabidopsis thaliana
  peptide (1)..(318): Ceres Seq. ID no. 13592434
MNIKFPVIDLSKLNGEERDQTMALIDDACQNWGFFELVNHGLPYDLMDNIERMTKEHYKKHMEQKFKEMLRSKGLDTLETEVEDVDWESTFYLHHLPQSNLYDIPDMSNEYRLAMKDFGKRLEILAEELLDLLCENLGLEKGYLKKVFHGTTGPTFATKLSNYPPCPKPEMIKGLRAHTDAGGLILLFQDDKVSGLQLLKDGDWVDVPPLKHSIVINLGDQLEVITNGKYKSVMHRVMTQKEGNRMSIASFYNPGSDAEISPATSLVDKDSKYPSFVFDDYMKLYAGLKFQAKEPRFEAMKNAEAAADLNPVAVVETF

SEQ ID NO: 50658 - protein, 297 aa, Arabidopsis thaliana
  peptide (1)..(297): Ceres Seq. ID no. 13592435
MALIDDACQNWGFFELVNHGLPYDLMDNIERMTKEHYKKHMEQKFKEMLRSKGLDTLETEVEDVDWESTFYLHHLPQSNLYDIPDMSNEYRLAMKDFGKRLEILAEELLDLLCENLGLEKGYLKKVFHGTTGPTFATKLSNYPPCPKPEMIKGLRAHTDAGGLILLFQDDKVSGLQLLKDGDWVDVPPLKHSIVINLGDQLEVITNGKYKSVMHRVMTQKEGNRMSIASFYNPGSDAEISPATSLVDKDSKYPSFVFDDYMKLYAGLKFQAKEPRFEAMKNAEAAADLNPVAVVETF

SEQ ID NO: 50659 - DNA, 1762 bp, Arabidopsis thaliana
  misc_feature (1)..(1762): Ceres Seq. ID no. 13588476
  misc_feature (1)..(1762): Ortholog of  Ceres SEQ ID NO 14308232 as cited in SEQ ID NO 58659
atgatcttaaaaggaatactgtggcaggtatggttccttggagaaaatgcaaactacgccgcatcagaatatgcatgggaatctgcaactccaccaggcacagcacttatgatgttggatgcagataaaatggttgctgctgctagttctcgcaatcctactctagctggtgcattaactcgcctccagaggtgtgcatttagtggaagctgggaggtcagaattgttgcaattcaagctcttactacaatagccattagatctggtgaacctttcaggctgcagatatacgagtttttgtacaccttagcagagggtggtgtacagtctcaactttctgaaatgcacctgagtaatggggaagaccaaggagctagtggtacaggtcttggagttttaataacaccgatgttaaaagttcttgatgaaatgtatgttggacaagacgaattaatcaaggatatacgccatcacgataatgcaaacaaagaatggaaggacgaggagctgaaaaaactctacgaaaaccatgagaggctgctggattttgtttcaatgttttgctttattcctagagccaagtatttaccactgggcccgataagcgcgaagctcattgacacataccgtacaaagcacaatatcactgcatctactgggtccaccgatccagctgttgttgctactgggatctcggacttaatctatgagtccactcagcctgcccccgctgcctcaaactccagtggtctggatgatgatttggtgaatgcttgggctgcaaaccttggtgatgatggtcttcttggaaacaatgccccagcaatgagtaggaaatggaactcagacctatataatacttgtcaggtcaatgaattcattgctggagtcggaacagatgcaccggatgttgaggaggagaatgtcttctctagaccttcggttgggtatgatgacatgtgggctaaaactcttttagaaacttcagaattggaggaagaagatgcgagatcaggttcatcgtctccagattctgctggatcagtggaaagctcaatatcctctcactttggtggaatgaactacccatcattgttcagttcaaagccttcctcacaagcaacggcaaaatcaggtggaagtaaataccagtccacatatgaaggctatggttccccaattagagaagagcctcctccgccttattcgtattctgagccacaaagtcgtgaatcgtttgagaaccctgtagcagggtctggttctcgaagttatgaatcagatgatgaagaacctaggaaatctactggtacaagatttggaacagcgctctatgacttcacagcaggaggagatgatgagctaaacttgacggcagaagaggaattggagatagagtatgaagttgatggctggttttacgtaaagaagaagcggcctggaagagatgggaagatggcgggacttgttcctgttctatacgtcaatcaatcttgaatttttggggaacggctttagacgtagaagccaacacactttggacatgttaagtggacttgcttagatgccgatagacattatgatccatgatttccttgaagaggtagtgtaaaatcagtgtacatgaaggaatgtatttgttttgttggggtttgatgtgtatgtgtatctcttttgacacttattgctcacatgctattgatgattgatcaacttgagttttaactattgtttcactgaattcataatatatattacatct

SEQ ID NO: 50660 - protein, 498 aa, Arabidopsis thaliana
  peptide (1)..(498): Ceres Seq. ID no. 13588477
MILKGILWQVWFLGENANYAASEYAWESATPPGTALMMLDADKMVAAASSRNPTLAGALTRLQRCAFSGSWEVRIVAIQALTTIAIRSGEPFRLQIYEFLYTLAEGGVQSQLSEMHLSNGEDQGASGTGLGVLITPMLKVLDEMYVGQDELIKDIRHHDNANKEWKDEELKKLYENHERLLDFVSMFCFIPRAKYLPLGPISAKLIDTYRTKHNITASTGSTDPAVVATGISDLIYESTQPAPAASNSSGLDDDLVNAWAANLGDDGLLGNNAPAMSRKWNSDLYNTCQVNEFIAGVGTDAPDVEEENVFSRPSVGYDDMWAKTLLETSELEEEDARSGSSSPDSAGSVESSISSHFGGMNYPSLFSSKPSSQATAKSGGSKYQSTYEGYGSPIREEPPPPYSYSEPQSRESFENPVAGSGSRSYESDDEEPRKSTGTRFGTALYDFTAGGDDELNLTAEEELEIEYEVDGWFYVKKKRPGRDGKMAGLVPVLYVNQS

SEQ ID NO: 50661 - protein, 462 aa, Arabidopsis thaliana
  peptide (1)..(462): Ceres Seq. ID no. 13588478
MMLDADKMVAAASSRNPTLAGALTRLQRCAFSGSWEVRIVAIQALTTIAIRSGEPFRLQIYEFLYTLAEGGVQSQLSEMHLSNGEDQGASGTGLGVLITPMLKVLDEMYVGQDELIKDIRHHDNANKEWKDEELKKLYENHERLLDFVSMFCFIPRAKYLPLGPISAKLIDTYRTKHNITASTGSTDPAVVATGISDLIYESTQPAPAASNSSGLDDDLVNAWAANLGDDGLLGNNAPAMSRKWNSDLYNTCQVNEFIAGVGTDAPDVEEENVFSRPSVGYDDMWAKTLLETSELEEEDARSGSSSPDSAGSVESSISSHFGGMNYPSLFSSKPSSQATAKSGGSKYQSTYEGYGSPIREEPPPPYSYSEPQSRESFENPVAGSGSRSYESDDEEPRKSTGTRFGTALYDFTAGGDDELNLTAEEELEIEYEVDGWFYVKKKRPGRDGKMAGLVPVLYVNQS

SEQ ID NO: 50662 - protein, 461 aa, Arabidopsis thaliana
  peptide (1)..(461): Ceres Seq. ID no. 13588479
MLDADKMVAAASSRNPTLAGALTRLQRCAFSGSWEVRIVAIQALTTIAIRSGEPFRLQIYEFLYTLAEGGVQSQLSEMHLSNGEDQGASGTGLGVLITPMLKVLDEMYVGQDELIKDIRHHDNANKEWKDEELKKLYENHERLLDFVSMFCFIPRAKYLPLGPISAKLIDTYRTKHNITASTGSTDPAVVATGISDLIYESTQPAPAASNSSGLDDDLVNAWAANLGDDGLLGNNAPAMSRKWNSDLYNTCQVNEFIAGVGTDAPDVEEENVFSRPSVGYDDMWAKTLLETSELEEEDARSGSSSPDSAGSVESSISSHFGGMNYPSLFSSKPSSQATAKSGGSKYQSTYEGYGSPIREEPPPPYSYSEPQSRESFENPVAGSGSRSYESDDEEPRKSTGTRFGTALYDFTAGGDDELNLTAEEELEIEYEVDGWFYVKKKRPGRDGKMAGLVPVLYVNQS

SEQ ID NO: 50663 - DNA, 774 bp, Arabidopsis thaliana
  misc_feature (1)..(774): Ceres Seq. ID no. 13588256
  misc_feature (1)..(774): Ortholog of  Ceres SEQ ID NO 12633896 as cited in SEQ ID NO 0
ggagcactcaattcgatcactaactctcactcttagtacaaatattttcaagaatggtttctccttctttttcaaccaagcttgtcttctttgcttgctttgttctgttcacattctcacacaaactcgtgacaggagaatccgacaaagttgagctcaatctttactacgaatcactttgtcccggttgtcagagtttcatcgtcgatgaactagtcaaagtctttgactccgatctcgatacaatcaccgatgtcaagctcgttccattcggtaacgccaaagtctccaataatctgaccgtcatttgccagcatggtgaagaggaatgcaaactcaacgctcttgaagcttgcgtcattaacactttgcctaacccgaaatcgcagtacaagttcatacgatgcgttgaaaacaatacggataactgggaatcatcatgtttaaagggctatggaaatgagaaagccatcaatgattgttacaatagtgatctctctaagaagctcatacttggatatgcaaaacaaacctcgagtcttaagccgaaacatgaattcgtaccatgggtcacaatcaacagcaaaccactctatacgaaactagatgatttggtgggtcaagtctgcaaagcttacaaaggaaagactccactcccaatagactgtagttccgctgccttgtccgagaggaaaatgtcgaatgttgaattctcctatgtagatgaaattatcagtcactaagttaataataaaactactaagatgaataatt

SEQ ID NO: 50664 - protein, 229 aa, Arabidopsis thaliana
  peptide (1)..(229): Ceres Seq. ID no. 13588257
MVSPSFSTKLVFFACFVLFTFSHKLVTGESDKVELNLYYESLCPGCQSFIVDELVKVFDSDLDTITDVKLVPFGNAKVSNNLTVICQHGEEECKLNALEACVINTLPNPKSQYKFIRCVENNTDNWESSCLKGYGNEKAINDCYNSDLSKKLILGYAKQTSSLKPKHEFVPWVTINSKPLYTKLDDLVGQVCKAYKGKTPLPIDCSSAALSERKMSNVEFSYVDEIISH

SEQ ID NO: 50665 - DNA, 860 bp, Arabidopsis thaliana; identical to SEQ ID NO: 31045
  misc_feature (1)..(860): Ceres Seq. ID no. 13591956
  misc_feature (1)..(860): Ortholog of  Ceres SEQ ID NO 13638595 as cited in SEQ ID NO 52050
  misc_feature (1)..(860): Ortholog of  Ceres SEQ ID NO 14301870 as cited in SEQ ID NO 61501
  misc_feature (1)..(860): Ortholog of  Ceres SEQ ID NO 12583993 as cited in SEQ ID NO 68098

SEQ ID NO: 50666 - protein, 208 aa, Arabidopsis thaliana; identical to SEQ ID NO: 23207
  peptide (1)..(208): Ceres Seq. ID no. 13591957

SEQ ID NO: 50667 - protein, 110 aa, Arabidopsis thaliana; identical to SEQ ID NO: 31047
  peptide (1)..(110): Ceres Seq. ID no. 13591958

SEQ ID NO: 50668 - DNA, 1889 bp, Arabidopsis thaliana; identical to SEQ ID NO: 50651
  misc_feature (1)..(1889): Ceres Seq. ID no. 12591570
  misc_feature (1)..(1889): Ortholog of  Ceres SEQ ID NO 14302588 as cited in SEQ ID NO 0

SEQ ID NO: 50669 - protein, 585 aa, Arabidopsis thaliana; identical to SEQ ID NO: 50652
  peptide (1)..(585): Ceres Seq. ID no. 12591571

SEQ ID NO: 50670 - protein, 579 aa, Arabidopsis thaliana; identical to SEQ ID NO: 50653
  peptide (1)..(579): Ceres Seq. ID no. 12591572

SEQ ID NO: 50671 - protein, 460 aa, Arabidopsis thaliana; identical to SEQ ID NO: 50654
  peptide (1)..(460): Ceres Seq. ID no. 12591573

SEQ ID NO: 50672 - DNA, 1136 bp, Arabidopsis thaliana
  misc_feature (1)..(1136): Ceres Seq. ID no. 13592427
  misc_feature (1)..(1136): Ortholog of  Ceres SEQ ID NO 13597389 as cited in SEQ ID NO 63426
  misc_feature (1)..(1136): Ortholog of  Ceres SEQ ID NO 13595998 as cited in SEQ ID NO 68161
  misc_feature (1)..(1136): Ortholog of  Ceres SEQ ID NO 15180463 as cited in SEQ ID NO 0
gatctttagctttaccaatgaatccaatcctatcttctttgtttgctctctctttgctttcttcactatcaccatcaacacatgcccatcaatgccatttcccagcaatctttaactttggtgactctaactccgataccggcggtctctccgctgcttttggccaagctggtcctcctcacggctcttccttcttcggctcacccgcgggacgatactgcgatggtcgcctcgtcattgacttcatagcggagagtcttggattaccatatctaagcgcgtttctagactccgttggttcaaacttcagccacggcgctaacttcgctaccgcgggatctccgataagagctcttaactctactctacgtcaaagtggattcagcccattttcactcgatgtacagttcgtacaattctataacttccacaacagatctcaaactgttcgtagtcgtggaggagtctacaagacaatgttgcctgaatccgacagcttctcaaaagctttgtacacttttgacattggtcagaacgatctcacagcaggttacttcgctaataaaaccgtagaacaagttgaaaccgaagttcctgagatcataagtcagttcatgaatgctatcaagaatatttatggacaaggagggagatacttctggattcataacactggacctattggttgtttagcttatgtgattgaacggtttccgaataaagcatcagactttgattcacatggatgtgtttctcctttgaaccacttagctcaacaattcaatcacgctttgaaacaagctgtgatcgagctaagaagttctctatctgaagcagccatcacttatgtagatgtctactctctcaagcatgagttgtttgttcacgctcagggtcacgggtttaagggatcgttggtttcgtgttgtggacatggagggaagtataactacaacaagggtatcggatgtgggatgaagaagattgtgaaaggtaaagaggtttacattggaaagccgtgcgatgagcctgataaggctgttgtgtgggacggtgtacacttcacgcaggctgctaacaaattcattttcgataagattgctccagggttaagcaaggcctgtaaaaggcagtga

SEQ ID NO: 50673 - protein, 377 aa, Arabidopsis thaliana
  peptide (1)..(377): Ceres Seq. ID no. 13592428
SLALPMNPILSSLFALSLLSSLSPSTHAHQCHFPAIFNFGDSNSDTGGLSAAFGQAGPPHGSSFFGSPAGRYCDGRLVIDFIAESLGLPYLSAFLDSVGSNFSHGANFATAGSPIRALNSTLRQSGFSPFSLDVQFVQFYNFHNRSQTVRSRGGVYKTMLPESDSFSKALYTFDIGQNDLTAGYFANKTVEQVETEVPEIISQFMNAIKNIYGQGGRYFWIHNTGPIGCLAYVIERFPNKASDFDSHGCVSPLNHLAQQFNHALKQAVIELRSSLSEAAITYVDVYSLKHELFVHAQGHGFKGSLVSCCGHGGKYNYNKGIGCGMKKIVKGKEVYIGKPCDEPDKAVVWDGVHFTQAANKFIFDKIAPGLSKACKRQ

SEQ ID NO: 50674 - protein, 372 aa, Arabidopsis thaliana
  peptide (1)..(372): Ceres Seq. ID no. 13592429
MNPILSSLFALSLLSSLSPSTHAHQCHFPAIFNFGDSNSDTGGLSAAFGQAGPPHGSSFFGSPAGRYCDGRLVIDFIAESLGLPYLSAFLDSVGSNFSHGANFATAGSPIRALNSTLRQSGFSPFSLDVQFVQFYNFHNRSQTVRSRGGVYKTMLPESDSFSKALYTFDIGQNDLTAGYFANKTVEQVETEVPEIISQFMNAIKNIYGQGGRYFWIHNTGPIGCLAYVIERFPNKASDFDSHGCVSPLNHLAQQFNHALKQAVIELRSSLSEAAITYVDVYSLKHELFVHAQGHGFKGSLVSCCGHGGKYNYNKGIGCGMKKIVKGKEVYIGKPCDEPDKAVVWDGVHFTQAANKFIFDKIAPGLSKACKRQ

SEQ ID NO: 50675 - protein, 219 aa, Arabidopsis thaliana
  peptide (1)..(219): Ceres Seq. ID no. 13592430
MLPESDSFSKALYTFDIGQNDLTAGYFANKTVEQVETEVPEIISQFMNAIKNIYGQGGRYFWIHNTGPIGCLAYVIERFPNKASDFDSHGCVSPLNHLAQQFNHALKQAVIELRSSLSEAAITYVDVYSLKHELFVHAQGHGFKGSLVSCCGHGGKYNYNKGIGCGMKKIVKGKEVYIGKPCDEPDKAVVWDGVHFTQAANKFIFDKIAPGLSKACKRQ

SEQ ID NO: 50676 - DNA, 1005 bp, Arabidopsis thaliana
  misc_feature (1)..(1005): Ceres Seq. ID no. 13601843
  misc_feature (1)..(1005): Ortholog of  Ceres SEQ ID NO 14310764 as cited in SEQ ID NO 55235
  misc_feature (1)..(1005): Ortholog of  Ceres SEQ ID NO 15171141 as cited in SEQ ID NO 58212
agatagagagaaagacgcttctggtcagttttcgttaaacccgccggagaaactagcgactacggtggtcgaacccgtctgacgtcgtagaattcatcgtaatcttcacttcctttcttccccgacaaaatcatcgatctgtgtttgccaatcagattcaccggaacttctagttaggacgattgtgaaaaatgtcgtcatcgttagaacaagaaatcttcttacagtggggaaacaagaagagattgagatgtcttagagccaaagccaaaaagatctctcgttctaaaaactcttctcgctttctaggtcaagataccgtcctccttcaatcctctagattctccagaggatcagaaggagcaatcctcagatctggactaccagatcgccggagaccgtctccggagaaagaggagaggtattatactacgagaggtgtagtggataacattgggaaagattgtttagatggaaacatcaatggagaagatagcaacaacaaggaagagagtatgtggcctaagctctttataacattatcaaacaaagagaaagaagaagatttcatggctatgaaaggttgcaaaccttctcataggcctaagaagagagctaaactcatccaaagaagcttacttttggtgagtcctggaacatggttggctgatttgtgccctgatagatacgatgttagggtgaagaagagctctaagaagaggcgagcaagagggctaaaagccatgggaaacatggagactgattcagattgacaagttttaagattagtttactagaaatgtttgcgtattgatttaagctaactttcgtgggtttccttaagcaatctttaagaatgtattttagatgaaattattcggttgagcactttgaacacaaggatatatcatttctttgtgacaatgtatgtacctgttgtaacttgtaaccctatcctaatctattgtttcagataatgtactttagtcctatttggcggcactt

SEQ ID NO: 50677 - protein, 193 aa, Arabidopsis thaliana
  peptide (1)..(193): Ceres Seq. ID no. 13601844
MSSSLEQEIFLQWGNKKRLRCLRAKAKKISRSKNSSRFLGQDTVLLQSSRFSRGSEGAILRSGLPDRRRPSPEKEERYYTTRGVVDNIGKDCLDGNINGEDSNNKEESMWPKLFITLSNKEKEEDFMAMKGCKPSHRPKKRAKLIQRSLLLVSPGTWLADLCPDRYDVRVKKSSKKRRARGLKAMGNMETDSD

SEQ ID NO: 50678 - DNA, 1347 bp, Arabidopsis thaliana
  misc_feature (1)..(1347): Ceres Seq. ID no. 15168791
  misc_feature (1)..(1347): Ortholog of  Ceres SEQ ID NO 15169607 as cited in SEQ ID NO 69301
gaccgagaaaacagagaacgttaagaatcattgcttttctcgagaaaataatatttttaattgaatcgagaaactcttcaaagttgaattaagaagaatattacctcaattgagatttgagagacacgcatagagagattgattattgcatcgaatcaagcttggtttgttagtaatggcgggaatagctttagttttagatctactgaagaaatctcaatctaagaacactctccactcatcttccttctattccgcctccgccgccgctgtttctgctgccgcctctgctccttttgcgtctaggtttctcttcggttcttttgagcctagagttgcgtattgtgatgctgctgctgcaatagatgatgattaccttggtgctatacggaaaatgtctgcggatgttttgcagcgtcaaccccttgcgtatatttctaggtccaaggaatacaatatccagccaaaaccagttctctcggcctttgagttcagggcacttgcaatgactacagtgagatcccttttgatgttttatttgcctcttttggagcctaaaacggcttcagaggatgatgatgatttcctaaacaatgctgcagaagaaaaccgccacacagacttgattgttcctcttaaaaagtcagcaaagcaaattgcccgtgagaccacagttgtgaccactcggagagtccttgaaaggctggctctgagttatgtctcacagcgtatggcatggaaacttctaaaggatgtgcctcagtcggctttacgcaaggctcagagagggttgccgacacatgtatatatctttaaagtcagccaaacaactcttagaggtcacttcctgggaatcgcagcatcatgggtagttcaagtaggcattgaaatctacagatgtgtgttcccgaatgttaaacccgaggaagaagaagaagaggagaaagtcgagatatcacagcaagctaaggatctcggaaacaaagttgtgggtatcacagtacgatgtggcgcgtccttagtatttgctgccattggagccgggatatgttcttgccttatccgtccctccacgggccaatggatcggttgcgcgctgggagacttggctggtccgatggttgtttcggtttgcctgcagaagactcttcaagctgattattaagttcttgtgtggaaattgaattcttctacttgaatcttgatgatccaaatgaaatcatagagcttgttttttgtttctgaaatttcttattgtcttcactgaaccttaaaaacattgatcaatagatttctcaaaatgtacctacttttgacaacagcacaataagtcaggtatttattttc

SEQ ID NO: 50679 - protein, 329 aa, Arabidopsis thaliana; identical to SEQ ID NO: 49026
  peptide (1)..(329): Ceres Seq. ID no. 15168792

SEQ ID NO: 50680 - protein, 256 aa, Arabidopsis thaliana; identical to SEQ ID NO: 49027
  peptide (1)..(256): Ceres Seq. ID no. 15168793

SEQ ID NO: 50681 - protein, 219 aa, Arabidopsis thaliana; identical to SEQ ID NO: 49028
  peptide (1)..(219): Ceres Seq. ID no. 15168794

SEQ ID NO: 50682 - DNA, 1537 bp, Arabidopsis thaliana; identical to SEQ ID NO: 49974
  misc_feature (1)..(1537): Ceres Seq. ID no. 13647981
  misc_feature (1)..(1537): Ortholog of  Ceres SEQ ID NO 13595199 as cited in SEQ ID NO 59815
  misc_feature (1)..(1537): Ortholog of  Ceres SEQ ID NO 13598276 as cited in SEQ ID NO 69311

SEQ ID NO: 50683 - protein, 376 aa, Arabidopsis thaliana; identical to SEQ ID NO: 49975
  peptide (1)..(376): Ceres Seq. ID no. 13647982

SEQ ID NO: 50684 - DNA, 687 bp, Arabidopsis thaliana
  misc_feature (1)..(687): Ceres Seq. ID no. 6429691
  misc_feature (1)..(687): Ortholog of  Ceres SEQ ID NO 12388689 as cited in SEQ ID NO 0
tggtggacctgacatcgtgttcgttcccgggagaaaggattcaaatgtctgccccaaggaaggaagacttcctgatgccaaacaaggtttccaacatctcagagatgtcttctaccgcatgggactatctgataaggatattgtggcactctcagggggtcatactctgggaagggctcacccagagaggtcaggctttgatggaccatggacccaagagccgctgaagtttgacaactcctacttcgtggaactgctgaaaggagaatcagagggcttgttgaaacttcaactgacaagaccttattggaagacccggagttccgtcgtcttgttgagctttatgcaaaggatgaaagatgcattcttagagactacgcggaatccacaaagaaactctnttgagctttggtttcaaccccaactcctcaacaggcaaaagcagtttgcagacagcaccattctggcacaaaatgccttccggggttcanttgctgctgcgggtggtggcatttggttcttttacgaaatcccgaagaaggtgaagtaaacnaaataggaagtaaacaccaaacaacgatgctcttatttgggtttaaaaaaactattaatcgctatcnatctattttgctgctacaanantctaactttttgaatccccattcncttgttaatagtaaaaaagtt

SEQ ID NO: 50685 - protein, 182 aa, Arabidopsis thaliana
  peptide (1)..(182): Ceres Seq. ID no. 6429692
  misc_feature (134)..(134): Xaa is any aa, unknown or other
  misc_feature (164)..(164): Xaa is any aa, unknown or other
GGPDIVFVPGRKDSNVCPKEGRLPDAKQGFQHLRDVFYRMGLSDKDIVALSGGHTLGRAHPERSGFDGPWTQEPLKFDNSYFVELLKGESEGLLKLQLTRPYWKTRSSVVLLSFMQRMKDAFLETTRNPQRNSXELWFQPQLLNRQKQFADSTILAQNAFRGSXAAAGGGIWFFYEIPKKVK

SEQ ID NO: 50686 - protein, 143 aa, Arabidopsis thaliana
  peptide (1)..(143): Ceres Seq. ID no. 6429693
  misc_feature (95)..(95): Xaa is any aa, unknown or other
  misc_feature (125)..(125): Xaa is any aa, unknown or other
MGLSDKDIVALSGGHTLGRAHPERSGFDGPWTQEPLKFDNSYFVELLKGESEGLLKLQLTRPYWKTRSSVVLLSFMQRMKDAFLETTRNPQRNSXELWFQPQLLNRQKQFADSTILAQNAFRGSXAAAGGGIWFFYEIPKKVK

SEQ ID NO: 50687 - DNA, 1399 bp, Arabidopsis thaliana
  misc_feature (1)..(1399): Ceres Seq. ID no. 12558817
  misc_feature (1)..(1399): Ortholog of  Ceres SEQ ID NO 12593464 as cited in SEQ ID NO 69039
atggctaattcctcaatcgtagctcttcttcttctctttgttatcgctagttccgtcaatggaggagatcaagagtatccaaatcaatatctaacagaagctttaggtgataaagaatggttagtgtctgtaagaagacaaatccatgaaaacccagaactccttttcgagttacataaaacaagtgctctgattcgtcgcgagcttgatgaattaggggtttcttattcttacccggttgcgaaaaccgggatcgtagctcaaatcggatccggttatcctccggttgttgctctccgtgctgatatggatgctcttcccttacaagaacttgttgagtgggatcataagagcaaaatcgatggaaaaatgcatgcttgtggtcatgattctcataccactatgctccttggtgctgctaaattgcttagcaaacgcaaacgtatgctcaatggaacagtgaggcttctttttcaaccagcagaagaaggtggtgcaggtgcttttcatatgataaaagaaggtgctttgggtgattctgaagcaatatttgggatgcatgttcatactggcttacctacaggagaattagcaacaatctcgggtcctgctttggcatccacaagcattttcagtgtaagaatgagtggtaaatcacccgcttcttcggagacctattcttgtgttgatccggtgttggctgcatcatctaccatcttagcattgcaacttattatctccagagaagtagatcctctcttaagccatgtgctctctgttacatttatgaaaagtggcggttctgagtttgatgtgattccggcatatgtagaatttgggggaactttgaggagtcttacaaccaatggcatcaactggttgataaagcggttgaaagaggtggttgaaggacaagctgaagtacaaagatgcaaagcggatatagatatgcatgaagacgatcatcctatgtatccagcaacagtgaacgatcacaagctacacgaattcactgaaaaggttttgaaactcttgcttggacccgagaaggtgaaaccggctaacaaggtaatggcgggtgaggattttgctttctatcaacaaaaaatacccggttactacataggaatcggtataagaaacgaagaaatcggttctgtgcgttcggttcattcgccttatttcttcctcgacgagaatgtgcttcccattggatcagcaacgtttgctgccttagctgaaatgtatctacaagagcatcagaatcaaactaagtctggagattgagaaagttactaaacaaaagcttagttaattgccttcacaagtaaatgctattgtttttataaaatgcaatttttacaacttcaagaaatcaagttgtattatataaaattgt

SEQ ID NO: 50688 - protein, 428 aa, Arabidopsis thaliana
  peptide (1)..(428): Ceres Seq. ID no. 12558818
MANSSIVALLLLFVIASSVNGGDQEYPNQYLTEALGDKEWLVSVRRQIHENPELLFELHKTSALIRRELDELGVSYSYPVAKTGIVAQIGSGYPPVVALRADMDALPLQELVEWDHKSKIDGKMHACGHDSHTTMLLGAAKLLSKRKRMLNGTVRLLFQPAEEGGAGAFHMIKEGALGDSEAIFGMHVHTGLPTGELATISGPALASTSIFSVRMSGKSPASSETYSCVDPVLAASSTILALQLIISREVDPLLSHVLSVTFMKSGGSEFDVIPAYVEFGGTLRSLTTNGINWLIKRLKEVVEGQAEVQRCKADIDMHEDDHPMYPATVNDHKLHEFTEKVLKLLLGPEKVKPANKVMAGEDFAFYQQKIPGYYIGIGIRNEEIGSVRSVHSPYFFLDENVLPIGSATFAALAEMYLQEHQNQTKSGD

SEQ ID NO: 50689 - protein, 326 aa, Arabidopsis thaliana
  peptide (1)..(326): Ceres Seq. ID no. 12558819
MDALPLQELVEWDHKSKIDGKMHACGHDSHTTMLLGAAKLLSKRKRMLNGTVRLLFQPAEEGGAGAFHMIKEGALGDSEAIFGMHVHTGLPTGELATISGPALASTSIFSVRMSGKSPASSETYSCVDPVLAASSTILALQLIISREVDPLLSHVLSVTFMKSGGSEFDVIPAYVEFGGTLRSLTTNGINWLIKRLKEVVEGQAEVQRCKADIDMHEDDHPMYPATVNDHKLHEFTEKVLKLLLGPEKVKPANKVMAGEDFAFYQQKIPGYYIGIGIRNEEIGSVRSVHSPYFFLDENVLPIGSATFAALAEMYLQEHQNQTKSGD

SEQ ID NO: 50690 - protein, 305 aa, Arabidopsis thaliana
  peptide (1)..(305): Ceres Seq. ID no. 12558820
MHACGHDSHTTMLLGAAKLLSKRKRMLNGTVRLLFQPAEEGGAGAFHMIKEGALGDSEAIFGMHVHTGLPTGELATISGPALASTSIFSVRMSGKSPASSETYSCVDPVLAASSTILALQLIISREVDPLLSHVLSVTFMKSGGSEFDVIPAYVEFGGTLRSLTTNGINWLIKRLKEVVEGQAEVQRCKADIDMHEDDHPMYPATVNDHKLHEFTEKVLKLLLGPEKVKPANKVMAGEDFAFYQQKIPGYYIGIGIRNEEIGSVRSVHSPYFFLDENVLPIGSATFAALAEMYLQEHQNQTKSGD

SEQ ID NO: 50691 - DNA, 860 bp, Arabidopsis thaliana; identical to SEQ ID NO: 31045
  misc_feature (1)..(860): Ceres Seq. ID no. 13591956
  misc_feature (1)..(860): Ortholog of  Ceres SEQ ID NO 13638595 as cited in SEQ ID NO 52050
  misc_feature (1)..(860): Ortholog of  Ceres SEQ ID NO 14301870 as cited in SEQ ID NO 61501
  misc_feature (1)..(860): Ortholog of  Ceres SEQ ID NO 12583993 as cited in SEQ ID NO 68098

SEQ ID NO: 50692 - protein, 208 aa, Arabidopsis thaliana; identical to SEQ ID NO: 23207
  peptide (1)..(208): Ceres Seq. ID no. 13591957

SEQ ID NO: 50693 - protein, 110 aa, Arabidopsis thaliana; identical to SEQ ID NO: 31047
  peptide (1)..(110): Ceres Seq. ID no. 13591958

SEQ ID NO: 50694 - DNA, 1701 bp, Arabidopsis thaliana; identical to SEQ ID NO: 47297
  misc_feature (1)..(1701): Ceres Seq. ID no. 13592655
  misc_feature (1)..(1701): Ortholog of  Ceres SEQ ID NO 15176911 as cited in SEQ ID NO 54868
  misc_feature (1)..(1701): Ortholog of  Ceres SEQ ID NO 13596433 as cited in SEQ ID NO 68721
  misc_feature (1)..(1701): Ortholog of  Ceres SEQ ID NO 13599169 as cited in SEQ ID NO 0

SEQ ID NO: 50695 - protein, 445 aa, Arabidopsis thaliana; identical to SEQ ID NO: 47298
  peptide (1)..(445): Ceres Seq. ID no. 13592656

SEQ ID NO: 50696 - protein, 411 aa, Arabidopsis thaliana; identical to SEQ ID NO: 47299
  peptide (1)..(411): Ceres Seq. ID no. 13592657

SEQ ID NO: 50697 - protein, 408 aa, Arabidopsis thaliana; identical to SEQ ID NO: 47300
  peptide (1)..(408): Ceres Seq. ID no. 13592658

SEQ ID NO: 50698 - DNA, 2028 bp, Arabidopsis thaliana; identical to SEQ ID NO: 37075
  misc_feature (1)..(2028): Ceres Seq. ID no. 12559842
  misc_feature (1)..(2028): Ortholog of  Ceres SEQ ID NO 14313670 as cited in SEQ ID NO 54491

SEQ ID NO: 50699 - protein, 589 aa, Arabidopsis thaliana; identical to SEQ ID NO: 37076
  peptide (1)..(589): Ceres Seq. ID no. 12559843

SEQ ID NO: 50700 - protein, 578 aa, Arabidopsis thaliana; identical to SEQ ID NO: 37077
  peptide (1)..(578): Ceres Seq. ID no. 12559844

SEQ ID NO: 50701 - protein, 463 aa, Arabidopsis thaliana; identical to SEQ ID NO: 37078
  peptide (1)..(463): Ceres Seq. ID no. 12559845

SEQ ID NO: 50702 - DNA, 1728 bp, Arabidopsis thaliana
  misc_feature (1)..(1728): Ceres Seq. ID no. 13575276
  misc_feature (1)..(1728): Ortholog of  Ceres SEQ ID NO 13582619 as cited in SEQ ID NO 56520
  misc_feature (1)..(1728): Ortholog of  Ceres SEQ ID NO 13660872 as cited in SEQ ID NO 60830
  misc_feature (1)..(1728): Ortholog of  Ceres SEQ ID NO 12616221 as cited in SEQ ID NO 63291
gagaaaaaaaagcagagagtgtattcaaagtcggaaagaaaccctaaagaagaggattatgggtgctgtatcgatggagtcgcttcctttaggtttcagattcagacctaccgatgaagagctcgtcaatcactacctccgtctcaagatcaacggacgtcactccgatgtccgtgtcatccctgatatcgatgtctgcaaatgggaaccttgggatcttcctgctctctcggtgattaagacggatgatccagagtggttctttttctgccctcgtgatcggaaataccctaatggtcatcgctctaacagagcaactgactctggctattggaaagctactggtaaagatcgtagcatcaagtctaagaagactttaatcggtatgaagaagactcttgtcttctatcgtggacgagctcctaaaggtgagcggactaattggattatgcacgagtatcgtcccactcttaaggatcttgatggcacttcccctggccaaagcccttacgttctttgtcgcctcttccacaagcctgatgatcgggttaatggtgtcaagtccgatgaagcagcttttacggccagcaacaaatactcacctgatgatacatcatctgatcttgttcaagaaacaccttcctctgatgctgctgttgagaaaccatcagattattcaggtggatgcggttatgctcatagtaatagtaccgcagatgggacaatgattgaggcacctgaagagaatctttggttatcttgtgaccttgaagatcaaaaggcaccactaccgtgtatggattctatatatgctggtgatttcagttacgatgagattggattccaatttcaagatggtaccagcgaaccagatgtatcactaacagaattgttggaggaggtgttcaataaccctgatgacttctcttgcgaggaatcgatcagtcgagagaatccagcagtctcaccaaatgggatattttcatctgctaaaatgctgcagtctgcagcaccagaggatgctttcttcaacgacttcatggctttcactgatacagatgctgagatggcgcaattgcagtatggttcagaaggtggagcttctggttggccaagtgacactaattcatactatagtgatttggttcagcaagagcaaatgatcaatcataacacagagaacaacctcacagaagggagagggataaagatccgggctcgacagcctcagaaccggcagagtacaggattgataaaccagggtattgctccaaggagaatccgtctgcagctgcagtctaactctgaagtaaaagaacgagaggaggtgaatgaaggacacactgttattcccgaggccaaagaagctgcagctaaatactcagagaagagtggttctttggttaaacctcaaataaagctcagggcgcggggaactataggccaagtaaaaggagagagatttgcagacgacgaggtacaggtgcagagcagaaagagacgaggagggaagcgatggaaggtggttgcaacggtaatggtggctgtgatggttggggtagggatgggtatatggaggacactggtgagttcatgacacatgagacacaaagagagagagagagagaatcaaatgtagtttaatgtaattagggatgatgcaatgttagcatgtttgtgtgttgtaacttaaaaacttatttaggaatctgataaaagttactgttg

SEQ ID NO: 50703 - protein, 531 aa, Arabidopsis thaliana
  peptide (1)..(531): Ceres Seq. ID no. 13575277
RKKSRECIQSRKETLKKRIMGAVSMESLPLGFRFRPTDEELVNHYLRLKINGRHSDVRVIPDIDVCKWEPWDLPALSVIKTDDPEWFFFCPRDRKYPNGHRSNRATDSGYWKATGKDRSIKSKKTLIGMKKTLVFYRGRAPKGERTNWIMHEYRPTLKDLDGTSPGQSPYVLCRLFHKPDDRVNGVKSDEAAFTASNKYSPDDTSSDLVQETPSSDAAVEKPSDYSGGCGYAHSNSTADGTMIEAPEENLWLSCDLEDQKAPLPCMDSIYAGDFSYDEIGFQFQDGTSEPDVSLTELLEEVFNNPDDFSCEESISRENPAVSPNGIFSSAKMLQSAAPEDAFFNDFMAFTDTDAEMAQLQYGSEGGASGWPSDTNSYYSDLVQQEQMINHNTENNLTEGRGIKIRARQPQNRQSTGLINQGIAPRRIRLQLQSNSEVKEREEVNEGHTVIPEAKEAAAKYSEKSGSLVKPQIKLRARGTIGQVKGERFADDEVQVQSRKRRGGKRWKVVATVMVAVMVGVGMGIWRTLVSS

SEQ ID NO: 50704 - protein, 512 aa, Arabidopsis thaliana
  peptide (1)..(512): Ceres Seq. ID no. 13575278
MGAVSMESLPLGFRFRPTDEELVNHYLRLKINGRHSDVRVIPDIDVCKWEPWDLPALSVIKTDDPEWFFFCPRDRKYPNGHRSNRATDSGYWKATGKDRSIKSKKTLIGMKKTLVFYRGRAPKGERTNWIMHEYRPTLKDLDGTSPGQSPYVLCRLFHKPDDRVNGVKSDEAAFTASNKYSPDDTSSDLVQETPSSDAAVEKPSDYSGGCGYAHSNSTADGTMIEAPEENLWLSCDLEDQKAPLPCMDSIYAGDFSYDEIGFQFQDGTSEPDVSLTELLEEVFNNPDDFSCEESISRENPAVSPNGIFSSAKMLQSAAPEDAFFNDFMAFTDTDAEMAQLQYGSEGGASGWPSDTNSYYSDLVQQEQMINHNTENNLTEGRGIKIRARQPQNRQSTGLINQGIAPRRIRLQLQSNSEVKEREEVNEGHTVIPEAKEAAAKYSEKSGSLVKPQIKLRARGTIGQVKGERFADDEVQVQSRKRRGGKRWKVVATVMVAVMVGVGMGIWRTLVSS

SEQ ID NO: 50705 - protein, 507 aa, Arabidopsis thaliana
  peptide (1)..(507): Ceres Seq. ID no. 13575279
MESLPLGFRFRPTDEELVNHYLRLKINGRHSDVRVIPDIDVCKWEPWDLPALSVIKTDDPEWFFFCPRDRKYPNGHRSNRATDSGYWKATGKDRSIKSKKTLIGMKKTLVFYRGRAPKGERTNWIMHEYRPTLKDLDGTSPGQSPYVLCRLFHKPDDRVNGVKSDEAAFTASNKYSPDDTSSDLVQETPSSDAAVEKPSDYSGGCGYAHSNSTADGTMIEAPEENLWLSCDLEDQKAPLPCMDSIYAGDFSYDEIGFQFQDGTSEPDVSLTELLEEVFNNPDDFSCEESISRENPAVSPNGIFSSAKMLQSAAPEDAFFNDFMAFTDTDAEMAQLQYGSEGGASGWPSDTNSYYSDLVQQEQMINHNTENNLTEGRGIKIRARQPQNRQSTGLINQGIAPRRIRLQLQSNSEVKEREEVNEGHTVIPEAKEAAAKYSEKSGSLVKPQIKLRARGTIGQVKGERFADDEVQVQSRKRRGGKRWKVVATVMVAVMVGVGMGIWRTLVSS

SEQ ID NO: 50706 - DNA, 3293 bp, Arabidopsis thaliana; identical to SEQ ID NO: 50448
  misc_feature (1)..(3293): Ceres Seq. ID no. 13647822
  misc_feature (1)..(3293): Ortholog of  Ceres SEQ ID NO 13646569 as cited in SEQ ID NO 20745

SEQ ID NO: 50707 - protein, 948 aa, Arabidopsis thaliana; identical to SEQ ID NO: 50449
  peptide (1)..(948): Ceres Seq. ID no. 13647823

SEQ ID NO: 50708 - protein, 884 aa, Arabidopsis thaliana; identical to SEQ ID NO: 50450
  peptide (1)..(884): Ceres Seq. ID no. 13647824

SEQ ID NO: 50709 - protein, 876 aa, Arabidopsis thaliana; identical to SEQ ID NO: 50451
  peptide (1)..(876): Ceres Seq. ID no. 13647825

SEQ ID NO: 50710 - DNA, 2418 bp, Arabidopsis thaliana
  misc_feature (1)..(2418): Ceres Seq. ID no. 12559742
  misc_feature (1)..(2418): Ortholog of  Ceres SEQ ID NO 15168900 as cited in SEQ ID NO 217
gtggttcaacctctatctctctctctttctgccatgaaaatgcaaagccaaatgtaatagttagagagggagaaaccaagaactgaaagaccatgacttccaacagaagcaacctcctgttctcattagtcctcttccactttctttttgtccccacacaactccaagctcttaacactgatggtgttcttctgcttactttcaaatactccatcctcactgaccctctctctgttctacgcaattggaactatgatgatgcaacaccatgcttgtggacaggtgtcacatgtacagagcttgggaagcctaacacaccagacatgttcagagtcacaagcttggtacttcccaacaaacaccttttgggttccatcactccggacttgttctcgattccatatctaaggatcttggatctgtctagcaatttcttcaacgggtcactcccggactcggtgttcaacgccactgagcttcagagtatctcccttggaagcaacaatctctctggtgatttgcccaagagtgtcaacagtgtgactaatctccagctcttgaatctctcagctaacgcatttactggcgaaattccgctcaacatctcacttctgaagaatctaacggtcgtttccttgtcaaaaaacaccttttcaggtgatattccaagtggtttcgaagcagcacagattcttgatctttcttcaaatcttctcaacggctctcttcccaaggatttgggaggaaaaagcctgcattacttgaacttatcacacaacaaagtcctcggcgagatttctccaaattttgcagagaagtttccagcaaatgccacagtcgatctctcctttaacaacctcacaggcccaatcccaagttccctttctttacttaaccaaaaggctgagtctttttccggtaaccaagagctttgtgggaagccattgaagatcctttgttcaattccttccactctttcaaaccctccaaatatctctgaaactacttcaccagcaatagcagttaaaccaagaagtacagctccaataaaccctttgacagaaaaaccaaatcagacaggaaaaagcaagctaaagccaagcaccattgccgcaatcacagttgcagatatagttggtctagctttcattggtctactcgtgctctacgtataccaagtcaggaaacgcagaaggtacccagaatctagcaaatttagcttcttcaagttctgtctggagaaaaacgaagccaagaaatcgaaaccaagcaccactgaggtcacagtcccagaatcaccagaggccaaaacgacatgcggttcatgcattatcttgaccggaggaaggtacgacgagacatcgacatcagagagcgacgtagagaatcaacaaaccgttcaggcattcactcgaacagatggtgggcaactgaagcagagctcccaaactcaattggttacagtcgacggcgagactcggctagatctagacactctgctaaaggcatctgcttacatattgggaaccaccggaaccgggatcgtgtataaggcggtgctggagaacggcacggcattcgcggtgaggcggatcgagacggagagctgtgcggctgcgaaacccaaggaattcgagagggaggttcgtgccatcgctaagcttcgtcacccaaatctcgtcagaattcgtgggttctgctggggagacgacgagaaacttctcatttccgattatgttcccaatggcagcctcctctgtttcttcaccgccactaaggcaagctcaagctcatcttcttcgtcgtcattacaaaaccctcttacttttgaagcacggctcaagatagcaagaggaatggctagaggactatcttacatcaatgagaagaaacaagtgcacggtaacatcaagcccaataacattctcttgaacgctgagaatgagcccatcatcaccgatttagggctagaccgcctcatgacaccagcgcgtgaatctcacaccactggaccaacttcgagctcaccgtaccagccaccggaatggtccacaagcctgaaaccaaaccctaaatgggacgtttactcctttggcgtcatacttttagaacttctcacaagcaaagtgttctcggtagatcatgatatagatcagttctcaaacttatccgactctgcagcggaagagaatggccggttcttgaggttaatcgacggtgcaattaggagtgatgtcgctcgccatgaggatgctgcaatggcgtgctttaggttagggattgaatgtgtctcttccttgcctcagaagcgaccatccatgaaagaattggtgcaagtgttggagaaaatttgtgttttagtttgatttcttaattcgtatagcctaagtcgttttggcaatatagaaagttatgtgt

SEQ ID NO: 50711 - protein, 757 aa, Arabidopsis thaliana
  peptide (1)..(757): Ceres Seq. ID no. 12559743
MTSNRSNLLFSLVLFHFLFVPTQLQALNTDGVLLLTFKYSILTDPLSVLRNWNYDDATPCLWTGVTCTELGKPNTPDMFRVTSLVLPNKHLLGSITPDLFSIPYLRILDLSSNFFNGSLPDSVFNATELQSISLGSNNLSGDLPKSVNSVTNLQLLNLSANAFTGEIPLNISLLKNLTVVSLSKNTFSGDIPSGFEAAQILDLSSNLLNGSLPKDLGGKSLHYLNLSHNKVLGEISPNFAEKFPANATVDLSFNNLTGPIPSSLSLLNQKAESFSGNQELCGKPLKILCSIPSTLSNPPNISETTSPAIAVKPRSTAPINPLTEKPNQTGKSKLKPSTIAAITVADIVGLAFIGLLVLYVYQVRKRRRYPESSKFSFFKFCLEKNEAKKSKPSTTEVTVPESPEAKTTCGSCIILTGGRYDETSTSESDVENQQTVQAFTRTDGGQLKQSSQTQLVTVDGETRLDLDTLLKASAYILGTTGTGIVYKAVLENGTAFAVRRIETESCAAAKPKEFEREVRAIAKLRHPNLVRIRGFCWGDDEKLLISDYVPNGSLLCFFTATKASSSSSSSSSLQNPLTFEARLKIARGMARGLSYINEKKQVHGNIKPNNILLNAENEPIITDLGLDRLMTPARESHTTGPTSSSPYQPPEWSTSLKPNPKWDVYSFGVILLELLTSKVFSVDHDIDQFSNLSDSAAEENGRFLRLIDGAIRSDVARHEDAAMACFRLGIECVSSLPQKRPSMKELVQVLEKICVLV

SEQ ID NO: 50712 - protein, 680 aa, Arabidopsis thaliana
  peptide (1)..(680): Ceres Seq. ID no. 12559744
MFRVTSLVLPNKHLLGSITPDLFSIPYLRILDLSSNFFNGSLPDSVFNATELQSISLGSNNLSGDLPKSVNSVTNLQLLNLSANAFTGEIPLNISLLKNLTVVSLSKNTFSGDIPSGFEAAQILDLSSNLLNGSLPKDLGGKSLHYLNLSHNKVLGEISPNFAEKFPANATVDLSFNNLTGPIPSSLSLLNQKAESFSGNQELCGKPLKILCSIPSTLSNPPNISETTSPAIAVKPRSTAPINPLTEKPNQTGKSKLKPSTIAAITVADIVGLAFIGLLVLYVYQVRKRRRYPESSKFSFFKFCLEKNEAKKSKPSTTEVTVPESPEAKTTCGSCIILTGGRYDETSTSESDVENQQTVQAFTRTDGGQLKQSSQTQLVTVDGETRLDLDTLLKASAYILGTTGTGIVYKAVLENGTAFAVRRIETESCAAAKPKEFEREVRAIAKLRHPNLVRIRGFCWGDDEKLLISDYVPNGSLLCFFTATKASSSSSSSSSLQNPLTFEARLKIARGMARGLSYINEKKQVHGNIKPNNILLNAENEPIITDLGLDRLMTPARESHTTGPTSSSPYQPPEWSTSLKPNPKWDVYSFGVILLELLTSKVFSVDHDIDQFSNLSDSAAEENGRFLRLIDGAIRSDVARHEDAAMACFRLGIECVSSLPQKRPSMKELVQVLEKICVLV

SEQ ID NO: 50713 - DNA, 636 bp, Arabidopsis thaliana
  misc_feature (1)..(636): Ceres Seq. ID no. 1957209
  misc_feature (1)..(636): Ortholog of  Ceres SEQ ID NO 13599549 as cited in SEQ ID NO 505
gggagaagaagaaaaagaagatcaatgacgttgaagaagcttgacgcgaatccatcgaccttagaatcgattttacaggaactgaaatcagacgagacaaatcgtagcaagatcaatttcatactcttcctcgccgacaatgatcccaccaccggtcaaagctggtgtccagactgtgttagagctgaacctgtgatttacaagactctagaggaatttccagaggaggtgaatctaattcgtgcttacgccggagaccgaccgacgtggcggactccggcgcatccttggagagttgattctcggtttaagctaacccggagtaccaactcttgttcgttgggatggtgactctggttaaggacgtcttggaaantattaaagctcacctttcttacttgattctttccctttttgccccttcacttgaattgatcgatttcgatttcttcgggactatcgtgggattgaggtcaaatatcttatatatattctagtgggaattggttttcaataaatccttacaatgggtaaanggaaagttggtttnttcgatgatctttacgatttcnggctcaatggaaggggtatttntctataaattaccggggatattanctgaattctaactttggg

SEQ ID NO: 50714 - protein, 116 aa, Arabidopsis thaliana
  peptide (1)..(116): Ceres Seq. ID no. 1957210
GRRRKRRSMTLKKLDANPSTLESILQELKSDETNRSKINFILFLADNDPTTGQSWCPDCVRAEPVIYKTLEEFPEEVNLIRAYAGDRPTWRTPAHPWRVDSRFKLTRSTNSCSLGW

SEQ ID NO: 50715 - protein, 108 aa, Arabidopsis thaliana
  peptide (1)..(108): Ceres Seq. ID no. 1957211
MTLKKLDANPSTLESILQELKSDETNRSKINFILFLADNDPTTGQSWCPDCVRAEPVIYKTLEEFPEEVNLIRAYAGDRPTWRTPAHPWRVDSRFKLTRSTNSCSLGW

SEQ ID NO: 50716 - DNA, 926 bp, Arabidopsis thaliana
  misc_feature (1)..(926): Ceres Seq. ID no. 12558873
  misc_feature (1)..(926): Ortholog of  Ceres SEQ ID NO 12587358 as cited in SEQ ID NO 62228
  misc_feature (1)..(926): Ortholog of  Ceres SEQ ID NO 12635930 as cited in SEQ ID NO 0
gacgaaaaagaagatgatgaagctcaaagtgtatgcagatcgaatgtcacagccatcacgtgctgttatcatattctgcaaggttaatggaatccaattcgatgaggtcttgatttccttggcgaagcgtcaacaattatctcctgaattcaaagatattaacccattggggaaagttccagctattgttgatggcaggcttaagctctttgagagtcacgcaatcctgatatatctatcctcggcgtttccaagtgttgctgatcattggtatccaaatgatctatccaaaagagccaagattcactcagttttggattggcatcacaccaatttacgtcgtggtgcagctggatatgttctgaatagtgtactaggtccagctctcggtcttcctctgaatccgaaagcagctgctgaagctgagcagttactaacaaagtctctgtccactctagagactttttggcttaagggcaatgctaaattcttgctcggaagcaaccaaccatctatagctgatctcagccttgtatgcgaacttatgcagctgcaggttttggatgacaaagatcgtcttagattgctcagcactcataagaaagttgaacaatggattgagaatacgaaaaaagcaacaatgcctcactttgatgagacccatgagatccttttcaaagtcaaagaaggattccagaagcggcgagagatgggaaccttatctaaaccgggtcttcaatccaagatctaagaacttagaacaaaactttggcaaaaccggtttcaggggtcagtcactggttcgttgaagaaaagccgattatctcctattctccattgtaagaaaaataaggaatgtaataatcacttgttttttgaactatatgtaataatcactttatcaaaggtttttacccgacccgagc

SEQ ID NO: 50717 - protein, 249 aa, Arabidopsis thaliana
  peptide (1)..(249): Ceres Seq. ID no. 12558874
TKKKMMKLKVYADRMSQPSRAVIIFCKVNGIQFDEVLISLAKRQQLSPEFKDINPLGKVPAIVDGRLKLFESHAILIYLSSAFPSVADHWYPNDLSKRAKIHSVLDWHHTNLRRGAAGYVLNSVLGPALGLPLNPKAAAEAEQLLTKSLSTLETFWLKGNAKFLLGSNQPSIADLSLVCELMQLQVLDDKDRLRLLSTHKKVEQWIENTKKATMPHFDETHEILFKVKEGFQKRREMGTLSKPGLQSKI

SEQ ID NO: 50718 - protein, 245 aa, Arabidopsis thaliana
  peptide (1)..(245): Ceres Seq. ID no. 12558875
MMKLKVYADRMSQPSRAVIIFCKVNGIQFDEVLISLAKRQQLSPEFKDINPLGKVPAIVDGRLKLFESHAILIYLSSAFPSVADHWYPNDLSKRAKIHSVLDWHHTNLRRGAAGYVLNSVLGPALGLPLNPKAAAEAEQLLTKSLSTLETFWLKGNAKFLLGSNQPSIADLSLVCELMQLQVLDDKDRLRLLSTHKKVEQWIENTKKATMPHFDETHEILFKVKEGFQKRREMGTLSKPGLQSKI

SEQ ID NO: 50719 - protein, 244 aa, Arabidopsis thaliana
  peptide (1)..(244): Ceres Seq. ID no. 12558876
MKLKVYADRMSQPSRAVIIFCKVNGIQFDEVLISLAKRQQLSPEFKDINPLGKVPAIVDGRLKLFESHAILIYLSSAFPSVADHWYPNDLSKRAKIHSVLDWHHTNLRRGAAGYVLNSVLGPALGLPLNPKAAAEAEQLLTKSLSTLETFWLKGNAKFLLGSNQPSIADLSLVCELMQLQVLDDKDRLRLLSTHKKVEQWIENTKKATMPHFDETHEILFKVKEGFQKRREMGTLSKPGLQSKI

SEQ ID NO: 50720 - DNA, 733 bp, Arabidopsis thaliana
  misc_feature (1)..(733): Ceres Seq. ID no. 12559033
  misc_feature (1)..(733): Ortholog of  Ceres SEQ ID NO 14307883 as cited in SEQ ID NO 67277
ggggtttatctttgactagtcttcttctgacttcgccgaatgtgtgtcgatctccggcgaagtaataagtcgtaataaccctaaaaatcttgccctctttttcgccgccggctaaagctatgaaggtttttaatcttgaccgtggaaacactctctctgtttccctcttctccggtgtcaccaactccaaggagctcttgaattcaatgcttgacggaagtctgaagctggaggtctcatttctcaatgcatcacttattccagacatttttcctctattggctgctgctcagaaagcacttatctccaaatcacgcgattccttatcaaccagaactcttcattctgagcttgtctacaattactcaggatctaagcacattacagaatcattgaaacgatgtgggatttctgagaacactacttacattctagctgcccggttcaatgcttctcccgttgagatggaggaggtggcgaaattgatcaacgggaaggagattgatttggaggaattgaagacacatgcaaatcaagccaatatactaaagcattacaagataactagccaagagctcggaatttcctctctgggagatgccattgtttgtcgaatagctgcacgcgatgctttgtangagtagacatctttctttatgtcttttgcaccaattatagtttctccttataacaacgttgacacttaccgttataattcaaccaatggtggggt

SEQ ID NO: 50721 - protein, 174 aa, Arabidopsis thaliana
  peptide (1)..(174): Ceres Seq. ID no. 12559034
  misc_feature (173)..(173): Xaa is any aa, unknown or other
MKVFNLDRGNTLSVSLFSGVTNSKELLNSMLDGSLKLEVSFLNASLIPDIFPLLAAAQKALISKSRDSLSTRTLHSELVYNYSGSKHITESLKRCGISENTTYILAARFNASPVEMEEVAKLINGKEIDLEELKTHANQANILKHYKITSQELGISSLGDAIVCRIAARDALXE

SEQ ID NO: 50722 - protein, 145 aa, Arabidopsis thaliana
  peptide (1)..(145): Ceres Seq. ID no. 12559035
  misc_feature (144)..(144): Xaa is any aa, unknown or other
MLDGSLKLEVSFLNASLIPDIFPLLAAAQKALISKSRDSLSTRTLHSELVYNYSGSKHITESLKRCGISENTTYILAARFNASPVEMEEVAKLINGKEIDLEELKTHANQANILKHYKITSQELGISSLGDAIVCRIAARDALXE

SEQ ID NO: 50723 - DNA, 1681 bp, Arabidopsis thaliana; identical to SEQ ID NO: 43822
  misc_feature (1)..(1681): Ceres Seq. ID no. 13591915
  misc_feature (1)..(1681): Ortholog of  Ceres SEQ ID NO 15176911 as cited in SEQ ID NO 54868
  misc_feature (1)..(1681): Ortholog of  Ceres SEQ ID NO 13596433 as cited in SEQ ID NO 68721
  misc_feature (1)..(1681): Ortholog of  Ceres SEQ ID NO 13599169 as cited in SEQ ID NO 0

SEQ ID NO: 50724 - protein, 435 aa, Arabidopsis thaliana; identical to SEQ ID NO: 43823
  peptide (1)..(435): Ceres Seq. ID no. 13591916

SEQ ID NO: 50725 - protein, 428 aa, Arabidopsis thaliana; identical to SEQ ID NO: 43824
  peptide (1)..(428): Ceres Seq. ID no. 13591917

SEQ ID NO: 50726 - protein, 417 aa, Arabidopsis thaliana; identical to SEQ ID NO: 43825
  peptide (1)..(417): Ceres Seq. ID no. 13591918

SEQ ID NO: 50727 - DNA, 1529 bp, Arabidopsis thaliana
  misc_feature (1)..(1529): Ceres Seq. ID no. 13575292
  misc_feature (1)..(1529): Ortholog of  Ceres SEQ ID NO 15177043 as cited in SEQ ID NO 57425
agataaataaactcaaaaccattcttcatttcgccgacactttcttctccaccaccaccatggatgatctctccaagcttctcttcttcctcctcctcactatctccattaccaccgcattacccgataaacccgggtcgggtcaaataaactcaaactccgtcctcgttgctcttcttgactcacactacacagaactagcagagctcgtcgaaaaagctcttcttctccaaaccttagaagaagctgttggtcaacacaacatcacaatctttgctcctcgtaacgatgccttagaaaaaaatcttgatcctgaattcaaatctttcttactccaaccgaaaaacctcaaatcattacaatctttattaatgtttcacattcttcccaaaagaatcacttctccacaattctcctccgccgtcgttagccaccgtactctctccaacgaccacctccatttcaccaacggaaaagtcaactccgctgaaataaccaaacccgatgatttaactcgtcccgatggaatcatccacggaatcgaacgtcttttaatcccacgttctgttcaagaagatttcaaccgccgtcgtagtctccgttcaatcgctgccgtattaccggaaggagcaccggaggttgatccaagaactcaccgtctcaagaaaaagccagcaccaattcccgccggagctccaccggttcttccggtttacgacgcaatgtcacctggtccgtcactagctccggctccggcaccaggaccgggtgggccacgccaccatttcaacggagaggctcaagttaaagattttatccacacgcttcttcattacggtggctacaatgaaatggcagatattctcgttaatctcacttctttagccaccgagatgggtcggctcgtgtcggaaggttacgttttaaccgttttagcaccaaacgacgaagctatggctaaattgaccacggaccaattgagcgaaccgggagctccagagcaaattatgtattatcacatcataccggaataccaaaccgaagagagtatgtacaattctgtacgccggtttgggaaaatccggtacgattcactccggtttcctcataaagtagaggctcaggaggcagatggttcggttaagttcggtcatggtgatggttcggcttatttgttcgatcctgatatttataccgatggacggatttcggttcaagggattgacggtgttttgttcccggaggaaaaaactccggtcgagaagaaaaccggcgttccagttgtcaagaaagcacctaaaccaagaagaggtaaattgatggaagtagcatgtacaatgctgggatcacaatttccaacatgtcaatgagatcaaattaaatccgggacatgagaattttataattctgtaaacatgtgataaaaatgtgaacagaaaaaagaaataatgtaaatgattattttttgggctcgttgcaatatgattgttaaattgtaatttcagttgttttgagctgcgtaaccaacc

SEQ ID NO: 50728 - protein, 455 aa, Arabidopsis thaliana
  peptide (1)..(455): Ceres Seq. ID no. 13575293
INKLKTILHFADTFFSTTTMDDLSKLLFFLLLTISITTALPDKPGSGQINSNSVLVALLDSHYTELAELVEKALLLQTLEEAVGQHNITIFAPRNDALEKNLDPEFKSFLLQPKNLKSLQSLLMFHILPKRITSPQFSSAVVSHRTLSNDHLHFTNGKVNSAEITKPDDLTRPDGIIHGIERLLIPRSVQEDFNRRRSLRSIAAVLPEGAPEVDPRTHRLKKKPAPIPAGAPPVLPVYDAMSPGPSLAPAPAPGPGGPRHHFNGEAQVKDFIHTLLHYGGYNEMADILVNLTSLATEMGRLVSEGYVLTVLAPNDEAMAKLTTDQLSEPGAPEQIMYYHIIPEYQTEESMYNSVRRFGKIRYDSLRFPHKVEAQEADGSVKFGHGDGSAYLFDPDIYTDGRISVQGIDGVLFPEEKTPVEKKTGVPVVKKAPKPRRGKLMEVACTMLGSQFPTCQ

SEQ ID NO: 50729 - protein, 436 aa, Arabidopsis thaliana
  peptide (1)..(436): Ceres Seq. ID no. 13575294
MDDLSKLLFFLLLTISITTALPDKPGSGQINSNSVLVALLDSHYTELAELVEKALLLQTLEEAVGQHNITIFAPRNDALEKNLDPEFKSFLLQPKNLKSLQSLLMFHILPKRITSPQFSSAVVSHRTLSNDHLHFTNGKVNSAEITKPDDLTRPDGIIHGIERLLIPRSVQEDFNRRRSLRSIAAVLPEGAPEVDPRTHRLKKKPAPIPAGAPPVLPVYDAMSPGPSLAPAPAPGPGGPRHHFNGEAQVKDFIHTLLHYGGYNEMADILVNLTSLATEMGRLVSEGYVLTVLAPNDEAMAKLTTDQLSEPGAPEQIMYYHIIPEYQTEESMYNSVRRFGKIRYDSLRFPHKVEAQEADGSVKFGHGDGSAYLFDPDIYTDGRISVQGIDGVLFPEEKTPVEKKTGVPVVKKAPKPRRGKLMEVACTMLGSQFPTCQ

SEQ ID NO: 50730 - protein, 332 aa, Arabidopsis thaliana
  peptide (1)..(332): Ceres Seq. ID no. 13575295
MFHILPKRITSPQFSSAVVSHRTLSNDHLHFTNGKVNSAEITKPDDLTRPDGIIHGIERLLIPRSVQEDFNRRRSLRSIAAVLPEGAPEVDPRTHRLKKKPAPIPAGAPPVLPVYDAMSPGPSLAPAPAPGPGGPRHHFNGEAQVKDFIHTLLHYGGYNEMADILVNLTSLATEMGRLVSEGYVLTVLAPNDEAMAKLTTDQLSEPGAPEQIMYYHIIPEYQTEESMYNSVRRFGKIRYDSLRFPHKVEAQEADGSVKFGHGDGSAYLFDPDIYTDGRISVQGIDGVLFPEEKTPVEKKTGVPVVKKAPKPRRGKLMEVACTMLGSQFPTCQ

SEQ ID NO: 50731 - DNA, 1599 bp, Arabidopsis thaliana
  misc_feature (1)..(1599): Ceres Seq. ID no. 12574945
  misc_feature (1)..(1599): Ortholog of  Ceres SEQ ID NO 13597034 as cited in SEQ ID NO 69002
agcatagcctccttacttcatcttcctctcattttatctttcttcttcacactctctcggatacttttttgtgcttcgacaaaagctctcagatccacagagtcagaggctcgtctcttctttgatcttggtttatgagctcgaaggagaaacccactctcggaggtacgcggattaagacccgcaaacggaatattgctgctcctctggaccctgcagccttttctgatgcagtggtccagatttaccatgataatgctggtgatctggaacttgttgccaaaagtattgagtcatcagaccttaatttcacaagatatggtgacatcttctttgaggttattttcataggaggacgcacacaacctggaacagtgaaatctgatgaaggagaacgtcatacttactctgtaattgattgtgaacccaagcgtgaagccattttgccatctgttgtctacatacagaaaattctgcgtaggaagcctttcctcataaagaaccttgaaaatgttactcggagattcctgcagtcactggagctttttgaggaaaatgaaaggaagaagcttgctatcttcacagcacttgccttttcccagaagctctcaggattacctccggaaactgtcttccagccattgctcaaggataatcttgttgccaaagggatagtgctctccttcgtaacagacttcttcaaggagtatttggttgagaacagtcttgaagacttgatttctattctgaggcgtgggaaaatggaagacaaccttatggatttcctaccaccagtaaggcgatctgctgaaagttttgcggaacatttcacgaatgaaggattgactgatctagtagagtaccattcaaagaaaatgtttgaggtgaaactgagggaaatcaaaaccgttcttacaagcaaggtcacagaggaaagtaatgtagacgaagtcattgaatcggtgaagcaacagatcaaagatgctaagttacctgacattgaggttgtgcgtgttgtttgggatggtttaatggatgctgttcagtggtctggaaaaaaccagcagcaaaatgcaaattctgttctgcgccaggtgaaaacatgggctccacttctgaacacgttctgtaccagcggaaagctagagctggaactgatgtacaaagtccaaatgcaatgctatgaggatgcaaagcttatgaaagttttcccagaagtagtgaggtcgctctatgaactcgatgtcctcgctgaagacaccattctccactggttccgtaaaggaaccaactcaaagggcaggcaaacctttgtgaaaagtttagagccatttgtgaattggcttgaagaggcggaggaagaagagtgagtgatctatgtttctaataaacaagccatgaagacgataataattcagggtttcttctatgtttcacttttgcttatgagctttactctgctttgtattttggcaataagtatttgatattgttgtgcttcttttttttttctttttggttttgatgactgtctctgtttccccagaacggttttggattcttttgcaaatggatttaggcaaatgcaaattctgcttt

SEQ ID NO: 50732 - protein, 411 aa, Arabidopsis thaliana
  peptide (1)..(411): Ceres Seq. ID no. 12574946
MSSKEKPTLGGTRIKTRKRNIAAPLDPAAFSDAVVQIYHDNAGDLELVAKSIESSDLNFTRYGDIFFEVIFIGGRTQPGTVKSDEGERHTYSVIDCEPKREAILPSVVYIQKILRRKPFLIKNLENVTRRFLQSLELFEENERKKLAIFTALAFSQKLSGLPPETVFQPLLKDNLVAKGIVLSFVTDFFKEYLVENSLEDLISILRRGKMEDNLMDFLPPVRRSAESFAEHFTNEGLTDLVEYHSKKMFEVKLREIKTVLTSKVTEESNVDEVIESVKQQIKDAKLPDIEVVRVVWDGLMDAVQWSGKNQQQNANSVLRQVKTWAPLLNTFCTSGKLELELMYKVQMQCYEDAKLMKVFPEVVRSLYELDVLAEDTILHWFRKGTNSKGRQTFVKSLEPFVNWLEEAEEEE

SEQ ID NO: 50733 - DNA, 3344 bp, Arabidopsis thaliana
  misc_feature (1)..(3344): Ceres Seq. ID no. 13575300
  misc_feature (1)..(3344): Ortholog of  Ceres SEQ ID NO 14303870 as cited in SEQ ID NO 53632
acttactctcaccctttttaaaaccaaaccctaacttacacagaaagagaagaaaaaaaacaaaaaaaaaatgaagcttcttcttctcctcctcctcctccttctcctccacatttctcattccttcaccgtcgctaaaccaatcaccgagctccacgctcttctctcactcaaatcctccttcaccatcgacgaacactcacctctcctgacctcatggaacctttcaacaactttctgttcatggaccggtgtcacgtgcgacgtctctctccgtcacgtgacctctctcgacctctcaggtcttaacctctccggaactctctcctccgacgtagctcatttacctctgctacagaatctatcactcgctgctaatcagatctcaggtcctattccgccgcaaatctccaatctctatgagcttcgtcacctcaatctctccaataatgtcttcaacggttcatttcccgatgaactctcctctggattggtgaatctccgtgttcttgacttatacaacaacaatttaaccggagatttaccggtttcactcactaatctcactcagctccgtcatcttcacctcggtgggaattacttctccggcaaaatcccggcgacgtacggaacctggcctgttctcgaatacttagcggtttccggtaacgagctaaccggtaaaatccctccggagatcggaaacctaacgactcttcgtgaactttacatcggatattacaacgcttttgaaaatggtcttccaccggagattggaaatttatcagagcttgttcggttcgacgctgctaattgtggtttaaccggagagattccaccggagattgggaagcttcagaagctagatacgttgtttcttcaagtaaacgcatttacagggacaataactcaagagctgggattgatttcaagcttgaaatcgatggatctgtctaacaatatgtttaccggcgagattccgacgagtttttcacagctgaagaacttaacgcttttgaatctcttcaggaataagctctacggtgctatacctgagttcatcggtgaaatgccggagcttgaagtgttgcagctttgggagaacaatttcactggtagtattcctcagaaattgggggaaaatggtagattagtgattcttgatctctcttcgaacaaactcaccggaactctgccgccgaatatgtgttctggtaaccggttaatgacgttaatcactcttggcaacttcttgtttggttcaataccggattcgcttggtaaatgtgagtctctgacccggatccggatgggtgagaatttccttaacgggtcgattccaaaggagctcttcgggttacctaaattatctcaagtggagctccaagacaattaccttaccggagagttgccaataagcggaggaggagtctctggtgaccttggtcagattagtctttctaataaccagctctctggttcattacctgcagctattggaaacttgtccggtgttcaaaaactacttcttgatggtaacaagttctctggttcgattcctcccgagattgggaggcttcagcagctatctaagttggattttagccacaatctgttctccggtcggatcgcaccggagatcagtcgttgtaagctgctaacgtttgttgatcttagccgtaatgagctctcaggtgatattcctaatgaactcacaggtatgaagatcttgaattacttgaatctttcaagaaaccatctcgttggttccatacctgtgacgatagcatcaatgcagagtttgacatcggttgatttctcttacaacaatctctccggtttagttcccagcactggacagtttagttacttcaattacacatcgtttgtgggtaactctcatctttgtggtccgtatttgggtccttgcggcaaaggaactcaccagtctcatgtcaaacctttatctgctactacgaaactgttactcgtccttggattgctcttttgttcgatggtgtttgctatagtggccataatcaaagctcggtccttgcgaaatgcgagtgaagccaaggcatggagattgactgctttccagaggctagacttcacttgtgacgatgtcttggactctctcaaggaagacaacatcatcggtaaaggcggtgctgggattgtctacaaaggcactatgcctaaaggcgacctagtcgcggtcaaacgattggctacaatgtcccatggatcttcccacgatcacgggttcaacgccgagattcagacgctaggtagaatcagacacagacacatcgtgagactgctcggtttttgctccaaccacgaaacgaatctccttgtgtacgagtacatgcctaatggtagccttggagaggttcttcatggaaagaaaggaggtcatttacattggaacacacgttataagatagctcttgaagcagccaagggtctttgctatctccaccatgattgttccccgttgatcgtccatagagatgttaaatccaacaacatcctcctcgattccaacttcgaagctcatgtcgccgactttggtctcgccaagttcctccaagattccggtacttctgaatgtatgtccgcaattgccggctcctacggctacatagctccagagtacgcgtatacattgaaggtagatgagaagagcgatgtgtatagtttcggtgttgttcttctagaactcatcaccgggaaaaaacccgtcggagaatttggcgacggcgttgatattgttcaatgggtgagaagcatgacggattcaaataaagattgtgtgctcaaagtaatcgatcttagactctcttcagttccagttcacgaggtaacacacgtcttctacgttgcgttgctctgcgttgaagaacaagcggtggagaggccgacgatgcgtgaagtcgttcagattctcactgagatcccaaaaattcctctttcgaagcagcaagcggcggaatcagacgtgactgagaaagctccggcgattaatgaatcgtcgccggattcaggaagtccaccggatcttttaagtaattagactttccggcgattgggtttggtcattgaggggcaaatttgtctttctaattttcttgtcaccgacgtctcggtagtggagttaattacttaattagcccgttgttgtctggttccggttaaggcaacaattagtggtttaactcttaaggttgttgcatttcttttttcactgctgccacaattattcgtgtaggaattttgaatatgtacattgcggttgaattttgcatgataagtggttaatttcaggaaatcgaatttcg

SEQ ID NO: 50734 - protein, 1002 aa, Arabidopsis thaliana
  peptide (1)..(1002): Ceres Seq. ID no. 13575301
MKLLLLLLLLLLLHISHSFTVAKPITELHALLSLKSSFTIDEHSPLLTSWNLSTTFCSWTGVTCDVSLRHVTSLDLSGLNLSGTLSSDVAHLPLLQNLSLAANQISGPIPPQISNLYELRHLNLSNNVFNGSFPDELSSGLVNLRVLDLYNNNLTGDLPVSLTNLTQLRHLHLGGNYFSGKIPATYGTWPVLEYLAVSGNELTGKIPPEIGNLTTLRELYIGYYNAFENGLPPEIGNLSELVRFDAANCGLTGEIPPEIGKLQKLDTLFLQVNAFTGTITQELGLISSLKSMDLSNNMFTGEIPTSFSQLKNLTLLNLFRNKLYGAIPEFIGEMPELEVLQLWENNFTGSIPQKLGENGRLVILDLSSNKLTGTLPPNMCSGNRLMTLITLGNFLFGSIPDSLGKCESLTRIRMGENFLNGSIPKELFGLPKLSQVELQDNYLTGELPISGGGVSGDLGQISLSNNQLSGSLPAAIGNLSGVQKLLLDGNKFSGSIPPEIGRLQQLSKLDFSHNLFSGRIAPEISRCKLLTFVDLSRNELSGDIPNELTGMKILNYLNLSRNHLVGSIPVTIASMQSLTSVDFSYNNLSGLVPSTGQFSYFNYTSFVGNSHLCGPYLGPCGKGTHQSHVKPLSATTKLLLVLGLLFCSMVFAIVAIIKARSLRNASEAKAWRLTAFQRLDFTCDDVLDSLKEDNIIGKGGAGIVYKGTMPKGDLVAVKRLATMSHGSSHDHGFNAEIQTLGRIRHRHIVRLLGFCSNHETNLLVYEYMPNGSLGEVLHGKKGGHLHWNTRYKIALEAAKGLCYLHHDCSPLIVHRDVKSNNILLDSNFEAHVADFGLAKFLQDSGTSECMSAIAGSYGYIAPEYAYTLKVDEKSDVYSFGVVLLELITGKKPVGEFGDGVDIVQWVRSMTDSNKDCVLKVIDLRLSSVPVHEVTHVFYVALLCVEEQAVERPTMREVVQILTEIPKIPLSKQQAAESDVTEKAPAINESSPDSGSPPDLLSN

SEQ ID NO: 50735 - protein, 711 aa, Arabidopsis thaliana
  peptide (1)..(711): Ceres Seq. ID no. 13575302
MDLSNNMFTGEIPTSFSQLKNLTLLNLFRNKLYGAIPEFIGEMPELEVLQLWENNFTGSIPQKLGENGRLVILDLSSNKLTGTLPPNMCSGNRLMTLITLGNFLFGSIPDSLGKCESLTRIRMGENFLNGSIPKELFGLPKLSQVELQDNYLTGELPISGGGVSGDLGQISLSNNQLSGSLPAAIGNLSGVQKLLLDGNKFSGSIPPEIGRLQQLSKLDFSHNLFSGRIAPEISRCKLLTFVDLSRNELSGDIPNELTGMKILNYLNLSRNHLVGSIPVTIASMQSLTSVDFSYNNLSGLVPSTGQFSYFNYTSFVGNSHLCGPYLGPCGKGTHQSHVKPLSATTKLLLVLGLLFCSMVFAIVAIIKARSLRNASEAKAWRLTAFQRLDFTCDDVLDSLKEDNIIGKGGAGIVYKGTMPKGDLVAVKRLATMSHGSSHDHGFNAEIQTLGRIRHRHIVRLLGFCSNHETNLLVYEYMPNGSLGEVLHGKKGGHLHWNTRYKIALEAAKGLCYLHHDCSPLIVHRDVKSNNILLDSNFEAHVADFGLAKFLQDSGTSECMSAIAGSYGYIAPEYAYTLKVDEKSDVYSFGVVLLELITGKKPVGEFGDGVDIVQWVRSMTDSNKDCVLKVIDLRLSSVPVHEVTHVFYVALLCVEEQAVERPTMREVVQILTEIPKIPLSKQQAAESDVTEKAPAINESSPDSGSPPDLLSN

SEQ ID NO: 50736 - protein, 705 aa, Arabidopsis thaliana
  peptide (1)..(705): Ceres Seq. ID no. 13575303
MFTGEIPTSFSQLKNLTLLNLFRNKLYGAIPEFIGEMPELEVLQLWENNFTGSIPQKLGENGRLVILDLSSNKLTGTLPPNMCSGNRLMTLITLGNFLFGSIPDSLGKCESLTRIRMGENFLNGSIPKELFGLPKLSQVELQDNYLTGELPISGGGVSGDLGQISLSNNQLSGSLPAAIGNLSGVQKLLLDGNKFSGSIPPEIGRLQQLSKLDFSHNLFSGRIAPEISRCKLLTFVDLSRNELSGDIPNELTGMKILNYLNLSRNHLVGSIPVTIASMQSLTSVDFSYNNLSGLVPSTGQFSYFNYTSFVGNSHLCGPYLGPCGKGTHQSHVKPLSATTKLLLVLGLLFCSMVFAIVAIIKARSLRNASEAKAWRLTAFQRLDFTCDDVLDSLKEDNIIGKGGAGIVYKGTMPKGDLVAVKRLATMSHGSSHDHGFNAEIQTLGRIRHRHIVRLLGFCSNHETNLLVYEYMPNGSLGEVLHGKKGGHLHWNTRYKIALEAAKGLCYLHHDCSPLIVHRDVKSNNILLDSNFEAHVADFGLAKFLQDSGTSECMSAIAGSYGYIAPEYAYTLKVDEKSDVYSFGVVLLELITGKKPVGEFGDGVDIVQWVRSMTDSNKDCVLKVIDLRLSSVPVHEVTHVFYVALLCVEEQAVERPTMREVVQILTEIPKIPLSKQQAAESDVTEKAPAINESSPDSGSPPDLLSN

SEQ ID NO: 50737 - DNA, 2055 bp, Arabidopsis thaliana; identical to SEQ ID NO: 46130
  misc_feature (1)..(2055): Ceres Seq. ID no. 13591783
  misc_feature (1)..(2055): Ortholog of  Ceres SEQ ID NO 15170764 as cited in SEQ ID NO 52602

SEQ ID NO: 50738 - protein, 588 aa, Arabidopsis thaliana; identical to SEQ ID NO: 46131
  peptide (1)..(588): Ceres Seq. ID no. 13591784

SEQ ID NO: 50739 - protein, 586 aa, Arabidopsis thaliana; identical to SEQ ID NO: 46132
  peptide (1)..(586): Ceres Seq. ID no. 13591785

SEQ ID NO: 50740 - protein, 522 aa, Arabidopsis thaliana; identical to SEQ ID NO: 46133
  peptide (1)..(522): Ceres Seq. ID no. 13591786

SEQ ID NO: 50741 - DNA, 681 bp, Arabidopsis thaliana
  misc_feature (1)..(681): Ceres Seq. ID no. 12558899
  misc_feature (1)..(681): Ortholog of  Ceres SEQ ID NO 12589876 as cited in SEQ ID NO 0
  misc_feature (1)..(681): Ortholog of  Ceres SEQ ID NO 15179249 as cited in SEQ ID NO 0
aaaaaataactcttttcttctttttaatcttttttagcactaatcataaaccacaaaaatacataattaatcaccacaaaagcaattcacattcaccacaaaatgacaatgacacttaagctcctatctctcgccgtggctgccttggccatcaccgccgtcttggccgccgatcctccaacaccggcaaacgcgcccaaagccaacggcgaaaagaattcaacctctccttctcccgccgccgcagcatccccaaaatcacccacggcctccgccccaacctcaccgcctacagctgctccgaccatggccaagaaaaactccaccggaactccaagcccttccccatcttcaaacaccgcaaagcctccaaagtcatcatcagccaaaactccggcttcaagccctgactcaagctccggtgattcttccgaaggtcctaccagctcctctgacggcacctaccgcctcctctccgccagctccgactccagaaatgtctccatcttccgatgacggaactggcgccagtgacggccctgaagcttcgggctcctgcggcaggagcctcatcgcttgtgatctctgtctcgggctctgttctcgcagccgttgcatggcttttcttcatatgattgaatattactagtattttcttggagatttcatactacatttaag

SEQ ID NO: 50742 - protein, 137 aa, Arabidopsis thaliana
  peptide (1)..(137): Ceres Seq. ID no. 12558900
MTMTLKLLSLAVAALAITAVLAADPPTPANAPKANGEKNSTSPSPAAAASPKSPTASAPTSPPTAAPTMAKKNSTGTPSPSPSSNTAKPPKSSSAKTPASSPDSSSGDSSEGPTSSSDGTYRLLSASSDSRNVSIFR

SEQ ID NO: 50743 - protein, 135 aa, Arabidopsis thaliana
  peptide (1)..(135): Ceres Seq. ID no. 12558901
MTLKLLSLAVAALAITAVLAADPPTPANAPKANGEKNSTSPSPAAAASPKSPTASAPTSPPTAAPTMAKKNSTGTPSPSPSSNTAKPPKSSSAKTPASSPDSSSGDSSEGPTSSSDGTYRLLSASSDSRNVSIFR

SEQ ID NO: 50744 - protein, 69 aa, Arabidopsis thaliana
  peptide (1)..(69): Ceres Seq. ID no. 12558902
MAKKNSTGTPSPSPSSNTAKPPKSSSAKTPASSPDSSSGDSSEGPTSSSDGTYRLLSASSDSRNVSIFR

SEQ ID NO: 50745 - DNA, 2266 bp, Arabidopsis thaliana
  misc_feature (1)..(2266): Ceres Seq. ID no. 12558903
  misc_feature (1)..(2266): Ortholog of  Ceres SEQ ID NO 13586013 as cited in SEQ ID NO 1182
attcctcacttccaaccgccaaagaaaaaaatcaaaaactccaacaaaaaaaacctcccaaaccctacccgagcagtcgccagatgggcacggaggactacacattccctcaaggagcggaggagcttcaccgccgccaccacacggtggaggctccacaacctcaaccgttcttgaagtcacttcagtactcagtgaaggaaactctgtttccagacgacccttttagacaatttaagaaccaaaatgcatcaagaaaatttgtgttaggcctcaaatacttcctcccgattttcgaatgggcaccacgctacaatctcaagttcttcaaatcagatctcatcgccggaatcaccatcgctagtctcgccatccctcagggcatcagttacgccaaacttgctaacttgcccccaattcttggcctttattcgagttttgtaccgccattggtatacgcggtgctagggagttcaagggacttagcggtgggaacggttgcggttgcgtctctgttgacaggtgcgatgctgagcaaagaagttgatgctgagaaagatcctaagctttaccttcaccttgctttcaccgccacttttttcgccggcgttctcgaagcctctcttggaattttcaggttagggttcatagtggactttctatcgcatgcaacgatagtaggattcatgggaggagcagcgacgctggtgagtctgcaacagcttaagggtatattcggacttaaacatttcacagactctaccgatgttatctctgtcatgcgttccgttttctcccaaactcacgagtggagatgggaaagtggcgttcttggatgtggttttctattctttcttctctccaccagatatttcagcatcaagaaaccaaaattcttttgggtggcggcgatggctcctttgacctcagtgattcttggaagtctcttggtttacttcactcacgctgagagacatggtgttcaagtgataggggacctgaagaaagggttgaatccactctccggttctgatctcatctttacttccccttacatgtccacagctgtcaaaactggcctcatcactggcatcattgctctcgctgaaggagtagcagtggggaggagttttgcgatgttcaagaactacaacatagacgggaacaaagagatgatagcgtttggaatgatgaacatcgttggttccttcacatcttgttacctcacaaccggaccattttcaaggtcggcagtgaactacaacgcgggttgcaagaccgcaatgtccaacatagtgatggcgattgcggttatgttcacactcctcttcctcacaccgctttttcactacacaccactcgtcgtcctctctgccatcatcatatccgcaatgctcggactcattgactatcaagctgccatccatctctggaaagttgacaagttcgacttcctcgtctgcatgagcgcctacgttggggtcgtattcggcagtgtagagattggactcgtcgtagcggtggcgatatctatagcgaggttgttgctgtttgtgtcgaggccaaaaactgcggtgaagggaaacataccaaacagcatgatctataggaacactgagcagtacccatcatcaagaaccgttcctggtattctcatcttggagattgatgctcccatctactttgctaatgccagttacttgcgtgaaagaatcataaggtggattgatgaagaggaagagagagttaaacaatcaggagagagcagcttacaatatattatactcgatatgtcagctgttggtaatatcgacacaagcggtattagcatgatggtggaaattaagaaagtcattgacaggagagcgttaaagttggtattgtcaaatccaaaaggagaggtcgtgaagaaattaaccagatccaaattcatcggtgatcatttgggcaaagagtggatgttcttaacggtaggagaagcagtggaggcttgtagctacatgcttcacacgtttaaaaccgaaccggcctccaaaaacgagccttggaacaacgtatagttcctttattttttgctgtcgttctgtgactactcgttattaactaatccgatgtaaacttaaattaaaaactgaaactcattttgtaatattgatgatgagccatatgcaatatatatgcactcttattgtagtgttatggaagaaattggcggttcggaattagaccaaataccggttaatgaacaatgaagcaaatttggttt

SEQ ID NO: 50746 - protein, 685 aa, Arabidopsis thaliana
  peptide (1)..(685): Ceres Seq. ID no. 12558904
SSLPTAKEKNQKLQQKKPPKPYPSSRQMGTEDYTFPQGAEELHRRHHTVEAPQPQPFLKSLQYSVKETLFPDDPFRQFKNQNASRKFVLGLKYFLPIFEWAPRYNLKFFKSDLIAGITIASLAIPQGISYAKLANLPPILGLYSSFVPPLVYAVLGSSRDLAVGTVAVASLLTGAMLSKEVDAEKDPKLYLHLAFTATFFAGVLEASLGIFRLGFIVDFLSHATIVGFMGGAATLVSLQQLKGIFGLKHFTDSTDVISVMRSVFSQTHEWRWESGVLGCGFLFFLLSTRYFSIKKPKFFWVAAMAPLTSVILGSLLVYFTHAERHGVQVIGDLKKGLNPLSGSDLIFTSPYMSTAVKTGLITGIIALAEGVAVGRSFAMFKNYNIDGNKEMIAFGMMNIVGSFTSCYLTTGPFSRSAVNYNAGCKTAMSNIVMAIAVMFTLLFLTPLFHYTPLVVLSAIIISAMLGLIDYQAAIHLWKVDKFDFLVCMSAYVGVVFGSVEIGLVVAVAISIARLLLFVSRPKTAVKGNIPNSMIYRNTEQYPSSRTVPGILILEIDAPIYFANASYLRERIIRWIDEEEERVKQSGESSLQYIILDMSAVGNIDTSGISMMVEIKKVIDRRALKLVLSNPKGEVVKKLTRSKFIGDHLGKEWMFLTVGEAVEACSYMLHTFKTEPASKNEPWNNV

SEQ ID NO: 50747 - protein, 658 aa, Arabidopsis thaliana
  peptide (1)..(658): Ceres Seq. ID no. 12558905
MGTEDYTFPQGAEELHRRHHTVEAPQPQPFLKSLQYSVKETLFPDDPFRQFKNQNASRKFVLGLKYFLPIFEWAPRYNLKFFKSDLIAGITIASLAIPQGISYAKLANLPPILGLYSSFVPPLVYAVLGSSRDLAVGTVAVASLLTGAMLSKEVDAEKDPKLYLHLAFTATFFAGVLEASLGIFRLGFIVDFLSHATIVGFMGGAATLVSLQQLKGIFGLKHFTDSTDVISVMRSVFSQTHEWRWESGVLGCGFLFFLLSTRYFSIKKPKFFWVAAMAPLTSVILGSLLVYFTHAERHGVQVIGDLKKGLNPLSGSDLIFTSPYMSTAVKTGLITGIIALAEGVAVGRSFAMFKNYNIDGNKEMIAFGMMNIVGSFTSCYLTTGPFSRSAVNYNAGCKTAMSNIVMAIAVMFTLLFLTPLFHYTPLVVLSAIIISAMLGLIDYQAAIHLWKVDKFDFLVCMSAYVGVVFGSVEIGLVVAVAISIARLLLFVSRPKTAVKGNIPNSMIYRNTEQYPSSRTVPGILILEIDAPIYFANASYLRERIIRWIDEEEERVKQSGESSLQYIILDMSAVGNIDTSGISMMVEIKKVIDRRALKLVLSNPKGEVVKKLTRSKFIGDHLGKEWMFLTVGEAVEACSYMLHTFKTEPASKNEPWNNV

SEQ ID NO: 50748 - protein, 510 aa, Arabidopsis thaliana
  peptide (1)..(510): Ceres Seq. ID no. 12558906
MLSKEVDAEKDPKLYLHLAFTATFFAGVLEASLGIFRLGFIVDFLSHATIVGFMGGAATLVSLQQLKGIFGLKHFTDSTDVISVMRSVFSQTHEWRWESGVLGCGFLFFLLSTRYFSIKKPKFFWVAAMAPLTSVILGSLLVYFTHAERHGVQVIGDLKKGLNPLSGSDLIFTSPYMSTAVKTGLITGIIALAEGVAVGRSFAMFKNYNIDGNKEMIAFGMMNIVGSFTSCYLTTGPFSRSAVNYNAGCKTAMSNIVMAIAVMFTLLFLTPLFHYTPLVVLSAIIISAMLGLIDYQAAIHLWKVDKFDFLVCMSAYVGVVFGSVEIGLVVAVAISIARLLLFVSRPKTAVKGNIPNSMIYRNTEQYPSSRTVPGILILEIDAPIYFANASYLRERIIRWIDEEEERVKQSGESSLQYIILDMSAVGNIDTSGISMMVEIKKVIDRRALKLVLSNPKGEVVKKLTRSKFIGDHLGKEWMFLTVGEAVEACSYMLHTFKTEPASKNEPWNNV

SEQ ID NO: 50749 - DNA, 2657 bp, Arabidopsis thaliana
  misc_feature (1)..(2657): Ceres Seq. ID no. 12558909
  misc_feature (1)..(2657): Ortholog of  Ceres SEQ ID NO 13596198 as cited in SEQ ID NO 68488
atttctgttaaatccgttgggttcttccatggatcctcatcgtcatcgcctccatctccgtctttcttcttcttcttctgctcgattctaattccgtaagagagaaataataaaggattcatgttcacatcttctacctgatgagcataccatgattctctcgctatgcgttggcttccgcaaatctcgttctcgtctccttcttcttctccatcttcttctctaaaacccgtggcttcttactctgaatctccggatccagatcgtaatcaggatcgggatcggtttcatcgccgcttgtttcgttttaaccgtggcaggctcacccgtcagcggaagcttcgtcacttgacggatgacgatgttttgttgggagaacgtcgtgcttctacctcttcctccaccttcgattccggtttaactcgctctcccagcgctttcaccgccgttcctcgctctccttctgccgttcccttacccttacctctccccttaccggaggtcgccgggattcgaaatgccgcaaacgctagaggattggatgacagagatcgagatcccgagagacttatttctgatcgcacctcttctggtcctcctctcaccagcgtcaatggcggctttgcccgtgactcgaggaaagctacggagaattcgtcatatcaagattttagtccgagaaacagaaatggttattgggtgaatattccaaccatgagtgcaccaacgagtccatacatgagtcctgtgcctagtccacaaaggaagagtactggccacgatttgccttttttttatttgcctcctaaaagcaatcaagcttggtctgctccagatatgccacttgatacctctggtcttcctcctcctgcattttatgatattactgcctttagtaccgataattctcccatccatagtccacaacctcggagtccacggaaacagatcagaagcccacaacctagcagaccatcttcaccgttgcattcggttgatagctcagctccaccgcgagatagtgtttcctcacctttgcatccgaggttgtctactgatgttacgaatgggcgacgtgattgctgcaatgttcatcctttgcctctccctcctggagctacttgttcctcttcatcagctgcttctgttccgtccccgcaggctcctctcaaactggattcattcccaatgaattcccagtggaagaaagggaagctaataggtcgtggtacttttggaagtgtttacgttgcaagcaacagcgaaactggagcattgtgtgcgatgaaagaagttgagctatttcctgatgaccccaaatccgcagagtgtataaagcaattagagcaggagatcaaacttctaagtaaccttcaacatccaaacattgtgcagtattttggtagcgagacagtagaagatcgtttctttatatacctggaatatgttcacccgggttcaataaacaaatatatccgtgatcattgcggcaccatgacagaatctgttgttcgcaattttactcgtcacattttgtctgggctggcttatttgcacaataaaaagactgtacatagggatatcaaaggtgctaatctccttgttgatgcttctggggttgtcaagcttgctgatttcggcatggctaaacaccttactggacaaagagctgatctctcgttaaagggaagcccgtactggatggcaccagagctcatgcaagctgtgatgcaaaaagatagcaacccagatctggcttttgctgttgatatatggagtttaggatgtacaatcattgagatgttcactgggaagcctccttggagtgagtttgaaggggctgcagctatgttcaaggtcatgagagatagcccaccgatacctgaatcaatgtcacctgagggtaaagacttcctgagattatgcttccagagaaacccagctgagcgaccaaccgcatctatgttgctagaacaccggttcctaaagaactctttgcaaccaacctcaccaagcaacagtgatgtctctcaattatttaatgggatgaacataacggaaccaagcagtagaagggagaagccaaatttcaaactagaccaggtcccgcgagctagaaacatgacatcctcagagagtgaaagtgggcaacagcagcagcaacaacagtaccggtctcccgatctaacaggaaccgtgaaccgtctgtctcctcgttccactctggaggctatcccaagcccgtgtccttcccaacgacctaagcccagcagcagtgacaggagaagaacgggcgtcacttcagatcacctttgatttgcagctcgagaggttaaccaatagaagctacttctatacgtattcttgtacacgtaagtgtatgtcaatgtacgtatttagagtttggggtcgcgtgggggaatacgattgggatgaaatgaaaatcctgtgggtggtagatgaagaatattgtgtctgtaaaattataattcaatgttgaatcgatagaagaagcttttttctttcttcctcttttttttttttttttgcttgagagagttgtgtataaattattttaacgacgtcttgtgtacctttggtttcgggtctgtatccacttttagatttagatccatttaaaacaaaattaatctctg

SEQ ID NO: 50750 - protein, 716 aa, Arabidopsis thaliana
  peptide (1)..(716): Ceres Seq. ID no. 12558910
MRWLPQISFSSPSSSPSSSLKPVASYSESPDPDRNQDRDRFHRRLFRFNRGRLTRQRKLRHLTDDDVLLGERRASTSSSTFDSGLTRSPSAFTAVPRSPSAVPLPLPLPLPEVAGIRNAANARGLDDRDRDPERLISDRTSSGPPLTSVNGGFARDSRKATENSSYQDFSPRNRNGYWVNIPTMSAPTSPYMSPVPSPQRKSTGHDLPFFYLPPKSNQAWSAPDMPLDTSGLPPPAFYDITAFSTDNSPIHSPQPRSPRKQIRSPQPSRPSSPLHSVDSSAPPRDSVSSPLHPRLSTDVTNGRRDCCNVHPLPLPPGATCSSSSAASVPSPQAPLKLDSFPMNSQWKKGKLIGRGTFGSVYVASNSETGALCAMKEVELFPDDPKSAECIKQLEQEIKLLSNLQHPNIVQYFGSETVEDRFFIYLEYVHPGSINKYIRDHCGTMTESVVRNFTRHILSGLAYLHNKKTVHRDIKGANLLVDASGVVKLADFGMAKHLTGQRADLSLKGSPYWMAPELMQAVMQKDSNPDLAFAVDIWSLGCTIIEMFTGKPPWSEFEGAAAMFKVMRDSPPIPESMSPEGKDFLRLCFQRNPAERPTASMLLEHRFLKNSLQPTSPSNSDVSQLFNGMNITEPSSRREKPNFKLDQVPRARNMTSSESESGQQQQQQQYRSPDLTGTVNRLSPRSTLEAIPSPCPSQRPKPSSSDRRRTGVTSDHL

SEQ ID NO: 50751 - protein, 533 aa, Arabidopsis thaliana
  peptide (1)..(533): Ceres Seq. ID no. 12558911
MSAPTSPYMSPVPSPQRKSTGHDLPFFYLPPKSNQAWSAPDMPLDTSGLPPPAFYDITAFSTDNSPIHSPQPRSPRKQIRSPQPSRPSSPLHSVDSSAPPRDSVSSPLHPRLSTDVTNGRRDCCNVHPLPLPPGATCSSSSAASVPSPQAPLKLDSFPMNSQWKKGKLIGRGTFGSVYVASNSETGALCAMKEVELFPDDPKSAECIKQLEQEIKLLSNLQHPNIVQYFGSETVEDRFFIYLEYVHPGSINKYIRDHCGTMTESVVRNFTRHILSGLAYLHNKKTVHRDIKGANLLVDASGVVKLADFGMAKHLTGQRADLSLKGSPYWMAPELMQAVMQKDSNPDLAFAVDIWSLGCTIIEMFTGKPPWSEFEGAAAMFKVMRDSPPIPESMSPEGKDFLRLCFQRNPAERPTASMLLEHRFLKNSLQPTSPSNSDVSQLFNGMNITEPSSRREKPNFKLDQVPRARNMTSSESESGQQQQQQQYRSPDLTGTVNRLSPRSTLEAIPSPCPSQRPKPSSSDRRRTGVTSDHL

SEQ ID NO: 50752 - protein, 525 aa, Arabidopsis thaliana
  peptide (1)..(525): Ceres Seq. ID no. 12558912
MSPVPSPQRKSTGHDLPFFYLPPKSNQAWSAPDMPLDTSGLPPPAFYDITAFSTDNSPIHSPQPRSPRKQIRSPQPSRPSSPLHSVDSSAPPRDSVSSPLHPRLSTDVTNGRRDCCNVHPLPLPPGATCSSSSAASVPSPQAPLKLDSFPMNSQWKKGKLIGRGTFGSVYVASNSETGALCAMKEVELFPDDPKSAECIKQLEQEIKLLSNLQHPNIVQYFGSETVEDRFFIYLEYVHPGSINKYIRDHCGTMTESVVRNFTRHILSGLAYLHNKKTVHRDIKGANLLVDASGVVKLADFGMAKHLTGQRADLSLKGSPYWMAPELMQAVMQKDSNPDLAFAVDIWSLGCTIIEMFTGKPPWSEFEGAAAMFKVMRDSPPIPESMSPEGKDFLRLCFQRNPAERPTASMLLEHRFLKNSLQPTSPSNSDVSQLFNGMNITEPSSRREKPNFKLDQVPRARNMTSSESESGQQQQQQQYRSPDLTGTVNRLSPRSTLEAIPSPCPSQRPKPSSSDRRRTGVTSDHL

SEQ ID NO: 50753 - DNA, 1288 bp, Arabidopsis thaliana
  misc_feature (1)..(1288): Ceres Seq. ID no. 13575314
  misc_feature (1)..(1288): Ortholog of  Ceres SEQ ID NO 15226408 as cited in SEQ ID NO 55563
gaaaatcagaaccaaacattccaatcctttgattgattgatttcacagtgaagatttctaattcttacgcttgctcttcacatctctcaaatctccagattggagcaacgaatctgattcaaccctaatttcaagcaaaaaccccttaccaagcctctgagattacatacagtcgtcactccaacatacgagagaagatacccaaaccaaaatggccaacgatcgacgcgcttcttctgtcaatccgtcgacggagcaagacaatgctatgtttcttgatatattgcatgaagctcctctctttggtcatcgtgaatcgagaagtcttgttggaagctgcatttatcttatcatattggcatgttatgctattttagcagcaggggcaccgtggatacttcagtctgtagactatcttatcccatcgctgctttgcagctgtaatgttgctttattgatgttaacaggtatgtttcagcaatattttgtcaatcaggtccagaaaatacgcttgcagggttattacagtttcagtcagaaactgaaacatgtagttcgtctgccatttgcaatcatggcctatgggactgcatctatgctacttttcatggagtggagaccatatgtcagtgttctacccatttttactgtgcaaaggttcatcatgtctgttgaagcaatttctgctgcttcttttatgattgtatttgttgctgttcttatctgtattttaatactggtaggttatgttcgccagtataactcagtgaattctcagcccgatgtcttaaattcattatattctcctcttcaaccagctgctttggaaggattgagataccatgaagccggtcgcctttctgatcaacaaatggctctactgcaatatcaacgcgagaatctccattatctcagtgaagagattctgcgtttgcaggagtccttaagtaaatatgaaacgaatggtagtagcacgcctcaggttgatctggcgcatcttgtggcaactcgagatcaggaattacgaacactatctgctgaggtggatcaactccattcagagcttaatctcgctcgatctctgatctctgagagagatagagagatacaacacgtccggaataccaataatcagtatgtagcagaaaatgaaaggttaagagctattcttggagaatggagtatgcgagctgcaaagcttgaacgagctctggaggtggagagaatatcaaatattgaactgcggaagaaagtttcagctctcagagaccagaggcaggtggcatga

SEQ ID NO: 50754 - protein, 358 aa, Arabidopsis thaliana
  peptide (1)..(358): Ceres Seq. ID no. 13575315
MANDRRASSVNPSTEQDNAMFLDILHEAPLFGHRESRSLVGSCIYLIILACYAILAAGAPWILQSVDYLIPSLLCSCNVALLMLTGMFQQYFVNQVQKIRLQGYYSFSQKLKHVVRLPFAIMAYGTASMLLFMEWRPYVSVLPIFTVQRFIMSVEAISAASFMIVFVAVLICILILVGYVRQYNSVNSQPDVLNSLYSPLQPAALEGLRYHEAGRLSDQQMALLQYQRENLHYLSEEILRLQESLSKYETNGSSTPQVDLAHLVATRDQELRTLSAEVDQLHSELNLARSLISERDREIQHVRNTNNQYVAENERLRAILGEWSMRAAKLERALEVERISNIELRKKVSALRDQRQVA

SEQ ID NO: 50755 - protein, 339 aa, Arabidopsis thaliana
  peptide (1)..(339): Ceres Seq. ID no. 13575316
MFLDILHEAPLFGHRESRSLVGSCIYLIILACYAILAAGAPWILQSVDYLIPSLLCSCNVALLMLTGMFQQYFVNQVQKIRLQGYYSFSQKLKHVVRLPFAIMAYGTASMLLFMEWRPYVSVLPIFTVQRFIMSVEAISAASFMIVFVAVLICILILVGYVRQYNSVNSQPDVLNSLYSPLQPAALEGLRYHEAGRLSDQQMALLQYQRENLHYLSEEILRLQESLSKYETNGSSTPQVDLAHLVATRDQELRTLSAEVDQLHSELNLARSLISERDREIQHVRNTNNQYVAENERLRAILGEWSMRAAKLERALEVERISNIELRKKVSALRDQRQVA

SEQ ID NO: 50756 - protein, 276 aa, Arabidopsis thaliana
  peptide (1)..(276): Ceres Seq. ID no. 13575317
MLTGMFQQYFVNQVQKIRLQGYYSFSQKLKHVVRLPFAIMAYGTASMLLFMEWRPYVSVLPIFTVQRFIMSVEAISAASFMIVFVAVLICILILVGYVRQYNSVNSQPDVLNSLYSPLQPAALEGLRYHEAGRLSDQQMALLQYQRENLHYLSEEILRLQESLSKYETNGSSTPQVDLAHLVATRDQELRTLSAEVDQLHSELNLARSLISERDREIQHVRNTNNQYVAENERLRAILGEWSMRAAKLERALEVERISNIELRKKVSALRDQRQVA

SEQ ID NO: 50757 - DNA, 1594 bp, Arabidopsis thaliana
  misc_feature (1)..(1594): Ceres Seq. ID no. 13617545
  misc_feature (1)..(1594): Ortholog of  Ceres SEQ ID NO 13532807 as cited in SEQ ID NO 53012
  misc_feature (1)..(1594): Ortholog of  Ceres SEQ ID NO 13663060 as cited in SEQ ID NO 60964
  misc_feature (1)..(1594): Ortholog of  Ceres SEQ ID NO 13500573 as cited in SEQ ID NO 67431
  misc_feature (1)..(1594): Ortholog of  Ceres SEQ ID NO 13656501 as cited in SEQ ID NO 69206
gatttcagacaatcttcttcttcgttgcagcttcgtggaaattattttctctttctcttccattattatcttaaagtgagaaatcaataagatgttggagaaagagtttttcacggagtatggtgaagcaagtcaatatcagatccaagaagttgttggcaaaggaagctacggagttgttgcttctgcggaatgtccacacacgggaggcaaagtagccatcaagaagatgacaaatgtgtttgaacatgtctcagatgctattcgtatcctcagagagatcaagcttctcaggcttcttcgacatcctgatatcgtggagatcaagcatatcatgcttcctccttgtcgcaaggaattcaaagatatatatgttgtttttgagttgatggagtctgatcttcaccacgttcttaaggtaaatgacgacctcactcctcagcatcatcaattcttcttgtaccaacttcttcgtggcttaaaattcatgcactcagctcatgtgttccatagagatctgaagcctaagaacatcctcgctaatgctgattgcaaaatcaagatctgtgatttaggacttgctcgtgtctcctttactgattccccttctgctgtgttttggactgactacgttgctacaagatggtaccgtgcgccagagctctgtggttccttctattctaactacacgccggcgattgacatgtggagtgttgggtgcatatttgcagagatgctaactggaaaacctttgtttcctggcaaaaacgttgtgcaccagctagaactcgtgactgatctgcttggaactccgtcgccgataactctatccaggattcggaatgagaaggctagaaagtatttgggaaacatgaggcgaaaggatcctgtacctttcacccataaattccccaatatcgatcctgtggcgctgaagttacttcagcgtttgatcgcttttgacccaaaggaccgtccctctgcagaagaggcattggctgatccgtattttcaaggattggcaaatgtggactatgaaccatcgaggcaacctatctcgaaacttgagtttgagtttgagaggaggaaattgactcgcgatgacgtgagggaactcatgtacagagagattttggagtatcatccacagatgttgcaagagtatctacaaggagaagagaacataaactctcattttctatacccaagagaaagtgtgtcttactttggtgaatcaatcttgatatccagcggagttgatcagttcaaacaagagtttgcccgactcgaagaacacaacgacgatgaagaggaacacaactccccaccacatcagagaaagtacacttcactccctagagaacgggtgtgctcatcagaagacgaaggttctgattcagttcatgctcaatcgtcttcagcttcagtggtgtttacacctccacagactccaaacacagcaactggcttatcatcacagaaggcgtcacaagtagacaaagcagcaactccggtaaaacggtctgcatgtctaatgaggagtgatagtatctgtgcttcaagatgtgttggtgtctcctctgcagtgtcatag

SEQ ID NO: 50758 - protein, 500 aa, Arabidopsis thaliana
  peptide (1)..(500): Ceres Seq. ID no. 13617546
MLEKEFFTEYGEASQYQIQEVVGKGSYGVVASAECPHTGGKVAIKKMTNVFEHVSDAIRILREIKLLRLLRHPDIVEIKHIMLPPCRKEFKDIYVVFELMESDLHHVLKVNDDLTPQHHQFFLYQLLRGLKFMHSAHVFHRDLKPKNILANADCKIKICDLGLARVSFTDSPSAVFWTDYVATRWYRAPELCGSFYSNYTPAIDMWSVGCIFAEMLTGKPLFPGKNVVHQLELVTDLLGTPSPITLSRIRNEKARKYLGNMRRKDPVPFTHKFPNIDPVALKLLQRLIAFDPKDRPSAEEALADPYFQGLANVDYEPSRQPISKLEFEFERRKLTRDDVRELMYREILEYHPQMLQEYLQGEENINSHFLYPRESVSYFGESILISSGVDQFKQEFARLEEHNDDEEEHNSPPHQRKYTSLPRERVCSSEDEGSDSVHAQSSSASVVFTPPQTPNTATGLSSQKASQVDKAATPVKRSACLMRSDSICASRCVGVSSAVS

SEQ ID NO: 50759 - protein, 454 aa, Arabidopsis thaliana
  peptide (1)..(454): Ceres Seq. ID no. 13617547
MTNVFEHVSDAIRILREIKLLRLLRHPDIVEIKHIMLPPCRKEFKDIYVVFELMESDLHHVLKVNDDLTPQHHQFFLYQLLRGLKFMHSAHVFHRDLKPKNILANADCKIKICDLGLARVSFTDSPSAVFWTDYVATRWYRAPELCGSFYSNYTPAIDMWSVGCIFAEMLTGKPLFPGKNVVHQLELVTDLLGTPSPITLSRIRNEKARKYLGNMRRKDPVPFTHKFPNIDPVALKLLQRLIAFDPKDRPSAEEALADPYFQGLANVDYEPSRQPISKLEFEFERRKLTRDDVRELMYREILEYHPQMLQEYLQGEENINSHFLYPRESVSYFGESILISSGVDQFKQEFARLEEHNDDEEEHNSPPHQRKYTSLPRERVCSSEDEGSDSVHAQSSSASVVFTPPQTPNTATGLSSQKASQVDKAATPVKRSACLMRSDSICASRCVGVSSAVS

SEQ ID NO: 50760 - protein, 419 aa, Arabidopsis thaliana
  peptide (1)..(419): Ceres Seq. ID no. 13617548
MLPPCRKEFKDIYVVFELMESDLHHVLKVNDDLTPQHHQFFLYQLLRGLKFMHSAHVFHRDLKPKNILANADCKIKICDLGLARVSFTDSPSAVFWTDYVATRWYRAPELCGSFYSNYTPAIDMWSVGCIFAEMLTGKPLFPGKNVVHQLELVTDLLGTPSPITLSRIRNEKARKYLGNMRRKDPVPFTHKFPNIDPVALKLLQRLIAFDPKDRPSAEEALADPYFQGLANVDYEPSRQPISKLEFEFERRKLTRDDVRELMYREILEYHPQMLQEYLQGEENINSHFLYPRESVSYFGESILISSGVDQFKQEFARLEEHNDDEEEHNSPPHQRKYTSLPRERVCSSEDEGSDSVHAQSSSASVVFTPPQTPNTATGLSSQKASQVDKAATPVKRSACLMRSDSICASRCVGVSSAVS

SEQ ID NO: 50761 - DNA, 1681 bp, Arabidopsis thaliana
  misc_feature (1)..(1681): Ceres Seq. ID no. 13575318
  misc_feature (1)..(1681): Ortholog of  Ceres SEQ ID NO 13594151 as cited in SEQ ID NO 58886
gacaatcgcagagactctttacgaaagagaaatatcaagactaagaaacaagaagagtaagaatcattgggagagcgatcatggcgacgagagcaaacgtacctgaacaagtcagaggtgctcctctcgttgatggtttgaagattcagaacaaaaacggtgctgtgaagagtcggcgtgccctcggtgacatcggaaatcttgtttctgttcccggagttcaaggaggaaaggctcaacctccgattaatcgacccattactcgaagtttccgtgcccagttattagcgaatgcccaactcgaaagaaagccaatcaatggagacaacaaggttccagctcttggtccaaagagacaacctcttgctgcaagaaacccagaagctcaaagggcggttcagaagaagaatctagtggttaagcaacagacgaagcctgttgaagtgatcgagacgaagaaggaggtgactaaaaaggaagtagcgatgtcacctaagaataagaaagtgacgtactcgtctgtacttagtgctcggagcaaagctgcttgtggtatagtcaacaaaccaaagattatcgatattgatgaatctgacaaagataaccatttggctgcggtggagtatgttgatgatatgtactcgttctataaagaagttgagaaggagagtcagcctaagatgtacatgcacattcagactgaaatgaatgagaagatgagagcgatcttgattgattggttactagaagttcacatcaagtttgagctcaaccttgaaactctgtacctcaccgtcaacatcattgatcgattcctctctgtgaaagctgtccctaaaagagagttacagctagtgggaatcagtgccttgcttattgcttccaaatatgaagaaatctggccacctcaggttaacgatctggtgtatgtcacggacaatgcttacagtagcagacagattctggtgatggagaaggcaattcttggaaacctcgaatggtatttgacagtcccgactcaatacgtcttccttgtccgcttcatcaaagcttcgatgtctgatccagaaatggagaatatggttcacttccttgctgaattggggatgatgcattacgacaccttgacgttctgtccctccatgcttgctgcttcagctgtttacacggcaagatgctcattgaacaagtcccctgcttggactgatacattgcagttccacaccggctacacagagtctgagattatggactgctcaaagcttttagcttttcttcactcgagatgcggtgagagcaggctacgtgcagtgtacaagaagtactcgaaggcagagaatggaggtgttgctatggtttctccggccaagtctctcttgagtgctgctgctgattggaagaagcctgtttcttcttagatgttttttttcatcagatctctctctgattcaaaattctagatttctcatcagatactcttttgtttttttgagttcaaacgtattaatgaattcttctcatcagtgtttttcttaatctctgattacttggatattagatttctactatatctttaacagatagatgatgtttgactgtaataaatcagatgcgtgcaattagtttccgacttattgtaaattgaatgatgataaatgaaatgcataaaatagttaatgtt

SEQ ID NO: 50762 - protein, 445 aa, Arabidopsis thaliana
  peptide (1)..(445): Ceres Seq. ID no. 13575319
MATRANVPEQVRGAPLVDGLKIQNKNGAVKSRRALGDIGNLVSVPGVQGGKAQPPINRPITRSFRAQLLANAQLERKPINGDNKVPALGPKRQPLAARNPEAQRAVQKKNLVVKQQTKPVEVIETKKEVTKKEVAMSPKNKKVTYSSVLSARSKAACGIVNKPKIIDIDESDKDNHLAAVEYVDDMYSFYKEVEKESQPKMYMHIQTEMNEKMRAILIDWLLEVHIKFELNLETLYLTVNIIDRFLSVKAVPKRELQLVGISALLIASKYEEIWPPQVNDLVYVTDNAYSSRQILVMEKAILGNLEWYLTVPTQYVFLVRFIKASMSDPEMENMVHFLAELGMMHYDTLTFCPSMLAASAVYTARCSLNKSPAWTDTLQFHTGYTESEIMDCSKLLAFLHSRCGESRLRAVYKKYSKAENGGVAMVSPAKSLLSAAADWKKPVSS

SEQ ID NO: 50763 - protein, 310 aa, Arabidopsis thaliana
  peptide (1)..(310): Ceres Seq. ID no. 13575320
MSPKNKKVTYSSVLSARSKAACGIVNKPKIIDIDESDKDNHLAAVEYVDDMYSFYKEVEKESQPKMYMHIQTEMNEKMRAILIDWLLEVHIKFELNLETLYLTVNIIDRFLSVKAVPKRELQLVGISALLIASKYEEIWPPQVNDLVYVTDNAYSSRQILVMEKAILGNLEWYLTVPTQYVFLVRFIKASMSDPEMENMVHFLAELGMMHYDTLTFCPSMLAASAVYTARCSLNKSPAWTDTLQFHTGYTESEIMDCSKLLAFLHSRCGESRLRAVYKKYSKAENGGVAMVSPAKSLLSAAADWKKPVSS

SEQ ID NO: 50764 - protein, 260 aa, Arabidopsis thaliana
  peptide (1)..(260): Ceres Seq. ID no. 13575321
MYSFYKEVEKESQPKMYMHIQTEMNEKMRAILIDWLLEVHIKFELNLETLYLTVNIIDRFLSVKAVPKRELQLVGISALLIASKYEEIWPPQVNDLVYVTDNAYSSRQILVMEKAILGNLEWYLTVPTQYVFLVRFIKASMSDPEMENMVHFLAELGMMHYDTLTFCPSMLAASAVYTARCSLNKSPAWTDTLQFHTGYTESEIMDCSKLLAFLHSRCGESRLRAVYKKYSKAENGGVAMVSPAKSLLSAAADWKKPVSS

SEQ ID NO: 50765 - DNA, 2211 bp, Arabidopsis thaliana
  misc_feature (1)..(2211): Ceres Seq. ID no. 12558926
  misc_feature (1)..(2211): Ortholog of  Ceres SEQ ID NO 14303276 as cited in SEQ ID NO 1264
  misc_feature (1)..(2211): Ortholog of  Ceres SEQ ID NO 15170536 as cited in SEQ ID NO 52791
  misc_feature (1)..(2211): Ortholog of  Ceres SEQ ID NO 15171813 as cited in SEQ ID NO 57309
  misc_feature (1)..(2211): Ortholog of  Ceres SEQ ID NO 14314378 as cited in SEQ ID NO 57601
  misc_feature (1)..(2211): Ortholog of  Ceres SEQ ID NO 12465083 as cited in SEQ ID NO 68239
gaaaacaaacctagccgcaattcacaattcctctttcacaatctttctttcgattttttagcttaatcctgagtagcgttaacaatggctggtaaaggagaaggtccagcgattggtatcgatctcggtaccacttactcttgcgttggagtttggcaacacgaccgtgttgagatcattgctaatgatcaaggtaacagaaccacaccgtcttacgtcgccttcactgatagcgaacggttgattggtgacgccgcaaagaatcaggtcgccatgaacccgattaacactgttttcgatgcgaagaggttgattggtcgaagatttactgatagctctgttcaaagtgacatcaaattgtggcccttcacgctcaaatctggacctgctgaaaaaccaatgatcgtcgttaactacaagggagaagataaagagttttctgctgaagaaatctcttctatgattctcatcaagatgcgtgagattgctgaagcttaccttggtacaacgatcaagaacgctgttgttactgttccagcttacttcaatgactctcagcgtcaggctactaaggatgctggtgttattgctggtttgaatgttatgcgtatcatcaacgagcctactgcagctgctattgcttacggtcttgacaagaaggctacaagtgttggtgagaagaacgttttgatctttgaccttggtggtggtacattcgatgtctctcttttgaccattgaggaaggtatatttgaagtgaaggcgactgcaggagacactcatcttggtggtgaggatttcgacaacagaatggtgaatcactttgttcaagagttcaagaggaagaacaagaaggacattagtggaaacccgagagctctaaggaggttgagaaccgcctgtgagagagcgaagaggactttgtcatctacggctcagaccaccatcgaaatcgactctctgttcgatggtattgacttctacgctcctatcacccgtgccagattcgaggagcttaacatagatctcttcagaaagtgtatggagcctgttgagaagtgtcttcgtgatgctaagatggacaagaactcaatcgatgatgttgtccttgttggtggctcaacccgtatccccaaggtccagcaattgctcgttgacttcttcaacggcaaggagctttgcaaatctatcaaccccgatgaggctgttgcatatggtgctgctgtccaggcagctattctcagtggtgagggtaatgagaaggttcaagatctcctcttgcttgatgtcacaccactatctcttggtcttgaaaccgctggaggagtcatgactgtcttgatccagaggaatacaaccatccccacaaagaaggagcaagtcttctcaacttattcagacaaccaacccggtgttttgatccaagtctatgaaggcgagagagcaagaaccaaggacaacaacctgttgggtaaattcgagctttctggtatccctccagcaccaagaggtgttcctcaaatcactgtctgttttgacattgatgcaaacggtatcctcaacgtctcggctgaggacaagacaacggggcagaagaacaagatcacaatcaccaacgacaagggaagattgtcaaaggacgagattgagaaaatggttcaagaggcagagaagtacaagtcggaggatgaggagcacaagaagaaggtggacgccaagaatgctcttgagaattacgcatacaacatgaggaacacaatccgtgatgagaagattggcgagaagcttgctggagatgacaagaagaagattgaagactcaattgaagcagccattgaatggctagaagcgaatcagctagcagagtgtgatgaatttgaggacaagatgaaagagctcgagagtatttgcaacccgatcatagcaaagatgtaccaaggcggtgaagctggtggtccagctgcaggaggaatggacgaggatgttcctccttctgccggaggtgcaggtcccaagattgaggaagtcgactaataactttctctcttactctcttactctcagtctttatgtgtttgtatttcaacattttcctgttttgtcccctagttttttttttctttttctttcttgtattgactctattttgagggctcgcttgtttcgatgagctccttattttttttaatctataacaggaatgttttgatt

SEQ ID NO: 50766 - protein, 649 aa, Arabidopsis thaliana
  peptide (1)..(649): Ceres Seq. ID no. 12558927
MAGKGEGPAIGIDLGTTYSCVGVWQHDRVEIIANDQGNRTTPSYVAFTDSERLIGDAAKNQVAMNPINTVFDAKRLIGRRFTDSSVQSDIKLWPFTLKSGPAEKPMIVVNYKGEDKEFSAEEISSMILIKMREIAEAYLGTTIKNAVVTVPAYFNDSQRQATKDAGVIAGLNVMRIINEPTAAAIAYGLDKKATSVGEKNVLIFDLGGGTFDVSLLTIEEGIFEVKATAGDTHLGGEDFDNRMVNHFVQEFKRKNKKDISGNPRALRRLRTACERAKRTLSSTAQTTIEIDSLFDGIDFYAPITRARFEELNIDLFRKCMEPVEKCLRDAKMDKNSIDDVVLVGGSTRIPKVQQLLVDFFNGKELCKSINPDEAVAYGAAVQAAILSGEGNEKVQDLLLLDVTPLSLGLETAGGVMTVLIQRNTTIPTKKEQVFSTYSDNQPGVLIQVYEGERARTKDNNLLGKFELSGIPPAPRGVPQITVCFDIDANGILNVSAEDKTTGQKNKITITNDKGRLSKDEIEKMVQEAEKYKSEDEEHKKKVDAKNALENYAYNMRNTIRDEKIGEKLAGDDKKKIEDSIEAAIEWLEANQLAECDEFEDKMKELESICNPIIAKMYQGGEAGGPAAGGMDEDVPPSAGGAGPKIEEVD

SEQ ID NO: 50767 - protein, 586 aa, Arabidopsis thaliana
  peptide (1)..(586): Ceres Seq. ID no. 12558928
MNPINTVFDAKRLIGRRFTDSSVQSDIKLWPFTLKSGPAEKPMIVVNYKGEDKEFSAEEISSMILIKMREIAEAYLGTTIKNAVVTVPAYFNDSQRQATKDAGVIAGLNVMRIINEPTAAAIAYGLDKKATSVGEKNVLIFDLGGGTFDVSLLTIEEGIFEVKATAGDTHLGGEDFDNRMVNHFVQEFKRKNKKDISGNPRALRRLRTACERAKRTLSSTAQTTIEIDSLFDGIDFYAPITRARFEELNIDLFRKCMEPVEKCLRDAKMDKNSIDDVVLVGGSTRIPKVQQLLVDFFNGKELCKSINPDEAVAYGAAVQAAILSGEGNEKVQDLLLLDVTPLSLGLETAGGVMTVLIQRNTTIPTKKEQVFSTYSDNQPGVLIQVYEGERARTKDNNLLGKFELSGIPPAPRGVPQITVCFDIDANGILNVSAEDKTTGQKNKITITNDKGRLSKDEIEKMVQEAEKYKSEDEEHKKKVDAKNALENYAYNMRNTIRDEKIGEKLAGDDKKKIEDSIEAAIEWLEANQLAECDEFEDKMKELESICNPIIAKMYQGGEAGGPAAGGMDEDVPPSAGGAGPKIEEVD

SEQ ID NO: 50768 - protein, 544 aa, Arabidopsis thaliana
  peptide (1)..(544): Ceres Seq. ID no. 12558929
MIVVNYKGEDKEFSAEEISSMILIKMREIAEAYLGTTIKNAVVTVPAYFNDSQRQATKDAGVIAGLNVMRIINEPTAAAIAYGLDKKATSVGEKNVLIFDLGGGTFDVSLLTIEEGIFEVKATAGDTHLGGEDFDNRMVNHFVQEFKRKNKKDISGNPRALRRLRTACERAKRTLSSTAQTTIEIDSLFDGIDFYAPITRARFEELNIDLFRKCMEPVEKCLRDAKMDKNSIDDVVLVGGSTRIPKVQQLLVDFFNGKELCKSINPDEAVAYGAAVQAAILSGEGNEKVQDLLLLDVTPLSLGLETAGGVMTVLIQRNTTIPTKKEQVFSTYSDNQPGVLIQVYEGERARTKDNNLLGKFELSGIPPAPRGVPQITVCFDIDANGILNVSAEDKTTGQKNKITITNDKGRLSKDEIEKMVQEAEKYKSEDEEHKKKVDAKNALENYAYNMRNTIRDEKIGEKLAGDDKKKIEDSIEAAIEWLEANQLAECDEFEDKMKELESICNPIIAKMYQGGEAGGPAAGGMDEDVPPSAGGAGPKIEEVD

SEQ ID NO: 50769 - DNA, 1902 bp, Arabidopsis thaliana
  misc_feature (1)..(1902): Ceres Seq. ID no. 12558930
  misc_feature (1)..(1902): Ortholog of  Ceres SEQ ID NO 13659971 as cited in SEQ ID NO 67565
  misc_feature (1)..(1902): Ortholog of  Ceres SEQ ID NO 13500385 as cited in SEQ ID NO 67583
aatttttcgcaattttaattttcgaacaaatgatttgacgttcttcttggtattcacgcgttgaaaatttccaccctttcatatattgttcttcacctccttcgtttttttctcatccatctcttccagaattctcttaaagtttcctactttcctggaatttcagtcctcaatctctcaagtttcatcggttttgatttgggtttgatcggaaaagtcatgggtaattgttgcggaacagcaggatcattggctcaaaacgataacaaacccaaaaaaggaaggaagaagcaaaaccctttctcgattgattacggtcttcaccacggtggtggagatggaggtggaagacctcttaagcttatcgttttgaatgatccaacaggtcgtgagatcgagtctaaatacacgttggggagagagctaggtcgtggagaattcggtgttacgtatctatgtactgataaggagacagacgacgtttttgcttgtaaatcgattttgaagaagaagctgaggacagctgttgatattgaagatgttaggagagaggttgagattatgaggcatatgcctgagcatcctaatgttgttactttgaaggagacttatgaggatgagcatgctgttcatttggttatggagctttgtgaaggtggtgaattgtttgataggattgttgctagagggcattatactgagagagctgctgctgctgtcactaagaccatcatggaagttgttcaggtgtgtcataagcatggggtaatgcacagggacctgaaacctgagaacttcttgtttggaaacaagaaggagactgcacctcttaaggcgattgattttggtctctctgttttctttaaaccaggcgagaggtttaacgaaatcgttggtagtccgtactacatggctcccgaggtgctaaaacggaattatggtccagaagttgatatttggagtgcaggtgtaattctttacatactgctatgtggtgtcccgcctttctgggcagaaactgaacaaggagttgcacaagcaattattcgatctgtactagacttcagaagggacccatggcccaaggtttctgaaaacgcaaaagaccttatcaggaaaatgcttgatcctgaccaaaagcgtcgtcttacagctcaacaagtcctagatcacccgtggttacagaatgcaaagacagcccccaatgtatcattgggtgaaacagtgagggcaaggttgaagcagttcaccgtcatgaacaagctcaagaaacgagcactcagggttattgctgagcatttatcagatgaagaagcttcaggtataagagaagggttccaaataatggacacaagccaaagagggaagattaacatcgacgagcttaaaatcgggttgcagaaacttggtcatgccattccgcaagatgatttacaaattttgatggatgctggagacatcgatagagatggatatttggactgtgacgagtttattgccatatcggtacacctaaggaaaatgggcaatgacgagcatctcaagaaagcgtttgcgttctttgatcaaaacaataacggatatatcgaaatagaggagttaagggaagccttgtctgacgaacttggtacaagtgaagaagttgttgatgccattatccgtgatgttgacaccgacaaggatggaagaataagttacgaagagtttgtaacgatgatgaaaacaggaacagattggagaaaagcttcgagacagtactcgagagaacggtttaacagtatcagtctcaaactgatgcaagatgcgtcgttgcagagttgtgtgtttgatatcctggctaatgagcgagctgagtatggggatcaagagagaaaaaccgtgttggcctttggctgtgtgtag

SEQ ID NO: 50770 - protein, 560 aa, Arabidopsis thaliana
  peptide (1)..(560): Ceres Seq. ID no. 12558931
MGNCCGTAGSLAQNDNKPKKGRKKQNPFSIDYGLHHGGGDGGGRPLKLIVLNDPTGREIESKYTLGRELGRGEFGVTYLCTDKETDDVFACKSILKKKLRTAVDIEDVRREVEIMRHMPEHPNVVTLKETYEDEHAVHLVMELCEGGELFDRIVARGHYTERAAAAVTKTIMEVVQVCHKHGVMHRDLKPENFLFGNKKETAPLKAIDFGLSVFFKPGERFNEIVGSPYYMAPEVLKRNYGPEVDIWSAGVILYILLCGVPPFWAETEQGVAQAIIRSVLDFRRDPWPKVSENAKDLIRKMLDPDQKRRLTAQQVLDHPWLQNAKTAPNVSLGETVRARLKQFTVMNKLKKRALRVIAEHLSDEEASGIREGFQIMDTSQRGKINIDELKIGLQKLGHAIPQDDLQILMDAGDIDRDGYLDCDEFIAISVHLRKMGNDEHLKKAFAFFDQNNNGYIEIEELREALSDELGTSEEVVDAIIRDVDTDKDGRISYEEFVTMMKTGTDWRKASRQYSRERFNSISLKLMQDASLQSCVFDILANERAEYGDQERKTVLAFGCV

SEQ ID NO: 50771 - protein, 446 aa, Arabidopsis thaliana
  peptide (1)..(446): Ceres Seq. ID no. 12558932
MRHMPEHPNVVTLKETYEDEHAVHLVMELCEGGELFDRIVARGHYTERAAAAVTKTIMEVVQVCHKHGVMHRDLKPENFLFGNKKETAPLKAIDFGLSVFFKPGERFNEIVGSPYYMAPEVLKRNYGPEVDIWSAGVILYILLCGVPPFWAETEQGVAQAIIRSVLDFRRDPWPKVSENAKDLIRKMLDPDQKRRLTAQQVLDHPWLQNAKTAPNVSLGETVRARLKQFTVMNKLKKRALRVIAEHLSDEEASGIREGFQIMDTSQRGKINIDELKIGLQKLGHAIPQDDLQILMDAGDIDRDGYLDCDEFIAISVHLRKMGNDEHLKKAFAFFDQNNNGYIEIEELREALSDELGTSEEVVDAIIRDVDTDKDGRISYEEFVTMMKTGTDWRKASRQYSRERFNSISLKLMQDASLQSCVFDILANERAEYGDQERKTVLAFGCV

SEQ ID NO: 50772 - protein, 443 aa, Arabidopsis thaliana
  peptide (1)..(443): Ceres Seq. ID no. 12558933
MPEHPNVVTLKETYEDEHAVHLVMELCEGGELFDRIVARGHYTERAAAAVTKTIMEVVQVCHKHGVMHRDLKPENFLFGNKKETAPLKAIDFGLSVFFKPGERFNEIVGSPYYMAPEVLKRNYGPEVDIWSAGVILYILLCGVPPFWAETEQGVAQAIIRSVLDFRRDPWPKVSENAKDLIRKMLDPDQKRRLTAQQVLDHPWLQNAKTAPNVSLGETVRARLKQFTVMNKLKKRALRVIAEHLSDEEASGIREGFQIMDTSQRGKINIDELKIGLQKLGHAIPQDDLQILMDAGDIDRDGYLDCDEFIAISVHLRKMGNDEHLKKAFAFFDQNNNGYIEIEELREALSDELGTSEEVVDAIIRDVDTDKDGRISYEEFVTMMKTGTDWRKASRQYSRERFNSISLKLMQDASLQSCVFDILANERAEYGDQERKTVLAFGCV

SEQ ID NO: 50773 - DNA, 1006 bp, Arabidopsis thaliana; identical to SEQ ID NO: 40003
  misc_feature (1)..(1006): Ceres Seq. ID no. 12371342
  misc_feature (1)..(1006): Ortholog of  Ceres SEQ ID NO 13503500 as cited in SEQ ID NO 68001
  misc_feature (1)..(1006): Ortholog of  Ceres SEQ ID NO 15174327 as cited in SEQ ID NO 0

SEQ ID NO: 50774 - protein, 169 aa, Arabidopsis thaliana; identical to SEQ ID NO: 40004
  peptide (1)..(169): Ceres Seq. ID no. 12371343

SEQ ID NO: 50775 - protein, 128 aa, Arabidopsis thaliana; identical to SEQ ID NO: 40005
  peptide (1)..(128): Ceres Seq. ID no. 12371344

SEQ ID NO: 50776 - protein, 114 aa, Arabidopsis thaliana; identical to SEQ ID NO: 40006
  peptide (1)..(114): Ceres Seq. ID no. 12371345

SEQ ID NO: 50777 - DNA, 2745 bp, Arabidopsis thaliana; identical to SEQ ID NO: 45606
  misc_feature (1)..(2745): Ceres Seq. ID no. 13591675
  misc_feature (1)..(2745): Ortholog of  Ceres SEQ ID NO 13598668 as cited in SEQ ID NO 60784
  misc_feature (1)..(2745): Ortholog of  Ceres SEQ ID NO 13659835 as cited in SEQ ID NO 60791

SEQ ID NO: 50778 - protein, 98 aa, Arabidopsis thaliana; identical to SEQ ID NO: 45607
  peptide (1)..(98): Ceres Seq. ID no. 13591676

SEQ ID NO: 50779 - protein, 55 aa, Arabidopsis thaliana; identical to SEQ ID NO: 45608
  peptide (1)..(55): Ceres Seq. ID no. 13591677

SEQ ID NO: 50780 - DNA, 3102 bp, Arabidopsis thaliana
  misc_feature (1)..(3102): Ceres Seq. ID no. 12558946
  misc_feature (1)..(3102): Ortholog of  Ceres SEQ ID NO 14306557 as cited in SEQ ID NO 53442
atctccgccgtattaatacaagctctctgaacgcactctacgacgagcctaacgtctttctccgatcgccggttagcagattcaagcgagatacgagatccgacgagcagatcttctgcttaatctgtaaacatgcctctcagactagatatcaagagaaagtttgctcaacgatcagagagagtcaaatctgttgatctgcatcctactgaaccatggattctagcaagtttgtattctggaaccgtgtgtatttggaactaccagacacagacgattacaaaatccttcgaggtgacggaattgccagttaggtcggccaagtttattccgcgcaagcaatgggttgtggctggagcggatgatatgtacatccgtgtatacaattacaatacaatggacaaggtcaaagtatttgaggctcattcggattacattaggtgtgtagctgtccatccgacccttccatatgtgctgtcatcttctgatgatatgctcataaagctttgggactgggaaaacggttgggcttgtactcagatatttgagggacattcgcactatgtgatgcaagtggtatttaatccaaaagataccaacacttttgccagtgcttcgcttgatcgtaccataaagatatggaatcttggttccccagacccaaattttacactggatgctcatcagaaaggagtcaactgtgtagattatttcacagggggtgataaaccctatctaattaccggctctgatgatcatactgctaaggtatgggactatcaaaccaaaagttgtgtccagacgctagatgggcacacacacaatgtttctgccgtatgtttccatccagagcttccaataataatcacaggttctgaggatggcactgttcgcatttggcacgccactacctacaggctagaaaacacattaaattatggtctcgagagagtttgggccattggttacatcaaaagttctcggcgggttgtgattggatatgatgaaggaaccatcatggttaaacttggacgagaaattcctgtcgctagcatggacagtagcggaaaaatcatatgggctaagcataatgaaattcaaaccgcaaacatcaaaagtattggtgcaggttacgaggctactgatggagaaagacttcccttgtctgttaaagagttggggacctgtgatctttatccacaaagcttgaagcacaaccctaatgggaggtttgtcgtagtctgcggtgatggagagtacataatctacactgctttggcgtggagaaatagatcttttgggtctggcctggaatttgtttggtcatctgagggggaatgtgcggttagagaaagctcatcaaagataaagatattcagtaaaaatttccaggaaaggaagagtatccggcctactttctcagctgagaagatttttggaggaaccttgttagcaatgtgttcgaatgatttcatctgcttctatgattgggccgaatgcaggctgattcaacaaattgatgtcaccgtaaagaatctttattgggctgaaagtggtgatttagtagccattgctagtgatacgtcattctacatcttgaagtacaatcgagagttggtttcctcgcattttgatagtggaagaccaactgatgaagagggtgttgaggatgcttttgaggttctccacgagaatgatgaacgtgttaggaccggtatatgggttggggactgcttcatttacaacaactcttcttggaagcttaactattgtgttggaggcgaggtaaccacaatgtatcatttggaccgcccaatgtatttgttaggctatattgccaaccaaagccgggtttacttggtagacaaagaattcaatgtcataggatataccctgctgcttagcctgattgaatacaagactcttgtgatgcgaggcgatttggatagagccaatcaaattttacctacaattcctaaagagcagcataacaatgttgctcatttcttggaatctcggggaatgattgaagatgctttagaaattgcgacagatccagactacaaatttgatctggccatacaactgggtagacttgaaattgcaaaggaaattgctgaagaagtacagagcgagtctaaatggaagcagttaggagagttagccatgtcctcggggaagctgcaattggccgaggattgcatgaagtacgctatggatttgagtggtttgttactactatattcttctttgggagatgctgaaggggtgtcaaaacttgcatgccttgctaaggaacaggggaagaacaatgttgcctttctttgcttatttacgctgggtagattggaagattgtctgcagttattggtggagagtaaccggataccagaagctgctctgatggcacgttcttatcttccaagcaaagtttcggagatagtagctctatggagggaagatctcagcaaggttaatccaaaagcagctgaatctttagctgatcctgaagagtactcaaatctttttgaggattggcaagttgctctttctgttgaagcgaacactgcagagacaaggggagtttataccgctgcagaaaattatccatcccatgccgataaaccttccattacccttgtggaagcctttagaaacctgcaagttgaagcagaggaatcacttgaaaatggaaacatcgatcacgaggtagcagaagaaaacggtcatgtagagaatgaaggagatgaagaggaacaacaggaagaagaagtgaatgaagaagagggagttgtggatgcagactctacggacggtgctgtacttgttaatggaagtgaggtgcttacgccacatccctagctagatccagtagccggcaccgatactccaagcaggaatcgattcttggtggatggagagtataaagacgaagatgggattggtggattaaggaatttggtgttgtggttttttcaactaatgattgtggttttcatctgaaagagtatattataacacagtagagagttatacaaattttctgctttagatttcagctcaaaattacaaatttctggtgcatatataattctttggaag

SEQ ID NO: 50781 - protein, 909 aa, Arabidopsis thaliana
  peptide (1)..(909): Ceres Seq. ID no. 12558947
MPLRLDIKRKFAQRSERVKSVDLHPTEPWILASLYSGTVCIWNYQTQTITKSFEVTELPVRSAKFIPRKQWVVAGADDMYIRVYNYNTMDKVKVFEAHSDYIRCVAVHPTLPYVLSSSDDMLIKLWDWENGWACTQIFEGHSHYVMQVVFNPKDTNTFASASLDRTIKIWNLGSPDPNFTLDAHQKGVNCVDYFTGGDKPYLITGSDDHTAKVWDYQTKSCVQTLDGHTHNVSAVCFHPELPIIITGSEDGTVRIWHATTYRLENTLNYGLERVWAIGYIKSSRRVVIGYDEGTIMVKLGREIPVASMDSSGKIIWAKHNEIQTANIKSIGAGYEATDGERLPLSVKELGTCDLYPQSLKHNPNGRFVVVCGDGEYIIYTALAWRNRSFGSGLEFVWSSEGECAVRESSSKIKIFSKNFQERKSIRPTFSAEKIFGGTLLAMCSNDFICFYDWAECRLIQQIDVTVKNLYWAESGDLVAIASDTSFYILKYNRELVSSHFDSGRPTDEEGVEDAFEVLHENDERVRTGIWVGDCFIYNNSSWKLNYCVGGEVTTMYHLDRPMYLLGYIANQSRVYLVDKEFNVIGYTLLLSLIEYKTLVMRGDLDRANQILPTIPKEQHNNVAHFLESRGMIEDALEIATDPDYKFDLAIQLGRLEIAKEIAEEVQSESKWKQLGELAMSSGKLQLAEDCMKYAMDLSGLLLLYSSLGDAEGVSKLACLAKEQGKNNVAFLCLFTLGRLEDCLQLLVESNRIPEAALMARSYLPSKVSEIVALWREDLSKVNPKAAESLADPEEYSNLFEDWQVALSVEANTAETRGVYTAAENYPSHADKPSITLVEAFRNLQVEAEESLENGNIDHEVAEENGHVENEGDEEEQQEEEVNEEEGVVDADSTDGAVLVNGSEVLTPHP

SEQ ID NO: 50782 - protein, 831 aa, Arabidopsis thaliana
  peptide (1)..(831): Ceres Seq. ID no. 12558948
MYIRVYNYNTMDKVKVFEAHSDYIRCVAVHPTLPYVLSSSDDMLIKLWDWENGWACTQIFEGHSHYVMQVVFNPKDTNTFASASLDRTIKIWNLGSPDPNFTLDAHQKGVNCVDYFTGGDKPYLITGSDDHTAKVWDYQTKSCVQTLDGHTHNVSAVCFHPELPIIITGSEDGTVRIWHATTYRLENTLNYGLERVWAIGYIKSSRRVVIGYDEGTIMVKLGREIPVASMDSSGKIIWAKHNEIQTANIKSIGAGYEATDGERLPLSVKELGTCDLYPQSLKHNPNGRFVVVCGDGEYIIYTALAWRNRSFGSGLEFVWSSEGECAVRESSSKIKIFSKNFQERKSIRPTFSAEKIFGGTLLAMCSNDFICFYDWAECRLIQQIDVTVKNLYWAESGDLVAIASDTSFYILKYNRELVSSHFDSGRPTDEEGVEDAFEVLHENDERVRTGIWVGDCFIYNNSSWKLNYCVGGEVTTMYHLDRPMYLLGYIANQSRVYLVDKEFNVIGYTLLLSLIEYKTLVMRGDLDRANQILPTIPKEQHNNVAHFLESRGMIEDALEIATDPDYKFDLAIQLGRLEIAKEIAEEVQSESKWKQLGELAMSSGKLQLAEDCMKYAMDLSGLLLLYSSLGDAEGVSKLACLAKEQGKNNVAFLCLFTLGRLEDCLQLLVESNRIPEAALMARSYLPSKVSEIVALWREDLSKVNPKAAESLADPEEYSNLFEDWQVALSVEANTAETRGVYTAAENYPSHADKPSITLVEAFRNLQVEAEESLENGNIDHEVAEENGHVENEGDEEEQQEEEVNEEEGVVDADSTDGAVLVNGSEVLTPHP

SEQ ID NO: 50783 - protein, 821 aa, Arabidopsis thaliana
  peptide (1)..(821): Ceres Seq. ID no. 12558949
MDKVKVFEAHSDYIRCVAVHPTLPYVLSSSDDMLIKLWDWENGWACTQIFEGHSHYVMQVVFNPKDTNTFASASLDRTIKIWNLGSPDPNFTLDAHQKGVNCVDYFTGGDKPYLITGSDDHTAKVWDYQTKSCVQTLDGHTHNVSAVCFHPELPIIITGSEDGTVRIWHATTYRLENTLNYGLERVWAIGYIKSSRRVVIGYDEGTIMVKLGREIPVASMDSSGKIIWAKHNEIQTANIKSIGAGYEATDGERLPLSVKELGTCDLYPQSLKHNPNGRFVVVCGDGEYIIYTALAWRNRSFGSGLEFVWSSEGECAVRESSSKIKIFSKNFQERKSIRPTFSAEKIFGGTLLAMCSNDFICFYDWAECRLIQQIDVTVKNLYWAESGDLVAIASDTSFYILKYNRELVSSHFDSGRPTDEEGVEDAFEVLHENDERVRTGIWVGDCFIYNNSSWKLNYCVGGEVTTMYHLDRPMYLLGYIANQSRVYLVDKEFNVIGYTLLLSLIEYKTLVMRGDLDRANQILPTIPKEQHNNVAHFLESRGMIEDALEIATDPDYKFDLAIQLGRLEIAKEIAEEVQSESKWKQLGELAMSSGKLQLAEDCMKYAMDLSGLLLLYSSLGDAEGVSKLACLAKEQGKNNVAFLCLFTLGRLEDCLQLLVESNRIPEAALMARSYLPSKVSEIVALWREDLSKVNPKAAESLADPEEYSNLFEDWQVALSVEANTAETRGVYTAAENYPSHADKPSITLVEAFRNLQVEAEESLENGNIDHEVAEENGHVENEGDEEEQQEEEVNEEEGVVDADSTDGAVLVNGSEVLTPHP

SEQ ID NO: 50784 - DNA, 1206 bp, Arabidopsis thaliana; identical to SEQ ID NO: 29329
  misc_feature (1)..(1206): Ceres Seq. ID no. 12601145
  misc_feature (1)..(1206): Ortholog of  Ceres SEQ ID NO 15179153 as cited in SEQ ID NO 1066
  misc_feature (1)..(1206): Ortholog of  Ceres SEQ ID NO 15176047 as cited in SEQ ID NO 55988
  misc_feature (1)..(1206): Ortholog of  Ceres SEQ ID NO 13582167 as cited in SEQ ID NO 56203
  misc_feature (1)..(1206): Ortholog of  Ceres SEQ ID NO 13658295 as cited in SEQ ID NO 66515

SEQ ID NO: 50785 - protein, 325 aa, Arabidopsis thaliana; identical to SEQ ID NO: 29330
  peptide (1)..(325): Ceres Seq. ID no. 12601146

SEQ ID NO: 50786 - protein, 323 aa, Arabidopsis thaliana; identical to SEQ ID NO: 29331
  peptide (1)..(323): Ceres Seq. ID no. 12601147

SEQ ID NO: 50787 - protein, 322 aa, Arabidopsis thaliana; identical to SEQ ID NO: 29332
  peptide (1)..(322): Ceres Seq. ID no. 12601148

SEQ ID NO: 50788 - DNA, 1513 bp, Arabidopsis thaliana
  misc_feature (1)..(1513): Ceres Seq. ID no. 13575326
  misc_feature (1)..(1513): Ortholog of  Ceres SEQ ID NO 13592859 as cited in SEQ ID NO 20479
aacttcacattctccgatattctctctctctatcaatctctcactctcaaactttctacatacctgaagaaaaaaataatctacgaattcgagccaaaaagatcgaaactttttaatctatgggtgcttcagggaaatgggtcaagtccattatcggtctcaagaagctagagaaggatgaaatcgaaaagggtaatgggaaaaacaagaaatggaagctatggaggactacttcagtagattcatggaagggttttcgaggaaaacatcggtctgattcagacggtgttgattcttctactgtttactctgctgctgttgctactgttcttagagctcctcctaaagatttcaaagctgttagagaagaatgggctgctattagaatccaaaccgcttttcgtggattcttggcgagaagagcgttgagggcattgaaagggatagtgaggttacaagctttagtgagaggaagacaagttaggaaacaagcagctgttacattgagatgcatgcaagctttggtgagagtacaagctcgtgttagagctcgtcgtgtgaggatgactgttgaaggacaagctgttcaaaagcttttagatgaacatagaaccaaatctgatctcttgaaagaagtcgaggaagggtggtgtgataggaaaggtactgtggatgatattaagtcaaagttgcagcagagacaagaaggtgcttttaagagggaacgtgctttggcttatgctcttgctcaaaagcaatggaggtcaactactagctcaaaccttaagacgaatagttcgatttcgtatcttaaaagtcaagagtttgataagaatagttggggatggagttggttggagcgttggatggctgctaggccatgggagactagacttatggacactgttgataccgctgccacgcctcctcctctgcctcataaacatttgaaatcaccggaaactgcggatgttgttcaagttagaagaaacaatgtgaccactagagtatctgcaaaacctcctcctcatatgctgtcttcaagtcctggttatgagtttaacgagagctcaggttcatcctcgatttgtacttcaactacgcctgtttctggaaaaactggacttgtttcagataactctagcagtcaagcaaaaaagcacaagccaagttacatgagcttgactgaatcgacaaaggctaagcgaagaactaaccgcggtctcaggcaatctatggatgagtttcagtttatgaagaactctggaatgtttacaggggaattgaagactagtccttcctcagatccttttgttagtttctccaaaccactcggtgttcctactcgattcgagaagccgagaggttaaatgtgaccttgttagattggagtttcaacagcttgttgttgtcttgtgtgttgtgagatatctgtgtatgttgttaattgttctttttcctttggaactacattggagttttgaatttaaatataaatttcagtcttgctttt

SEQ ID NO: 50789 - protein, 416 aa, Arabidopsis thaliana
  peptide (1)..(416): Ceres Seq. ID no. 13575327
MGASGKWVKSIIGLKKLEKDEIEKGNGKNKKWKLWRTTSVDSWKGFRGKHRSDSDGVDSSTVYSAAVATVLRAPPKDFKAVREEWAAIRIQTAFRGFLARRALRALKGIVRLQALVRGRQVRKQAAVTLRCMQALVRVQARVRARRVRMTVEGQAVQKLLDEHRTKSDLLKEVEEGWCDRKGTVDDIKSKLQQRQEGAFKRERALAYALAQKQWRSTTSSNLKTNSSISYLKSQEFDKNSWGWSWLERWMAARPWETRLMDTVDTAATPPPLPHKHLKSPETADVVQVRRNNVTTRVSAKPPPHMLSSSPGYEFNESSGSSSICTSTTPVSGKTGLVSDNSSSQAKKHKPSYMSLTESTKAKRRTNRGLRQSMDEFQFMKNSGMFTGELKTSPSSDPFVSFSKPLGVPTRFEKPRG

SEQ ID NO: 50790 - protein, 285 aa, Arabidopsis thaliana
  peptide (1)..(285): Ceres Seq. ID no. 13575328
MQALVRVQARVRARRVRMTVEGQAVQKLLDEHRTKSDLLKEVEEGWCDRKGTVDDIKSKLQQRQEGAFKRERALAYALAQKQWRSTTSSNLKTNSSISYLKSQEFDKNSWGWSWLERWMAARPWETRLMDTVDTAATPPPLPHKHLKSPETADVVQVRRNNVTTRVSAKPPPHMLSSSPGYEFNESSGSSSICTSTTPVSGKTGLVSDNSSSQAKKHKPSYMSLTESTKAKRRTNRGLRQSMDEFQFMKNSGMFTGELKTSPSSDPFVSFSKPLGVPTRFEKPRG

SEQ ID NO: 50791 - protein, 268 aa, Arabidopsis thaliana
  peptide (1)..(268): Ceres Seq. ID no. 13575329
MTVEGQAVQKLLDEHRTKSDLLKEVEEGWCDRKGTVDDIKSKLQQRQEGAFKRERALAYALAQKQWRSTTSSNLKTNSSISYLKSQEFDKNSWGWSWLERWMAARPWETRLMDTVDTAATPPPLPHKHLKSPETADVVQVRRNNVTTRVSAKPPPHMLSSSPGYEFNESSGSSSICTSTTPVSGKTGLVSDNSSSQAKKHKPSYMSLTESTKAKRRTNRGLRQSMDEFQFMKNSGMFTGELKTSPSSDPFVSFSKPLGVPTRFEKPRG

SEQ ID NO: 50792 - DNA, 724 bp, Arabidopsis thaliana
  misc_feature (1)..(724): Ceres Seq. ID no. 13591447
  misc_feature (1)..(724): Ortholog of  Ceres SEQ ID NO 15172800 as cited in SEQ ID NO 60137
gaacggataagtgttatcctcatctagtcatcttcaccctctaactcaccgagaaagaaaagtaaagagagtttggtgtcactatgaacattgccattcataattaccgtcactcaaaattcatcgtaaatcctcacatagacaagacttttgcaaggactcgacaggcaagatcaaataatattacattcatgacaagtactcatggaagaagaagaacgatgggactttgtttggtaagagcaagtgccgagaccggagaagaagaatccgacgatcaaaacaagcctgagagaagaagtttcttgagcttagcagaagctggtctagtcgaaatctcaggccttggtgcacacgagaagtttctctgtcgactaacgatatcatcattgaatttgctaagagtgatatcagagcaagaaggatgttcaatagaagagttgaatgctggcaaaatatgtgattggttccttaaggacaagctgaagagagagcataacattgaatctgctgttcttcaatgggatgatcccgattttcctttttaaatatccttattttttacattcaagccacacaaaagtatgatcattaacaaggtgaatatgtatcgtaagtcttaattagtctattgtggtctgactaggaaaatataaaccttttgttaagtcctacaataaaacgtattcaacaattccaaatattatccatgactgaaatacat

SEQ ID NO: 50793 - protein, 154 aa, Arabidopsis thaliana
  peptide (1)..(154): Ceres Seq. ID no. 13591448
MNIAIHNYRHSKFIVNPHIDKTFARTRQARSNNITFMTSTHGRRRTMGLCLVRASAETGEEESDDQNKPERRSFLSLAEAGLVEISGLGAHEKFLCRLTISSLNLLRVISEQEGCSIEELNAGKICDWFLKDKLKREHNIESAVLQWDDPDFPF

SEQ ID NO: 50794 - protein, 118 aa, Arabidopsis thaliana
  peptide (1)..(118): Ceres Seq. ID no. 13591449
MTSTHGRRRTMGLCLVRASAETGEEESDDQNKPERRSFLSLAEAGLVEISGLGAHEKFLCRLTISSLNLLRVISEQEGCSIEELNAGKICDWFLKDKLKREHNIESAVLQWDDPDFPF

SEQ ID NO: 50795 - protein, 108 aa, Arabidopsis thaliana
  peptide (1)..(108): Ceres Seq. ID no. 13591450
MGLCLVRASAETGEEESDDQNKPERRSFLSLAEAGLVEISGLGAHEKFLCRLTISSLNLLRVISEQEGCSIEELNAGKICDWFLKDKLKREHNIESAVLQWDDPDFPF

SEQ ID NO: 50796 - DNA, 860 bp, Arabidopsis thaliana; identical to SEQ ID NO: 26402
  misc_feature (1)..(860): Ceres Seq. ID no. 13505019
  misc_feature (1)..(860): Ortholog of  Ceres SEQ ID NO 13581889 as cited in SEQ ID NO 50900

SEQ ID NO: 50797 - protein, 136 aa, Arabidopsis thaliana; identical to SEQ ID NO: 26403
  peptide (1)..(136): Ceres Seq. ID no. 13505020

SEQ ID NO: 50798 - DNA, 1262 bp, Arabidopsis thaliana; identical to SEQ ID NO: 46078
  misc_feature (1)..(1262): Ceres Seq. ID no. 13578513
  misc_feature (1)..(1262): Ortholog of  Ceres SEQ ID NO 14307041 as cited in SEQ ID NO 54672

SEQ ID NO: 50799 - protein, 304 aa, Arabidopsis thaliana; identical to SEQ ID NO: 46079
  peptide (1)..(304): Ceres Seq. ID no. 13578514

SEQ ID NO: 50800 - protein, 242 aa, Arabidopsis thaliana; identical to SEQ ID NO: 46080
  peptide (1)..(242): Ceres Seq. ID no. 13578515

SEQ ID NO: 50801 - protein, 221 aa, Arabidopsis thaliana; identical to SEQ ID NO: 46081
  peptide (1)..(221): Ceres Seq. ID no. 13578516

SEQ ID NO: 50802 - DNA, 1030 bp, Arabidopsis thaliana; identical to SEQ ID NO: 48152
  misc_feature (1)..(1030): Ceres Seq. ID no. 13649803
  misc_feature (1)..(1030): Ortholog of  Ceres SEQ ID NO 13638567 as cited in SEQ ID NO 51303
  misc_feature (1)..(1030): Ortholog of  Ceres SEQ ID NO 14301396 as cited in SEQ ID NO 51789
  misc_feature (1)..(1030): Ortholog of  Ceres SEQ ID NO 12610031 as cited in SEQ ID NO 55811
  misc_feature (1)..(1030): Ortholog of  Ceres SEQ ID NO 12610896 as cited in SEQ ID NO 55861
  misc_feature (1)..(1030): Ortholog of  Ceres SEQ ID NO 12619664 as cited in SEQ ID NO 66048
  misc_feature (1)..(1030): Ortholog of  Ceres SEQ ID NO 12635952 as cited in SEQ ID NO 0

SEQ ID NO: 50803 - protein, 263 aa, Arabidopsis thaliana [sequence omitted]

SEQ ID NO: 50804 - protein, 215 aa, Arabidopsis thaliana; identical to SEQ ID NO: 48154
  peptide (1)..(215): Ceres Seq. ID no. 13649805

SEQ ID NO: 50805 - protein, 205 aa, Arabidopsis thaliana; identical to SEQ ID NO: 48155
  peptide (1)..(205): Ceres Seq. ID no. 13649806

SEQ ID NO: 50806 - DNA, 548 bp, Arabidopsis thaliana; identical to SEQ ID NO: 24388
  misc_feature (1)..(548): Ceres Seq. ID no. 12395205
  misc_feature (1)..(548): Ortholog of  Ceres SEQ ID NO 12611730 as cited in SEQ ID NO 56744

SEQ ID NO: 50807 - protein, 141 aa, Arabidopsis thaliana; identical to SEQ ID NO: 24389
  peptide (1)..(141): Ceres Seq. ID no. 12395206

SEQ ID NO: 50808 - protein, 103 aa, Arabidopsis thaliana; identical to SEQ ID NO: 24390
  peptide (1)..(103): Ceres Seq. ID no. 12395207

SEQ ID NO: 50809 - protein, 100 aa, Arabidopsis thaliana; identical to SEQ ID NO: 24391
  peptide (1)..(100): Ceres Seq. ID no. 12395208

SEQ ID NO: 50810 - DNA, 1569 bp, Arabidopsis thaliana
  misc_feature (1)..(1569): Ceres Seq. ID no. 13575342
  misc_feature (1)..(1569): Ortholog of  Ceres SEQ ID NO 14303786 as cited in SEQ ID NO 52947
  misc_feature (1)..(1569): Ortholog of  Ceres SEQ ID NO 14316208 as cited in SEQ ID NO 53539
  misc_feature (1)..(1569): Ortholog of  Ceres SEQ ID NO 14305019 as cited in SEQ ID NO 53897
gaataatcagaatccggttagagattgaatttgggttttgttagttttgcttcttctctctgcaaaaatcctccatccgcttcctcacgaaaaaccctagcacagctccgagatcccttttgtcgccatgggagactccggcgatcctttcttgcgtaatccaaacgccgctgttcaagctcgcgctaaagttcagaacagagccaatgttcttcagcttaagctgatgggtcagagccaccctactggcttaacaaacaatctcttgaagctttttgagccacgtccgccattggagtacaaaccaccaccagagaagagaaagtgcccgccttatacaggtatggctcagtttgtaagtaactttgctgagcctggggatccagaatacgctccacctaagccagaagttgaattaccttcgcagaaaagggaaagaattcataaattgcgactggagaaaggtgttgaaaaggctgctgaggacttaaagaaatatgaccccaataatgatccaaatgctactggagatccatacaagacattgttcgtttcaagacttaactacgaatcctcagagagtaagattaaaagggagtttgaatcttatggaccaattaaacgggttcatttggtgactgatcagctgaccaataaacccaaaggatatgctttcattgagtacatgcacacccgtgacatgaaagctgcatataagcaagctgatggacaaaagattgacggcagaagagttttggttgatgtggagagaggtagaaccgtcccaaactggcgtccacgcaggcttggtggtggacttgggacctcaagagtgggtggtggtgaagaaattgttggggaacaacaaccgcaaggaagaacctcccagtcagaggagccatcgagaccacgggaagagcgtgagaaatctcgggaaaagggaaaagaaagggaaaggtctcgtgagctgtctcacgaacaacctcgagagaggtctcgtgacagaccgagagaggataagcaccacagagaccgagaccaaggaggcagagacagggatagggacagcagacgtgatcgtgaccggacccgtgacagaggagacagagaccgccgtgaccgtgacaggggacgggatcgtacttcaagggatcatgaccgagaccgcagtagaaagaaggagcgggattatgaaggaggtgaatatgagcatgagggtggtggtcggtcccgtgagagagatgcagagtaccgtggcgagccagaagaaactcgtggctactatgaagacgatcaaggggacacagaccggtacagtcatcgctacgataaaatggaggaagatgacttcagatatgaacgtgagtacaagcggtctaagagatcagaatcgcgagagtatgttcgttgatgtttcattcggctgtttaaaactctaaaaacttaagaatcctttttgtttattctaaatcaaaacttgatgcaattctgtttgttacctctgaacttgattgctattttttctcttttgaagtttgtcatattattaatcaaaatcaaaccaacttt

SEQ ID NO: 50811 - protein, 427 aa, Arabidopsis thaliana
  peptide (1)..(427): Ceres Seq. ID no. 13575343
MGDSGDPFLRNPNAAVQARAKVQNRANVLQLKLMGQSHPTGLTNNLLKLFEPRPPLEYKPPPEKRKCPPYTGMAQFVSNFAEPGDPEYAPPKPEVELPSQKRERIHKLRLEKGVEKAAEDLKKYDPNNDPNATGDPYKTLFVSRLNYESSESKIKREFESYGPIKRVHLVTDQLTNKPKGYAFIEYMHTRDMKAAYKQADGQKIDGRRVLVDVERGRTVPNWRPRRLGGGLGTSRVGGGEEIVGEQQPQGRTSQSEEPSRPREEREKSREKGKERERSRELSHEQPRERSRDRPREDKHHRDRDQGGRDRDRDSRRDRDRTRDRGDRDRRDRDRGRDRTSRDHDRDRSRKKERDYEGGEYEHEGGGRSRERDAEYRGEPEETRGYYEDDQGDTDRYSHRYDKMEEDDFRYEREYKRSKRSESREYVR

SEQ ID NO: 50812 - protein, 394 aa, Arabidopsis thaliana
  peptide (1)..(394): Ceres Seq. ID no. 13575344
MGQSHPTGLTNNLLKLFEPRPPLEYKPPPEKRKCPPYTGMAQFVSNFAEPGDPEYAPPKPEVELPSQKRERIHKLRLEKGVEKAAEDLKKYDPNNDPNATGDPYKTLFVSRLNYESSESKIKREFESYGPIKRVHLVTDQLTNKPKGYAFIEYMHTRDMKAAYKQADGQKIDGRRVLVDVERGRTVPNWRPRRLGGGLGTSRVGGGEEIVGEQQPQGRTSQSEEPSRPREEREKSREKGKERERSRELSHEQPRERSRDRPREDKHHRDRDQGGRDRDRDSRRDRDRTRDRGDRDRRDRDRGRDRTSRDHDRDRSRKKERDYEGGEYEHEGGGRSRERDAEYRGEPEETRGYYEDDQGDTDRYSHRYDKMEEDDFRYEREYKRSKRSESREYVR

SEQ ID NO: 50813 - protein, 355 aa, Arabidopsis thaliana
  peptide (1)..(355): Ceres Seq. ID no. 13575345
MAQFVSNFAEPGDPEYAPPKPEVELPSQKRERIHKLRLEKGVEKAAEDLKKYDPNNDPNATGDPYKTLFVSRLNYESSESKIKREFESYGPIKRVHLVTDQLTNKPKGYAFIEYMHTRDMKAAYKQADGQKIDGRRVLVDVERGRTVPNWRPRRLGGGLGTSRVGGGEEIVGEQQPQGRTSQSEEPSRPREEREKSREKGKERERSRELSHEQPRERSRDRPREDKHHRDRDQGGRDRDRDSRRDRDRTRDRGDRDRRDRDRGRDRTSRDHDRDRSRKKERDYEGGEYEHEGGGRSRERDAEYRGEPEETRGYYEDDQGDTDRYSHRYDKMEEDDFRYEREYKRSKRSESREYVR

SEQ ID NO: 50814 - DNA, 1229 bp, Arabidopsis thaliana; identical to SEQ ID NO: 49371
  misc_feature (1)..(1229): Ceres Seq. ID no. 12601816
  misc_feature (1)..(1229): Ortholog of  Ceres SEQ ID NO 14303355 as cited in SEQ ID NO 59746
  misc_feature (1)..(1229): Ortholog of  Ceres SEQ ID NO 14302415 as cited in SEQ ID NO 62781

SEQ ID NO: 50815 - protein, 318 aa, Arabidopsis thaliana; identical to SEQ ID NO: 49372
  peptide (1)..(318): Ceres Seq. ID no. 12601817

SEQ ID NO: 50816 - protein, 284 aa, Arabidopsis thaliana; identical to SEQ ID NO: 49373
  peptide (1)..(284): Ceres Seq. ID no. 12601818

SEQ ID NO: 50817 - protein, 281 aa, Arabidopsis thaliana; identical to SEQ ID NO: 49374
  peptide (1)..(281): Ceres Seq. ID no. 12601819

SEQ ID NO: 50818 - DNA, 1620 bp, Arabidopsis thaliana; identical to SEQ ID NO: 48248
  misc_feature (1)..(1620): Ceres Seq. ID no. 12559488
  misc_feature (1)..(1620): Ortholog of  Ceres SEQ ID NO 14312208 as cited in SEQ ID NO 54845
  misc_feature (1)..(1620): Ortholog of  Ceres SEQ ID NO 15171755 as cited in SEQ ID NO 57047
  misc_feature (1)..(1620): Ortholog of  Ceres SEQ ID NO 13597613 as cited in SEQ ID NO 65334
  misc_feature (1)..(1620): Ortholog of  Ceres SEQ ID NO 14303664 as cited in SEQ ID NO 65892
  misc_feature (1)..(1620): Ortholog of  Ceres SEQ ID NO 15178832 as cited in SEQ ID NO 0

SEQ ID NO: 50819 - protein, 351 aa, Arabidopsis thaliana; identical to SEQ ID NO: 48249
  peptide (1)..(351): Ceres Seq. ID no. 12559489

SEQ ID NO: 50820 - protein, 339 aa, Arabidopsis thaliana; identical to SEQ ID NO: 48250
  peptide (1)..(339): Ceres Seq. ID no. 12559490

SEQ ID NO: 50821 - protein, 330 aa, Arabidopsis thaliana; identical to SEQ ID NO: 48251
  peptide (1)..(330): Ceres Seq. ID no. 12559491

SEQ ID NO: 50822 - DNA, 682 bp, Arabidopsis thaliana; identical to SEQ ID NO: 47245
  misc_feature (1)..(682): Ceres Seq. ID no. 12601843
  misc_feature (1)..(682): Ortholog of  Ceres SEQ ID NO 15179194 as cited in SEQ ID NO 0

SEQ ID NO: 50823 - protein, 181 aa, Arabidopsis thaliana; identical to SEQ ID NO: 47246
  peptide (1)..(181): Ceres Seq. ID no. 12601844

SEQ ID NO: 50824 - protein, 177 aa, Arabidopsis thaliana; identical to SEQ ID NO: 47247
  peptide (1)..(177): Ceres Seq. ID no. 12601845

SEQ ID NO: 50825 - protein, 162 aa, Arabidopsis thaliana; identical to SEQ ID NO: 47248
  peptide (1)..(162): Ceres Seq. ID no. 12601846

SEQ ID NO: 50826 - DNA, 1988 bp, Arabidopsis thaliana
  misc_feature (1)..(1988): Ceres Seq. ID no. 12558999
  misc_feature (1)..(1988): Ortholog of  Ceres SEQ ID NO 13660287 as cited in SEQ ID NO 67316
gaccacattctcaaagagagagagaaaagatcatatcacacttattttctcttgccctcttttctttttccttttgaatatttctgggttactaatatttaatttgttggttcttcggtttctccgactctttccccttgaacctagcttaacagagaaaatcaaagagagaggaaaaatgagtggaggtggtggagaaatggaagagagactgttaaatgggtcagagacagaacaaaggagagagagtctctacttgagaaaaaagatttggagtgaagtaaggaagatgtggagaatagctttaccatcaactttgttcagagttatgtcgtttggatgcgtagtggtggctcaagccttcattggccactccagtgaaacgggtctcgctgcttatgctctccttcaaagcactttcattcgcttcatctacggtattatggcaggtatgtcaagtgcgacagagacgttatgtggacaagcatacggagcagaacaataccacatgatggggatatacttacaacgttcttggatagtagatacctttattgcaactctcttcgtccctttcatcgtcttagcgggtcccattctccggttattaggccaaaacgttgtgatctccgagacagtagacgagatttacccatgggtcattccttatctctacagcatcgtgttcaccatgacaatgcaaatgtacctccaagcgcagatgaaaaacgccatcataggcattctttcgaccctagccttggtcttggacattgcggccacgtggtggtgcgtaagcgtgatggggatggggatccatggtgcgcttctagggcttaatataagctcatggtcggtggccatagccgagtttgtatatgtgtttggagggtggtgcccgcatacttggaccggctttagcactgctgcttttcttgatcttattcccatgctcaagttatccatatcctccggcttcatgctttgcttagagtactggtatatgagcatcattgtcttgatgtctggatatgcaaaggatgcgaatatcgcaatttccgctttctccatatgccaatatatctactcatgggagatgaacatatgctttggcttgatgggtgcagcatgtgtacgagtggcgaatgaattgggaaaaggcgatgcggatgcggtgagattctcgataaaagtggtgcttgtggtatcagcggtgatcggtgtgatatgttccgctctttgcctagcgtttggcggtcagatttcgtatttgttctctgatagccaagcagtttcggatgcagtagctgatctctccatcgtccttagcatatctatactcttcaacatcatccagcccattctatctggggtagcaattggagcagggatgcagagtatggtagcattagtgaacttagcatcttattatgcaattggtgttcctttaggtgtcctccttgtttacgttttcaattttgggattaagggactctggtccggaatgttggctggagttggtatccaaacgttgatattgtgttatgttatttacaaaactgactgggaattggaggttaagaagacaaacgagcgtatgaaaacgtggactctaaatttacctgctgtacaatcgactactatctccacaagagatgaagagagaaagtgaacatacaactaagttaatttaaagaaatcttttaagaaattctttataaaaaaagaaagaataatttatgttgtattgtggttgtgttttgcattccctaagaatgaagtatcggtgttgagattgcattattaggttaatgcaactctcataactttgaaaaaggttaagaaggatgaactttttcttttatcagagaaaaaggttgttctcttgttcttcggatatactctttctaaacaaaaaaaaaattgtgggaggtttgaaattttaacttctttcttgattttttaatggatgtatattttgtgtgtgg

SEQ ID NO: 50827 - protein, 556 aa, Arabidopsis thaliana
  peptide (1)..(556): Ceres Seq. ID no. 12559000
TTFSKRERKDHITLIFSCPLFFFLLNISGLLIFNLLVLRFLRLFPLEPSLTEKIKERGKMSGGGGEMEERLLNGSETEQRRESLYLRKKIWSEVRKMWRIALPSTLFRVMSFGCVVVAQAFIGHSSETGLAAYALLQSTFIRFIYGIMAGMSSATETLCGQAYGAEQYHMMGIYLQRSWIVDTFIATLFVPFIVLAGPILRLLGQNVVISETVDEIYPWVIPYLYSIVFTMTMQMYLQAQMKNAIIGILSTLALVLDIAATWWCVSVMGMGIHGALLGLNISSWSVAIAEFVYVFGGWCPHTWTGFSTAAFLDLIPMLKLSISSGFMLCLEYWYMSIIVLMSGYAKDANIAISAFSICQYIYSWEMNICFGLMGAACVRVANELGKGDADAVRFSIKVVLVVSAVIGVICSALCLAFGGQISYLFSDSQAVSDAVADLSIVLSISILFNIIQPILSGVAIGAGMQSMVALVNLASYYAIGVPLGVLLVYVFNFGIKGLWSGMLAGVGIQTLILCYVIYKTDWELEVKKTNERMKTWTLNLPAVQSTTISTRDEERK

SEQ ID NO: 50828 - protein, 497 aa, Arabidopsis thaliana
  peptide (1)..(497): Ceres Seq. ID no. 12559001
MSGGGGEMEERLLNGSETEQRRESLYLRKKIWSEVRKMWRIALPSTLFRVMSFGCVVVAQAFIGHSSETGLAAYALLQSTFIRFIYGIMAGMSSATETLCGQAYGAEQYHMMGIYLQRSWIVDTFIATLFVPFIVLAGPILRLLGQNVVISETVDEIYPWVIPYLYSIVFTMTMQMYLQAQMKNAIIGILSTLALVLDIAATWWCVSVMGMGIHGALLGLNISSWSVAIAEFVYVFGGWCPHTWTGFSTAAFLDLIPMLKLSISSGFMLCLEYWYMSIIVLMSGYAKDANIAISAFSICQYIYSWEMNICFGLMGAACVRVANELGKGDADAVRFSIKVVLVVSAVIGVICSALCLAFGGQISYLFSDSQAVSDAVADLSIVLSISILFNIIQPILSGVAIGAGMQSMVALVNLASYYAIGVPLGVLLVYVFNFGIKGLWSGMLAGVGIQTLILCYVIYKTDWELEVKKTNERMKTWTLNLPAVQSTTISTRDEERK

SEQ ID NO: 50829 - protein, 490 aa, Arabidopsis thaliana
  peptide (1)..(490): Ceres Seq. ID no. 12559002
MEERLLNGSETEQRRESLYLRKKIWSEVRKMWRIALPSTLFRVMSFGCVVVAQAFIGHSSETGLAAYALLQSTFIRFIYGIMAGMSSATETLCGQAYGAEQYHMMGIYLQRSWIVDTFIATLFVPFIVLAGPILRLLGQNVVISETVDEIYPWVIPYLYSIVFTMTMQMYLQAQMKNAIIGILSTLALVLDIAATWWCVSVMGMGIHGALLGLNISSWSVAIAEFVYVFGGWCPHTWTGFSTAAFLDLIPMLKLSISSGFMLCLEYWYMSIIVLMSGYAKDANIAISAFSICQYIYSWEMNICFGLMGAACVRVANELGKGDADAVRFSIKVVLVVSAVIGVICSALCLAFGGQISYLFSDSQAVSDAVADLSIVLSISILFNIIQPILSGVAIGAGMQSMVALVNLASYYAIGVPLGVLLVYVFNFGIKGLWSGMLAGVGIQTLILCYVIYKTDWELEVKKTNERMKTWTLNLPAVQSTTISTRDEERK

SEQ ID NO: 50830 - DNA, 1959 bp, Arabidopsis thaliana; identical to SEQ ID NO: 50010
  misc_feature (1)..(1959): Ceres Seq. ID no. 13588423
  misc_feature (1)..(1959): Ortholog of  Ceres SEQ ID NO 14312408 as cited in SEQ ID NO 55042

SEQ ID NO: 50831 - protein, 577 aa, Arabidopsis thaliana; identical to SEQ ID NO: 50011
  peptide (1)..(577): Ceres Seq. ID no. 13588424

SEQ ID NO: 50832 - protein, 544 aa, Arabidopsis thaliana; identical to SEQ ID NO: 50012
  peptide (1)..(544): Ceres Seq. ID no. 13588425

SEQ ID NO: 50833 - protein, 354 aa, Arabidopsis thaliana; identical to SEQ ID NO: 50013
  peptide (1)..(354): Ceres Seq. ID no. 13588426

SEQ ID NO: 50834 - DNA, 2153 bp, Arabidopsis thaliana
  misc_feature (1)..(2153): Ceres Seq. ID no. 13575358
  misc_feature (1)..(2153): Ortholog of  Ceres SEQ ID NO 13582297 as cited in SEQ ID NO 56486
  misc_feature (1)..(2153): Ortholog of  Ceres SEQ ID NO 13586936 as cited in SEQ ID NO 0
ctccttcttcattgcaaagaaagcaccaccttttaaagaatcctcctcacactccattcttcttaaaaaacccaccacaacacaattcccacttgtttcttcatcatcacctacttcaatcaaaaaacattccaactttcttctcaatttcattccaggatagtattatgtgcagtggaccaaagagcaatctctgctcttcaagaaccttaacagaaatcgaatcaaggcaaaaggaagaagaaacaatgcttctcctcgaattcgctgcttgtgatgatcttgactcgttcaagagagaggttgaagagaaagggcttgatttggatgagtcagggttatggtattgcagacgtgtcggttctaagaagatgggtcttgaagaaagaacacctttaatggttgcagctatgtatggaagcataaaggttttgactttcatcgtttccactggaaaatctgatgtgaacagagcttgtggtgaagagagagttactccgcttcactgtgctgttgctggctgttctgtgaatatgattgaagtcatcaatgtcttgcttgatgcttctgctttggttaactctgttgatgctaatgggaatcaacctttggatgtgtttgttcgagtttcgaggtttgtggctagtccgaggaggaaagcggttgagttgttgctgagaggaggaggtgttggaggattgatcgatgaggcggttgaagaagagatcaagattgtctctaagtatccagctgatgcttctttaccggatataaacgaaggggtttatggaagtgatgagtttaggatgtatagctttaaggttaagccatgttctagggcttattctcatgattggaccgagtgtgcttttgttcatccgggagaaaatgcgaggaggagagatccgaggaagtatccttacacttgtgtcccctgtcccgagttccgtaaaggatcatgcccgaaaggagattcttgcgagtatgctcacggggttttcgagtcgtggcttcaccccgcgcagtataaaacccggctttgtaaagatgaaacgggttgtgcaaggaaagtttgtttctttgctcataaacgcgaagagatgagacctgttaatgcttcaactggctctgccgtggctcagtctccgtttagcagcttggagatgatgccagggttgtctcctcttgcttattcttcaggagtttcgactcctccggtttctccaatggctaatggtgttccttcctctccaagaaacggcggatcatggcagaacagagtcaatacccttactccaccggctttgcagctcaatggtggaagcagattgaagtccacactgagcgctagagatatcgatatggagatggagatggaattgagactccgcggttttggcaacaatgtggaagagacgttcgggtcttatgtttcctctccaagtaggaattctcaaatgggtcaaaacatgaaccaacattatccatcttccccggtgagacaaccgccatctcaacacgggttcgaatcttcagcagctgcagcggttgcagtgatgaaagcgagatcaaccgcctttgcgaaacgtagcttgagcttcaaaccagctactcaagcagcaccacagtcgaatctctcggattggggatctccaaacgggaagctggaatggggaatgaaaggagaagagctgaataagatgagaagaagtgtttcctttggaatccatggaaacaacaacaataacgcagctagagactacagggacgagccagatgtgtcatgggttaactctttagttaaagacagtactgtggtgtctgagagaagctttggaatgaatgagagggttcggataatgtcgtgggctgagcaaatgtacagagagaaggagcagactgtggtgtaaacacacacaaagatggtttcttatatatattgcttttgggccatctctgcaaatttgattctttaatttttgtgactttctttagttgttactgttattagtagtatatggtttgttgtcactacgagtctacgtgatgaaaagatagaagttaattgcattagtttctatattcgtttctcatcctcttgtaatttatcaaaccatgaaatggctaagcaatccaaaccgtaatatggctgg

SEQ ID NO: 50835 - protein, 635 aa, Arabidopsis thaliana
  peptide (1)..(635): Ceres Seq. ID no. 13575359
PSSLQRKHHLLKNPPHTPFFLKNPPQHNSHLFLHHHLLQSKNIPTFFSISFQDSIMCSGPKSNLCSSRTLTEIESRQKEEETMLLLEFAACDDLDSFKREVEEKGLDLDESGLWYCRRVGSKKMGLEERTPLMVAAMYGSIKVLTFIVSTGKSDVNRACGEERVTPLHCAVAGCSVNMIEVINVLLDASALVNSVDANGNQPLDVFVRVSRFVASPRRKAVELLLRGGGVGGLIDEAVEEEIKIVSKYPADASLPDINEGVYGSDEFRMYSFKVKPCSRAYSHDWTECAFVHPGENARRRDPRKYPYTCVPCPEFRKGSCPKGDSCEYAHGVFESWLHPAQYKTRLCKDETGCARKVCFFAHKREEMRPVNASTGSAVAQSPFSSLEMMPGLSPLAYSSGVSTPPVSPMANGVPSSPRNGGSWQNRVNTLTPPALQLNGGSRLKSTLSARDIDMEMEMELRLRGFGNNVEETFGSYVSSPSRNSQMGQNMNQHYPSSPVRQPPSQHGFESSAAAAVAVMKARSTAFAKRSLSFKPATQAAPQSNLSDWGSPNGKLEWGMKGEELNKMRRSVSFGIHGNNNNNAARDYRDEPDVSWVNSLVKDSTVVSERSFGMNERVRIMSWAEQMYREKEQTVV

SEQ ID NO: 50836 - protein, 580 aa, Arabidopsis thaliana
  peptide (1)..(580): Ceres Seq. ID no. 13575360
MCSGPKSNLCSSRTLTEIESRQKEEETMLLLEFAACDDLDSFKREVEEKGLDLDESGLWYCRRVGSKKMGLEERTPLMVAAMYGSIKVLTFIVSTGKSDVNRACGEERVTPLHCAVAGCSVNMIEVINVLLDASALVNSVDANGNQPLDVFVRVSRFVASPRRKAVELLLRGGGVGGLIDEAVEEEIKIVSKYPADASLPDINEGVYGSDEFRMYSFKVKPCSRAYSHDWTECAFVHPGENARRRDPRKYPYTCVPCPEFRKGSCPKGDSCEYAHGVFESWLHPAQYKTRLCKDETGCARKVCFFAHKREEMRPVNASTGSAVAQSPFSSLEMMPGLSPLAYSSGVSTPPVSPMANGVPSSPRNGGSWQNRVNTLTPPALQLNGGSRLKSTLSARDIDMEMEMELRLRGFGNNVEETFGSYVSSPSRNSQMGQNMNQHYPSSPVRQPPSQHGFESSAAAAVAVMKARSTAFAKRSLSFKPATQAAPQSNLSDWGSPNGKLEWGMKGEELNKMRRSVSFGIHGNNNNNAARDYRDEPDVSWVNSLVKDSTVVSERSFGMNERVRIMSWAEQMYREKEQTVV

SEQ ID NO: 50837 - protein, 553 aa, Arabidopsis thaliana
  peptide (1)..(553): Ceres Seq. ID no. 13575361
MLLLEFAACDDLDSFKREVEEKGLDLDESGLWYCRRVGSKKMGLEERTPLMVAAMYGSIKVLTFIVSTGKSDVNRACGEERVTPLHCAVAGCSVNMIEVINVLLDASALVNSVDANGNQPLDVFVRVSRFVASPRRKAVELLLRGGGVGGLIDEAVEEEIKIVSKYPADASLPDINEGVYGSDEFRMYSFKVKPCSRAYSHDWTECAFVHPGENARRRDPRKYPYTCVPCPEFRKGSCPKGDSCEYAHGVFESWLHPAQYKTRLCKDETGCARKVCFFAHKREEMRPVNASTGSAVAQSPFSSLEMMPGLSPLAYSSGVSTPPVSPMANGVPSSPRNGGSWQNRVNTLTPPALQLNGGSRLKSTLSARDIDMEMEMELRLRGFGNNVEETFGSYVSSPSRNSQMGQNMNQHYPSSPVRQPPSQHGFESSAAAAVAVMKARSTAFAKRSLSFKPATQAAPQSNLSDWGSPNGKLEWGMKGEELNKMRRSVSFGIHGNNNNNAARDYRDEPDVSWVNSLVKDSTVVSERSFGMNERVRIMSWAEQMYREKEQTVV

SEQ ID NO: 50838 - DNA, 1278 bp, Arabidopsis thaliana
  misc_feature (1)..(1278): Ceres Seq. ID no. 12559007
  misc_feature (1)..(1278): Ortholog of  Ceres SEQ ID NO 15176895 as cited in SEQ ID NO 54714
tctctcttcagtcttcaacctccgcccggtattgttgaaaagttttagcctttttgttaattactactttactactcttgttgtgaatttgctgctactgttgaagccatggaagctcggattttgcagtcttcttcttcctgttattcgtctctttacgctgtcaatcgatcccggttctcttctgtgtcatctccgaaacctttctccgtcagctttgctcagacgacgagaacaaggactcgtgtattatccatgtcgaagaaagatggtcgcactgataaagatgatgacactgatagtctcaattacaaagattctggtgttgatatcgatgctggtgctgagcttgttaaacgaatcgcaaagatggctcctggaattggtggatttggtggtctctttccattaggtgatagttatcttgtagctggtacggatggtgtagggactaaattgaaattggcatttgaaactggaattcatgacaccattggaatcgacttggttgctatgagtgtgaatgatattattacttctggtgcaaagcctctgtttttccttgattactttgctactagtcgtcttgatgtagaccttgctgaaaaggtcattaaagggattgttgaaggttgtcggcaatcggaatgtgctctcttagggggagagactgcagagatgcctgacttttatgcagagggcgagtacgatctaagtgggtttgcagtaggcatagtaaagaaaacttcagttatcaacggaaaaaacattgtggccggtgatgttcttattggcctcccgtctagtggtgttcattccaatggtttttctctagtaagaagggtattggctcgaagcaatctttcgctgaaggatgcgcttccaggtggatcaagtacccttggtgatgctctaatggcacccactgtcatttacgtgaaacaggtacttgatatgatagaaaaaggaggagtgaaaggtttagctcatatcacaggcggaggtttcacagacaacattccccgagtcttcccggacggtttgggtgctgttattcacaccgatgcttgggaacttccaccgttgttcaagtggattcaacagactgggagaatagaagacagtgagatgagaaggacgtttaacctggggatagggatggttatggtggttagtccagaggcagcttcacgaatactagaagaagtcaagaatggagactatgttgcgtatcgcgtaggagaggttgtcaacggtgaaggcgtaagctatcagtag

SEQ ID NO: 50839 - protein, 389 aa, Arabidopsis thaliana
  peptide (1)..(389): Ceres Seq. ID no. 12559008
MEARILQSSSSCYSSLYAVNRSRFSSVSSPKPFSVSFAQTTRTRTRVLSMSKKDGRTDKDDDTDSLNYKDSGVDIDAGAELVKRIAKMAPGIGGFGGLFPLGDSYLVAGTDGVGTKLKLAFETGIHDTIGIDLVAMSVNDIITSGAKPLFFLDYFATSRLDVDLAEKVIKGIVEGCRQSECALLGGETAEMPDFYAEGEYDLSGFAVGIVKKTSVINGKNIVAGDVLIGLPSSGVHSNGFSLVRRVLARSNLSLKDALPGGSSTLGDALMAPTVIYVKQVLDMIEKGGVKGLAHITGGGFTDNIPRVFPDGLGAVIHTDAWELPPLFKWIQQTGRIEDSEMRRTFNLGIGMVMVVSPEAASRILEEVKNGDYVAYRVGEVVNGEGVSYQ

SEQ ID NO: 50840 - protein, 340 aa, Arabidopsis thaliana
  peptide (1)..(340): Ceres Seq. ID no. 12559009
MSKKDGRTDKDDDTDSLNYKDSGVDIDAGAELVKRIAKMAPGIGGFGGLFPLGDSYLVAGTDGVGTKLKLAFETGIHDTIGIDLVAMSVNDIITSGAKPLFFLDYFATSRLDVDLAEKVIKGIVEGCRQSECALLGGETAEMPDFYAEGEYDLSGFAVGIVKKTSVINGKNIVAGDVLIGLPSSGVHSNGFSLVRRVLARSNLSLKDALPGGSSTLGDALMAPTVIYVKQVLDMIEKGGVKGLAHITGGGFTDNIPRVFPDGLGAVIHTDAWELPPLFKWIQQTGRIEDSEMRRTFNLGIGMVMVVSPEAASRILEEVKNGDYVAYRVGEVVNGEGVSYQ

SEQ ID NO: 50841 - protein, 302 aa, Arabidopsis thaliana
  peptide (1)..(302): Ceres Seq. ID no. 12559010
MAPGIGGFGGLFPLGDSYLVAGTDGVGTKLKLAFETGIHDTIGIDLVAMSVNDIITSGAKPLFFLDYFATSRLDVDLAEKVIKGIVEGCRQSECALLGGETAEMPDFYAEGEYDLSGFAVGIVKKTSVINGKNIVAGDVLIGLPSSGVHSNGFSLVRRVLARSNLSLKDALPGGSSTLGDALMAPTVIYVKQVLDMIEKGGVKGLAHITGGGFTDNIPRVFPDGLGAVIHTDAWELPPLFKWIQQTGRIEDSEMRRTFNLGIGMVMVVSPEAASRILEEVKNGDYVAYRVGEVVNGEGVSYQ

SEQ ID NO: 50842 - DNA, 1386 bp, Arabidopsis thaliana; identical to SEQ ID NO: 30488
  misc_feature (1)..(1386): Ceres Seq. ID no. 12337305
  misc_feature (1)..(1386): Ortholog of  Ceres SEQ ID NO 14310616 as cited in SEQ ID NO 55699
  misc_feature (1)..(1386): Ortholog of  Ceres SEQ ID NO 13596519 as cited in SEQ ID NO 62572
  misc_feature (1)..(1386): Ortholog of  Ceres SEQ ID NO 12625108 as cited in SEQ ID NO 68102

SEQ ID NO: 50843 - protein, 257 aa, Arabidopsis thaliana; identical to SEQ ID NO: 30489
  peptide (1)..(257): Ceres Seq. ID no. 12337306

SEQ ID NO: 50844 - protein, 255 aa, Arabidopsis thaliana; identical to SEQ ID NO: 30490
  peptide (1)..(255): Ceres Seq. ID no. 12337307

SEQ ID NO: 50845 - protein, 210 aa, Arabidopsis thaliana; identical to SEQ ID NO: 30491
  peptide (1)..(210): Ceres Seq. ID no. 12337308

SEQ ID NO: 50846 - DNA, 1770 bp, Arabidopsis thaliana; identical to SEQ ID NO: 49181
  misc_feature (1)..(1770): Ceres Seq. ID no. 12601427
  misc_feature (1)..(1770): Ortholog of  Ceres SEQ ID NO 13579556 as cited in SEQ ID NO 53743

SEQ ID NO: 50847 - protein, 431 aa, Arabidopsis thaliana; identical to SEQ ID NO: 49182
  peptide (1)..(431): Ceres Seq. ID no. 12601428

SEQ ID NO: 50848 - protein, 271 aa, Arabidopsis thaliana; identical to SEQ ID NO: 49183
  peptide (1)..(271): Ceres Seq. ID no. 12601429

SEQ ID NO: 50849 - protein, 223 aa, Arabidopsis thaliana; identical to SEQ ID NO: 49184
  peptide (1)..(223): Ceres Seq. ID no. 12601430

SEQ ID NO: 50850 - DNA, 840 bp, Arabidopsis thaliana
  misc_feature (1)..(840): Ceres Seq. ID no. 13575368
  misc_feature (1)..(840): Ortholog of  Ceres SEQ ID NO 12609041 as cited in SEQ ID NO 51310
  misc_feature (1)..(840): Ortholog of  Ceres SEQ ID NO 14312140 as cited in SEQ ID NO 57002
  misc_feature (1)..(840): Ortholog of  Ceres SEQ ID NO 14312224 as cited in SEQ ID NO 57255
  misc_feature (1)..(840): Ortholog of  Ceres SEQ ID NO 12582457 as cited in SEQ ID NO 57530
gctttttccatttttcttgttttttttgttttgtttttggagttgtgtttcacctgttgttggttctttantccgtcttctgggttaaacaaagaagatcggttctgtttttatttttattttgaaacaagaagaagaaagcaagctacgatgatgtttcttgctgacgccaaaagataaagacacgacttttacaaagcttaggacctgcattctcaccgttatcaaaaaatgtcgaatctttctgcaagaacaggacgagaccatcaacgttatgacaacaacttccgtcttgtttctggatgcattccgtataggctggtgaaagatgaagaagaggactcaacaagtgttgactttgaaaacaagcttcaagttcttatgatttcatctcctaatcgtcacgatcttgtcttcccaaagggaggatgggaagatgatgaaactgttcttgaagctgcttctcgtgaagctatggaagaagcaggagttaaaggaatactaagagaagatccattaggagtttgggaatttagaagtaagagtagcagtgtggaagctgattgctgcttaggtggtggatgcaaaggttatatgtttgcgttagaggtgaaggaagaacttgcgatatggcctgagcaagatgaccgcgagagaagatggctgaatgtaaaagaagccttggagctgtgtcggtatgagtggatgcagagcgctcttgaagagtttctacgagtaatggcagaagaaggaagcacaaaggaagactctcttgccatttccagcatttcaaatcgaggagagcgtcaaattgatcctcgctactgctttgtagtctaa

SEQ ID NO: 50851 - protein, 202 aa, Arabidopsis thaliana
  peptide (1)..(202): Ceres Seq. ID no. 13575369
MSNLSARTGRDHQRYDNNFRLVSGCIPYRLVKDEEEDSTSVDFENKLQVLMISSPNRHDLVFPKGGWEDDETVLEAASREAMEEAGVKGILREDPLGVWEFRSKSSSVEADCCLGGGCKGYMFALEVKEELAIWPEQDDRERRWLNVKEALELCRYEWMQSALEEFLRVMAEEGSTKEDSLAISSISNRGERQIDPRYCFVV

SEQ ID NO: 50852 - protein, 152 aa, Arabidopsis thaliana
  peptide (1)..(152): Ceres Seq. ID no. 13575370
MISSPNRHDLVFPKGGWEDDETVLEAASREAMEEAGVKGILREDPLGVWEFRSKSSSVEADCCLGGGCKGYMFALEVKEELAIWPEQDDRERRWLNVKEALELCRYEWMQSALEEFLRVMAEEGSTKEDSLAISSISNRGERQIDPRYCFVV

SEQ ID NO: 50853 - protein, 121 aa, Arabidopsis thaliana
  peptide (1)..(121): Ceres Seq. ID no. 13575371
MEEAGVKGILREDPLGVWEFRSKSSSVEADCCLGGGCKGYMFALEVKEELAIWPEQDDRERRWLNVKEALELCRYEWMQSALEEFLRVMAEEGSTKEDSLAISSISNRGERQIDPRYCFVV

SEQ ID NO: 50854 - DNA, 1776 bp, Arabidopsis thaliana; identical to SEQ ID NO: 46570
  misc_feature (1)..(1776): Ceres Seq. ID no. 13579260
  misc_feature (1)..(1776): Ortholog of  Ceres SEQ ID NO 14308698 as cited in SEQ ID NO 58663

SEQ ID NO: 50855 - protein, 524 aa, Arabidopsis thaliana; identical to SEQ ID NO: 46571
  peptide (1)..(524): Ceres Seq. ID no. 13579261

SEQ ID NO: 50856 - protein, 453 aa, Arabidopsis thaliana; identical to SEQ ID NO: 46572
  peptide (1)..(453): Ceres Seq. ID no. 13579262

SEQ ID NO: 50857 - protein, 447 aa, Arabidopsis thaliana; identical to SEQ ID NO: 46573
  peptide (1)..(447): Ceres Seq. ID no. 13579263

SEQ ID NO: 50858 - DNA, 1690 bp, Arabidopsis thaliana
  misc_feature (1)..(1690): Ceres Seq. ID no. 12559025
  misc_feature (1)..(1690): Ortholog of  Ceres SEQ ID NO 14302742 as cited in SEQ ID NO 66899
attaatagatatctcaaacacaactctcaaaacttgccctgtttggtccgaaaccgaaactaaccctaatctcacatcacatcacatagcaatcacttcacatcacaaaacacctcatagccgcaaaatttaatggcagacgtcaagattcaatccgaatccgaatcctcggattctcatccagtggtcgacaatcaaccacctcctccgcctccgccgccgcaacagccggcgaaagaagaggagaatcaaccaaaaacatctccgactccgccgccacactggatgcggtatccaccaacggtgataatccctcatcagatgatgtacgcgccgccgccgttcccaccttatcatcagtatccgaatcaccaccaccttcaccatcaatctcgtggtaataagcatcaaaacgcttttaatggtgagaataaaaccatatgggttggtgatttgcatcactggatggatgaggcttatcttaattcttcttttgcttccggcgacgagagagagattgtttcggtgaaggtgattcgtaataagaacaatggtttatcagaaggatatggatttgtggagtttgagtcccatgatgtagctgataaggttttgcgggagtttaacgggacgactatgccaaatactgaccaaccttttcgtttgaactgggctagttttagcaccggtgagaagcggttagagaacaatggacctgatctctctattttcgtgggggatttgtcaccagatgtttcggataatttgttgcacgagaccttctctgagaagtatccgtcggttaaagctgcgaaagttgtccttgatgctaatactggtaggtcaaaggggtatgggtttgtgaggtttggtgatgagaatgaaaggaccaaagcaatgactgagatgaatggtgttaaatgttctagtagagctatgcgcatcggtcctgctaccccgaggaagactaatggttatcaacaacaaggtggatacatgccgaatggtaccttgacgcgtcctgaaggggacataatgaacacaacaatatttgttggagggcttgactctagtgtcactgatgaagacttaaagcaacctttcaatgaattcggggaaatagtctctgtcaagattcctgttggtaaaggatgcggatttgttcagtttgttaacagaccaaatgcagaggaggctttggagaaactaaatgggactgtaattggaaaacaaacagttcggctttcttggggacgtaatcccgccaataagcagcctagagataagtatggaaaccaatgggttgatccgtactatggaggacagttttacaatgggtatggatacatggtacctcaacctgacccgagaatgtatcccgctgcaccttactatccaatgtacggtggtcatcagcaacaagttagctgaggaaactaaaagcttaatctgagcatctatctataggacaacaaaaactcactcaggttaggtgatgttaggaagaacaaggcaaaaattgttggcttcttgtctctccttgagtttagggtttatcatctagtggacatcgaatttttggtggaaaccatacagtaatttaggggacttggatttgattgattaattttatttgtttcttctgatacttttgactatggaagttattgatcaagaagaagtgagttgc

SEQ ID NO: 50859 - protein, 432 aa, Arabidopsis thaliana
  peptide (1)..(432): Ceres Seq. ID no. 12559026
MADVKIQSESESSDSHPVVDNQPPPPPPPPQQPAKEEENQPKTSPTPPPHWMRYPPTVIIPHQMMYAPPPFPPYHQYPNHHHLHHQSRGNKHQNAFNGENKTIWVGDLHHWMDEAYLNSSFASGDEREIVSVKVIRNKNNGLSEGYGFVEFESHDVADKVLREFNGTTMPNTDQPFRLNWASFSTGEKRLENNGPDLSIFVGDLSPDVSDNLLHETFSEKYPSVKAAKVVLDANTGRSKGYGFVRFGDENERTKAMTEMNGVKCSSRAMRIGPATPRKTNGYQQQGGYMPNGTLTRPEGDIMNTTIFVGGLDSSVTDEDLKQPFNEFGEIVSVKIPVGKGCGFVQFVNRPNAEEALEKLNGTVIGKQTVRLSWGRNPANKQPRDKYGNQWVDPYYGGQFYNGYGYMVPQPDPRMYPAAPYYPMYGGHQQQVS

SEQ ID NO: 50860 - protein, 381 aa, Arabidopsis thaliana
  peptide (1)..(381): Ceres Seq. ID no. 12559027
MRYPPTVIIPHQMMYAPPPFPPYHQYPNHHHLHHQSRGNKHQNAFNGENKTIWVGDLHHWMDEAYLNSSFASGDEREIVSVKVIRNKNNGLSEGYGFVEFESHDVADKVLREFNGTTMPNTDQPFRLNWASFSTGEKRLENNGPDLSIFVGDLSPDVSDNLLHETFSEKYPSVKAAKVVLDANTGRSKGYGFVRFGDENERTKAMTEMNGVKCSSRAMRIGPATPRKTNGYQQQGGYMPNGTLTRPEGDIMNTTIFVGGLDSSVTDEDLKQPFNEFGEIVSVKIPVGKGCGFVQFVNRPNAEEALEKLNGTVIGKQTVRLSWGRNPANKQPRDKYGNQWVDPYYGGQFYNGYGYMVPQPDPRMYPAAPYYPMYGGHQQQVS

SEQ ID NO: 50861 - protein, 369 aa, Arabidopsis thaliana
  peptide (1)..(369): Ceres Seq. ID no. 12559028
MMYAPPPFPPYHQYPNHHHLHHQSRGNKHQNAFNGENKTIWVGDLHHWMDEAYLNSSFASGDEREIVSVKVIRNKNNGLSEGYGFVEFESHDVADKVLREFNGTTMPNTDQPFRLNWASFSTGEKRLENNGPDLSIFVGDLSPDVSDNLLHETFSEKYPSVKAAKVVLDANTGRSKGYGFVRFGDENERTKAMTEMNGVKCSSRAMRIGPATPRKTNGYQQQGGYMPNGTLTRPEGDIMNTTIFVGGLDSSVTDEDLKQPFNEFGEIVSVKIPVGKGCGFVQFVNRPNAEEALEKLNGTVIGKQTVRLSWGRNPANKQPRDKYGNQWVDPYYGGQFYNGYGYMVPQPDPRMYPAAPYYPMYGGHQQQVS

SEQ ID NO: 50862 - DNA, 1336 bp, Arabidopsis thaliana
  misc_feature (1)..(1336): Ceres Seq. ID no. 12599967
  misc_feature (1)..(1336): Ortholog of  Ceres SEQ ID NO 13494608 as cited in SEQ ID NO 18143
  misc_feature (1)..(1336): Ortholog of  Ceres SEQ ID NO 12616181 as cited in SEQ ID NO 63343
agccgtcacctcctacctcagactctattactccggccggcgaaattagggttagaatctgtagctgtttggtgagataagaataataaatgggtcgtttcaaaaacaataagaagagtagggtcattgggaaacctattgcgaagaaaaatcaagaggatgttagtcatgtcactggggataagattcccaagagttttgtcttctcaagaatgaaacttgctggccctgttaaacaactccagatggatttgaggaagctcatgcttccctacactgctctcagtcttaaggagaagaagcggaacactttaagggactttttgaatgtatcaggtccaatgggtgttacacatttccttatgctttcgaaaacagcgtcttcactgtctcttagagtagcaagaacccctcagggcccgactcttaccttcaaaattcatcagtattccttagcatcagatatagctcagtctcagcttcgacctagatgtcctcaagatcttttcaagagtcctcctttgattgtcctttctggattcggttctcaagagttgcatctgaaactggcaacgattatgtttcagaatatattcccagctattgatattaacactgtcaagctctccacctgccagagattagtactcttgaactacaacaaagacaccaagctcattgatttccggcattattctataagacttcagcctgttggagtatctcgtaggatcagaaagtttgtgcaaaatcatcaggttccagatcttaggaatctgcaggatgttagtgattttgtcaccaaggctggttacggatcagagagcgaaggagatgaagaagcggcaacagtgacactatcatctgatctaggccgagttaacaaaggtgccaccaagagcgcagtgaaactgcaagaaattggaccaagaatgactatgcaactcgttaaagtggaggaaggattgtgtacaggaggaatcatattcagtgaatatgatgttgatggaaagaaagaaaagttaaagaagaaacaggatgaagaagaagaagaagatagtgaagaagaaggcgaagagggtagtgaagaagatggggaagacatggatgaggattttgaagattgaaaagagttaaaatagagtaacactgttttcacatgagacttgagtgttgttcatcaaattttgttccttggatctctgagtagcgttgcatctattgtctgattaaactacaattacaaagccttttgtactattaaactaaatgtcttcccggaattcgtataatgaccgaattaagccttttgtactattaaactaaatgtcttccc

SEQ ID NO: 50863 - protein, 345 aa, Arabidopsis thaliana
  peptide (1)..(345): Ceres Seq. ID no. 12599968
MGRFKNNKKSRVIGKPIAKKNQEDVSHVTGDKIPKSFVFSRMKLAGPVKQLQMDLRKLMLPYTALSLKEKKRNTLRDFLNVSGPMGVTHFLMLSKTASSLSLRVARTPQGPTLTFKIHQYSLASDIAQSQLRPRCPQDLFKSPPLIVLSGFGSQELHLKLATIMFQNIFPAIDINTVKLSTCQRLVLLNYNKDTKLIDFRHYSIRLQPVGVSRRIRKFVQNHQVPDLRNLQDVSDFVTKAGYGSESEGDEEAATVTLSSDLGRVNKGATKSAVKLQEIGPRMTMQLVKVEEGLCTGGIIFSEYDVDGKKEKLKKKQDEEEEEDSEEEGEEGSEEDGEDMDEDFED

SEQ ID NO: 50864 - protein, 304 aa, Arabidopsis thaliana
  peptide (1)..(304): Ceres Seq. ID no. 12599969
MKLAGPVKQLQMDLRKLMLPYTALSLKEKKRNTLRDFLNVSGPMGVTHFLMLSKTASSLSLRVARTPQGPTLTFKIHQYSLASDIAQSQLRPRCPQDLFKSPPLIVLSGFGSQELHLKLATIMFQNIFPAIDINTVKLSTCQRLVLLNYNKDTKLIDFRHYSIRLQPVGVSRRIRKFVQNHQVPDLRNLQDVSDFVTKAGYGSESEGDEEAATVTLSSDLGRVNKGATKSAVKLQEIGPRMTMQLVKVEEGLCTGGIIFSEYDVDGKKEKLKKKQDEEEEEDSEEEGEEGSEEDGEDMDEDFED

SEQ ID NO: 50865 - protein, 293 aa, Arabidopsis thaliana
  peptide (1)..(293): Ceres Seq. ID no. 12599970
MDLRKLMLPYTALSLKEKKRNTLRDFLNVSGPMGVTHFLMLSKTASSLSLRVARTPQGPTLTFKIHQYSLASDIAQSQLRPRCPQDLFKSPPLIVLSGFGSQELHLKLATIMFQNIFPAIDINTVKLSTCQRLVLLNYNKDTKLIDFRHYSIRLQPVGVSRRIRKFVQNHQVPDLRNLQDVSDFVTKAGYGSESEGDEEAATVTLSSDLGRVNKGATKSAVKLQEIGPRMTMQLVKVEEGLCTGGIIFSEYDVDGKKEKLKKKQDEEEEEDSEEEGEEGSEEDGEDMDEDFED

SEQ ID NO: 50866 - DNA, 2118 bp, Arabidopsis thaliana; identical to SEQ ID NO: 45488
  misc_feature (1)..(2118): Ceres Seq. ID no. 13646450
  misc_feature (1)..(2118): Ortholog of  Ceres SEQ ID NO 13654989 as cited in SEQ ID NO 63117
  misc_feature (1)..(2118): Ortholog of  Ceres SEQ ID NO 13584744 as cited in SEQ ID NO 69137

SEQ ID NO: 50867 - protein, 557 aa, Arabidopsis thaliana; identical to SEQ ID NO: 45489
  peptide (1)..(557): Ceres Seq. ID no. 13646451

SEQ ID NO: 50868 - protein, 539 aa, Arabidopsis thaliana; identical to SEQ ID NO: 45490
  peptide (1)..(539): Ceres Seq. ID no. 13646452

SEQ ID NO: 50869 - protein, 491 aa, Arabidopsis thaliana; identical to SEQ ID NO: 45491
  peptide (1)..(491): Ceres Seq. ID no. 13646453

SEQ ID NO: 50870 - DNA, 549 bp, Arabidopsis thaliana; identical to SEQ ID NO: 35308
  misc_feature (1)..(549): Ceres Seq. ID no. 12397083
  misc_feature (1)..(549): Ortholog of  Ceres SEQ ID NO 12635836 as cited in SEQ ID NO 0
  misc_feature (1)..(549): Ortholog of  Ceres SEQ ID NO 13599004 as cited in SEQ ID NO 0

SEQ ID NO: 50871 - protein, 78 aa, Arabidopsis thaliana; identical to SEQ ID NO: 35309
  peptide (1)..(78): Ceres Seq. ID no. 12397084

SEQ ID NO: 50872 - protein, 41 aa, Arabidopsis thaliana; identical to SEQ ID NO: 35310
  peptide (1)..(41): Ceres Seq. ID no. 12397085

SEQ ID NO: 50873 - DNA, 1090 bp, Arabidopsis thaliana; identical to SEQ ID NO: 35686
  misc_feature (1)..(1090): Ceres Seq. ID no. 13490166
  misc_feature (1)..(1090): Ortholog of  Ceres SEQ ID NO 14304202 as cited in SEQ ID NO 56346
  misc_feature (1)..(1090): Ortholog of  Ceres SEQ ID NO 14304159 as cited in SEQ ID NO 56494
  misc_feature (1)..(1090): Ortholog of  Ceres SEQ ID NO 14314198 as cited in SEQ ID NO 57472
  misc_feature (1)..(1090): Ortholog of  Ceres SEQ ID NO 12613472 as cited in SEQ ID NO 60611
  misc_feature (1)..(1090): Ortholog of  Ceres SEQ ID NO 12623915 as cited in SEQ ID NO 61013

SEQ ID NO: 50874 - protein, 274 aa, Arabidopsis thaliana; identical to SEQ ID NO: 30943
  peptide (1)..(274): Ceres Seq. ID no. 13490167

SEQ ID NO: 50875 - protein, 207 aa, Arabidopsis thaliana; identical to SEQ ID NO: 30944
  peptide (1)..(207): Ceres Seq. ID no. 13490168

SEQ ID NO: 50876 - DNA, 935 bp, Arabidopsis thaliana
  misc_feature (1)..(935): Ceres Seq. ID no. 13487308
  misc_feature (1)..(935): Ortholog of  Ceres SEQ ID NO 14306627 as cited in SEQ ID NO 53023
  misc_feature (1)..(935): Ortholog of  Ceres SEQ ID NO 15174917 as cited in SEQ ID NO 53650
  misc_feature (1)..(935): Ortholog of  Ceres SEQ ID NO 14304034 as cited in SEQ ID NO 53878
  misc_feature (1)..(935): Ortholog of  Ceres SEQ ID NO 14307559 as cited in SEQ ID NO 54006
  misc_feature (1)..(935): Ortholog of  Ceres SEQ ID NO 14307797 as cited in SEQ ID NO 54802
  misc_feature (1)..(935): Ortholog of  Ceres SEQ ID NO 15168374 as cited in SEQ ID NO 55652
  misc_feature (1)..(935): Ortholog of  Ceres SEQ ID NO 13663874 as cited in SEQ ID NO 67003
atcttttgggagaggagaaagaaaaagaaaatgggaagagggagagtagaattgaagaggatagagaacaagatcaataggcaagtgacgtttgcaaagagaaggaatggtcttttgaagaaagcatacgagctttcagttctatgtgatgcagaagttgctctcatcatcttctcaaatagaggaaagctgtacgagttttgcagtagttcgagcatgcttcggacactggagaggtaccaaaagtgtaactatggagcaccagaacccaatgtgccttcaagagaggccttagcagttgaacttagtagccagcaggagtatctcaagcttaaggagcgttatgacgccttacaaagaacccaaaggaatctgttgggagaagatcttggacctctaagtacaaaggagcttgagtcacttgagagacagcttgattcttccttgaagcagatcagagctctcaggacacagtttatgcttgaccagctcaacgatcttcagagtaaggaacgcatgctgactgagacaaataaaactctaagactaaggttagctgatgggtatcagatgccactccagctgaaccctaaccaagaagaggttgatcactacggtcgtcatcatcatcaacaacaacaacactcccaagctttcttccagcctttggaatgtgaacccattcttcagatcgggtatcaggggcaacaagatggaatgggagcaggaccaagtgtgaataattacatgttgggttggttaccttatgacaccaactctatttgaatctttctcacttaatcaatccctctcttttttttttgacatttttaagatgatgtttctattttattacctctctcatgttttctgtcttgtgtgcatgtgtgtgtgtaatgtttatgcccttctattattcaataattttttcgact

SEQ ID NO: 50877 - protein, 261 aa, Arabidopsis thaliana
  peptide (1)..(261): Ceres Seq. ID no. 13487309
IFWERRKKKKMGRGRVELKRIENKINRQVTFAKRRNGLLKKAYELSVLCDAEVALIIFSNRGKLYEFCSSSSMLRTLERYQKCNYGAPEPNVPSREALAVELSSQQEYLKLKERYDALQRTQRNLLGEDLGPLSTKELESLERQLDSSLKQIRALRTQFMLDQLNDLQSKERMLTETNKTLRLRLADGYQMPLQLNPNQEEVDHYGRHHHQQQQHSQAFFQPLECEPILQIGYQGQQDGMGAGPSVNNYMLGWLPYDTNSI

SEQ ID NO: 50878 - protein, 251 aa, Arabidopsis thaliana
  peptide (1)..(251): Ceres Seq. ID no. 13487310
MGRGRVELKRIENKINRQVTFAKRRNGLLKKAYELSVLCDAEVALIIFSNRGKLYEFCSSSSMLRTLERYQKCNYGAPEPNVPSREALAVELSSQQEYLKLKERYDALQRTQRNLLGEDLGPLSTKELESLERQLDSSLKQIRALRTQFMLDQLNDLQSKERMLTETNKTLRLRLADGYQMPLQLNPNQEEVDHYGRHHHQQQQHSQAFFQPLECEPILQIGYQGQQDGMGAGPSVNNYMLGWLPYDTNSI

SEQ ID NO: 50879 - protein, 189 aa, Arabidopsis thaliana
  peptide (1)..(189): Ceres Seq. ID no. 13487311
MLRTLERYQKCNYGAPEPNVPSREALAVELSSQQEYLKLKERYDALQRTQRNLLGEDLGPLSTKELESLERQLDSSLKQIRALRTQFMLDQLNDLQSKERMLTETNKTLRLRLADGYQMPLQLNPNQEEVDHYGRHHHQQQQHSQAFFQPLECEPILQIGYQGQQDGMGAGPSVNNYMLGWLPYDTNSI

SEQ ID NO: 50880 - DNA, 674 bp, Arabidopsis thaliana
  misc_feature (1)..(674): Ceres Seq. ID no. 12559599
  misc_feature (1)..(674): Ortholog of  Ceres SEQ ID NO 15179562 as cited in SEQ ID NO 0
aacataaattaagtttttttttgtccttttctgcctttacctttccttctactcccgaaaaagcactgactttgctctgtttccttcgttcacacagagaaagagagaaatcttctgagcgaaattctgacaaaagagatgatggaatgggataatcagctacaacccaataaccatcactcttctaatcttcaagggatcgacgttaatggcggctccggcgccggaggaggaatgtacgtgaaggtgatgaccgatgagcagtatgaaactctcaggaaacagattgctatttacggcaccatttgtgagcgtcttgttgagatgcataaaactctcactgctcaacaagatcttgcaggagggagaatgggaggactatatgcagaccccaatgatgtcatctttaggtcataagatgacagctagacagaggtggactcctacgccagtccagcttcagattctggaacgtatattcgatcaaggcacgggaacncccgagcaagcagaagatcaaagacataacagaagagcttgagcccacacgggcagattgnttgaacaaaatgnctataactgggttccagaacccgacgtgctcgatccaaganggaagcagcatgggngganggtctttcttggaaaaaaaataaatggggaagtctgaggta

SEQ ID NO: 50881 - protein, 94 aa, Arabidopsis thaliana
  peptide (1)..(94): Ceres Seq. ID no. 12559600
  misc_feature (81)..(81): Xaa is any aa, unknown or other
MSSMKLSGNRLLFTAPFVSVLLRCIKLSLLNKILQEGEWEDYMQTPMMSSLGHKMTARQRWTPTPVQLQILERIFDQGTGXPEQAEDQRHNRRA

SEQ ID NO: 50882 - protein, 92 aa, Arabidopsis thaliana
  peptide (1)..(92): Ceres Seq. ID no. 12559601
MMEWDNQLQPNNHHSSNLQGIDVNGGSGAGGGMYVKVMTDEQYETLRKQIAIYGTICERLVEMHKTLTAQQDLAGGRMGGLYADPNDVIFRS

SEQ ID NO: 50883 - protein, 91 aa, Arabidopsis thaliana
  peptide (1)..(91): Ceres Seq. ID no. 12559602
MEWDNQLQPNNHHSSNLQGIDVNGGSGAGGGMYVKVMTDEQYETLRKQIAIYGTICERLVEMHKTLTAQQDLAGGRMGGLYADPNDVIFRS

SEQ ID NO: 50884 - DNA, 807 bp, Glycine max
  misc_feature (1)..(807): Ceres Seq. ID no. 12608801
taccgggccccccctcgaggtcgacggtatcgataagcttttttttttttttttttgcagttcaagaccttaattggtattaccacacgagtacagtgtcatgtagtgcactacggaatagtggccagctgcaacgagcatggaatgcttattcaggtttttgatggtcaaccgtgcggtaattagagggcagcaatgcactcaatctcaatccttgcgttcagtggcagagctgcgacttggtaggtcgagcgcgccggtgcaggggctggaaaatatttagcataaatctcgttcacgttcttgaaatcctgtaggtccgctaacatgattgttgtcttgacaactgatgagtagctagcaccacttgctttcaatatttcacccatgttcttcataacctgctcagtttgctcctccacgctttcagagacaaacttccctgtctcaggatttaggccaagaacgcccgagacaaacacaagattgtttgcttttatcgcctgagagtaggggcctagtgctgctggcgccttctccgtctgaacagcctccttttgaacggtggcggaggtggcgagggacgcggcgacggggccgaagcggcggcgcccggcgaaggagacggaggcggcggcggctgctgagaagggcaggcggatctcggcggccggggaggcggcgaacctggagacggcggcggcggcgctccacgccatggctaaaaccctactctaccaactacgagcacgggacggcagaagattggattgtgttgctctctgctgggatggagccgagtttttt

SEQ ID NO: 50885 - protein, 53 aa, Glycine max
  peptide (1)..(53): Ceres Seq. ID no. 12608802
PGPPSRSTVSISFFFFFFAVQDLNWYYHTSTVSCSALRNSGQLQRAWNAYSGF

SEQ ID NO: 50886 - protein, 47 aa, Glycine max
  peptide (1)..(47): Ceres Seq. ID no. 12608803
MECLFRFLMVNRAVIRGQQCTQSQSLRSVAELRLGRSSAPVQGLENI

SEQ ID NO: 50887 - protein, 39 aa, Glycine max
  peptide (1)..(39): Ceres Seq. ID no. 12608804
MFFITCSVCSSTLSETNFPVSGFRPRTPETNTRLFAFIA

SEQ ID NO: 50888 - DNA, 868 bp, Glycine max
  misc_feature (1)..(868): Ceres Seq. ID no. 13594457
aacttaaccttcaaaaatattataattaagacaaattacattcaagtaattaacatgatagtcacgatacccaaaatgattttatacatgtcctccaaactatgagcattaactcatttttccttccctctataaccaaagtaataataattagagtagcaaatcatacacaaatcaaaaactagatttgaaactgcaagttacacgaacatccacgatggctattgcatgggtaaggtgccccgggcagaccttatacatttttagcatgaaaccaaattatgcctgcttatgaatcctccttcaattcatccgaatcagagtcacttgcattataacctgggtgcttatcacctactttccaaaccgaagacctagtccttgatgctttggtcagccaaactcttcccttctgagcatctcttggaaccccataaccaccgtagtacatctgacccaccaacacttgcatgtttatgtcccctgccttagcctctttcagtgcatctctgaaccaccgcttcacacaatctgccaccacctctgaaagtgccacgcgttcactcctctctcccccaacggaactctccataacccctttcagccactttcaacttcaacgtggtttcagtgttcaagtttcgatctttctttcacccctttttgtgagagccctttatattggggtggatttgagtcttcggcgatgctatttgaagatcatttttggtttcaatgctgaggatttgaaacgaaaaaattcaaatattcagaaagagacgcagaaagagaaagaggaagagagaatgagaaatttaaagggaaaaaatgaagaggtttagagaggaggagaaggagtaagaaaagc

SEQ ID NO: 50889 - protein, 123 aa, Glycine max
  peptide (1)..(123): Ceres Seq. ID no. 13594458
MFMSPALASFSASLNHRFTQSATTSESATRSLLSPPTELSITPFSHFQLQRGFSVQVSIFLSPLFVRALYIGVDLSLRRCYLKIIFGFNAEDLKRKNSNIQKETQKEKEEERMRNLKGKNEEV

SEQ ID NO: 50890 - protein, 121 aa, Glycine max
  peptide (1)..(121): Ceres Seq. ID no. 13594459
MSPALASFSASLNHRFTQSATTSESATRSLLSPPTELSITPFSHFQLQRGFSVQVSIFLSPLFVRALYIGVDLSLRRCYLKIIFGFNAEDLKRKNSNIQKETQKEKEEERMRNLKGKNEEV

SEQ ID NO: 50891 - DNA, 1054 bp, Glycine max
  misc_feature (1)..(1054): Ceres Seq. ID no. 12608889
agagcatagcaattgctacccaatgaatatgtataatcgtgttgaatggattatcacacaatcagttttcattatttccccggtcaaaatcccctttttcagggctcaaaattaccactccaattacaacagcttcaattgaatcatgctgcagagattccccaactcatcgcattcggacaatcaaatctatctatgcctcaatcccacgcacccgagatctaaatcgtaaagcaaaaaaagcaaatcttacgagtttgctttggctccatccaccgcaaccgccgcgttctcctcggcggcggcggcggccgcatccgcctcgatctgcttcttgttgcgctcgatggcctcgccgacctccttgggcatgtacttctcgtcgtgcttggcgagcacctccgtgccgcgcaagaagcactggccctccagcgccttatcggagacctttctccccgcccagtcgcggcggaggtcgtcggtcagcggcttgaggaacccctcgacgacgacggagtggccctcgcggaagaggtcgggcagggcgccctcgtagcggacgagcacgtcggtgacgaggtcggtgacgacgaactcgatctcggagttggaggaggaggggtgggcgacggagccctcgaggacgagcccgccgaggcggcagcgggtcttggaggggtcggtggcgaagcgcgcgagcgcgtcggtgggggtgaggtagaagacgagctggtcctggaacgtggcgagcacggtgaccacgaacccggccgcgcagccgaaggtgagcgcgtaggtccagaggcgccggctctgcagctgccgcgcccgcgcgccgatgtccgccgcgcgctgccgcggggcgcccggcccggcccgcctcgtcgcggagaagaagcgcgcgggctggagggtgtgggcgaacggggaggtggtcgcggcggcggggccggtggcgcgcgcggcggggatcggggtcggggtgtggaggagggcggagaggaggcggcgggaggggagaaggcgcgagaaggccatggggacggtgggatct

SEQ ID NO: 50892 - protein, 72 aa, Glycine max
  peptide (1)..(72): Ceres Seq. ID no. 12608890
MSAARCRGAPGPARLVAEKKRAGWRVWANGEVVAAAGPVARAAGIGVGVWRRAERRRREGRRREKAMGTVGS

SEQ ID NO: 50893 - protein, 69 aa, Glycine max
  peptide (1)..(69): Ceres Seq. ID no. 12608891
MASPTSLGMYFSSCLASTSVPRKKHWPSSALSETFLPAQSRRRSSVSGLRNPSTTTEWPSRKRSGRAPS

SEQ ID NO: 50894 - protein, 61 aa, Glycine max
  peptide (1)..(61): Ceres Seq. ID no. 12608892
MYFSSCLASTSVPRKKHWPSSALSETFLPAQSRRRSSVSGLRNPSTTTEWPSRKRSGRAPS

SEQ ID NO: 50895 - protein, 59 aa, Glycine max
  peptide (1)..(59): Ceres Seq. ID no. 12608893
MDYHTISFHYFPGQNPLFQGSKLPLQLQQLQLNHAAEIPQLIAFGQSNLSMPQSHAPEI

SEQ ID NO: 50896 - DNA, 624 bp, Glycine max
  misc_feature (1)..(624): Ceres Seq. ID no. 15172954
atcatcacacaactgtgatgtaaggcaattctgcattcatttatgtatgtaatatttgcttgwgatgcatttctcagtcataatttctctttttgcaggttccacatgtgaatcgcactgactatcagcttattgatatctctgaagacggctttgtgagtctgttgactgataatggaaataccaaggatgatctgaagcttcccacggatgaggcgttgctttctcagattaaagatggatttgctgaaggaaaagatcttgtggtttctgtcatgtctgcaatgggagaagaacagatctgttcgctgaaggacatcggtccaaaaaattaaaatgatgctatggctgtagctatagctgtagctatagctgatagcatgctttttcttcttatgttgctaacaggtagtatattttccgatacatgtgtgcaaaataaacttcataagatggaaatttgcctgcgcttgaaactcaaatgcttgggatagaggaaggggagctgaagtgctttttgtccattaatcaaggaacacaacggtcttgggtggatgaaattcttataaatatctcatcatttgtttttgttgagtttaatatataaccctattagttccccct

SEQ ID NO: 50897 - protein, 49 aa, Glycine max
  peptide (1)..(49): Ceres Seq. ID no. 15172955
MAVAIAVAIADSMLFLLMLLTGSIFSDTCVQNKLHKMEICLRLKLKCLG

SEQ ID NO: 50898 - protein, 41 aa, Glycine max
  peptide (1)..(41): Ceres Seq. ID no. 15172956
MLGIEEGELKCFLSINQGTQRSWVDEILINISSFVFVEFNI

SEQ ID NO: 50899 - protein, 37 aa, Glycine max
  peptide (1)..(37): Ceres Seq. ID no. 15172957
MLFLLMLLTGSIFSDTCVQNKLHKMEICLRLKLKCLG

SEQ ID NO: 50900 - DNA, 664 bp, Glycine max
  misc_feature (1)..(664): Ceres Seq. ID no. 13581889
ggcagaaaatatgcgtgatcccatttatcaaaccagagatttgaacatttgatggcatccattagaaatacaaggagggaaacataaggaggagcagacaactacagagtcataaacatctagcgggattcaagggcagctgacacagggcggatacagagcctaggcgcgctccccgcggatgcggcgggcgagctggatgtccttgggcatgatggtgacgcgcttggcgtggatggcgcacaggttggtgtcctcgaacagccccaccaggtacgcctcggcggcctcctggagcgcggagacggcggaggactggaagcggaggtcggtcttgaagtcctgggcgatctcccggacgaggcgctggaaggggagcttgcggatgagcagctccgtgctcttctggtacttgcggatctcacggagcgcgacggttcccgggcggaagcggtggggcttcttgacgccgccggtggccggcgccgacttgcgcgccgccttggtggcgagctgcttcctgggcgccttgccgccggtggacttgcgggcagtctgcttggtgcgggccatcggagctgcgggaggcgggcggcggcgagggatgggctgctgctgcggtttggagatggagatggagactgagattgagatttttcgcggt

SEQ ID NO: 50901 - protein, 161 aa, Glycine max
  peptide (1)..(161): Ceres Seq. ID no. 13581890
MRRASWMSLGMMVTRLAWMAHRLVSSNSPTRYASAASWSAETAEDWKRRSVLKSWAISRTRRWKGSLRMSSSVLFWYLRISRSATVPGRKRWGFLTPPVAGADLRAALVASCFLGALPPVDLRAVCLVRAIGAAGGGRRRGMGCCCGLEMEMETEIEIFRG

SEQ ID NO: 50902 - protein, 155 aa, Glycine max
  peptide (1)..(155): Ceres Seq. ID no. 13581891
MSLGMMVTRLAWMAHRLVSSNSPTRYASAASWSAETAEDWKRRSVLKSWAISRTRRWKGSLRMSSSVLFWYLRISRSATVPGRKRWGFLTPPVAGADLRAALVASCFLGALPPVDLRAVCLVRAIGAAGGGRRRGMGCCCGLEMEMETEIEIFRG

SEQ ID NO: 50903 - protein, 151 aa, Glycine max
  peptide (1)..(151): Ceres Seq. ID no. 13581892
MMVTRLAWMAHRLVSSNSPTRYASAASWSAETAEDWKRRSVLKSWAISRTRRWKGSLRMSSSVLFWYLRISRSATVPGRKRWGFLTPPVAGADLRAALVASCFLGALPPVDLRAVCLVRAIGAAGGGRRRGMGCCCGLEMEMETEIEIFRG

SEQ ID NO: 50904 - DNA, 718 bp, Glycine max
  misc_feature (1)..(718): Ceres Seq. ID no. 14316124
atacttacacatctcttaaactctatacgataatttaaaaaactagactatgaatctctacttccatctggatctcttgaagatcatgagggatagagagaggagatttacgtaccgatctgatgagatcgaggttgagttcatcgggacggagcaacatatcggcgctatgattccggtaaaacataaattcccgatcaccgtcggccttcaacgtcacgaacgccaaggcggttctggctccggtatcgaagttgatcccctgatcagcgacgccgtttttcctcaggatcccagccaacatgtgtccgaactcgtcgtcgccgagttttacgatgaaggcggatcgtccaccgaggcaagaaacggtgatggcgacgatagccggagcgccgccgggagctttgaggaaacctggagcctcggcgagggagacgcgggattcggtggggacgaagtcgatgagcatcacgccgaagctgacgaagtcggtgggggggggctgtccaataccaaaccgacacgtcagggattcttaccagttctaaaaagcccaagttaagcagcggtcccatcttttttttgggcttttccaattatttttttttcacttttgtttagaacctcttctaaaggacccccgatggaggtggtctaatatgctttgatacttttgttgcttccctccacgttacatatcagaggagcttctaagagc

SEQ ID NO: 50905 - protein, 170 aa, Glycine max
  peptide (1)..(170): Ceres Seq. ID no. 14316125
MNLYFHLDLLKIMRDRERRFTYRSDEIEVEFIGTEQHIGAMIPVKHKFPITVGLQRHERQGGSGSGIEVDPLISDAVFPQDPSQHVSELVVAEFYDEGGSSTEARNGDGDDSRSAAGSFEETWSLGEGDAGFGGDEVDEHHAEADEVGGGGLSNTKPTRQGFLPVLKSPS

SEQ ID NO: 50906 - protein, 158 aa, Glycine max
  peptide (1)..(158): Ceres Seq. ID no. 14316126
MRDRERRFTYRSDEIEVEFIGTEQHIGAMIPVKHKFPITVGLQRHERQGGSGSGIEVDPLISDAVFPQDPSQHVSELVVAEFYDEGGSSTEARNGDGDDSRSAAGSFEETWSLGEGDAGFGGDEVDEHHAEADEVGGGGLSNTKPTRQGFLPVLKSPS

SEQ ID NO: 50907 - protein, 130 aa, Glycine max
  peptide (1)..(130): Ceres Seq. ID no. 14316127
MIPVKHKFPITVGLQRHERQGGSGSGIEVDPLISDAVFPQDPSQHVSELVVAEFYDEGGSSTEARNGDGDDSRSAAGSFEETWSLGEGDAGFGGDEVDEHHAEADEVGGGGLSNTKPTRQGFLPVLKSPS

SEQ ID NO: 50908 - DNA, 1476 bp, Glycine max
  misc_feature (1)..(1476): Ceres Seq. ID no. 14315290
atgattatgctaattctgtaccttgaggtagatatcgacggcgcggtatagatcgtcgtcggattttctcgcgcctttgggaatgaggatggcgatgccgttgaatttcgagatggagagttcggcgtacgcggcgatctcagcgaggtacgagtcgacggttttggccacgcgctgcatcgtggcggagaagtcctcgttgaagttgacgccggcgttgaacaccgtcgtgcccttctccctctccacaaaaccggagataatcctcctcacgctgtccagatccaagagcctctcgccgtcgtaggagaacgtgagcacgaggaggtcgtcgacggtcacgtgctcgagaatctccgtcacgcgcttctccagctcgcgcttgcacgcgctcgacgcgcggaggtagatcgcacaccgcaagaggcagcagaggaagttgatcggaaacgcggctttctccgtcggaaagagaggaacgatagcctgcagaagctcgcgctgttcgcttcttttcgactccgaatcggagtctccggattccggtgaccggattcctcttccgccgccggagtgatccctgacgagctccctcagcgcgcgttcggtgtacgtaatcaacgctccggcgacggttaggtacttcgcgccacgctgcttcatcgcggcgatcaccttcgcgaaggaatccacgtcgagcacggcgagctcttccgtccaccagttcggcggcgactggctcggaaaattcgcctcgttgcaagccttgcagctgatgacctcaacgcagcggtcaacgacgttgacctcggcggcgaaggggagaatcttttggcaggatttgagaaccgcgacggcgctgtggagcgtggagaggccgacctgagagagaaaatcctccgtccttccggcgaggtttccgtcgcaatactcgtcggtcatctggaggaacacagcggcgcagtgcagcgccgccacgttgtgaaccgtgatctcgaagttaacgccgtaacagaacttcgccgctttctcaaaagcttctgatcctccagttaacggtcacagtcagggacacaatattcagcaataagtccgatgctaggtgcagcttgtgagaagtaaccatttgccgttttgaactcaacgcatgttcatacttcataggctatggaccgcaaagccgaaccacacggttaatccactagctagctgcttccatgcaagtgggaagtttgaaattgacatttaacaacgacagtttttttggtagctactcaaaatttttgttctgctctttgactgaggttatcttactttcttacctgtttccattttcttcaatctgcattaattttccgtttttaaacttacagaaattgattctttaaagtttaggtttaattccggcgtgtacgtagcttttcttcacataattttgcatatgggagcttggaaattaaatgatacagtttgttc

SEQ ID NO: 50909 - protein, 74 aa, Glycine max
  peptide (1)..(74): Ceres Seq. ID no. 14315291
MRMAMPLNFEMESSAYAAISARYESTVLATRCIVAEKSSLKLTPALNTVVPFSLSTKPEIILLTLSRSKSLSPS

SEQ ID NO: 50910 - protein, 72 aa, Glycine max
  peptide (1)..(72): Ceres Seq. ID no. 14315292
MAMPLNFEMESSAYAAISARYESTVLATRCIVAEKSSLKLTPALNTVVPFSLSTKPEIILLTLSRSKSLSPS

SEQ ID NO: 50911 - protein, 70 aa, Glycine max
  peptide (1)..(70): Ceres Seq. ID no. 14315293
MPLNFEMESSAYAAISARYESTVLATRCIVAEKSSLKLTPALNTVVPFSLSTKPEIILLTLSRSKSLSPS

SEQ ID NO: 50912 - DNA, 1507 bp, Glycine max
  misc_feature (1)..(1507): Ceres Seq. ID no. 15177882
gacatttcaaagtaggttatgcgctaaacagtgctttattattgcaatatgtctctgtaaactgggtttgacttttgaggttctcagtttatttatacaggtttgctctcctttttagtttgcttacgcttttttcttattgggtctttgcataaattttattaaatttatagtcaagtcccaacctaccaccataaattcttatatctccatgtatacaacatcttgcctcctggacaaaatgtattgtatgcatatcaaactatttgtacctgtttacaccaacagtgtttatttttcctgccaccattttgttttttggggtctctcttttaagttcattttctcttggtctaattgctaagaaggagctatctcgttctcaggaggacctgctgccacctgccaccatatctaattagtttttccctgcttcatctatctgaactctttattcactgtcttgatgtcttccattttatgcttttatgatctggctcttcagccactacactcacttcattgatttagacccaaccacctaaacacgaaagagtccacaggtgaaccttttctttctagctctgtttaatctctaccctctgaatccatggctaacttatagtggtagggcacagaagctattgggtctgtgttccttttcttccagatctggtaagagaagtttagtgttcgttcagttttaatgaagttaccctggttaatgattacaggggcttgattacaatgtacaaatttataaaattaccaagactcgattccaaattttaaaagaagtgtagggaccatttcttagtgacattgttggaatgtggaggacttctactaatgttaatggtgttcaggatatagaaagattgctacaatggaaactggagagaagaaaaggaacttgttaaagtttttcatcttttctcaatcctcattctcatttttttagccttagtgaatcatgtttatgctctgcatacaattttttttctggtttgttaattttcagatgtaattttgaacattttatttgcaggacccactggttactaagggaccaaatttggttccattgcttggtattgatgtttgggagcatgcgtactacttacagtacaagaatgttagaccagactatctgaagaacatttggaaagttattaattggaaatatgccagtgaagtgtatgagaaagagagctcttagtctgaaagtgctacttgatatagctcttgagatgacagatttgcagcacggtaagagatgtggaataaaatgatgtgatgtgatgtaataaataacactaactattttatgtagttgtactgaagaacctcgagcattgtatggctgcatttcttgtactaagttcctcttgtcttatggattttctgatgctctgttaagatactattcgtttccagtgatgtatatattttgcctccagggtttgatccttttactcgaattagtaaaattctgaaattcaagccc

SEQ ID NO: 50913 - protein, 50 aa, Glycine max
  peptide (1)..(50): Ceres Seq. ID no. 15177883
MYTTSCLLDKMYCMHIKLFVPVYTNSVYFSCHHFVFWGLSFKFIFSWSNC

SEQ ID NO: 50914 - protein, 40 aa, Glycine max
  peptide (1)..(40): Ceres Seq. ID no. 15177884
MYCMHIKLFVPVYTNSVYFSCHHFVFWGLSFKFIFSWSNC

SEQ ID NO: 50915 - protein, 38 aa, Glycine max
  peptide (1)..(38): Ceres Seq. ID no. 15177885
TFQSRLCAKQCFIIAICLCKLGLTFEVLSLFIQVCSPF

SEQ ID NO: 50916 - DNA, 1664 bp, Glycine max
  misc_feature (1)..(1664): Ceres Seq. ID no. 15170842
ataggcacagagaataattgatatagtttagagagagaaaaaaaaaaaaactctcttcagtcttcagtcctcacttctcactcagcatgaaatgtcttagttctctctccaattaaatgctcttcctaccatcccattaatgagtctctacaaattgccagaccgtctcattaaattaaatcgcatgcgaccacctccattaaattcctccttgagctcaccctccatcaatctccgatcaaccctctcaccaatcacccccgccacgtgtcctcttgccggccattcccattcatttcagaaaatactgttaacattttcaacccttcctttcttttcacctccggttaaacctctccggcgacagcagcgcctcgggatccccgcacctcagccggctcgacgagaacgccgccgcggctgccacccccgacgaccgcagaaacatcggactcgctatcgacttgctccgccgcgacgagctccccccgctgccgtacctcacgctcgactccgacaacgggaaaaaacccctcctccggaagaacggtgacttcatccctctataatacctgaacgaaaacaccctcggcttccccaatgatccgaatggcgagggcctcttgctccagaaactactactccctctccggtaccgccacggcgacgccgtcgccggttccatcaccatcctctccgacgccagactccgttcaaatccaaacgagtaagacctcttcagcagaaaatccctaaaacaatcctctgagttaacgttcgcatggttctggttcctcctcggagtgttctcgtcgacgcagggagtaatctccgacacggaggatatagccaccgccgacgcaggctgcggcggcagatcgatgagaggatctatactgatacggtggagaattgtgtcgtcgtcgaggctcggtcggattctagcggccatcatcggagtgaaaggtgaatcggtgcagagaactccagcgcggcagagaggacagttagcgtgcgagcgaagccacgcgtcgatgcagtccacgtggaacgtgtgtgaacaaacgggaagcgttcttacgtaatcctcgtcttcgaattcgagcaagcaaacggcgcagtcgtagcgagactcatcaaaacgcgcgtcgtatttcgctgtataaagcgagaacgggattgttttaataaccgtttcgtccaaaccgtagggggagaacacgtgcggtccgtcgaagggagaatcgtaggggagggactcgaggtcgccgacggaggaggggaggaagcggcggcgtcggaagcggcggaggaggcggtggacgggtggtctgaggtggcgcgcgatgaggcgggagtaggtgacgacaagaaacgcggcggcgacgacgacgaccattgctattaagggcggagtgaagtcaacagccggcgagtttgacgtcgggggtaggaaagacttgctgaggattggtgtgggagatggggcccaatgaggtggctgagaaggaggcatcatcgtgggaataacaaaaacagaggaatagggttttagttttagagtagttctacaaacaaaaacagagaagagagagagagagagaagactgtgcaattgggtttaatgcaaagaaagatacaaaggttgactgtggttgtgtgct

SEQ ID NO: 50917 - protein, 137 aa, Glycine max
  peptide (1)..(137): Ceres Seq. ID no. 15170843
MSLYKLPDRLIKLNRMRPPPLNSSLSSPSINLRSTLSPITPATCPLAGHSHSFQKILLTFSTLPFFSPPVKPLRRQQRLGIPAPQPARRERRRGCHPRRPQKHRTRYRLAPPRRAPPAAVPHARLRQREKTPPPEER

SEQ ID NO: 50918 - protein, 122 aa, Glycine max
  peptide (1)..(122): Ceres Seq. ID no. 15170844
MRPPPLNSSLSSPSINLRSTLSPITPATCPLAGHSHSFQKILLTFSTLPFFSPPVKPLRRQQRLGIPAPQPARRERRRGCHPRRPQKHRTRYRLAPPRRAPPAAVPHARLRQREKTPPPEER

SEQ ID NO: 50919 - DNA, 1675 bp, Glycine max
  misc_feature (1)..(1675): Ceres Seq. ID no. 15226473
tttcctcatactccaaatgttacatgatggtggccttttataggcaagcaaatggttgtgcaacaaaaaataatgacagtgtaatccaattaactactagtagtttcgacataattgaagtggtattgattcaaatattttaggaatgctgcttattgacaaaggttccttaatgcttagtcatgttcttcaataattgcacattgaaagaatgtatatttatccgaagtatctaaactaacagcttgtatgatagattcatggcgggaacattgatccttctattgatttcattacaaatattgatatttctgaggggtttttttaaagagttatcgctcctgcgtcgtgtcccctcttctttgacccattgagttccttacttatttcactcataaaatttttgaaatattactcaaatgtacctgcaactgtgtctgcatgtgcgtgtgtcactaccattctctcgggagaacaaaccaccttttcttgttttttccagcattccaatttcccacgaattgtgtagatttctctgcagatatcttcttgtgaagcctctgctactagaagtgcaaacagtaactgtaccatgtattgcagagatcttcctgagcttatctgtacaggaaatacaaggtctcaggtctgcaaaaggccaagtccaagtgaatgttttgtaggttcttattcatcttgagacttgcataatgcttactttgcttaattagtggagttcttcaacaattctgtatagaaaacataggaattcagtggttttcaataaccagattttcagccccgaaaaagtcatggacgaagctctgttccacacttggtcttggctaaaatgcatggacaaagactttgatatgcatttcaaccagtggtcttctaacttgaaggagcagctcccttaaaccacctcttgtctccagcttgagccttgcaaatgaacagttttccatcttttacagttgctctaattatgtggtgcttgccaccttcatctccatcagcagttcttgtcaacacagacaaaaaatagtatggcttcccgtcaatcacaggtgttgcagtctctaagatgttagccgtggccactgcatttggatcaaaaccaccctcagcttgtgtttcgccgaagaaggcctgttttcctagtaaataatccaccttagagaggaactcttcgggtgaaccatagtcagtgatggacttcttatcagttggagtgatggtgacaaccacgttggtggttgagtcaaagttatcctcgtatctaacaacctgacccgtgtactcaacttctttgcttgggttccactttgagggaatagatagtttgaatccatctccattgtatggcaggaaatctgtgtctgtctttggctttccaaacacattggcagcttcaccataggctgcatcagcaggttggactttggagccaacagcagcagcaccaatgagcacagttagagctaaccggcgagagattgggctgacatcaatatcctcttgtggtgtttgttgtttctgtgccttgcaaacaagctggttaggcttggtgctaaccaagatgcgtagtgatggggatctggcactggcaggggtggtaagagcatggtggtgcaagaaacattgggtagaagccattctgctctgtgtctgc

SEQ ID NO: 50920 - protein, 87 aa, Glycine max
  peptide (1)..(87): Ceres Seq. ID no. 15226474
MYLQLCLHVRVSLPFSRENKPPFLVFSSIPISHELCRFLCRYLLVKPLLLEVQTVTVPCIAEIFLSLSVQEIQGLRSAKGQVQVNVL

SEQ ID NO: 50921 - protein, 69 aa, Glycine max
  peptide (1)..(69): Ceres Seq. ID no. 15226475
MSTVRANRREIGLTSISSCGVCCFCALQTSWLGLVLTKMRSDGDLALAGVVRAWWCKKHWVEAILLCVC

SEQ ID NO: 50922 - protein, 46 aa, Glycine max
  peptide (1)..(46): Ceres Seq. ID no. 15226476
SSYSKCYMMVAFYRQANGCATKNNDSVIQLTTSSFDIIEVVLIQIF

SEQ ID NO: 50923 - DNA, 1305 bp, Glycine max
  misc_feature (1)..(1305): Ceres Seq. ID no. 14311227
aattatttatgctcctaagtttttaaaaatagggaaaatcaatcaataaatatttgagaataggaaaagacaactaattacgaataatgatgctgattctctaaatgcatcaattatgctaatacatggaattttgtaaataatggaactttaccattaattgtttaggttcttaagccagctgagtttaggtcatcttactttctttcccttcagaacttgtgttctttaatatttggcaaatagaagctggtgtataaaacaatatgccctattaattggctgtagatagtggatttggctcttgtaaagtgaggggaacactttagaaggtaaaatgtatagttatagccatctacagttgatgttgtgataaaaaatacatgcacatgtatagcaaacttgttaaatctcaactgctaattttttaattaacctttagaggatccaaatccttgtattatgtagtttgtactactgtttaatagccaaattttcaataataaacgtagaataatcaattgtgaaaaattgtggcaccatagcgctgtcgtgttgtatcaccatctctggtccctacaggcttgccgtaatattctatctttctcttgcggctgtgctgactggggttgcagccaaatagtgtttggcactgcacctaagggtgaaatacctgttgtttgactggcatgtcccctttgttatggattaatcccagcaaactgtagtttttcccgccagaaccacccttttccactaattctgagtattattgataaatgtcttaaatcagatgtactttttgagatttgagcattattgtgtattataaattacttaatattgtttcttgtatctcaggtatagtaggctctctgttctgctataacatatttggggttgtccgctgtgcactgctctttggatttgccgcctagaattaatttacatatcttgaaactatttcctaacataaaatattcaagtttctatttttacttttattgggtatgttttgttaggtctattggagatgagagcctttgcaaggaagtatttgaggagtacattgcacagctaaaagaagaggcaaaagagaatgagcggaaacgaaaagaggaaagggcaaagaaggaaaaagacagggaggaaagagaaagaaggaaagggaagcaaagaaaggaaaaagagggagggcgtgaaagagggaaagatgaggcacataagaaggataaagcagacagtgacagtatggagttaactgaaatccaaacctccaaagaaaacaaaaggtctgaagatgat

SEQ ID NO: 50924 - protein, 53 aa, Glycine max
  peptide (1)..(53): Ceres Seq. ID no. 14311228
MSGNEKRKGQRRKKTGRKEKEGKGSKERKKREGVKEGKMRHIRRIKQTVTVWS

SEQ ID NO: 50925 - DNA, 1406 bp, Glycine max
  misc_feature (1)..(1406): Ceres Seq. ID no. 15176536
aactgccaatgttcagacatgtttaattcaatcccaaaaggtaactcaagattcttacaagccaatgtaggtttaactcaatcccaaaaggtatttcgattaccttttctatattgattttgaggcgtctatgactgaaccccgagcacaaactgccttaggacatcttcaggtttgacttcttaatttttttattttatgatttgaattatgtattttgattcttctcttattttatctcctcctaaacttttacaataacccatggaaaaatagtagaaaattttgttcagttgttttaggagtccagcaagcctgtgcagagtagtcctctcatatttttagattctagcatgctaacttaataaaaatttgccaacaattaatatcaaggagagcaagctttggtttggacttctactgtgctcaagagttttcattcttgagttttatgtccttgatttggatgcttgagtatgttatcacagctcaatttaacccctctgcatctccttaaccacatcattgttggtatagcatatgataaaatgggacaaatttgcatacaaaaatagcaatgacaattggcagaagcacttcctgcaagccatgaatggtgctgttccaaaagtttctgaggtttgtctccaatggtgctgttctattagggtccaatcactatttaactcaatatttttcattactacaacaaatactaatctaaaatgcatataactctaggaaactttcttcctcaaattttctgtgcggtgcagtaactttttcctttttgggcagctgtaataatataattaattaacccttcaactttcatgtcatgagtatctaaccacataccaaaaaccattttatgtccctacaggaatttgccacatttcttcgggtatggtaaaaaatgtaatttacattacacaatagttagttagccttttattcattttgttagtcagttttatagattgacacgtgtgctatactacctgtcttaataagaatttaaatagagacttgtattgtaatttttcattcaatcaatattcagaactttatcctctcttcgtttcttgaatagtttgaatttatgctaacaatagttgatcttgacctttagacagtgccattagttcatctaaacttcaattcatcaaacgaagtttgatggccattgaagaagatattcatgaaggataacaattaacaaggtatgaggttttagccaaatatgtagttctgagctttctttctattaaattgtcaaacctggcaaaaaaacgaaaagaatcggctaatgtattctgtcactgtatcgtaatcattaagaacatgtttggttcgcatctcatgtcttgatttttatcatcttccacccaccaagttaattagtt

SEQ ID NO: 50926 - protein, 64 aa, Glycine max
  peptide (1)..(64): Ceres Seq. ID no. 15176537
MIKWDKFAYKNSNDNWQKHFLQAMNGAVPKVSEVCLQWCCSIRVQSLFNSIFFITTTNTNLKCI

SEQ ID NO: 50927 - protein, 41 aa, Glycine max
  peptide (1)..(41): Ceres Seq. ID no. 15176538
MNGAVPKVSEVCLQWCCSIRVQSLFNSIFFITTTNTNLKCI

SEQ ID NO: 50928 - protein, 38 aa, Glycine max
  peptide (1)..(38): Ceres Seq. ID no. 15176539
NCQCSDMFNSIPKGNSRFLQANVGLTQSQKVFRLPFLY

SEQ ID NO: 50929 - DNA, 1542 bp, Glycine max
  misc_feature (1)..(1542): Ceres Seq. ID no. 15226846
cagctacgtaggccccccccccaggaacctaaatccttgcttgatttgatatactttgactagttagtgttatgcttttatattctaagactagtaaccaaatggttcgatactttcatggtgatagggttaagagaatgcctaaacctcttgttaccaaagtgtatgttaggcgccagcctggcagtaataggaataactaaccgaattctgttaggaataactaacagaattctgttagttaaagagtactataaataagagctttaactggttgtaaaggggtgttttttggcatattgggatttgggactaactgaattgggatttagttagagttggttagagaagttcaagtgaattgggattcagttgaacctttttcagttgtaattctctgttctgagttcttcttttataagcaataaagattcttagtgatttactctctgttcttggtgtttggctttgttttcttctattttctttatccgtgagttgccagtgttatcacatggtcatgttttgttgtgaagctaatcttataagtatgcctgaattgtattctatcatatctttttgacctttctacccatctcttaactttgtttaactttattttttcttctcatgataaatatgctaatattcattctaaattctttgtaaattacctcctcgtggattcaataaattgttgcaatgtgcagacacgactactcctttgacaattgtccggatgctgtttgacaactgggattaaggctctgtttggataattctcaagaaagcaaaatgaaaaagtttcttctgtagaaactctcgtttagtttctccaaaagtttattttaactagtgcataatctaattttaagtttataaagggaagtttaattaattttactttcttttctttttctgcaaatgcttagtgataagtttatccaaactgactttcccactgtgggggaaacacaaatttatttgttgcaactgaaattgtctgaaagcatgttttctaattgtcacttcattatagccacattgatgcagattgcttacaagttattttgacacagatttggctcttttgatcaggtatggtgtgatgttggttaccctagattggttcagaggccactagagattgctttgacagggaagatgagtaagcgttgtgcatgctttgaagattctcagttggaccaacctggcttagaggtatatgaagggtgtgattaccatgctaccaggtgcaaagtttaatcaggaatcaaacaccaacggaagaaatttttttttagctatctgtatgtatattaaaagcttaatttagtgaagctggtaattatttttgtacattgttgcttttattttgagggttgctttatgctatttttattccggaataatcactcttctttaacaattaaatttaaaattgtgctatatgccccgcactctgtaacaggaaaaaaaaaaaaaaagtcaagtatatattaatatttaatggatttttaaataaaaatagggtatttcttt

SEQ ID NO: 50930 - protein, 49 aa, Glycine max
  peptide (1)..(49): Ceres Seq. ID no. 15226847
MLSDKFIQTDFPTVGETQIYLLQLKLSESMFSNCHFIIATLMQIAYKLF

SEQ ID NO: 50931 - protein, 47 aa, Glycine max
  peptide (1)..(47): Ceres Seq. ID no. 15226848
MVIGLRECLNLLLPKCMLGASLAVIGITNRILLGITNRILLVKEYYK

SEQ ID NO: 50932 - protein, 43 aa, Glycine max
  peptide (1)..(43): Ceres Seq. ID no. 15226849
MLLYSKTSNQMVRYFHGDRVKRMPKPLVTKVYVRRQPGSNRNN

SEQ ID NO: 50933 - DNA, 535 bp, Glycine max
  misc_feature (1)..(535): Ceres Seq. ID no. 13582419
aaatatacttcaatttactaatactcggtaaatgctggtagagagttttgagttagactttagagtgcaaaaagtcatactgctattattgtagtcaatgataaattacaaggccttggccactagctgcattcagaatgagaaggcaaagttcttgtggggacagggcaaaggttttctttagcggcatactttggggaaaagctttctcacctaactaccactaaagttgggcaagcaataaatttataaatgtcacaagtaattagttctaaaataacttgacattatgaggattaaatggattatttatctcttcattaaattttccttttcgtctataagattaattatatttgtgtatcaagactttgattggccaatgttgagccaatcaggaagagagaattgacatgtagaatgatttattccataagtgttgaatgaattcacccatgggaagcaggaaaaagtgagcaagagtgagttcaaagaggttctctcagacattctattgggtatggctgctggactg

SEQ ID NO: 50934 - protein, 40 aa, Glycine max
  peptide (1)..(40): Ceres Seq. ID no. 13582420
MRIKWIIYLFIKFSFSSIRLIIFVYQDFDWPMLSQSGREN

SEQ ID NO: 50935 - DNA, 1036 bp, Glycine max
  misc_feature (1)..(1036): Ceres Seq. ID no. 12455697
tttctggttatattcagaatgaattgcatcagctatgttggcagcgatcagatgatcagttcatccatgtgaactttagtgaaacagcttgatcaatggcaaacttaaacagctaatcaaatgcgtctgatcaactaaacatagcaactatattgcccaacaactttacaacttcagcattcactttcaactctctactaaacaacggacattatcaacaactttctaatcaggcttttatggtatctcacaccaggcattaatcttgtgtgtggatataaatattttacactcttctcagacgctagattctgtatttggatgaaattttcttactgaggattctcttaatataatgtaaaatgttactctctagaatttatagaagcaagaaagatgtcactaattcaagtttattagctgtttagtgtggtatttggatgttatgtcctttatcaaggaagcactaaagattaactcctgcattttcatttcagtcacgaagaaaacgtgcaagaactccaaccccagggcactatcttggactgaaaaacacaagggagtatggctatcgtggtgaccgaggtggtgaccggggaaggtatcgcgatggtcctgaccgtgacaattactcacgtcgtaggtctccgaggcgttcaccatacagaggtggccaagattattctccccagcgctcaccctatggtggaaggtctaggagggaaaggtctaggtcacttccttattctccacatggtagcccagacaggaagtatgctcgcggatctaggtgatgtttatcttagcattctactatttgaacaaggtaagcaaaaatttgttgactatatggtgctgtgactaccagtttgcgcctatatacaatgtatacgtttattggtggaagctgctgttcctgtgtgactatcagtgtgccttttctcgaagtcacacagaaagttagagtggacaaaagtgtggaaatctgaatttgaagtatgtaagcatttgctatagggaattgagactctggctt

SEQ ID NO: 50936 - protein, 98 aa, Glycine max
  peptide (1)..(98): Ceres Seq. ID no. 12455698
MAIVVTEVVTGEGIAMVLTVTITHVVGLRGVHHTEVAKIILPSAHPMVEGLGGKGLGHFLILHMVAQTGSMLADLGDVYLSILLFEQGKQKFVDYMVL

SEQ ID NO: 50937 - protein, 83 aa, Glycine max
  peptide (1)..(83): Ceres Seq. ID no. 12455699
MVLTVTITHVVGLRGVHHTEVAKIILPSAHPMVEGLGGKGLGHFLILHMVAQTGSMLADLGDVYLSILLFEQGKQKFVDYMVL

SEQ ID NO: 50938 - protein, 56 aa, Glycine max
  peptide (1)..(56): Ceres Seq. ID no. 12455700
MFILAFYYLNKVSKNLLTIWCCDYQFAPIYNVYVYWWKLLFLCDYQCAFSRSHTES

SEQ ID NO: 50939 - DNA, 2117 bp, Glycine max
  misc_feature (1)..(2117): Ceres Seq. ID no. 15174543
atgtccgccccacagcaccagacacaacatgttcatggtaaggtggacgaaattgacgtgcaggaagccgtaggcgagcaggcgccaatactcatgacgcgcgatggcggtcgaatacatgccgccgtagcgatagagcagctccgacgaagccgccggaccgcccgcctggatgaagcaaaaccccgacgcgaggaccgtcaccgtcatcagcgcgtagacggccgcatgaggggtttcgaagaagctggcacgatatgagggcattggcgatcgcaagcaggaggagacgtagatgccaacctagccgagccgatcgatgattgctactccagcgggtgccagccgctgacgcctaccgtccctcgaatttcggcgcgcgcttctccatgaaagccttcatgccctcggccatgtcctgcgtcttgaacagcggcagcagttggagatagacgtgatggacgtggtcgtggaagttctcgttcaggcccatccgcatcatacgcttggaggcctgcaccgcgagcggcgcgttggcggcaatctcgcgggcgacggcgtacgcgcgggtcatcagctcggcatccggcacgacctcgttggcaaggccccagtccaggcactcgcgcgcgctcagcgtgcggccggtaaaaatcagctcggaggccttggcccagccgagcatgcgcggcaacagccaggtgccgccggattccggcaccacgccgcgcttgacgaaggcggcggcgagctttgaggattccgccatgatgcggatgtcgcagccaagcgcggtgtccatgccgtaaccggccgcgccgccattgacggcgcagatggtcggcttgtccatcgcctgcaacaccgtcggcggcgtgttgcgcagattgatcgtcgtcggcgaggacgccgcgctgaggccattgccgtcgcgctccctgcggagatcgaggccggcgcagaacgccctgcccctgccggtgagaatcaccacgcggacattcttgtcctcattggcctcggtcaagagccgcgcgaggtcgttcagcatcgggccggagatcgtattcatccgctccggcgcgttcagcgtgatggtcgcgatgtgatcggcgacctcgtaaaggacttcgttttcggcgtcggtcatgtgtcgctcctcgaattgtcagatcctgcgtcccgcctgctcccaatagggatcgcggagccggcgcttgaagatttttccggaatcttcgcgcggcagtcccgtgcggatctcgatgtgttttgggaccttgtaatcggcgagcgagctcttgagccgcgcacggatgcccgcggcgtcgagcgttacgcccggctgcggctcgaccaccgccatcagcgcctcgccgaactcggcatcggggatgccgaacacagcgcaatcatgcacgccaggcaccgcgtgcagcaccgactcgatctcggccggatagatgttgacgccgccagagatcaccatgtcgcgcttgcggtcgcagatgaagacgtagccgtcctcgtcgatatagccgacgtcgcccgaggtgatgaacccgtcgcggtcgatctctgcgcgcttctcgggcttgttgtgataggtgaagtcggccattgcaggcatgcgcgaatagatctcgccgatttcgccgacaccaagcacgcgaccgtcatcgccgatgaaacgtaattcggcgccgggcgagatcttaccgaccgtaccgggcttcttgagtgcgtcctccgacgtcgcgaaggtgacggcgctggattcggtcgagccgtagaattcgtagatcaccggcccccaccattcgatcatggcgcgcttgacgtccgccggacagggcgcggccgcgtggatgatgtggcgcagcgaagagacgtcgtatttcttgcggacctcctccggcagcttcatcaggcggatgaacatggtcggcaccatgaagatggtgtcgaccttgtagcgctcgatcagctgcagaaaatcttccgcctcaaagcgcggcatcagcaccagcacgccgccgagcttgccggcgcggatgccgaacgaattcggcgcggaatggtagagcggccccggcaggatcgcgcgggctcccggc

SEQ ID NO: 50940 - protein, 99 aa, Glycine max
  peptide (1)..(99): Ceres Seq. ID no. 15174544
MDVVVEVLVQAHPHHTLGGLHRERRVGGNLAGDGVRAGHQLGIRHDLVGKAPVQALARAQRAAGKNQLGGLGPAEHARQQPGAAGFRHHAALDEGGGEL

SEQ ID NO: 50941 - protein, 93 aa, Glycine max
  peptide (1)..(93): Ceres Seq. ID no. 15174545
MHARHRVQHRLDLGRIDVDAARDHHVALAVADEDVAVLVDIADVARGDEPVAVDLCALLGLVVIGEVGHCRHARIDLADFADTKHATVIADET

SEQ ID NO: 50942 - protein, 90 aa, Glycine max
  peptide (1)..(90): Ceres Seq. ID no. 15174546
MVGLSIACNTVGGVLRRLIVVGEDAALRPLPSRSLRRSRPAQNALPLPVRITTRTFLSSLASVKSRARSFSIGPEIVFIRSGAFSVMVAM

SEQ ID NO: 50943 - DNA, 889 bp, Glycine max
  misc_feature (1)..(889): Ceres Seq. ID no. 13637616
ttttttctttttttctttccattgctaatcctttaatatcgaagatgttatatatgccttgtggagtatgaggatggagacagcatgcgagttctgccttgtcatcatgaatttcatacaacatgtgtagacaagtggctgaaggagattcacagggtgtgcccactatgtcgaggggatatctgtgtatctgattcactgccaagggagaactaaggtggccaattgttaatcaatatctccttctgagatactcatggctcctttgatcattcattgcacataagctgatgtgacaccatcagaagaagcactctcattgctgtcaatgattatttactccaatttctgaataaacatcaaaccatagtagaaatagaatgatctactagctcattctctatcaccaagtgaagcagatggcccaaaaaaggtggggtggaggtattgtttaatgaagaatttttccaacatgtttcacaaaaaaaggttctcttttgatgtatccgacaaccttttgttttgccccacttcttgtttaacacacaatttggaaaaaaagcatcattcaaatgagcacttttggtcatggaggaaactgcagattggctcaagcatctttgaccgaatcattctctttagctgtagaccagtcaactgagtggcttcaaaactataagcagtggtgcatgcgtgtgatgatatccttttcacttttcagaggaaaaagggaaaagaaacatttcaattgcagtgtaaattgtggagacaagtggtagttgtctcctaacaaacctaaaaagaccactagctacactgatttttgttgtacaatttgtctaccttgtgttcttccaatgcatgatcatgatgcaggggtggttatagg

SEQ ID NO: 50944 - protein, 68 aa, Glycine max
  peptide (1)..(68): Ceres Seq. ID no. 13637617
MSTFGHGGNCRLAQASLTESFSLAVDQSTEWLQNYKQWCMRVMISFSLFRGKREKKHFNCSVNCGDKW

SEQ ID NO: 50945 - protein, 68 aa, Glycine max
  peptide (1)..(68): Ceres Seq. ID no. 13637618
MKNFSNMFHKKRFSFDVSDNLLFCPTSCLTHNLEKKHHSNEHFWSWRKLQIGSSIFDRIILFSCRPVN

SEQ ID NO: 50946 - protein, 62 aa, Glycine max
  peptide (1)..(62): Ceres Seq. ID no. 13637619
MFHKKRFSFDVSDNLLFCPTSCLTHNLEKKHHSNEHFWSWRKLQIGSSIFDRIILFSCRPVN

SEQ ID NO: 50947 - DNA, 1035 bp, Glycine max
  misc_feature (1)..(1035): Ceres Seq. ID no. 15225973
cagctacgtaggccccccccccgaaaaacccagattcttcttcaccgagtccctggagagaccttctagataatcccatgcagtaacgtgatttccgtgaaagcaaacggcaatggattagtaaaaccaaagcaccctgatttcaaacgcaaggatcgcaattctctctggcttggcaaggatgaaaagtgggttttgcctaaattggaaggacttcaatttgatgttccaactgctatatccaaaaaaggtgatggtggtgagccctgtaatgatttggtgcaaaactatgctaactggtgggataatagattaaataagaggaatgcaaaagctcccgatttcaagcacaaagaaaccggtaaagggttgtggcttgattcttcatcagagtgggttttggaaaaattgccgccacctctgaagcctaaacaaagtgtagatactgaaaggacactggtttcataagcaatggacagtgaagtagaaaatggagtcattctctttgttacacttccatataactttgcccgtgagaagttggctgctgagtatatttgtagagaactacgtgaggcagatgaaacaaatttgcttcaggaagaacgttgtctgattttcttttttttacttggtgaatcgaccctttttttaatacaataagaatgaaggtgctgattgtcacatgctgaaaatgaataaggctctgtttggaaaaacttctcaataagcacttatagaagaagaaaataagaagggatggcaagacccagcaacttgggccaaaactctgggaaatagttggagaacaacaggggatattgaagatacctggaattggtgagcatactcacattcgtgcttttattggacacttgacaaagatattggcagaacaaagctactatttaggttgtgtgaaagcagaaggatctacatacaacatgtgtgttgttctgcttttatttaatgtaacatcttatgtggatgcaagatctaaatttaattatatatgtgcatcattttccccttctt

SEQ ID NO: 50948 - protein, 63 aa, Glycine max
  peptide (1)..(63): Ceres Seq. ID no. 15225974
MDSEVENGVILFVTLPYNFAREKLAAEYICRELREADETNLLQEERCLIFFFLLGESTLFLIQ

SEQ ID NO: 50949 - protein, 44 aa, Glycine max
  peptide (1)..(44): Ceres Seq. ID no. 15225975
MKSGFCLNWKDFNLMFQLLYPKKVMVVSPVMIWCKTMLTGGIID

SEQ ID NO: 50950 - protein, 41 aa, Glycine max
  peptide (1)..(41): Ceres Seq. ID no. 15225976
MESFSLLHFHITLPVRSWLLSIFVENYVRQMKQICFRKNVV

SEQ ID NO: 50951 - DNA, 1371 bp, Glycine max
  misc_feature (1)..(1371): Ceres Seq. ID no. 15225667
cagctacgtaggcccccccccccatttattcttccgtagataagagaattcagcattattcagtacatcgtgaggtgagtgaacaagaatggaatcaccaagaacgtgacaagtagcaaacgaatgtgacaaaaaaaaaaacacttcagctgtcccgattagctgctgttgcatttccacgcattcacacagttcagatctcgcatacattgagctgctgactgcgtgaatgcatggaaaatcagatgtctagaattgtggtttaaagcattccggagggatttgtccgttgaatcttttggtatctgtgcagtagtcatagatcatgtagttgttcctgacccaattcagttgccccatctgggagtgactcagctgcttgtatctccgggaagtccaccaatttgctgggagattggaggcacattgattgatgctctttgctccgccccacttgcaagcccttgctctgaaatggtggaatctggccgtgaatggtgcgctgtgccagtccgtcttaacaaggccgcctctggttgcccagtcgtctgcattccatagggttgtgtaaaccctcattccttgcttggttgggtaagcaattccctctttttcgtagtttcgaaaaacccgaattggcacactatcaacataccacctgacgtactcgtcatagactcatacttagttaatggatcatacacacttagagaaaaaaatgaatagctttgtgttctggtaaaatttatctactcacacaattgctgttggattccagtgaatggtgtaattgtgaaaatcagcagttgggtcaaaccagaggtaaaattgttgctctctgcttccttttccttgtgtgtatatgttagtgtggacagtgtatggctgtcctgtactgttgcctaagaactcaaaatctatctcgtcatgttggcttcctgcagaggataactgtatggattctgagtgagaaacatggacacttcatttagtaatgggagtttgatagatttggttgttcaaaagtgcgtgttttggtgtctttgagatctcttagatccggtgaacttacatagtaggctgtaactgttccggcagaattaccaggtaccagcttgattagcatttcaatgcttccaaataagaatgatctctttgattgagcagctgatcctgaaatccataggcaacaccacattgttccactctagctagtaatagatgaatgcattttttattatttatttaacgtcagtttgcataatgtttagtttgattacaaatcttgtgtaaagtggtatatgaacatatattattgtgatgctcatgttataattcagttgcaacttatttaaaatgcaataaactatg

SEQ ID NO: 50952 - protein, 45 aa, Glycine max
  peptide (1)..(45): Ceres Seq. ID no. 15225668
MLFAPPHLQALALKWWNLAVNGALCQSVLTRPPLVAQSSAFHRVV

SEQ ID NO: 50953 - protein, 36 aa, Glycine max
  peptide (1)..(36): Ceres Seq. ID no. 15225669
MAVLYCCLRTQNLSRHVGFLQRITVWILSEKHGHFI

SEQ ID NO: 50954 - protein, 35 aa, Glycine max
  peptide (1)..(35): Ceres Seq. ID no. 15225670
MLVWTVYGCPVLLPKNSKSISSCWLPAEDNCMDSE

SEQ ID NO: 50955 - DNA, 984 bp, Glycine max
  misc_feature (1)..(984): Ceres Seq. ID no. 13581195
ttttatcaatgtcatctgttagaagagattttctaggcaaggaaaatgagcatcaagctgaacctacagaaggcaataaacagttcaaaaaacaaaatgtgcacagaaggctaaaatcatcagttttatctcctggatctgcttcatctgtttgccagtctcctcgtttgaagatgctgactatgcaggtgatataaacaagagaaggtcaataattgtctatatattcactctatatggcaatgtagtccgttggaaagcaaatcttcaatctgttgtggctctgtcaaccactgaatcagagtacattgcactgactgaggccataaacgaagctttttggctgaaaggatttgtagaggagctggaaggaaagaaactgaagactgaggttatgtgtgatagccaaagtgctatatgtctctctaagaatcagccattccatgagatgacaaaacatatagatgcaaggtttcatttcatctgagacatcattgcaaaaggagtgatccaagtgaagaaaattgcaactgaagagaaccctactgatatgttgaccaaggttctcactgctgctaggtttgagcattgtctagacttagtaggcattcaaagacctaatgagtgaagtttcaattcagaaacttgagacatttattggagctgaagctgataatgaagatccaaggtgaagatttgtgaggattaggggatcaccattaggcttagttagttagatgccatagctgtttttggctaagtgttagttgaagagccttggtagttaagttagttatttctattataactaactttaggcttgtggattccttctatataaagtcttagctaggcaactcatgtgagtgtgaatcacaaacaatttggtgagataccttcgagtatgtgtgagatcaaagtgtgagcaatctagctcttgtaaagttattgtaatctctcaataaaagtccatgaagtatcttg

SEQ ID NO: 50956 - protein, 64 aa, Glycine max
  peptide (1)..(64): Ceres Seq. ID no. 13581196
LSMSSVRRDFLGKENEHQAEPTEGNKQFKKQNVHRRLKSSVLSPGSASSVCQSPRLKMLTMQVI

SEQ ID NO: 50957 - protein, 62 aa, Glycine max
  peptide (1)..(62): Ceres Seq. ID no. 13581197
MSSVRRDFLGKENEHQAEPTEGNKQFKKQNVHRRLKSSVLSPGSASSVCQSPRLKMLTMQVI

SEQ ID NO: 50958 - DNA, 1171 bp, Glycine max
  misc_feature (1)..(1171): Ceres Seq. ID no. 14307284
ataaattgagtatgtattgaattgtaatatatatacatatacatacatacatatatatatatatatatatatatacatatatatatatgtgtgtgtgtgtgtgtgtgtgtgtgtgtgtgtgtgtgtgtgtgtgtgtgtgtgtgtgtgtgcattgagatgttgtgtgcactgagttgtgagctatgaatcgtacaatcacatgactataagaccctttaagggcgacgggttaatgcacgacgagtattgtgatgggaaccactgtggggacccaacgagtttaatcacaagcgtgacaagataaaattattgagaataattcaggaatcgtgtgttttgtatagttcatagatagattctgtgcgctaaaatattttatgatttggacttgaatcaggagggagaggccctaacggactcttcagagtctaggccttggggataaatacacctagtttgagtgctcctttaagtctatgtcgatcctacatggttggagcattctcacaaaacggcgtgatcctaactgatctccctataattttacctaatgagagtgatctgacttactagtgtatggtttgtattgcatgtactcctaggcgcctgacgagatttttcactgacatggtaccacattgcatatagggttgattcttagtgtatttgttgcataactcttgtgtattgattgatattgattaatttagtgatattgtattttgatcattgagtacgtgaataatgtgaaaatgaatgagagttgttgtgttgtgatgtgatgttacgcgacaaagtggtggagtgacgtgagctatctttaagtaaattgtatttcatttatatgatatgtatatttacatgttgttttgtttctctctattagttaggaatgtgataactcactctgtgtgttgtttgtgtttggatcctgtgatgatctcgaactttgtgttcgtaggagcagatgactaggcaaatttctttaaagaaccttgtgctgaaggacgttgggacacaatgttttgcaaggatgtgacattggagcatgagttttgtttaattacatgatgttttgagcaaaaaatgtttctaacaagttttatttgataatagtgaagtgaatgtaaaccttttacccttttgaaatgcttttatttaaatgtgtttt

SEQ ID NO: 50959 - protein, 41 aa, Glycine max
  peptide (1)..(41): Ceres Seq. ID no. 14307285
MYIYMLFCFSLLVRNVITHSVCCLCLDPVMISNFVFVGADD

SEQ ID NO: 50960 - protein, 37 aa, Glycine max
  peptide (1)..(37): Ceres Seq. ID no. 14307286
MLFCFSLLVRNVITHSVCCLCLDPVMISNFVFVGADD

SEQ ID NO: 50961 - protein, 34 aa, Glycine max
  peptide (1)..(34): Ceres Seq. ID no. 14307287
MTIRPFKGDGLMHDEYCDGNHCGDPTSLITSVTR

SEQ ID NO: 50962 - DNA, 1089 bp, Glycine max
  misc_feature (1)..(1089): Ceres Seq. ID no. 15168864
acttgcaagttgatgctgatgacttgcacaattggaaaggttgggtggaatcatgccttcaccaactaactttgatggtgtaaaacagatgttagtcaactgttttttattggcaagattattttacttgactgaaactaaaagaaaggttgggtttaggaaatgggaagaatcttgatcttgaacaatgctcttgatcaaagcttcaaaaacagtgcatcaagtatttgggacctatatgtgcatcttcgatttgattgtgtgtgaatattatatatattttttaaatgcatgaggttgtttgacatgttgctctatttttatattcttttttctactggttattattttcttaaattagcaagagagagaacggtatgaatacattgagcgtgtgggcaaaattatcgactagcaatatggagatttgcttcacacaaatgaagattctgaagatgcaaaatggatatttgtaatgagcaagaaactttatgttgtcaaggtaacaattcaagggtagttacattttaaagttacttattttctttaaagacaattaccatgtctttcttgtaccactattacattgcattaatcttgtagaaaaagaaacattatttcatcattctagtgttttggctggaggagctacattagctgctagaaggctggtggaagagaatggaattcttaaggtgaattaacttcataggttgcatgactaaactattgtgctaatggaacttcttatgatatttgtctgctagcttttatagtgacaaggagatagtggattgcaaatgtgacatgcctaatttatgtgaattgcaaatgtttgattatcaatggcacaatggctttgatttttcaatctatctcagcttatagtggacattatcgaccaatggatagtggattaacttatgtaattttaaaaatttcatgagcgaagattatgtaataaaattttggttcatagatagaatcttgaatccttgattcaccatggaacatcatagagttgtttgatccatgcgaaaaaccttgatagaatcttggtaaattaatagattttttattcttttatct

SEQ ID NO: 50963 - protein, 41 aa, Glycine max
  peptide (1)..(41): Ceres Seq. ID no. 15168865
MPSPTNFDGVKQMLVNCFLLARLFYLTETKRKVGFRKWEES

SEQ ID NO: 50964 - protein, 35 aa, Glycine max
  peptide (1)..(35): Ceres Seq. ID no. 15168866
MLLIKASKTVHQVFGTYMCIFDLIVCEYYIYFLNA

SEQ ID NO: 50965 - protein, 34 aa, Glycine max
  peptide (1)..(34): Ceres Seq. ID no. 15168867
MGRILILNNALDQSFKNSASSIWDLYVHLRFDCV

SEQ ID NO: 50966 - DNA, 1540 bp, Glycine max
  misc_feature (1)..(1540): Ceres Seq. ID no. 15171100
ttcaaagtgacttcgccgccaagagagcgaacaacagacccaccactgcatgcgcccactttgcagcactcttcaagtgacagacctttgatcactccatacaaaaatccacttgcaaaaagatcccctgcccctgttgcatcagttgcctttgcttctccaattgccgggacacgtgcaatctgacacgtttcaaacataattcataataatgactagagttagtacatatttggtttgcagttgaaaaaaaagtacttttgtctcaaaagtaatttttcaccttgttttcaagcatgctcttgatcattctagcacttatcctagaacactattcacttgcttttttcttcttctttttttttttttttttagttaagagggtacaacactattcacatgcttgcttgctaagtatcatgaatgtaaaactaaattactttttaatttcttccttagtgattttggatcccaatcatcacataaaactgatattgtcaaacaactttcggcactagactttttccatggttatatatactattgttactaaagcagattttgagtttattataccaacaagaagaagcttcacaactaaattactttctagattttttccctagtgattttggatcacaaccatcacatcaacagataatgtcaaacaattttctgaactagacttggtccatggttatatactattgttactaaagcagattttgagaatatcataccaacaggaaagcttcactagtctaatattcagtctcatattggaaggaaaaaacatcataacaagttcctactaggtaaattaaatctattgtttgatctagttaattatggtttccatctggaatgttaacaaaagggttcagaatttccaacggtaccacttggctaatagacacataagaataactgtacaacatattaaaaagaatggaaattgggtgtgaaatataattctcacagataatttacacacctcgtttccatgtttagcaatgcatccattaggacccagtgttactacggcccattggcagtatttggcaagaaattctacagcagttactggatcagcattttgttcgcccctaaatccattgtaaaatgacattatgtataaaaaacaatcaacagattagttattaagtgaaactaagacaatgatgaataacttggaataattcatgctttggtaccaagcagggttaagtaaaaaagacaattaccgtagaagctctgttgcctcatcctcattggcaaagcaaaggtctatattcccagactccagtagcttcagaagtggttgtttgaaattcctaaccatcttgccaaaataagaagaaccatatcagactagtacataatttacataactgatgcaattatccaaatatcaactgctgtgtagaagaagaaaatttcccacaatatcgatactgaatacacaaaaaacttgctagcacaaacacaaaatatgatatcatagttcgtaacggaggcgagttgattcagatcatagttc

SEQ ID NO: 50967 - protein, 73 aa, Glycine max
  peptide (1)..(73): Ceres Seq. ID no. 15171101
MLLIILALILEHYSLAFFFFFFFFFLVKRVQHYSHACLLSIMNVKLNYFLISSLVILDPNHHIKLILSNNFRH

SEQ ID NO: 50968 - protein, 61 aa, Glycine max
  peptide (1)..(61): Ceres Seq. ID no. 15171102
FKVTSPPRERTTDPPLHAPTLQHSSSDRPLITPYKNPLAKRSPAPVASVAFASPIAGTRAI

SEQ ID NO: 50969 - protein, 50 aa, Glycine max
  peptide (1)..(50): Ceres Seq. ID no. 15171103
MLWYQAGLSKKDNYRRSSVASSSLAKQRSIFPDSSSFRSGCLKFLTILPK

SEQ ID NO: 50970 - DNA, 1468 bp, Glycine max
  misc_feature (1)..(1468): Ceres Seq. ID no. 15172499
tactttctctttctagaagcaaagagagagagaagaattcactacaagaattaaacaaagaatctaagttacaaaaaaaattacaagagaaagttgtgtcatttgagaggtgcagcaccggcgagttcgacctataggaaagctttgaaaccttgtcgctagcatttggagggcacgccaaagccactatgttgtgggtgtatcttaacgacctctcactactgcaaaaacacatttctactacattgtttctaagaagagccaaggaggaagaggttgaaaggaagccttgtgtgaaggctcttcctttcaaggtgaaagcgatgtcgagaggatcatcgtcgcagaaagcaaggagtggattcttctagaactcaatgtttgattgtttaatttgatgcaccgaacactatgaccctgttctggtgtctcaggaagtgtgcgttgaaatctacaaaggcgtcaccactagccagctcaatgaattggtagcggaaaccaccgcggctatgatcgccaaccaccctgactattcttctgtttttacatttttggagtagctaaatcagatgaggcaaggtggtcttttgttaattacttcaacttaggtaaacgaatctgccttggtgaatctgtcaagattgaagaatagattgcaaactacttgtcttggcaaaaaggatttaaaatgagttggaacccacacatggaggtccattacaataccattagctatccctataatacaacaggaagctttatcgaatattttgaaagtctcacctatgaacatgtcaacttcattttttatggtgaatcgcatgctcaggtactagcaaaaattttcatttatatcatgtttaagatattttatataatccttggtttgatggaaattgttcttcttatcttgttttattaatgtaaatatgtcctgtagttgtgtttcactattttatctcaaactttgttattgttgttcttttgttattaatgataggctactagaaagattcataattctaaagtaaagacataaaattccatttatatatgctggagagttcatacccttcaaagtcaagcttttacaagtttggactatctgaaccagagaatacttcacactatcgttacggtcatgattatgaggtaaatcatcacgaacctgtggtggatgagtataggagaccttctgagaactcattgacaatcaatgaaaagtctgcagcagtaagcacaaaatgggttaaaggtggaaacactaacacacgagacaattatattgaatgtaagtttgtgattttcatccaactgaaaataattacaatagtaatatctggctgttgaaatgcagtcttgggtatatatgtaatgtcctaaaaagttcatttatgctcaatttatactgttacacttgattcttttcgtaagcatcataatgtttgagaaactagttgttgtactg

SEQ ID NO: 50971 - protein, 98 aa, Glycine max
  peptide (1)..(98): Ceres Seq. ID no. 15172500
MLESSYPSKSSFYKFGLSEPENTSHYRYGHDYEVNHHEPVVDEYRRPSENSLTINEKSAAVSTKWVKGGNTNTRDNYIECKFVIFIQLKIITIVISGC

SEQ ID NO: 50972 - protein, 77 aa, Glycine max
  peptide (1)..(77): Ceres Seq. ID no. 15172501
MSWNPHMEVHYNTISYPYNTTGSFIEYFESLTYEHVNFIFYGESHAQVLAKIFIYIMFKIFYIILGLMEIVLLILFY

SEQ ID NO: 50973 - protein, 71 aa, Glycine max
  peptide (1)..(71): Ceres Seq. ID no. 15172502
MEVHYNTISYPYNTTGSFIEYFESLTYEHVNFIFYGESHAQVLAKIFIYIMFKIFYIILGLMEIVLLILFY

SEQ ID NO: 50974 - DNA, 1220 bp, Glycine max
  misc_feature (1)..(1220): Ceres Seq. ID no. 14313939
atatttttctctcaatgatttcatttacatcattgcattatgaagtgttaatccccttcttttccctttttctgagcatcttcctttcatttttggtgagtggttacatgtatatatttatgtacacttcatctcattttttttaaccaattgattgcttgcaattaagttgatggtgcttgcatagaacaaaaacaaggaaagagttattgctgtcaacactcatggtcaacatgttctctattaggctgaagtgtatcagcactagagcttttgtttgcattttcttggacaagggactccaataggtgctactgggcaccgtgcgccactactttgctgagttgcctctctctgacattgacactcgcacttatacatctttggggctctgtatgaggagttaactagaaaagttgtcactttggtggcagagaatgaaaacctaaagagggagaaagaattggctttgaaagagtatgagtctttggagactacaaataagaacttgaagacacagatagccaagtcaataaacactgaagtggagaaaactcctgttgagcctgtgtcatctgtggctgagataacaccttcatccggtaatggtccatggttcctttataacctttttccagttccacaaatattttggccttccatccttcaatcttctaatccaattcatctacaaaatacatcatttaattccatcgccattccacctaatgctaatgtttcatgttcttctgagtctgaatcacatcacaagcaaaataaccttataaatgataatcgaactcgagtaatcactttttaaaattttattttgatctatccttttgatttttgaggttgtaagtttctttctttagcttaatcactagaagaagataagaaagcttttgaaatgactgagtcaaaagaggcaacattgcttgaagcagagaagatttcctgtcgtaaatctgaagtggatttcaagttcctgtgttttttgctggtttctcaagtcaagaattgggaagtaacacattcctgtttttgggatttattgttttttattattattattattattattattaagtcatgttttaggaaattggacgatctgatggtgcaacttctccagcagttgaggctttaaccttctctcatacttactgtttgctgctagctttaattcaatttagttgtccaccattttttcctgcatt

SEQ ID NO: 50975 - protein, 79 aa, Glycine max
  peptide (1)..(79): Ceres Seq. ID no. 14313940
MTESKEATLLEAEKISCRKSEVDFKFLCFLLVSQVKNWEVTHSCFWDLLFFIIIIIIIIKSCFRKLDDLMVQLLQQLRL

SEQ ID NO: 50976 - protein, 60 aa, Glycine max
  peptide (1)..(60): Ceres Seq. ID no. 14313941
MVHGSFITFFQFHKYFGLPSFNLLIQFIYKIHHLIPSPFHLMLMFHVLLSLNHITSKITL

SEQ ID NO: 50977 - protein, 47 aa, Glycine max
  peptide (1)..(47): Ceres Seq. ID no. 14313942
IFLSMISFTSLHYEVLIPFFSLFLSIFLSFLVSGYMYIFMYTSSHFF

SEQ ID NO: 50978 - DNA, 1414 bp, Glycine max
  misc_feature (1)..(1414): Ceres Seq. ID no. 15170255
ataatacatatcataatgaatggaacccctgcgtgattattgcctccgccagcagccacccaattctcatgatacaccctcagagtcaggatccttgaccatcccaaattcctcagcatcccaactgcagagaattatagtcctgcttggcttccaccccgagcccaatagagcagaaaatcaacgagcaacatcaagtagtgcagctgttccaatgctaggatcaacagcaccattcgtccatgcatctctatggttcccaagaagaacatatcaatcaggttctttcgacccctttatgacagctaaaacattttgaattgtggccatcttttcaccctaaaaaatagaaaccaaaagccaacagaaacatacacacaaaacaatatcaagcttcagcttaaatgttcccattcctccttttcaactccccacctcatttctatcaaatcatgtgccatcttactgaggtgttatcttatccactaacggaatggagctgagtcgagtggctggcagaattatggcatttttaggtgtgatctattaatcctttgccattagtccttgatatgatgaacatgtacgatactgaaacagtttcagaaaaagactcgatggcattgtgcgaggcaaagctaggtacataagattcagtaaagattactgcaagtgacatcgctctcacagggccgtgtctaaaactttctaggcctgaggcaaattttatacttgaatttccccatctatcacactgcgttcgactcctataactggatggcatagtattgagatccattcttccaccgccatgttactgttgtacaaaaacacgttgagcaacttgatagaccagaaaatttctctacatccattaaccctttcaattgaagaatctgcttctgctgccaaagaagccgatgatgaattaaagatatgaaaaagcgagcattgaatgatagactaattgcggaaaaaggcttcttggatgcagatggacttcaagcatctctcgtgtttgggccttcaagcaaccatgggaggttaatttcttcccagggatttctgattctatcactaggtcgtcggctatcatcaattcaatatgagatttggagggttgccaaagcaattcgtagagctgctggtgctgcactcagtggagaattcacctaaaaactaatgggaaaaagtcatacagaggagaatggagatggatgaaatcttgtacttgagttacctgtaaatattagcgtttcttttaacacgagcagagtagttagttaattagttagcttatctgcatattgtggtacataattgtacattaagttttctaaaaggagatggatagatattccagccgtttgaagaaatgtacacggtgacagcagattttgtgcttcttataatg

SEQ ID NO: 50979 - protein, 99 aa, Glycine max
  peptide (1)..(99): Ceres Seq. ID no. 15170256
MEPLRDYCLRQQPPNSHDTPSESGSLTIPNSSASQLQRIIVLLGFHPEPNRAENQRATSSSAAVPMLGSTAPFVHASLWFPRRTYQSGSFDPFMTAKTF

SEQ ID NO: 50980 - protein, 79 aa, Glycine max
  peptide (1)..(79): Ceres Seq. ID no. 15170257
MKKRALNDRLIAEKGFLDADGLQASLVFGPSSNHGRLISSQGFLILSLGRRLSSIQYEIWRVAKAIRRAAGAALSGEFT

SEQ ID NO: 50981 - DNA, 801 bp, Glycine max
  misc_feature (1)..(801): Ceres Seq. ID no. 12582036
cagctacgtaggcccccccccccctgattatttactcgatgcagttctttggagcggttatgcgttattctttttcttgtttaaaatgttttggcttaatatggattttaactgctgatattttcccattgcaaatgaaataataaaatatctgcgtgcttttattctgtacgaattggtatgaacgattttcgttgtggtgcttttgttactctattggtttaacgaatgaacatgttactttgtttttcaggacattgcaaatgccgaactgcctccaactcatccaattaggcttggccttgcacttaacttctctgtattttactacgaaatccttaactctcccgatcgtgcctgcaaccttgcaaaacaggcttttgatgaagctattgctgaattggatacactgggagaggagtcatacaaggatagcactccgatcatgcaactccttcgtgataacctcaccctttggacctctgacatgcaggatgatggagcagatgaaattaaagaagcagcaccgaaacaggatgaccagtaaaaatattttactgctaattagaattgaacttctcctccatatctttttgaagggagaaggtgtttgttgctaatatctctttggtactgagattttaggcattcatgtttgttatgattgtggatgtactgggccgtttttagtttgtccttccattttcaagtgttttccaaattgcctattttattaaggacgctgaagtttttattatatggaattggaattttaagattcttaaaaaaaaaaaaaaaaaa

SEQ ID NO: 50982 - protein, 118 aa, Glycine max
  peptide (1)..(118): Ceres Seq. ID no. 12582037
MPNCLQLIQLGLALHLTSLYFTTKSLTLPIVPATLQNRLLMKLLLNWIHWERSHTRIALRSCNSFVITSPFGPLTCRMMEQMKLKKQHRNRMTSKNILLLIRIELLLHIFLKGEGVCC

SEQ ID NO: 50983 - protein, 78 aa, Glycine max
  peptide (1)..(78): Ceres Seq. ID no. 12582038
MKLLLNWIHWERSHTRIALRSCNSFVITSPFGPLTCRMMEQMKLKKQHRNRMTSKNILLLIRIELLLHIFLKGEGVCC

SEQ ID NO: 50984 - DNA, 514 bp, Glycine max
  misc_feature (1)..(514): Ceres Seq. ID no. 14305551
tgaatatcacttgtctcaaaccaaagagaagcccctccaaaagggtcaagtcctgtttcctcacctacacccacaattcgaagtgctgcttgccccaccgtaacgtttgatttggtcaagtcaggtttggttgaacttgaaagtgcccaaaagtcatctatccagcaatttttggttcaacaaatggctacttctttgacaagggataccaatttcacaacagcacttgccactgccatttcaggaaaaattctagaggcccaatggtgaattaaacacaaacattattaggaacatgttatcaattttaaaaaataatctctccttttttttaattaccagaaagattataaaaagagattattttcttaaaataagttcaatcacgtatatactcgctgcaccgaacagggattgtattagtttgcttgcttcttttagaggggccgaagagacaaatagttggaatgtatatagaaaattaaagtgaaaaagaaaaattatatttcctttt

SEQ ID NO: 50985 - protein, 64 aa, Glycine max
  peptide (1)..(64): Ceres Seq. ID no. 14305552
MLSILKNNLSFFLITRKIIKRDYFLKISSITYILAAPNRDCISLLASFRGAEETNSWNVYRKLK

SEQ ID NO: 50986 - protein, 35 aa, Glycine max
  peptide (1)..(35): Ceres Seq. ID no. 14305553
NITCLKPKRSPSKRVKSCFLTYTHNSKCCLPHRNV

SEQ ID NO: 50987 - protein, 33 aa, Glycine max
  peptide (1)..(33): Ceres Seq. ID no. 14305554
EYHLSQTKEKPLQKGQVLFPHLHPQFEVLLAPP

SEQ ID NO: 50988 - DNA, 866 bp, Glycine max
  misc_feature (1)..(866): Ceres Seq. ID no. 15226787
atttaaatgattaatattattggtaatgaatatgataatgtccataaccaccattgtatcagctgctccatagttttcatgggttctaaaatctaaatccgttccatatggatttaaatcttctcaagtttcatcaccagaacaatcaggcacagaaaagcacaaactttttttaatggatatgataattccattaccatcaggtctgctttgtctctctcataatttcttattgcagtgacaggactggtcattgtttcaagtttctggatattaaaaagattaaagaaaaacagaatattgtcttgtaacagcaaagaacatgattggagaagttgcaataagcactttcaatgttattctgaatttttttcacatcaataacttttggaccaacgaaagtgttcatttcccttatattgccacacatgtctataggttgaggcagttattgacaaaattattgaggaggcaagaactggggagattggtgatggcaaaattttcttgatccccatctcagatgttataagaattcggacaggtgaacgtggggagcaggcagctaggatgactgggggccgaagtgacatgttatctgctgtatgactggttggaatgaaagataagcatttgtcatctgcttctcttacccttgtggaatattgaatttactatgctgtatgctttatatgtcttgcacttaattgtgggaagatgtatatgacagccagtattggaagggcactgtagttatgtggtgaagaaacctgagagaaaataataaccaaatgctgagttgcttcatatgccatatgacaccaagatgtgcaataaagttaatgacataatttagatatagtgcc

SEQ ID NO: 50989 - protein, 62 aa, Glycine max
  peptide (1)..(62): Ceres Seq. ID no. 15226788
MIGEVAISTFNVILNFFHINNFWTNESVHFPYIATHVYRLRQLLTKLLRRQELGRLVMAKFS

SEQ ID NO: 50990 - DNA, 517 bp, Glycine max
  misc_feature (1)..(517): Ceres Seq. ID no. 13581259
gaacttcaagggcaaaaaaagttgtgctgtgccgcctcttccgtaggcagcagcaatggcctcaaatcccaaaactttgacctttgaggaggtagctaagcacaacaacaaaaaggattgctggattattatcaatggaaaggtctgcttcttctttctctctatcttagttgatctgtttcacagttttcagtttctgggatttaacatgatgcgtgctaaatgctcatgaagatgaccgaggaattaattataggggtgtgatgcggttcagaagccacatgttaatctccaatacagtgtattaagctaatcaattttattcagagtaatgttaatgagcataataaatcatctaacttaactagttatcaaagtgaattgcttgatttgttgagaattgagattaataaccaaaatgtagaaacaaaaaattcaactctgcaatacaaagacaacgttggaacagaatgccaacagattagaatttggaaaccttatcaagcaatccagattt

SEQ ID NO: 50991 - protein, 58 aa, Glycine max
  peptide (1)..(58): Ceres Seq. ID no. 13581260
MASNPKTLTFEEVAKHNNKKDCWIIINGKVCFFFLSILVDLFHSFQFLGFNMMRAKCS

SEQ ID NO: 50992 - DNA, 304 bp, Glycine max
  misc_feature (1)..(304): Ceres Seq. ID no. 13581394
atattctagttctggccttgcagatgatatatgcttcactgtttattactattattattattattattattattattaggcaatcctttaatataattcggttttgctctgctatgcagaatcgttgacgagagcaccaaagaaggtgcggtggtggaccctgtagagcctcagaaagttctagaagctgccaattctcatggggtcaataatctcaagcttgtcctcaccacacatcatcacggggatcatgctggtggaaatgacnngataaagcaattggtgcttggaatgaaggcctatg

SEQ ID NO: 50993 - protein, 41 aa, Glycine max
  peptide (1)..(41): Ceres Seq. ID no. 13581395
ILVLALQMIYASLFITIIIIIIIIIRQSFNIIRFCSAMQNR

SEQ ID NO: 50994 - protein, 34 aa, Glycine max
  peptide (1)..(34): Ceres Seq. ID no. 13581396
MIYASLFITIIIIIIIIIRQSFNIIRFCSAMQNR

SEQ ID NO: 50995 - DNA, 1030 bp, Glycine max
  misc_feature (1)..(1030): Ceres Seq. ID no. 13595808
ggatgtaaagagtttctttattaatccaagtaaatcaccacagactcatagttatccacgcatggttgcatgtgcagggaagaaaaccaacaaaccgtgaggaaatggagggaacacgacgtcccaccacggacaccaccagccacacaagccaccacaccagtgacggacgcgcggtgcatgccccccggttcgttcacaccgaaaccgacacggcctccgcggccggctcgccgccggcgagggcggccccctccagcagctcggcgaccctggtggccaggctgagcttggccgccggcgacaccccgtgctcgccgatgatggactccagcacggcctcgcagagccgggcgttgtcgatggccacgccgccggactccggcacggacgagtccttggagaaggcgacggtgaggaggccggcgggggagtgggtgaagaggatggacgcgccgggggcgaagctgtggggcccgaaggcctccttgaacttgtcgacggcggcggcctcggcgtccgtgtacacgccggtggccttccagtaggcgacgcagttctccgtcaccttgtccgagtactgcgcgcccgtcagcggcaggatcatcgtcaccctcgtgaacttctcgaactcgccggtgacgacgtcgcggaagaaggcggcgtcggaggcgaggtcggcggcgggcttgccggcccacttggcggcgagcgcggagacggcggcgtcggcctgcaggtagacgccgatggccgtgaacttgatgaagttgcccccgatctccatcccccgcacgcctgcgccggcgagaaagtgggcgtgctcggagcccggcgggcgggcgagcggcgggaagacgacgccgtcgacctcgagctccgacacggccatggtggtgcacggagggtctccggagacgacggcacgtagcgagcgaacacttgtattgatgtgatgggggcaggccggcagggtaggtgcgatctggcgaggcgtaggcgcacgggatttttcgattaggatgttcta

SEQ ID NO: 50996 - protein, 147 aa, Glycine max
  peptide (1)..(147): Ceres Seq. ID no. 13595809
MEGTRRPTTDTTSHTSHHTSDGRAVHAPRFVHTETDTASAAGSPPARAAPSSSSATLVARLSLAAGDTPCSPMMDSSTASQSRALSMATPPDSGTDESLEKATVRRPAGEWVKRMDAPGAKLWGPKASLNLSTAAASASVYTPVAFQ

SEQ ID NO: 50997 - protein, 75 aa, Glycine max
  peptide (1)..(75): Ceres Seq. ID no. 13595810
MMDSSTASQSRALSMATPPDSGTDESLEKATVRRPAGEWVKRMDAPGAKLWGPKASLNLSTAAASASVYTPVAFQ

SEQ ID NO: 50998 - protein, 74 aa, Glycine max
  peptide (1)..(74): Ceres Seq. ID no. 13595811
MDSSTASQSRALSMATPPDSGTDESLEKATVRRPAGEWVKRMDAPGAKLWGPKASLNLSTAAASASVYTPVAFQ

SEQ ID NO: 50999 - DNA, 601 bp, Glycine max
  misc_feature (1)..(601): Ceres Seq. ID no. 13594923
ccattcccctcccctccagcagtcctctctgctctcgcctagtcgcctccccgtctcccatccccccaccccgctgacccaaccctagcaatcaagcagatcgcgtcgccgccgatggatcagggctgggcgagctggttcggcgccggcgtcacctccgccttcttcgcctcgctcgagcgctgctcctgcatcaacctctccaccgacgacgacgacgacgacgacgccgacgccctcatgctcgcggccgccgccccctccgaccagccccagctcgacgccgcccccgcccccgccgtcgccgccggcaaggaggaggggcaggagcaggagcctcccctcccgcccgtgtgacccgctccctccccccatccatcgcttgcgtacgccttactcctcctctcgtccgcgtcctctgctctagatctggtgaactgctgctcgtcgctcgtggccgactaataaatcctgtcgattttactgctggccggccatgtttaaattaattgaactagtagtatgtctgcgtgtgtgtgtatgccattaccatgcctgttgtttgtgttcatgtgaatatatcatcatgccgtcgtgtggg

SEQ ID NO: 51000 - protein, 80 aa, Glycine max
  peptide (1)..(80): Ceres Seq. ID no. 13594924
MDQGWASWFGAGVTSAFFASLERCSCINLSTDDDDDDDADALMLAAAAPSDQPQLDAAPAPAVAAGKEEGQEQEPPLPPV

SEQ ID NO: 51001 - DNA, 719 bp, Glycine max
  misc_feature (1)..(719): Ceres Seq. ID no. 13595704
ctattattcgattccttttttttttttctggaagattgaatgttcgtctatatgaatctgagatttggtgatatgtgatttggtaatgacagagattagttcagcaccagccgacacaacatccaacctctgaggaacttagcattggcaaaatcaagttcaaggcttttgatttaggtggccatcagattgctcgaagagtttggaaagattactatgccaaggttgatgcagttgtctacctcgtggatgcttatgacaaggagagattttcagagtcaaaaagagagctagacgctcttctctcggatgaagcccttgcaactgtcccgtttctgattctcggaaacaagattgatatcccttatgcagcctccgaagatgagcttaggtatcacttgggtctcaccaacttcaccaccggtaagggcaaagtgacgacagctggaggagattttggtgttcgccccctcgaagtcttcatgtgcagcattgtccgcaaaatgggctacggcgagggattcaaatggctctctcagtacatcaactaaaagacatcatcatgccttgtctttctcatataatcaaaccaaacccatgaacatctgtcttttcttgagataaaagattcgtctatgatgatgtcataacactctttctcctttttgggtttttgtagttttcttgtttttaatataagtttggtgacttgcatttcc

SEQ ID NO: 51002 - DNA, 502 bp, Glycine max
  misc_feature (1)..(502): Ceres Seq. ID no. 13595346
cctttttagggttcatctgtgccatgatgcaatgccgaccaccctctattcgaagctgccgcctctaattaatcgtttgacattcttgctactggttctcacaatctaacaccattacataatccagtgcatccaatcgtcgtgattaagcctctcaagtcgtcaccgtagagtatcgcgttttttcgagcgggaagagagctttgcggcgtagtttgtcaaacacttcatcgtcactgagaaggaatatgacagaggagagagatgaaaaggccgatgattgcttttctgatgatcgtaaaagatgcgcttggatcgctccgaaatctgaccaatcttgcattgctttccataatgaagagtggggagttcctgtccatgatgacaattattaagcctccctgttgttctcccggaactatcctggaaatacattckgtttcamaaggcaatcattcaggaaatttttcaaggagtttgattcaattcctacatctgaact

SEQ ID NO: 51003 - protein, 79 aa, Glycine max
  peptide (1)..(79): Ceres Seq. ID no. 13595347
  misc_feature (58)..(58): Xaa is any aa, unknown or other
  misc_feature (61)..(61): Xaa is any aa, unknown or other
MKRPMIAFLMIVKDALGSLRNLTNLALLSIMKSGEFLSMMTIIKPPCCSPGTILEIHXVSXGNHSGNFSRSLIQFLHLN

SEQ ID NO: 51004 - protein, 75 aa, Glycine max
  peptide (1)..(75): Ceres Seq. ID no. 13595348
  misc_feature (54)..(54): Xaa is any aa, unknown or other
  misc_feature (57)..(57): Xaa is any aa, unknown or other
MIAFLMIVKDALGSLRNLTNLALLSIMKSGEFLSMMTIIKPPCCSPGTILEIHXVSXGNHSGNFSRSLIQFLHLN

SEQ ID NO: 51005 - protein, 70 aa, Glycine max
  peptide (1)..(70): Ceres Seq. ID no. 13595349
  misc_feature (49)..(49): Xaa is any aa, unknown or other
  misc_feature (52)..(52): Xaa is any aa, unknown or other
MIVKDALGSLRNLTNLALLSIMKSGEFLSMMTIIKPPCCSPGTILEIHXVSXGNHSGNFSRSLIQFLHLN

SEQ ID NO: 51006 - DNA, 489 bp, Glycine max
  misc_feature (1)..(489): Ceres Seq. ID no. 13582040
atcaaaagagaatggtacatcctttaaattcctaagaggcatatatattttagagaaatctttaataaacctcctatgaaaactagcatacctgagaaagcttcttacacctcttatatctctaggagaaggtagtttctctatagcctctatattagttctatcaactttagtacccctttcagagattctatgtcgaagaacaatacattcattcaccatgaagtggcacttctcccattcaagactaggttgcgttcttcacaccactgcaaactttatcgagattgcatagacaattatcgaaagatgtcccataaatggaaaaaatgtccatgaagaactcggtaatttgttcaacaaagcccatgaatatggcagtcatgcatctttaaaatgtggctggtgcattacacaaaccaatagttatatgtctgtaagcataagttccaaaaggaaagtaaagttacctttaaaaaaaaaaaaaaa

SEQ ID NO: 51007 - protein, 48 aa, Glycine max
  peptide (1)..(48): Ceres Seq. ID no. 13582041
MSKNNTFIHHEVALLPFKTRLRSSHHCKLYRDCIDNYRKMSHKWKKCP

SEQ ID NO: 51008 - DNA, 753 bp, Glycine max
  misc_feature (1)..(753): Ceres Seq. ID no. 13595158
aaacaaactaatgtttattgctcatctcattcatatgtatatttacatacacacataaaagcgtggcaaatctaatgttagcaaggggtgaaaaaaagaaaatttaaaagtacaggggtgaaaagtcaaaaaaaaaaaagatacaaaggaggagggaaggaagctgtctctctgtctctctatagttccgtcacgggacagtactcactgtgaaaatcatgaacaccagaagcagcccacagccgttgattaaactcttcttgcatctcgtccggaacaaacggcgttctacagagaggacacgtcttctgatcgtgatccatccaacggtcgagacagctccggtggaatatatgtctgcagtttctcagccaccggatctcttgctctccttcgaactcgtagaggcagacggcgcagctctccggcagatcttcgccggaagaggtcgtcacgtcttcgaacttgatgacgggtaagatctcgcggatgaggagggcggagaagggggagcggagctcgggtgttcgggtcgggtaagatgtgtagtcgggccaggtttggtccatttcgaggaagtcggagaggcccaagaagcggaagagggagaagacgacggttctgatgagactgaggattgagagtgtttgtacgaagagcttcgggaggaagacctctgtgtagcctacggggaagcccattggagctagagagagagagagagagagagtgagctctgttttaataaaggtt

SEQ ID NO: 51009 - protein, 86 aa, Glycine max
  peptide (1)..(86): Ceres Seq. ID no. 13595159
MNTRSSPQPLIKLFLHLVRNKRRSTERTRLLIVIHPTVETAPVEYMSAVSQPPDLLLSFELVEADGAALRQIFAGRGRHVFELDDG

SEQ ID NO: 51010 - DNA, 1336 bp, Glycine max
  misc_feature (1)..(1336): Ceres Seq. ID no. 13582264
caaatttttaattcagatttattaattaatgttatatggaattacatatacactaaaatcatagaaatagaaccttaccagttggcagcgttagcaatgacattacatcgcaaacctcccctggaataaagatgagtaatgtccccaacatgggtaaagaacttttgggcatcaatgttttttcctgcaattttagccttaactaaggacagaatctttgatttatgagacaagtcaacaagaacaagtctggcattcctaaacttatttgagaactctgcaaccttctcaacaataatatcagctgccttctcatggttgaattgaaaatcagatgttgaaatagatggaaatgccagagtgggaatatcatccagagaaacttgattggcatgggaatcaacagagccaactgcttggttttctacttccttcgtctctgagttgtcattatcaggaattgaggaaaatgtttgcttatctttgcagcaggagttatttttacccggagtctgggaagtagggtcttcaatgccactctctctagatgcagcagcaactgggacctctgctcttttaaggaacttcattataccaacttgaattttggaatcaggattcttctggccaaagcagccatattgaagactatccagtggcccaagtgtgctgtatgtgttaagagcattttttacatcactttcattctgacaaaatgttatccggctaaagccttcacttaatttgggaagctctttatgttgaagcattctattcacaactgcagcagcttttccaccctgcaaatttccttcatgcccagttcgtttgactgatcgagaaatacaaagcttagcaggaagatcaagtacaactgcatggacatctatttggggtccatcaccaagctttataaattctgaacgctgttctctgtcaagattgcacctatcaataaatacactcttcccatccttcaatgctttagttgcactgcttaggcactgagctttatttcctgctttaccatttccaatagtgtcctggcatacgcgaacccaagggcgagtagaggaacccataacttcttcgcagaaggtggacttcccgctccctggagcgcccaccaagatcaccaaaacgggctttctctctttaggtgcagaagcttcttccacgtccatgtccatcttcaaatccgagcgtttttcaccacattgtcattgtgaatttagatcgcaagcaatgggtacattctgctgtgttgtgagcgagttttggggttgtgttgggttttgtgttgtggccaatcatttttcgattggatgttctaggt

SEQ ID NO: 51011 - protein, 58 aa, Glycine max
  peptide (1)..(58): Ceres Seq. ID no. 13582265
MEMPEWEYHPEKLDWHGNQQSQLLGFLLPSSLSCHYQELRKMFAYLCSRSYFYPESGK

SEQ ID NO: 51012 - protein, 56 aa, Glycine max
  peptide (1)..(56): Ceres Seq. ID no. 13582266
MPEWEYHPEKLDWHGNQQSQLLGFLLPSSLSCHYQELRKMFAYLCSRSYFYPESGK

SEQ ID NO: 51013 - protein, 51 aa, Glycine max
  peptide (1)..(51): Ceres Seq. ID no. 13582267
MSIFKSERFSPHCHCEFRSQAMGTFCCVVSEFWGCVGFCVVANHFSIGCSR

SEQ ID NO: 51014 - DNA, 1563 bp, Glycine max
  misc_feature (1)..(1563): Ceres Seq. ID no. 13582281
ttggcagaatctatcaacacatgacgagtcttttcaaattaagtaaatcatgaagtcctttgcagaaaccatcaacacattctgactctacgttgtcgcttagtaagaagttcctcagtttgctatgattttctctcacttctcttccaacctcattcccatcatccatcacaattttcacagctttgcatacactttcttttgtgaacaacccatcttcttcacctttctcaatttccacaccaacccttaactttctactaaacattcggcaatttatgagttgatcagcacccagatgcggtaagaaaaccaacctacacttattcacaagcgcctctgtcaaagaagcagctccacagtgtgttatgaagcacccgacagaagggtgtcctaaaatcaattgttgttgcacccaaccttcatctacaatccctcttccttgaaccctttctctgaacccttctggaagtgcttcttcaatagactcaaaaccattagggggcttaagtgctgcaagaaatggaaaacctgttagctcaagaccaagcaacaactcttgaagttgattttgcggtaaccggctttcacttccataagcacagaaaacaacagaaccagggttgaatctcccaagccataaaacccattttccctctaaagtagtgttcggaggctcaggtaaaagaggccctgaaagtaaaacaggtttcccatacacagtttcaagatactcagcatatggtccatcaatttctttgcaacctttgaatcctattgcatctgccatgctcgctgcagtgtggtaccgatcatagagaagaaccccacttccaaactcgagtttccttactccaacgaggaaccgaagctcatgtggctgaaacttgatgcatgaatcagggaacccctgagggggcaccattagatcaagttcagttaactctcttcctttgcttttccttggtccgtttgcgaagtacgctgttgataacggattaataatgacatacataacactcttgatgcctagtcttctagtcaagtttggtagccaatgttggaaatcgaagaaaacaatttgtggcttcagttcccttaggagaatttcgatgtccttctcagtgcgatccatagcctcggcaataagtgggaataaagagaagggcacatctgaagtagtttcagcatcgtgaggaagaccattgacattaggaactttgatgggaacaaaggtgattagatgagggtgaagattgaggtgttgtagtttggtttgtgtttttttggggcctatgaaggagattctgtggcctctctgtgcaagcttgttggagaggtgaagagatggggttagatggcccatagcaaaccatggaaatattgctatgtgcaaaggagctgcatttgcggtatccatggctgctcctgtttgagttatttgcttactgtcttcgaaaataacgcatgcacgcgttcaaattaaatagtctccatcaactttctgtctctctctgattgcagaattatcaaagtttggtgccacgtaaaaaaaaaaaaaaa

SEQ ID NO: 51015 - protein, 63 aa, Glycine max
  peptide (1)..(63): Ceres Seq. ID no. 13582282
MTYITLLMPSLLVKFGSQCWKSKKTICGFSSLRRISMSFSVRSIASAISGNKEKGTSEVVSAS

SEQ ID NO: 51016 - protein, 56 aa, Glycine max
  peptide (1)..(56): Ceres Seq. ID no. 13582283
MPSLLVKFGSQCWKSKKTICGFSSLRRISMSFSVRSIASAISGNKEKGTSEVVSAS

SEQ ID NO: 51017 - protein, 42 aa, Glycine max
  peptide (1)..(42): Ceres Seq. ID no. 13582284
MAHSKPWKYCYVQRSCICGIHGCSCLSYLLTVFENNACTRSN

SEQ ID NO: 51018 - DNA, 1017 bp, Glycine max
  misc_feature (1)..(1017): Ceres Seq. ID no. 12611884
aaaaaaactgtcgaactcatctcttgaatcagaaagagaacctcagctaatacatgcacgcattataaaatttgggaactccacacaaaagcaaaatattaaaaactcaaggacataatcaatactgaataaatggatgacatgagttactgctacattattacatcaagcagccaaacaaacaacatttaaaaatagcaaattttagttattctggatgtgtgctggctcagttagacggtgcagcggcagcctctcgtgccttggcgaactcaagcagcctgcccacgtctggcagggccaccttggccgcgtcgagctcgctgaagcgctccacccatgcggccaggagcggggtcttggcggcatcgaagatcttgtcaccggacaacacctcgatcaccttcatccacgacagcacgcctcccagcgcaacgtcgacgagcccgaggccgtcgccgccgaagaagccccctcccttggagcattccctcagggccccttcaagaatctccaccgccgcgaacgcctgcttctttccctcggatttctcctcctctgtcttgcccctcaaccactgcctccatggggctaccagcttgtcgtcaacgtaggccatccagaagcgagcaatggcgcactcgtaggggtccgctgggagaagggacgggccggagccggcgaacacttcgtcgatgtactgcagaatgatcatggactcgcagaccggggcgccgttgtggatgagcacgggtatcttcttgtgcaccgggttggacttgaggagaagctcgctcttcttgtacaggtcctcctccacgtcctcgtagctcaggtccttcaaggcgagcgtgagcttcaccctggtaacaaatgggcttggccatgcgccgagcagcttcaggtcatcccctccggccatctccaactagctcgaagcctagaacgatggatgtgcgtgtgtgtgaaggctgagatcgttttagctgtttctgatttgctgggtactggcttgat

SEQ ID NO: 51019 - protein, 266 aa, Glycine max
  peptide (1)..(266): Ceres Seq. ID no. 12611885
MCAGSVRRCSGSLSCLGELKQPAHVWQGHLGRVELAEALHPCGQERGLGGIEDLVTGQHLDHLHPRQHASQRNVDEPEAVAAEEAPSLGAFPQGPFKNLHRRERLLLSLGFLLLCLAPQPLPPWGYQLVVNVGHPEASNGALVGVRWEKGRAGAGEHFVDVLQNDHGLADRGAVVDEHGYLLVHRVGLEEKLALLVQVLLHVLVAQVLQGERELHPGNKWAWPCAEQLQVIPSGHLQLARSLERWMCVCVKAEIVLAVSDLLGTGL

SEQ ID NO: 51020 - DNA, 1509 bp, Glycine max
  misc_feature (1)..(1509): Ceres Seq. ID no. 13504015
caaaaagaaaattttatttctccctctctcactgtatttgtgacgcctacaaatagaaaaactgcatttggacacacagtagatacatgctaaaatgcaaggaaaggaaacaaagaaaacaactaaatttttttgacattagatcatcccattcactttgaaaagtgaatgcatccttaccaaccaagaagcaatacctttaagagagccatcctaatatatagaccattctttgcctgccgaaagtaagcagctcttggatcactatcaacatccaccgtaatctcatcaagtcttggaagagggtgcataaccacggcatgtttttgcatcacatttaaaacatcttgatttacaatatacctgcctcttgcctcctcataaagttcaattttctctccaaatctttctttctgaatgcgagtttgataaaccacattgcacttagaagccacttccatcaaatcagcactttcttcccactccactccctttgatgtcagatagtcttttatgtcatccttcattttaaccacgttaggagagacaaaataaattttcacgtcctgatacttggctagtaagtatgcaagtgagcgaactgttctcccattagcaaggtctcccacaagcccaactctaattccgtccagtttccctatctctctttcaatggtataaacatctagcagtgcctgtgagggatgctgtccagggccatcccctgcattgattacaggaatgctagcagttgttgctgctcttttggcagcaccactttcaaagtgcctcatcacaattatatcagagtaaccttcaaccgttcttattgtatcttcaagcgtctctcctttagcagcagatgaaaactcccttgcattctcagttgtgagaacatccccacccaatcttttcatggcagactcaaatgaaagcctagttctagtggatggctcataaaacaaagtagccatgaggtaaccctttagcatttggctcctagatgacttgctttcaatgctctccatgctccttgcaacttcaaatatggcattgagagtctctctgtcaaattgctgagcctcaatcacatcatgaaggtgaaatttttgccccatggagaaggagggtgcactttccacttgaagggcccctgccctccacagaatctcatcacctttttgtgaaagtttagatttttccaaaactcctgaatgcccaaatggtgtttttgactttaaatgattccatggctgattgagcaaaccgcatggagaggattttgcagccactttgggatgagacacacccacatgcatagagcaggagaatagaaaagaagcagcgctcattgtgttcttttggagtggcgtgagtgaaggttgtgttgtgagaaatgagtagtttttgttttattttgaaggcagacaacggctacaaaacagcgttgctaccgtgcaagaaggaacaatatgtaggctatatatataagaggagacgacctggttt

SEQ ID NO: 51021 - protein, 53 aa, Glycine max
  peptide (1)..(53): Ceres Seq. ID no. 13504016
MLSRAIPCIDYRNASSCCCSFGSTTFKVPHHNYIRVTFNRSYCIFKRLSFSSR

SEQ ID NO: 51022 - protein, 37 aa, Glycine max
  peptide (1)..(37): Ceres Seq. ID no. 13504017
MSSFCFILKADNGYKTALLPCKKEQYVGYIYKRRRPG

SEQ ID NO: 51023 - protein, 30 aa, Glycine max
  peptide (1)..(30): Ceres Seq. ID no. 13504018
QKENFISPSLTVFVTPTNRKTAFGHTVDTC

SEQ ID NO: 51024 - DNA, 1371 bp, Glycine max
  misc_feature (1)..(1371): Ceres Seq. ID no. 13595548
cgatgcccgtgggaataagaacagacacagaacagtacagctctcatgctggtcggaagcagcacaacacagcgaaaatgacaaacactcctcctacatatcctcctagctaggcgtagcacataagccagcaggctcgtttattcggcaccaaacagcagccagtggtttagtacgtacgtacgtacaaactctggagcatcctatgtgccatcgtcctcaaccattgaccgaggccacgttcggagagcagagcaagggcgtagcacgtagttgttggttctaagcggtggcgatgaggttggagctgtggctgtccatggacttgaaggcctcgaacctgggctccttgtcctcgaacttgtggcgcacgtacagcttcatgtagtcctcgaacacgaacctggggtacgccccgcccgccgcctccgcctccaccagcgccggcgccgggaagatcaccgcgtcgccagccgggttgtagaaggaggcgatggacatccggttgccgtcggcctgcgcgaccacgcggtggaccacgctcttgtacctgccgttggtgatcacctccagctggtcgcccaggttgaccacgatggagtggcgcgtgggcggcacgtccacccactcgccgcccctgagcagctggagcccgccgacgcggtcgtcctggaagagcaggatgatgccgccggcgtcggtgtgggcgcggaggcccttgacgaggtccgggcgcgggcacggcgggtagctgctgaccttggtgccgaaggtgggggcgccgttggagccccggaacgcgcgcgtgaggtaccctttatcgaggccgaggttctcgcagagcaggtccagcagccgctccgccagcctctccagctccgacgcgaactgcttcatcacccgccggtagtcgtcgtcgaggtcaggtatctcggcgatgttgggctccgggaggtggcgcacgaagaaggtgctctcccagtccaggttctccgccgccctgccgccgtcctgcagcgtcttgctagcgaactcgaggaacctctgctcgcgcaccctcttgtagtgccccttggtcatcttctccacctcgtccatcagctccgtcgagatgccgtggtccaggacctggaagaatccccagttctcgcatgcgtcatgcagcaggtccatggccgcgggtcgctcctccccggccagcagccccatgtcgatgatcgggaacgacgaagccggcgccatttctagctctcgaacttgttctgcggcctgcggcgcctggtgctggaaccgatctcgggcagctctatggcttctctgcaagcgcttgctgtgcgtttgagtagtcagtgtttttcgattaggatgttc

SEQ ID NO: 51025 - protein, 85 aa, Glycine max
  peptide (1)..(85): Ceres Seq. ID no. 13595549
MDIRLPSACATTRWTTLLYLPLVITSSWSPRLTTMEWRVGGTSTHSPPLSSWSPPTRSSWKSRMMPPASVWARRPLTRSGRGHGG

SEQ ID NO: 51026 - protein, 76 aa, Glycine max
  peptide (1)..(76): Ceres Seq. ID no. 13595550
MPWSRTWKNPQFSHASCSRSMAAGRSSPASSPMSMIGNDEAGAISSSRTCSAACGAWCWNRSRAALWLLCKRLLCV

SEQ ID NO: 51027 - protein, 56 aa, Glycine max
  peptide (1)..(56): Ceres Seq. ID no. 13595551
MAAGRSSPASSPMSMIGNDEAGAISSSRTCSAACGAWCWNRSRAALWLLCKRLLCV

SEQ ID NO: 51028 - DNA, 559 bp, Glycine max
  misc_feature (1)..(559): Ceres Seq. ID no. 13582124
ctttatctggttatttcatttcatctcttataaataaagtcccagagaattgcataatttgtccaaataagcgccaaaaatataatgcaagacaaaaaaaacaataagattgccttaaaactttagaaagaaagaagagagtttttatctttccgtgagcttttggtcctatgactttgcctctaaacggggctttactgtggaggcttgccagcacttaagagctgtccgaccattccatttacctgccagtacttggaaacacaacggtcaatgcaactgttctcacccatgtttaactcagcttccttgtaccttttatccacacatttaacaaagcatgtttgagcaagcttgttgaagagttcaactcgatattccatctccgtttgtgccatgctaaacgcctgttccttagaaatgccggcgggaattggactgggagcagccatcttagcaatactttctcaaaaaaaaaaaagaaaaaacgaagatgttcagagagattgaatacggacaaggcttctcgcttttgcttgctcctcttttcgattaggat

SEQ ID NO: 51029 - protein, 37 aa, Glycine max
  peptide (1)..(37): Ceres Seq. ID no. 13582125
MLNACSLEMPAGIGLGAAILAILSQKKKRKNEDVQRD

SEQ ID NO: 51030 - protein, 34 aa, Glycine max
  peptide (1)..(34): Ceres Seq. ID no. 13582126
LSGYFISSLINKVPENCIICPNKRQKYNARQKKQ

SEQ ID NO: 51031 - DNA, 1515 bp, Glycine max
  misc_feature (1)..(1515): Ceres Seq. ID no. 12583469
aacttgaacttgtatatgatttttgtttttcatcaaattgtaatgctaccaacaagtaccatgtttttgttcaaactattacacacaagcatgaaagtgacaccccaaaaatcaaaaacattatttaacaatatgatggctgagcatttcaaaatagtttaattggtaaagaagaaagacccctccctagccgcaagcattggatcaaccaataggttggagatcacaatgttcatgaagagggaaagggggatcaaaaagagaaccatttagaatggcatgtgcaacaatcttgttcgctgcttccgtgaaatggatgccatcccagctcacatagctgtggggttcatcacaagcacttgctagcatatggccacacaaaattttagggttaaagttgtacacaccgcctccatacccacaacatgttctggtactatactttagtccataaaatgtggggtggtgaaagagctccaagagagcagagttggtgtccacgtaaataagggaagcatctactaaactttctctggttagactcaatgtatatttcaacagtttgttataatcatttacagcattgttgtaagaagccatgcatccaaactcatcatagtcagaagtagcatgaggaagctccaccaagtatccaggatagcatcccacaggaccaagattgaataccataaatctacgccccccttgtgcatatagctccttgatagcagcattaatttgtaaaacgatgtgaggaagggtgcccctcactgcatcaataccaccagtggctgctattttggaagtgaaatcattttggccaatatagaacgtgtaaagggcctttccaaatatatccggtgaaggaattttcgttccagatgatatccttgttcctggttgatgaaattcatcaactttggctttgaattgctccatttgcctgagttgaacagagagggaaaatggacttagcccactgacaaagaaggaagttgtgggcggaatcacagtggaggccgaagatgcaaagttaaccccatgagtatagtccgatccaattgactgcagatatgggctcaaatatggcaatccaagaccctgagcgagaaaatcaacaatgagccttccatcagaagcacgccccactggttttttgaagtaagtcattccatagggaccaggttgtgctggaaagcttgtatgaaacccacccgtatccgaatttgaatccccgaaattgaagattgcctcaaaatcacacaaggaataacttgaatcaaccaaagaagatatcatcaccatacaaattactaggaacttcgaaaatatgtataaactactgttggacaccttaagggtacccatcattttttttgtttttcactcttgatcaagtgcttccagaggctaatgctgttaaaggtagcaatgagagatccgtattatatgaactgcatgcatattctgaagataaggccaagcactgaatcagttgttctaaagttgactagt

SEQ ID NO: 51032 - protein, 53 aa, Glycine max
  peptide (1)..(53): Ceres Seq. ID no. 12583470
NLNLYMIFVFHQIVMLPTSTMFLFKLLHTSMKVTPQKSKTLFNNMMAEHFKIV

SEQ ID NO: 51033 - protein, 48 aa, Glycine max
  peptide (1)..(48): Ceres Seq. ID no. 12583471
MIFVFHQIVMLPTSTMFLFKLLHTSMKVTPQKSKTLFNNMMAEHFKIV

SEQ ID NO: 51034 - protein, 41 aa, Glycine max
  peptide (1)..(41): Ceres Seq. ID no. 12583472
LELVYDFCFSSNCNATNKYHVFVQTITHKHESDTPKIKNII

SEQ ID NO: 51035 - DNA, 1358 bp, Glycine max
  misc_feature (1)..(1358): Ceres Seq. ID no. 14312136
aacaacgactctctcctcttccgctccttcgtctaccatttcttgtctcgcagagacgcttccaccaatgtctaccatctcaacttcaagtgccaagacaaaaaacttgatcttgccaaaaccatcgattccatcattgactatgttaccctcacaccaccaatctccgccgccattcaggttcttagcatcttggcaccaccaaacaacaccatcgtaggaaatttttctcaactctcccattgtcaatccctcaccaccctcaacctttctgacatatccactgacatcacatcctttcgtttggtttctcttcaaaaattagacctttatgattgtgttttcgagtgtgggctggaggagtttcttaatccttttaggggctgcgttaatttgactactttgtctctgtttggttgtcagtactgcggtggcaaactcaagaggttcacaatttttgcccccagcttacgaacttgaatatttcgctcatggaagttgatgaagtgtattttgactgtgccattgagctttttacgccaaagttccaatcttttacgtacagtgtttgtgacctgtatggttttttcatcaagtctaatcttccctttgtggagacagtgcatattgatgttctgggttgcaccaatgatcctaatttgcaactaaagttgattcaaatgtttgaagtgatggggagtgctgagtttgttgccttgtcaactggtatcgttgaagttctatctatgtttcctgatctactggatagtcggccttcccccttcactaaggtgcagacttttgagttaaacagggaaatacctgcttcctccgttgatatgcctgctaatgtcatggcctacttatttggcaaatctccaggatttgatttctatgaatgtcgatgggaaggtgcaaaatggtcaaaacaatctgattgaagatggtttcttgctaactttcaaggttttacatttttgggggattaaaagttgtttttcttggacctaaacaaaaaagaacccgtgctcttttgcagaggaataggggtcttgctgatacgtttgctaaatatgcaattaagaggtgttgacttattgttcatagtctgcgacatatttgctactaatggttattgactattttgtgatcttttaggctcttctgttgtgaatagcctattaaagggagcttttctgctccctaatattgaaaattgcttgttacataggcaatctcaattagctaaaaattcgcagtgagctacaaatcaatttgttaaaaaaaaaaaaaaaaaaaaaaaaaaaaaaaaaaaaaaaaaaaaaaaaaaaaaaaaaaaaaaaaaaaaaaaaaaaagg

SEQ ID NO: 51036 - protein, 159 aa, Glycine max
  peptide (1)..(159): Ceres Seq. ID no. 14312137
NNDSLLFRSFVYHFLSRRDASTNVYHLNFKCQDKKLDLAKTIDSIIDYVTLTPPISAAIQVLSILAPPNNTIVGNFSQLSHCQSLTTLNLSDISTDITSFRLVSLQKLDLYDCVFECGLEEFLNPFRGCVNLTTLSLFGCQYCGGKLKRFTIFAPSLRT

SEQ ID NO: 51037 - protein, 149 aa, Glycine max
  peptide (1)..(149): Ceres Seq. ID no. 14312138
MEVDEVYFDCAIELFTPKFQSFTYSVCDLYGFFIKSNLPFVETVHIDVLGCTNDPNLQLKLIQMFEVMGSAEFVALSTGIVEVLSMFPDLLDSRPSPFTKVQTFELNREIPASSVDMPANVMAYLFGKSPGFDFYECRWEGAKWSKQSD

SEQ ID NO: 51038 - protein, 86 aa, Glycine max
  peptide (1)..(86): Ceres Seq. ID no. 14312139
MFEVMGSAEFVALSTGIVEVLSMFPDLLDSRPSPFTKVQTFELNREIPASSVDMPANVMAYLFGKSPGFDFYECRWEGAKWSKQSD

SEQ ID NO: 51039 - DNA, 1369 bp, Glycine max
  misc_feature (1)..(1369): Ceres Seq. ID no. 14314359
acactttccatgtacacatcagagaatctgcaccctttctccacttggaagattgaagcctcaggctcataggagaaggccaagcagtgcagaagccacaccctcttcgccatttcggcgaatgaggtgaagaatgcagtgtctggaaaccctccaccagtattcacaaggttcctctgactcaggttaccaaaaaacgatgactccatcttgggatgaacaagtcccaaatacttgacccggcaatacttggcgaacgatgatcgtggcctctcggctaggtagtcctttgccttcattgatttcagctcattgaacttcccaaagaaccactgttgtctcctgtttttttctagaggagactcacttgaaagggagaagttagggatgtggaatgcatcaaacatttccctgcaaacaaaggcctccattgcgaaacacttgtgatcttctgccatataaaccacattctgttcgatggcgtcgactgcagcatcaatgtcccaacctgcagatctcatctcatccacaaccagcctcacaaagttgcgaatggaccggactgcatggcgaaggaccatgatgaaatggctaggacttaatccagttatgtgaagattatcaagcactgatagctggccactttgattcaatctcttctcaattgccttgttgtgcatattagcttcctctaacttctccctaaggaaaataatctcagaatccttgagcctcacctgtgactccaacttcctccccatgatctcataggttttgatcacaccctgcagctccttggattcggctgcaagaatctccttctcgggcaaaggatcaaactgtttcttcaagtaacattgctttagctcagacaagttcttcaactcagacactagcaattgatcagcagcttcaattccatcagggtcaaaaggtgactgagcatgctgcaactcagcatatgcagctttaacagttgaaatgctagcaaaaagctttgccaaaagagcttcattggccactctctcttgaagctcttcatcatcatcttcattaaaagactcggaccaattcagtgtagtcttgctcttagcgatttttccttcgtccttgagatttgcatcagatataacattcttcagaccatcaactgaagcaattccaataagtgctttgacatgaagaaccttcgcaaaactgcgcgccaacttctttcgcggggtcacggccgacggcttcactgattccatctgcacaagcagcagccaccaccaaagtttccaaatacagatcagaattgtgattattgaaatgtatatatgtatatgtatatgtataagtatatgcaagtagcagtatctttaaaaag

SEQ ID NO: 51040 - protein, 62 aa, Glycine max
  peptide (1)..(62): Ceres Seq. ID no. 14314360
MHQTFPCKQRPPLRNTCDLLPYKPHSVRWRRLQHQCPNLQISSHPQPASQSCEWTGLHGEGP

SEQ ID NO: 51041 - protein, 45 aa, Glycine max
  peptide (1)..(45): Ceres Seq. ID no. 14314361
MASTAASMSQPADLISSTTSLTKLRMDRTAWRRTMMKWLGLNPVM

SEQ ID NO: 51042 - protein, 42 aa, Glycine max
  peptide (1)..(42): Ceres Seq. ID no. 14314362
HFPCTHQRICTLSPLGRLKPQAHRRRPSSAEATPSSPFRRMR

SEQ ID NO: 51043 - DNA, 658 bp, Glycine max
  misc_feature (1)..(658): Ceres Seq. ID no. 12583631
atcttctcacttccaaatatatttcatttgagtatatctgttatagtttattactactgaaagatggattcgaagaggaagatagcattacttatcttcggtctgctggccatgctccttttcatctcctcagaggtggcagccagagaactgaaagaggtcactggtgctggcttgtctggtggccgtggcgtaaactttggtggctttggtggcattggtggtggccctggcttccgctttggcttcaataatggcttccccttcttcttccctggattccccagcttccgtggattccccggaagctggggaatccagggaaagaagaagccaaagtagaggaagcaacaacaccagcaactactgaagacaccaacaaggttgttccagaggttaagattaatgaatacttctataacccaccaaggtatggcatggaggtgtatgcatatcctgcacaccctgcgtatttccattcctaccctccccagatgttcagcgatgagaacccaaatgcctgcactgtcatgtagtcaaaattgagggtgtcagggtgatatgggaattggggaaaaattgtgaagtttggtgggtgacatgaaatgatgcccattcctgtgttacctgtactgtgaaagtacaatgtatgcataag

SEQ ID NO: 51044 - protein, 92 aa, Glycine max
  peptide (1)..(92): Ceres Seq. ID no. 12583632
MDSKRKIALLIFGLLAMLLFISSEVAARELKEVTGAGLSGGRGVNFGGFGGIGGGPGFRFGFNNGFPFFFPGFPSFRGFPGSWGIQGKKKPK

SEQ ID NO: 51045 - protein, 83 aa, Glycine max
  peptide (1)..(83): Ceres Seq. ID no. 12583633
LLTSKYISFEYICYSLLLLKDGFEEEDSITYLRSAGHAPFHLLRGGSQRTERGHWCWLVWWPWRKLWWLWWHWWWPWLPLWLQ

SEQ ID NO: 51046 - protein, 76 aa, Glycine max
  peptide (1)..(76): Ceres Seq. ID no. 12583634
MLLFISSEVAARELKEVTGAGLSGGRGVNFGGFGGIGGGPGFRFGFNNGFPFFFPGFPSFRGFPGSWGIQGKKKPK

SEQ ID NO: 51047 - DNA, 936 bp, Glycine max
  misc_feature (1)..(936): Ceres Seq. ID no. 13581663
aaattcgttctaacattaaagaaaatcaattacaaaataatgaatagaattgaacctacctaactaacaaaattgatcaacaacaatcaattattcatcgatcagtgtggcaacaaaaaacaaaaaattactcaaaaaataatcccatgatgctttttccctcagatcatagccaaagccacccaaagtgccacgccacccaacaccatcggagccccgaaattggaacttgaacccgaatcatcaccaaccgaaccctgtgaactttccggcgaagaactcgccggcgcagttcccggcgaggcactggtggatggtagtgtgattggtgaacctgccggcacggccgatgaaggaattccggtagaagattccggcgtaggcgcctctgccactggcggagccccgactggagaactcaccggagccaccgtcggcggaggagtcgctggggacggagccggcggcgaagaaacattgttggatgggctggaagccggaggaaccgacgatgggggctgagtggccggagacttcgccggagggttagtcgccggcggcggggtggaaccagatggagaaaccgccggagattgtgaaggcggtgataaagttggagactttgcaggaggcgccggatgggtcgccggagagggtggtttggcggtcggcggagagggggatgacttgggtgaaggggcaggagcattgtctgcgcgaaccgaacacaaagatgtgaagaacaatgcgaatacaaagagtggaagaaacttattattcatcatcgtcattatgagtttgcggtttttgatgatgattcggagaagtacgaggaagtggtgaagtgaagattaaaccaacaccaaacaaatgttaaaaagtgtttgtgatgtttgaaagtggaaagtgttattcgattaggatgtgtttaaacac

SEQ ID NO: 51048 - protein, 54 aa, Glycine max
  peptide (1)..(54): Ceres Seq. ID no. 13581664
MEKPPEIVKAVIKLETLQEAPDGSPERVVWRSAERGMTWVKGQEHCLREPNTKM

SEQ ID NO: 51049 - DNA, 1063 bp, Glycine max
  misc_feature (1)..(1063): Ceres Seq. ID no. 13494980
attattctgtttgtttttttcaaagcaacgcatagtcacatagtacactctggtctgaactctgaatctttctggtgtcgtgtcccatttgaattgaattgcatcttgaaagatggcggaggaggagaagccaaatggagaagaacaagtgaaggacaacaacaacaacaacttatacgacgccgttcagcgtctgatcttggagccttccaagatcaaggcctctctcatccctctcttccccgaagcttctagaacctactctcgccaactccctccactggtcccgtcaaggttctcccctccgacgcatcctcttcatctccattgggatagnngcacttgttgctctctcaggacttgttgcttttacgctcttttttctggctgctactgtaaatgccattttcgtctcccttctcatttctttggctgtggctggaggcttcttggttctgttctttgcttttgtgacagctatatatattggagcactatcactggccatctttgctatttccaccgtcactttttgggctgttgtggctattatcattactgctggatgggttggattcctttataccgtgtggctggtaactagcaagagccttggattggcaaagcaatctttgagtgtgactggctctgcaattactacttactcagctgcttggggtacccgtaacattgcagacaaaaattcaatttaggtgccggtcacatatagaaggttgtgcacaaatcttacacaaacatgttttttggatggcaaaagcttcttctgttgactggtagagtctcatatccttcatcttgctcatggtttggtttcagtggctttcaatagcatgcttgtattatgttaataaaatgccacagtttggtttcatgtgttttagtcggagtagtgttgataaaattcctggttgtatgtattgtgcttcaaatttcaatttttaagttggaaaaacaagtgcttttactttatttacctatgttgccacctggtattgtacaacttgtagacttgatgaaattggactgctgtgttaaatgatgc

SEQ ID NO: 51050 - protein, 163 aa, Glycine max
  peptide (1)..(163): Ceres Seq. ID no. 13494981
  misc_feature (75)..(75): Xaa is any aa, unknown or other
  misc_feature (76)..(76): Xaa is any aa, unknown or other
MAEEEKPNGEEQVKDNNNNNLYDAVQRLILEPSKIKASLIPLFPEASRTYSRQLPPLVPSRFSPPTHPLHLHWDXXTCCSLRTCCFYALFSGCYCKCHFRLPSHFFGCGWRLLGSVLCFCDSYIYWSTITGHLCYFHRHFLGCCGYYHYCWMGWIPLYRVAGN

SEQ ID NO: 51051 - protein, 84 aa, Glycine max
  peptide (1)..(84): Ceres Seq. ID no. 13494982
IILFVFFKATHSHIVHSGLNSESFWCRVPFELNCILKDGGGGEAKWRRTSEGQQQQQLIRRRSASDLGAFQDQGLSHPSLPRSF

SEQ ID NO: 51052 - DNA, 844 bp, Glycine max
  misc_feature (1)..(844): Ceres Seq. ID no. 13595749
cagattaatcatttgtttcaaattccaattctgcatgtatatttgcattaaatacaagagtttttctgcccttaataatctcaatggactcaaataaatacgatcgtctcttgtaaaaaaaaaaagaagaagaagaagctagaactggaagtcaattctaaggggtggttcctgaatcaaaatcttagggaaggaagattcaaccttgagagaagctctgcagagagggcaactagagtgatgagtgagccacttatcaacacaatcacagtgaaaataatggtcacacgccggcaaaaccttaactttctcaccgtctctgaactcgccgagacagatgcagcactccgtttcgtcccacgcgctttcgtcgcggtctgcaggcgcgtggtggaggattatgggaagtttcttaatggaggcggggtccagtccctgaggcggcgctagcggcggcgcgtggacggctgcggcggagaacgcggtggtggggagtcgtccctggtagcggcaaacccagcgcgtgtagatgaagagaacggtgacaagaagaataatggagaagagtacgatgacgaaaaacagtgtcctacctcggatctctaggtctctgtcatcgagttccgtgtagtgccaattgaatgatcgagtgtctgggttcgacatcgtgatttgattccaaggtatgagaagggagagctaagacggcggcgggtggcggcggaggaaggctgcgacgttggggcatcagaaacaaaaacagtatcatgagacactgtttggttctgttgctattagtaggcactggcaaaatgaggagtgattttcgattaggatgttctag

SEQ ID NO: 51053 - protein, 69 aa, Glycine max
  peptide (1)..(69): Ceres Seq. ID no. 13595750
MSEPLINTITVKIMVTRRQNLNFLTVSELAETDAALRFVPRAFVAVCRRVVEDYGKFLNGGGVQSLRRR

SEQ ID NO: 51054 - protein, 56 aa, Glycine max
  peptide (1)..(56): Ceres Seq. ID no. 13595751
MVTRRQNLNFLTVSELAETDAALRFVPRAFVAVCRRVVEDYGKFLNGGGVQSLRRR

SEQ ID NO: 51055 - DNA, 513 bp, Glycine max
  misc_feature (1)..(513): Ceres Seq. ID no. 13581749
tctgattaattgatttgatattttaattgtttgtgatgggtatttcagggagtttgtgaactgtgtccgctgtattaaaatactttctcctcaagaagtgcagcagatgagcttggacggagattttggcaatggtggccttcaaaatcaagcctgtagcagctctgacggtggcaatacttaaatgaagttcagtaatacgctaactattcttccgtattgttaacttagattatttctgggagatgcattattgtcctaattccgaaaggcaattattatgccactgggaacttctgtgcccaccatcaggacttgaaaggagaagttttgtctatgttccggacatgcaaatttgaagagccaaatgagggcggagaagtgagctgctgctctggtttaacattgagcggtaattttgaatgtataaagtcttaggcagctagattttgcggaagctttcatgatcttccatccttggaggcaccttattattttttagccaatatgact

SEQ ID NO: 51056 - protein, 37 aa, Glycine max
  peptide (1)..(37): Ceres Seq. ID no. 13581750
MHYCPNSERQLLCHWELLCPPSGLERRSFVYVPDMQI

SEQ ID NO: 51057 - protein, 33 aa, Glycine max
  peptide (1)..(33): Ceres Seq. ID no. 13581751
MFRTCKFEEPNEGGEVSCCSGLTLSGNFECIKS

SEQ ID NO: 51058 - DNA, 761 bp, Glycine max
  misc_feature (1)..(761): Ceres Seq. ID no. 13594416
gccaaagatgaaagtacttcaactatttaaccttaacttcaacacattaatcactcgtgttcaattacttgattttcaatcaatttaaataaaagcttgtagatccatcgagtttacatggatatcagctttttaaactgatgagtgatgaggattcggccggacaacatccttttcttttccttctaattcaagaccctagaatatcgctccccgtccccccctgtaagggggagatatgggaattgaagaattgatcagcagtgatgtaatcctgggtgagcttagagcagacatcagaagcagccaaacagggccttatcttctgccaactcccggaaccggtgacgtggttcctcaaccaggaggagaagccgtgaagcctgtactccttgtagcctcttccggggacatcataggctccatcgggtctggtgacgacgaatgcgaagacgagaacgaggaggaggagggcgatgaggagagccatacagaagaggtagagggcgaggagaccctgtttgttccagtaggcaccgacaaaaccggccagggaaacgaggaggatgaggatgccgatgatgacaatgggccaccggaagttggccacgcactcgttgtcgggcttcgatgccagccaaatgccggaggctatgatcgggattgaggccagcgtagctatcaagttcagcactgcggtgatgttgttgcttacccccatccccaaccccaaccccaaccccaatattacttcctagatt

SEQ ID NO: 51059 - protein, 142 aa, Glycine max
  peptide (1)..(142): Ceres Seq. ID no. 13594417
MGIEELISSDVILGELRADIRSSQTGPYLLPTPGTGDVVPQPGGEAVKPVLLVASSGDIIGSIGSGDDECEDENEEEEGDEESHTEEVEGEETLFVPVGTDKTGQGNEEDEDADDDNGPPEVGHALVVGLRCQPNAGGYDRD

SEQ ID NO: 51060 - DNA, 1160 bp, Glycine max
  misc_feature (1)..(1160): Ceres Seq. ID no. 13594390
caagagaaaagtagaaagttaatatcaagtcatcctcaaaatatgtacacatcatcactctaggagtaatgctacatatacaatacatagatttacaattagtcacaacaggtgtctgctaaaaaagagcaactactagttcttactaaatatatattcttctgttctatgaaaactaatatacagacacctataaaattgtaaccagttgaaattctaagcattgttcaaataacataactcttattcaactatgtgtaagcaaagctcctttggtttgtgagatattcatattccccaagctaacagcaacacagtggattcaatattcggcttcatggttaatgtaatgaaagtggttatgaagccacagctacttcaattcctccttcgttgattggcataaaactcaccctttgtactctccttaacactttgttggtccaacaccaccatcttttcaccattttccttagttccaccctcattttctctgcttccattggccttataaaggttcatgatcctctcagcagcctcagcctcatccttgcaaccttgaatcaatttctccacttctgcttttggaagcctcattttcaacctcacaccaccaccattattactattctccttattatcggtgttgctgctttgtttcatgattgaaagatcagaggcagaccttctagtgagcacaaggctctctaggcgatccttggcactcatgttgatgccggaacgaacccttcgcggcgtcgtctccttcggaagctccacaagaaaatacagcctcttaggctgcaaatccttgtgtgcttccaatggctttgctctcacgccatagtgtttaaccgcctcagaatctagcaaaacaagaccagggtgatccttaagcacttccccaactttcactggtgtcttcaatttgaatgtctcaccatcaattttcataacctttgtggttttcttcgcaccaaatgtgttacccattatagctagcaccccaattgaacaaaatttctctttggccttttagttttgtgaggttgaggcactatagggtatagagaatcaatgtcactttgtgataaaatgaaacagattttaattattcctcacaaaaaaccaaaggggtaatgctcacacacttgaaaaat

SEQ ID NO: 51061 - protein, 61 aa, Glycine max
  peptide (1)..(61): Ceres Seq. ID no. 13594391
MIERSEADLLVSTRLSRRSLALMLMPERTLRGVVSFGSSTRKYSLLGCKSLCASNGFALTP

SEQ ID NO: 51062 - protein, 39 aa, Glycine max
  peptide (1)..(39): Ceres Seq. ID no. 13594392
MLMPERTLRGVVSFGSSTRKYSLLGCKSLCASNGFALTP

SEQ ID NO: 51063 - protein, 37 aa, Glycine max
  peptide (1)..(37): Ceres Seq. ID no. 13594393
MPERTLRGVVSFGSSTRKYSLLGCKSLCASNGFALTP

SEQ ID NO: 51064 - DNA, 1027 bp, Glycine max
  misc_feature (1)..(1027): Ceres Seq. ID no. 12582601
ctaataccatattagattcattgataacataaaattgtatccaacaaatatataaattacattgcactccaagaaaaaacaaccaatatagaacttgaatatttccaacatactagtaacatggaaaaaagaatttaagagtgatatgatgacacaataaatgatcaatgaaacaaggagaaactaacgtgatataattatataaaattgtacataggaagtgataatgtgaatgtgacacggtaataaaattaggtggaaaaaataaatgagaagtattgatgtaacaaagggtagcaataataataataataatagcagtaggaaagtgaaagggagaattttaaatgtcacggtctggtttgcactcaggggagagttgagggtagcgttttctgtcagtgcagtagttgtagatggtgtatttctggcgcacccatctgaggctacgccactgggaagcgtcgaggtcacggaattctggttggtcccaccagctcttgccctgcgtgtcgcagaacttggcgttcaccgaggcctcgcacccgtcgatgtggaaccccttgtaggctgctatgaatggggctttggaccaatccgttttctccaaaccaccccttgtggcccagtcatcagcgttccatagactgttgtagatcttcattggctggtcgaaggggaatttcactcccaagtccttgctgttcttgaacaccctgattgccacatcgtccacaaagaacctgtacacccccaacttttcaatctttctcactcaacatgtcaaaagtttttaatgtttttctattttgagacccaaatatttaaacccataatccttttcttttccgttcacccttatggtatattggtttgtaaagaaaaaaacaattaaaatataaaattcatattttatattttactttgaattttaatttattttcttttcattctaccaaaataatccttttaagtccctcggcatgccgactacatatctccaagtttttttttcgattaagatgtt

SEQ ID NO: 51065 - protein, 125 aa, Glycine max
  peptide (1)..(125): Ceres Seq. ID no. 12582602
MRSIDVTKGSNNNNNNSSRKVKGRILNVTVWFALRGELRVAFSVSAVVVDGVFLAHPSEATPLGSVEVTEFWLVPPALALRVAELGVHRGLAPVDVEPLVGCYEWGFGPIRFLQTTPCGPVISVP

SEQ ID NO: 51066 - DNA, 1664 bp, Glycine max
  misc_feature (1)..(1664): Ceres Seq. ID no. 13581775
gaaaatcaccactagaaggatgttatatactcgatgataataaagtcaatatgctataaatctgacaaaaaaatctctccacccaagaaaataaaactcaaaatgcaggcacaaaaagtgaaagcgacccaaatcaaagtccaattttgcattgaaatagacaaattggctgttaggataattgcaagaaaaaaccgtcaaagattacattacatttgaaggcttgacctttccaccatagacatctggtaagagaggcaaatctttctgaaaactgaccacaaaattctctagaaattttttctcagttatgcaaataatggcacttaagtgcaatttgttctcaatcagaccttttgatttcaagattttgattaccgagaatctagggataatcctcttctccaagttgtacgctatcacctgaggatattcagcaatatcttctgataaccaacccatatctttaactaggaaactcatttttttggcaaacgtctcctctgacaacttcataacacagggaaactttcgaaatacttgaagagccatttcgcgattccaaccccacctctcataaacctcaaaccttgattcccatacggctttgctcctaattagaagcatttcaacggccacaataaaatttgttctcaagggattaagcccaatttccttagcagtgttgacagcttccacaaatctggaatgcttccagtaggctacagtcgcagaattgatcatcaggaaagtgatagaagcttgcggcacaccagactgcctcaaaacctcaatgtttggaaccaagttcattgtgtcaccatatgtaaaaccaaatcgggaatttgttatagctctaacaacttcctgatcatcaccaagtacacgtctgaggatctcataacgtgggatgaagaattttttcaagctcctgttcaaggtatggttagcaattaaaatcttacgcatatcagtgttggaaagcccaatagaacggaagaacttgagtttaggcaaaagggtattctctgcatccgcaacaagcaccaaagggtgtttctccacaagttttgcaagatgggttttggtgaagccatagttgttgagaagatcaataacagcatttgggccatctggggttttcaaattgatcctattggagagttccttggcttttcttggggacaccccacatgagttgatgagataagacacagtaaaagtgtcacctttgtggtagtttccatctgattcagaatcagaagaggtgccagaagagaatgaattgaagaaaaaaaggaaagcattgtgtttgtgttgaagcagagaacccaattgggtttgggtactcctgtggtgtgtgaacgatgataatgatgcagttaaccttgcaatgagaaaattaggaaccatttattcactcacagatttcagtgaacgttgtcagatttggcataacaacactgaagttaacctattgccacaaagacaggtaactgggttttggaatatccgtggttgtggagaagaccaaggacaacatctgccgtgtctactgtctaggtttctcagataaacccttttgattttgtagaggaacaagggcatgcgtattccctactactatttacctccactacggatggcaatcgagttggtcaggt

SEQ ID NO: 51067 - protein, 82 aa, Glycine max
  peptide (1)..(82): Ceres Seq. ID no. 13581776
MLPVGYSRRIDHQESDRSLRHTRLPQNLNVWNQVHCVTICKTKSGICYSSNNFLIITKYTSEDLITWDEEFFQAPVQGMVSN

SEQ ID NO: 51068 - protein, 62 aa, Glycine max
  peptide (1)..(62): Ceres Seq. ID no. 13581777
MKNFFKLLFKVWLAIKILRISVLESPIERKNLSLGKRVFSASATSTKGCFSTSFARWVLVKP

SEQ ID NO: 51069 - protein, 61 aa, Glycine max
  peptide (1)..(61): Ceres Seq. ID no. 13581778
MIIKSICYKSDKKISPPKKIKLKMQAQKVKATQIKVQFCIEIDKLAVRIIARKNRQRLHYI

SEQ ID NO: 51070 - DNA, 1126 bp, Glycine max
  misc_feature (1)..(1126): Ceres Seq. ID no. 12582657
acataaacccacattccgaagttcataaaactacaaaatcaagtcgtatacagatataaataaccagcacaaaaataaaacctacaatatccataaagtaaacttaaaggtaaagaaccacaaaatttaaccaaatcatattgagaatgtccctctaatcgaacaagccaaatcccatatcatcatcactctcttcttcaggttcctccttctttttctcctcagcagctggggcggcagcagcaccaccaccaccaccagaggcagcaacaggggcagctgctgcaacagcaactggtgcaccaccgcctgctgcattggctatcaaatcgccaagatttttcttctcagcaagtttagcaaataaggttggccaataagtatctacttgaacctttgcagttttcaacaaggtgctgatcttgtcggcctatttacaatttaaggagcaactcgccatatccaaacaaattcatttattctaaaccttaaaacccactatttctctcccaggaaaaccaaaaaaacccagttaaaaaacacgtattagcttagacccacttttacaaacaaaatgttatcaaaatcatccgacccacttccaccaaatatgcacgtttcatctttttttaaccacaattacccagcactacacttgattcaatatgtaatccatcaatagaaaatataatccgaaagcctgaaacaaataaatgcaaccccacattgctcagtatttaatttgtttacaaatgaatctcaacaagaaaatacaggttaaattggaaccacattttcaataaaaattacttcacagaaacttttttttagttttgatttaataccaattactcggttcttcaattgaattaaatctaaactaacactagaaaacataacccaaaacaaagaaattaaattatttcgaacattcactcacaattcgttaacgcaaaacctaagggcacacaaaaggatacagttacactgattccatcttcatgaaggatgagagctgcgtatgaacaagcagtttctccgagcgacatttttacaattcagagaaggcggatcttagacaaacgaagaatgatgagtgcttctctgctgcagccgcaagtgaatt

SEQ ID NO: 51071 - protein, 39 aa, Glycine max
  peptide (1)..(39): Ceres Seq. ID no. 12582658
MRAAYEQAVSPSDIFTIQRRRILDKRRMMSASLLQPQVN

SEQ ID NO: 51072 - protein, 35 aa, Glycine max
  peptide (1)..(35): Ceres Seq. ID no. 12582659
MLSKSSDPLPPNMHVSSFFNHNYPALHLIQYVIHQ

SEQ ID NO: 51073 - DNA, 1707 bp, Glycine max
  misc_feature (1)..(1707): Ceres Seq. ID no. 12582068
aagaatcacctccattctacacaaatgaataacaatttcagcaaaataagtttgtgcacatagcaatcatctgccccaatcaataacatctctgcacctcgttgtaaacaaatttctatcacagtagaatgtaaaaaccatcagtattgccactccttagagacaacaaaaaaacagtcacggtaatatttactccttcaatgttgtggttggtgaaacacattggaaataacctaattgcattatatcctactaaaattggactgttgacctcacaataacctgctgagggacttgataagtaatttcaaactctttcttgtagcttcatcgccagtgaaacccaaaatatccgagctaacattctcaatgttcttcagggtaaaaataagagtatatatggacttttggagcagttcagtgttctcaggggtcattatggatgagtgtacccttctcaaatcctcagttgcttgtgtaaggcttcgggttaaattctcaacttccttcaacaggccactatcacggacttcagtcaacaaaggttgaacatcttcagccatggctttcatctttataagaagtggtttcgcttctttgataattgaagcagctcgttcagccaacgaatagctattaacaatgccaattttctctacatcttgcccaagacgggtaaatatcccaaccaatttatccaaactcactccttctatacccttaatcttttctctatcacacacaatgagtgcttctttagaacattcttggtcaagaggtccagccgaaggtgttggaataggatcacgaggagtaatgtcgattatagtttccataagaagacctgactggtttacttcaaccaatgaatttcgcggtatgattgttttatcgtcttcaatctcaacaatagcttcaatacttcttaaggaaggattcacacgaatgacatcacctacagtcacccctctgatcctcacaggagttccagtgcaaataccgcaagcctgatcaaactcaaatgttgctgtgtacttcctgaatttggatcgcatttggaaacccttcaaccaggccaaactaagcgcaaatagaaccgcacttgaaactaaaaacaatcctaccccaccttcccatatgctcctaccaccaaacccaaaatcacttaatggacgcattgttttcttccaaatggtacgaggaatgtccaaaacaaccgcaagaggattttttgatcccaaagctggcgatgactcaataggccctccatctgcagcagatgtagctcttatccagttgatttttcttagggctctaaatggaaggcagggcatacactttacagaacttccatgtagagtaatcagagatgaagataaagcacttggcaatgttgaagcatgcaatgaagggttagtaatcatctttgagcaaacaccgtaactcccaaatactaatatctcccaatgatgaactggaaatgaatcaaaacagcaaagactacagcagcaaaaatttcccaataactgaaacgagggaagagaagtgattaatgcttcatacttttcatttccatctagccaaagaagacagagagagaataatatgtgaaagagggtttaggctatagagatccgtgtgcaatagcaggagccattggacggtgagtgagtcagaaatcagaaggggggggggcctacgtagctg

SEQ ID NO: 51074 - protein, 122 aa, Glycine max
  peptide (1)..(122): Ceres Seq. ID no. 12582069
MPIFSTSCPRRVNIPTNLSKLTPSIPLIFSLSHTMSASLEHSWSRGPAEGVGIGSRGVMSIIVSIRRPDWFTSTNEFRGMIVLSSSISTIASILLKEGFTRMTSPTVTPLILTGVPVQIPQA

SEQ ID NO: 51075 - protein, 101 aa, Glycine max
  peptide (1)..(101): Ceres Seq. ID no. 12582070
MLLPPNPKSLNGRIVFFQMVRGMSKTTARGFFDPKAGDDSIGPPSAADVALIQLIFLRALNGRQGIHFTELPCRVIRDEDKALGNVEACNEGLVIIFEQTP

SEQ ID NO: 51076 - protein, 88 aa, Glycine max
  peptide (1)..(88): Ceres Seq. ID no. 12582071
MSASLEHSWSRGPAEGVGIGSRGVMSIIVSIRRPDWFTSTNEFRGMIVLSSSISTIASILLKEGFTRMTSPTVTPLILTGVPVQIPQA

SEQ ID NO: 51077 - DNA, 797 bp, Glycine max
  misc_feature (1)..(797): Ceres Seq. ID no. 12582387
gcaaatatatgatgaatatattttttaattctgctgctacaaagggcaatctcatagaagtattaaatgaagaaaggaaacaaaatgtgtattttcagagcagtatcaatggccttattccaatgattactgcaacaaactcaaaaattctaccaaacatttggttgctgtgtgacacaaaatcccaggtaactagagatattactctgaacggcctgccttgccctcctcatttttattcatggccttctttgccaactcatagcctgcaaagttcatagcacctagaggagcaatccaaaagaacctgggtactgctcctttgaacaagccaaggggtccctcatgttttagtatagagaaggctatcaaagtcatcgacacagatcggccctgtgcagtcatcattctagttttcatgacatcgaacggcgttgtaacaacagccgccaagccaccagataaagctccaacagcaattgtttccaagggaccgagttcccgctctagtagtcgttcggcaacctaaaatcaaatgccatgacaattaaccatttcagtgtggcattaaaggagactcactggtagccaagcaaacatactatgccaaggtgtacatacaatttacgagtgagttattccctgttagttgttgtgtatatcacatacatcagagtatcaattcagatttcagaaagcatttgtcacacaattttaaagagcaatatcccatggcctaaagttagctagatttattacaactcatttcatattgggggggggggcctacgtagctg

SEQ ID NO: 51078 - protein, 92 aa, Glycine max
  peptide (1)..(92): Ceres Seq. ID no. 12582388
KYMMNIFFNSAATKGNLIEVLNEERKQNVYFQSSINGLIPMITATNSKILPNIWLLCDTKSQVTRDITLNGLPCPPHFYSWPSLPTHSLQSS

SEQ ID NO: 51079 - protein, 90 aa, Glycine max
  peptide (1)..(90): Ceres Seq. ID no. 12582389
MMNIFFNSAATKGNLIEVLNEERKQNVYFQSSINGLIPMITATNSKILPNIWLLCDTKSQVTRDITLNGLPCPPHFYSWPSLPTHSLQSS

SEQ ID NO: 51080 - protein, 89 aa, Glycine max
  peptide (1)..(89): Ceres Seq. ID no. 12582390
MNIFFNSAATKGNLIEVLNEERKQNVYFQSSINGLIPMITATNSKILPNIWLLCDTKSQVTRDITLNGLPCPPHFYSWPSLPTHSLQSS

SEQ ID NO: 51081 - DNA, 1352 bp, Glycine max
  misc_feature (1)..(1352): Ceres Seq. ID no. 14308128
ttcaaacgcctctgtactcttcccaccagtccaatgtaataaaattttgtgcatactctaaaatctaaaacaccatgatggggattacagatatttcatgtccacacttcctttctcatggaaggcattactcttctgttttcttctcataaattgcagtgtgcttcaacactctcaaacaaactttttcaatgtaccaaatgtggagtgaaaactgatatcggttgaagcaaatatagctggatgatgaccaagctgggcagtgtcacaacaactcttaattaggaataggatgaggagcctcaatggggaatgcatgctgtatgtgagagaaaagagatggttgaagttacagaaaatttaaatttgaaaaaaaatgaaaaggcagttttatcaattaatcagttatttaactgagtatgacggatttttgtctgaaagaaaaatgaggaggatgctaacccatatgtgtgtgttcagataccgtaattttgcttcataattcattattgattcaagtgttcatgtacaagttgcatgctaattaatctgtatgttacagttttgtatgataataacaattttttacatttagttgctttgatgttggtctctgtttaacatttttttgtatgtttccgtgattagtgctcaaagcacggctaagattgaggaactgcttctagaagatcaaaatgttaagcgcagaagggatcgaatccagaaacaatcatcccttctctcgaaattgacacgccaattgagtattcatgacacccgagcagcagctgcctctggctggtcaaacggtagtgcagagagtagcccaagaagcagcagcggacctggtgatgactggagatctgcctttgatgcagctgccaatggccctgttagtcgaagtggttcatcaagatcgggatccaatggtcacagtcgacattctagtgatgctgcccaaaatggtgatgtgaactctgggtcaaactccagcagccgtcgaacgcctaatcggttgcctcctgctcctccgggttcttcaggttacaaatattaacaggtggctgactagtgattgcttgacagttactgtttgatacatttttggagggtgaggctgctcccaccccatttcatacggtcatccccaattctttgtttctgccggtatatttaggtgaggaaatgtttgtgtaaatagaagacgactatagtttattagtataagttttctgggcattcgtctcattatccggaagtttggtatcgaggtggacttgagtacatttatcatgttttgctttttttgtttacgaagcatttatcatgttttgctaaaaaaaaaaaaaaag

SEQ ID NO: 51082 - protein, 67 aa, Glycine max
  peptide (1)..(67): Ceres Seq. ID no. 14308129
MTPEQQLPLAGQTVVQRVAQEAAADLVMTGDLPLMQLPMALLVEVVHQDRDPMVTVDILVMLPKMVM

SEQ ID NO: 51083 - protein, 41 aa, Glycine max
  peptide (1)..(41): Ceres Seq. ID no. 14308130
MKRQFYQLISYLTEYDGFLSERKMRRMLTHMCVFRYRNFAS

SEQ ID NO: 51084 - protein, 40 aa, Glycine max
  peptide (1)..(40): Ceres Seq. ID no. 14308131
MTGDLPLMQLPMALLVEVVHQDRDPMVTVDILVMLPKMVM

SEQ ID NO: 51085 - DNA, 1462 bp, Glycine max
  misc_feature (1)..(1462): Ceres Seq. ID no. 15177384
gaaaaagcaaaagagaaagaatatatttttcaaactaaacaagcaacaatacataagaaaaaaaaaggatttgtgatcttctgtataatttttctgacacacccagataactcatacacaacactcgttacacaattgacccataaataaacctggttccagacagttctatagttcaatttatgctcaatcacaaagaatctttcaatgaagataaaattggacaaaagatattcactttgcaactgcatatatagattacttgtgtgtaagcttaaatgaattaatagtaaaacaagttcttatttattggtatacaaaaagaagcatttgatgaaggcagggcagggaaaaaaaatcaaaagacagaataagccttgatcagccaacaatacatatgaaaaaagaaagatttgttgtcttgacaaaatatgattactgattagacactgacactgcggagcacaaccgtctcaacagtgagtccagggccaaaaccaaagagcacaccccaatcaaggccttcaccagttgtgccaagtccattttctatagacttcttcctcatctgatccaagatgaataacacacatgcacttgacatattaccatactcgctgagcacatgtctagtagcttccattttttcaggcttcaagcctaacttagcctcgacttggtctaaaattgccggtccaccagggtgtgcaatccagaagatagagttgtaatcagagattcccaagggttggaaggcttcaactaaggccttttcgatattcttagagatgagtccaggaacatccttgaggagatggaagtgagtccaacttctcgaaggtggccatcaatagccccttcactgtctggaaggattgtctgtgcagtccaaacaagctgaaacaaagacttttcaactggtaaggggtctgatccaacaatgacagcagctgcaccatctccaaacaaggcttgacccacaaggctatcaagatgggtgtcagttgggccacggaacgtcactgcagtgatctcagaacaaaccacaagcacgcgagcacccttgttgttttcggcgaggtctttggccagacgaagcaccgtgccaccggcaaagcagccttgttggtacatcatgtaacgcttgacggagggacgaaggcccagtagtttagtgagctggtaatcagcaccaggcatgtcgacaccgctggtggtgcaaaaaatgagatgggtaatcttggacttgggttgaccccattccttgattgccttagttgcagcctcttttcccaactttggtacctccacaaccaccatgtcttgccttgcatccaatgaaggtgccatatatgcacaaacactcggattctccttcaggatctcttcatttaagtacatgtatcgcttcttaatcattgacttatcacctgatccaaacaataaattaaatttcattagt

SEQ ID NO: 51086 - protein, 58 aa, Glycine max
  peptide (1)..(58): Ceres Seq. ID no. 15177385
MGVSWATERHCSDLRTNHKHASTLVVFGEVFGQTKHRATGKAALLVHHVTLDGGTKAQ

SEQ ID NO: 51087 - protein, 50 aa, Glycine max
  peptide (1)..(50): Ceres Seq. ID no. 15177386
MNNTHALDILPYSLSTCLVASIFSGFKPNLASTWSKIAGPPGCAIQKIEL

SEQ ID NO: 51088 - protein, 49 aa, Glycine max
  peptide (1)..(49): Ceres Seq. ID no. 15177387
EKAKEKEYIFQTKQATIHKKKKGFVIFCIIFLTHPDNSYTTLVTQLTHK

SEQ ID NO: 51089 - DNA, 1418 bp, Glycine max
  misc_feature (1)..(1418): Ceres Seq. ID no. 12364737
gagcaaaggaatagagaacattttatttctgatgacagaccaaaattacttccaagagagcaataacaattggagggacaaaccagtacataataattaactttgcagcacaaaccacactagctaaggaattatcatgagaagatgaaataaacttaattagggggcacacacatagatagaatacgaaggaaggttattgtagatgatgcattgatcaagtcttggaatcgatggccatgatagtgctgagattcatggggtgcatgtactcagtggtgcctctgaggatctgttggactatgattcgactagctttctctgatggatggaatggatcccaaaacgcgtaaaggtctctgttcggacacaagtttgaggccggtgtgcagagtccaaccccattgtatggcccttgcccacaacaagctatcttcgatgtaacaaatccataagctcgagggttggaaacgaaatccatgtgcatgcgttgggcattagcagcaatgaaaacgtcagcaccaagttcttgatttaatccgtttaacatttgaacgagttggggattgaataaggatgcagctctctgaagttccacgtcgcaatcaccagttctgcttctcgtcgctaattccgcaggaacacaccccattggtcctgtacccgttacaagaaccctacgtgcacccaaatcataaagcctccttagaactttgcggtactcagatatgagatagcgcacatagtcagggagagaaaattggcgagatcttgccgaatagggcaccaagtagtaattgttgacaaaatcattgcctccaagagtgatgaggacgagtgctctgtttactaggttcctggttccctccgcaccaatgtgtaaacttaacctttcctgatactcgtggaatagcttcagttgcttctgaatgtggataatgttcaaaaattgaattccagtatcattgagaatgccaattccagcggaggcaaaattggcaccaattaagagcttctctccaactagtagcgggctcaaatagggtagtgtaggctctaagccaagctccaaactaattaagtcagggatgtttaggccattagagaagcgtccagtgggtctgtgtgttgggtagtcaatgccatagggtggagcgtctgctctggctgtggttaccaagaaatcattgttaccactgtccacgagtgaatcaccaaatacgaagaaagcccttgttggttgagcagaaacagaacctagtgctacaaccaagcttattactaaacaatagccaaacaccaaaacactagtcatggctgcaaaacaggagtgaccactactgttgattgtgtatgaatatgattctcttaggtttgataactcgtggcttcggggggggggggggcctacgtagctg

SEQ ID NO: 51090 - protein, 51 aa, Glycine max
  peptide (1)..(51): Ceres Seq. ID no. 12364738
MQLSEVPRRNHQFCFSSLIPQEHTPLVLYPLQEPYVHPNHKASLELCGTQI

SEQ ID NO: 51091 - protein, 39 aa, Glycine max
  peptide (1)..(39): Ceres Seq. ID no. 12364739
MAMIVLRFMGCMYSVVPLRICWTMIRLAFSDGWNGSQNA

SEQ ID NO: 51092 - protein, 39 aa, Glycine max
  peptide (1)..(39): Ceres Seq. ID no. 12364740
MDGMDPKTRKGLCSDTSLRPVCRVQPHCMALAHNKLSSM

SEQ ID NO: 51093 - DNA, 931 bp, Glycine max
  misc_feature (1)..(931): Ceres Seq. ID no. 13594090
gtcgacggtatcgataagcttttttttttttttttttcgaataaaatacttatttctattagagaaaatataaatataaatacaacacattcctctaaacaaactaataatgttttttgtttggtgcgttgaaaaaaaaacgatacatctttacaatatttttcctaaagaatgtgacttccaccttttaaacttaaacaatgtcataacatggtaacatgcactcacatgtcagttgctttaatggacaccttaaactcatctttgaagaaatattttgaaagaaaaaagttaaacaaattgtctgtaactaagtctgcggtatcgtgttttgttgtttagccctttcagcctcaatcttccgtagcattgatgaactcagcttaatttcacctgattctccagagaccaaatctacaacttcaatcttcaactgtgaaagatctctttcagctcttcttctgtttatagccaatcctcccggtaatgtctctttgcttacaatcacagcctccaagttctcatctgtaatggaagggccaaatggatctgtgattggcacagcttgcacttccaactccggcttgatagactttatgaaagttttgacattatttatcctttcctcaatgggctgtatcagttcagcaaactgtttttttgccagcataggtccatcgcaaactccaattacaatccggcgccttgccaactccgctgaagcggtgaggaagaggcggtggccgtcgtgcaatcggtcgaaggtgccaccattgacgacggcttcgtaggtgttgggcggagagagtttgggaaccaccatcaccatggtgtcatcgtcaccgtgaaccgccattcgatgtgcaggaatgactttcactggtggcagtaggtgtgagatgaaaagaggatcggattcgttgttatatat

SEQ ID NO: 51094 - protein, 86 aa, Glycine max
  peptide (1)..(86): Ceres Seq. ID no. 13594091
MEGPNGSVIGTACTSNSGLIDFMKVLTLFILSSMGCISSANCFFASIGPSQTPITIRRLANSAEAVRKRRWPSCNRSKVPPLTTAS

SEQ ID NO: 51095 - protein, 64 aa, Glycine max
  peptide (1)..(64): Ceres Seq. ID no. 13594092
MKVLTLFILSSMGCISSANCFFASIGPSQTPITIRRLANSAEAVRKRRWPSCNRSKVPPLTTAS

SEQ ID NO: 51096 - protein, 53 aa, Glycine max
  peptide (1)..(53): Ceres Seq. ID no. 13594093
MGCISSANCFFASIGPSQTPITIRRLANSAEAVRKRRWPSCNRSKVPPLTTAS

SEQ ID NO: 51097 - DNA, 1024 bp, Glycine max
  misc_feature (1)..(1024): Ceres Seq. ID no. 13594734
cctagaacatcctaatcgaaaagcgtttcccttcaacaacttgagatccaatccagcgagagagagaaatccccaatccaattcaccgaaccctaaccctaaccaagcaggcggcaagagagatgttggtccagaagatgccgatggccgccggctacgagggctttcccctcatcccatcgttccaggcggacaaggagcaggcggaggcggtgttggccgtcagggccatcaaggccaaggcggaggaggcgtcgttgatcctcaaggcggggtgcggctccaagaggaaggcggaggaggacggcggcgaggtcaccgtcaaggccaaggccaaggccgcggaggaggaggcggcagctttcaccaccgtcaaggccaaggcagaggaggactcggacgaagacgctgaatgggacgatgatgagttcatggccagaatcacggcagaccacgccgcccatgtcgagaagatgaaggctctgtatcccaccatcaagtacggggactacgaccctaaggtctactgccacagccccgacccggagtcggatgcttggaatctccaaaagaaatgccttggtcttgctgagattgctgccggattactgtaatttgacgactgggatgggaatatgggatggaggagggttaccaatgctatctatctatctatatgctagtagtcgatcaatcgatccggaggacatctaaattaatgttagccaagcaccacctatatgtgatgtgcgtgcgtgtgtgatatcagtgggcagtgtcaatgccaatgtatctactaatattatctagtgctattatattaaaaaaaaaaaaaaaaaagcttatcgataccgtcgacctcgagggggggccgagttcccagttggcagtatcattaatgtgaagctctccatcgccggccctgtngccgccgtcggattcttcttcttctctctctaagttgataaacaacttatttgtttcatatgactttatgtaacgtntgagatgagaccacatcttt

SEQ ID NO: 51098 - protein, 163 aa, Glycine max
  peptide (1)..(163): Ceres Seq. ID no. 13594735
MLVQKMPMAAGYEGFPLIPSFQADKEQAEAVLAVRAIKAKAEEASLILKAGCGSKRKAEEDGGEVTVKAKAKAAEEEAAAFTTVKAKAEEDSDEDAEWDDDEFMARITADHAAHVEKMKALYPTIKYGDYDPKVYCHSPDPESDAWNLQKKCLGLAEIAAGLL

SEQ ID NO: 51099 - protein, 158 aa, Glycine max
  peptide (1)..(158): Ceres Seq. ID no. 13594736
MPMAAGYEGFPLIPSFQADKEQAEAVLAVRAIKAKAEEASLILKAGCGSKRKAEEDGGEVTVKAKAKAAEEEAAAFTTVKAKAEEDSDEDAEWDDDEFMARITADHAAHVEKMKALYPTIKYGDYDPKVYCHSPDPESDAWNLQKKCLGLAEIAAGLL

SEQ ID NO: 51100 - protein, 156 aa, Glycine max
  peptide (1)..(156): Ceres Seq. ID no. 13594737
MAAGYEGFPLIPSFQADKEQAEAVLAVRAIKAKAEEASLILKAGCGSKRKAEEDGGEVTVKAKAKAAEEEAAAFTTVKAKAEEDSDEDAEWDDDEFMARITADHAAHVEKMKALYPTIKYGDYDPKVYCHSPDPESDAWNLQKKCLGLAEIAAGLL

SEQ ID NO: 51101 - DNA, 916 bp, Glycine max
  misc_feature (1)..(916): Ceres Seq. ID no. 13638716
gaagggaactgtagccagggccaggatattattattgtgtaacaacgcaagttgagcatgaccaggctatcgggatccaatgctgggataatagtcggtgttggcgacacgccagacgttctagaaatactcacgcggccccagtacattttcgacatattattgatggcacagctatagatatggatcttgtgggaggctgcgcaaatctacgacgaagctgttggatctgactgtagatatggggcgaagtgcttcagtgtctcctcgtagacaggtttcttgaaatcaacagccttctcaatcacttgctgaggggtcatccatgcccattcggagaactccggcttctcggatccatcgcccatcaggttgatctcctcgtcacccccggtaagcctaaatagaaaccacttctgagcctggcccttccagtttgttccccacctagcattcagcttgtctttgacatccgcggggaaatcatatgtcaaccaattgggggcctcggcgacgatctcggcggatctaacaccagtttcttccctcaattccctaacggcagctgctcgcggctcttcccctgggtctattccaccctgaggcatctgccacgcggtggggatgtcgatcctggacgcggagaaaatcttggtgagggaggggtcggcgaggcagatgccgacgttggtgcggtagccctcgggcggcgagtccatggtggcgaacacggcgagcggcgaggccgagcaggagagcgggcggcggcgggcgatccgggggagccggagcgcggcggaggaggaggagatggtgggggtgagaatgaggcagcgtgcggcggccaccgtcatcggtcttttcgattaggattttctaggtaatggtctcgtgcgaattcctgcagcccggggga

SEQ ID NO: 51102 - protein, 50 aa, Glycine max
  peptide (1)..(50): Ceres Seq. ID no. 13638717
MVANTASGEAEQESGRRRAIRGSRSAAEEEEMVGVRMRQRAAATVIGLFD

SEQ ID NO: 51103 - protein, 40 aa, Glycine max
  peptide (1)..(40): Ceres Seq. ID no. 13638718
MTRLSGSNAGIIVGVGDTPDVLEILTRPQYIFDILLMAQL

SEQ ID NO: 51104 - DNA, 636 bp, Glycine max
  misc_feature (1)..(636): Ceres Seq. ID no. 14305990
tgtccgaggtttcctccaacaagcgcgcatctcttgcttccaccaccgtctataactaagacttgaccttctcctttggtctctagttggtttctgacaaggacattgtcttcaaataccttgagtgtcacgattggtcctgagaagcatcttctttggccgtagatgttgaagattgggtggagagcgcgtaggtctccgtttgctattagctcagaacaacgggtgggcagggattgtggtgaatggatgcgttagagatgtggatgagatcaatgactgtgatgtcggggttagggcattgggttctaacccactgaagtctagtaagaaaggtcatggtgagaagaatgtgccggtttatattggaggaactttgattagagatggagagtggctttatgctgatagtgatggtatcttgatctccaagaccgaactctccgtttgattcagaatgttttcatgatagtgctaagagaaagagagtactactacagcggtttcttgggacatgctggtttatttcaaatttttaataatcggtttcatattcttaaaattaaatcgtgtaacgcgctttgtgaactttgtaatactgaagatttttttttttaaaataatttcttatattcg

SEQ ID NO: 51105 - protein, 50 aa, Glycine max
  peptide (1)..(50): Ceres Seq. ID no. 14305991
MIVLREREYYYSGFLGHAGLFQIFNNRFHILKIKSCNALCELCNTEDFFF

SEQ ID NO: 51106 - protein, 40 aa, Glycine max
  peptide (1)..(40): Ceres Seq. ID no. 14305992
MLVYFKFLIIGFIFLKLNRVTRFVNFVILKIFFFKIISYI

SEQ ID NO: 51107 - protein, 30 aa, Glycine max
  peptide (1)..(30): Ceres Seq. ID no. 14305993
MLKIGWRARRSPFAISSEQRVGRDCGEWMR

SEQ ID NO: 51108 - DNA, 599 bp, Glycine max
  misc_feature (1)..(599): Ceres Seq. ID no. 15170815
atcctctagctagtcgattgattgatccagaaatcaaggccggtccatggggaactttttgcccggacgtgcgtccatgaaggacgccctggacgaaaccatgcacctcgtcgacaccaagatggtctggcatcacgtcgccaacggcgggtgcctccaagagttcgtgatcgccatggacgtgtgcaaccccgattacatgaagcagcggcacccccagttttacaagaagcagcaacgcaaggccacccccgtcgacaaggacgcgtgcgtcaaggccacggcggcactgcgcgagtgcttcgccggcaaccccgtcatgttcaagcacgagtatctccaccgcatggacgagggcctcgaccaggaccgcaacccctccccggcccagatcaagaaggagtgggccagcgaatataggtggtggaccggcatgaggagaagctagtaaattttgtgcagatgcagtacgtgatgatcaatggcgctagatagatatatagatagatcggttcatcttatgatgcgatgtgtttgtttggtaagttagttttttcattaccatgcattattcgcaacgaagtgtaacaagtgatgtt

SEQ ID NO: 51109 - protein, 133 aa, Glycine max
  peptide (1)..(133): Ceres Seq. ID no. 15170816
MGNFLPGRASMKDALDETMHLVDTKMVWHHVANGGCLQEFVIAMDVCNPDYMKQRHPQFYKKQQRKATPVDKDACVKATAALRECFAGNPVMFKHEYLHRMDEGLDQDRNPSPAQIKKEWASEYRWWTGMRRS

SEQ ID NO: 51110 - protein, 123 aa, Glycine max
  peptide (1)..(123): Ceres Seq. ID no. 15170817
MKDALDETMHLVDTKMVWHHVANGGCLQEFVIAMDVCNPDYMKQRHPQFYKKQQRKATPVDKDACVKATAALRECFAGNPVMFKHEYLHRMDEGLDQDRNPSPAQIKKEWASEYRWWTGMRRS

SEQ ID NO: 51111 - protein, 115 aa, Glycine max
  peptide (1)..(115): Ceres Seq. ID no. 15170818
MHLVDTKMVWHHVANGGCLQEFVIAMDVCNPDYMKQRHPQFYKKQQRKATPVDKDACVKATAALRECFAGNPVMFKHEYLHRMDEGLDQDRNPSPAQIKKEWASEYRWWTGMRRS

SEQ ID NO: 51112 - DNA, 925 bp, Glycine max
  misc_feature (1)..(925): Ceres Seq. ID no. 14307229
gatcgcgtcttttagttgtctatatatgtatctgagttatgctatattatcatcaagtgtcctaaaatgaagacatacagacgcagaacaaaaaagacagtgcatctatcacaggaactgatcaatgaaatcttgttgaggttgccggtgaaatctcttgtccgcttcaaatgtgtgtgtaagtggctttcccttatctctgattagcacttttcactatcacattttgaacgtgcagccgaaggcacagagagacttgtgttctttgagccttcagctcctgaaatccgatccatagacttcaatgcatctctttacgatgattctgcttctgttgcattaaagctcaactttttgccacccaaaccttatgatgttcgaatccgaggttcctgtcggggccttgtgctcttggagtgctgtcaaagtctctgggtgtgaaatccatccacaggtttccacggacaactagcttacccacctataattgctcccagtaagaatgtcatgtttttgacatttctctatggtttttggtatgacccatcaacagatgactacttggtggttaaagtgttctgccacgcttgctcagctgttagtgctaactgatacggaagcagaggcagcaaacacaacaacaggaacagcagtcacaaagccaaaaacgaaggtgcaagtagaagaaaagcccaagagaaagatcacaaagccatcttacctcaaccactacttttgaggaaatggacaaagctagtagcgtaatctgcttgttggtgcttgtctacccacaggggacaagcctaacaaattctgttagtgtaatattcctaggcacacatcagcacaattttgttactaggaaacactataaatatagctatgtaaataacaagcaagtcaatgaaaattcacaattaccttc

SEQ ID NO: 51113 - protein, 70 aa, Glycine max
  peptide (1)..(70): Ceres Seq. ID no. 14307230
MVFGMTHQQMTTWWLKCSATLAQLLVLTDTEAEAANTTTGTAVTKPKTKVQVEEKPKRKITKPSYLNHYF

SEQ ID NO: 51114 - protein, 66 aa, Glycine max
  peptide (1)..(66): Ceres Seq. ID no. 14307231
MTHQQMTTWWLKCSATLAQLLVLTDTEAEAANTTTGTAVTKPKTKVQVEEKPKRKITKPSYLNHYF

SEQ ID NO: 51115 - protein, 61 aa, Glycine max
  peptide (1)..(61): Ceres Seq. ID no. 14307232
MTTWWLKCSATLAQLLVLTDTEAEAANTTTGTAVTKPKTKVQVEEKPKRKITKPSYLNHYF

SEQ ID NO: 51116 - DNA, 1308 bp, Glycine max
  misc_feature (1)..(1308): Ceres Seq. ID no. 13595626
cagaatatatttgaattaaatccaataayaaattcyrrtaahmwragaaaagaaaaaaggaaaaacagccggcgacaaggcattgggggtctccactctgcagcttccactctctaaagtctaaagtcttccaaatcccaaaaccctagggaagatgatggcgtcttccaattcacgaaaatcagaaacttccccttctcccgccccgcaattcaccaccaccaacttcatccccatccccgccgccgcagcccctaaaaccgtcgatgacgtgtggcaggagatcgtgaccggcgaccgccgcgagtgcaaggaggaggccctcgacgacgacgacgacgacgacaacgagatgatgactctcgaggacttcctcgccaaggccgacgccgtggacgacgctgaccatgaccatgaccatgcccatgaccacgaccccgactaccacaacgacgacgtcaagatgccaatgcccctcaccgagaggctcggcagcggcaccctcttctccttcgaccaccttcccacgacgccgtttcacgacccctccgaaggctccgtcatagggttcggaaacggcgtcgaggtcyahygaatgcggaaggggtaaaagatcgcgtcccgttttggagcagttggataaggccgcgcaacagaggcagaggaggatgatcaaaaacagagaatctgctgctaggtctagggaacgcaaacaggcttaccaagtggaattggagtctttggcggtgaaactagaggaggaaaatgacaagctcttgaaggaaaaggctgagaggaaaaagaagaggtacaagcagctaatggaaaaagtactccctattgcgcagaagcaaaagccaccatgtatactccgtagggctcgctccttgcaatggtagatcaaaattgctaggggtgcaggacaggaattgaatattaaccacatcagtggtgggaaatgagcaaattaatcatcatctcttaaaaatcatagttctcagcctaatgattagtctcgagggcaatcatggttaaaaatgtgaagagattgatggaattggaacctgagtaataaggaaaatttcttattactgaagaaacaacatttgcttattcttaggaggtaaaaagcggaagtatggagttggaccatgtaagtttagatacaaattaaacatcctggtatctcccgtgcgcagaatgtcaatgtgtaatagtagagagcaaagggaatttgtagactagtatataatgtagtcatggcttagacctatatttatttggagataaaagtatatagaaattgct

SEQ ID NO: 51117 - protein, 151 aa, Glycine max
  peptide (1)..(151): Ceres Seq. ID no. 15221624
  misc_feature (146)..(146): Xaa is any aa, unknown or other
  misc_feature (147)..(147): Xaa is any aa, unknown or other
MMASSNSRKSETSPSPAPQFTTTNFIPIPAAAAPKTVDDVWQEIVTGDRRECKEEALDDDDDDDNEMMTLEDFLAKADAVDDADHDHDHAHDHDPDYHNDDVKMPMPLTERLGSGTLFSFDHLPTTPFHDPSEGSVIGFGNGVEVXXMRKG

SEQ ID NO: 51118 - protein, 150 aa, Glycine max
  peptide (1)..(150): Ceres Seq. ID no. 15221625
  misc_feature (145)..(145): Xaa is any aa, unknown or other
  misc_feature (146)..(146): Xaa is any aa, unknown or other
MASSNSRKSETSPSPAPQFTTTNFIPIPAAAAPKTVDDVWQEIVTGDRRECKEEALDDDDDDDNEMMTLEDFLAKADAVDDADHDHDHAHDHDPDYHNDDVKMPMPLTERLGSGTLFSFDHLPTTPFHDPSEGSVIGFGNGVEVXXMRKG

SEQ ID NO: 51119 - protein, 85 aa, Glycine max
  peptide (1)..(85): Ceres Seq. ID no. 15221626
  misc_feature (80)..(80): Xaa is any aa, unknown or other
  misc_feature (81)..(81): Xaa is any aa, unknown or other
MMTLEDFLAKADAVDDADHDHDHAHDHDPDYHNDDVKMPMPLTERLGSGTLFSFDHLPTTPFHDPSEGSVIGFGNGVEVXXMRKG

SEQ ID NO: 51120 - DNA, 970 bp, Glycine max
  misc_feature (1)..(970): Ceres Seq. ID no. 13582109
atcatcagtttctcatttcaagcttctttcctcatcgcctgcgctttagttttcagtgttaatctgaggattgctagcttctaccaccagcattagtaacgcatccttttgttccttcatgacatgtcgctcgatttaagatcctgtttcactgaatttacttggcatgcaagactctcgaaatccacaaacccttctgtgtttcagtgatcttgtctacaattagtaatcataagcatctcatgctaggccaagaataaaacgtaagggtcaagaatcagatcaagtcgaagcatataaagggattgaaggaagtgaaagttattaaccttcttggagcggacacgaccgatgcctttctcaagcctaccttccaggttcttgagctccttgaggttcaaggaaccaagagattcaccaagaatgtgtctgttcagattctgaatgtcccggatctgtctccgtagcttagacgattcttgctgatagtacttcatcaagtgttcgaccccacaagggattcagtaaagtcagaaactgaaacaagaagaaacgtagtggtaaagtaactaactatggaagcttacctgagtattagcttcggtgacggaaggaggattaacagcgtcggagcaagctttcttgtacctttcaatcgttcctcttacacttttcattaattgtacgatttcaccaacatccacaaaaagaaaatacaagagttagtaaattagagagctataagcaaagacataatcattggcggaggcagaaaatatttctgttgggggcaaaaaaaaggtatgagagcaaaaaataattatgagtggggacatcatatagattgaactttaagttacactattttttttaatcttgttgggttcattgcccccatgttgttgcatgtggctcttccactggacataatgtacatatcctataaataacatctttatcgacttctacg

SEQ ID NO: 51121 - protein, 34 aa, Glycine max
  peptide (1)..(34): Ceres Seq. ID no. 13582110
MEAYLSISFGDGRRINSVGASFLVPFNRSSYTFH

SEQ ID NO: 51122 - protein, 31 aa, Glycine max
  peptide (1)..(31): Ceres Seq. ID no. 13582111
IISFSFQASFLIACALVFSVNLRIASFYHQH

SEQ ID NO: 51123 - protein, 30 aa, Glycine max
  peptide (1)..(30): Ceres Seq. ID no. 13582112
MPFSSLPSRFLSSLRFKEPRDSPRMCLFRF

SEQ ID NO: 51124 - DNA, 1682 bp, Glycine max
  misc_feature (1)..(1682): Ceres Seq. ID no. 13595492
tcgaggtcgacggtatcgataagcttttttttttttttttttgagtcattaaatatatgcttctcacaataatacaagaaagcatataccaatttccatatactaacaaatagatgaagcagtgtttttttacatcagtgatggatacataacccgacacaagtaacaacacataactgagcttcatcaaatattaacatctatacaatgcttggcccctcccttctgcatatacatattacacatttaatgccaacatacatgaaccagcgataaaatcacacgacttaaaatattttacacatcttattcttccttacacttgcttcgcgtggcacatcaacattcaacaacctaaatgcttcattggcgaaaccagagtttcaacatagacctctgcatcaaaccagcccttaccactctcaatcttaggatacttaaacgagttatctcttgggttatacagaatcaagtcaaactcaaacatcaacagcacttcaccattctctgaaatgtaataaggccctgagtacgaaaaattttcaggattaggcacataaggaatgctcaccaatttcacccaagactctctcactccataatccttcatcatccacacaacaaaatgagttttcttgtaatcataattcatgcaaagacatccttgtaaaacacccaaaccaggggtggaacagtcttccttttcataatcaggtggcagaacttccctatatgtttccttatgaagatccaaggaaacaataacccacaaggaacttgaaccaatagaatgattagcagcccaattgagagtgccgctcacaaattttcctgaattttgaaagggtgagaaaccatgagggaaatcctgaatcttcctccatgaattggtggccatgctatacaccttcactttacactcaataaaatactcactagggtcacaaaacacagccaccaccttgtaatcctcattaacatgatcatagccaaggccaaaggcagtgaaacaccctggcctccaattattccccaaaggtggtgattttttggagaccttgatggaggggttccaaagaagcacacaatcaccctttatggcaaaacataacaacccattacaagagccaacaatcccatcgtggcgaaacttgttcttcacagggtagttaagttcatcacaaacggttgaaaggttgttgaacaaggaactcagagaacatgatttgaggtgaaactcagcggttgtggcactcaatatgatcctgtggtgggtgaagtgggtgcttcgagatgacaggtgaaggtgctttttcatgaagtaaggatcataaataagggacatccatgacttgcaaacgcacctgaactgcaacagagacttcactgggagcctcgagagaatttcaacaacgagttcatcagggagaaagggtagtggaagtgactctgacatgccttgttgtttctgaaccgaagatggtggcagtggtgaggttcggtccattgggttgatgagcctttctctcttcctggtgaagcctatgcggtggaggtaaccctgcgatgacatgttaggttgaggtggtggaagtgtttgtggtgatcagtgatcagtagtgtttatgttgagttgagtctgagacagtgtgtgtgtgtgagagagagagagagagtttcat

SEQ ID NO: 51125 - protein, 50 aa, Glycine max
  peptide (1)..(50): Ceres Seq. ID no. 13595493
MLHWRNQSFNIDLCIKPALTTLNLRILKRVISWVIQNQVKLKHQQHFTIL

SEQ ID NO: 51126 - protein, 35 aa, Glycine max
  peptide (1)..(35): Ceres Seq. ID no. 13595494
MEGFQRSTQSPFMAKHNNPLQEPTIPSWRNLFFTG

SEQ ID NO: 51127 - DNA, 1559 bp, Glycine max
  misc_feature (1)..(1559): Ceres Seq. ID no. 13595497
ctccttaattctcagtccaaaccacacctttccccacttctattccacattcttctctctctctctctctctctctctctctattttcacttagcctatgcagagaaagagaaggagatcatggagcttggtttgagcttaggagactcttcaaggcctttgcttggtttcatggaaaagcctcgtgaagccacctccaaccaactggggttaggcttcaacacaacgttatcaattggtccaatcatcactagacaaaaagatcatcaacaagatgaagatgaagaataccaagatgaagaaacaaagccaaataacaacaacaacactcacagaacagaagatcctaatgacctttgttccaaacccaacaacaacacagttctgcatcaacttgattttctccctcaacttgctctcccatggcaccctccttctgaaaacgggagtttatcatccgagttgggaggttcttcacgggggctggacgtgaacgtgcaacctccagcggcggaggacgaggcggcgcggtncgtcgtctccgaacagcgccgccccttcgntksnnwtmartgatctctgcatatacaacagcagaggagggagctctaataagagggactttgagggtgaggcctatgatcaaaggacttcttcaagagctagcgatgatgatgacaataatggtagtggtggtaacaccaggaagaaactcagactctcgaaggaacagtctgcgttccttgaagagagtttcaaggagcacaacactcttaatcccaaacaaaagcttgctcttgctaaacaactcaatcttcaacctcgccaagtagaagtttggttccaaaaccgaagagcaaggactaagttgaagcaaacagaagtggattgtgagtacttgaagagatgttgtgagacactaacggaagagaatagaagacttcacaaggagcttcaagaattgagggctttgaagacttcaaacccattctacatgcaattaccagccactactttgaccatgtgcccttcttgtgaacgcgtggccacaaattccacatccacttcctcatcaatgagtgccaccatcaatgctactaattcaggagccacggcctgtgtcaaaacaggtaataacaataacaacaatgactcaccctccaaacccattggattcccctttggcaaacccaggttccacccatttgttcacagtagccaacaacaactccatcagcaccaatcctcagcatcttgaaagatatcaagctcaagactagtgctatatattttgagttgaggcttggaaattgatttgatttttgtatatagggaagttaattaattctgagaggcttatagtttttttttggtgggggtggagacggttatatagaatttggataattggttttttttccttgtttgaatctctctctgtattttccttcttttactggttttatccatggtgaaatcagaaagaaggcagaagaaaattttagacagtgaagatgatagatatcaaagagaaagggaaatgatactgggttttttgt

SEQ ID NO: 51128 - protein, 191 aa, Glycine max
  peptide (1)..(191): Ceres Seq. ID no. 15221597
  misc_feature (178)..(178): Xaa is any aa, unknown or other
  misc_feature (188)..(188): Xaa is any aa, unknown or other
  misc_feature (189)..(189): Xaa is any aa, unknown or other
  misc_feature (190)..(190): Xaa is any aa, unknown or other
  misc_feature (191)..(191): Xaa is any aa, unknown or other
LLNSQSKPHLSPLLFHILLSLSLSLSLYFHLAYAEKEKEIMELGLSLGDSSRPLLGFMEKPREATSNQLGLGFNTTLSIGPIITRQKDHQQDEDEEYQDEETKPNNNNNTHRTEDPNDLCSKPNNNTVLHQLDFLPQLALPWHPPSENGSLSSELGGSSRGLDVNVQPPAAEDEAARXVVSEQRRPFXXXX

SEQ ID NO: 51129 - protein, 151 aa, Glycine max
  peptide (1)..(151): Ceres Seq. ID no. 15221598
  misc_feature (138)..(138): Xaa is any aa, unknown or other
  misc_feature (148)..(148): Xaa is any aa, unknown or other
  misc_feature (149)..(149): Xaa is any aa, unknown or other
  misc_feature (150)..(150): Xaa is any aa, unknown or other
  misc_feature (151)..(151): Xaa is any aa, unknown or other
MELGLSLGDSSRPLLGFMEKPREATSNQLGLGFNTTLSIGPIITRQKDHQQDEDEEYQDEETKPNNNNNTHRTEDPNDLCSKPNNNTVLHQLDFLPQLALPWHPPSENGSLSSELGGSSRGLDVNVQPPAAEDEAARXVVSEQRRPFXXXX

SEQ ID NO: 51130 - protein, 134 aa, Glycine max
  peptide (1)..(134): Ceres Seq. ID no. 15221599
  misc_feature (121)..(121): Xaa is any aa, unknown or other
  misc_feature (131)..(131): Xaa is any aa, unknown or other
  misc_feature (132)..(132): Xaa is any aa, unknown or other
  misc_feature (133)..(133): Xaa is any aa, unknown or other
  misc_feature (134)..(134): Xaa is any aa, unknown or other
MEKPREATSNQLGLGFNTTLSIGPIITRQKDHQQDEDEEYQDEETKPNNNNNTHRTEDPNDLCSKPNNNTVLHQLDFLPQLALPWHPPSENGSLSSELGGSSRGLDVNVQPPAAEDEAARXVVSEQRRPFXXXX

SEQ ID NO: 51131 - DNA, 1090 bp, Glycine max
  misc_feature (1)..(1090): Ceres Seq. ID no. 13639109
gaaacttcatggaaacatctataacattcatcagtctacaaccacattgccataacagatgcgtaaggtgaacatcagcaggtctcggaggagaacactctaatgtcgaggaggagacaaacaagcccccagtccataaaacaaggtgcttcaacacagttcacggaatttcatatgacatcaatcaggttgacgcagaaggggcctcggccatctcttgctcgacaggagccgcctggactgggtagtagtggtagtgcagctctccaacatcatctccagacaacttcttccagccgtcagggccaacatagtagacactaacacagccaccactagctccgtcacggaatgttgcgtggtaaatagcccgccgagctaactcagcagcttcctcaactgacatgttgaatttgtaaccctcgtccaagataccataagcatatagagagccagaaccaacagagaatcggcttcccttgagccttgcaccctcgctatcaacatagtacaagcccggaccagtttcatcaaatccagcaatcatggtaccgattgaaagtcccatcccgcggtatgaataaaggatattagccaacgtctttgaagaaccagcaatggagatcctccgcttgttcgcgagctcatggagccggcacttgacccccaagtttctatgccaaaattggcaatcagcagcacctccagccatggttcccagcatgtagggattaatctcgatgattttcctcacagtttgcgaagatatgtagccgcccatgctggcccgggagtcggcggcgacgatgacgcccttgtcgaagatgaaggagagcgtggtggtccccttcttgttgttcaccatctccttggtcgccttctggaacccatcgaagtcgttgcaggtggggaactcgagggcgagctggtcggcggcgtcggcggagaagaggccggcgaagtcgtcgctgccggcggcggcggcgccgaagtggttctcgagggcggagaggttgggaatcatggcgtcgtcggcgggtgtgggggtgcggcgaggcggaggcggaggcgatgaagtgagctttttttc

SEQ ID NO: 51132 - protein, 142 aa, Glycine max
  peptide (1)..(142): Ceres Seq. ID no. 13639110
MEPALDPQVSMPKLAISSTSSHGSQHVGINLDDFPHSLRRYVAAHAGPGVGGDDDALVEDEGERGGPLLVVHHLLGRLLEPIEVVAGGELEGELVGGVGGEEAGEVVAAGGGGAEVVLEGGEVGNHGVVGGCGGAARRRRRR

SEQ ID NO: 51133 - protein, 132 aa, Glycine max
  peptide (1)..(132): Ceres Seq. ID no. 13639111
MPKLAISSTSSHGSQHVGINLDDFPHSLRRYVAAHAGPGVGGDDDALVEDEGERGGPLLVVHHLLGRLLEPIEVVAGGELEGELVGGVGGEEAGEVVAAGGGGAEVVLEGGEVGNHGVVGGCGGAARRRRRR

SEQ ID NO: 51134 - protein, 103 aa, Glycine max
  peptide (1)..(103): Ceres Seq. ID no. 13639112
MLARESAATMTPLSKMKESVVVPFLLFTISLVAFWNPSKSLQVGNSRASWSAASAEKRPAKSSLPAAAAPKWFSRAERLGIMASSAGVGVRRGGGGGDEVSFF

SEQ ID NO: 51135 - DNA, 1187 bp, Glycine max
  misc_feature (1)..(1187): Ceres Seq. ID no. 14306268
accgcattagaatcaggtgatggtggaggagggtcatccttgagcaacacaacatcatcagctgtgcttgtgatgtccattacctcaggctggcttttatgtttgccatcactctgtatatccttgagagtctccaccacttcttccatagaaggtctcatctctttagaactctgcaagcactgaaatgctaactcagccacagcatttatcattttcctgactttgaaatcggattcaaacccgagggtagggtcgacaagctcatgcagtgcctgattatgaatcttgttgatggccatgttggacaaattgatttcatgtctatgccttgtgatatctacagcaggcaaggatgatatcagctcaaccagaaccactccaaagctatatacgtcgctttgtttagtaagctggtagcactggtggtactcgggatccacataacctggagtcccttgtggagctgttgaaacatgggtgacatggtctgggaaaagacgcgagagtccaaaatctgccactttgacacaaaagtcactgtcaagaagaatattgttggttttcacatctcggtggatgacgtctttgtgatgaagaaaattcaatgcacttgcagtctccacagcaattttcattctaatatgccaagggagttttccaggtttggatcgttgaccatgaagatgatcagcaacggttccattaggaatgtactcgtatacaagcagaagttcgcggctgtggcgagaggtgcatccatataacttcacaagatttggatgaactaactttgctaggattttaatttcattcatgaactgtgcaactctcttgaagttgttctcatacaacctcttcactgcaacagaacgcccgtcccgcagtttgcctagacaagaaacatcagaagacaggaacctttgttaatggtcattgaaagcataaaaacgacagagataattacaaagggtgtgtttgcttttaccaaaatacacagttccaaatcccccttctcctagttctttagatgagtcaaagtaatttgtggcctcttcaagttcatcatacaagaagaggggcactcctggtacaaagctttgagtaaagctttgaactcccttctcagtgtcttttgaagatggatcagaagagaggctacgaggattgtatatatgagattgcat

SEQ ID NO: 51136 - protein, 96 aa, Glycine max
  peptide (1)..(96): Ceres Seq. ID no. 14306269
MGDMVWEKTRESKICHFDTKVTVKKNIVGFHISVDDVFVMKKIQCTCSLHSNFHSNMPREFSRFGSLTMKMISNGSIRNVLVYKQKFAAVARGASI

SEQ ID NO: 51137 - protein, 93 aa, Glycine max
  peptide (1)..(93): Ceres Seq. ID no. 14306270
MVWEKTRESKICHFDTKVTVKKNIVGFHISVDDVFVMKKIQCTCSLHSNFHSNMPREFSRFGSLTMKMISNGSIRNVLVYKQKFAAVARGASI

SEQ ID NO: 51138 - protein, 61 aa, Glycine max
  peptide (1)..(61): Ceres Seq. ID no. 14306271
TALESGDGGGGSSLSNTTSSAVLVMSITSGWLLCLPSLCISLRVSTTSSIEGLISLELCKH

SEQ ID NO: 51139 - DNA, 1117 bp, Glycine max
  misc_feature (1)..(1117): Ceres Seq. ID no. 14316432
tttttaatagctgtcatcctattgtctactccatggcatagcatactgggcctactgcatcatgctctgctatcatgaatttcaaactctggaattggttgtcgtaagatattattaggggtaccagaattgtgcattgggtgtagttaaaatgcaactgaaacattttttagaagaaattaataattggagtgtaaatttgtagattcacaaagatattccatattatagtctagttttattagattttggtcatttcaatttgttgttcataggatgatgtagtttgttgtgaatgactgcacgtgtattcaactatctcttttttgtcgtcaatggcctgaggtctcttgctactaggtttcctcattttccatgtttgtattgtttgtgcattgcaatgccacataaactctgtttatttagtaggttaagtctgtactaatacatattaatgtgacaattttctttttaggctgctaactacttgaacatcaagagcctgctggaccttacatgtcaaactgtagccgacatgatcaaggggaagactccagaggaaattcgcaagacctttaacattaagaatgacttcacccctgaggaggaagaggaagttcgtcgggaaaaccaatgggcatttgaatgattttgttaatctcaaaaaatctgaatcaaagatctgccatgtggatttatgctatgcttgtttgtttatcaaagatctctcttgtagatttgcctatgctatatacttgtttgttttatattcaagactatttccgttgactgtgttcactacaactagtcataagaattatcttccttcatgaacttaagagcactttgaattgtaagtaatagttatgatgagggatgcgttgattctgacacgagggttattgagttcaataacagccaacccttggctccatatttttcatcccgtgaactacgtgataatgtgtatatgcacctttgtaaaggggaggtgcagaaacaagattcggagaccatttgatcatgtttgccaaggtggtaggtagctccatgtttcatggtcgattcatattacttttcatcacgtctcactaatctacattaatgtgttactttc

SEQ ID NO: 51140 - protein, 81 aa, Glycine max
  peptide (1)..(81): Ceres Seq. ID no. 14316433
MTSPLRRKRKFVGKTNGHLNDFVNLKKSESKICHVDLCYACLFIKDLSCRFAYAIYLFVLYSRLFPLTVFTTTSHKNYLPS

SEQ ID NO: 51141 - protein, 59 aa, Glycine max
  peptide (1)..(59): Ceres Seq. ID no. 14316434
MMRDALILTRGLLSSITANPWLHIFHPVNYVIMCICTFVKGRCRNKIRRPFDHVCQGGR

SEQ ID NO: 51142 - protein, 58 aa, Glycine max
  peptide (1)..(58): Ceres Seq. ID no. 14316435
MRDALILTRGLLSSITANPWLHIFHPVNYVIMCICTFVKGRCRNKIRRPFDHVCQGGR

SEQ ID NO: 51143 - DNA, 1289 bp, Glycine max
  misc_feature (1)..(1289): Ceres Seq. ID no. 15177266
attcaaaatttcggatttattagtctttccgagcaaagatcacaacaacaaaaatggaaagaatcataggtatagattctcatcattcagatctatacatctgaaaagagtttatattttgcaaaccaaataacttattaaagtgtatccatggtcacccatgacactgctagcagctatagccagtgacagctaccaaaacagttatagcaagtccggctgttgcccatatatttctcctttgctggtgctttgatggtgcagcattctgtgaggagaaaaaagatgtgattaaaacaacgtaatattgattggcatacttgtatataattgtaatttgatatttcactaaacaaagatattaccagattcagacttggtgatggtgccggtgttgtatctgattctgctgtggaatcaggtggtgctgtggacttttgcgaataattgttggagctgaagctggtgcttgatgccttctgtgtctgtgccttctatgcctatggtgtgcaggcgctggagccggtacctctatcactggtgctggtgccggtgccggtacctctattacaggtgctggtgctggtgttggggttggcggtggaggaacaggtgatggtgttggtgctggctttgtgggtgcaggtgctggtgttgcctttgctggtgcaggtgctggtggtgttttggctggtgttggggctatctttggtggtggtaatggtggtggggaagcaacaggtggtgggggtggtgatgtgggaggtgagactggtgaaggttttggttgttgtggtggtggggcttttggacttgaaacaggtgcaaccttgggagctggtggcgtcacgagagcagatttgggagctacatttcaggtggctgcgatgtaattggtgtactggtggcaggaggagattccgccactgtgggtggctgtgttaccgccggtggtgtgccagaagacaatggagatgttgcagttggtgttgttggtggcaaagttgtaggtggcaactttactggcatggttgctggggcttgagcattggtagctaactggcagcaaaggcttactgtagccaaagcccagaaaattgcagccattgtatgatgaatgttttgatatggttgagaatggagagagtctccttcttatatatgggctatggtgaggctcaaggttcaatcgtgtggtgtggactatgtggggaacgaatgatgtagccttcatgtgattgtgacataatttaaatactaataatctaacaaggaacgttaacaatggg

SEQ ID NO: 51144 - protein, 147 aa, Glycine max
  peptide (1)..(147): Ceres Seq. ID no. 15177267
MVLVLALWVQVLVLPLLVQVLVVFWLVLGLSLVVVMVVGKQQVVGVVMWEVRLVKVLVVVVVGLLDLKQVQPWELVASREQIWELHFRWLRCNWCTGGRRRFRHCGWLCYRRWCARRQWRCCSWCCWWQSCRWQLYWHGCWGLSIGS

SEQ ID NO: 51145 - protein, 112 aa, Glycine max
  peptide (1)..(112): Ceres Seq. ID no. 15177268
MVVGKQQVVGVVMWEVRLVKVLVVVVVGLLDLKQVQPWELVASREQIWELHFRWLRCNWCTGGRRRFRHCGWLCYRRWCARRQWRCCSWCCWWQSCRWQLYWHGCWGLSIGS

SEQ ID NO: 51146 - protein, 100 aa, Glycine max
  peptide (1)..(100): Ceres Seq. ID no. 15177269
MWEVRLVKVLVVVVVGLLDLKQVQPWELVASREQIWELHFRWLRCNWCTGGRRRFRHCGWLCYRRWCARRQWRCCSWCCWWQSCRWQLYWHGCWGLSIGS

SEQ ID NO: 51147 - DNA, 1556 bp, Glycine max
  misc_feature (1)..(1556): Ceres Seq. ID no. 12582623
cgaggaaaaaatcaataaatcatgcataagcatggccaaataatggggacttccagaaattctagttcgacggggtaaaaacacaacaactctctcttacagtgaaagaatataagatgaatgctagatgataatctaaagatacagaacctaagtacaagcaacctatttcttttgtggggcattttacaaactaatgtagtatattttgtagttacaaaagccatgactctctaatcttatcgattctgactgtttctgaaaaacttgaaatcccaacgtcgcagtaagccgttcaagacatgaatgttggattcttaataacagttaatgtggcttttgtattgtgtgaaatgtcagtgtctgatgaactttgtaagctagcagaactatcattaccagtagaagcactttctgtatcgccagactcggtgaccgatgaagtgtccaatggtggtagtggtgatgatggtattttgcttgatgaaagacttgttacaggacttggaatcactgaaatggaatttgactcagttttcaagggctccaatgcatcagatgaagtggaaattgttttatcactgtggttgagtaaagaagattctgtctccacaggtttggaaatctcatgtgaattagaagcatgtgagtcattcttatccgatggctctatagacatggtactactagcactcctaacaggtggttgttctacctctggaattcgtatttcccggtctttcaatgaatctatcactgcttccgtgaacattttttgttctttctttgcactagatggacagcctgtaaagtcatcaagttgaaattccacaaagtggtcatcatctagatcggttggaacgaggggactatagagacgaccatttgataattcaaaactaatcattgtagaagatgatgaggaaagatcatcacatttctgtgcctcacagtcgagatgtgcatcttttgaagaaatatgtgatggaacctccatcctactcattggtttttttgaacggacgtgcttaatgtcttccacagtactgcttgttgatgtttctttgttttggaatgatggttcattgccaaagtcaaattcatgcacagatctccaaacatccttaccaaagtaatcattcataatgtcaaaaaatgattccccaagctcatcttcaggaggttgtaaaacattgtgaaaaaatatgtttacggaatcaaaataatactgaggacgcgaagagttgtgatctccctcaaatttaattatatttttgtcccccatgtaagcctcaagtatacgatctgagtgatgaggacgaataaaatcatcatcaatggcatgccctactagagcaggaacaaaacaagattttgctacataagcaggggaaaatacaggagagaaaatttctacacttttgaatgctcataaagtcgttattttatatgtttaggaggacaaaaaattgttcactattttggttgttttgtctctgtcctcctatacttcatgaatgatcacaagcacgcaatctaaaaagaagattctaaac

SEQ ID NO: 51148 - protein, 173 aa, Glycine max
  peptide (1)..(173): Ceres Seq. ID no. 12582624
MNVGFLITVNVAFVLCEMSVSDELCKLAELSLPVEALSVSPDSVTDEVSNGGSGDDGILLDERLVTGLGITEMEFDSVFKGSNASDEVEIVLSLWLSKEDSVSTGLEISCELEACESFLSDGSIDMVLLALLTGGCSTSGIRISRSFNESITASVNIFCSFFALDGQPVKSSS

SEQ ID NO: 51149 - protein, 156 aa, Glycine max
  peptide (1)..(156): Ceres Seq. ID no. 12582625
MSVSDELCKLAELSLPVEALSVSPDSVTDEVSNGGSGDDGILLDERLVTGLGITEMEFDSVFKGSNASDEVEIVLSLWLSKEDSVSTGLEISCELEACESFLSDGSIDMVLLALLTGGCSTSGIRISRSFNESITASVNIFCSFFALDGQPVKSSS

SEQ ID NO: 51150 - protein, 101 aa, Glycine max
  peptide (1)..(101): Ceres Seq. ID no. 12582626
MEFDSVFKGSNASDEVEIVLSLWLSKEDSVSTGLEISCELEACESFLSDGSIDMVLLALLTGGCSTSGIRISRSFNESITASVNIFCSFFALDGQPVKSSS

SEQ ID NO: 51151 - DNA, 1280 bp, Glycine max
  misc_feature (1)..(1280): Ceres Seq. ID no. 13581701
gaaagaaaaaaaatccagttcacacaaattcaattaagtacaaactctatcacaatggatagaacacactaagtataaaactctattactttaactgatattcttcttcataagctaacagcaatatgggcacaaaatcaatccattctcattacactgaaggcactgattgctctctccattttccgccataaccttgtggcttccattacacttgaagcacagcacaaaccttatccctccacatgcatcacaaggaccattagaataatccattggaaccccttcaaagattttcctcagctttccctgctcatgcaaactcagaacttcttctgctccaccaatgtacctgcccttcacaaaaagccttggaggcactaatttcccctccaaactgctccacaactcatccctgaactccttgtgcattgaaatgtccctctcaaaatacaaaaccttgaaactctggaggaggaagcggattttgttgcaatcctcgaatgtcttcaggattcccctaagtgtcgtggtgtagaaaataaccattccgtcgcccccgggtggacacttctcttcaaagaacatcaaagggtcagggtcatcatcttccactttctgtgaagactcttcttcgactctgcttctcctctgttcttctgttattctagaatgttccttcacggcttgctcgaacgcggccagtagattcggatcgaataggctgccggagttcaagtccggccgccggaacgatggaacatcagtgtctaacaaagggatttttctgttgctgtttctgttgttgttattgtcagcattttctggtgaagactttttttcctccaaaacccctctctgttttgaatctgtttttgctctgttcccgttctgcaaaacacccttgtggtgttgttggggtttctgtgaacatggacctatgttctctttgttgtcattgtaatcatcttcttcctcaaggtctttcatcagctctgcaacgtcgatcacctcgggttcgtcctgcattttctcgcagctctgaacaactttctcgggcttgttttctcgggaaacaaacggggaatgcagattgaaactcggaatctttgggagaaaatggacgtacccatctgaggccttgatctggagaattaaatcttgcttcaggattggtttgatggatttgagcttcttcaggaattttcctttcacccccttcattttttttcctgagattttccaacggaattatctgctaaacagagaagattgaaaat

SEQ ID NO: 51152 - protein, 113 aa, Glycine max
  peptide (1)..(113): Ceres Seq. ID no. 13581702
MEHQCLTKGFFCCCFCCCYCQHFLVKTFFPPKPLSVLNLFLLCSRSAKHPCGVVGVSVNMDLCSLCCHCNHLLPQGLSSALQRRSPRVRPAFSRSSEQLSRACFLGKQTGNAD

SEQ ID NO: 51153 - protein, 63 aa, Glycine max
  peptide (1)..(63): Ceres Seq. ID no. 13581703
MYLPFTKSLGGTNFPSKLLHNSSLNSLCIEMSLSKYKTLKLWRRKRILLQSSNVFRIPLSVVV

SEQ ID NO: 51154 - DNA, 709 bp, Glycine max
  misc_feature (1)..(709): Ceres Seq. ID no. 15226876
agtrccggsccccccctctagtcagctacgtaggccccccccccaaaataagagaaggggtgagggggcggcaccacctttccttccctcccgattgccctaggtaaaaaatgtatatagttcttttcttttgcatcaattcagcggcgacgaaaccgcaatagatctccgtttctcgccaaacaaacacaaaatagctgccttcagcggcgacgaaaccgcacctttctttggcttcctcggagccaccgctaccctcgttttttcctgtaactaactcatcaaggaggatccatctctgaaacatattttggaggagatagagactggtggtcctgctgctatgatgaggtactggaatgatgaggaggttttgcggaagttgggacaaaccatgggagtttccttaataaacgtgtaaagggattaggaacccagaacataaactgttcattgtcaactttgaaggaacccagaacataaactgtcctaaagctacttgagaaagatgcttttctgtaattgtaatgcatgatgccatgctgtcaccaacaatcaaaggggaaactgaggggaagaagagctgatagacaacttgagttcacccaactagacatggaaatgacctttactccttacgaggatatgttaacacttaatgaagaattgattagaaagaagtagtaaagttgcaggaaaaatggtgtgg

SEQ ID NO: 51155 - protein, 50 aa, Glycine max
  peptide (1)..(50): Ceres Seq. ID no. 15226877
MMPCCHQQSKGKLRGRRADRQLEFTQLDMEMTFTPYEDMLTLNEELIRKK

SEQ ID NO: 51156 - protein, 49 aa, Glycine max
  peptide (1)..(49): Ceres Seq. ID no. 15226878
MPCCHQQSKGKLRGRRADRQLEFTQLDMEMTFTPYEDMLTLNEELIRKK

SEQ ID NO: 51157 - protein, 34 aa, Glycine max
  peptide (1)..(34): Ceres Seq. ID no. 15226879
  misc_feature (1)..(1): Xaa is any aa, unknown or other
  misc_feature (3)..(3): Xaa is any aa, unknown or other
XRXPPLVSYVGPPPKIREGVRGRHHLSFPPDCPR

SEQ ID NO: 51158 - DNA, 1467 bp, Glycine max
  misc_feature (1)..(1467): Ceres Seq. ID no. 13645078
aaataactttgaaattcattaaacacggataatatagataaactcataaacaaaatttgaaataaacgatcagtcttccctgaaacaaaagtttggccaacttaaggagaaaaaaaactcactacccgagaatccataatatcaaaacagaaacactacaaagtttataagtgatggcaaccaaatagaattccagcatttccatccaattaacataattatgctttgaggcgtccaaagaacttctgcttctcctgtgtggtctggaagcgaccatgcccaaactttgaagaggtatcgataaacttgagtttgatctcctcaagagcaacacgagaagtctgcttaaggagggattgacgcaatgtaatgaccctcttcttgggaccaacacagcatcccttgaccatgataaaatcatccttaacaacaccatagtgagggaaaccacccattggggtaatgtctttctcggtcctatcaaactcagtaagagcagagtgagattcatctccagctttgccaagcttgtaaaccttcttgttcaactcagttcggtggtggtatccattctgaccagccctggcaacagtgaatgaaactcttgcaggatgccaggcaccaatacaagcaaccttcctcaaacctctgtgagtcttacggggaaggcgggtaacaccccaacgagtgacaacaccctcataacctttacccttggtcacaccaatgatgtcaatcatctcatccttctggaacactgcatcaataggaacctgtttctcaaagaaactgtatgcaaagtccaccttttgtgcaatactaccaccattaacctgaatttccatgatatgggctttcttctgcttcaaccctttcattttcctgatctgagtgtgagccaaaacacgaaccacagtagcatacttcttcagtttctccagctgcgccccaatgtttttctttccctcctcagtttcatactgcttagagtacttggtgaaggccttcttcttggacttgcaccagttcttgtagaacctacgtttcaattcctcactcaaatgctgagcccagacagtgttcaatgttcggagaccacgtggagttttcacataacccacaacaccaacaataaccattggaggggtctcaataattgtaacaggctcacaagtttccttcttgtgaagctttgatcctggcttctcgacctctctaacaatgtgagtcataccggccttgtaacccaagaatgcagtgagcttgggtgccttggatgggtcatccttggggaatgccttcacttttcccctgtgacgagcagcacgcttcctgggaagaaatcccagtgaaccgtgccttgggtgctcgaacttcctgtgagacatccttctcctcctgaggctgctcctcgtgctgcggctagttacagtcccgaatggaggcactgggggggggggggggccc

SEQ ID NO: 51159 - protein, 194 aa, Glycine max
  peptide (1)..(194): Ceres Seq. ID no. 13645079
MPGTNTSNLPQTSVSLTGKAGNTPTSDNTLITFTLGHTNDVNHLILLEHCINRNLFLKETVCKVHLLCNTTTINLNFHDMGFLLLQPFHFPDLSVSQNTNHSSILLQFLQLRPNVFLSLLSFILLRVLGEGLLLGLAPVLVEPTFQFLTQMLSPDSVQCSETTWSFHITHNTNNNHWRGLNNCNRLTSFLLVKL

SEQ ID NO: 51160 - protein, 115 aa, Glycine max
  peptide (1)..(115): Ceres Seq. ID no. 13645080
MGFLLLQPFHFPDLSVSQNTNHSSILLQFLQLRPNVFLSLLSFILLRVLGEGLLLGLAPVLVEPTFQFLTQMLSPDSVQCSETTWSFHITHNTNNNHWRGLNNCNRLTSFLLVKL

SEQ ID NO: 51161 - DNA, 1239 bp, Glycine max
  misc_feature (1)..(1239): Ceres Seq. ID no. 13581600
gtcagctacgtaggcccccccccccaatgcttccagtgcttttgtatgatattcccaatttttgtgtagatttctttggatggtgagaattggtggaggagaatatcgtgtagataaaggagcagctccaaagatgttgaactgtcttatgtctgttggttattgctgctatatccctttgcgtattcatgttgggtaaacttgaggactgccttcaacttttggtagaaagagggttgactttttggcaatcggattccagaggctgctttaatggcttgatcctatctcccaagcaaggtctcagtgacaatttggagaaaagatctcactaaggctacatggtgtttgctatgagaatcccttggcaccgttgatacgtgagttaggacttacactatagcatgccggtggtgataactctgtcatatatgatcatgacttggaaagtctgaagaagcagagaggtattggtttgttgcactgcccacattcaattatgtatgttctaagttctctctaagatctaaatatttacctacaattgaagatgatatctacatattaaagacttttacctacagttaggagatgtaagtagaagttaatgacttttacctacacactatacatagtaggtaaaacttatagtgacagacaattaaccgttattatatgtccctcaaagttgacggaagaaatatccgtaagacaaagtctatcatacatttacctacggattttttatttagagtgacagtttttgtctatagatataggtcatttttcttgtagtgcggttctcttgattcatacaatgaaagcttctggacacaactaaatctggatgacatttcctacaatgtaccatgtgaaattgtttcaaaagatttcaatggctcttttcaaagtacaaatgctacccagatccttgattcttgtgcaatgtctcctacaactagcgaaagtaatattgttctggataatgactttgtcgactttctggatgcatacgaagatgcaatggttgataacctttggacagagtcatatgtagctaacatgttccacattccaagcgaactacttattctcttcgtggcagaatctgaatattttactccaatatataatgatctgtggggttgtcatttgtattagctcattctaatgaacaaaatcactccttgttcatagaacaatagttttgagagcaaaaaaaaaaaaaaaaaagaaatc

SEQ ID NO: 51162 - protein, 71 aa, Glycine max
  peptide (1)..(71): Ceres Seq. ID no. 13581601
MSPTTSESNIVLDNDFVDFLDAYEDAMVDNLWTESYVANMFHIPSELLILFVAESEYFTPIYNDLWGCHLY

SEQ ID NO: 51163 - protein, 69 aa, Glycine max
  peptide (1)..(69): Ceres Seq. ID no. 13581602
MTFPTMYHVKLFQKISMALFKVQMLPRSLILVQCLLQLAKVILFWIMTLSTFWMHTKMQWLITFGQSHM

SEQ ID NO: 51164 - protein, 64 aa, Glycine max
  peptide (1)..(64): Ceres Seq. ID no. 13581603
MYHVKLFQKISMALFKVQMLPRSLILVQCLLQLAKVILFWIMTLSTFWMHTKMQWLITFGQSHM

SEQ ID NO: 51165 - DNA, 1281 bp, Glycine max
  misc_feature (1)..(1281): Ceres Seq. ID no. 13581327
cccccctccagttcccactttcttgagtttaaacatacatgaagcttttgacttcaatttttttcttggttcaacagattcatgttttagcagtacaaacagtagtctctttgattgcataccaagtctgtacttttacttaatcatacaaaggtattaaatgttcatgcaaatgctacaaagcacctttaaggggatagataccacaaccatttttattcaccaacaaagggtctctcactctcaacacgctccctttacttccccaagaagatgatgatccactttccaagcttacgcttcacggaaaatctgccaaaaccacacagctggcacaccaaaacctactacctattttgcacattcattccttgtgcgattcttgcttatgctgctgaaccagcttgttcacataggtccaacagatccagagtctctggaactgacagctcaagacgaaactttggcccatcataatgatgcaatactggcctgaaagaatcttcttccaatgccttgcagagcttcctgacacggattcttacctgagctggaaaccttgattcgcctttgcactttttatcctcccaggcagttggatctatgttagagccaccaaaacttgctgcatcaaaaataccatgcagctgatgagtagtatagttataaagaaataatggtaacccaggtgttatagccctaacagaatctcgataccttggaggcaaaccaaatagctgacgtttcaagtcttcctgcattgtgtcattgttacagacaaagatgtatcctccaagcacctcattgcgcgggagtgtctccgcagcaggcaaggtcttaaaccttttgtcggttgcatttgtgttgttgctttcattgttggtgttgttgttgatctctttgttatgaagaatattaccattgtacttgttactgatcacattactcaccaagtttgcattgtttttctgatacactgcattcataccataaacaccatttcgaagcgagcttttgctcacattctcagtaaatttagagtccaggttcaacatgcttaagttaagagaatcaaatttgttctcttcctggaacccaaatttatcccttgaccttgtttcaatggggccctttgaaagatcaaggttgttcacacgctcccccttcaatcttgtctgttccgccaatttcgaagcaaccattaaccatttgtgatcctccgatgcttttgagtgtccacggagttcatcgcccaattgggggggggggcctacgtagctg

SEQ ID NO: 51166 - protein, 67 aa, Glycine max
  peptide (1)..(67): Ceres Seq. ID no. 13581328
MMIHFPSLRFTENLPKPHSWHTKTYYLFCTFIPCAILAYAAEPACSHRSNRSRVSGTDSSRRNFGPS

SEQ ID NO: 51167 - protein, 66 aa, Glycine max
  peptide (1)..(66): Ceres Seq. ID no. 13581329
MIHFPSLRFTENLPKPHSWHTKTYYLFCTFIPCAILAYAAEPACSHRSNRSRVSGTDSSRRNFGPS

SEQ ID NO: 51168 - protein, 53 aa, Glycine max
  peptide (1)..(53): Ceres Seq. ID no. 13581330
MLKLRESNLFSSWNPNLSLDLVSMGPFERSRLFTRSPFNLVCSANFEATINHL

SEQ ID NO: 51169 - protein, 51 aa, Glycine max
  peptide (1)..(51): Ceres Seq. ID no. 13581331
MKNITIVLVTDHITHQVCIVFLIHCIHTINTISKRAFAHILSKFRVQVQHA

SEQ ID NO: 51170 - DNA, 1812 bp, Glycine max
  misc_feature (1)..(1812): Ceres Seq. ID no. 15225553
gattgtttacgttggtcttgacccctctggctttgtgtgactctgacaggactatgatcctaacttacacaattaggagtgtatattttgattttatgttcaaggagatatatttaaatattccaggttcgtccttgactctacaacattccattttcataggaaaagccaaaactgaagctcgaggaagataactacgatgaaacaagaggaatggatgattacgacagcgttgctatcgttgctgtttgtttcatcttttccgccgttgagttacggagttgttcctcctcgtactctgctcaataagctgtcggagggcaaatatctcaacactcaggagctctggttcgaccaaaccctcgatcacttctctccctatgatcaccgacaattccggcaacgttactatgagtttctagactatttccggattcccgatggaccaatttttttggtaataggtggtgaaggtatattgaatggggtagcaaatgactatcttgctgtactggcaaagaagtttggagcagctatggttactcttgaacatcgctactacggaaagagtactccatttaattctttggagacagaaaatttgaaatatctttcgtccaagcaggcactctctgatttggctgtttttcggcagtattatcaggactccataaatgcaaagcttaatagaacaaaaattgaaaacccctggttcatttttggtggttcatattctggagcactcagtgcatggttccgtcttaagtttccccatttaacatgtggaagtctggctagttctgcagttgttcttgctgtttataactacacagaatttgatcagcagattggtgagtcggcaggtcctgaatgtaaagaagcgctgcaagaaactactcaactcattgaacacaaacttgcaaccagtggaaaggaattgaaggcctcttttgatgctgctgatcttgaaatagatggagactttttttatttcttggctgatgctactgctatagcgtttcaatatggaaatccagataaagtatgcaagcctcttgttgaagcaaagaaggctggagaggacttggtggatgcttatgccaaatatgtcaaagagtactacattggaacttttggtactgatgtgcagacatatgatcagaagtacttgaaaagaactgctatgaacgaggacaattctgctcgattatggtggtttcaagtttgcactgaagttgcatactttcaggtggctccctcaaatgacagtattcgctcctcaaaagtggacataaaataccatttggacctttgcaaaaatgtctttggagagggcatctttcctgatgttgatgcaactaatttatactacggaggcactaaaattgctggttcaaaaataatatttacaaatggctcacaagatccttggcgccatgcatccaagcaaacttcatctcctgatatgccttcctacatcgtcaaatgttacaattgtggccactgttctgattatcgaggatgtcctcaattccctttctccattgaaggtaatgagaaaaactgcacctctcctgatgcagttcacaaagtaaggcaaaagatttcagaacatatggacttgtggttatctgaatgcgtcgacacaggcagaagttttatatgattatttacataagatgtgaatgatgtacttttttttctaagttgttaatgatgtactataactccgcatgacttttggtatttctttccttcataagctaattatgacaccgtgaaatatatttagtgacttcgtataaattgacc

SEQ ID NO: 51171 - protein, 488 aa, Glycine max
  peptide (1)..(488): Ceres Seq. ID no. 15225554
MKQEEWMITTALLSLLFVSSFPPLSYGVVPPRTLLNKLSEGKYLNTQELWFDQTLDHFSPYDHRQFRQRYYEFLDYFRIPDGPIFLVIGGEGILNGVANDYLAVLAKKFGAAMVTLEHRYYGKSTPFNSLETENLKYLSSKQALSDLAVFRQYYQDSINAKLNRTKIENPWFIFGGSYSGALSAWFRLKFPHLTCGSLASSAVVLAVYNYTEFDQQIGESAGPECKEALQETTQLIEHKLATSGKELKASFDAADLEIDGDFFYFLADATAIAFQYGNPDKVCKPLVEAKKAGEDLVDAYAKYVKEYYIGTFGTDVQTYDQKYLKRTAMNEDNSARLWWFQVCTEVAYFQVAPSNDSIRSSKVDIKYHLDLCKNVFGEGIFPDVDATNLYYGGTKIAGSKIIFTNGSQDPWRHASKQTSSPDMPSYIVKCYNCGHCSDYRGCPQFPFSIEGNEKNCTSPDAVHKVRQKISEHMDLWLSECVDTGRSFI

SEQ ID NO: 51172 - protein, 482 aa, Glycine max
  peptide (1)..(482): Ceres Seq. ID no. 15225555
MITTALLSLLFVSSFPPLSYGVVPPRTLLNKLSEGKYLNTQELWFDQTLDHFSPYDHRQFRQRYYEFLDYFRIPDGPIFLVIGGEGILNGVANDYLAVLAKKFGAAMVTLEHRYYGKSTPFNSLETENLKYLSSKQALSDLAVFRQYYQDSINAKLNRTKIENPWFIFGGSYSGALSAWFRLKFPHLTCGSLASSAVVLAVYNYTEFDQQIGESAGPECKEALQETTQLIEHKLATSGKELKASFDAADLEIDGDFFYFLADATAIAFQYGNPDKVCKPLVEAKKAGEDLVDAYAKYVKEYYIGTFGTDVQTYDQKYLKRTAMNEDNSARLWWFQVCTEVAYFQVAPSNDSIRSSKVDIKYHLDLCKNVFGEGIFPDVDATNLYYGGTKIAGSKIIFTNGSQDPWRHASKQTSSPDMPSYIVKCYNCGHCSDYRGCPQFPFSIEGNEKNCTSPDAVHKVRQKISEHMDLWLSECVDTGRSFI

SEQ ID NO: 51173 - protein, 376 aa, Glycine max
  peptide (1)..(376): Ceres Seq. ID no. 15225556
MVTLEHRYYGKSTPFNSLETENLKYLSSKQALSDLAVFRQYYQDSINAKLNRTKIENPWFIFGGSYSGALSAWFRLKFPHLTCGSLASSAVVLAVYNYTEFDQQIGESAGPECKEALQETTQLIEHKLATSGKELKASFDAADLEIDGDFFYFLADATAIAFQYGNPDKVCKPLVEAKKAGEDLVDAYAKYVKEYYIGTFGTDVQTYDQKYLKRTAMNEDNSARLWWFQVCTEVAYFQVAPSNDSIRSSKVDIKYHLDLCKNVFGEGIFPDVDATNLYYGGTKIAGSKIIFTNGSQDPWRHASKQTSSPDMPSYIVKCYNCGHCSDYRGCPQFPFSIEGNEKNCTSPDAVHKVRQKISEHMDLWLSECVDTGRSFI

SEQ ID NO: 51174 - DNA, 1151 bp, Glycine max
  misc_feature (1)..(1151): Ceres Seq. ID no. 15171402
ataaaaacattagaccgagacaaaaccagctattttttttttagaaatggcgaatagagaagaaaacaacgagggtcacaaattcacagtgaaatatgttggactcaacggaatggaatgcgaaggcaaattgccgaggagggtggtgggagtgagaaatcactgttaccttttgaaatccaaaatcggagagggttcattctccgccgtgtggagagcggagcagagaccaccaaccggcgttgacgtggcggtgaagcaggtcttcctctccaaactcaaccctcgcctcaaggcatgtttggattgcgagatcaatttcttgtcctccgttaaccaccccaatattattcgccttcttcacttcttccaggatgatggatgtgtgtacctggtcctggagttttgtgctggagggaatcttgcttcttatattcagaatcatgggagagttcagcaacaaatagccagaaaattcatgcagcagcttgggtctggtctaaaagtattacactcgcatgacattattcacagagacttgaaaccagagaacattttgctatcaagccacggggttgaagcagtgctaaagatagctgattttggtctctcaaggactgtatgtcctggtgaatatgctgagacagtttgcggttctccattatatatggctccagaagttcttcagttccagagatatgatgacaaggcagacatgtggagtgttggggccattctttttgagcttctaaatggctacccaccttttaatggcagaaataatgttcaggtgttgagaaacatcagatcctgcacctgtcttccattttctcaactgattctttcaggattggatcctgactgtcttgatatttgttcaaggctactacgcttaaatccagtggagcgcctctcctttgatgaattttattggcatagctttctacaaagaaaactgatgggaacatgataactataccaggatttgaagtgttcacgatctttccatggtagttatcttcaaaactatcaaattcatctgtaaaagttaatgccatttccgtttctttcccatctttgatttctctcctttctgaacattggataagtgcgttacttatggggatataatctatgagttctttcttgac

SEQ ID NO: 51175 - protein, 307 aa, Glycine max
  peptide (1)..(307): Ceres Seq. ID no. 15171403
MANREENNEGHKFTVKYVGLNGMECEGKLPRRVVGVRNHCYLLKSKIGEGSFSAVWRAEQRPPTGVDVAVKQVFLSKLNPRLKACLDCEINFLSSVNHPNIIRLLHFFQDDGCVYLVLEFCAGGNLASYIQNHGRVQQQIARKFMQQLGSGLKVLHSHDIIHRDLKPENILLSSHGVEAVLKIADFGLSRTVCPGEYAETVCGSPLYMAPEVLQFQRYDDKADMWSVGAILFELLNGYPPFNGRNNVQVLRNIRSCTCLPFSQLILSGLDPDCLDICSRLLRLNPVERLSFDEFYWHSFLQRKLMGT

SEQ ID NO: 51176 - protein, 285 aa, Glycine max
  peptide (1)..(285): Ceres Seq. ID no. 15171404
MECEGKLPRRVVGVRNHCYLLKSKIGEGSFSAVWRAEQRPPTGVDVAVKQVFLSKLNPRLKACLDCEINFLSSVNHPNIIRLLHFFQDDGCVYLVLEFCAGGNLASYIQNHGRVQQQIARKFMQQLGSGLKVLHSHDIIHRDLKPENILLSSHGVEAVLKIADFGLSRTVCPGEYAETVCGSPLYMAPEVLQFQRYDDKADMWSVGAILFELLNGYPPFNGRNNVQVLRNIRSCTCLPFSQLILSGLDPDCLDICSRLLRLNPVERLSFDEFYWHSFLQRKLMGT

SEQ ID NO: 51177 - protein, 163 aa, Glycine max
  peptide (1)..(163): Ceres Seq. ID no. 15171405
MQQLGSGLKVLHSHDIIHRDLKPENILLSSHGVEAVLKIADFGLSRTVCPGEYAETVCGSPLYMAPEVLQFQRYDDKADMWSVGAILFELLNGYPPFNGRNNVQVLRNIRSCTCLPFSQLILSGLDPDCLDICSRLLRLNPVERLSFDEFYWHSFLQRKLMGT

SEQ ID NO: 51178 - DNA, 1184 bp, Glycine max
  misc_feature (1)..(1184): Ceres Seq. ID no. 14311866
aatttcatcttaataatgaacactctctctgaagcctacaaagcacaccctctccacctcagtcacattattcccttagacttttcttcagcccttagcttacctgattctcacgcatggcctcactgtcaacccaatgatgatgcatcatcatcatcatcatcatcatccatacccatcatagacctcatggatcccaatgctatggacctcataggccatgcatgtgagaagtggggtgctttccaattgaagaaccatggcataccttttggtgtcattgaagatgttgaagaagaggctaaaagactttttgctcttcccactgaacagaagttgaaggctcttcgatctcccggtggtgccactgggtatggcagagcaaggatttcaccgttcttcccaaagtttatgtggcacgaaggattcaccatcattggctctccctctcacgatgccaaaaagatatggcctaatgattatgcacgcttttgtgatttgatggagaattatgagaagcaaatgaaggttctagcggatagactaacagagatgatattcaacttaatggacataagtgaggaaaaaagaaagtgggttggtgcaagcaacataagtgaagctgttcagttaaatttctacccaagttgtcccgagccaaaccgagccatgggcttagcccctcacaccgacacttctctcttcacaattcttcaccaaagtcaaatcactggtcttcaaatcttcaaggaaggaaaagggtgggttcctgtgcaccctcaccctaataccctggtcgtgcacacaggcgatctcttgcacatcatttccaacgcaaggtttcgctgtgcacttcaccgcgtaacggtgaataggacatgggaacgttactctgtggcttatttctattctccaccgatggattatgtagtttctcctttggttcactctgttgctcgttttcgtgatgtgactgtgaaggagtatattgggattaaggctaagaattttggagaagcattgtcctttattagtacttgaaactatgtatgtatcttatgattttgttatatgtattaattccttaaatatttatctagctagatactttattaatttgcttctttgtaaatttcccatttctgttagttgttaggaagtgctagatatatatcagacttaag

SEQ ID NO: 51179 - protein, 346 aa, Glycine max
  peptide (1)..(346): Ceres Seq. ID no. 14311867
NFILIMNTLSEAYKAHPLHLSHIIPLDFSSALSLPDSHAWPHCQPNDDASSSSSSSSIPIIDLMDPNAMDLIGHACEKWGAFQLKNHGIPFGVIEDVEEEAKRLFALPTEQKLKALRSPGGATGYGRARISPFFPKFMWHEGFTIIGSPSHDAKKIWPNDYARFCDLMENYEKQMKVLADRLTEMIFNLMDISEEKRKWVGASNISEAVQLNFYPSCPEPNRAMGLAPHTDTSLFTILHQSQITGLQIFKEGKGWVPVHPHPNTLVVHTGDLLHIISNARFRCALHRVTVNRTWERYSVAYFYSPPMDYVVSPLVHSVARFRDVTVKEYIGIKAKNFGEALSFIST

SEQ ID NO: 51180 - protein, 341 aa, Glycine max
  peptide (1)..(341): Ceres Seq. ID no. 14311868
MNTLSEAYKAHPLHLSHIIPLDFSSALSLPDSHAWPHCQPNDDASSSSSSSSIPIIDLMDPNAMDLIGHACEKWGAFQLKNHGIPFGVIEDVEEEAKRLFALPTEQKLKALRSPGGATGYGRARISPFFPKFMWHEGFTIIGSPSHDAKKIWPNDYARFCDLMENYEKQMKVLADRLTEMIFNLMDISEEKRKWVGASNISEAVQLNFYPSCPEPNRAMGLAPHTDTSLFTILHQSQITGLQIFKEGKGWVPVHPHPNTLVVHTGDLLHIISNARFRCALHRVTVNRTWERYSVAYFYSPPMDYVVSPLVHSVARFRDVTVKEYIGIKAKNFGEALSFIST

SEQ ID NO: 51181 - protein, 283 aa, Glycine max
  peptide (1)..(283): Ceres Seq. ID no. 14311869
MDPNAMDLIGHACEKWGAFQLKNHGIPFGVIEDVEEEAKRLFALPTEQKLKALRSPGGATGYGRARISPFFPKFMWHEGFTIIGSPSHDAKKIWPNDYARFCDLMENYEKQMKVLADRLTEMIFNLMDISEEKRKWVGASNISEAVQLNFYPSCPEPNRAMGLAPHTDTSLFTILHQSQITGLQIFKEGKGWVPVHPHPNTLVVHTGDLLHIISNARFRCALHRVTVNRTWERYSVAYFYSPPMDYVVSPLVHSVARFRDVTVKEYIGIKAKNFGEALSFIST

SEQ ID NO: 51182 - DNA, 1975 bp, Glycine max
  misc_feature (1)..(1975): Ceres Seq. ID no. 15177343
atcattcacacacgttttgcactttttcctctctctctctctctctaaaatacttcttttctttctctcagactctgaaactctttttctctctctgtttctaaggccaaagaagaacaacaccttcaccgccacctaaactaacaacagcagcataagatttgaaggtaataaacaattgatggatgagtattctcgtaaaagaggtgtagatgggatggtattccctagaaaggggatgggccatgtatttagagatactgctaatactagagatcgaaatggtcaaatttgtagtcgattgggttgcagtagcagagccaatcttcccaaagttgctcacgtcagatcttctgaaaaaggtaaatctttgaggccttcatttcagtcctcttcaagtagcaaggatgcaattggaagttcctctagaactactagttacccagcaaaacgacttatagaacctcggaaaacattatcctctcagtttgaggcacattcatctgaaactagtagtgtacaggacggaccagaattttcagtgcccatccctccaacagaagaaattcggagagggcctctagttgaaggagaaagtacagagtctagtaatgcaatattgatggaagtaggaagttccagtgcagtatcaaatactagatctcaaagagctggattgcgtgcgcaagaaattaaaagcactggtgcagtgaggcgggctgtttccagcaggtatgggttgagaaacctcaaatgcaactctatatctgacgtcgtcccagctggttgttcaccgttggattcaagccttaatagaaggaaggatacaataaaaaagggaaactgtgaagggggaaatagttccactgttagggggaaaaatatcactgggtcttcactggaaggacggaattctggctccagaaatggcatatctatatccgattcaagaagatctagaaatgttccttctcaccggagcaccagcgtggcatcagtaagaactcaaagatcaattagtggtcaagccaggggaaggttttgtagccaaggaaacgaaaaccctgtggcaagcagtgattcccctcttaacattcccctttcacctcattctggtgatcttgatgctcctggcttttcatatcatacttctatggagactcctctaagtggctcaagctcttatggtagaccaggcaatagcagtgagcagttaagtggtgttatgcctgcatctcctgcagaagatgacaacactcattctctaataaatagggatagctttcgacattacaacatgggtggtattgcagaggtgttattggcacttgagaggattgaacaagatgcagagctaacccatgagcaaattcttttgttggaggccaacttgttcctcagtggattaaacttttatgatcaccacagagacatgcggttggatattgataacatgtcctatgaggaacttttagctctagaagagagaatgggaactgtgagcaccgctctgccggaggaagcacttgcagaatgtctgaaaagaagtaaatatcagtctgcacctttagatgatgcagatgagagttgtaatgaggataaggatgatatcaaatgctgcatttgccaggaggaatatgttgttggagatgaagttggggatctgcaatgtgaacatagatttcatgtggtttgcatacaggagtggatgcggcttaagaactggtgccctgtttgtaaagtatctgcagcactgtccaattcatttttacctcattgattgcattgttccttttcttttacttttcattttgtacaaaatacagatacagatgctcctcacctcatcttattgatccatatgtacatacatagccaatgtctccatccataaaaactaataacctaagccaccggcttgatggacactggaacttgctatcctgcgcatgaaaatagtcccatctttttgttt

SEQ ID NO: 51183 - protein, 532 aa, Glycine max
  peptide (1)..(532): Ceres Seq. ID no. 15177344
MDEYSRKRGVDGMVFPRKGMGHVFRDTANTRDRNGQICSRLGCSSRANLPKVAHVRSSEKGKSLRPSFQSSSSSKDAIGSSSRTTSYPAKRLIEPRKTLSSQFEAHSSETSSVQDGPEFSVPIPPTEEIRRGPLVEGESTESSNAILMEVGSSSAVSNTRSQRAGLRAQEIKSTGAVRRAVSSRYGLRNLKCNSISDVVPAGCSPLDSSLNRRKDTIKKGNCEGGNSSTVRGKNITGSSLEGRNSGSRNGISISDSRRSRNVPSHRSTSVASVRTQRSISGQARGRFCSQGNENPVASSDSPLNIPLSPHSGDLDAPGFSYHTSMETPLSGSSSYGRPGNSSEQLSGVMPASPAEDDNTHSLINRDSFRHYNMGGIAEVLLALERIEQDAELTHEQILLLEANLFLSGLNFYDHHRDMRLDIDNMSYEELLALEERMGTVSTALPEEALAECLKRSKYQSAPLDDADESCNEDKDDIKCCICQEEYVVGDEVGDLQCEHRFHVVCIQEWMRLKNWCPVCKVSAALSNSFLPH

SEQ ID NO: 51184 - protein, 520 aa, Glycine max
  peptide (1)..(520): Ceres Seq. ID no. 15177345
MVFPRKGMGHVFRDTANTRDRNGQICSRLGCSSRANLPKVAHVRSSEKGKSLRPSFQSSSSSKDAIGSSSRTTSYPAKRLIEPRKTLSSQFEAHSSETSSVQDGPEFSVPIPPTEEIRRGPLVEGESTESSNAILMEVGSSSAVSNTRSQRAGLRAQEIKSTGAVRRAVSSRYGLRNLKCNSISDVVPAGCSPLDSSLNRRKDTIKKGNCEGGNSSTVRGKNITGSSLEGRNSGSRNGISISDSRRSRNVPSHRSTSVASVRTQRSISGQARGRFCSQGNENPVASSDSPLNIPLSPHSGDLDAPGFSYHTSMETPLSGSSSYGRPGNSSEQLSGVMPASPAEDDNTHSLINRDSFRHYNMGGIAEVLLALERIEQDAELTHEQILLLEANLFLSGLNFYDHHRDMRLDIDNMSYEELLALEERMGTVSTALPEEALAECLKRSKYQSAPLDDADESCNEDKDDIKCCICQEEYVVGDEVGDLQCEHRFHVVCIQEWMRLKNWCPVCKVSAALSNSFLPH

SEQ ID NO: 51185 - protein, 513 aa, Glycine max
  peptide (1)..(513): Ceres Seq. ID no. 15177346
MGHVFRDTANTRDRNGQICSRLGCSSRANLPKVAHVRSSEKGKSLRPSFQSSSSSKDAIGSSSRTTSYPAKRLIEPRKTLSSQFEAHSSETSSVQDGPEFSVPIPPTEEIRRGPLVEGESTESSNAILMEVGSSSAVSNTRSQRAGLRAQEIKSTGAVRRAVSSRYGLRNLKCNSISDVVPAGCSPLDSSLNRRKDTIKKGNCEGGNSSTVRGKNITGSSLEGRNSGSRNGISISDSRRSRNVPSHRSTSVASVRTQRSISGQARGRFCSQGNENPVASSDSPLNIPLSPHSGDLDAPGFSYHTSMETPLSGSSSYGRPGNSSEQLSGVMPASPAEDDNTHSLINRDSFRHYNMGGIAEVLLALERIEQDAELTHEQILLLEANLFLSGLNFYDHHRDMRLDIDNMSYEELLALEERMGTVSTALPEEALAECLKRSKYQSAPLDDADESCNEDKDDIKCCICQEEYVVGDEVGDLQCEHRFHVVCIQEWMRLKNWCPVCKVSAALSNSFLPH

SEQ ID NO: 51186 - DNA, 1121 bp, Glycine max
  misc_feature (1)..(1121): Ceres Seq. ID no. 13638532
aagcgaaagcaaaaccgcaggactagcaggagagacagagatcgcccgaaccctaaccctaccagcacctcccgtcgccggctgagatggcgatggacgcggagcggcggcaggcggagctgatcgagcagttttcggcgcaggcggcggcgctctcctcggctcctcagctggcggcgctcgtgctcgaggccacctcccacccggcgctctttgccttctccgagctcctcacccttccagccctctccaagctaacgggcacgcagtacgcctcgtcgctggacctgctccgcctcttcgcctacggcaccctcaaggactacaagagtaattctagcgccctccctgcattgttgcctgatcaagcccggaagctgaagcaactcagtgtgctaactttggctgagtcaaccaaggtacttccatatgatcagctcatgcaagagctagacgtttccaatgtgagagaacttgaagatttcctcatcaatgagtgcatgtactcaggtattgtcagaggcaagttggaccaactgcggcggtgctttgaagtacaatttgcagctggaagggacctcacacatgatcagctaaccaacatgattgagaccttgtctgactggttgggaacatcagataatttattacaccaaattcaggagaaaatcaagtgggcggatacaacaagtgaatcgaacaagaagcaccagaaagaatttgaagacagagtggaagaagccaagaagtcagtcaaggcagacaatgacttacgggggcatgacgactttctctctgaatctggaggaataatggattttgaggaggaccgcatccgaccaaaaaggaggcgacaaccaatgtcatagtttgactgaagtatcacacctatggtccctgctcgcagaagtgacgaatgctgttcttgagacattttgtcaccggagtttaggagcgtcaattagggtgctttccatgaagcgagtctgttgagaaaacgcttgtttttggtatgagatgttacaaggagatgatttactgccgcatttattaagtagcacaaagggcatatgggtgacttagcactgtaaagattatggttctgaaaaggttggtgaccc

SEQ ID NO: 51187 - protein, 260 aa, Glycine max
  peptide (1)..(260): Ceres Seq. ID no. 13638533
MAMDAERRQAELIEQFSAQAAALSSAPQLAALVLEATSHPALFAFSELLTLPALSKLTGTQYASSLDLLRLFAYGTLKDYKSNSSALPALLPDQARKLKQLSVLTLAESTKVLPYDQLMQELDVSNVRELEDFLINECMYSGIVRGKLDQLRRCFEVQFAAGRDLTHDQLTNMIETLSDWLGTSDNLLHQIQEKIKWADTTSESNKKHQKEFEDRVEEAKKSVKADNDLRGHDDFLSESGGIMDFEEDRIRPKRRRQPMS

SEQ ID NO: 51188 - protein, 258 aa, Glycine max
  peptide (1)..(258): Ceres Seq. ID no. 13638534
MDAERRQAELIEQFSAQAAALSSAPQLAALVLEATSHPALFAFSELLTLPALSKLTGTQYASSLDLLRLFAYGTLKDYKSNSSALPALLPDQARKLKQLSVLTLAESTKVLPYDQLMQELDVSNVRELEDFLINECMYSGIVRGKLDQLRRCFEVQFAAGRDLTHDQLTNMIETLSDWLGTSDNLLHQIQEKIKWADTTSESNKKHQKEFEDRVEEAKKSVKADNDLRGHDDFLSESGGIMDFEEDRIRPKRRRQPMS

SEQ ID NO: 51189 - protein, 142 aa, Glycine max
  peptide (1)..(142): Ceres Seq. ID no. 13638535
MQELDVSNVRELEDFLINECMYSGIVRGKLDQLRRCFEVQFAAGRDLTHDQLTNMIETLSDWLGTSDNLLHQIQEKIKWADTTSESNKKHQKEFEDRVEEAKKSVKADNDLRGHDDFLSESGGIMDFEEDRIRPKRRRQPMS

SEQ ID NO: 51190 - DNA, 686 bp, Glycine max
  misc_feature (1)..(686): Ceres Seq. ID no. 13594525
ttttttttttgttacaaataactgatttcatcattcatgcaagagcaaattggacagtactacgagggaaactgatacaggagcatagggttctagattcagaagcaacatttaactgaaactaagactcgaaccaaactttgaattcccagttaatccagctatagaatgccactttgttatgtttccaacgctttagtgggggcgcagcttctccttgggcctgatgtcattgctgtggccgcacttcttcttgcggcagttggcagccctgaggggcaggcgtgcatagcacttgcggcacacaagcctgtgctgcatgtacttgagcgcaagcacgcgcaggttaggctccatcctgctggggtagaccccgcccttgccaccgccgacgaggcgcagcgcgaggtgaagcgtggactccttgtggatgctgtagtcggccagggtgcggccatcgtcgagctgcttccccgcgaagatgaggcgctgctggtccggctggataccttccttgtcgtggatcttggccttgacgctgtcgacggccgcgcaactctcgacctcgagcgtcatggtctccccggtcggcgtcttcacgaagatctgcatcatctcgccgccggttgctcgctccccctctgctctcctctcgccgggcggtggtggtagtggtggtggaagtg

SEQ ID NO: 51191 - protein, 167 aa, Glycine max
  peptide (1)..(167): Ceres Seq. ID no. 13594526
MPLCYVSNALVGAQLLLGPDVIAVAALLLAAVGSPEGQACIALAAHKPVLHVLERKHAQVRLHPAGVDPALATADEAQREVKRGLLVDAVVGQGAAIVELLPREDEALLVRLDTFLVVDLGLDAVDGRATLDLERHGLPGRRLHEDLHHLAAGCSLPLCSPLAGRWW

SEQ ID NO: 51192 - DNA, 643 bp, Glycine max
  misc_feature (1)..(643): Ceres Seq. ID no. 13594460
ctagaacatcctaatcgaaaaatttattataatacaatggatgagattcacatgcctcctcctgtggtaacagttgtcctaaaagttcgaatgcattgtgaagcatgtgctcaagttatacagaagcgaatccgcaagattaaaggagtagaatcagtggaaacagacttggcaaatgatcaagttatagtaaaaggtgtggtcgaccctgccaagcttgttgatcatgtatataagaggaccaaaaagcaagcctctattgtgaaggacggagaaaagaaggaagaagaaaagaaagaagaggagaaaaaggaagagaaagaagaagagaaaagaggtgaagaagaaaacaagggaggagaagataacaaaactgaaatcaaacgaagtgaatactggccatccaaaaactacatcgactatgcttatgaccccgagattttcagcgacgagaacccaaatgcctgctctgttatgtaaaccagcaagtaattccgtatttcagttggaacagtaattagctgaagtagttttcttttcaatgtttttctaagaatatgtaccagtgtgagtatgttaagggtatattggttcctttacatagcgtccctcaaagttagatgtcttatttcttgtgcttttg

SEQ ID NO: 51193 - protein, 159 aa, Glycine max
  peptide (1)..(159): Ceres Seq. ID no. 13594461
LEHPNRKIYYNTMDEIHMPPPVVTVVLKVRMHCEACAQVIQKRIRKIKGVESVETDLANDQVIVKGVVDPAKLVDHVYKRTKKQASIVKDGEKKEEEKKEEEKKEEKEEEKRGEEENKGGEDNKTEIKRSEYWPSKNYIDYAYDPEIFSDENPNACSVM

SEQ ID NO: 51194 - protein, 147 aa, Glycine max
  peptide (1)..(147): Ceres Seq. ID no. 13594462
MDEIHMPPPVVTVVLKVRMHCEACAQVIQKRIRKIKGVESVETDLANDQVIVKGVVDPAKLVDHVYKRTKKQASIVKDGEKKEEEKKEEEKKEEKEEEKRGEEENKGGEDNKTEIKRSEYWPSKNYIDYAYDPEIFSDENPNACSVM

SEQ ID NO: 51195 - protein, 142 aa, Glycine max
  peptide (1)..(142): Ceres Seq. ID no. 13594463
MPPPVVTVVLKVRMHCEACAQVIQKRIRKIKGVESVETDLANDQVIVKGVVDPAKLVDHVYKRTKKQASIVKDGEKKEEEKKEEEKKEEKEEEKRGEEENKGGEDNKTEIKRSEYWPSKNYIDYAYDPEIFSDENPNACSVM

SEQ ID NO: 51196 - DNA, 1230 bp, Glycine max
  misc_feature (1)..(1230): Ceres Seq. ID no. 15177119
accaccacaggagcgcgcgacgcagagatttgattcagggagaagagaatggcggcgccgtcgtccctcgcctcctcccacctctcccgcctcgccgctgccgcaccggccccgcagcaccaccaccagaaccaccagctccgcctcggctgctcccgccgccgcgcgcagcgcctcgtcgccatggccggatccggaaagttcttcgtcggaggcaactggaagtgcaatggaacaaaggaatccattagcaagcttgtctctgatttgaatgctgccacactcgaaagcgatgtagatgttgtggtagcaccgccattcatctatatcgaccaggtcaagagttcactaactggacgtattgaggtgtctgctcaaaacacatggattggaaaaggaggagctttcactggagagatcagtgcggagcagttggtggacattggctgccaatgggttattcttggtcactctgagcgcagacatgttatcggtgaagatgatgagtttattgggaagaaggctgcatatgcattgagtcaaaatcttaaggttatggcatgcataggagaattgttggaagagagggaagctgggaaaactttcgatgtctgttttaagcagatgaaggcttttgcagataatattacggactggacaaacgttgttattgcgtatgagcctgtgtgggctattggaaccggaaaggttgcttctcctgagcaagctcaagaagttcatgccgctgtccgtgattggttaaaaaccaatgtatcagctgatgttgcttctaccgttcgaattatatacggaggttctgtaaacgcagcaaactgtgcagagctagcaaagaaggaagatattgatggcttccttgtcggcggtgcctctttgaagggtccggactttgccaccatctgcaactcagtgacgtcgaagaaagttacagcctgatgtgagaccaccacctatatggtagaaataagtgatgagaaagagaggcagcctggctaccgcgtcgaaaaagcgtgagataggtgctccacgtgaaccgtgaatcgtgtcgagtcgtgatctggttttgctgattcgtagaacgaagaaatacaaataatacgacgtggcgccattttgcttctcatggaatttctgtacgaaacgggagttttcttctttgtacgtgagggagtggtcacactcacacctgaattgaagtgtgctcatgctaat

SEQ ID NO: 51197 - protein, 301 aa, Glycine max
  peptide (1)..(301): Ceres Seq. ID no. 15177120
MAAPSSLASSHLSRLAAAAPAPQHHHQNHQLRLGCSRRRAQRLVAMAGSGKFFVGGNWKCNGTKESISKLVSDLNAATLESDVDVVVAPPFIYIDQVKSSLTGRIEVSAQNTWIGKGGAFTGEISAEQLVDIGCQWVILGHSERRHVIGEDDEFIGKKAAYALSQNLKVMACIGELLEEREAGKTFDVCFKQMKAFADNITDWTNVVIAYEPVWAIGTGKVASPEQAQEVHAAVRDWLKTNVSADVASTVRIIYGGSVNAANCAELAKKEDIDGFLVGGASLKGPDFATICNSVTSKKVTA

SEQ ID NO: 51198 - protein, 256 aa, Glycine max
  peptide (1)..(256): Ceres Seq. ID no. 15177121
MAGSGKFFVGGNWKCNGTKESISKLVSDLNAATLESDVDVVVAPPFIYIDQVKSSLTGRIEVSAQNTWIGKGGAFTGEISAEQLVDIGCQWVILGHSERRHVIGEDDEFIGKKAAYALSQNLKVMACIGELLEEREAGKTFDVCFKQMKAFADNITDWTNVVIAYEPVWAIGTGKVASPEQAQEVHAAVRDWLKTNVSADVASTVRIIYGGSVNAANCAELAKKEDIDGFLVGGASLKGPDFATICNSVTSKKVTA

SEQ ID NO: 51199 - DNA, 946 bp, Glycine max
  misc_feature (1)..(946): Ceres Seq. ID no. 13594527
aacatcatcagcttgagccaccgatcctcctgatccaccctcgccttacgagactctttcagagcagctcgcgccacctttcgccagctagccatggccgccgcacggacctacgtcgacttcgtgccgtcgcacgacctcgtcgaggacgccgccaagcagaccttcgtcgtcaacctccccgggttcaagaaggagcacctgagggtgcagatcgacaactacggccggctgagggtcagcggcgagcggccgctcgagggcggccagtggagccgcttccgcaaggagttccaggtccccgagggctgcaacgccggcggcatccgcgccaggttcgagaaggacggcgtcctccacgtcatcatgcccaggctcacgcccctcgaggacgcctcaaagtcagcggcagaccacgaggcggaagctgcgcggcacgccgctgccgcagaagagaagaagcgccacgaggagatggaggaggacgctaggaagcgtcgtgcgggtgacgaggacgactacgccagcgacgacggggaaggcgcacgccagccggcgtctgccggccggcaggcgtacggcttcgccagggaccggagcaggagtgggatggtgagggcactgctcctcgccgtggcggtggccttggttggcgttgctggcctgtatgctcggtacaggtggatggacccgtcggctgaggcggcgccggcagatggtgccaccgtcggcctctctgactattgatcaccagcaccaagcattcattcacaccgctgaagataagatcattcggtaaagaaaaacagtggacaagatacgggactgactacacgagctgcctgaaatactacgtgtaaatatgatctcactactgtaacttatacacactaataagcttgcacgtgcaatgcacgtctcatttgacttaaaagtttgaatatgc

SEQ ID NO: 51200 - protein, 217 aa, Glycine max
  peptide (1)..(217): Ceres Seq. ID no. 15221376
MAAARTYVDFVPSHDLVEDAAKQTFVVNLPGFKKEHLRVQIDNYGRLRVSGERPLEGGQWSRFRKEFQVPEGCNAGGIRARFEKDGVLHVIMPRLTPLEDASKSAADHEAEAARHAAAAEEKKRHEEMEEDARKRRAGDEDDYASDDGEGARQPASAGRQAYGFARDRSRSGMVRALLLAVAVALVGVAGLYARYRWMDPSAEAAPADGATVGLSDY

SEQ ID NO: 51201 - protein, 162 aa, Glycine max
  peptide (1)..(162): Ceres Seq. ID no. 15221377
HHQLEPPILLIHPRLTRLFQSSSRHLSPASHGRRTDLRRLRAVARPRRGRRQADLRRQPPRVQEGAPEGADRQLRPAEGQRRAAARGRPVEPLPQGVPGPRGLQRRRHPRQVREGRRPPRHHAQAHAPRGRLKVSGRPRGGSCAARRCRRREEAPRGDGGGR

SEQ ID NO: 51202 - protein, 126 aa, Glycine max
  peptide (1)..(126): Ceres Seq. ID no. 15221378
MPRLTPLEDASKSAADHEAEAARHAAAAEEKKRHEEMEEDARKRRAGDEDDYASDDGEGARQPASAGRQAYGFARDRSRSGMVRALLLAVAVALVGVAGLYARYRWMDPSAEAAPADGATVGLSDY

SEQ ID NO: 51203 - DNA, 994 bp, Glycine max
  misc_feature (1)..(994): Ceres Seq. ID no. 13594464
atattgagttcttgaccaactgcgcgcacctcatcgagcctgcctaaccccgcccgcccgctaaaccctaccctactcaccggcggcagaggttttcgtgagctcgtccgacaatggcgtccctttgagaactcgtgcgaggtcggggtgttcgcgaggctcaccaacgcctactgcctcgtcccggccggtggggcggagaatttcaccagtgtgtttgaggccgagctcgccgacaccgtcccggtggtcaaggcatccatcggcggcatgaggatcctcaggacattgtgcgtgggcaacaagaagggccttcttctaccacacaccactaacgaccaagagctccagcacctcaagaatagcctgcctgatgaggtggtcgtccagcgtgtcgacgagcggctctccgccctcggcaactgcattgcctgcaacgaccacgtggctctcacaaaaccagatctcaccaaggaaaccgaggagatcatctcggacgttcttggggtggaggtgttcaggcagaccatcgcagggagcatcctggtcggcagctcctgcgccttctccaacaaagggggacttgttcacccgcagacgtcggtggaggacctggacgagctgtcgacgctgctgcaggtgcccctcgtcgccggcaccgtcaaccgggggagcgatggcatcgcggccggcatggtggtcaacgactgggcggccttctgcggttccgacaccacggccaccgagctctcagtggtggagagcgtcttcaggctgagggacgcccggccgggggcattgggcgccgacgtcaggaaatccttggttgaaagctgctttctttaggggaattttgccttcccttgctgtatctgtgtttgtcatgaaatattctcaactagtactccctccgcaaaaaaaaaaaaaaaaaagcttatcgataccgtcgacctstttaaacacaataaagttggaacgggaggggggaaaggat

SEQ ID NO: 51204 - protein, 191 aa, Glycine max
  peptide (1)..(191): Ceres Seq. ID no. 15221366
MRILRTLCVGNKKGLLLPHTTNDQELQHLKNSLPDEVVVQRVDERLSALGNCIACNDHVALTKPDLTKETEEIISDVLGVEVFRQTIAGSILVGSSCAFSNKGGLVHPQTSVEDLDELSTLLQVPLVAGTVNRGSDGIAAGMVVNDWAAFCGSDTTATELSVVESVFRLRDARPGALGADVRKSLVESCFL

SEQ ID NO: 51205 - protein, 134 aa, Glycine max
  peptide (1)..(134): Ceres Seq. ID no. 15221367
MRWSSSVSTSGSPPSATALPATTTWLSQNQISPRKPRRSSRTFLGWRCSGRPSQGASWSAAPAPSPTKGDLFTRRRRWRTWTSCRRCCRCPSSPAPSTGGAMASRPAWWSTTGRPSAVPTPRPPSSQWWRASSG

SEQ ID NO: 51206 - DNA, 1116 bp, Glycine max
  misc_feature (1)..(1116): Ceres Seq. ID no. 15172958
acagggtaaggccggaacattttgttatcatcgccgtcgtcaagatgccgccggccggagaactccaacatcaatccccatcaaaagacaaacaacccaccgatactcaatctgccgaagcagctgcggcagcgattgccgcggctgcggcggatgcggaagctgcgggattatggacacagatcaaggcggaggctcgccgtgacgctgaggcggagccggcgctagctagctacctttactcgacgattctttctcactcgtctctcgagcgatccatctcgtttcatttgggaaacaagctctgctcatcgacgcttctctccacgcttctatacgatctgttcttgaacacgttcacctccgatccttctctccgcaacgccaccgtcgcggatctccgtgctgctcgtgttcgtgatccggcgtgtatctccttctcccattgccttctcaattacaaaggcttcttagcgattcaggcacatcgtatctcgcacaagctatggactcaaacaagaaagccactagccttagctctcaactcgcgtatctccgaagtgttcgccgtcgatatccatccagcagcgaagatcggaaaaggtatacttctcgatcacgcaaccggagttgtcatcggagaaacagctgtgatagggaacaacgtttcgatcctccaccacgtgacgctcggtggaacaggtaaagcttgcggagacaggcatcccaagatcggtgacggttgcttgatcggagctggagcgactattctcgggaatgtcaagatcggttgtggagctaaagtaggtgctggatctgtggttctgatcgacatccctccacgagctacggcggttgggaatccggcgagacttgtcggaggaaaagagaaaccgacgattcatgatgaggagtgtccgggagaatcgatggatcatacttcgtttatctcggaatggtcagactacatcatttgaaattattaccgagttttgttgtgttatcgagctactcgagattataaggtaaacgtgatggactgtctttactgagctctgtcggatttatagactactggcatgttcagtgcaataataatgagtttagtttggtctt

SEQ ID NO: 51207 - protein, 324 aa, Glycine max
  peptide (1)..(324): Ceres Seq. ID no. 15172959
RVRPEHFVIIAVVKMPPAGELQHQSPSKDKQPTDTQSAEAAAAAIAAAAADAEAAGLWTQIKAEARRDAEAEPALASYLYSTILSHSSLERSISFHLGNKLCSSTLLSTLLYDLFLNTFTSDPSLRNATVADLRAARVRDPACISFSHCLLNYKGFLAIQAHRISHKLWTQTRKPLALALNSRISEVFAVDIHPAAKIGKGILLDHATGVVIGETAVIGNNVSILHHVTLGGTGKACGDRHPKIGDGCLIGAGATILGNVKIGCGAKVGAGSVVLIDIPPRATAVGNPARLVGGKEKPTIHDEECPGESMDHTSFISEWSDYII

SEQ ID NO: 51208 - protein, 310 aa, Glycine max
  peptide (1)..(310): Ceres Seq. ID no. 15172960
MPPAGELQHQSPSKDKQPTDTQSAEAAAAAIAAAAADAEAAGLWTQIKAEARRDAEAEPALASYLYSTILSHSSLERSISFHLGNKLCSSTLLSTLLYDLFLNTFTSDPSLRNATVADLRAARVRDPACISFSHCLLNYKGFLAIQAHRISHKLWTQTRKPLALALNSRISEVFAVDIHPAAKIGKGILLDHATGVVIGETAVIGNNVSILHHVTLGGTGKACGDRHPKIGDGCLIGAGATILGNVKIGCGAKVGAGSVVLIDIPPRATAVGNPARLVGGKEKPTIHDEECPGESMDHTSFISEWSDYII

SEQ ID NO: 51209 - DNA, 909 bp, Glycine max
  misc_feature (1)..(909): Ceres Seq. ID no. 12608945
acgacgacacacagagccttggaccggaccaacaaacgaactgtacccgcgactgcgagcgagcgagcgagcgaaccgaggaggacagcgcaaccgccggatcgatccgtcccctccccgccgatcgccaccgttacccggagacttcgctcgaacccggccgaaggcgtcggccatgggctgctcctcctccgtgccagctagaagcaccggagggctgaacaatatcaacggtagctcttctgctgctgattcaaatgacttgcgtgccaagttggtattgctcggagattctggtgttggaaaaagctgcatcgttcttcggtttgtccgcggtcagttcgatccaacttccaaggtaactgttggtgcatcatttttatcacaaacattggcgttggaggattcgacaatagtgaagtttgaaatctgggatactgctggacaagagagatatgctgccttggcacctctttactacagaggagctgctgctgcggttgttgtctatgacataactagtccagaatcattcaagaaagcacaatattgggtgaaggaacttcaaaaacatggtagtcctggtattgtcatggtattggttggtaataaagctgatctacatgaaagtcgaagtgtaccttctcaggaggcacaagagtatgcagagaagaacagcatgttattcatggagacgtcagcaaaaacatctgataatataaatcaagtatttgaggaaatcgcgaagaggttgcccaagccaacggcgtcctgataaataaatagctctcgtgtactatattgagatggagtgacacgcttacaagtctgtaccatgtaatgcatgtaaatgcccgaggttaaactgggcatttgattggaaattgaggataatgtaaagctagctta

SEQ ID NO: 51210 - protein, 257 aa, Glycine max
  peptide (1)..(257): Ceres Seq. ID no. 12608946
RRHTEPWTGPTNELYPRLRASERANRGGQRNRRIDPSPPRRSPPLPGDFARTRPKASAMGCSSSVPARSTGGLNNINGSSSAADSNDLRAKLVLLGDSGVGKSCIVLRFVRGQFDPTSKVTVGASFLSQTLALEDSTIVKFEIWDTAGQERYAALAPLYYRGAAAAVVVYDITSPESFKKAQYWVKELQKHGSPGIVMVLVGNKADLHESRSVPSQEAQEYAEKNSMLFMETSAKTSDNINQVFEEIAKRLPKPTAS

SEQ ID NO: 51211 - protein, 199 aa, Glycine max
  peptide (1)..(199): Ceres Seq. ID no. 12608947
MGCSSSVPARSTGGLNNINGSSSAADSNDLRAKLVLLGDSGVGKSCIVLRFVRGQFDPTSKVTVGASFLSQTLALEDSTIVKFEIWDTAGQERYAALAPLYYRGAAAAVVVYDITSPESFKKAQYWVKELQKHGSPGIVMVLVGNKADLHESRSVPSQEAQEYAEKNSMLFMETSAKTSDNINQVFEEIAKRLPKPTAS

SEQ ID NO: 51212 - DNA, 1175 bp, Glycine max
  misc_feature (1)..(1175): Ceres Seq. ID no. 14311659
ctctcaaccacgagtgggatcgatcctcccgcgtaccaagccaccgactaacatggcagcgtctctccaagccgcggccacgctgatgccggccaagatcggcggccgggcctcctccgcgcggccgtcgtcgcacgtcgcccgggcgttcggcgttgacgctggcgccaggatcacctgctccctgcagtccgacatcagggaggtcgcaagcaagtgcgccgacgccgccaagatggccggcttcgccctcgccacctctgccctcctcgtctccggcgcgagcgcggagggggcgcccaagaggctgaccttcgacgagatccagagcaagacctacatggaggtgaagggtaccggcaccgcgaaccagtgcccgaccatcgacggcggcgtcgactccttccccttcaaggccggcaagtacgagatgaagaagttctgcctggagcccacctccttcaccgtcaaggccgagggcatccagaagaacgagccgccggccttccagaaaaccaagctcatgacccgtctcacctacacccttgacgagatggaaggcccgctcgaggtcggcgccgacggcaccctcaagttcgaggagaaggacggcatcgactacgcggccgtcaccgtgcagctccccggaggcgagcgagtgcccttcctcttcaccgtcaagcagctcgtcgctaccggcaagcccgagagcttcagcgggcccttcctcgtgcccagctacaggggttcgtctttcctcgacccaaagggccgtggtggctctactggctacgacaacgccgtggcgctacccgccggaggcagaggagacgaggaggagttggctaaggagaacgtgaagaacgcgtcctcgtccacgggcaacatcacgctcagcgtgaccaagagcaagccggagaccggcgaggtgatcggtgtcttcgagagcgtgcagccgtcagacaccgacctcggcgccaaggcgcccaaggatgtcaagatccagggtgtgtggtacgcgcagctcgagtctaactagagcagagcagaagtgaagatactcatcttgtgtgcatgcgtacgtgggttgatcggtggagaggaaacaatcgaggcaacaaatgtgtttgtgtgtgtatctagtaatctaaacccagggtgtcggtttatatttt

SEQ ID NO: 51213 - protein, 345 aa, Glycine max
  peptide (1)..(345): Ceres Seq. ID no. 14311660
SQPRVGSILPRTKPPTNMAASLQAAATLMPAKIGGRASSARPSSHVARAFGVDAGARITCSLQSDIREVASKCADAAKMAGFALATSALLVSGASAEGAPKRLTFDEIQSKTYMEVKGTGTANQCPTIDGGVDSFPFKAGKYEMKKFCLEPTSFTVKAEGIQKNEPPAFQKTKLMTRLTYTLDEMEGPLEVGADGTLKFEEKDGIDYAAVTVQLPGGERVPFLFTVKQLVATGKPESFSGPFLVPSYRGSSFLDPKGRGGSTGYDNAVALPAGGRGDEEELAKENVKNASSSTGNITLSVTKSKPETGEVIGVFESVQPSDTDLGAKAPKDVKIQGVWYAQLESN

SEQ ID NO: 51214 - protein, 328 aa, Glycine max
  peptide (1)..(328): Ceres Seq. ID no. 14311661
MAASLQAAATLMPAKIGGRASSARPSSHVARAFGVDAGARITCSLQSDIREVASKCADAAKMAGFALATSALLVSGASAEGAPKRLTFDEIQSKTYMEVKGTGTANQCPTIDGGVDSFPFKAGKYEMKKFCLEPTSFTVKAEGIQKNEPPAFQKTKLMTRLTYTLDEMEGPLEVGADGTLKFEEKDGIDYAAVTVQLPGGERVPFLFTVKQLVATGKPESFSGPFLVPSYRGSSFLDPKGRGGSTGYDNAVALPAGGRGDEEELAKENVKNASSSTGNITLSVTKSKPETGEVIGVFESVQPSDTDLGAKAPKDVKIQGVWYAQLESN

SEQ ID NO: 51215 - protein, 317 aa, Glycine max
  peptide (1)..(317): Ceres Seq. ID no. 14311662
MPAKIGGRASSARPSSHVARAFGVDAGARITCSLQSDIREVASKCADAAKMAGFALATSALLVSGASAEGAPKRLTFDEIQSKTYMEVKGTGTANQCPTIDGGVDSFPFKAGKYEMKKFCLEPTSFTVKAEGIQKNEPPAFQKTKLMTRLTYTLDEMEGPLEVGADGTLKFEEKDGIDYAAVTVQLPGGERVPFLFTVKQLVATGKPESFSGPFLVPSYRGSSFLDPKGRGGSTGYDNAVALPAGGRGDEEELAKENVKNASSSTGNITLSVTKSKPETGEVIGVFESVQPSDTDLGAKAPKDVKIQGVWYAQLESN

SEQ ID NO: 51216 - DNA, 789 bp, Glycine max
  misc_feature (1)..(789): Ceres Seq. ID no. 15173015
accaaagcattccacaaaattcagcaagcaatccaacgcagtccaacccgaggagatcgaccgagctcgagatcagcgagcgagaatggcgggcatggtgttcggcttggatgccccgatgatggccgccctgcagcacctgctggacatcccggacggcgaggccggagcagccgccggcgagaagcagggcccgacgcgcgcctacgtccgcgacgcgcgcgccatggcggccacccccgccgacgtgaaggagctgccgggcgcgtacgcgttcgtggtggacatgccggggctcgggtccggcgacatcaaggtgcaggtggaggacgagcgggtgctggtgatcagcggcgagcggcggagggaggagaaggaggacgccaagtacctgcggatggagcgccgcatgggcaagctgatgcgcaagttcgtgctgccggagaacgccgacatggagaagatctccgccgcgtgccgcgacggcgtgctcaccgtgaccgtcgacaagctgccgccgcccgagcccaagaagcccaagaccatccaggtccaggtcgcctgagatgcatcgtgtgcgcgtcgaatcgaatcagagtgtgagtgggtagcgagtttcctgtgatgagtgatgggagtgtctgtcctttgatttcatctactagtagtatggttatctgagggagagggtgtgtactgtctgttcgtgcgtactggtggttgtttgatgtttcgttaatggaaatggggatgatctccggcctcgcctgaataaaacatgcgaacctc

SEQ ID NO: 51217 - protein, 200 aa, Glycine max
  peptide (1)..(200): Ceres Seq. ID no. 15173016
TKAFHKIQQAIQRSPTRGDRPSSRSASENGGHGVRLGCPDDGRPAAPAGHPGRRGRSSRRREAGPDARLRPRRARHGGHPRRREGAAGRVRVRGGHAGARVRRHQGAGGGRAGAGDQRRAAEGGEGGRQVPADGAPHGQADAQVRAAGERRHGEDLRRVPRRRAHRDRRQAAAARAQEAQDHPGPGRLRCIVCASNRIRV

SEQ ID NO: 51218 - protein, 187 aa, Glycine max
  peptide (1)..(187): Ceres Seq. ID no. 15173017
PKHSTKFSKQSNAVQPEEIDRARDQRARMAGMVFGLDAPMMAALQHLLDIPDGEAGAAAGEKQGPTRAYVRDARAMAATPADVKELPGAYAFVVDMPGLGSGDIKVQVEDERVLVISGERRREEKEDAKYLRMERRMGKLMRKFVLPENADMEKISAACRDGVLTVTVDKLPPPEPKKPKTIQVQVA

SEQ ID NO: 51219 - protein, 159 aa, Glycine max
  peptide (1)..(159): Ceres Seq. ID no. 15173018
MAGMVFGLDAPMMAALQHLLDIPDGEAGAAAGEKQGPTRAYVRDARAMAATPADVKELPGAYAFVVDMPGLGSGDIKVQVEDERVLVISGERRREEKEDAKYLRMERRMGKLMRKFVLPENADMEKISAACRDGVLTVTVDKLPPPEPKKPKTIQVQVA

SEQ ID NO: 51220 - DNA, 734 bp, Glycine max
  misc_feature (1)..(734): Ceres Seq. ID no. 13594573
gtgattagatccaggtagccggctttgccatttccgcctctataaatgccgccctacgctctcgtgcacagcaaaacccaacggaactataactacagtcactctgctccctcactcaacctgtcccccacacaccacacagagagacgcagagaagcagcaggagggtgatggctatggctcagggaagaggcagtgcggcgcagggcttcgccctcggcttgctagtgctgtgcctcctcctcggcgccgacaccgccggcgccgccacctacaacgtcgactggtcgttcgcctccggcagctggcccatcggcaagagcttccgcgcaggggacgtcctcgttttcagctacaacccggccgtgcacaacgtggtggcggtggacgccggcggctacaacagctgccggggctccggcgcgacgcacacctacacctcggggagcgaccacgtcccgctcgtccccgggacgaactacttcatctgcagcctcagcagccactgcgggctcgggatgaagatggccgtcactgcaaactgaagctagctgcagcttctggtttcaagaaaagcgagctgcgactgcgatgccatctgtgcgcatgtgaaaacatcaataaagtgctgtggaactcagtgactcctagtatgcgatagtgtacgccccgtgtgttgtactgtatccctgagttgttaacatgacacagaagccagcagtgtgcaccaattg

SEQ ID NO: 51221 - protein, 124 aa, Glycine max
  peptide (1)..(124): Ceres Seq. ID no. 13594574
MAMAQGRGSAAQGFALGLLVLCLLLGADTAGAATYNVDWSFASGSWPIGKSFRAGDVLVFSYNPAVHNVVAVDAGGYNSCRGSGATHTYTSGSDHVPLVPGTNYFICSLSSHCGLGMKMAVTAN

SEQ ID NO: 51222 - protein, 122 aa, Glycine max
  peptide (1)..(122): Ceres Seq. ID no. 13594575
MAQGRGSAAQGFALGLLVLCLLLGADTAGAATYNVDWSFASGSWPIGKSFRAGDVLVFSYNPAVHNVVAVDAGGYNSCRGSGATHTYTSGSDHVPLVPGTNYFICSLSSHCGLGMKMAVTAN

SEQ ID NO: 51223 - DNA, 1345 bp, Glycine max
  misc_feature (1)..(1345): Ceres Seq. ID no. 13638574
gttttttccgtccccttccttcgagcgtcgtctgcgagagactgcaagtgactgcctccgtgtgcgggtggtgtctgggagcggggatggcgacgcacttcgtgctcaacaccggcgccaagatcccctccgtggggctcggcacctggcagtccgaccccggcatcgtcggcgaggccgtctacgccgccgtcaaggcggggtaccggcacatcgactgcgccagggcctacaacaacgagaaggaggtgggtttggctctgaagaagctgtttgaagagagtgtagtcaagcgtgaggatctgtttatcacctctaagctatggtgtggtcatcatgccccagaagatgtgcctgaggcacttggggattctctcgatgacttgcagcttgactacttggatctttaccttatccattggccatttagagtcaggaagggaacaagcattggcaaccctgaaaacttcttaccacctgacatcccagctacatggggagcaatggagaagttacatgatgctggcaaagctcgtgcaattggtgtgagtaacttcgcgtcgaagaaattgggtgacttgcttgctgtagctcgcatacctccggctgttgaccaggtggagtgccatcctggttggcagcaatctaaactccataccttttgtcagtcggccggtgttcacctctctgcgtactcaccactaggttcgcctggttcaacatggatgaatggtaatgtcctcaaagaacccgtcgtcctctcaattgcagagaagcttggcaaaactcctgcacaagtggcgttgcgctggaacattcagatgggtcacagtgtactgccaaagagcgtgagtgaagaacggataaagcagaaccttgctgtttatgactggtctattccagaagacttgcttgcaaagttctctgagattaagcaggccaggcttctcatgggcaacttcatcgtcaacaaagacagcgtttacaagacccacgatgagctctgggacggcgaaatctaggacggctcctgtcgtggctgggagcagggcgccttactagtgtcagtcacttgttatgtatcgtcaaactgtaagcttaagagatgtatggtggtttagccccactgtgggaggaactcttcagtagactgcatggatttgcccctttaggtatggattttctgctaaacccgcgtgttgccaatggaggcatgaacttatcctagcttgttcctgcgactgggatcacctgttctgtaccgattgttggtttgctggtgtaattgtgttcctccaaagaagttgctccacacatgataataaagctggggccgtttgtttgc

SEQ ID NO: 51224 - protein, 339 aa, Glycine max
  peptide (1)..(339): Ceres Seq. ID no. 13638575
FFRPLPSSVVCERLQVTASVCGWCLGAGMATHFVLNTGAKIPSVGLGTWQSDPGIVGEAVYAAVKAGYRHIDCARAYNNEKEVGLALKKLFEESVVKREDLFITSKLWCGHHAPEDVPEALGDSLDDLQLDYLDLYLIHWPFRVRKGTSIGNPENFLPPDIPATWGAMEKLHDAGKARAIGVSNFASKKLGDLLAVARIPPAVDQVECHPGWQQSKLHTFCQSAGVHLSAYSPLGSPGSTWMNGNVLKEPVVLSIAEKLGKTPAQVALRWNIQMGHSVLPKSVSEERIKQNLAVYDWSIPEDLLAKFSEIKQARLLMGNFIVNKDSVYKTHDELWDGEI

SEQ ID NO: 51225 - protein, 311 aa, Glycine max
  peptide (1)..(311): Ceres Seq. ID no. 13638576
MATHFVLNTGAKIPSVGLGTWQSDPGIVGEAVYAAVKAGYRHIDCARAYNNEKEVGLALKKLFEESVVKREDLFITSKLWCGHHAPEDVPEALGDSLDDLQLDYLDLYLIHWPFRVRKGTSIGNPENFLPPDIPATWGAMEKLHDAGKARAIGVSNFASKKLGDLLAVARIPPAVDQVECHPGWQQSKLHTFCQSAGVHLSAYSPLGSPGSTWMNGNVLKEPVVLSIAEKLGKTPAQVALRWNIQMGHSVLPKSVSEERIKQNLAVYDWSIPEDLLAKFSEIKQARLLMGNFIVNKDSVYKTHDELWDGEI

SEQ ID NO: 51226 - protein, 172 aa, Glycine max
  peptide (1)..(172): Ceres Seq. ID no. 13638577
MEKLHDAGKARAIGVSNFASKKLGDLLAVARIPPAVDQVECHPGWQQSKLHTFCQSAGVHLSAYSPLGSPGSTWMNGNVLKEPVVLSIAEKLGKTPAQVALRWNIQMGHSVLPKSVSEERIKQNLAVYDWSIPEDLLAKFSEIKQARLLMGNFIVNKDSVYKTHDELWDGEI

SEQ ID NO: 51227 - DNA, 708 bp, Glycine max
  misc_feature (1)..(708): Ceres Seq. ID no. 12608953
accaatctctcagagcatcctctgccccccacaatctcacctactccggccatctctccggcgaccaccgtagtaccaccctacctccccacccaaccctagcgatggcgacaacggcagccggcggcgggaggggcaagccgaagggcagcaagtcggtgtcgcggtcggtgaaggcgggcctgcagttccccgtcggccgcgtcgcccggcacctcaaggtcggccgctacgcgaagcgcgtgggcgcgggcgcccccgtctacctctgcgccgtcctcgagtacctcgccgccgaggccctggagctggccggcaacgcggcgcgcgacaacaagaagacccggatctcgccgcgccacatccagctcgccgtccgcaacgacgaggagctcagccggctgctcggcggcgtcaccatcgccgccggcggcgtcctgcccaacatccactcggtgctcctccccaagaaggtcggcaagggcgccggcaccggcgggtccgcatcccagtcccaggagttttagagtaccagagatctgagtatggcgtggtggtgtttttaggttggtagattagttcttcttggccaatgttcttgttggttcatgtatcgagggtggatctggttggaatggaatgcatctggttctgctgtctgtgttttgtccatggtaatctgaatgaaacggattttgttttgctctg

SEQ ID NO: 51228 - protein, 174 aa, Glycine max
  peptide (1)..(174): Ceres Seq. ID no. 12608954
QSLRASSAPHNLTYSGHLSGDHRSTTLPPHPTLAMATTAAGGGRGKPKGSKSVSRSVKAGLQFPVGRVARHLKVGRYAKRVGAGAPVYLCAVLEYLAAEALELAGNAARDNKKTRISPRHIQLAVRNDEELSRLLGGVTIAAGGVLPNIHSVLLPKKVGKGAGTGGSASQSQEF

SEQ ID NO: 51229 - protein, 140 aa, Glycine max
  peptide (1)..(140): Ceres Seq. ID no. 12608955
MATTAAGGGRGKPKGSKSVSRSVKAGLQFPVGRVARHLKVGRYAKRVGAGAPVYLCAVLEYLAAEALELAGNAARDNKKTRISPRHIQLAVRNDEELSRLLGGVTIAAGGVLPNIHSVLLPKKVGKGAGTGGSASQSQEF

SEQ ID NO: 51230 - DNA, 1167 bp, Glycine max
  misc_feature (1)..(1167): Ceres Seq. ID no. 14311467
atttttagtcttttgactcatatgaaccctaattttgggttgaattactctctctctctctctctttccttaaaattagatttcaaagttctcaccttttgtcttcctcgtatctcgcagcctcgagggcttccgacattcccagcgattatgctcgaatccgaagacaaagggacataaaaaaaagcaactctttcaagttgagtgttgtgtggggatggatcaaatagtttcaggagaagaagaagaggagcttggtgttgacattgaggaaggtgttgggttcaatgagacacaagatataacaacaaccaatcaagaagatgttcttgatcaggtttggagtgggcggttgagttatgaccacaggtctgaaaatcttactgatgatgatgctgatgatggtctgataaaccccttgatgggaggagatgggaagcagaggagagaaagaagcagccaaagtctggacctttcggatagaaaattcgatagtgtcaaggttaagaagacgaggaagccttcttccaagcctcctagacctccgaaaggtcctttattgactgcaaacgaccagaagctgatgagggagatcgcggagctcgctatgaggaagcgtgctaggattgagcgtatgagaaggatgaaagcagcaaagtcttcttctccttgcagtagcattttggctatgatagtgactgttatcttcttcgtcttccttatctttcaagggttcttcacaagcaatgcaagtttgagttcaagcaattctccagcaccagacaataaccgtatggtctctgttcagttcttcaatgagtttgctcctcgtgagagaatcgatcccagcccaactacgaggttcaggtataagagagtctcgggtgcagacaatgaagagaacacaagagaagttaccagatgagttagttctcttgggattctttgtaatgtaaaaccaaaaaacagtacttatgttttgttttattcttgacatcattctattgttccttttgctctgttcttgtgctcacatgtgtctctctgcgtgtatatatatgttgttatggatgaatctcgaaaccttctttggggttaggctttgtacagcaactgagtcttatgtcctaaaacaataatgctgatgaagtcatgatgattgatggc

SEQ ID NO: 51231 - protein, 235 aa, Glycine max
  peptide (1)..(235): Ceres Seq. ID no. 14311468
MDQIVSGEEEEELGVDIEEGVGFNETQDITTTNQEDVLDQVWSGRLSYDHRSENLTDDDADDGLINPLMGGDGKQRRERSSQSLDLSDRKFDSVKVKKTRKPSSKPPRPPKGPLLTANDQKLMREIAELAMRKRARIERMRRMKAAKSSSPCSSILAMIVTVIFFVFLIFQGFFTSNASLSSSNSPAPDNNRMVSVQFFNEFAPRERIDPSPTTRFRYKRVSGADNEENTREVTR

SEQ ID NO: 51232 - protein, 167 aa, Glycine max
  peptide (1)..(167): Ceres Seq. ID no. 14311469
MGGDGKQRRERSSQSLDLSDRKFDSVKVKKTRKPSSKPPRPPKGPLLTANDQKLMREIAELAMRKRARIERMRRMKAAKSSSPCSSILAMIVTVIFFVFLIFQGFFTSNASLSSSNSPAPDNNRMVSVQFFNEFAPRERIDPSPTTRFRYKRVSGADNEENTREVTR

SEQ ID NO: 51233 - DNA, 897 bp, Glycine max
  misc_feature (1)..(897): Ceres Seq. ID no. 13594465
tccgctaaaaccctagcccgacgccacgcagcaaccttctagaaccttctccacgatggcgttcctccgagctctccggcgagccctcccgccgctctactctccggcggcgcctctttcccggcgcgcaccaggtcctcctgcgctccctccccgtcctctccggctcctggatccgatcgggttccggccgttctccgccgcggccgccaccgccaccgccgtcgcgcgggcgccggaaatgggggccagcctcttcagagggctcacggagaccaggttccccaagcggcgcccggggttcgtgtcccggcgcaagagggccagcctgcgacccaaaggtccgcactactgggtgaagtgcacgccgggggagcctatcccttcgagccagccgaacaagggcagcgtgcaggggaggaaggagaagaagcggatcaagcagcgcaaggacttcatcatggctgagaagaggaagcgcaaagcacagtattctgttgctgtgaagaggaaggaggcagaacggacagaaagaaagatggctgcagtggcaagagaccgggcatgggtggaaaggttggcagagctaaagcagatagaggcagaaaagaaagctgcaatggcttgaggagctcctctggaaacggcaaggcgtctaactcgtttctgctgccccgtttcgttcctatttttttccagatagcttgaatatgttctgtgctacagctgtcaacaatgccacaacccttctgggtgaacctttggctgtacccgtcccctcaacagccatcccaaagtggcagatttgttttgatatgatgttctcaaatttgtcttcattgtaatgagatattggttctgtgttgtatttagaataaaccaaatgatcttagttgc

SEQ ID NO: 51234 - protein, 190 aa, Glycine max
  peptide (1)..(190): Ceres Seq. ID no. 15221368
MAFLRALRRALPPLYSPAAPLSRRAPGPPALPPRPLRLLDPIGFRPFSAAAATATAVARAPEMGASLFRGLTETRFPKRRPGFVSRRKRASLRPKGPHYWVKCTPGEPIPSSQPNKGSVQGRKEKKRIKQRKDFIMAEKRKRKAQYSVAVKRKEAERTERKMAAVARDRAWVERLAELKQIEAEKKAAMA

SEQ ID NO: 51235 - protein, 128 aa, Glycine max
  peptide (1)..(128): Ceres Seq. ID no. 15221369
MGASLFRGLTETRFPKRRPGFVSRRKRASLRPKGPHYWVKCTPGEPIPSSQPNKGSVQGRKEKKRIKQRKDFIMAEKRKRKAQYSVAVKRKEAERTERKMAAVARDRAWVERLAELKQIEAEKKAAMA

SEQ ID NO: 51236 - DNA, 1111 bp, Glycine max
  misc_feature (1)..(1111): Ceres Seq. ID no. 13594544
acccccccccagctccgcctcccttctgctctacccgcttctaacaaacgcgcgcacactccctctcgctctcgcggcgcaggtcggaggctaaaaccctagacacaggcgactatgacggcgccggcggacaaggggaagaaggccaagaccgacaccgacgtcggcgaggagaacgagcagatcgacggtgccctcgtcctctccatcgagaggctccaggagatccaggacgagctcgagaaggttaatgaagaagcaagtgataaggttttggaggttgagcagaagtacagtgagattcgcagacctgtctatcttcggaggtgtgacatcatcaaaacaattccagacttttggctgacagcgtttctaagtcatcctcttctcagtgagcttttgactgaagaggatcaaaagatgttcaagtacttggaatctgttgatgttgatgattctaaagatgtcaagtcaggctactccatcactcttaacttctctgagaatccgtactttgaagacagaaagcttaccaagtcatatgcctttgctgatgatggaacaaccacaataaatgccacttccattaagtggaaggagggaatggaaattaatgggaatgccattaagaagaaaggaagcaagcgcccattggttgaagaaagtttcttcacctggttcactgatacagagcacaagagccttgctgatggggtgcaagatgaggtggcagagatcatcaaagaagatttgtggccgaacccattgaaatatttcaacaatgaggttgaagagtttgaaggagatgacgaggatgaagagggatctgatggggaggatgctgaggaggacgacgacgaggagaactgaggccttggttggctttggtgggtcctgatgaatcgttgtctgcagatgctatgggtgtctgaagggtgaagtcatgtgaccgtttcgagactgtttcgttttgtgtttgacttagctggaacttagccttaggagctgttgaatgcgttatcgagtacgtactgtcgtattttcgacttaaaggagacctcgatatatcataatctggcgatatctatgacaacaatttaacttgctggcg

SEQ ID NO: 51237 - protein, 251 aa, Glycine max
  peptide (1)..(251): Ceres Seq. ID no. 13594545
MTAPADKGKKAKTDTDVGEENEQIDGALVLSIERLQEIQDELEKVNEEASDKVLEVEQKYSEIRRPVYLRRCDIIKTIPDFWLTAFLSHPLLSELLTEEDQKMFKYLESVDVDDSKDVKSGYSITLNFSENPYFEDRKLTKSYAFADDGTTTINATSIKWKEGMEINGNAIKKKGSKRPLVEESFFTWFTDTEHKSLADGVQDEVAEIIKEDLWPNPLKYFNNEVEEFEGDDEDEEGSDGEDAEEDDDEEN

SEQ ID NO: 51238 - protein, 149 aa, Glycine max
  peptide (1)..(149): Ceres Seq. ID no. 13594546
MFKYLESVDVDDSKDVKSGYSITLNFSENPYFEDRKLTKSYAFADDGTTTINATSIKWKEGMEINGNAIKKKGSKRPLVEESFFTWFTDTEHKSLADGVQDEVAEIIKEDLWPNPLKYFNNEVEEFEGDDEDEEGSDGEDAEEDDDEEN

SEQ ID NO: 51239 - DNA, 875 bp, Glycine max
  misc_feature (1)..(875): Ceres Seq. ID no. 14311693
acagcgtcaccggcgaactcaaagcaatggacaccgctcccgctccccttaagccgtccttgtccaagaagccctcgccgtcgttccgcctccgcaacggcagcctcaatgccctgcgcctgcgccgcgttttcgacctcttcgaccgcaacggcgacggcgagatcaccctcgacgagatggcggccgcgctcgacaccctcggcctcggcgccgaccgcgccagcctggaggccaccgtcggcgcctacatccctgctggcgccgccgggctcggcttcgaggacttcgagggcctccaccgcgctctcggcgacgcgctctttggccccatcaccgaggaggagcccggcaaggaaggcgagggcgaggacgaggacatgaaggaggcgttccgggtcttcgacgagaacggcgacgggttcatctcggcgtccgagctgcaggccgtgctcaagaagctgggcctggcggaggcgcggaacctggcggcggtgcaggagatgatctgcaacgtcgaccgcgaccgcgacggccaggtcgacttcggcgagttcaagtgcatgatgcaggggatcaccgtgtggggagcttgaaggcggcgcgcccggcctcttcctctcgtccctctcctgtttctcatatgagtatgtatcattcctagacatttttgtttagggtgttttttttttcatgatcgagctttccaccgttgactcgatctggcggtaggtcttcaggattttgcttgacaaccatggtcacatcacagcaagcagtaattagttccttcatttattttacaagttcttgttaattcggaaactgtactatcaaagaccttgaccagcctcccctaaaaatattctctcctc

SEQ ID NO: 51240 - protein, 197 aa, Glycine max
  peptide (1)..(197): Ceres Seq. ID no. 14311694
SVTGELKAMDTAPAPLKPSLSKKPSPSFRLRNGSLNALRLRRVFDLFDRNGDGEITLDEMAAALDTLGLGADRASLEATVGAYIPAGAAGLGFEDFEGLHRALGDALFGPITEEEPGKEGEGEDEDMKEAFRVFDENGDGFISASELQAVLKKLGLAEARNLAAVQEMICNVDRDRDGQVDFGEFKCMMQGITVWGA

SEQ ID NO: 51241 - protein, 189 aa, Glycine max
  peptide (1)..(189): Ceres Seq. ID no. 14311695
MDTAPAPLKPSLSKKPSPSFRLRNGSLNALRLRRVFDLFDRNGDGEITLDEMAAALDTLGLGADRASLEATVGAYIPAGAAGLGFEDFEGLHRALGDALFGPITEEEPGKEGEGEDEDMKEAFRVFDENGDGFISASELQAVLKKLGLAEARNLAAVQEMICNVDRDRDGQVDFGEFKCMMQGITVWGA

SEQ ID NO: 51242 - protein, 138 aa, Glycine max
  peptide (1)..(138): Ceres Seq. ID no. 14311696
MAAALDTLGLGADRASLEATVGAYIPAGAAGLGFEDFEGLHRALGDALFGPITEEEPGKEGEGEDEDMKEAFRVFDENGDGFISASELQAVLKKLGLAEARNLAAVQEMICNVDRDRDGQVDFGEFKCMMQGITVWGA

SEQ ID NO: 51243 - DNA, 931 bp, Glycine max
  misc_feature (1)..(931): Ceres Seq. ID no. 13594547
atcaaactgaaaggcgctctctcattctcataccttcaaacctcaagtactcaacacagaggaaagagtcttagcaacatatatggcttgccatcttagatcagttagtttgccttctaggcctcacaccaaggttgaagaggagctgcacagcctagaggcaagcatctcttcaccctccatgaccatcgagacaatctctgatggtttgaggaggcttggagacatctacagcaccattgaagagatcatgtgccttcctagcaaccaaatttgctcttcccagcaaaggaagatgttggaaggtgaaaccgagtgctcccttgagctgctagatctctgcaatgccatgcatgaggacttcaccgagttgaaggacattatccaagatctgcaagtggcgataagaaaaggagatgacaccgctgttcaagtcaagatccagtcttacacccgcctggtgaagaaggcgaagaaacatttcaagaaggctgcgaagaaggttacatctgacaaggaggactgcaggatggtcaggctgttgagcgaggctagggagatcaccacctctctgctcgagtcaacagtacacctcttgtccaagcaaatcgcagtgccaaaatggtctctcgtctccaaggcattccagaagaagaactcggttatttgcaaggaggagcagttgcaggtcctagagtgcagtgtcggagatcttgaggctggagcaggaattctgttccggagattgctccagagcagagttactctcctaaacattcttagctcatagatactcttcaacatctgctactcttgcaccgtgcgattggcttccaccttttaaaggattgctgatctttctcagtgtgtatatatatatgtagaaatgtacagaatactccatacagaaaggaaacaaaagttttgattg

SEQ ID NO: 51244 - protein, 235 aa, Glycine max
  peptide (1)..(235): Ceres Seq. ID no. 15221384
MACHLRSVSLPSRPHTKVEEELHSLEASISSPSMTIETISDGLRRLGDIYSTIEEIMCLPSNQICSSQQRKMLEGETECSLELLDLCNAMHEDFTELKDIIQDLQVAIRKGDDTAVQVKIQSYTRLVKKAKKHFKKAAKKVTSDKEDCRMVRLLSEAREITTSLLESTVHLLSKQIAVPKWSLVSKAFQKKNSVICKEEQLQVLECSVGDLEAGAGILFRRLLQSRVTLLNILSS

SEQ ID NO: 51245 - protein, 202 aa, Glycine max
  peptide (1)..(202): Ceres Seq. ID no. 15221385
MTIETISDGLRRLGDIYSTIEEIMCLPSNQICSSQQRKMLEGETECSLELLDLCNAMHEDFTELKDIIQDLQVAIRKGDDTAVQVKIQSYTRLVKKAKKHFKKAAKKVTSDKEDCRMVRLLSEAREITTSLLESTVHLLSKQIAVPKWSLVSKAFQKKNSVICKEEQLQVLECSVGDLEAGAGILFRRLLQSRVTLLNILSS

SEQ ID NO: 51246 - protein, 179 aa, Glycine max
  peptide (1)..(179): Ceres Seq. ID no. 15221386
MCLPSNQICSSQQRKMLEGETECSLELLDLCNAMHEDFTELKDIIQDLQVAIRKGDDTAVQVKIQSYTRLVKKAKKHFKKAAKKVTSDKEDCRMVRLLSEAREITTSLLESTVHLLSKQIAVPKWSLVSKAFQKKNSVICKEEQLQVLECSVGDLEAGAGILFRRLLQSRVTLLNILSS

SEQ ID NO: 51247 - DNA, 813 bp, Glycine max
  misc_feature (1)..(813): Ceres Seq. ID no. 13594466
ctctctctcccgaacccaaagacggcgaaaccctagctcctagtctcccccatggcctcgcacctcgactttcgctacctcgacgagggcctcggcggcgagcgcggcaagcgcaagcgccgggaggaggaggcagatgccgccgattccatggacctcgacgccgacgcgccccggccgtcgaagctccgcgcagtggcctcccagtccgacccgtccaagccggcggccttcgggtcgcccacctacgacggcgtcatcgccgggcgcgtctcggggcggacatggaaggagccacgcacgcgccgctcctccgcgctgatggtgtcccggaagcccgtccctctggagcagcgcgcgagggacaagtccctgaagaaggcgtaccaggcgcgcgtggcggagctcaaggacgagatccggcagaacaaggtcgccaagcgcaagcagaaggaggagcgggagaagcgcaagaaggagaacgtgctgcgcacgggctcgaagctgcagaaggtcaccaaccccaagacgatccagaagatcgccaagtccaagaaccgaggtcagctcagggtcgtctccgacgacatcttcggcggcaagaagtccgaggccgcccgccgcatgcaggtgcccggcctggagaactgagtcgcagcttatctttgcaatatgtaacgccaattttgtagtaatgcttttcaattgctgtgagctctgtcatggccgatcaaaaatcaaacgcatactgttactttggtatggtgtatgaaactatgtgctactgtttggttactctgtcagcggattttt

SEQ ID NO: 51248 - protein, 229 aa, Glycine max
  peptide (1)..(229): Ceres Seq. ID no. 13594467
LSPEPKDGETLAPSLPHGLAPRLSLPRRGPRRRARQAQAPGGGGRCRRFHGPRRRRAPAVEAPRSGLPVRPVQAGGLRVAHLRRRHRRARLGADMEGATHAPLLRADGVPEARPSGAAREGQVPEEGVPGARGGAQGRDPAEQGRQAQAEGGAGEAQEGERAAHGLEAAEGHQPQDDPEDRQVQEPRSAQGRLRRHLRRQEVRGRPPHAGARPGELSRSLSLQYVTPIL

SEQ ID NO: 51249 - protein, 199 aa, Glycine max
  peptide (1)..(199): Ceres Seq. ID no. 13594468
MASHLDFRYLDEGLGGERGKRKRREEEADAADSMDLDADAPRPSKLRAVASQSDPSKPAAFGSPTYDGVIAGRVSGRTWKEPRTRRSSALMVSRKPVPLEQRARDKSLKKAYQARVAELKDEIRQNKVAKRKQKEEREKRKKENVLRTGSKLQKVTNPKTIQKIAKSKNRGQLRVVSDDIFGGKKSEAARRMQVPGLEN

SEQ ID NO: 51250 - protein, 166 aa, Glycine max
  peptide (1)..(166): Ceres Seq. ID no. 13594469
MDLDADAPRPSKLRAVASQSDPSKPAAFGSPTYDGVIAGRVSGRTWKEPRTRRSSALMVSRKPVPLEQRARDKSLKKAYQARVAELKDEIRQNKVAKRKQKEEREKRKKENVLRTGSKLQKVTNPKTIQKIAKSKNRGQLRVVSDDIFGGKKSEAARRMQVPGLEN

SEQ ID NO: 51251 - DNA, 1207 bp, Glycine max
  misc_feature (1)..(1207): Ceres Seq. ID no. 14311671
acacaaacacaagcttccatcgggctttctcctcctcatcaaccttcttctactactagttgttcctagctagctggttgagtgagcttgctttcgggagcaagaaacgcatggcggtgtcctcggtgctggcgatcctgctcgacgcctcgtgtgcccttgcgtcggcgaccttcgacaaggagttcgacatcacctggggtgacggccgagggaagatcatgaacaatggccagctcctcacgctggggctggacaaggtctccggctccggattccagtccaagcacgagtacctctacggcaagatcgacatgcagctcaagctcgtccccggcaactccgccggcaccgtcaccgcatactacctgtcgtcgcaggggccgacgcacgacgagatcgactttgagttcctgggcaatgtcaccggcgagccgtacactctgcacaccaacgtgttcacgcaggggcaggggcagcgggagcagcagttccgcctctggttcgatcccaccaacgacttccacacctactccatcctctggaacccaaagcacatcatcttcatggtggacgacatgccgatcagggacttcaggaacctggagggaaaggggatcgccttccccaagaaccagccgatgcgcctctactccagcctctggaacgccgacgactgggccacgcaaggaggccgcgtcaagacggactggtcccacgcgccgttctctgcctcctaccgcggcttcaaggccgacgcgtgcgtggtgaccgcggccggccggccgcgctgcggcgccagcgtgggcacggaggtcgcccccggcacgggcgcggcgggcgagtggtacaaccaggagctcgacctgacgcggcagcagcggatgcggtgggtgcagagcaactacatgatctacaactactgcaccgaccccaagcgcttcgcccagggcgttcccgccgagtgctccatgtagtccatgcctgtcgatcgccggagaaagacggccggagatagggaagatggggtgtctgtataatccgatatcaataaggattggtgactgggagatgtgtaaagtagccggtggtagattcttctttggcatttacgcccagttcttctaatcgtgatcacgatcatttcgtgtgtaatctattgcctcgtcgtacatacgttcatcacctgtatgctgctctcggctct

SEQ ID NO: 51252 - protein, 288 aa, Glycine max
  peptide (1)..(288): Ceres Seq. ID no. 14311672
MAVSSVLAILLDASCALASATFDKEFDITWGDGRGKIMNNGQLLTLGLDKVSGSGFQSKHEYLYGKIDMQLKLVPGNSAGTVTAYYLSSQGPTHDEIDFEFLGNVTGEPYTLHTNVFTQGQGQREQQFRLWFDPTNDFHTYSILWNPKHIIFMVDDMPIRDFRNLEGKGIAFPKNQPMRLYSSLWNADDWATQGGRVKTDWSHAPFSASYRGFKADACVVTAAGRPRCGASVGTEVAPGTGAAGEWYNQELDLTRQQRMRWVQSNYMIYNYCTDPKRFAQGVPAECSM

SEQ ID NO: 51253 - protein, 251 aa, Glycine max
  peptide (1)..(251): Ceres Seq. ID no. 14311673
MNNGQLLTLGLDKVSGSGFQSKHEYLYGKIDMQLKLVPGNSAGTVTAYYLSSQGPTHDEIDFEFLGNVTGEPYTLHTNVFTQGQGQREQQFRLWFDPTNDFHTYSILWNPKHIIFMVDDMPIRDFRNLEGKGIAFPKNQPMRLYSSLWNADDWATQGGRVKTDWSHAPFSASYRGFKADACVVTAAGRPRCGASVGTEVAPGTGAAGEWYNQELDLTRQQRMRWVQSNYMIYNYCTDPKRFAQGVPAECSM

SEQ ID NO: 51254 - protein, 220 aa, Glycine max
  peptide (1)..(220): Ceres Seq. ID no. 14311674
MQLKLVPGNSAGTVTAYYLSSQGPTHDEIDFEFLGNVTGEPYTLHTNVFTQGQGQREQQFRLWFDPTNDFHTYSILWNPKHIIFMVDDMPIRDFRNLEGKGIAFPKNQPMRLYSSLWNADDWATQGGRVKTDWSHAPFSASYRGFKADACVVTAAGRPRCGASVGTEVAPGTGAAGEWYNQELDLTRQQRMRWVQSNYMIYNYCTDPKRFAQGVPAECSM

SEQ ID NO: 51255 - DNA, 1361 bp, Glycine max
  misc_feature (1)..(1361): Ceres Seq. ID no. 14311717
gaggaaatccctaataacccccggtcgcctttccacggcgaaaggtatcccggcggcgatggcggcggctgcggcaaggtccggatcccggcgcttgttctccatatccgccctggtgccaccgaagccaccgagccctcccccgaaggcagatcccttcgccagcctctttgttcccgggttaagcaagcgaacagtagctgatggacttaggggagcttttgcaaagtctggtgaagtcgtgcatggttctcttttgacaaaccttccagcatcatctgtaaaaaaatcaaggtggtatatgatcaatgcaaaccgttcaggtcctttgacagtgcgtaaagaataccgcaaagtacttccttctttcataaggccatctgcatcttactccacacaagcttcagaaaaaagaccaaaacaggagagaacagacttgacgactgttgaagatccctttaatgcgcctacctacaatatacctgagaagccagtgacatttgtcgagggcgcctcttacagtgttgtaatacttgctgggcttggagttgctgcattggctggatacgctgttttcaaagagcttatatttgaaccaaaagagtacaagatttttgggaaagctctagcaagagttcagagtgatagccaggttacagccaaaattggttaccctataactggttatggtacggaatccagaaaccgtgcagctcggcagcgcatccaaaacagggtttggacagatgaggatggtgttgaacatgtggaggtaggctttcatatccgagggccgcatggagctggaaaggtgtttgcggagatgttcaaagacagctccgacaggacatggaagttcacgtttcttctcgtcgagattacgtcaccgcgacccgcacaaatcatgttagaatcttacctaccagcatagggatgcaagagacaacatcagccagcagcggcacatctatgcgacacttcattttacatcctatctccaatggcctgcatctgatgttaaatacccgtcctcggattaaagaagttgtgaattttgaactttcccgaaagcataagtaggaggaagatgaaccatcagagctgctgaccatctctagtatcttagacatggtgtaccgtgcaaggaccttgatgttgttgctttgtttagctgaaaggcgcgcaggcacatgtatacaagccatctttcctgatgctcctcaaacaacatggaacggagcgagtgatccttcatctatcgagttgtggtctcgtttcaggcagttttaatgatgcctatggatttcatgcaaacctccaatgatgtccaaatagcaataatatctggttacattacggcc

SEQ ID NO: 51256 - protein, 309 aa, Glycine max
  peptide (1)..(309): Ceres Seq. ID no. 14311718
RKSLITPGRLSTAKGIPAAMAAAAARSGSRRLFSISALVPPKPPSPPPKADPFASLFVPGLSKRTVADGLRGAFAKSGEVVHGSLLTNLPASSVKKSRWYMINANRSGPLTVRKEYRKVLPSFIRPSASYSTQASEKRPKQERTDLTTVEDPFNAPTYNIPEKPVTFVEGASYSVVILAGLGVAALAGYAVFKELIFEPKEYKIFGKALARVQSDSQVTAKIGYPITGYGTESRNRAARQRIQNRVWTDEDGVEHVEVGFHIRGPHGAGKVFAEMFKDSSDRTWKFTFLLVEITSPRPAQIMLESYLPA

SEQ ID NO: 51257 - protein, 290 aa, Glycine max
  peptide (1)..(290): Ceres Seq. ID no. 14311719
MAAAAARSGSRRLFSISALVPPKPPSPPPKADPFASLFVPGLSKRTVADGLRGAFAKSGEVVHGSLLTNLPASSVKKSRWYMINANRSGPLTVRKEYRKVLPSFIRPSASYSTQASEKRPKQERTDLTTVEDPFNAPTYNIPEKPVTFVEGASYSVVILAGLGVAALAGYAVFKELIFEPKEYKIFGKALARVQSDSQVTAKIGYPITGYGTESRNRAARQRIQNRVWTDEDGVEHVEVGFHIRGPHGAGKVFAEMFKDSSDRTWKFTFLLVEITSPRPAQIMLESYLPA

SEQ ID NO: 51258 - protein, 209 aa, Glycine max
  peptide (1)..(209): Ceres Seq. ID no. 14311720
MINANRSGPLTVRKEYRKVLPSFIRPSASYSTQASEKRPKQERTDLTTVEDPFNAPTYNIPEKPVTFVEGASYSVVILAGLGVAALAGYAVFKELIFEPKEYKIFGKALARVQSDSQVTAKIGYPITGYGTESRNRAARQRIQNRVWTDEDGVEHVEVGFHIRGPHGAGKVFAEMFKDSSDRTWKFTFLLVEITSPRPAQIMLESYLPA

SEQ ID NO: 51259 - DNA, 1197 bp, Glycine max
  misc_feature (1)..(1197): Ceres Seq. ID no. 14311727
gttatttagagagattcagagagaaatggcttcatattcttcgtcctctctttctagaatctcaactctccagaatcatatctcccctcttgaagccaacaacaagctacggagtctggtcaagatatctccacaagtgtctgaagccatagccagtggacgtgctgtggtcgctcttgagtcaaccattatctcacatgggatgccttaccctcaaaacctgcaaacagcaaaagaggtggagtcaattgtgagagagaatggagcagtccctgcaacaatagctatattaaacggagtaccttgcataggtctgaacgaagaagaactagaacgtcttgcatctctgggcaaaagtgtccaaaagactgcaggcagggacataccacatgttgtggcgacaagaggagatggtgcaactacagtctctgcaacgttgttttttgcttcaatggttggcatccaagtctttgtaaccggcgggataggaggtgtgcatagacatgccaaccatactatggacatatcatctgatcttactgcactaggaaggactcctatagctgtgatatcagcaggcgttaaatcaatacttgatatcccaaagactcttgaatatttggaaactcaagaagtgtatgttgctgcatacaagagcgatgagtttccagcatttttcacagagaaaagcggctgtaaggcaccttcccgagttgatagccctgaagactgtgctcgagtaatagatgcaaacatgaagttaaaccgtaaggcggggattctattcgctgttccaatcccaaaacagcattcagctgccggaaatcttatcgaatcagcaacacagcgtgctcttacagaagcaagggaacaaaacgttactggaaatgccgaaactccattcttactctcacgtgtaaatgagttaactgaaggcacctcacttgcagcaaatattgcgcttgtgaaaaacaatgcccttatcggttctcaaattgcagtagcgctttctcagctggtatgagcttccttatcaacctcagactcaggctcaggttcatgattcaggactggtcaaagatcttttagattggtagtaatctagtgttttaatgttgcttatgaaatattgtttcttgcccaaaaaaaaactcttttttaacaaactttcacatattatatgaatatttttatatc

SEQ ID NO: 51260 - protein, 340 aa, Glycine max
  peptide (1)..(340): Ceres Seq. ID no. 14311728
LFREIQREMASYSSSSLSRISTLQNHISPLEANNKLRSLVKISPQVSEAIASGRAVVALESTIISHGMPYPQNLQTAKEVESIVRENGAVPATIAILNGVPCIGLNEEELERLASLGKSVQKTAGRDIPHVVATRGDGATTVSATLFFASMVGIQVFVTGGIGGVHRHANHTMDISSDLTALGRTPIAVISAGVKSILDIPKTLEYLETQEVYVAAYKSDEFPAFFTEKSGCKAPSRVDSPEDCARVIDANMKLNRKAGILFAVPIPKQHSAAGNLIESATQRALTEAREQNVTGNAETPFLLSRVNELTEGTSLAANIALVKNNALIGSQIAVALSQLV

SEQ ID NO: 51261 - protein, 332 aa, Glycine max
  peptide (1)..(332): Ceres Seq. ID no. 14311729
MASYSSSSLSRISTLQNHISPLEANNKLRSLVKISPQVSEAIASGRAVVALESTIISHGMPYPQNLQTAKEVESIVRENGAVPATIAILNGVPCIGLNEEELERLASLGKSVQKTAGRDIPHVVATRGDGATTVSATLFFASMVGIQVFVTGGIGGVHRHANHTMDISSDLTALGRTPIAVISAGVKSILDIPKTLEYLETQEVYVAAYKSDEFPAFFTEKSGCKAPSRVDSPEDCARVIDANMKLNRKAGILFAVPIPKQHSAAGNLIESATQRALTEAREQNVTGNAETPFLLSRVNELTEGTSLAANIALVKNNALIGSQIAVALSQLV

SEQ ID NO: 51262 - protein, 273 aa, Glycine max
  peptide (1)..(273): Ceres Seq. ID no. 14311730
MPYPQNLQTAKEVESIVRENGAVPATIAILNGVPCIGLNEEELERLASLGKSVQKTAGRDIPHVVATRGDGATTVSATLFFASMVGIQVFVTGGIGGVHRHANHTMDISSDLTALGRTPIAVISAGVKSILDIPKTLEYLETQEVYVAAYKSDEFPAFFTEKSGCKAPSRVDSPEDCARVIDANMKLNRKAGILFAVPIPKQHSAAGNLIESATQRALTEAREQNVTGNAETPFLLSRVNELTEGTSLAANIALVKNNALIGSQIAVALSQLV

SEQ ID NO: 51263 - DNA, 1178 bp, Glycine max
  misc_feature (1)..(1178): Ceres Seq. ID no. 14311683
ctcaagctcaaatcccttcccctcctcgcgtgcccccccttatccccttcaccatggccacctccgccatgacactcgccatggtcgcggccacggacgcctccctcttccaccccacgttccccgcccaacacaagctcgccccggcatccgcctccctcccactcattttctctcgcgcgccgctcctccgctccacccgcccccgcgtcccccttacgcccctcgtcgcctcctccgacgccgccgaggcgggcctcgactgggccgacgcggaggaagccgaagagacggtgacggaggaggagcccgcggtggcggcctccggtggggacgcggggtacgcagccgagccgcccgaggaggccaaggtgtacgtcgggaacctgccgtatgatgtcgacagcgagcggctcgctcagctcttcgaccaggccggcgtcgtcgaggtcgccgaggtcatttacaacagagagtcaggccagagccgtggatttggatttgttaccatgagtactattgaggaagctgacaaagccatcgagacgttcaatcgctacgacatcagtggaaggcttctgaacgtaaacagggcagctcaaaggggctcccgtgttgagagacctcctcgacagtttgcatcttctttcagggcttatgttggtaacctgccatggcaagcggaagactctaggttggtgcaattgttcagcgagcatggggaagtagttaacgctacagttgtgtacgacagagaaactggtcgttcacgaggatttggttttgtaactatggcttcaaaggaggatcttgacagtgctatttcagcgcttgatggacaggagatggatggccgcccactccgagtgaacgttgccgcggagcgaccacagcgagggttctgatgcagaggagagcgggtgcttcttttggacacacgagagcaacactgctgaaatgttactgcagaagactgaagcatgtcaccacttaaaaatcctgcactagcctcctgatgctgggctatctcctcccatcccatgttcttttttcatgcttccgtttgctgctgatgtcatcatgttaatttcttgtcaacaccatgagttcaacttttcaagtaggctactgtaatgatgtcttagtgttctcatgataatcgaagaaggttttgttgg

SEQ ID NO: 51264 - protein, 300 aa, Glycine max
  peptide (1)..(300): Ceres Seq. ID no. 14311684
QAQIPSPPRVPPLIPFTMATSAMTLAMVAATDASLFHPTFPAQHKLAPASASLPLIFSRAPLLRSTRPRVPLTPLVASSDAAEAGLDWADAEEAEETVTEEEPAVAASGGDAGYAAEPPEEAKVYVGNLPYDVDSERLAQLFDQAGVVEVAEVIYNRESGQSRGFGFVTMSTIEEADKAIETFNRYDISGRLLNVNRAAQRGSRVERPPRQFASSFRAYVGNLPWQAEDSRLVQLFSEHGEVVNATVVYDRETGRSRGFGFVTMASKEDLDSAISALDGQEMDGRPLRVNVAAERPQRGF

SEQ ID NO: 51265 - protein, 283 aa, Glycine max
  peptide (1)..(283): Ceres Seq. ID no. 14311685
MATSAMTLAMVAATDASLFHPTFPAQHKLAPASASLPLIFSRAPLLRSTRPRVPLTPLVASSDAAEAGLDWADAEEAEETVTEEEPAVAASGGDAGYAAEPPEEAKVYVGNLPYDVDSERLAQLFDQAGVVEVAEVIYNRESGQSRGFGFVTMSTIEEADKAIETFNRYDISGRLLNVNRAAQRGSRVERPPRQFASSFRAYVGNLPWQAEDSRLVQLFSEHGEVVNATVVYDRETGRSRGFGFVTMASKEDLDSAISALDGQEMDGRPLRVNVAAERPQRGF

SEQ ID NO: 51266 - protein, 278 aa, Glycine max
  peptide (1)..(278): Ceres Seq. ID no. 14311686
MTLAMVAATDASLFHPTFPAQHKLAPASASLPLIFSRAPLLRSTRPRVPLTPLVASSDAAEAGLDWADAEEAEETVTEEEPAVAASGGDAGYAAEPPEEAKVYVGNLPYDVDSERLAQLFDQAGVVEVAEVIYNRESGQSRGFGFVTMSTIEEADKAIETFNRYDISGRLLNVNRAAQRGSRVERPPRQFASSFRAYVGNLPWQAEDSRLVQLFSEHGEVVNATVVYDRETGRSRGFGFVTMASKEDLDSAISALDGQEMDGRPLRVNVAAERPQRGF

SEQ ID NO: 51267 - DNA, 1109 bp, Glycine max
  misc_feature (1)..(1109): Ceres Seq. ID no. 13594548
ctggtgaagtaaatctctcttttttcggtataaccatgagcagcttcttgttaacattcccttacttccctaacgacgcttcgtggcaggtaaaactttgtccttctccacaaattcgccttgtctgcgtcaaaaccaatctcaaaacactcaccaaggcttcttctcagaattgcgtcgaaagcatgagttctctcaccagtcttgctccactcgaagcagtgctctttgatgttgatggaactctctgtgattctgatccactccactattatgctttgcgtgaaatgctccaagagcttggttttaatggaggtgctcctataacagaggaattctttgtcgagacattttctggcaagcacagtgatgatactgccttggttgtctttcctggtgatctggaacgaggtttaaagtttgtagaagataaggaagccatgttccggagattggcttcagagcaactgaatcccttgaaaggccttgataaagtgaggaaatgggttgaaaaccatggtctgaagagagctgcagtcaccaatgctccaaggaaaaatgcagaactcattatctcaaaacttggtctaacagatttctttgatgctgttattattggtgatgaatgtgaacatgccaaacctcatccagaaccctacttgaaagcacttgaagttctgaaggcatcaaaggatcatgcatttgtatttgaggattctgcttcagggataaaagctggagtggcagctgggatgcctgttataggtttagctacaagaaacccggagaatttactgatggaagcaaagcctgcctttctgattaaggattatgaggattcaaaattgtgggcagctttggaagaacttgacaaggctggtgcacgttaagtttgaattaatgatgtgactgacggaatttcttgatataaacatgtaacaaggagttccatattaaatcccctacttccctaaataattttgttcaaagtgggcaatattattacactagtccacaatcaatctcgctttggaacagaaggcaaacggttctattctatttgtatttagtaataatgtaacgttggccatgawaaacmaaammaaamr

SEQ ID NO: 51268 - protein, 295 aa, Glycine max
  peptide (1)..(295): Ceres Seq. ID no. 15221387
GEVNLSFFGITMSSFLLTFPYFPNDASWQVKLCPSPQIRLVCVKTNLKTLTKASSQNCVESMSSLTSLAPLEAVLFDVDGTLCDSDPLHYYALREMLQELGFNGGAPITEEFFVETFSGKHSDDTALVVFPGDLERGLKFVEDKEAMFRRLASEQLNPLKGLDKVRKWVENHGLKRAAVTNAPRKNAELIISKLGLTDFFDAVIIGDECEHAKPHPEPYLKALEVLKASKDHAFVFEDSASGIKAGVAAGMPVIGLATRNPENLLMEAKPAFLIKDYEDSKLWAALEELDKAGAR

SEQ ID NO: 51269 - protein, 284 aa, Glycine max
  peptide (1)..(284): Ceres Seq. ID no. 15221388
MSSFLLTFPYFPNDASWQVKLCPSPQIRLVCVKTNLKTLTKASSQNCVESMSSLTSLAPLEAVLFDVDGTLCDSDPLHYYALREMLQELGFNGGAPITEEFFVETFSGKHSDDTALVVFPGDLERGLKFVEDKEAMFRRLASEQLNPLKGLDKVRKWVENHGLKRAAVTNAPRKNAELIISKLGLTDFFDAVIIGDECEHAKPHPEPYLKALEVLKASKDHAFVFEDSASGIKAGVAAGMPVIGLATRNPENLLMEAKPAFLIKDYEDSKLWAALEELDKAGAR

SEQ ID NO: 51270 - protein, 234 aa, Glycine max
  peptide (1)..(234): Ceres Seq. ID no. 15221389
MSSLTSLAPLEAVLFDVDGTLCDSDPLHYYALREMLQELGFNGGAPITEEFFVETFSGKHSDDTALVVFPGDLERGLKFVEDKEAMFRRLASEQLNPLKGLDKVRKWVENHGLKRAAVTNAPRKNAELIISKLGLTDFFDAVIIGDECEHAKPHPEPYLKALEVLKASKDHAFVFEDSASGIKAGVAAGMPVIGLATRNPENLLMEAKPAFLIKDYEDSKLWAALEELDKAGAR

SEQ ID NO: 51271 - DNA, 879 bp, Glycine max
  misc_feature (1)..(879): Ceres Seq. ID no. 13595797
atgcctcagaaaatagagattccaattcgagctccatagacaccattagcattagagggagggtgcaacagcaggattggagggttctcttctccaaaggcgccgaagttcttcagcttggcaagtaagtgataatcaatggcttacaggcttccactggcaggagttagggcttccaattatgaggctagagagcttccatcaaacagctacctggatctgggtgggccttatggaaaatttgtgcctttcataatcgcgggagaagggggctttggggagcataagcagctcaactggacaaacttgtttttactgaacaagcttggcagtgacatagacagggatcatcaagaggtgatcgatcagataaaggcagagaaagatgttgaaaagataaaagagttgatagagcgactgcctcgtgaaattgctgagcatttggaaggccatgagacccatgaacaggtcgaaatcctggcagatctgagcaggaacatggatcagaggatgtcttatctcagcagagagatccggcatctaaggagtgacctgggacaggtgatgcaaggtatcggagagatacgcgaagcattggctaggatggagcgccagaatccttgcttccgtccatgaacaaatgcaaccagccctggagcaagtgcacctggcagtttcgtatttgcatttcgtacttttctatattgtgttgtaatgaataaaattatgcgctccttgcagcgtataatgttgtacgagtctgagtcgatcgagttttattagctacatgtgcatgtctgtactgtctgcagttggttgttcttgtcaagggtttgtaatgaataaaattatgtgcagcttgctgcacataatgttgtc

SEQ ID NO: 51272 - protein, 165 aa, Glycine max
  peptide (1)..(165): Ceres Seq. ID no. 15221664
MAYRLPLAGVRASNYEARELPSNSYLDLGGPYGKFVPFIIAGEGGFGEHKQLNWTNLFLLNKLGSDIDRDHQEVIDQIKAEKDVEKIKELIERLPREIAEHLEGHETHEQVEILADLSRNMDQRMSYLSREIRHLRSDLGQVMQGIGEIREALARMERQNPCFRP

SEQ ID NO: 51273 - DNA, 957 bp, Glycine max
  misc_feature (1)..(957): Ceres Seq. ID no. 14311709
ctgcttctcattcgtcccttcctctccgctccgtccctttctctccgctgcgtcccttttcgccagatccgacgcccttccggcttgtcgttgcctcgccgccgtgacaaagttgggagaagggggttggccgtcgtcttgcggttgggccggagcagcggtgggctggacgccgcttcctgctgtcttcgagcgatgggagagggttagggtctgtcgtttgccgttcgattggtgactgttgcgggttggcagcgcgccgtgtagctgcgagacaacttccttgttgatctgccgtcctgctgcagtgttatatactgtcgaattccaaaaacgaggtctgccacacgcgcatatcctcatctggcgtaaaggagacaaagatggtgatcactgccctagctgctcttgtcccaggaaacaagaagttgactattcgtgtgtatgtctcaaggctgtggcagcatcgtggaactactgataatggtcctatcattcatactgacatggtgcttgtggatgctgagggttctcatatctatgctgagatctctaaagactgggtaagcaagtttatggagaagctcagggaaggctgtgcttatgagatttgtcagtttctggtgttcccaaataagcgttactttaaggccgtcgatgcagcaaacatgatctgtttcaatagattcactacggtcaatcctaataccgacctggaggtcgcgttcccgttttgcactatgcacctgtccaaccttagtgtagattatttgtaatcagtactatgccccagtatacctgcataagactactaccctttgctattgtaattgtaatcagtactatctagatggatgatagcaggcaatgtatacctgcataagactactaccccttagctctctgatttatgaacctgtccggtgtttagtttggtattacgtatgtacctcttcc

SEQ ID NO: 51274 - protein, 130 aa, Glycine max
  peptide (1)..(130): Ceres Seq. ID no. 14311710
MVITALAALVPGNKKLTIRVYVSRLWQHRGTTDNGPIIHTDMVLVDAEGSHIYAEISKDWVSKFMEKLREGCAYEICQFLVFPNKRYFKAVDAANMICFNRFTTVNPNTDLEVAFPFCTMHLSNLSVDYL

SEQ ID NO: 51275 - protein, 89 aa, Glycine max
  peptide (1)..(89): Ceres Seq. ID no. 14311711
MVLVDAEGSHIYAEISKDWVSKFMEKLREGCAYEICQFLVFPNKRYFKAVDAANMICFNRFTTVNPNTDLEVAFPFCTMHLSNLSVDYL

SEQ ID NO: 51276 - protein, 78 aa, Glycine max
  peptide (1)..(78): Ceres Seq. ID no. 14311712
CFSFVPSSPLRPFLSAASLFARSDALPACRCLAAVTKLGEGGWPSSCGWAGAAVGWTPLPAVFERWERVRVCRLPFDW

SEQ ID NO: 51277 - DNA, 926 bp, Glycine max
  misc_feature (1)..(926): Ceres Seq. ID no. 13594474
aacatcctaatcgaaaacttttctttcttgaggccaaagccgcagacagcacgcacgcacagcccaccgtcgccgctccaaatctcgcccgctcgcccgccgctctccgccgccatggacgccgcctcctcgctcatgggcgggccctcctccgccgacgcccccaccgacggcgagcaccggatgggcaccaccatcgtcggggtatgctacgccggcggggtcgtcctcgccgccgactccaggaccagcaccggaatgtatgtggcaaaccgtgcttcggacaagattagtcagctcactgataatgtctatgtctgccgttctggatctgccgctgatacacaagttatttcagattatgtgcgctattttctccaccagcacacaattcagcttgggcaaccagctaccgtgaaagtcgcatccaacttggttaggttgctggcctatcagaacaagagcatgttgcaagctggtatgatagttggtggatgggataagtacgaaggaggccaaatttactcggtccctcttggtggaacgattctgaggcaaccattcgcaattggaggatctggttccagctatctgtatggattgatggatcatgaatggaaagaggggatgacccaggaagaagctgagaaatttgtggtgaaggtggtttcccttgccattgcacgtgatggtgctagtggaggggttgttcgcaccgttactataaatgaggagggcgtgaagaggagcttccatcctggcgacaagctgccactgtggcatgaggagatggagccccagaactcgctcctcgacattctcgcggccgtgagctctgatgccatggtccagtgagccgtgcttcctactggttcttcctactgtgtctgatgatgacttgttctgaatttgagcttaatgttgtt

SEQ ID NO: 51278 - protein, 284 aa, Glycine max
  peptide (1)..(284): Ceres Seq. ID no. 13594475
NILIENFSFLRPKPQTARTHSPPSPLQISPARPPLSAAMDAASSLMGGPSSADAPTDGEHRMGTTIVGVCYAGGVVLAADSRTSTGMYVANRASDKISQLTDNVYVCRSGSAADTQVISDYVRYFLHQHTIQLGQPATVKVASNLVRLLAYQNKSMLQAGMIVGGWDKYEGGQIYSVPLGGTILRQPFAIGGSGSSYLYGLMDHEWKEGMTQEEAEKFVVKVVSLAIARDGASGGVVRTVTINEEGVKRSFHPGDKLPLWHEEMEPQNSLLDILAAVSSDAMVQ

SEQ ID NO: 51279 - protein, 246 aa, Glycine max
  peptide (1)..(246): Ceres Seq. ID no. 13594476
MDAASSLMGGPSSADAPTDGEHRMGTTIVGVCYAGGVVLAADSRTSTGMYVANRASDKISQLTDNVYVCRSGSAADTQVISDYVRYFLHQHTIQLGQPATVKVASNLVRLLAYQNKSMLQAGMIVGGWDKYEGGQIYSVPLGGTILRQPFAIGGSGSSYLYGLMDHEWKEGMTQEEAEKFVVKVVSLAIARDGASGGVVRTVTINEEGVKRSFHPGDKLPLWHEEMEPQNSLLDILAAVSSDAMVQ

SEQ ID NO: 51280 - protein, 239 aa, Glycine max
  peptide (1)..(239): Ceres Seq. ID no. 13594477
MGGPSSADAPTDGEHRMGTTIVGVCYAGGVVLAADSRTSTGMYVANRASDKISQLTDNVYVCRSGSAADTQVISDYVRYFLHQHTIQLGQPATVKVASNLVRLLAYQNKSMLQAGMIVGGWDKYEGGQIYSVPLGGTILRQPFAIGGSGSSYLYGLMDHEWKEGMTQEEAEKFVVKVVSLAIARDGASGGVVRTVTINEEGVKRSFHPGDKLPLWHEEMEPQNSLLDILAAVSSDAMVQ

SEQ ID NO: 51281 - DNA, 1148 bp, Glycine max
  misc_feature (1)..(1148): Ceres Seq. ID no. 15174863
aagcaaagtagcatacattgggcaaactaggccagcttcgcctcccctcccacatcagccatggctgctcaagcagtagtagctccatccatgatgagtgatccagagagtactactgccaagagttcaacaacacaagaagaagaagatgtcctcccacccaaggatttcgtagccgcacttccagtaagagaggggtggtctgaaccactggttcaatacaagaactactggttcaggccgaggctcctggagcagatcctgctcgttcagcacgcctttgtgccccgcgccgacgacatcatcctcgccacgcagcccaaatgcggcaccacctggctcaaagccctcgccttcaccatcgccaaccgatcccgctacggcttcagcgaccacccgctcctcacacgccacccacagcatgtcgtgccgttcatcgagatcccgggcgccggcccgaaccacaccgacatccatacacttccgcctccgaggcttctcgccacgcacatgcccatgtcgttgctcccgccgggcacgagatcggtcggctgccgggtcgtgtacctgtgccgggaccccaaagacgccctcgtgtcaaggctgcacttcgagaacaaggcgttccagggcaccaatctgtccatggacaatgctttcagcatgttctgcgaggggttctcgccctatggccccttctgggatcactgccttgggtactggagggagagcatagcaaggccggacaacgtcctcttcttgaagtatgaagagatcaagtccgatcctgtgcccgtggtgaggaagctggcgaaatttctcggcgtcccgctgaccgaggaggaggagagctctggtgttgctcaagaggtggtgaagttgtgcagctttgagacgcttaccagcctgcaagtgaatcaggtcggcggcgttcgtcacggtgataaaattttcatgagtaactctgtgttttacagaaaaggagaagtaggggactgggcaaaccacatgagccacgtgatgggggaggagttggatcgcatcgtccaacaaaagcttgagggatctgggcttgtgttttgacttttgagttgttgttatctgttcatttctcctttcctcaccatgtacgcggtattgcacattac

SEQ ID NO: 51282 - protein, 340 aa, Glycine max
  peptide (1)..(340): Ceres Seq. ID no. 15174864
MAAQAVVAPSMMSDPESTTAKSSTTQEEEDVLPPKDFVAALPVREGWSEPLVQYKNYWFRPRLLEQILLVQHAFVPRADDIILATQPKCGTTWLKALAFTIANRSRYGFSDHPLLTRHPQHVVPFIEIPGAGPNHTDIHTLPPPRLLATHMPMSLLPPGTRSVGCRVVYLCRDPKDALVSRLHFENKAFQGTNLSMDNAFSMFCEGFSPYGPFWDHCLGYWRESIARPDNVLFLKYEEIKSDPVPVVRKLAKFLGVPLTEEEESSGVAQEVVKLCSFETLTSLQVNQVGGVRHGDKIFMSNSVFYRKGEVGDWANHMSHVMGEELDRIVQQKLEGSGLVF

SEQ ID NO: 51283 - protein, 330 aa, Glycine max
  peptide (1)..(330): Ceres Seq. ID no. 15174865
MMSDPESTTAKSSTTQEEEDVLPPKDFVAALPVREGWSEPLVQYKNYWFRPRLLEQILLVQHAFVPRADDIILATQPKCGTTWLKALAFTIANRSRYGFSDHPLLTRHPQHVVPFIEIPGAGPNHTDIHTLPPPRLLATHMPMSLLPPGTRSVGCRVVYLCRDPKDALVSRLHFENKAFQGTNLSMDNAFSMFCEGFSPYGPFWDHCLGYWRESIARPDNVLFLKYEEIKSDPVPVVRKLAKFLGVPLTEEEESSGVAQEVVKLCSFETLTSLQVNQVGGVRHGDKIFMSNSVFYRKGEVGDWANHMSHVMGEELDRIVQQKLEGSGLVF

SEQ ID NO: 51284 - protein, 329 aa, Glycine max
  peptide (1)..(329): Ceres Seq. ID no. 15174866
MSDPESTTAKSSTTQEEEDVLPPKDFVAALPVREGWSEPLVQYKNYWFRPRLLEQILLVQHAFVPRADDIILATQPKCGTTWLKALAFTIANRSRYGFSDHPLLTRHPQHVVPFIEIPGAGPNHTDIHTLPPPRLLATHMPMSLLPPGTRSVGCRVVYLCRDPKDALVSRLHFENKAFQGTNLSMDNAFSMFCEGFSPYGPFWDHCLGYWRESIARPDNVLFLKYEEIKSDPVPVVRKLAKFLGVPLTEEEESSGVAQEVVKLCSFETLTSLQVNQVGGVRHGDKIFMSNSVFYRKGEVGDWANHMSHVMGEELDRIVQQKLEGSGLVF

SEQ ID NO: 51285 - DNA, 1119 bp, Glycine max
  misc_feature (1)..(1119): Ceres Seq. ID no. 13594482
aaaaatgccactgctcctccgccgacccctctccccctccctcgtctcctccttcttcctccgccgccgctcaatgtcttccaaatccgatccaatcagcccctccaacacccgaatcggctggatcggaaccggcgtcatgggccggtcaatgtgcggacacctaatcaaagccggatactccgtcaccgtcttcaaccgcacaatctccaaagcccagcctctcctcgccatgggcgctaacctcgccgcctcgccgaactccctcgcttcccaatccgacgtcgtcttctccatcgtcggctacccctccgacgtccgccgcgtcctcctcgatccaaactccggcgccttatccggcctctctcccggcggcgtcctcgtcgacatgaccacctccgagccttctctagccgaggagatctccaaatcagcttcctccgcgggctgcttctcagtcgacgctcccgtctccggcggagacctcggcgctaaaaacgggaagctctcgatcttcgccgggggagacgaagcaacggtgaagcgtctggatccattgtttcgtttaatggggaaagtcaacttcatgggagcgagcgggaaggggcagttcgctaagctggcgaatcaggtcacgatcgcttcgacgatggtggggctcgtcgaagggatcgtgtacgcgcacaaggccgggctcgatgtgaggaagtttctagaagcgatttcgaccggagccgcgggttcgaagtcgatagatttgtatggggagaggattctcaagagggatttcgatccggggttctatgtggatcatttcgttaaggatttggggatttgtttgaacgagtgtcagaggatggggttggctttgcctgggttggctcttgcgcagcagctttacttgtctctcaaggcacatggtgaaggtggtcttggaactcaagctctcatcttggctcttgagcgacttaataatgtctctgttcaaccaagtgtctgattatgtttttatgttgatttggagaaaaaagatttgaacttttgttgtgtatcgttgcttaaacatgaacttttgctggaatgtgtattgtttagatatatagaagtgtattgttggtt

SEQ ID NO: 51286 - protein, 332 aa, Glycine max
  peptide (1)..(332): Ceres Seq. ID no. 13594483
KMPLLLRRPLSPSLVSSFFLRRRSMSSKSDPISPSNTRIGWIGTGVMGRSMCGHLIKAGYSVTVFNRTISKAQPLLAMGANLAASPNSLASQSDVVFSIVGYPSDVRRVLLDPNSGALSGLSPGGVLVDMTTSEPSLAEEISKSASSAGCFSVDAPVSGGDLGAKNGKLSIFAGGDEATVKRLDPLFRLMGKVNFMGASGKGQFAKLANQVTIASTMVGLVEGIVYAHKAGLDVRKFLEAISTGAAGSKSIDLYGERILKRDFDPGFYVDHFVKDLGICLNECQRMGLALPGLALAQQLYLSLKAHGEGGLGTQALILALERLNNVSVQPSV

SEQ ID NO: 51287 - protein, 331 aa, Glycine max
  peptide (1)..(331): Ceres Seq. ID no. 13594484
MPLLLRRPLSPSLVSSFFLRRRSMSSKSDPISPSNTRIGWIGTGVMGRSMCGHLIKAGYSVTVFNRTISKAQPLLAMGANLAASPNSLASQSDVVFSIVGYPSDVRRVLLDPNSGALSGLSPGGVLVDMTTSEPSLAEEISKSASSAGCFSVDAPVSGGDLGAKNGKLSIFAGGDEATVKRLDPLFRLMGKVNFMGASGKGQFAKLANQVTIASTMVGLVEGIVYAHKAGLDVRKFLEAISTGAAGSKSIDLYGERILKRDFDPGFYVDHFVKDLGICLNECQRMGLALPGLALAQQLYLSLKAHGEGGLGTQALILALERLNNVSVQPSV

SEQ ID NO: 51288 - protein, 308 aa, Glycine max
  peptide (1)..(308): Ceres Seq. ID no. 13594485
MSSKSDPISPSNTRIGWIGTGVMGRSMCGHLIKAGYSVTVFNRTISKAQPLLAMGANLAASPNSLASQSDVVFSIVGYPSDVRRVLLDPNSGALSGLSPGGVLVDMTTSEPSLAEEISKSASSAGCFSVDAPVSGGDLGAKNGKLSIFAGGDEATVKRLDPLFRLMGKVNFMGASGKGQFAKLANQVTIASTMVGLVEGIVYAHKAGLDVRKFLEAISTGAAGSKSIDLYGERILKRDFDPGFYVDHFVKDLGICLNECQRMGLALPGLALAQQLYLSLKAHGEGGLGTQALILALERLNNVSVQPSV

SEQ ID NO: 51289 - DNA, 1087 bp, Glycine max
  misc_feature (1)..(1087): Ceres Seq. ID no. 13594490
accccccatccccatctcgctctcgcggccgagagatcgaatcggagaagaagaaggagcggagaggcctctgctgccctagctccgccgccccccaccagccatggcgctcgccgctcgcctcgtatcccgctcccgccagttatattctgtccaagctgctttggccaatggaggtctcactcaagtccgctcatttgccaaggaggcagctcctgtcagcggagatgacctattgaagggcatctttttttgaggtgaagaaaaagtttgagaccgcacttggggtccttaagaaggagaagatcacgattgacccagatgaccaaacagcagttgctaactatgcccaagtcatgaggactgtaagagaaaaggcagatcttctttctgattctcagagaattaaatatactattgagactttcacgaagggcatccctgatgcaaggacgtacttggatacccttcagcagctcaggaaaaagagtggtctcatagatgatatgggtattgaggatatgatgatggaagctctcgagaaagttgagaaggacattaagaaacctcttctgaggagtgacaagaagaacatgggtctcctcttggcagagtttgacaagattaacaaaaagcttggcattcggaaggaggatcttcccaagattgaggaaaatcttgaaatggaacttgccaaagctgagctgacggaacttaagaaggaagttgttgaagcaatggagggccaactaaagagggaggagtttaaagatgaggcgatgcctgacgtcaggaagttggacattagaaacttcctctaggtccctgattgatgataaccctcggggtgaccgatctgtgatttttcttttcaagtgacggccggtgctgtaagccacaccgaatggatgttattgttgctttttgtaataaaactgcaccgaaaatatgacagtcaaccgttgagttgggttgcttggttaccttccggcgttgagagttttgtttcttaggctggcaacgtgaacatcaagcgttgctgaatatgtgcctgcggctgctgttgtatgtagtagccacacattat

SEQ ID NO: 51290 - protein, 154 aa, Glycine max
  peptide (1)..(154): Ceres Seq. ID no. 13594491
MRTVREKADLLSDSQRIKYTIETFTKGIPDARTYLDTLQQLRKKSGLIDDMGIEDMMMEALEKVEKDIKKPLLRSDKKNMGLLLAEFDKINKKLGIRKEDLPKIEENLEMELAKAELTELKKEVVEAMEGQLKREEFKDEAMPDVRKLDIRNFL

SEQ ID NO: 51291 - protein, 104 aa, Glycine max
  peptide (1)..(104): Ceres Seq. ID no. 13594492
MGIEDMMMEALEKVEKDIKKPLLRSDKKNMGLLLAEFDKINKKLGIRKEDLPKIEENLEMELAKAELTELKKEVVEAMEGQLKREEFKDEAMPDVRKLDIRNFL

SEQ ID NO: 51292 - protein, 99 aa, Glycine max
  peptide (1)..(99): Ceres Seq. ID no. 13594493
MMMEALEKVEKDIKKPLLRSDKKNMGLLLAEFDKINKKLGIRKEDLPKIEENLEMELAKAELTELKKEVVEAMEGQLKREEFKDEAMPDVRKLDIRNFL

SEQ ID NO: 51293 - DNA, 968 bp, Glycine max
  misc_feature (1)..(968): Ceres Seq. ID no. 13594494
aatatacacggagaagagatcgtcatcatccgccaaaccagatcggctcggctgcttcctcttcttcaacttcgcagaatcgctggtcttctcgtcctctagttaagtccctcgacagcaatgggaggaggcaacgacggtcatgggtacccacccggtggccaggggggataccctccgcaagggtacccgccgcagcagggaggttaccctccacagcaaggatacccgcctgcacctggagcttacccacctgcacctggggcataccctcctgcacctggggcataccctcctgcgcccggagcgggtggcagtgacggggagaaggggctcctctccaacatcatgcacggtgttgccggtgctcatggtggtggccatggctacccatctggtggccacgggtaccccccgcagcagcatggataccctcagcaaggctaccctcctcagcatggctacccaccgcaacagcatggctaccctccacagcagcatggctatccccctgctggctaccctggctcatctggtcacagtggtagccatggaggaggaggcatgggcatgggcggcatgctagctggaggcgcagcagctgctgccgccgcttacggagcacacaagatttctcacggcggccacggtggaggtggacacatgatgggaggcatgatgggcggccatggaggctatggcggcgggtacggccaccacggcggcaagttcaagcacgggaagcacggccacggcaagttcaagcacggcaagcatgggaagcacggcatgttcggcggcggcggaaagttcaagaagtggaagtaatgcgctagctagtagcttcaccatggctgatgaatcaaaaaaaatacctaaactcttcgtgtaggcttccagaacttggtttggtcagggaaagcctttgagatgtatctaagcagggtgtggtgtggttgctgcccggc

SEQ ID NO: 51294 - protein, 235 aa, Glycine max
  peptide (1)..(235): Ceres Seq. ID no. 13594495
MGGGNDGHGYPPGGQGGYPPQGYPPQQGGYPPQQGYPPAPGAYPPAPGAYPPAPGAYPPAPGAGGSDGEKGLLSNIMHGVAGAHGGGHGYPSGGHGYPPQQHGYPQQGYPPQHGYPPQQHGYPPQQHGYPPAGYPGSSGHSGSHGGGGMGMGGMLAGGAAAAAAAYGAHKISHGGHGGGGHMMGGMMGGHGGYGGGYGHHGGKFKHGKHGHGKFKHGKHGKHGMFGGGGKFKKWK

SEQ ID NO: 51295 - protein, 159 aa, Glycine max
  peptide (1)..(159): Ceres Seq. ID no. 13594496
MHGVAGAHGGGHGYPSGGHGYPPQQHGYPQQGYPPQHGYPPQQHGYPPQQHGYPPAGYPGSSGHSGSHGGGGMGMGGMLAGGAAAAAAAYGAHKISHGGHGGGGHMMGGMMGGHGGYGGGYGHHGGKFKHGKHGHGKFKHGKHGKHGMFGGGGKFKKWK

SEQ ID NO: 51296 - protein, 147 aa, Glycine max
  peptide (1)..(147): Ceres Seq. ID no. 13594497
MGTHPVARGDTLRKGTRRSREVTLHSKDTRLHLELTHLHLGHTLLHLGHTLLRPERVAVTGRRGSSPTSCTVLPVLMVVAMATHLVATGTPRSSMDTLSKATLLSMATHRNSMATLHSSMAIPLLATLAHLVTVVAMEEEAWAWAAC

SEQ ID NO: 51297 - DNA, 1157 bp, Glycine max
  misc_feature (1)..(1157): Ceres Seq. ID no. 15171268
ctctccatctcgttcctcccccacctgcgcagccaagaagttcaaaccctagtccagcctgcgagcgccgacacgtcgcgccgtgcggcttcccgcaagcaggggctcgggccgaccgcgggggatgagcggcgcagcctacagggaccggggattcggcggcgccgcggagatggaccggaagcgcatcaaggaggcgctcgagaagcacacggagaggccgtccccgtccacctccaggggggcgtccagggagaaggagctgctcgccgccggcaagataaccactcagatcggcaaggtccccaaggtctccgacgtcgaggaattcgaaactgacagtgaagattctgatgttagtggttctgaaggagaggacacatcttggatttcatggttctgtagcttgcgaggcaacgaattcttctgtgagattgatgatgattatatacaggatgatttcaatctctgtggcctaagcagtcaggtgccatattatgattatgcacttgatctcatcctagacattgagtcttctaatggtgatgtattcactgaggagcaaaatgaattaattgagtcatctgcagagatgctgtatggtttaattcatgcacgttacatcttaaccagcaagggtctagctgcaatgttagagaagttcaagaactatgattttggcagatgccctcgagtatactgctgtggtcaaccctgtcttccagcaggacaatcagacattcctaggtcaagcacagtgaaggtgttttgtccaaaatgtgaagatttacactatccaaggtccaagtaccaaggcaacattgatggagcatactttggtacgacattccctcatctcttcttgatgacatacccacacctgaagccacagaagccatcacagcaatatgttccaagagtttttggcttcaaacttcacaagcaatcatgacgaacttttaccagtgagcgctatttgtttttacctagtgttagagatggaacaccttggcctgaaaatgttgtggcctcttgattcgagtactcgcgagctcgaatcttgctgtaaactgctgagcaactgtatctgttttgttgtatgactgttgtgtaatctaggtttcctcacttgatcaatctatgcacatttgcatgtt

SEQ ID NO: 51298 - protein, 275 aa, Glycine max
  peptide (1)..(275): Ceres Seq. ID no. 15171269
MSGAAYRDRGFGGAAEMDRKRIKEALEKHTERPSPSTSRGASREKELLAAGKITTQIGKVPKVSDVEEFETDSEDSDVSGSEGEDTSWISWFCSLRGNEFFCEIDDDYIQDDFNLCGLSSQVPYYDYALDLILDIESSNGDVFTEEQNELIESSAEMLYGLIHARYILTSKGLAAMLEKFKNYDFGRCPRVYCCGQPCLPAGQSDIPRSSTVKVFCPKCEDLHYPRSKYQGNIDGAYFGTTFPHLFLMTYPHLKPQKPSQQYVPRVFGFKLHKQS

SEQ ID NO: 51299 - protein, 259 aa, Glycine max
  peptide (1)..(259): Ceres Seq. ID no. 15171270
MDRKRIKEALEKHTERPSPSTSRGASREKELLAAGKITTQIGKVPKVSDVEEFETDSEDSDVSGSEGEDTSWISWFCSLRGNEFFCEIDDDYIQDDFNLCGLSSQVPYYDYALDLILDIESSNGDVFTEEQNELIESSAEMLYGLIHARYILTSKGLAAMLEKFKNYDFGRCPRVYCCGQPCLPAGQSDIPRSSTVKVFCPKCEDLHYPRSKYQGNIDGAYFGTTFPHLFLMTYPHLKPQKPSQQYVPRVFGFKLHKQS

SEQ ID NO: 51300 - DNA, 1007 bp, Glycine max
  misc_feature (1)..(1007): Ceres Seq. ID no. 13595844
aaatccgtcgagcagaaccaaatccgtcacgactccacgagcactcgagcagggcaacacagattcgcgcagcccacctcgtcgagcattccccatcagatctgatcgaatccggcggcggcggcgatggcggcggagaagccggccccggcgaaggtgctctactgcggcgtctgcggcctccccgcggagtactgcgaattcggccccgacttcgagcgctgcaagccgtggctccgcgcccacgcgcccagagtctaccccgacgagctcgtggcctcctcctccggtggcgatgataaggacgtgggcaaggtcggcgagcgcctccagggcgtcagcatctccaccgccgacggctccacaagcgcagggggtgcttcggcatccaagactgaagaggtgaaacgactgccgggtggtaagctcaagaaaaaggacaagcaagaggttattattgagaagattgtccgcaacaagcgcaagtgtgttactgtggtgaaaggcctggatttgtttggtgtaaagctgagtgatgcttcgaagaagcttggaaagaagtttgctactggagcttcggttgtcaagggcccaactgagaaggagcaaatcgatgtccaaggagacatatcatatgatgttgtggacttcattacagctacatggccagatgttcctgaatcggccgtatatttcattgaagatggaaggaaggttgctgctgcttgattgaatatggtttacaaggcaatacaccagtggagttacaaatatgatagaaatataaggcaagagatggccgttaaggcatgcctgtcacatgggttcttaatccttactcccgagatactactcgctccattttgacttgtgggtcagttcacaagtggtgttttaactaccgctggcacgtcgccttcgtgtatcatcttttatttgatagtcgagttcctcctgcaggcgagtatgacatccatatgtggtttatatatgtttaatgttttttc

SEQ ID NO: 51301 - protein, 200 aa, Glycine max
  peptide (1)..(200): Ceres Seq. ID no. 13595845
MAAEKPAPAKVLYCGVCGLPAEYCEFGPDFERCKPWLRAHAPRVYPDELVASSSGGDDKDVGKVGERLQGVSISTADGSTSAGGASASKTEEVKRLPGGKLKKKDKQEVIIEKIVRNKRKCVTVVKGLDLFGVKLSDASKKLGKKFATGASVVKGPTEKEQIDVQGDISYDVVDFITATWPDVPESAVYFIEDGRKVAAA

SEQ ID NO: 51302 - protein, 134 aa, Glycine max
  peptide (1)..(134): Ceres Seq. ID no. 13595846
NPSSRTKSVTTPRALEQGNTDSRSPPRRAFPIRSDRIRRRRRWRRRSRPRRRCSTAASAASPRSTANSAPTSSAASRGSAPTRPESTPTSSWPPPPVAMIRTWARSASASRASASPPPTAPQAQGVLRHPRLKR

SEQ ID NO: 51303 - DNA, 960 bp, Glycine max
  misc_feature (1)..(960): Ceres Seq. ID no. 13638567
acatcctaatcgaaaaatcccacatcccatcccatccgcagcggctttattacctaccgagaagaagagagaaaaaaaggttcgagtgcgttcgagagtgaggagtgagaagagatggctccggtgaagctgtacggcgcgaccctgtcgtggaacgtcaccaggtgcgtggcggcgctggaggaagccggcgtcgagtacgagctcgtccccatcaacttcggcaccggcgagcacaagggccccgaccacctcgccaggaacccctttggccaggtgccagctttgcaggatggtgacttgtacgtcttcgaatcacgtgctatttgcaagtatgcgtgccgcaagagcaagccagagctgttgaaggagggcgacatcaaggagtcagctatggtggatgtgtggctcgaggtggaggcccatcagtacaccgccgcgctgagccccattctcttcgagtgccttatccatcctatgcttgggggagccactgaccagacggtcatcgatgctaaccttgttaagatcaagaacgtgctggcggtgtacgaggcgcacctgagcaagtccaagtacctggctggagacttcctcagtcttgcggaccttaaccatgtgtctgtcaccctgtgcttggcggctacaccctacgcgtctctgttcgacgcgtacccgcatgtgaaggcctggtggactgacctgctggcgaggccgtccgtccagaaggtcgctgcgctgatgaagccatgatcttagtttctggcgctcgttcgtcgcgaaataagccgaagtgtgtttcccccgatgtgtgcctgtccgagtgtgtgttcttgtgatgtctcctcgtgttgaatgttcaggcttgtgcttgcgatcctgtctagatcttgtactgaaatgagcattcctatgctctggtttaataataaattgtgcccagagattatctcagcttcg

SEQ ID NO: 51304 - protein, 212 aa, Glycine max
  peptide (1)..(212): Ceres Seq. ID no. 13638568
MAPVKLYGATLSWNVTRCVAALEEAGVEYELVPINFGTGEHKGPDHLARNPFGQVPALQDGDLYVFESRAICKYACRKSKPELLKEGDIKESAMVDVWLEVEAHQYTAALSPILFECLIHPMLGGATDQTVIDANLVKIKNVLAVYEAHLSKSKYLAGDFLSLADLNHVSVTLCLAATPYASLFDAYPHVKAWWTDLLARPSVQKVAALMKP

SEQ ID NO: 51305 - protein, 119 aa, Glycine max
  peptide (1)..(119): Ceres Seq. ID no. 13638569
MVDVWLEVEAHQYTAALSPILFECLIHPMLGGATDQTVIDANLVKIKNVLAVYEAHLSKSKYLAGDFLSLADLNHVSVTLCLAATPYASLFDAYPHVKAWWTDLLARPSVQKVAALMKP

SEQ ID NO: 51306 - DNA, 915 bp, Glycine max
  misc_feature (1)..(915): Ceres Seq. ID no. 12609037
gctcatttatcttatggtagttttctgggttccccactcagacttagatgttgagtcgtgcactttcaaccccaacaactcaaagcctcaaggcaacaagaacaaatgcaatgctttatccaactcatagattattgtctcttaagaacccagtatcaaataccagaggattttcatcaaaagagaatatttttatcagaggtcaccaaatcaatataaaataattttttggccttatctcgggtcgtacgccacgaaacaaagcaggagttgtttccccaaggtgtggcctgccactgacagaagagaatgtggagaaggttttggatgaggtaaggcctggcttgatggctgatggagggaatgtggcattacatgagatagatggtcttgttgttgtcctcaagctgcaaggggcatgtggatcatgtcctagctcagctatgacattgaaaatgggaattgaaactcgcctccgggataagattccagaaatcttggaagtggagcagataatggacaccgagactggtcttgagttaaccgaagaaaatgttgaaaatgttctttctgaaattagaccataccttgttggcaccgggggaggaatattagagcttgttcagatcaaggattatactgtcaaagttcggctaagtggacctgcagctggggttacaacagttcgtgttgccttaacacagaagctgagagataagatacctgctattgcagctgtgcagctaatagactgatgtcacatacaatacaagttcttttatattttgatttatctgttacaagatgaactggaaccatccatagaaagaacatgtaaacttctgttaggaaaacaaattcagtgtcagttactcagttttataggatttaatgtttgtctcctccgttcacttc

SEQ ID NO: 51307 - protein, 135 aa, Glycine max
  peptide (1)..(135): Ceres Seq. ID no. 12609038
MADGGNVALHEIDGLVVVLKLQGACGSCPSSAMTLKMGIETRLRDKIPEILEVEQIMDTETGLELTEENVENVLSEIRPYLVGTGGGILELVQIKDYTVKVRLSGPAAGVTTVRVALTQKLRDKIPAIAAVQLID

SEQ ID NO: 51308 - protein, 103 aa, Glycine max
  peptide (1)..(103): Ceres Seq. ID no. 12609039
MTLKMGIETRLRDKIPEILEVEQIMDTETGLELTEENVENVLSEIRPYLVGTGGGILELVQIKDYTVKVRLSGPAAGVTTVRVALTQKLRDKIPAIAAVQLID

SEQ ID NO: 51309 - protein, 99 aa, Glycine max
  peptide (1)..(99): Ceres Seq. ID no. 12609040
MGIETRLRDKIPEILEVEQIMDTETGLELTEENVENVLSEIRPYLVGTGGGILELVQIKDYTVKVRLSGPAAGVTTVRVALTQKLRDKIPAIAAVQLID

SEQ ID NO: 51310 - DNA, 930 bp, Glycine max
  misc_feature (1)..(930): Ceres Seq. ID no. 12609041
cccccgccgcattgctccccgtgcaccgccggaccccactcgccccacaggcctgcgagacggcgcgcaggaagagcgggcgggcggcggcggcggaggcgggcagggtagcatgtgcgacctcgtggcccgcacggggcgccaccagcagcggtacgaagacggcagacggctcgtcgccgggtgcataccattcaggtatagagctgatgaaacttctggtgatgaacagaaaaaagttgttgaagttctcatgataaactcccaaagcggaccaggtttattattccccaagggaggatgggagaacgatgaaacggttgaacaagcagctgctcgagaagctatagaagaagctggagttcgaggagatatagtgcaatttctaggtttctacgatttcaagagcaagacgcatcaggacgcgtgctgccccgagggcatgtgcagagcggcagtgtttgcgctgcacgtgaaggaggagctggcctcatggcccgagcagagcacccgccggaggacctggctgacggtccccgaagccacgtcacaatgtcgataccagtggatgcaagaggccttgctgacgggcttctctgagtggcatgacaactggagcaaaggcggcagtgcaggtggcgacccaatctaaacgcaagaaggcgtcctcctctgtcgtctctcgctttcctttgccttctcctctgttctcccctctaggccccaaccttgcacgcaaattgcaataatacagtgtggtgcttttacttgatgatgcctagtaggtcattgacccttggttcctgggattgaagtcttagcgtagtggtatatctcatcgaagacgagaattatcacaaattttaagtgtctgattctcgccgcgtcatattatttctcaaatttcagcttgattttgatttcttgctc

SEQ ID NO: 51311 - protein, 216 aa, Glycine max
  peptide (1)..(216): Ceres Seq. ID no. 12609042
PRRIAPRAPPDPTRPTGLRDGAQEERAGGGGGGGQGSMCDLVARTGRHQQRYEDGRRLVAGCIPFRYRADETSGDEQKKVVEVLMINSQSGPGLLFPKGGWENDETVEQAAAREAIEEAGVRGDIVQFLGFYDFKSKTHQDACCPEGMCRAAVFALHVKEELASWPEQSTRRRTWLTVPEATSQCRYQWMQEALLTGFSEWHDNWSKGGSAGGDPI

SEQ ID NO: 51312 - protein, 179 aa, Glycine max
  peptide (1)..(179): Ceres Seq. ID no. 12609043
MCDLVARTGRHQQRYEDGRRLVAGCIPFRYRADETSGDEQKKVVEVLMINSQSGPGLLFPKGGWENDETVEQAAAREAIEEAGVRGDIVQFLGFYDFKSKTHQDACCPEGMCRAAVFALHVKEELASWPEQSTRRRTWLTVPEATSQCRYQWMQEALLTGFSEWHDNWSKGGSAGGDPI

SEQ ID NO: 51313 - protein, 132 aa, Glycine max
  peptide (1)..(132): Ceres Seq. ID no. 12609044
MINSQSGPGLLFPKGGWENDETVEQAAAREAIEEAGVRGDIVQFLGFYDFKSKTHQDACCPEGMCRAAVFALHVKEELASWPEQSTRRRTWLTVPEATSQCRYQWMQEALLTGFSEWHDNWSKGGSAGGDPI

SEQ ID NO: 51314 - DNA, 1075 bp, Glycine max
  misc_feature (1)..(1075): Ceres Seq. ID no. 12609045
atacacaacacaagacttcgaataatgtccgaaccatctccagtctctgatccttacgctcacataggcatcgtaaagaacccagatggctccatcactcgcgaccccaccagattcccgtacgcctcagccacacctgacccctccccggtaaacaccgtcgtatccaaagacatcaccgtgagccactcaaactccacgtggatgcgtctctacgtccccgttaccgcactaaacgacggcgtttcgtctaaaaaactccctctcgtcgtctactaccacggcggaggcttcgtcatctgcagcgtcgacttcaaacccttccacgacttctgcaaccgtatggcgcgtgagctcaacgcggtcgtcgcgtcgccttcctaccggctggctccggagcacagactcccggcggcgtacgacgacggagtggacgctctgaggtttattagaacctcagacgacgagtggatcaagtctcacgctgatctctccaacgtgttcctcatggggacaagcgctggtggtaacttggcctacaacgtcgggctcagatccgccttggcggacctgagtcccgtacgtatccgtggactggtcttacaccatccgttcttcggcggcgaggagcggtgcgagtccgagatcagacttgagcacgatcaggtttttccgcctactgccggagacgtttgctgggagctttgtctccctgtcggagctaaccgggatcacgagtattctaatctgacggtgggagatggaccggtgaatatggagatgatcggacggttgggatggaaggtggtggtgagtggaggaggaggagatccgatgatagataggcagagagatgtggcgaagctgatgaaggagaagggagttgatgtggtggagcgttttactgacggcgttgttcacggtgctgagctcggtgatccgaccaagagtacaactctgtttgcttccatcagaaatctcatttactcttagaggccagcccaatatgttaggcccatttaaaggttaccttaatgtattggtttgtggaaaagttataaataagaaaaatatt

SEQ ID NO: 51315 - protein, 330 aa, Glycine max
  peptide (1)..(330): Ceres Seq. ID no. 12609046
IHNTRLRIMSEPSPVSDPYAHIGIVKNPDGSITRDPTRFPYASATPDPSPVNTVVSKDITVSHSNSTWMRLYVPVTALNDGVSSKKLPLVVYYHGGGFVICSVDFKPFHDFCNRMARELNAVVASPSYRLAPEHRLPAAYDDGVDALRFIRTSDDEWIKSHADLSNVFLMGTSAGGNLAYNVGLRSALADLSPVRIRGLVLHHPFFGGEERCESEIRLEHDQVFPPTAGDVCWELCLPVGANRDHEYSNLTVGDGPVNMEMIGRLGWKVVVSGGGGDPMIDRQRDVAKLMKEKGVDVVERFTDGVVHGAELGDPTKSTTLFASIRNLIYS

SEQ ID NO: 51316 - protein, 322 aa, Glycine max
  peptide (1)..(322): Ceres Seq. ID no. 12609047
MSEPSPVSDPYAHIGIVKNPDGSITRDPTRFPYASATPDPSPVNTVVSKDITVSHSNSTWMRLYVPVTALNDGVSSKKLPLVVYYHGGGFVICSVDFKPFHDFCNRMARELNAVVASPSYRLAPEHRLPAAYDDGVDALRFIRTSDDEWIKSHADLSNVFLMGTSAGGNLAYNVGLRSALADLSPVRIRGLVLHHPFFGGEERCESEIRLEHDQVFPPTAGDVCWELCLPVGANRDHEYSNLTVGDGPVNMEMIGRLGWKVVVSGGGGDPMIDRQRDVAKLMKEKGVDVVERFTDGVVHGAELGDPTKSTTLFASIRNLIYS

SEQ ID NO: 51317 - protein, 262 aa, Glycine max
  peptide (1)..(262): Ceres Seq. ID no. 12609048
MRLYVPVTALNDGVSSKKLPLVVYYHGGGFVICSVDFKPFHDFCNRMARELNAVVASPSYRLAPEHRLPAAYDDGVDALRFIRTSDDEWIKSHADLSNVFLMGTSAGGNLAYNVGLRSALADLSPVRIRGLVLHHPFFGGEERCESEIRLEHDQVFPPTAGDVCWELCLPVGANRDHEYSNLTVGDGPVNMEMIGRLGWKVVVSGGGGDPMIDRQRDVAKLMKEKGVDVVERFTDGVVHGAELGDPTKSTTLFASIRNLIYS

SEQ ID NO: 51318 - DNA, 1145 bp, Glycine max
  misc_feature (1)..(1145): Ceres Seq. ID no. 15173003
agagccgcagagactgaccgaacagacgttcgcaccaactcccctgaagcctgaacggagcggcggagaggaaggggagagatcacccgccggcggcgaggggagatggccggaggcgaggaagggtggaggaggagcggcatcgaggtgagcaccctgcagttcggctacgacggggaggcgccgctcttcgcgcgcttcaacctccgcgtcgcccccggctcgcgctgcctcctcgtcggcgccaacggatccggcaagaccactctcttaaagattcttgcaggaaaacatatggttggaggaaaggatgttgtccgtgttcttaatggttctgcttttcatgacacacagtttgtgtgcagtggtgacctttcctacttgggtggttcgtggagtcggaatgtcagttcagttggtgatgttccactacaaggcgatttctctgctgagcacatgatatttggagttgatggggttgatcctgttaggcgggagaagctgattgatctactggatattgatctgcaatggcgcatgcataaagtttcagatggacagcgccgcagggtacaaatttgcatgggtcttcttcatccatacaaggtactcttactcgatgagatcaccgtggatctcgatgtcgtgaccaggatggatctcctcgacttcttcaaggaagagtgcgagcagagggaagccacgatcgtctacgccacgcacatattcgacggcctggagacatgggcgaccgacatcgcgtacatccaggagggcgagctgaaaaagtcggcgaaatactcggacatcgaagagctcaagacggccaagaacctgctgtcggtcgtggagtcatggctgaagtccgagaccaaactcccgaagaaagagcccgcgcgcgtcgagagccagcccaggcgcccctccccgttcgacgcctcccctttccgagcgtcgcgccacatggcctactaccgatgatgatcgtgtaaaaccatgatcgtgtaaaacctctacacccattccggtgtcatacaactctggagtctgtatctttctttttcctgttcctcatgcatccctgtatacggcaatgtatctatctgaagaacaaacaagtcgagcttaattaccctattcccagc

SEQ ID NO: 51319 - protein, 291 aa, Glycine max
  peptide (1)..(291): Ceres Seq. ID no. 15173004
MAGGEEGWRRSGIEVSTLQFGYDGEAPLFARFNLRVAPGSRCLLVGANGSGKTTLLKILAGKHMVGGKDVVRVLNGSAFHDTQFVCSGDLSYLGGSWSRNVSSVGDVPLQGDFSAEHMIFGVDGVDPVRREKLIDLLDIDLQWRMHKVSDGQRRRVQICMGLLHPYKVLLLDEITVDLDVVTRMDLLDFFKEECEQREATIVYATHIFDGLETWATDIAYIQEGELKKSAKYSDIEELKTAKNLLSVVESWLKSETKLPKKEPARVESQPRRPSPFDASPFRASRHMAYYR

SEQ ID NO: 51320 - protein, 228 aa, Glycine max
  peptide (1)..(228): Ceres Seq. ID no. 15173005
MVGGKDVVRVLNGSAFHDTQFVCSGDLSYLGGSWSRNVSSVGDVPLQGDFSAEHMIFGVDGVDPVRREKLIDLLDIDLQWRMHKVSDGQRRRVQICMGLLHPYKVLLLDEITVDLDVVTRMDLLDFFKEECEQREATIVYATHIFDGLETWATDIAYIQEGELKKSAKYSDIEELKTAKNLLSVVESWLKSETKLPKKEPARVESQPRRPSPFDASPFRASRHMAYYR

SEQ ID NO: 51321 - protein, 174 aa, Glycine max
  peptide (1)..(174): Ceres Seq. ID no. 15173006
MIFGVDGVDPVRREKLIDLLDIDLQWRMHKVSDGQRRRVQICMGLLHPYKVLLLDEITVDLDVVTRMDLLDFFKEECEQREATIVYATHIFDGLETWATDIAYIQEGELKKSAKYSDIEELKTAKNLLSVVESWLKSETKLPKKEPARVESQPRRPSPFDASPFRASRHMAYYR

SEQ ID NO: 51322 - DNA, 1013 bp, Glycine max
  misc_feature (1)..(1013): Ceres Seq. ID no. 13594498
acatcgaccagacgacagcccctgcccgatccccaaacccacccaccgcatcctagtccacctccgaaccaaggatccaagccatggagcgcggcgatgctgccaccggcagcggcagccgcagcggtgcgggaacgagcatccaggtcacggctctggacggcatcgtgaacgtgaactctctcttcaccctcgccgcgttcctcggcttggcgtggcgcccctcctccgacgggccaggcctcgccgacggcgccgaccacctgggcgcctgcgccgcgggggaccgcatcgagtctgacctcgtctcctttcacgtcctcgccttcgcttgtttcctcttctccagcctcgtcgcgctctgcctcaagcagatcgtccgcaccttcccccactaccgccgtgcctcctccgccgccgccggagccgccgtcagctggacggtgaagatcaaccgggcagcgctccgggtcgggatcttggcgtgcgcggtgggatccgtgtgcggatgcgggttcctgacgatggccctcgtcaacgtggtgcaggtgaagctcggccggctcggctgcggcgccggcggctccgcggcatggggcgccgtcatcccgctcgtcacgctcgtgccttccgccatgctgatctacattggcatcgtcttctacgccttcacccgctagcctgaatcggatccagtaactccacttagtgcttcctttgcattttcttatgcttagattatgcgtctgtgtgatgactgattagagtgcagtgagattgcagctgacatgcctgtgtacgtatcagtgtgtccatgcttgtgttcttggtgttctttgtgtgggcaactttttgtgttagtacttggtagtagtactgtactgcttaattaccttgattgactccttttagcaagtcaatttgttatgatttgcaaggtggcaacttgatatgcaaagtccaatctaaaacgaaaaaaaaaaaaaaaaaagcttatcgataccgtcgacctc

SEQ ID NO: 51323 - protein, 198 aa, Glycine max
  peptide (1)..(198): Ceres Seq. ID no. 13594499
MERGDAATGSGSRSGAGTSIQVTALDGIVNVNSLFTLAAFLGLAWRPSSDGPGLADGADHLGACAAGDRIESDLVSFHVLAFACFLFSSLVALCLKQIVRTFPHYRRASSAAAGAAVSWTVKINRAALRVGILACAVGSVCGCGFLTMALVNVVQVKLGRLGCGAGGSAAWGAVIPLVTLVPSAMLIYIGIVFYAFTR

SEQ ID NO: 51324 - protein, 99 aa, Glycine max
  peptide (1)..(99): Ceres Seq. ID no. 13594500
HRPDDSPCPIPKPTHRILVHLRTKDPSHGARRCCHRQRQPQRCGNEHPGHGSGRHRERELSLHPRRVPRLGVAPLLRRARPRRRRRPPGRLRRGGPHRV

SEQ ID NO: 51325 - DNA, 1003 bp, Glycine max
  misc_feature (1)..(1003): Ceres Seq. ID no. 13639704
acttttgatgcattatcacactcgacaatcctcaaaaaccactttcatcgcaactcagccagccagagcttaggcgagagagacagagacagaagatggcgtacagcgcgtgtttcctacatcagagcgcactggcctcctccgccgctcgatcatcatcttcctcctcatcccagcgctacgtttcactctccaaacccgtccaggtagtgtgtaaagctcaacagtctcatgaagacgataatcccgccgtctctcgccgtctcgccctcacactcctcgtcggcgccgccgccgttgattccaaagtgtctcctgccgatgccgcctatggtgaagctgcaaatgtgtttgggaagccaaagaaaaacacagacttcacgccatacaatggagatggattccaagtgcaggttccagctaaatggaacccaagcagagaggtagagtatccaggacaagtccttaggtacgaagacaactttgatgctactagcaatctcaatgtcatggtcactcctaccgacaagaagtccatcactgattacggctctcctgaagagttcctctctcaggtcaactaccttcttgggaaacaagcttacttcggtgagactgcctccgagggaggctttgacaacaatgcagtggcaacagcaaacattctggagacaaatgttcaggacgttggtgggaaaccatactactacttgtccgtgttgacaagaacggccgatggagatgaaggtggtaagcatcagctgatcacagccaccgtgaacggaggcaagctttacatctgcaaagcacaagctggagacaagaggtggttcaagggagccaacaaatttgtcgagaaagcagccacttctttcagtgttgcttgaatcaaagcaacacaaacagaacaatgctctgctttctttttttttcatttgtctcttgtaaaaaaatggaaaatgaaactaagcttttgagaaactatcaagatgatgatgatgct

SEQ ID NO: 51326 - protein, 263 aa, Glycine max
  peptide (1)..(263): Ceres Seq. ID no. 13639705
MAYSACFLHQSALASSAARSSSSSSSQRYVSLSKPVQVVCKAQQSHEDDNPAVSRRLALTLLVGAAAVDSKVSPADAAYGEAANVFGKPKKNTDFTPYNGDGFQVQVPAKWNPSREVEYPGQVLRYEDNFDATSNLNVMVTPTDKKSITDYGSPEEFLSQVNYLLGKQAYFGETASEGGFDNNAVATANILETNVQDVGGKPYYYLSVLTRTADGDEGGKHQLITATVNGGKLYICKAQAGDKRWFKGANKFVEKAATSFSVA

SEQ ID NO: 51327 - DNA, 788 bp, Glycine max
  misc_feature (1)..(788): Ceres Seq. ID no. 13594501
accgattgcgactcgagaacctttcgttcatctccaaaatatcttcctcctctgttctgcgcctccagccctccactatcccttgcgtggttttagtctgtgaactcgagagaccgagcgaggaaagttgccgtgtgagacctgaaagttagggagatatggctgggattggtcctatcaggcaggactgggagccgatagtggcgcggaagaaggcgcagaacgccgccgacaagaaggacgaaaaggccgtcaacgctgcccgccgctccggcgccgagatcgacaccaccaagaagtacaacgctggaacgaacaaggctgcatctagcggaacttccctcaacaccaagcggctcgacgacgacacggagaacctttcccatgagcgtgtttcaagtgacctgaagaaaaaccttatgcaagcaagactggataagaagatgacccaggcacaacttgctcagatgatcaatgagaagccacaggtgatccaggagtacgagtcgggcaaggcgattccgaacaatcagataattggaaagctcgagagggcacttggagctaagctgcgtagcaagaagtaatgccttgaaggccaagccctgtctatttgccttacactgcatttgctaggtcctaaaagctcttacaggctgtttctgttggttgatactgaataactatgccacagaacgactttatgtatcattatattcccgtgttctaaaatgtgtcgtcatatgacccagtgtaagagctgcattgagcatgcagattgacatggc

SEQ ID NO: 51328 - protein, 142 aa, Glycine max
  peptide (1)..(142): Ceres Seq. ID no. 13594502
MAGIGPIRQDWEPIVARKKAQNAADKKDEKAVNAARRSGAEIDTTKKYNAGTNKAASSGTSLNTKRLDDDTENLSHERVSSDLKKNLMQARLDKKMTQAQLAQMINEKPQVIQEYESGKAIPNNQIIGKLERALGAKLRSKK

SEQ ID NO: 51329 - DNA, 1194 bp, Glycine max
  misc_feature (1)..(1194): Ceres Seq. ID no. 13594560
acgattccatccacacatcaacacatggctccgccgaacagatcgttttcgccagagctatattgcctacagcgatcctcaccctcgcatcacttgaataactgcacgtggtgggcaggcgaggccgactcgtgatctgatcgggcgacaagagaatatcgctgtgcttgttctctttcgcggcgcatgtggccttgcccgcgagcgagcgcgacggacggacggacggacggacgccggcgatcacagtcacatggtcacatggaggatgacggaatggatgtgaccacatgctgttatcctattattaatggggtgttgccacgggattgccacaactctcgcggggagcaggggatgtgcgtcgtcggggccatcaacaactacacggagcagctctacacctacggggactcccccaagagttcgtcgtacaacctgacggagagcctcatgttcctggcgcacttcgtgggggacgtgcaccagccgctgcacgtcggctacgaggacgacgagggcggcaacaccatcacggtgcactggtaccacaggaaggccaacctccaccacgtgtgggacgtgagcatcatcgacacggtgatgaaggacttctacaacaagagcctcgacaccatggtggccgccctgcagacgaacctcaccgagggatggtctgacgatgtcggtcactgggagaattgcgccaacaagaaggcgacctgcgcaaacgactacgcgatcgagagcataagtctgtcgtgcaactacgcctacaaagatgtggtgcagaacatcaccctaggagatgattattacttcacccgctacccggttgtggagaagagattggcgcaggccggcgtcagactggcgctgatactcaaccgtatatttgacaagaaagaagctgatactatgccgttatacgtgcagtagaatagctatacttgtacaaaaggtgtatatatacgggctggacaaaattcggtattgtagctgccactgccacgccgtttgatcaatttccacttcaataggtttaccattatgtaatataaagagtcacgcaaccttggcacggctttcagaaattcattagttgtaaagttgcaatacaaaccctcttattagtctatttgcttgaacaataaacaaatccacaagtgcagtttaaagcgatgttttagtttc

SEQ ID NO: 51330 - protein, 250 aa, Glycine max
  peptide (1)..(250): Ceres Seq. ID no. 13594561
MWPCPRASATDGRTDGRRRSQSHGHMEDDGMDVTTCCYPIINGVLPRDCHNSRGEQGMCVVGAINNYTEQLYTYGDSPKSSSYNLTESLMFLAHFVGDVHQPLHVGYEDDEGGNTITVHWYHRKANLHHVWDVSIIDTVMKDFYNKSLDTMVAALQTNLTEGWSDDVGHWENCANKKATCANDYAIESISLSCNYAYKDVVQNITLGDDYYFTRYPVVEKRLAQAGVRLALILNRIFDKKEADTMPLYVQ

SEQ ID NO: 51331 - protein, 225 aa, Glycine max
  peptide (1)..(225): Ceres Seq. ID no. 13594562
MEDDGMDVTTCCYPIINGVLPRDCHNSRGEQGMCVVGAINNYTEQLYTYGDSPKSSSYNLTESLMFLAHFVGDVHQPLHVGYEDDEGGNTITVHWYHRKANLHHVWDVSIIDTVMKDFYNKSLDTMVAALQTNLTEGWSDDVGHWENCANKKATCANDYAIESISLSCNYAYKDVVQNITLGDDYYFTRYPVVEKRLAQAGVRLALILNRIFDKKEADTMPLYVQ

SEQ ID NO: 51332 - protein, 220 aa, Glycine max
  peptide (1)..(220): Ceres Seq. ID no. 13594563
MDVTTCCYPIINGVLPRDCHNSRGEQGMCVVGAINNYTEQLYTYGDSPKSSSYNLTESLMFLAHFVGDVHQPLHVGYEDDEGGNTITVHWYHRKANLHHVWDVSIIDTVMKDFYNKSLDTMVAALQTNLTEGWSDDVGHWENCANKKATCANDYAIESISLSCNYAYKDVVQNITLGDDYYFTRYPVVEKRLAQAGVRLALILNRIFDKKEADTMPLYVQ

SEQ ID NO: 51333 - DNA, 760 bp, Glycine max
  misc_feature (1)..(760): Ceres Seq. ID no. 15172991
tcttaatctctcggcctctcacttgaatctcctcacaacacacgtacgatccttttgctctcctctctctctctctctagaaaccctgcaatcctcttcttcaagattcgagtatgaaaggaggtaaatcaaagactgaaaccaggagctccaagctctctgtggccaagaagcctgctaaagcagcaggtcgcagcaaagcggcggctaaggatcctaacaaacctaagaggccagccagtgccttcttcgttttcatggaggactttcgccagacttacaagaaggaacaccccagcaacaaatctgttgccgctgttggtaaagctggtggagaaaagtggaagtccttgtccgactctgagaaggctcccttcgtagctaaggctgataagcgcaaggttgagtatgagaagaccatgaaagcctacaacaagaagctggaggaaggtccaaaggaggacgaggaggaatctgacaagtctgtgtccgaggtgaatgatgaggatgatgccgatgatggtagtgatgaggaggaagacgatgactaaagaagttgaagctggtagcacaatataggacgctacatcaaggatctcggatgttttttattttctttctttttactgatgttttcaacttagtaaagctgccactatctctctgattatgattctaccggtaatggaaaaagtgtgtgtagaatgtttgaattagagatatgcacctctatgtaacgatttagcttttttatcattct

SEQ ID NO: 51334 - protein, 145 aa, Glycine max
  peptide (1)..(145): Ceres Seq. ID no. 15172992
MKGGKSKTETRSSKLSVAKKPAKAAGRSKAAAKDPNKPKRPASAFFVFMEDFRQTYKKEHPSNKSVAAVGKAGGEKWKSLSDSEKAPFVAKADKRKVEYEKTMKAYNKKLEEGPKEDEEESDKSVSEVNDEDDADDGSDEEEDDD

SEQ ID NO: 51335 - protein, 97 aa, Glycine max
  peptide (1)..(97): Ceres Seq. ID no. 15172993
MEDFRQTYKKEHPSNKSVAAVGKAGGEKWKSLSDSEKAPFVAKADKRKVEYEKTMKAYNKKLEEGPKEDEEESDKSVSEVNDEDDADDGSDEEEDDD

SEQ ID NO: 51336 - DNA, 1091 bp, Glycine max
  misc_feature (1)..(1091): Ceres Seq. ID no. 13594503
gtaaagtatagtcccgcggtgctgctctgttcattactcgggcgatcggcgatcggtagtgcacttgccgtagctgtatattgatagcgggctgattgaggtagctgcctgccatgtctggaaaatcgcttgcagtggcgccgcggtctgacccggacaacggggcggagcggcagccgtcgtcggcgatgctcgggggcgtcatgggctcgctccgcgtcatcgagctccagctcgtcgccttcatcatggtcttctcgatgtcaggcctcgtcccgctcatcgacctcgccttcccggtcgtcaccactctctacctcctcgccctctcccgcctcgccttcccttcgctccacagcaaggtcgacgacgaggccgccgccgtccactccgccgcgtcccaggagatcttccgcggaagcaagctgtttcaggtgtacgtggtgatgggcaccacggtggggctgttcctgccgctggcgcacgtcctgggtgggttcgcgcgcggcgacgatgccgccgtgcgctccgcgacgccgcacctgttcctgctctcctgccagatcctcacggagaacatcgtcggctcgctcggcgtcttctcgccgccgctgagggcgctggtgccgcttctctacaccgtgcgccgcgtcttcgtcatcgtcgactgggtctatgacgtgtggaccaacaagctcatcacccgcaccgcccccgttcaggataaggcctgggtgtggttcggcaggtacctcgcggtggcgaacctggtctacttctccatcaacctgttcgtcttcctgatccccaagttcctcccccgcgcgttcgagaagtacttccacacgcgcaacgaggtgtacgccaagacggcggaggacaagcgggcaagggatctatcctcgctcgatgatgacagtgcgccaaaatcggaggtctgcaagaaggccgactgagatcgatgatcgtgttcgttgcgcggcgtttgagctgcgctcgtagtgtgctctctagcttcaactttgcttacctgtatgtggaccggtgtttgtacatttgggtcttcgcttctcaattctgaaattccgtgc

SEQ ID NO: 51337 - protein, 280 aa, Glycine max
  peptide (1)..(280): Ceres Seq. ID no. 13594504
MSGKSLAVAPRSDPDNGAERQPSSAMLGGVMGSLRVIELQLVAFIMVFSMSGLVPLIDLAFPVVTTLYLLALSRLAFPSLHSKVDDEAAAVHSAASQEIFRGSKLFQVYVVMGTTVGLFLPLAHVLGGFARGDDAAVRSATPHLFLLSCQILTENIVGSLGVFSPPLRALVPLLYTVRRVFVIVDWVYDVWTNKLITRTAPVQDKAWVWFGRYLAVANLVYFSINLFVFLIPKFLPRAFEKYFHTRNEVYAKTAEDKRARDLSSLDDDSAPKSEVCKKAD

SEQ ID NO: 51338 - protein, 255 aa, Glycine max
  peptide (1)..(255): Ceres Seq. ID no. 13594505
MLGGVMGSLRVIELQLVAFIMVFSMSGLVPLIDLAFPVVTTLYLLALSRLAFPSLHSKVDDEAAAVHSAASQEIFRGSKLFQVYVVMGTTVGLFLPLAHVLGGFARGDDAAVRSATPHLFLLSCQILTENIVGSLGVFSPPLRALVPLLYTVRRVFVIVDWVYDVWTNKLITRTAPVQDKAWVWFGRYLAVANLVYFSINLFVFLIPKFLPRAFEKYFHTRNEVYAKTAEDKRARDLSSLDDDSAPKSEVCKKAD

SEQ ID NO: 51339 - protein, 250 aa, Glycine max
  peptide (1)..(250): Ceres Seq. ID no. 13594506
MGSLRVIELQLVAFIMVFSMSGLVPLIDLAFPVVTTLYLLALSRLAFPSLHSKVDDEAAAVHSAASQEIFRGSKLFQVYVVMGTTVGLFLPLAHVLGGFARGDDAAVRSATPHLFLLSCQILTENIVGSLGVFSPPLRALVPLLYTVRRVFVIVDWVYDVWTNKLITRTAPVQDKAWVWFGRYLAVANLVYFSINLFVFLIPKFLPRAFEKYFHTRNEVYAKTAEDKRARDLSSLDDDSAPKSEVCKKAD

SEQ ID NO: 51340 - DNA, 1283 bp, Glycine max
  misc_feature (1)..(1283): Ceres Seq. ID no. 13581848
agatggagagaaagtttaaaaattctaaagacccaatctcaatacctcaaactctaaacactgcatatttaattatcataccaccacccacccttctcccatccctcactctctcgacgaaaccctaagcttcccctttcaatctcatcagatcctttcgtggttgcgcgaaaccctaattttgaatctgcaaacatgtctgcagctatggatatgtcgctcgacgacataatcaagaacaacaaaaaatctggatccggaagttcccgtggccggatccgaccctccggttccggaccttctcgccggttccccaaccgtgccgccaaccgcgccgctccttatgccaccgctaaggcgccggaggcgacgtggcagcacgatttatatgcagatcagcaagtggctgcggcggggtaccctgctcaaggtggtcgtgcggcttccatagaaactgggactaagctttacatttcaaacttggattatggtgtttccagtgacgatattaaggaattgtttgctgaagttggtgacctgaaacggcatgcggttcattatgacaggagtggcagatcaaagggtacagcagaagtagtattttcacgacgagctgatgctgtagctgctgtaaagagatacaacaatgttcagttggatgggaaaccaatgaagattgagattgtgggaaccaacatttccacacctggtgtggctcctgctcgtaacggggctattggaaattttgatggagttcctcgaagtggacaaggaagaggtggggcattaagaaggccaggaggaagagggcagggcgttcgaagggatcggggacggggaagaggtcgtggcggagcaggtcgcggtgaaaaggtatctgctgatgatcttgatgcggatttggagaagtatcatgcagaggcaatgcaattgaactgaaggaattggccatattttattttcttgctattacatctatgatgtttattagggacttggtgctggaacaccatgtgtttatgtatctttcacgctggcctactttttagggaaagagaatggatttcctgagtgaaaacatttagacttgccatatggagtttgggcttctgttgtctatttttgattttccttgggtatgaaatatggattacgaaacagaagtcagcatgtaatatgcagtcaagtttgccttcactggcattaatttgttttaacgagtggattatggaagtgggaaccatgatttcatctatcaatgtacaaagaaatgtttggctgcc

SEQ ID NO: 51341 - protein, 247 aa, Glycine max
  peptide (1)..(247): Ceres Seq. ID no. 13581849
MSAAMDMSLDDIIKNNKKSGSGSSRGRIRPSGSGPSRRFPNRAANRAAPYATAKAPEATWQHDLYADQQVAAAGYPAQGGRAASIETGTKLYISNLDYGVSSDDIKELFAEVGDLKRHAVHYDRSGRSKGTAEVVFSRRADAVAAVKRYNNVQLDGKPMKIEIVGTNISTPGVAPARNGAIGNFDGVPRSGQGRGGALRRPGGRGQGVRRDRGRGRGRGGAGRGEKVSADDLDADLEKYHAEAMQLN

SEQ ID NO: 51342 - protein, 243 aa, Glycine max
  peptide (1)..(243): Ceres Seq. ID no. 13581850
MDMSLDDIIKNNKKSGSGSSRGRIRPSGSGPSRRFPNRAANRAAPYATAKAPEATWQHDLYADQQVAAAGYPAQGGRAASIETGTKLYISNLDYGVSSDDIKELFAEVGDLKRHAVHYDRSGRSKGTAEVVFSRRADAVAAVKRYNNVQLDGKPMKIEIVGTNISTPGVAPARNGAIGNFDGVPRSGQGRGGALRRPGGRGQGVRRDRGRGRGRGGAGRGEKVSADDLDADLEKYHAEAMQLN

SEQ ID NO: 51343 - protein, 241 aa, Glycine max
  peptide (1)..(241): Ceres Seq. ID no. 13581851
MSLDDIIKNNKKSGSGSSRGRIRPSGSGPSRRFPNRAANRAAPYATAKAPEATWQHDLYADQQVAAAGYPAQGGRAASIETGTKLYISNLDYGVSSDDIKELFAEVGDLKRHAVHYDRSGRSKGTAEVVFSRRADAVAAVKRYNNVQLDGKPMKIEIVGTNISTPGVAPARNGAIGNFDGVPRSGQGRGGALRRPGGRGQGVRRDRGRGRGRGGAGRGEKVSADDLDADLEKYHAEAMQLN

SEQ ID NO: 51344 - DNA, 899 bp, Glycine max
  misc_feature (1)..(899): Ceres Seq. ID no. 15227143
cttcttcctagtgttacaacattccacaaacaactctttcttttaaattttataatattcttctgagtctgttttttttttttctcacaagaccattataccagatccagtttgaagagatcgagtagtatgagcagccagacgtcgaagccgaacgtggatggagtgcacatcgatgtgaaggttgtggagaggccaatgagagaaaggccctacgatctgttgctgcggtttcttggcctttcactcactcttgtggcagtcatcattgttggtgttgacaatgagaccaaagtcatctcctatgccgaaatgcagttcaaagccactgctaagtgggaatatgtctctgccattgtgtttttcttggtgataaacgcgatagcatgctcatacgcagctgcatcattggttatcacattgatggcaagaagcaatggaagaaaaaacgatgtgacactgttggggctaacagcgctagatcttgtgatgatggctttgttgttctcggccaatggtgcagcttgtgcagtgggagtgatagcacagaaggggaactcgcacgtgcaatggatgaaagtgtgcaacgtctttgatgcctattgtcgccacgtcactgcagcattggtcctctccatcattggatccacggtctttctcttgctcgtgctcctttctgttcttaaactccattacagaacaggaatttagatctcgatatgatatgatacacgctataatatatatttgtagggttaattaattaattgagggtgttcttgtacgtgtgaatcgtgtttttggcatagaccttgtgcacttgttgtggttgatgaagaacgccaaagcacttaaaagatatagatgctatatttaatttattaaaaaaaaaaaaaaaa

SEQ ID NO: 51345 - protein, 193 aa, Glycine max
  peptide (1)..(193): Ceres Seq. ID no. 15227144
MSSQTSKPNVDGVHIDVKVVERPMRERPYDLLLRFLGLSLTLVAVIIVGVDNETKVISYAEMQFKATAKWEYVSAIVFFLVINAIACSYAAASLVITLMARSNGRKNDVTLLGLTALDLVMMALLFSANGAACAVGVIAQKGNSHVQWMKVCNVFDAYCRHVTAALVLSIIGSTVFLLLVLLSVLKLHYRTGI

SEQ ID NO: 51346 - protein, 170 aa, Glycine max
  peptide (1)..(170): Ceres Seq. ID no. 15227145
MRERPYDLLLRFLGLSLTLVAVIIVGVDNETKVISYAEMQFKATAKWEYVSAIVFFLVINAIACSYAAASLVITLMARSNGRKNDVTLLGLTALDLVMMALLFSANGAACAVGVIAQKGNSHVQWMKVCNVFDAYCRHVTAALVLSIIGSTVFLLLVLLSVLKLHYRTGI

SEQ ID NO: 51347 - protein, 132 aa, Glycine max
  peptide (1)..(132): Ceres Seq. ID no. 15227146
MQFKATAKWEYVSAIVFFLVINAIACSYAAASLVITLMARSNGRKNDVTLLGLTALDLVMMALLFSANGAACAVGVIAQKGNSHVQWMKVCNVFDAYCRHVTAALVLSIIGSTVFLLLVLLSVLKLHYRTGI

SEQ ID NO: 51348 - DNA, 751 bp, Glycine max
  misc_feature (1)..(751): Ceres Seq. ID no. 15170007
aaaaagacactgaaagaacagcaatggaagctgcattatgcagtgcacttgctctttcacccaaccaagtattcaacgcagcaaatcctggagataaaaatgttcctttgaaatatagcaaagatcggagtgttgtaatgacagtggcagccactggaatattagggaaaggtggtgggttgttggagaggccaaccatagagacaacatcacctggtcgggaatctgaatttgacttgaggaaatcgcggaaaacatccccaccctaccgagttttgctgcacaatgacaacttcaacaagcgagaatatgttgtgcaagtgttgatgaaggtgataccaggaatgaccattgataatgcggttaacatcatgcaggaggcacattataatggactagcagtggtgatagtatgtgctcaagtggatgctgaagatcactgcatgcagttaagaggaaacggtcttttaagttctattgagccagctgatggtggtggttgttgatacatagagagaccattgacatgatgagctttggccaaatagtttcattgaagaagtgacatcatatacacatttccatgatgtgcatctttccaaccactgaagatggttgtatagaaaattattgactaggtaaggaaagggatagtgctagttagttagtagttagtacttatacaggacataatttgctaccagccagtggcattatttggatttaacgtgttatactatcattagtccct

SEQ ID NO: 51349 - protein, 167 aa, Glycine max
  peptide (1)..(167): Ceres Seq. ID no. 15170008
KDTERTAMEAALCSALALSPNQVFNAANPGDKNVPLKYSKDRSVVMTVAATGILGKGGGLLERPTIETTSPGRESEFDLRKSRKTSPPYRVLLHNDNFNKREYVVQVLMKVIPGMTIDNAVNIMQEAHYNGLAVVIVCAQVDAEDHCMQLRGNGLLSSIEPADGGGC

SEQ ID NO: 51350 - protein, 160 aa, Glycine max
  peptide (1)..(160): Ceres Seq. ID no. 15170009
MEAALCSALALSPNQVFNAANPGDKNVPLKYSKDRSVVMTVAATGILGKGGGLLERPTIETTSPGRESEFDLRKSRKTSPPYRVLLHNDNFNKREYVVQVLMKVIPGMTIDNAVNIMQEAHYNGLAVVIVCAQVDAEDHCMQLRGNGLLSSIEPADGGGC

SEQ ID NO: 51351 - protein, 122 aa, Glycine max
  peptide (1)..(122): Ceres Seq. ID no. 15170010
MTVAATGILGKGGGLLERPTIETTSPGRESEFDLRKSRKTSPPYRVLLHNDNFNKREYVVQVLMKVIPGMTIDNAVNIMQEAHYNGLAVVIVCAQVDAEDHCMQLRGNGLLSSIEPADGGGC

SEQ ID NO: 51352 - DNA, 655 bp, Glycine max
  misc_feature (1)..(655): Ceres Seq. ID no. 15226140
acatcctaatcgaaaaaagatttgtgctatctaagagctgagtttttctgaatcttcagaggaaacataacatcatattagggaccctccctctctacattgttgcagagaatacaaagcctcaagtgaaccaagcaattcatctgcggaaggacatcatattttgtacacgccttctcaactatctaggaaagggatggagggaaatatggagaaaaagtccccttgcatgaatgtaataaagctggatggtaaagaaataaaaatgcctggcttgaatatggatgatatcaataagcagtcaaatatggttgtgtctgtgtcaacaacacctcaagctgcatctgcattgaagaagtcttcgagtgaaaggaggagttgtctatgctcacccaccacacatgttggatccttcaggtgccggcaccaccgttcaggaatgagccatgctagctctgttggctccaatctctctgcaatgagctccaacgactcactccaatctcaatactagccttgcctggcttctgtgcttgaatatgttgtgaatactgcaaagtttcaatggaaagaactctcatgttaactaaattacttgtaatgaaataagttttttaataacaaaaatattattttaattaattttttttgtggg

SEQ ID NO: 51353 - protein, 105 aa, Glycine max
  peptide (1)..(105): Ceres Seq. ID no. 15226141
MEGNMEKKSPCMNVIKLDGKEIKMPGLNMDDINKQSNMVVSVSTTPQAASALKKSSSERRSCLCSPTTHVGSFRCRHHRSGMSHASSVGSNLSAMSSNDSLQSQY

SEQ ID NO: 51354 - protein, 101 aa, Glycine max
  peptide (1)..(101): Ceres Seq. ID no. 15226142
MEKKSPCMNVIKLDGKEIKMPGLNMDDINKQSNMVVSVSTTPQAASALKKSSSERRSCLCSPTTHVGSFRCRHHRSGMSHASSVGSNLSAMSSNDSLQSQY

SEQ ID NO: 51355 - protein, 94 aa, Glycine max
  peptide (1)..(94): Ceres Seq. ID no. 15226143
MNVIKLDGKEIKMPGLNMDDINKQSNMVVSVSTTPQAASALKKSSSERRSCLCSPTTHVGSFRCRHHRSGMSHASSVGSNLSAMSSNDSLQSQY

SEQ ID NO: 51356 - DNA, 1416 bp, Glycine max
  misc_feature (1)..(1416): Ceres Seq. ID no. 14311713
aggttaggttacttagcttaaggaggggagaataccaagaagctccgcttcctttttcaagtgcaattcttggtgatttccaatttttttcttgagtaggcaaaaaattgaaaaaaaaaaactatagtttcatgttaatgggtatccatcaatcatgcagaaattcataaacaaatgattgtgaaaaagatattttgttttacaaacttaggttattctttcttgttttcagtaatattcttctgtggttgctttattttctggccactttccacaagcatagattctcatagagagtccagagagagccctctctcctagctgtgcagcagaggaatggatgattgtgctctgctctgctttgattctctctgctcataaagaacctcttcatactcattgcagttgcagtacgtggggggtgctttcaacactttcttcaatcagcaaaatgagtcatgcacattctcatatgggctctggtagtagaaccactcgaagagcttttgagtttgggaagacacatgtagtgaggccaaaaggaaaacaccaagccactatagtttggctgcatggtcttggtgataatggtttgagctcatctcagctcctggaatcccttccacttccaaatataaaatggatttgcccaactgctcctacccgtcctgtggcgatactggtgggttttccctgcactgcatggtttgatgtgggagaactttcagaagatggtccagatgattgggagggtttagatgcctcagcagcacacattgctaacttgttgtccacagagccagctgatgtgaaagttggtattggaggcttcagcatgggtgcagcaatagctctgtactcttcaacttgttttgccatgggaaggtatggaaatggcattccataccctctcaacttaagaacagtggttggactaagtggttggcttcccggatcaaggagcttaaggaacaagatagaagtgtcacatgaagcaagaaggcgagcagcttcattacccattttgctgtgccatggaatcagtgatgatgtagtcctttgcaaatacggagaaaaatctgctcaatccttatgttcagcagggtttcgatatgttgcattcaaatcttatgatgggcttggtcattacacagttcctagagaaatggatgaggtttgcacttggcttagttcaaggctgggacttgaaggtatataggaggatttattttcttggtccctttttgtcatgttcctcgggcaataaagatctgcatatgttttttaagaattttcctagggactggattagttgtattattgaagagatttttagttattattattattattctaacatagcacggaccttgacctccttatttctcaatttcaaagaagatatggttaaaaaat

SEQ ID NO: 51357 - protein, 292 aa, Glycine max
  peptide (1)..(292): Ceres Seq. ID no. 14311714
MIVLCSALILSAHKEPLHTHCSCSTWGVLSTLSSISKMSHAHSHMGSGSRTTRRAFEFGKTHVVRPKGKHQATIVWLHGLGDNGLSSSQLLESLPLPNIKWICPTAPTRPVAILVGFPCTAWFDVGELSEDGPDDWEGLDASAAHIANLLSTEPADVKVGIGGFSMGAAIALYSSTCFAMGRYGNGIPYPLNLRTVVGLSGWLPGSRSLRNKIEVSHEARRRAASLPILLCHGISDDVVLCKYGEKSAQSLCSAGFRYVAFKSYDGLGHYTVPREMDEVCTWLSSRLGLEGI

SEQ ID NO: 51358 - protein, 255 aa, Glycine max
  peptide (1)..(255): Ceres Seq. ID no. 14311715
MSHAHSHMGSGSRTTRRAFEFGKTHVVRPKGKHQATIVWLHGLGDNGLSSSQLLESLPLPNIKWICPTAPTRPVAILVGFPCTAWFDVGELSEDGPDDWEGLDASAAHIANLLSTEPADVKVGIGGFSMGAAIALYSSTCFAMGRYGNGIPYPLNLRTVVGLSGWLPGSRSLRNKIEVSHEARRRAASLPILLCHGISDDVVLCKYGEKSAQSLCSAGFRYVAFKSYDGLGHYTVPREMDEVCTWLSSRLGLEGI

SEQ ID NO: 51359 - protein, 248 aa, Glycine max
  peptide (1)..(248): Ceres Seq. ID no. 14311716
MGSGSRTTRRAFEFGKTHVVRPKGKHQATIVWLHGLGDNGLSSSQLLESLPLPNIKWICPTAPTRPVAILVGFPCTAWFDVGELSEDGPDDWEGLDASAAHIANLLSTEPADVKVGIGGFSMGAAIALYSSTCFAMGRYGNGIPYPLNLRTVVGLSGWLPGSRSLRNKIEVSHEARRRAASLPILLCHGISDDVVLCKYGEKSAQSLCSAGFRYVAFKSYDGLGHYTVPREMDEVCTWLSSRLGLEGI

SEQ ID NO: 51360 - DNA, 1104 bp, Glycine max
  misc_feature (1)..(1104): Ceres Seq. ID no. 15171646
atcaaaatctaggtatttacaccgcacaatattatgagattgcagtagcagtgtttgctttgctcaagtctcagcgatatgatggcagacccagcaagtttcatagcaagctggttaactccttcttacctcttcatcttggtcaacctcgtcataggcaccatagccatcacttctcgcttcagttccacgcccaaaaaccaacaagcccaccacccccaaccactcagctccttcaatacccatcatcaccaacccaactgcactcagccccaactccttccaataccctcactgttgcagcgagtcacgtccttcaacctctccctccacaaacaccaacccacacctccagaaacacaacatctgcatcccgaaccccaaccccaacctgaaaagccgccggaactgcttcggactccctcactcttggagcgactcaggtccttccataatctttctctccacaaacatgtccaacccgagccagagccagagccagaacctgaacctgaaaagccggaactggttcggagtccctcgctcttgcagcggattcagtccataaacttctcccatctctacagatccgacttcagtcaccgagatgatgaggatcccgattcgggttcggatccgggtcgcggttcgggaaaggcggcggagatgaggaaatcggcgagcgtgagagggggtttgacggatagcgagtgggaggaggtcgagaagcggaggccgcagacggcgaggccggttgaaacgacgacgtcgtggagagaagacgaagaagtagacgccaaagctgacgatttcatcaacaggttcaagaaacagttgaggttgcagaggattgattcccttctccgttacagaggaggtaactcatcatgagtaaagaaaaacccgccctaatcttccttgcgcctgcgtcgttgcctcaagttgttctgacgttaaagtttgttggttttcaaatgtttgtatagtactgcgtgctactaggttggtgtggcaaagttcttgtcttagtaatcatgtcatgtttgtctaatattaataatagacttgtgtaggcatacacaaattgataataaatttgatatt

SEQ ID NO: 51361 - protein, 270 aa, Glycine max
  peptide (1)..(270): Ceres Seq. ID no. 15171647
MMADPASFIASWLTPSYLFILVNLVIGTIAITSRFSSTPKNQQAHHPQPLSSFNTHHHQPNCTQPQLLPIPSLLQRVTSFNLSLHKHQPTPPETQHLHPEPQPQPEKPPELLRTPSLLERLRSFHNLSLHKHVQPEPEPEPEPEPEKPELVRSPSLLQRIQSINFSHLYRSDFSHRDDEDPDSGSDPGRGSGKAAEMRKSASVRGGLTDSEWEEVEKRRPQTARPVETTTSWREDEEVDAKADDFINRFKKQLRLQRIDSLLRYRGGNSS

SEQ ID NO: 51362 - protein, 269 aa, Glycine max
  peptide (1)..(269): Ceres Seq. ID no. 15171648
MADPASFIASWLTPSYLFILVNLVIGTIAITSRFSSTPKNQQAHHPQPLSSFNTHHHQPNCTQPQLLPIPSLLQRVTSFNLSLHKHQPTPPETQHLHPEPQPQPEKPPELLRTPSLLERLRSFHNLSLHKHVQPEPEPEPEPEPEKPELVRSPSLLQRIQSINFSHLYRSDFSHRDDEDPDSGSDPGRGSGKAAEMRKSASVRGGLTDSEWEEVEKRRPQTARPVETTTSWREDEEVDAKADDFINRFKKQLRLQRIDSLLRYRGGNSS

SEQ ID NO: 51363 - DNA, 1355 bp, Glycine max
  misc_feature (1)..(1355): Ceres Seq. ID no. 14311721
actatactagtgagaaaagaaagggaagtcctccgcgccgccactcctcccatctctctgctctaaacgacaccgttttagtcttctcctcaagtcatggccacactcaagagcctctgcttcagaggaactgcctttcccgtttgcccctccaatgtcaccaacaatagaaactccaggagctcatattggaggcctgcacaagcagccgtgaagcccaatttccatctcccaatgcgcagttttgagttaaaaaataggacttctccagaggacataaaggctctgagattgataactgccattaaaactccatacctacctgatggtcgatttgatcttgaagcatatgatgacttggtgaatatgcagattggacaaggggccgaaggtattattgttggtgggacaactggtgaaggccaattaatgagctgggaagagcacataatgcttattgctcacacagtcaactgttttggtgggaaaattaaggttattggaaatactggaagcaactccaccagggaagcaattcatgccaccgagcaaggttttgctgttggaatgcatgctgcccttcacataaacccttactatggcaaaacctccttggatggtatgcttgctcactttcaaagtgtgctttccatgggtcccacaataatctacaatgtgcctgcacggactggtcaagacattcccccgcatgtaattcaaaccttagctgaaagtgctaacctggctggtgtcaaggagtgtgtgggaaatgaccggatcaagcagtatacagatgatggaattgttgtgtggagtgggaatgatgatcaatgccatgatgctagatggggttatggggctactggtgtgatatctgttgtaagcaacctggttcctggtttaatgcgagaactcatgtttggcggcgtaaaccctacactaaattctaagcttttgcctctgattgactggcttttccacatgccaaaccccattggtttgaacactgctcttgctcaacttggagttgtcagacccgtttttaggctaccgtttgtacctctccctgtggacaaaaggatagagtttgccaatttggtgaaggaaattggtcgagagcattttgttggaaataaagatgttgaggttcttgatgacgatgactttttcttggttagtcgttattaagttaccatgtaggttcgttgtatcctttcttggggtttgccaaatttaaaatccagatgagagtctattgtagtgaactagttaatgatcatctagtttctttttactggctactttgtagttgcaaactggttcaaatttattctggatttttttcttttggtaat

SEQ ID NO: 51364 - protein, 363 aa, Glycine max
  peptide (1)..(363): Ceres Seq. ID no. 14311722
MATLKSLCFRGTAFPVCPSNVTNNRNSRSSYWRPAQAAVKPNFHLPMRSFELKNRTSPEDIKALRLITAIKTPYLPDGRFDLEAYDDLVNMQIGQGAEGIIVGGTTGEGQLMSWEEHIMLIAHTVNCFGGKIKVIGNTGSNSTREAIHATEQGFAVGMHAALHINPYYGKTSLDGMLAHFQSVLSMGPTIIYNVPARTGQDIPPHVIQTLAESANLAGVKECVGNDRIKQYTDDGIVVWSGNDDQCHDARWGYGATGVISVVSNLVPGLMRELMFGGVNPTLNSKLLPLIDWLFHMPNPIGLNTALAQLGVVRPVFRLPFVPLPVDKRIEFANLVKEIGREHFVGNKDVEVLDDDDFFLVSRY

SEQ ID NO: 51365 - protein, 317 aa, Glycine max
  peptide (1)..(317): Ceres Seq. ID no. 14311723
MRSFELKNRTSPEDIKALRLITAIKTPYLPDGRFDLEAYDDLVNMQIGQGAEGIIVGGTTGEGQLMSWEEHIMLIAHTVNCFGGKIKVIGNTGSNSTREAIHATEQGFAVGMHAALHINPYYGKTSLDGMLAHFQSVLSMGPTIIYNVPARTGQDIPPHVIQTLAESANLAGVKECVGNDRIKQYTDDGIVVWSGNDDQCHDARWGYGATGVISVVSNLVPGLMRELMFGGVNPTLNSKLLPLIDWLFHMPNPIGLNTALAQLGVVRPVFRLPFVPLPVDKRIEFANLVKEIGREHFVGNKDVEVLDDDDFFLVSRY

SEQ ID NO: 51366 - protein, 273 aa, Glycine max
  peptide (1)..(273): Ceres Seq. ID no. 14311724
MQIGQGAEGIIVGGTTGEGQLMSWEEHIMLIAHTVNCFGGKIKVIGNTGSNSTREAIHATEQGFAVGMHAALHINPYYGKTSLDGMLAHFQSVLSMGPTIIYNVPARTGQDIPPHVIQTLAESANLAGVKECVGNDRIKQYTDDGIVVWSGNDDQCHDARWGYGATGVISVVSNLVPGLMRELMFGGVNPTLNSKLLPLIDWLFHMPNPIGLNTALAQLGVVRPVFRLPFVPLPVDKRIEFANLVKEIGREHFVGNKDVEVLDDDDFFLVSRY

SEQ ID NO: 51367 - DNA, 877 bp, Glycine max
  misc_feature (1)..(877): Ceres Seq. ID no. 13594535
ccttggatcccccgggctscaggaattcscactttattgwgwyyawyacctagaacatcctaatcgaaaatattagccttcccttgtcctcattgaaatctctttcttctcgtgggtttctctattttttttctttgtcacttctccaagtaggttctagcaatttcttcaattcttgagtatagtttaaaggatgattctttcgatgaagcaagttttctcactagtaatattcattgcattttgggaattttcttctggtgtagctgatgggggagatgtgattatagttcgagtatcaaataatttaaaccaaggtttaagtttcacaattcactgcaaaaccaataaccaagacttgggaactcaagtggtgaatccgggttactttgaacgacttgaactccatcatgacaatgcagctgacacaaaattcttgttttgcaaaataacatggagagatgcatcaattgattatgtcatttaccaagatgccagggattttcgtcgtagatgtataactgattgtaattgggaagtcaacaatgaaaaccttcttggcactaatcaatatactctaaaaccagatattattgtcccatggcctaaaaattgatacccatttagtgaacatccaattttacttgggtaatttaaataaaaaagtgttgtgttaaaaaaaaaaaaaaaaaaaaaaaaaaaaaaaaaaaaaaaaaaaaaaaaaaaaaaaaaaaaaaaaaaaaaaaaaaaaaaaaaaaaaaaaaaaaaaaaaaaaaaaaaaaaaaaaaaaagaaaaaattataaaaaaaaaaannctntttttttcacccccccccccccggggggggcccccccccccccctcccccaaaaagggg

SEQ ID NO: 51368 - protein, 140 aa, Glycine max
  peptide (1)..(140): Ceres Seq. ID no. 15221379
MILSMKQVFSLVIFIAFWEFSSGVADGGDVIIVRVSNNLNQGLSFTIHCKTNNQDLGTQVVNPGYFERLELHHDNAADTKFLFCKITWRDASIDYVIYQDARDFRRRCITDCNWEVNNENLLGTNQYTLKPDIIVPWPKN

SEQ ID NO: 51369 - protein, 136 aa, Glycine max
  peptide (1)..(136): Ceres Seq. ID no. 15221380
MKQVFSLVIFIAFWEFSSGVADGGDVIIVRVSNNLNQGLSFTIHCKTNNQDLGTQVVNPGYFERLELHHDNAADTKFLFCKITWRDASIDYVIYQDARDFRRRCITDCNWEVNNENLLGTNQYTLKPDIIVPWPKN

SEQ ID NO: 51370 - DNA, 1552 bp, Glycine max
  misc_feature (1)..(1552): Ceres Seq. ID no. 15171669
atccttctggcgtcgacggtgaaacttgttttccttgcgcgaagctttggcattcccccaatcgcttcatcctcatctacttaaccctaaccccacactctcacatactacatatataaaaccgccgtcacgatgatgctcagaattcgtagccgcgatggcctggagcgagtgagcgtcgaaaaccccctcgccacaacagtctcggacctaaaacggattatccaaacccaattgggaatcccggttcacaaccaaaccctctccaccaaccagaacctcctcttggccaaatccctcgaagatctcctccgattcaccgacatgtccaacctcgatgcgtctctctcgtctcttaacctcggccacggctccatcgtcttcttggcctacgagggcgagcggcgcgtggcgggccccgccttcaaccccgccggctccttcggccgcaagatgaccatggacgacctcatcgccaagcagatgcgcgtcacgcgccaggagaatccacactgcgagctcgtctccttcgaccgcgactgcgccaacgcgttccagcactacgtcaacgacactctcgccttcgccgtcaagcgcggggggttcatgtacggcaccgtttcggaggtgggaaaggtcgaggtggacttcatctacgagcctccgcagcagggttcggaggacaatctcgtctttttcagggacccagaagaggagaagtttgttgaagctattgcggtggggttggggatgaggaaggttgggtttattttcacgcagacgattactcaggataagaaggattacactttgtcgaatagggaggtgcttcaggctgtggagtaccatgccgagagtgggttgaaggagtgggctactgcggtggttaagcttgaggtgaatgaggaaatgggtggtgctgatgtgcattttgaagcgtttcagatgagtgatgtgtgtgtgaggttgtttaaggaagggtggttcgagacggagatcaaggaggacgatgatcccaagttgtcgaagatgaagaaggatgtggttgtcggggttaaggatactagagaggttgacaatgatttcttcttggtcgtcgtcaaaatcgctgatcatcagggtcctctttcatcatcatttcccattgagaaccggaacactcaagtgactatgaaggctttgaagaatcatctggaacggtcaaaaaatcttccatttgtgaagcgaatttctgattttcatcttcttctcgtattagcaagggttttagacctgaatgctgatgttcctgcattgacggaatgtgtgcagacacagacttctgttccagaaggttatcagatccttattgagtctatggcaagcactgcttgatgctgtatgcagttgttctggactcatggtgacacgagaattatgcactttacgttcaggtcctttgcagcaacatggtgcatattgccccatagcactcaaggaatgtttcgtatgttggtaatttgtacattgcttctttattgctgcggaaaatctcggatctgtcattttaccg

SEQ ID NO: 51371 - protein, 413 aa, Glycine max
  peptide (1)..(413): Ceres Seq. ID no. 15171670
MMLRIRSRDGLERVSVENPLATTVSDLKRIIQTQLGIPVHNQTLSTNQNLLLAKSLEDLLRFTDMSNLDASLSSLNLGHGSIVFLAYEGERRVAGPAFNPAGSFGRKMTMDDLIAKQMRVTRQENPHCELVSFDRDCANAFQHYVNDTLAFAVKRGGFMYGTVSEVGKVEVDFIYEPPQQGSEDNLVFFRDPEEEKFVEAIAVGLGMRKVGFIFTQTITQDKKDYTLSNREVLQAVEYHAESGLKEWATAVVKLEVNEEMGGADVHFEAFQMSDVCVRLFKEGWFETEIKEDDDPKLSKMKKDVVVGVKDTREVDNDFFLVVVKIADHQGPLSSSFPIENRNTQVTMKALKNHLERSKNLPFVKRISDFHLLLVLARVLDLNADVPALTECVQTQTSVPEGYQILIESMASTA

SEQ ID NO: 51372 - protein, 412 aa, Glycine max
  peptide (1)..(412): Ceres Seq. ID no. 15171671
MLRIRSRDGLERVSVENPLATTVSDLKRIIQTQLGIPVHNQTLSTNQNLLLAKSLEDLLRFTDMSNLDASLSSLNLGHGSIVFLAYEGERRVAGPAFNPAGSFGRKMTMDDLIAKQMRVTRQENPHCELVSFDRDCANAFQHYVNDTLAFAVKRGGFMYGTVSEVGKVEVDFIYEPPQQGSEDNLVFFRDPEEEKFVEAIAVGLGMRKVGFIFTQTITQDKKDYTLSNREVLQAVEYHAESGLKEWATAVVKLEVNEEMGGADVHFEAFQMSDVCVRLFKEGWFETEIKEDDDPKLSKMKKDVVVGVKDTREVDNDFFLVVVKIADHQGPLSSSFPIENRNTQVTMKALKNHLERSKNLPFVKRISDFHLLLVLARVLDLNADVPALTECVQTQTSVPEGYQILIESMASTA

SEQ ID NO: 51373 - protein, 349 aa, Glycine max
  peptide (1)..(349): Ceres Seq. ID no. 15171672
MSNLDASLSSLNLGHGSIVFLAYEGERRVAGPAFNPAGSFGRKMTMDDLIAKQMRVTRQENPHCELVSFDRDCANAFQHYVNDTLAFAVKRGGFMYGTVSEVGKVEVDFIYEPPQQGSEDNLVFFRDPEEEKFVEAIAVGLGMRKVGFIFTQTITQDKKDYTLSNREVLQAVEYHAESGLKEWATAVVKLEVNEEMGGADVHFEAFQMSDVCVRLFKEGWFETEIKEDDDPKLSKMKKDVVVGVKDTREVDNDFFLVVVKIADHQGPLSSSFPIENRNTQVTMKALKNHLERSKNLPFVKRISDFHLLLVLARVLDLNADVPALTECVQTQTSVPEGYQILIESMASTA

SEQ ID NO: 51374 - DNA, 1461 bp, Glycine max
  misc_feature (1)..(1461): Ceres Seq. ID no. 15177336
aaaaaattagttgcgacttgcgagcaacaaaatgagtgttccaatggagacggagctctcaaccgaccaaaacggcgcttcttcccaacactcactttccgttcccgaggacaaagttcttgtccctgtcgaggtaaccctaaaactttccagcacagctaaaatcgacgacgttcgttccgccgttgaggggatgttagaaaagaggagtttgagctataacgatggacccattccggtgcctcttgatgacgcgtttctagcagataacgtgcaaagaatttgtgtttgtggatgtgatactgatgaggggatgcacaatgataatgttcttttgttctggcaagtcaagcctgttgtacatgtctttcagcttagcgaggaagggccatgtgaggatataagctctgatggccaatcttccagcttcaatgaatggattcttcctgcaaaagaatttgacggcatgtgggaaagcttaatatacgaatctggtctaaagcaacggttattacgatatgcagcaagtgctttgctctttactgaaaaaggggttgatccattccttgtttcatggaaccgcataattttgttacatggaccacctgggactggaaagacgtcgttatgtaaagcattagctcagaaattatcaattcgattcaattcgagatacccacaggcccagcttgttgaagtgaatgcacattctttgttcagtaaatggttctctgaaagtggcaagctggtagcgaaacttttccaaaagattcaagaaatggtagaggaagaaagcaatctagtatttgtattgattgatgaagtcgaaagccttgccgctgctagaaaagctgctttatctggttctgaaccttctgattctattcgggttgtcaatgcattactaactcagatggacaagttaaaatcatcgccaaatgtgataattctaaccacctccaacataactgcggctattgatattgcttttgttgatcgagctgatatcaaagcatatgttggtcccccaactcttcaagctcggtatgaaatattaaggtcctgcttacaggaaatgatgcgtacagggatattgactagtttacaggattgtaagaacgccatgcttcctcattacgctagtgcgaaagataggttgaacactctagattttcatgaggacgctacattcatgcaactgtgcaaacaactacttgaaactgcagaggcatgtgagggaatgagtggaaggtcgttgagaaagcttccatttttggcacatgctgcgcttgcaaatccttttgaatgcaaccctattaagttcttatgtacaatggtagaaacagcaaagagggagcgttctgagcttcctgactaaagtaactaaaatttcaattgaaaatgtgtaaatcaaaagtgtaacgattgcgtctactgcattttagtgcgataagtgttgat

SEQ ID NO: 51375 - protein, 448 aa, Glycine max
  peptide (1)..(448): Ceres Seq. ID no. 15177337
MSVPMETELSTDQNGASSQHSLSVPEDKVLVPVEVTLKLSSTAKIDDVRSAVEGMLEKRSLSYNDGPIPVPLDDAFLADNVQRICVCGCDTDEGMHNDNVLLFWQVKPVVHVFQLSEEGPCEDISSDGQSSSFNEWILPAKEFDGMWESLIYESGLKQRLLRYAASALLFTEKGVDPFLVSWNRIILLHGPPGTGKTSLCKALAQKLSIRFNSRYPQAQLVEVNAHSLFSKWFSESGKLVAKLFQKIQEMVEEESNLVFVLIDEVESLAAARKAALSGSEPSDSIRVVNALLTQMDKLKSSPNVIILTTSNITAAIDIAFVDRADIKAYVGPPTLQARYEILRSCLQEMMRTGILTSLQDCKNAMLPHYASAKDRLNTLDFHEDATFMQLCKQLLETAEACEGMSGRSLRKLPFLAHAALANPFECNPIKFLCTMVETAKRERSELPD

SEQ ID NO: 51376 - protein, 444 aa, Glycine max
  peptide (1)..(444): Ceres Seq. ID no. 15177338
METELSTDQNGASSQHSLSVPEDKVLVPVEVTLKLSSTAKIDDVRSAVEGMLEKRSLSYNDGPIPVPLDDAFLADNVQRICVCGCDTDEGMHNDNVLLFWQVKPVVHVFQLSEEGPCEDISSDGQSSSFNEWILPAKEFDGMWESLIYESGLKQRLLRYAASALLFTEKGVDPFLVSWNRIILLHGPPGTGKTSLCKALAQKLSIRFNSRYPQAQLVEVNAHSLFSKWFSESGKLVAKLFQKIQEMVEEESNLVFVLIDEVESLAAARKAALSGSEPSDSIRVVNALLTQMDKLKSSPNVIILTTSNITAAIDIAFVDRADIKAYVGPPTLQARYEILRSCLQEMMRTGILTSLQDCKNAMLPHYASAKDRLNTLDFHEDATFMQLCKQLLETAEACEGMSGRSLRKLPFLAHAALANPFECNPIKFLCTMVETAKRERSELPD

SEQ ID NO: 51377 - protein, 394 aa, Glycine max
  peptide (1)..(394): Ceres Seq. ID no. 15177339
MLEKRSLSYNDGPIPVPLDDAFLADNVQRICVCGCDTDEGMHNDNVLLFWQVKPVVHVFQLSEEGPCEDISSDGQSSSFNEWILPAKEFDGMWESLIYESGLKQRLLRYAASALLFTEKGVDPFLVSWNRIILLHGPPGTGKTSLCKALAQKLSIRFNSRYPQAQLVEVNAHSLFSKWFSESGKLVAKLFQKIQEMVEEESNLVFVLIDEVESLAAARKAALSGSEPSDSIRVVNALLTQMDKLKSSPNVIILTTSNITAAIDIAFVDRADIKAYVGPPTLQARYEILRSCLQEMMRTGILTSLQDCKNAMLPHYASAKDRLNTLDFHEDATFMQLCKQLLETAEACEGMSGRSLRKLPFLAHAALANPFECNPIKFLCTMVETAKRERSELPD

SEQ ID NO: 51378 - DNA, 1300 bp, Glycine max
  misc_feature (1)..(1300): Ceres Seq. ID no. 15171279
ataggagttgtgttaagatttggcataatacattgatttgtttcttaaaaacaacactgcaatgtctgccatatttctgcttgttggaatgctatcgtccattacagttgcacaatccataggagtttgctatggagtgattggtgataatctaccatcaaggcaagaagttgtggacttatataaaacaaatggcattggtagaatgcgtatatactacccagatgaagaagcactccaagcccttagaggttcaggcattgagttgattatggacgtggctaaggaaacccttcaatcattgacagactccaatgctgctacagattgggtcaataaatatgttacaccttactcgcaagacgtcaatttcaagtacatcgctgttggaaatgaaattcatcccaataccaatgaggcacaatatattctatctgccatgaccaacattcagaatgcaatttcatcagcaaatttacaaattaaggtgtcaacagctatagactctactttgattactaactcttaccctcccaatgatggcgttttcactagcgatgcggagccatacataaaacccataatcaacttcctagtgagcaatggggccccacttcttgccaacgtgtacccttactttgcttatgcaaatgatcaaagcattcctcttgcctatgctctttttacccaacaaggaaacaacgacgttgggtaccaaaacctctttgatgctatgttggattcaatatatgctgctttggagaaagtgggagcgtccaatttgcagatagtggtttctgagagtgggtggccatctgaaggtggagctggagcctcaattgataatgcaggcacttactatgctaatttgattcgtcatgcctcgagtgggaatggaactccaaagaggcctggtgagtctatagagacttacttgttcgccatgtttgacgaaaaccagaagcaaggtgctgatactgagcgtcattttggtctcttcaatcctgataaatcacctaaataccaacttagtttcaactaattgaaactaacagaaatatatatatatatatatatgctcctatatctatttactttgaataagtgtgtcaagtatatatgcacatctgtaaaacgcttatttatgccctaaatgacaaatatataagaagtgtcataatttagtttgtgatatttttttttacttactttgtttaaataaatacaaaccaaatttctgttggatgattgttatcataaggagaaaagaataagaatcactgtttaatatcattagtac

SEQ ID NO: 51379 - protein, 326 aa, Glycine max
  peptide (1)..(326): Ceres Seq. ID no. 15171280
MSAIFLLVGMLSSITVAQSIGVCYGVIGDNLPSRQEVVDLYKTNGIGRMRIYYPDEEALQALRGSGIELIMDVAKETLQSLTDSNAATDWVNKYVTPYSQDVNFKYIAVGNEIHPNTNEAQYILSAMTNIQNAISSANLQIKVSTAIDSTLITNSYPPNDGVFTSDAEPYIKPIINFLVSNGAPLLANVYPYFAYANDQSIPLAYALFTQQGNNDVGYQNLFDAMLDSIYAALEKVGASNLQIVVSESGWPSEGGAGASIDNAGTYYANLIRHASSGNGTPKRPGESIETYLFAMFDENQKQGADTERHFGLFNPDKSPKYQLSFN

SEQ ID NO: 51380 - protein, 317 aa, Glycine max
  peptide (1)..(317): Ceres Seq. ID no. 15171281
MLSSITVAQSIGVCYGVIGDNLPSRQEVVDLYKTNGIGRMRIYYPDEEALQALRGSGIELIMDVAKETLQSLTDSNAATDWVNKYVTPYSQDVNFKYIAVGNEIHPNTNEAQYILSAMTNIQNAISSANLQIKVSTAIDSTLITNSYPPNDGVFTSDAEPYIKPIINFLVSNGAPLLANVYPYFAYANDQSIPLAYALFTQQGNNDVGYQNLFDAMLDSIYAALEKVGASNLQIVVSESGWPSEGGAGASIDNAGTYYANLIRHASSGNGTPKRPGESIETYLFAMFDENQKQGADTERHFGLFNPDKSPKYQLSFN

SEQ ID NO: 51381 - protein, 278 aa, Glycine max
  peptide (1)..(278): Ceres Seq. ID no. 15171282
MRIYYPDEEALQALRGSGIELIMDVAKETLQSLTDSNAATDWVNKYVTPYSQDVNFKYIAVGNEIHPNTNEAQYILSAMTNIQNAISSANLQIKVSTAIDSTLITNSYPPNDGVFTSDAEPYIKPIINFLVSNGAPLLANVYPYFAYANDQSIPLAYALFTQQGNNDVGYQNLFDAMLDSIYAALEKVGASNLQIVVSESGWPSEGGAGASIDNAGTYYANLIRHASSGNGTPKRPGESIETYLFAMFDENQKQGADTERHFGLFNPDKSPKYQLSFN

SEQ ID NO: 51382 - DNA, 1814 bp, Glycine max
  misc_feature (1)..(1814): Ceres Seq. ID no. 13594536
atcagggcgagaagaagagagtgagtgaagaagcattatttccacttgacttgggtgtctccgcctttctcttctcaaatcaaatcaatgagcatggcttctctccccaattcccccgctctttcattctcctcatctctctccaccaccgccaatctcctcccatgtcgccgcttcaccgcattcccccgccgccgcgcctcttcattctccgtgcaagctaagatccgcgaaatcttcatgcccgcactcagctccaccatgaccgagggcaaaatcgtctcctggatcaaatccgagggcgacatgctctccaagggcgacagcgttgtcgtcgtcgaatccgacaaggccgacatggacgtcgagaccttctacgatggcatcctcgctgccatcgtcgtcgccgacggcgaaactgcccccgtcggagcccccatcggtttgctcgccgattctcccgaagaagtcgccgaagccaaagccaaagccgccaaatccgttccctctggctctcccgcccccgcctctccctccgacccttctccggcgactcctccgccacctcctccgccggccaagtctgtttcagaaggtccggcgaagatcgtggccacgcctcaggctaagaagctcgcaaagcagcacaaggtcgacattgcaacggtcgccgggaccggtccgttcggtaggattactccggcggacgtggaggccgccgccggaatcgcgccgtcaaagagaaatgtggctccggcggcgattcctgctccggcgactccagctcctccatcgaaagctgcttctggttctgctgcaccggctccgattccgggttctagtgttgttcccttcactactatgcaatctgcggtggcgaagaacatgatggagagtctatctgtgcctacgttcagggtggggtaccctgtgactactgatgcgttggatgccctgtatgagaaggtgaaaccaaagggtgtgacaatgacggctattttggctaaggctgctgcaatggcacttgttcagcacccggttgtcaatgccacctgcaaagacggcaagaatttcgtgtataacggtaacatcaatgttgctgttgctgtggcaattaatggtggtttgatcacccctgttcttcaggatgcggataagttggacttgtatctattgtcccaaaaatggaaggagctagtggaaaaagctcgtgcaaagcagttgcaacctcatgagtataattcaggaactttcacgctttccaatttgggtatgtttggagttgacaggtttgatgccatacttccaccaggccagggtgctatcatggctgttggcgcatcaaagcctactgttctggctgataaagatggattcttcagcgtgaagaataaaatgctggtgaatgtaacagctgatcatcgaattatttatggggctgacttggccgctttcctccagacattctcgaaaatcattgaaaacccagaaagcctgacattgtagtcattctgtacttccaacataaaattatctccaccactggatcacgactcgataatgtttgtttagaagctatttgactcaatgccgaacattttgtgatttttttccctcaactttcattgttttatcttttaggagctatcctgaggaccaatgatagattttttgacagggagaaacagctttaaaattgtttacagtgagggatgttctaaacggcaattattttgagaatctacatgtaagcaataagcggttttaacttttaaatgttggatttttcagtaaaaaattactttttactcctt

SEQ ID NO: 51383 - protein, 472 aa, Glycine max
  peptide (1)..(472): Ceres Seq. ID no. 15221381
MSMASLPNSPALSFSSSLSTTANLLPCRRFTAFPRRRASSFSVQAKIREIFMPALSSTMTEGKIVSWIKSEGDMLSKGDSVVVVESDKADMDVETFYDGILAAIVVADGETAPVGAPIGLLADSPEEVAEAKAKAAKSVPSGSPAPASPSDPSPATPPPPPPPAKSVSEGPAKIVATPQAKKLAKQHKVDIATVAGTGPFGRITPADVEAAAGIAPSKRNVAPAAIPAPATPAPPSKAASGSAAPAPIPGSSVVPFTTMQSAVAKNMMESLSVPTFRVGYPVTTDALDALYEKVKPKGVTMTAILAKAAAMALVQHPVVNATCKDGKNFVYNGNINVAVAVAINGGLITPVLQDADKLDLYLLSQKWKELVEKARAKQLQPHEYNSGTFTLSNLGMFGVDRFDAILPPGQGAIMAVGASKPTVLADKDGFFSVKNKMLVNVTADHRIIYGADLAAFLQTFSKIIENPESLTL

SEQ ID NO: 51384 - protein, 470 aa, Glycine max
  peptide (1)..(470): Ceres Seq. ID no. 15221382
MASLPNSPALSFSSSLSTTANLLPCRRFTAFPRRRASSFSVQAKIREIFMPALSSTMTEGKIVSWIKSEGDMLSKGDSVVVVESDKADMDVETFYDGILAAIVVADGETAPVGAPIGLLADSPEEVAEAKAKAAKSVPSGSPAPASPSDPSPATPPPPPPPAKSVSEGPAKIVATPQAKKLAKQHKVDIATVAGTGPFGRITPADVEAAAGIAPSKRNVAPAAIPAPATPAPPSKAASGSAAPAPIPGSSVVPFTTMQSAVAKNMMESLSVPTFRVGYPVTTDALDALYEKVKPKGVTMTAILAKAAAMALVQHPVVNATCKDGKNFVYNGNINVAVAVAINGGLITPVLQDADKLDLYLLSQKWKELVEKARAKQLQPHEYNSGTFTLSNLGMFGVDRFDAILPPGQGAIMAVGASKPTVLADKDGFFSVKNKMLVNVTADHRIIYGADLAAFLQTFSKIIENPESLTL

SEQ ID NO: 51385 - protein, 421 aa, Glycine max
  peptide (1)..(421): Ceres Seq. ID no. 15221383
MPALSSTMTEGKIVSWIKSEGDMLSKGDSVVVVESDKADMDVETFYDGILAAIVVADGETAPVGAPIGLLADSPEEVAEAKAKAAKSVPSGSPAPASPSDPSPATPPPPPPPAKSVSEGPAKIVATPQAKKLAKQHKVDIATVAGTGPFGRITPADVEAAAGIAPSKRNVAPAAIPAPATPAPPSKAASGSAAPAPIPGSSVVPFTTMQSAVAKNMMESLSVPTFRVGYPVTTDALDALYEKVKPKGVTMTAILAKAAAMALVQHPVVNATCKDGKNFVYNGNINVAVAVAINGGLITPVLQDADKLDLYLLSQKWKELVEKARAKQLQPHEYNSGTFTLSNLGMFGVDRFDAILPPGQGAIMAVGASKPTVLADKDGFFSVKNKMLVNVTADHRIIYGADLAAFLQTFSKIIENPESLTL

SEQ ID NO: 51386 - DNA, 1790 bp, Glycine max
  misc_feature (1)..(1790): Ceres Seq. ID no. 15177258
actctgcttcctctctccaaagcctgaaagaaaaaaaaaatcatctttctctttctcatattttctctgtgtgtgaatttgttgttctttcacaatggaacaacctccttcctcgtctcttcaggtggagacagcacaacaaccgggacctagtcctctccgaaaaatgttcgctgtctcgtcaatcgccgcgggaattcaattcgggtgggccctacagctctctcttctgacaccgtacgtccagaccctcggcgtccctcacgcatgggcgtcgttcatttggctctgcggcccaatctctgggctgcttgtgcagcccattgtagggtacagcagcgatcgatgcagatcccgcttcggtcgccgccgtcccttcatcttcgtcggagccatcgccgtcgcaattgctgtgttcctcatcggttatgcagccgatataggacacgcggcgggcgatgacctcacgaagaagacccgtccacgcgcggtggtggtctttgtggtcggcttctggatcctggacgtggccaacaacatgctccagggtccatgccgcgccttcctcggtgacctcgccgccggggaccaccgcaagacgaggaccgccaacgccttcttctcgttcttcatggccatcggaaacgtcctcggctacgcagccggctcctacgacaaactccaccgcgccttcaaattcacacaaaccgaagcgtgtgacgtgttctgtgcaaacctcaagagctgcttcttcttctcaattgtcctcctcctggttctttgtttcgttgtgctcatttgcgtcgacgacccacaattcacgccacgtggcgatgacaacaatggcgaaaacgacggcgtttcggggtcgtgctttggtgaactctgggctgcgtttaaaggtctaaagaggccaatgtggttgttgatggtagtgaccgctataaactgggtggcgtggtttccgtacatgctgttcgatactgattggatggggcgtgaggtgtacggtggtaaggtgggggagaaagcatacgattcgggagtgcataagggggcgttggggcttatgctgaactctgtcgttttggcattgatgtcgttgacggtggaaccgttgggtcgtttcgttgggggagttaagtggctatggggaatcgttaacgtaattctcgccgtttgcatggcaatgacggtggttatcacaagggctgcagaacatgaacggaaaaacggcgtttctgctgttgggcatccctcagttggtgtgcaagtggctgcattgactttcttctccgcccttggtgttcctcttgctattactttcagcgtcccctttgcactggcatctatatactcctccacttcaggagcaggccaaggtttatccttgggcgtcctcaatgttgcaattgtcgtgccacagatgatagtatcggctataagtggacagtgggataagtggtttggtggtggcaacttgccggcgtttgtgttgggtgccgtggcggccgccgtgagtgccgtgttagcggttgttctgctgccaacaccaaagccagcagatgtggccaaggttacttccgtcactgctgggagtttccattagtatatattatagagttttacatgcatgggacaatattagatggagacttttaatttaaatttggtgagtgtgtatcatttaggtattagacccatcaaataactctttagggtgggcttaagttttatccttgttttgtctaataaatatatgtacaacaacattaaaaaattaaaaatcc

SEQ ID NO: 51387 - protein, 504 aa, Glycine max
  peptide (1)..(504): Ceres Seq. ID no. 15177259
MEQPPSSSLQVETAQQPGPSPLRKMFAVSSIAAGIQFGWALQLSLLTPYVQTLGVPHAWASFIWLCGPISGLLVQPIVGYSSDRCRSRFGRRRPFIFVGAIAVAIAVFLIGYAADIGHAAGDDLTKKTRPRAVVVFVVGFWILDVANNMLQGPCRAFLGDLAAGDHRKTRTANAFFSFFMAIGNVLGYAAGSYDKLHRAFKFTQTEACDVFCANLKSCFFFSIVLLLVLCFVVLICVDDPQFTPRGDDNNGENDGVSGSCFGELWAAFKGLKRPMWLLMVVTAINWVAWFPYMLFDTDWMGREVYGGKVGEKAYDSGVHKGALGLMLNSVVLALMSLTVEPLGRFVGGVKWLWGIVNVILAVCMAMTVVITRAAEHERKNGVSAVGHPSVGVQVAALTFFSALGVPLAITFSVPFALASIYSSTSGAGQGLSLGVLNVAIVVPQMIVSAISGQWDKWFGGGNLPAFVLGAVAAAVSAVLAVVLLPTPKPADVAKVTSVTAGSFH

SEQ ID NO: 51388 - protein, 480 aa, Glycine max
  peptide (1)..(480): Ceres Seq. ID no. 15177260
MFAVSSIAAGIQFGWALQLSLLTPYVQTLGVPHAWASFIWLCGPISGLLVQPIVGYSSDRCRSRFGRRRPFIFVGAIAVAIAVFLIGYAADIGHAAGDDLTKKTRPRAVVVFVVGFWILDVANNMLQGPCRAFLGDLAAGDHRKTRTANAFFSFFMAIGNVLGYAAGSYDKLHRAFKFTQTEACDVFCANLKSCFFFSIVLLLVLCFVVLICVDDPQFTPRGDDNNGENDGVSGSCFGELWAAFKGLKRPMWLLMVVTAINWVAWFPYMLFDTDWMGREVYGGKVGEKAYDSGVHKGALGLMLNSVVLALMSLTVEPLGRFVGGVKWLWGIVNVILAVCMAMTVVITRAAEHERKNGVSAVGHPSVGVQVAALTFFSALGVPLAITFSVPFALASIYSSTSGAGQGLSLGVLNVAIVVPQMIVSAISGQWDKWFGGGNLPAFVLGAVAAAVSAVLAVVLLPTPKPADVAKVTSVTAGSFH

SEQ ID NO: 51389 - protein, 356 aa, Glycine max
  peptide (1)..(356): Ceres Seq. ID no. 15177261
MLQGPCRAFLGDLAAGDHRKTRTANAFFSFFMAIGNVLGYAAGSYDKLHRAFKFTQTEACDVFCANLKSCFFFSIVLLLVLCFVVLICVDDPQFTPRGDDNNGENDGVSGSCFGELWAAFKGLKRPMWLLMVVTAINWVAWFPYMLFDTDWMGREVYGGKVGEKAYDSGVHKGALGLMLNSVVLALMSLTVEPLGRFVGGVKWLWGIVNVILAVCMAMTVVITRAAEHERKNGVSAVGHPSVGVQVAALTFFSALGVPLAITFSVPFALASIYSSTSGAGQGLSLGVLNVAIVVPQMIVSAISGQWDKWFGGGNLPAFVLGAVAAAVSAVLAVVLLPTPKPADVAKVTSVTAGSFH

SEQ ID NO: 51390 - DNA, 1322 bp, Glycine max
  misc_feature (1)..(1322): Ceres Seq. ID no. 14311477
aactcacacacccttctcttctctctttcaattccttcccagctcttcattgaagaagctatggactttctaaacttcttgcttaacttgttggtccctccaggcagtatgatcaccttggctttctcatggcctgcactttgcttcctcaatttttgtgagtggctttataatagtatatatggtgaggatatggataataaagtggtcataatcaccggcgcatcttcaggcattggagagcaaattgcatatgagtatgctttgaggagagcaaatttaacgttggtggcccgcagagagcacaggctaagagggatcgctgagaatgcaaagagattgggtgcaagacatgtgatgattatggcagcagatgttgtgaaggaagatgattgtaggagatttgttaacgaaaccataaatgtctttggccgtgtagatcatcttgtaaatacagtgagtttgggacatacattctgctttgaagaagctacagacacatcagttttccctgttctcctggatattaatttttgggggaatgtttatccaacatttgtggctcttccttaccttcatcaaagcaatggtcgtattattatcaatgcatcagttgaaagttggttgcctatgccaaggatgagtttatatgctgctgcaaaggcagcattagtgaacttttatgagacactgagatttgagttgaaagatgaggttggaataacaatagccacacatggttggattggaagcgaaatgacgaggggcaagttcatgctggaggagggtgctgagatgcaatggaaggaagaaagagaagtgcaggtgacgggtggaccagtagaggagttcgcaaggttgatagtatcaggggcatgtagaggagatgcatatgtgaagtttcctagctggtatgatgtattcctactatacagggtgtttgctccaagagttcttaactgggcattcaggcttcttatttcgccacaagggacaagaagagcttcttcttatgtagggactggcaaacacatcgaagctgtgggtatggtgagacctatggctatgctggagggaacctcacctacacacaatgccattggtcctcttaccttctctggccagctgatcagccagcacaagctcgattaattccaacatcatatcctccagaaaattatgaagccatctactttttctatacatatatatgcttttatcatttattgcattcttgctatcaccatgcttcgtgaaactatgtcatgttgttggactttgttgtcaaaaatgaaaataaacttgtcttgattgccaaatcc

SEQ ID NO: 51391 - protein, 383 aa, Glycine max
  peptide (1)..(383): Ceres Seq. ID no. 14311478
NSHTLLFSLSIPSQLFIEEAMDFLNFLLNLLVPPGSMITLAFSWPALCFLNFCEWLYNSIYGEDMDNKVVIITGASSGIGEQIAYEYALRRANLTLVARREHRLRGIAENAKRLGARHVMIMAADVVKEDDCRRFVNETINVFGRVDHLVNTVSLGHTFCFEEATDTSVFPVLLDINFWGNVYPTFVALPYLHQSNGRIIINASVESWLPMPRMSLYAAAKAALVNFYETLRFELKDEVGITIATHGWIGSEMTRGKFMLEEGAEMQWKEEREVQVTGGPVEEFARLIVSGACRGDAYVKFPSWYDVFLLYRVFAPRVLNWAFRLLISPQGTRRASSYVGTGKHIEAVGMVRPMAMLEGTSPTHNAIGPLTFSGQLISQHKLD

SEQ ID NO: 51392 - protein, 363 aa, Glycine max
  peptide (1)..(363): Ceres Seq. ID no. 14311479
MDFLNFLLNLLVPPGSMITLAFSWPALCFLNFCEWLYNSIYGEDMDNKVVIITGASSGIGEQIAYEYALRRANLTLVARREHRLRGIAENAKRLGARHVMIMAADVVKEDDCRRFVNETINVFGRVDHLVNTVSLGHTFCFEEATDTSVFPVLLDINFWGNVYPTFVALPYLHQSNGRIIINASVESWLPMPRMSLYAAAKAALVNFYETLRFELKDEVGITIATHGWIGSEMTRGKFMLEEGAEMQWKEEREVQVTGGPVEEFARLIVSGACRGDAYVKFPSWYDVFLLYRVFAPRVLNWAFRLLISPQGTRRASSYVGTGKHIEAVGMVRPMAMLEGTSPTHNAIGPLTFSGQLISQHKLD

SEQ ID NO: 51393 - protein, 347 aa, Glycine max
  peptide (1)..(347): Ceres Seq. ID no. 14311480
MITLAFSWPALCFLNFCEWLYNSIYGEDMDNKVVIITGASSGIGEQIAYEYALRRANLTLVARREHRLRGIAENAKRLGARHVMIMAADVVKEDDCRRFVNETINVFGRVDHLVNTVSLGHTFCFEEATDTSVFPVLLDINFWGNVYPTFVALPYLHQSNGRIIINASVESWLPMPRMSLYAAAKAALVNFYETLRFELKDEVGITIATHGWIGSEMTRGKFMLEEGAEMQWKEEREVQVTGGPVEEFARLIVSGACRGDAYVKFPSWYDVFLLYRVFAPRVLNWAFRLLISPQGTRRASSYVGTGKHIEAVGMVRPMAMLEGTSPTHNAIGPLTFSGQLISQHKLD

SEQ ID NO: 51394 - DNA, 1637 bp, Glycine max
  misc_feature (1)..(1637): Ceres Seq. ID no. 14311459
ggctttccttccttcctttgtcaggcatccatgttgtgaagagcagaggatggataacataccagagcacatagtatgggagatattgagtaggataaagaaaacaagtgatagaaatgctgtttctcttgtttgtaaacggctttattatttggacaatgcagaaaggaattgtataagggttgggtgtggaatggatcctgcagatgaagctttgagctgtctatgcataaggtttgagaacttgtccaaagtggagattacatactctggatggatgtccaaattgggaaaacaattggatgacaagggccttctcattcttgcgaatcactgccctctactctgtgatctctccttgagctactgcacattcatcactgatgttggtctccgttacttggcttcttcttccaagctctcatctttaaggttgaatttcacaccaaggatcactggctgtggcattctgtctcttgttgtgggctgcaagaacctctccagccttcaccttatcagatgccttaatgtcagcagtgtggagtggcttgaatatcttggcaagctcggaacgcttgaggatctctccatcaacaattgcagggccattggtgaaggggacttgattaagcttggccctggttggcagaaactcacaaggttgcagtttgaagtggatgctaattaccgatacatgaaggtttatgaccggttgtctgtggataggtggcaaaagcagtatgtcccttgtgggaacatgcttgaacttagcctggtcaattgcatcatcagtcccgggagagggcttgcttgcgtgttgagtaagtgcaagaacttgcagaaaattcacctagacatgtgtgttggggtgagggactttgacattatttgtttgtcccaaagatcaagtgaacttaaatcggtttcacttagagttccatccgatttttcactcccctccttggtgaataatccgttgagattgacggatgagagtctcaaggccttggctcaaaactgctccaaacttgaatcagtgaggatatctttttctgatggggagttcccttcatcctcctcattcacattaagtggaatactttgtttgattcaaaggtgcctggttcgacagcttgctcttgatcatgtttattccttcaatgatgttggaatggaagctctttgctccgctgagtatcttgaatcacttgaacttgtgaaatgccaagagattagcgatgaagggctacagcttgtgagtcagtttcccagattgtgcattttacggttaagcaagtgtttggggatctctgatgatggattaaagccgcttgttggatcattgaagttagatttcttggccattgaagattgtcctcaaatttctgaaagaggtgtccaaggagctgcaaagtctgtgtctttcaggcaagacttatcttggatgtactgaacctgttgggttttagggacatgaagtccgttgtttttttttatggccatcttcaatgcttctatatatctatagtgtatcacacacacgtaagattattctgttgtattttttatttttatgtcaaattctgttcttgtatttgttttgtaaatcttttaataaaataaatggcttctctggc

SEQ ID NO: 51395 - protein, 483 aa, Glycine max
  peptide (1)..(483): Ceres Seq. ID no. 14311460
AFLPSFVRHPCCEEQRMDNIPEHIVWEILSRIKKTSDRNAVSLVCKRLYYLDNAERNCIRVGCGMDPADEALSCLCIRFENLSKVEITYSGWMSKLGKQLDDKGLLILANHCPLLCDLSLSYCTFITDVGLRYLASSSKLSSLRLNFTPRITGCGILSLVVGCKNLSSLHLIRCLNVSSVEWLEYLGKLGTLEDLSINNCRAIGEGDLIKLGPGWQKLTRLQFEVDANYRYMKVYDRLSVDRWQKQYVPCGNMLELSLVNCIISPGRGLACVLSKCKNLQKIHLDMCVGVRDFDIICLSQRSSELKSVSLRVPSDFSLPSLVNNPLRLTDESLKALAQNCSKLESVRISFSDGEFPSSSSFTLSGILCLIQRCLVRQLALDHVYSFNDVGMEALCSAEYLESLELVKCQEISDEGLQLVSQFPRLCILRLSKCLGISDDGLKPLVGSLKLDFLAIEDCPQISERGVQGAAKSVSFRQDLSWMY

SEQ ID NO: 51396 - protein, 467 aa, Glycine max
  peptide (1)..(467): Ceres Seq. ID no. 14311461
MDNIPEHIVWEILSRIKKTSDRNAVSLVCKRLYYLDNAERNCIRVGCGMDPADEALSCLCIRFENLSKVEITYSGWMSKLGKQLDDKGLLILANHCPLLCDLSLSYCTFITDVGLRYLASSSKLSSLRLNFTPRITGCGILSLVVGCKNLSSLHLIRCLNVSSVEWLEYLGKLGTLEDLSINNCRAIGEGDLIKLGPGWQKLTRLQFEVDANYRYMKVYDRLSVDRWQKQYVPCGNMLELSLVNCIISPGRGLACVLSKCKNLQKIHLDMCVGVRDFDIICLSQRSSELKSVSLRVPSDFSLPSLVNNPLRLTDESLKALAQNCSKLESVRISFSDGEFPSSSSFTLSGILCLIQRCLVRQLALDHVYSFNDVGMEALCSAEYLESLELVKCQEISDEGLQLVSQFPRLCILRLSKCLGISDDGLKPLVGSLKLDFLAIEDCPQISERGVQGAAKSVSFRQDLSWMY

SEQ ID NO: 51397 - protein, 419 aa, Glycine max
  peptide (1)..(419): Ceres Seq. ID no. 14311462
MDPADEALSCLCIRFENLSKVEITYSGWMSKLGKQLDDKGLLILANHCPLLCDLSLSYCTFITDVGLRYLASSSKLSSLRLNFTPRITGCGILSLVVGCKNLSSLHLIRCLNVSSVEWLEYLGKLGTLEDLSINNCRAIGEGDLIKLGPGWQKLTRLQFEVDANYRYMKVYDRLSVDRWQKQYVPCGNMLELSLVNCIISPGRGLACVLSKCKNLQKIHLDMCVGVRDFDIICLSQRSSELKSVSLRVPSDFSLPSLVNNPLRLTDESLKALAQNCSKLESVRISFSDGEFPSSSSFTLSGILCLIQRCLVRQLALDHVYSFNDVGMEALCSAEYLESLELVKCQEISDEGLQLVSQFPRLCILRLSKCLGISDDGLKPLVGSLKLDFLAIEDCPQISERGVQGAAKSVSFRQDLSWMY

SEQ ID NO: 51398 - DNA, 1401 bp, Glycine max
  misc_feature (1)..(1401): Ceres Seq. ID no. 14311509
atcggttataccctttgccccctctctctctctctctctccttctcagtgcaaacagtttagaaaaccaaattaatctagttcaatcatacatagagaatacagtgtaaagaatagattttctcccctaccaaaaacaagagggagctgagatattgtaaggtggtgtgaaaggaattaacaaggatctgttttgggatatatgggcataagagaaagagatgacatggtgcaatgactcagatgaggagaggggaattgatcaactggttgcaccaacaattactcctacttcaactaataacactactgttcttactgatcatcgcacaaaagcaagcgaaattcgcaccttaacttgcccctcatgtggccaaaacattgaattccaagaccagactggaatcaatgacttgccggggttaccagctggggtgaagtttgatccgaatgaccaagagatattagagcatttggaagcaaaggtactgtctgacgtgccaaagcttcatccacttattgatgagttcataccaacgcttgaaggagagaatgggatctgttatacgcatccagaaaagcttccaggtgtaagaaaagatgggcaaatccgccacttctttcacaggccatctaaagcatacacaacaggaacaaggaaaagaagaaaggttcacaccgacgaagaaggaagcgagacaaggtggcacaaaacaggaaaaactagacccgtttttgttggtggtgctgtgaaggggttcaagaaaatcctagtcctctacaccaactatggaaggcaaaagaagcctgagaagaccaattgggtgatgcatcaataccaccttggcactagcgaagaagagaaagatggagaattggtggtttcaaaggttttctaccaaacacaacctcgacaatgtggtaattccattataaagcaggatctttatgatgaagaaagattgatgactaaccaaagtgtccataatgatgatgacaacaatataatacctagaaataataatgcaagtgctcttatggactactacaatccttctttcataaattatgaccaattgggtggtcgtagtaatagggaaaattcacctcaacttattccaaatttggtcatgcaaggtgatagctcttctttcattcgattagcaatggatgcaaccaaagccaagatggacagaaaatagctccttactggaagaactttcttggtagaacatatagtagtgacaatgaccatatattgatgttgatgttttttttttatattactattatatatataacatgtatttattctatatatgggacgataagttggaagaaagacaaggcttccattattattattatatatatatgtgtgtcgaggattacccatttgacg

SEQ ID NO: 51399 - protein, 326 aa, Glycine max
  peptide (1)..(326): Ceres Seq. ID no. 14311510
MTWCNDSDEERGIDQLVAPTITPTSTNNTTVLTDHRTKASEIRTLTCPSCGQNIEFQDQTGINDLPGLPAGVKFDPNDQEILEHLEAKVLSDVPKLHPLIDEFIPTLEGENGICYTHPEKLPGVRKDGQIRHFFHRPSKAYTTGTRKRRKVHTDEEGSETRWHKTGKTRPVFVGGAVKGFKKILVLYTNYGRQKKPEKTNWVMHQYHLGTSEEEKDGELVVSKVFYQTQPRQCGNSIIKQDLYDEERLMTNQSVHNDDDNNIIPRNNNASALMDYYNPSFINYDQLGGRSNRENSPQLIPNLVMQGDSSSFIRLAMDATKAKMDRK

SEQ ID NO: 51400 - DNA, 1161 bp, Glycine max
  misc_feature (1)..(1161): Ceres Seq. ID no. 14311463
atcccactttgttaaaaatttcacgaaaaaaaataaaataaaaattggaaaaattccaattccgctctcgattttcgatttcggagtttgatagcaacgttggaaggaaaggtgagagcaaaatcgttggaagaatctggtttttgggtcgtggttgttgttttcgccatcaaaacaatgtcttcgccggacattgtctcgatattggagaactcgaaggagttcgatcgggtgaggaaagaacaagaggatattctgtcggagatcaacaaacttcacaagaagcttcaagcaactcctgaagtagttgagaagcctggggataactcattggctaggctgaaatttttgtacactcaagcaaaagatctttcagaaagtgaagcaagtatttccaacttactgataaaccaaattgatgccctactgcctacgggtccacaagggcaaacacgaagaagaatagaaggtaatgagcagaaaaggaaacgagtgaagactgagtcagacatttcaaggctaactcctaatatgcgaagtcaacttgaggcttgtgccagtcttaaaggcgaacaggtagcggctagggtcacaccacgaaatgctgataaggacgagtggtttgtcgtaaaagtgattcattttgataaggaatcaaaggaatttgaagtactggatgaggaaccaggcgatgatgaagaaagcagtggccaaagacaatacaagcttcccatggcaaatatcattcctttccccaagagtaatgatccttctagcgctcttgatttccctcctggaaaacatgttttggcggtctatccaggaactactgcactttataaagcaacagttgttcaaggccctcgcagaaggaagaccgaggattatgtgttggaatttgatgatgatgaggaagatggatctttacctcaaaggacagtgccattccgcaaagtggttcctcttccagaaggacatcgccaatgagtttgagtataagctatttattatagttgtgtataaagcagaaactagaccattgcatatgtgccacttgtgtaatatgctccgtgtgatgtggtttgtaagaatgacattgcaacccaatttcgaacatgtaagaatgacacgaagttcaatttcacgttacctagaaatgat

SEQ ID NO: 51401 - protein, 269 aa, Glycine max
  peptide (1)..(269): Ceres Seq. ID no. 14311464
MSSPDIVSILENSKEFDRVRKEQEDILSEINKLHKKLQATPEVVEKPGDNSLARLKFLYTQAKDLSESEASISNLLINQIDALLPTGPQGQTRRRIEGNEQKRKRVKTESDISRLTPNMRSQLEACASLKGEQVAARVTPRNADKDEWFVVKVIHFDKESKEFEVLDEEPGDDEESSGQRQYKLPMANIIPFPKSNDPSSALDFPPGKHVLAVYPGTTALYKATVVQGPRRRKTEDYVLEFDDDEEDGSLPQRTVPFRKVVPLPEGHRQ

SEQ ID NO: 51402 - protein, 161 aa, Glycine max
  peptide (1)..(161): Ceres Seq. ID no. 14311465
MRNQAMMKKAVAKDNTSFPWQISFLSPRVMILLALLISLLENMFWRSIQELLHFIKQQLFKALAEGRPRIMCWNLMMMRKMDLYLKGQCHSAKWFLFQKDIANEFEYKLFIIVVYKAETRPLHMCHLCNMLRVMWFVRMTLQPNFEHVRMTRSSISRYLEM

SEQ ID NO: 51403 - protein, 156 aa, Glycine max
  peptide (1)..(156): Ceres Seq. ID no. 14311466
MMKKAVAKDNTSFPWQISFLSPRVMILLALLISLLENMFWRSIQELLHFIKQQLFKALAEGRPRIMCWNLMMMRKMDLYLKGQCHSAKWFLFQKDIANEFEYKLFIIVVYKAETRPLHMCHLCNMLRVMWFVRMTLQPNFEHVRMTRSSISRYLEM

SEQ ID NO: 51404 - DNA, 1375 bp, Glycine max
  misc_feature (1)..(1375): Ceres Seq. ID no. 14311489
gagtatcttccattctatttcacttatagttcaaagaaacaaaatgacgaagcagttaacatgagttcctatccagcgatgtcggggtaaaatgtacaaaatcgaaagaggaacaaggtgcttcgctgctattgctttctgcaatgcaccttttttcatttccataactctttacagttacaccacgcctcctcctcctcctttagccattcccctatccacaacagctattccaattagatctagggtttcctcttcctcactattcaccatccctcgccggagaacaacaccgattttccggcgccggcttcacggatctcgcatcagcgtctgatacattggcaaaatgcacaccaaatcggcgcagtcatcgtttcgggatcggacgcacgaattccagagcattgcggagaggttgaagaaaacagggccagcgccgaatggacaaagcagcagttcatccagatcggaggaacagcgatccgcgattgcaaatcaatcggagttcaatagaagagcttccaagatcggcttcgggattcaccaaacctctcagaaactcgccaagctcgccaagttggctaagaggacttcggttttcgatgaccctaccatggaaattcaagagcttacgggggttattaagcaagacatcactgctctaaactctgcggttgtggatcttcagttactcagcaactctcggaacgagagtgggaacgcttctaccgacacgactagccattcgaccacggtggttgatgacctgaagacacggttgatgagcgccaccaaagagtttaaagatgttctcaccatgcgaactgagaacttgaaagtgcatgagaataggaggcagctgttttcggccactgcttctaaggactctgcgaatccttttgtccggcaacggccgttggctacgaggtcggctgctagtacttctaatgcccccgctgcaccttgggctactgggtcatcttcatctcagttgtttcctaagaagcaggtggatggggagagtcaaccattgctgcaacagcagcagcagcagcaagaggtagttccattgcaagacagttacatgcaaaacagagctgaagctcttcagaatgttgagtccactattcatgagctcagcaacatctttaatcaactagcaactcttgtttctcaacaaggagagattgccatcaggattgatgaaaacatggatgatacattggcaaatgtagagggggcgcaaggggctttgttgaagtatctgaacaacatatcttctaataggtggctgatgatcaagattttctttatattaatattttttcttatggttttcttattttttgtggcatagtcattctaatgacag

SEQ ID NO: 51405 - protein, 336 aa, Glycine max
  peptide (1)..(336): Ceres Seq. ID no. 14311490
MHTKSAQSSFRDRTHEFQSIAERLKKTGPAPNGQSSSSSRSEEQRSAIANQSEFNRRASKIGFGIHQTSQKLAKLAKLAKRTSVFDDPTMEIQELTGVIKQDITALNSAVVDLQLLSNSRNESGNASTDTTSHSTTVVDDLKTRLMSATKEFKDVLTMRTENLKVHENRRQLFSATASKDSANPFVRQRPLATRSAASTSNAPAAPWATGSSSSQLFPKKQVDGESQPLLQQQQQQQEVVPLQDSYMQNRAEALQNVESTIHELSNIFNQLATLVSQQGEIAIRIDENMDDTLANVEGAQGALLKYLNNISSNRWLMIKIFFILIFFLMVFLFFVA

SEQ ID NO: 51406 - protein, 247 aa, Glycine max
  peptide (1)..(247): Ceres Seq. ID no. 14311491
MEIQELTGVIKQDITALNSAVVDLQLLSNSRNESGNASTDTTSHSTTVVDDLKTRLMSATKEFKDVLTMRTENLKVHENRRQLFSATASKDSANPFVRQRPLATRSAASTSNAPAAPWATGSSSSQLFPKKQVDGESQPLLQQQQQQQEVVPLQDSYMQNRAEALQNVESTIHELSNIFNQLATLVSQQGEIAIRIDENMDDTLANVEGAQGALLKYLNNISSNRWLMIKIFFILIFFLMVFLFFVA

SEQ ID NO: 51407 - protein, 191 aa, Glycine max
  peptide (1)..(191): Ceres Seq. ID no. 14311492
MSATKEFKDVLTMRTENLKVHENRRQLFSATASKDSANPFVRQRPLATRSAASTSNAPAAPWATGSSSSQLFPKKQVDGESQPLLQQQQQQQEVVPLQDSYMQNRAEALQNVESTIHELSNIFNQLATLVSQQGEIAIRIDENMDDTLANVEGAQGALLKYLNNISSNRWLMIKIFFILIFFLMVFLFFVA

SEQ ID NO: 51408 - DNA, 1379 bp, Glycine max
  misc_feature (1)..(1379): Ceres Seq. ID no. 14315098
taatcgaaaaacaatcagagatcattttcatcaaattgttcaaaactcaaagcatcgatttgatgccatttgcgctcctgcttgtcgtagacattccccaatcgatcaccgtcctcccgatccaccagtctgaatggaagaaggtaagaggaagttggcgatgaagagaaagagagagagcacaggtggtggaaaagacagactgagtgagttgcctgactctgtattggtccacataatggaattgatggagacaagaaatgcagttcagacttgtgtactctctcagcgttggaagaacctttggagacgtatgactcgtctctctttcaaccaccctagaacattttccagatatcacaattttgtgtctcatgttctttctggacgagaccattctgtttccctaattgatcttctttttgtggtccttcattcaacttcggccacactcttgcatgacgtcatcagttatgctgtgtcgcacaatgtgcagcagttgacaatctatatagatacattagattgcattaacggtgccacaccctcctttcagctttccaaaactccttttgtccctctcctttttccctctccatctttgacttctcttaagctttccagtgtgttcattggatattctttggaacttccaaaatctctactactaccatctttgaaaaccttgcatctcacaaatgttcactttactgctagtgaccacaacaacaactttgttgagcccttttctacttgtcacatgttgaatactttggtcattcaatattgctttatgcacacttctgcacaagtcctctccatatccaattctaacctttcttctttgacccttgacacctttcaagaacacattgtgctttctactccgaatctcacttctcttacaatcagggatggtttccattttactcttctccaactctcctccacttgtgatctttcacttcttaaagaggcggatattgagacccgtgttgatatacattattcagtcatcattacctggctgcgacttatgactaatgttaagatgctcacaatctcttctgctacccttaaggcaatactaaatgacctatcagatcctgctgcagcgactgttcaacctccatgctttggtagattggagtcattgaaagtgaaaatgcatccacatgtaaacatatctaaggaagaagtaagtaggacattggagcacttacttgtgaactctcctccaccgaccagagtttatctcataaatgtatccctatcccatcaagaactagttaggtatgcttgaaggaaatgaaacattggggaagatgaagagaaagatggaagagttacagaggacaaggacaggatcaatgataagt

SEQ ID NO: 51409 - protein, 389 aa, Glycine max
  peptide (1)..(389): Ceres Seq. ID no. 14315099
MEEGKRKLAMKRKRESTGGGKDRLSELPDSVLVHIMELMETRNAVQTCVLSQRWKNLWRRMTRLSFNHPRTFSRYHNFVSHVLSGRDHSVSLIDLLFVVLHSTSATLLHDVISYAVSHNVQQLTIYIDTLDCINGATPSFQLSKTPFVPLLFPSPSLTSLKLSSVFIGYSLELPKSLLLPSLKTLHLTNVHFTASDHNNNFVEPFSTCHMLNTLVIQYCFMHTSAQVLSISNSNLSSLTLDTFQEHIVLSTPNLTSLTIRDGFHFTLLQLSSTCDLSLLKEADIETRVDIHYSVIITWLRLMTNVKMLTISSATLKAILNDLSDPAAATVQPPCFGRLESLKVKMHPHVNISKEEVSRTLEHLLVNSPPPTRVYLINVSLSHQELVRYA

SEQ ID NO: 51410 - protein, 380 aa, Glycine max
  peptide (1)..(380): Ceres Seq. ID no. 14315100
MKRKRESTGGGKDRLSELPDSVLVHIMELMETRNAVQTCVLSQRWKNLWRRMTRLSFNHPRTFSRYHNFVSHVLSGRDHSVSLIDLLFVVLHSTSATLLHDVISYAVSHNVQQLTIYIDTLDCINGATPSFQLSKTPFVPLLFPSPSLTSLKLSSVFIGYSLELPKSLLLPSLKTLHLTNVHFTASDHNNNFVEPFSTCHMLNTLVIQYCFMHTSAQVLSISNSNLSSLTLDTFQEHIVLSTPNLTSLTIRDGFHFTLLQLSSTCDLSLLKEADIETRVDIHYSVIITWLRLMTNVKMLTISSATLKAILNDLSDPAAATVQPPCFGRLESLKVKMHPHVNISKEEVSRTLEHLLVNSPPPTRVYLINVSLSHQELVRYA

SEQ ID NO: 51411 - protein, 354 aa, Glycine max
  peptide (1)..(354): Ceres Seq. ID no. 14315101
MELMETRNAVQTCVLSQRWKNLWRRMTRLSFNHPRTFSRYHNFVSHVLSGRDHSVSLIDLLFVVLHSTSATLLHDVISYAVSHNVQQLTIYIDTLDCINGATPSFQLSKTPFVPLLFPSPSLTSLKLSSVFIGYSLELPKSLLLPSLKTLHLTNVHFTASDHNNNFVEPFSTCHMLNTLVIQYCFMHTSAQVLSISNSNLSSLTLDTFQEHIVLSTPNLTSLTIRDGFHFTLLQLSSTCDLSLLKEADIETRVDIHYSVIITWLRLMTNVKMLTISSATLKAILNDLSDPAAATVQPPCFGRLESLKVKMHPHVNISKEEVSRTLEHLLVNSPPPTRVYLINVSLSHQELVRYA

SEQ ID NO: 51412 - DNA, 1319 bp, Glycine max
  misc_feature (1)..(1319): Ceres Seq. ID no. 14311505
actctcctcgtaagtcctgcgtttccagacccagtggaagtagcgaaatgtatcgaacggcggcgaagcggttgttgtgcggtgcaagatactactataatggcaacgttggactccgattccggcctcctcagatatttataccctcttctcgcttttccacatccgagactcaacctttacccattccacacgctacggatcgtaccattccagtcgtcgtcaccaccgaaaccgaaaaccctaactcttcagattcgtccgcttcttcttcaccttcatcttcctcaacagctgatgatgccacaaaacccagggccaagtatgaggaccaacacactcgcgtgcttcaggcctcgctctcttacgtcttaaagttggggtggacagaagctgcgctagttgcaggagccagggatgtcggtctttcgccatctattgttggatcttttcccaggaaggaagcagcactggtcgagtatttcatggatggctgcttacaaagacttgctgataaaattgactcagatgagagtttacaaaatttgacaccaagtgactgcatctctaagcttatcagatttcgtttagaaatgcaagctccatatatatcaacatggcctcaagctcttagcatccaggcacaacctgttaatgttcctacaagttttaagcagagggcagtgcttgtggatgagatctggcatgctgctggtgataatgcctctgacattgattggtatgccaagcgcactatccttggaggaatatactcaacaactgagatttatatgctgacagatacctctcctgatttccgtgatacatgggctttcttggatgctcgagttaaagatgcctttgatttaaagaaaaccattcaagaggcacagtatttggcagaagctgtcagtaccgggctgggaaactcctttcaagggtttgtcgggaaagttttccagagatgagtcgtggtgggaatttatgctgacaatgtttctccgagacattgattgttaccttgaaggagatgctatattatacacgcctagtaattactagttatctttcatttatttcaaatttgctgtcttcggcccttcactcaaatttgctctttcatttaataataattttaagcttgtaaataattctattgccattttattatgatacaaaaaactagctcttttttcccttcccccaaatagcttttgtttattcatgtctcttactccttggtatattgtaatttctctcttttcaaaagcgacgtgtttgctgaattaaatatttttttatagaaaattgttgactat

SEQ ID NO: 51413 - protein, 321 aa, Glycine max
  peptide (1)..(321): Ceres Seq. ID no. 14311506
SPRKSCVSRPSGSSEMYRTAAKRLLCGARYYYNGNVGLRFRPPQIFIPSSRFSTSETQPLPIPHATDRTIPVVVTTETENPNSSDSSASSSPSSSSTADDATKPRAKYEDQHTRVLQASLSYVLKLGWTEAALVAGARDVGLSPSIVGSFPRKEAALVEYFMDGCLQRLADKIDSDESLQNLTPSDCISKLIRFRLEMQAPYISTWPQALSIQAQPVNVPTSFKQRAVLVDEIWHAAGDNASDIDWYAKRTILGGIYSTTEIYMLTDTSPDFRDTWAFLDARVKDAFDLKKTIQEAQYLAEAVSTGLGNSFQGFVGKVFQR

SEQ ID NO: 51414 - protein, 306 aa, Glycine max
  peptide (1)..(306): Ceres Seq. ID no. 14311507
MYRTAAKRLLCGARYYYNGNVGLRFRPPQIFIPSSRFSTSETQPLPIPHATDRTIPVVVTTETENPNSSDSSASSSPSSSSTADDATKPRAKYEDQHTRVLQASLSYVLKLGWTEAALVAGARDVGLSPSIVGSFPRKEAALVEYFMDGCLQRLADKIDSDESLQNLTPSDCISKLIRFRLEMQAPYISTWPQALSIQAQPVNVPTSFKQRAVLVDEIWHAAGDNASDIDWYAKRTILGGIYSTTEIYMLTDTSPDFRDTWAFLDARVKDAFDLKKTIQEAQYLAEAVSTGLGNSFQGFVGKVFQR

SEQ ID NO: 51415 - protein, 160 aa, Glycine max
  peptide (1)..(160): Ceres Seq. ID no. 14311508
MDGCLQRLADKIDSDESLQNLTPSDCISKLIRFRLEMQAPYISTWPQALSIQAQPVNVPTSFKQRAVLVDEIWHAAGDNASDIDWYAKRTILGGIYSTTEIYMLTDTSPDFRDTWAFLDARVKDAFDLKKTIQEAQYLAEAVSTGLGNSFQGFVGKVFQR

SEQ ID NO: 51416 - DNA, 1248 bp, Glycine max
  misc_feature (1)..(1248): Ceres Seq. ID no. 14311497
agagacattctccctccaaaagaatcacattctttgttttcttcttcttggccatggcttattcccgttggtgctggttcccactctacttagcagcctcaattgccctcggaatcatcgccatctcctcagcgatacgttccacttccaacaagaacccaccccaagatccacccataccccacgacatctcactcaacgcctccaacgctctccgcaaagcaggcttcatagtaatggcagatcttctccaccactctccctcattcttcaaaccgccgcaaaactcaaccatcttcgccatcaaagactccgccatcaaaaacacctcccaccctctctggttcctcaaaaccctcctcctctaccacaccaccacctccaacgcctattccttcaacgacctcgtcaaaattccccaaggaacgtgcctccccaccctccttcgtgataaaaatgtttctctcactaagcttgaccttgaccatgcaccaaactccgtggagattaatcacgtcttgatatcaaaccctaatatcttcctcggagagcaacttgccgtgcatggcgttcttgcgccgttctctccccttcagccgcaagaccttcttcaacggggttttggttttgctattcgcacacccacttgccgctccaacgacgtcaacgtctccgtttccaagaacggggttgagtggaaccgcgtcgttcacttgctccgtgcaaaagggtatgcttcgttctcgattgcgttgcattctgttcttgatgggataaagagagacttttctgggagtttgggttatgtcacaatcttcgctcctcgcgatttgactttacttggataccctttgactattcttgatagagctgtgaggcttcatattctgcctcaaaggtttgtttacaaagaaatctcttctctgccggttaggagtttgttaaagacgctcatgcctgatgagcatcttgagattgatggggttctggattttgtgccgggcatggttgttaatggtgttgtgattgtggcgcctgacatgatcatttcggagaaatttgtggttcatgggatttctagagcttttaagatggctgaggttactagttgaagatattattgaaggtcaatggagtccatacattatgatagggtcagggaaatttgtagcaattttgcttttgggtgcataagtttgtatcatttttagtttcattggataatgtacaaaacatgtatgttctcgt

SEQ ID NO: 51417 - protein, 369 aa, Glycine max
  peptide (1)..(369): Ceres Seq. ID no. 14311498
RHSPSKRITFFVFFFLAMAYSRWCWFPLYLAASIALGIIAISSAIRSTSNKNPPQDPPIPHDISLNASNALRKAGFIVMADLLHHSPSFFKPPQNSTIFAIKDSAIKNTSHPLWFLKTLLLYHTTTSNAYSFNDLVKIPQGTCLPTLLRDKNVSLTKLDLDHAPNSVEINHVLISNPNIFLGEQLAVHGVLAPFSPLQPQDLLQRGFGFAIRTPTCRSNDVNVSVSKNGVEWNRVVHLLRAKGYASFSIALHSVLDGIKRDFSGSLGYVTIFAPRDLTLLGYPLTILDRAVRLHILPQRFVYKEISSLPVRSLLKTLMPDEHLEIDGVLDFVPGMVVNGVVIVAPDMIISEKFVVHGISRAFKMAEVTS

SEQ ID NO: 51418 - protein, 352 aa, Glycine max
  peptide (1)..(352): Ceres Seq. ID no. 14311499
MAYSRWCWFPLYLAASIALGIIAISSAIRSTSNKNPPQDPPIPHDISLNASNALRKAGFIVMADLLHHSPSFFKPPQNSTIFAIKDSAIKNTSHPLWFLKTLLLYHTTTSNAYSFNDLVKIPQGTCLPTLLRDKNVSLTKLDLDHAPNSVEINHVLISNPNIFLGEQLAVHGVLAPFSPLQPQDLLQRGFGFAIRTPTCRSNDVNVSVSKNGVEWNRVVHLLRAKGYASFSIALHSVLDGIKRDFSGSLGYVTIFAPRDLTLLGYPLTILDRAVRLHILPQRFVYKEISSLPVRSLLKTLMPDEHLEIDGVLDFVPGMVVNGVVIVAPDMIISEKFVVHGISRAFKMAEVTS

SEQ ID NO: 51419 - protein, 291 aa, Glycine max
  peptide (1)..(291): Ceres Seq. ID no. 14311500
MADLLHHSPSFFKPPQNSTIFAIKDSAIKNTSHPLWFLKTLLLYHTTTSNAYSFNDLVKIPQGTCLPTLLRDKNVSLTKLDLDHAPNSVEINHVLISNPNIFLGEQLAVHGVLAPFSPLQPQDLLQRGFGFAIRTPTCRSNDVNVSVSKNGVEWNRVVHLLRAKGYASFSIALHSVLDGIKRDFSGSLGYVTIFAPRDLTLLGYPLTILDRAVRLHILPQRFVYKEISSLPVRSLLKTLMPDEHLEIDGVLDFVPGMVVNGVVIVAPDMIISEKFVVHGISRAFKMAEVTS

SEQ ID NO: 51420 - DNA, 1607 bp, Glycine max
  misc_feature (1)..(1607): Ceres Seq. ID no. 12612314
acttcattaacaacacacacacactcatgccatgatttctcaaattagcatgctttcccttttcttcttcctcttctcctcttttctaatcgttttcttcttccgcaaaacctctgcacttcacatcctcaaccaatggttcctttccttcgaaaaccgtctccaccttcaccagtccttcaaaatccctcgctataatcttcactctctggacaatagcctctaccggaaaatcctcacttacctcgattctcttccctccgttgaagattccgattacaccaacctcttctccggccccaatccctccgacatcttcctccacctcgaccctaaccacaccgttcatgacaccttcctcggcgccaggctctcctggaccaacgcctccggcgacgcgctcgtccttcgactaaagaagaaagacaagcgcagagtcttccggcagtacttccagcacattctctccgtcgcggacgagatcgagcaacgaagaanaaaggacgtcaagctgtacgtgaactccgactccggcgagtggcgctcggcgccgttcacgcatccggcgagctttgagacggtggcgatggacgcggagctgaagaacaaggtgaagtccgatctggaccagttcctgaagtcgaagcagtactaccaccggctaggccgcgtttggaagcggagctacctcctctacggcgcgcctggcaccggaaaatcctccttcgtcgccgcgatggcgaagttcctctgctacgacgtctacgacgtggacgtttcgaagttcaccgatggcgccgattggaaggtgatgctgatgcagacgacggcgaagtctctgatcgtgatcgaagacctagatcgcttgctgacggagaagtcaaagtcaaacacaacgagcttatcgagcgtgttgaacttcatggacggaatcgtatcgtgctgcggagaagagcgcgtgatggtgttcacgatgaacgaaactaaagaggaggttgatcaagcggttctgaggcctgggaggattgacgtgcacatacacttccccttatgtgatttctccacctttaagattctcgcgagtagttacttagggttgaaggagcacaagcttttccctcaggttgaggaggtttttcagaccggggcccggctcagcccggccgagcttggtgagattatgatatcgaaccggaattcgcccacgcgggccttgaaaaccgttatttcggccctgcaggtgcaatccaacggcccgagagagggacagaggttgagccatagcgggtcgggtcggaatagcgatgataacgaaccgggtgcggttatatgtagggagagtgttcacacggtgagggagttccggaagctgtatgggcttttgcgtttgggaagtaggaggaaggaggagtcttattcggggcccatagagaaagagcctccacgtattgagagtcgggtcggatataactaatcgggttttctttccttttattatttttttaaatgtaaagttgcttgcccgagttttattttttgtttttccgttagaaattatattattgtaactacacagaaagataatggtaggtcggtaaggtcgatgc

SEQ ID NO: 51421 - protein, 480 aa, Glycine max
  peptide (1)..(480): Ceres Seq. ID no. 12612315
  misc_feature (156)..(156): Xaa is any aa, unknown or other
MISQISMLSLFFFLFSSFLIVFFFRKTSALHILNQWFLSFENRLHLHQSFKIPRYNLHSLDNSLYRKILTYLDSLPSVEDSDYTNLFSGPNPSDIFLHLDPNHTVHDTFLGARLSWTNASGDALVLRLKKKDKRRVFRQYFQHILSVADEIEQRRXKDVKLYVNSDSGEWRSAPFTHPASFETVAMDAELKNKVKSDLDQFLKSKQYYHRLGRVWKRSYLLYGAPGTGKSSFVAAMAKFLCYDVYDVDVSKFTDGADWKVMLMQTTAKSLIVIEDLDRLLTEKSKSNTTSLSSVLNFMDGIVSCCGEERVMVFTMNETKEEVDQAVLRPGRIDVHIHFPLCDFSTFKILASSYLGLKEHKLFPQVEEVFQTGARLSPAELGEIMISNRNSPTRALKTVISALQVQSNGPREGQRLSHSGSGRNSDDNEPGAVICRESVHTVREFRKLYGLLRLGSRRKEESYSGPIEKEPPRIESRVGYN

SEQ ID NO: 51422 - protein, 474 aa, Glycine max
  peptide (1)..(474): Ceres Seq. ID no. 12612316
  misc_feature (150)..(150): Xaa is any aa, unknown or other
MLSLFFFLFSSFLIVFFFRKTSALHILNQWFLSFENRLHLHQSFKIPRYNLHSLDNSLYRKILTYLDSLPSVEDSDYTNLFSGPNPSDIFLHLDPNHTVHDTFLGARLSWTNASGDALVLRLKKKDKRRVFRQYFQHILSVADEIEQRRXKDVKLYVNSDSGEWRSAPFTHPASFETVAMDAELKNKVKSDLDQFLKSKQYYHRLGRVWKRSYLLYGAPGTGKSSFVAAMAKFLCYDVYDVDVSKFTDGADWKVMLMQTTAKSLIVIEDLDRLLTEKSKSNTTSLSSVLNFMDGIVSCCGEERVMVFTMNETKEEVDQAVLRPGRIDVHIHFPLCDFSTFKILASSYLGLKEHKLFPQVEEVFQTGARLSPAELGEIMISNRNSPTRALKTVISALQVQSNGPREGQRLSHSGSGRNSDDNEPGAVICRESVHTVREFRKLYGLLRLGSRRKEESYSGPIEKEPPRIESRVGYN

SEQ ID NO: 51423 - protein, 295 aa, Glycine max
  peptide (1)..(295): Ceres Seq. ID no. 12612317
MDAELKNKVKSDLDQFLKSKQYYHRLGRVWKRSYLLYGAPGTGKSSFVAAMAKFLCYDVYDVDVSKFTDGADWKVMLMQTTAKSLIVIEDLDRLLTEKSKSNTTSLSSVLNFMDGIVSCCGEERVMVFTMNETKEEVDQAVLRPGRIDVHIHFPLCDFSTFKILASSYLGLKEHKLFPQVEEVFQTGARLSPAELGEIMISNRNSPTRALKTVISALQVQSNGPREGQRLSHSGSGRNSDDNEPGAVICRESVHTVREFRKLYGLLRLGSRRKEESYSGPIEKEPPRIESRVGYN

SEQ ID NO: 51424 - DNA, 1352 bp, Glycine max
  misc_feature (1)..(1352): Ceres Seq. ID no. 13581804
agttcacaccctagagggagtggatggattttgttgtttttcatataagggcaaagaaagatagaggagctagctagctagcgagcttcaaaactcaaaagcactgacacatacaaacaaaaagatctggctttcataaaattgagataaaagtgcaccgtctccgaatcatgtttataatattatcttcattagatcttgatctcatttttcatctgaaactaaaagaatatatatgtgcctttaccctatttagctatatgcacacacaacttgtcacatatcatattttgttcatcaagtttataattccttatctttgaacttacttacatccaagtaaggtctaagctagctggagttgattagatctagctagctagttttcgatctgcttaatttgttttccatgatctcttatatatagtaattttatttccctttaattaattaagaaagagttgaagaagaatgggaagggggaagatcgaaatcaaaaggattgagaacacaacaaatcggcaagtgaccttctgcaagagaagaaatgggcttctgaagaaagcttatgagctgtcagtgctgtgtgatgcagaagttgccctcatcgtcttctccagccgtggccgtctctatgagtattccaacaacaacataagatcaacaatagagaggtacaaaaaggcatgttctgatcactcaagcgcgagcactaccacagaaatcaatgctcagtattatcaacaagaatctgcaaagctgcgacagcaaatacagatgctgcaaaattctaacaggcacctgatgggtgatgccttaagcacactgactgtgaaggaacttaagcagttggagaatagacttgaaagaggaatcactagaatcagatctaagaaacatgagatgctactggctgaaattgaatacttccagaaaagggagattgaactggaaaatgaaaatctttgcctccgaactaagataactgacgtggagaggattcagcaagtaaacatggtttctgggccagaactgaatgccattcaggcattagcttcccgtaacttcttcaatccaaatatgttggaaggtggaactgtttaccctcactcagataagaagattcttcatcttgggtgatcaataatatatgatcttggctagcctatggcatgtctatccaattagccggtggctaaatgcattattattactactcttttggttgctcattaactagaccatgtgatctatatactacttatggattatggatacttatgtatgatgattgtatgatatcataacaatcagttagaaataataattaaaaaatagagttgtgtttgaag

SEQ ID NO: 51425 - protein, 222 aa, Glycine max
  peptide (1)..(222): Ceres Seq. ID no. 13581805
MGRGKIEIKRIENTTNRQVTFCKRRNGLLKKAYELSVLCDAEVALIVFSSRGRLYEYSNNNIRSTIERYKKACSDHSSASTTTEINAQYYQQESAKLRQQIQMLQNSNRHLMGDALSTLTVKELKQLENRLERGITRIRSKKHEMLLAEIEYFQKREIELENENLCLRTKITDVERIQQVNMVSGPELNAIQALASRNFFNPNMLEGGTVYPHSDKKILHLG

SEQ ID NO: 51426 - protein, 120 aa, Glycine max
  peptide (1)..(120): Ceres Seq. ID no. 13581806
MLQNSNRHLMGDALSTLTVKELKQLENRLERGITRIRSKKHEMLLAEIEYFQKREIELENENLCLRTKITDVERIQQVNMVSGPELNAIQALASRNFFNPNMLEGGTVYPHSDKKILHLG

SEQ ID NO: 51427 - protein, 111 aa, Glycine max
  peptide (1)..(111): Ceres Seq. ID no. 13581807
MGDALSTLTVKELKQLENRLERGITRIRSKKHEMLLAEIEYFQKREIELENENLCLRTKITDVERIQQVNMVSGPELNAIQALASRNFFNPNMLEGGTVYPHSDKKILHLG

SEQ ID NO: 51428 - DNA, 1577 bp, Glycine max
  misc_feature (1)..(1577): Ceres Seq. ID no. 15171275
aactactgtacagagttcatatcaatctcatcatattatatagagcaccaacttatcttcaaaactcattcataactaaaatccttccattccttccttccacaaaccctatcctattaccagacaaacctcattttcaggctttttctgttactctgcaccataccacttcactcatcacaattcacaaacccatagagaaaggaaaagctttttttttatttttttatctgggtcaccctacacaaccttgctgaatggaaaactgtgtcttccaccaccaccaccatcaccttaggagcatgatcactcttccacaaccatcttcactgaaaccgaacttgagagtgtgccccaaagttatgagggtgagagcgagcgcgggaaggaggcactgcgagttcagcagccagaacgcgccccttgagccacggtccctggcggggaagtttctgagcggcgtgttgcagaaccgccgccagctgttccacgtgcttgccaaggaagagttgaagatgctgagtgatgacagagactctgctattgctcgcatgcgtctcagtcaccactctgatgaagccttgcttcacaggaggattgcacaagtgaaagagaatgagtctatgattgctatagaagatgttatgtatttgctgattttatacaagttttccgagatcagggttcatttggttccaaagctttctagttgcatatacaatggaaggctagaaatattgccctctaaggactgggatctagagtctattcacagcatggaggttttggatatcataaggaaacacgtcagtaccgtgacaggtttgagatcaaatcctagtgtaagggagagttgggaaacgactcctattcgacaattctggcttgcccgagtctatgtcgcctccatattatatggctactttttgaagtcagtttcattgaggtacaacctagagcgaagtctgtctttgtctgaccatgatcttcatcatggtcacaagaccggcccttcatttcaggacatgtatcgttccgggccaaaagacgtgatgcttggcaacaagagtgacatacgatctgtgtggcatggtttaatcgggcaggaagaggaaatcgaggatttaacatgttatgttacgggctttcaccctggatcatttgagagatgtgccaaactgagatccaaggaagctgtgcatttggtagagagtcatagtaatgcactttttggagatgggaaatctggtttgtctcagcatgatgatgttattgtaacttcattttctagtctgaggaggctagtcttggaagctgttgcttttggatctttcctgtgggagacagaagattacattgacaatgtatataagcttaaagatcaagtggttgagtgaaggaacatgttggtaaatgaatttccacactgttgggctaattctcattgtatataaagttagttagatttaggctaattttattttgtataggatgcattacctctaaataatgtaggttggttagctaagaaagaatggagatagagattttacatagtgacaaagaatgtccttatg

SEQ ID NO: 51429 - protein, 379 aa, Glycine max
  peptide (1)..(379): Ceres Seq. ID no. 15171276
MENCVFHHHHHHLRSMITLPQPSSLKPNLRVCPKVMRVRASAGRRHCEFSSQNAPLEPRSLAGKFLSGVLQNRRQLFHVLAKEELKMLSDDRDSAIARMRLSHHSDEALLHRRIAQVKENESMIAIEDVMYLLILYKFSEIRVHLVPKLSSCIYNGRLEILPSKDWDLESIHSMEVLDIIRKHVSTVTGLRSNPSVRESWETTPIRQFWLARVYVASILYGYFLKSVSLRYNLERSLSLSDHDLHHGHKTGPSFQDMYRSGPKDVMLGNKSDIRSVWHGLIGQEEEIEDLTCYVTGFHPGSFERCAKLRSKEAVHLVESHSNALFGDGKSGLSQHDDVIVTSFSSLRRLVLEAVAFGSFLWETEDYIDNVYKLKDQVVE

SEQ ID NO: 51430 - protein, 364 aa, Glycine max
  peptide (1)..(364): Ceres Seq. ID no. 15171277
MITLPQPSSLKPNLRVCPKVMRVRASAGRRHCEFSSQNAPLEPRSLAGKFLSGVLQNRRQLFHVLAKEELKMLSDDRDSAIARMRLSHHSDEALLHRRIAQVKENESMIAIEDVMYLLILYKFSEIRVHLVPKLSSCIYNGRLEILPSKDWDLESIHSMEVLDIIRKHVSTVTGLRSNPSVRESWETTPIRQFWLARVYVASILYGYFLKSVSLRYNLERSLSLSDHDLHHGHKTGPSFQDMYRSGPKDVMLGNKSDIRSVWHGLIGQEEEIEDLTCYVTGFHPGSFERCAKLRSKEAVHLVESHSNALFGDGKSGLSQHDDVIVTSFSSLRRLVLEAVAFGSFLWETEDYIDNVYKLKDQVVE

SEQ ID NO: 51431 - protein, 344 aa, Glycine max
  peptide (1)..(344): Ceres Seq. ID no. 15171278
MRVRASAGRRHCEFSSQNAPLEPRSLAGKFLSGVLQNRRQLFHVLAKEELKMLSDDRDSAIARMRLSHHSDEALLHRRIAQVKENESMIAIEDVMYLLILYKFSEIRVHLVPKLSSCIYNGRLEILPSKDWDLESIHSMEVLDIIRKHVSTVTGLRSNPSVRESWETTPIRQFWLARVYVASILYGYFLKSVSLRYNLERSLSLSDHDLHHGHKTGPSFQDMYRSGPKDVMLGNKSDIRSVWHGLIGQEEEIEDLTCYVTGFHPGSFERCAKLRSKEAVHLVESHSNALFGDGKSGLSQHDDVIVTSFSSLRRLVLEAVAFGSFLWETEDYIDNVYKLKDQVVE

SEQ ID NO: 51432 - DNA, 1556 bp, Glycine max
  misc_feature (1)..(1556): Ceres Seq. ID no. 14311557
aaaataaaacacaagaacgagctcaccaaagcgatttacaccgcagaaagacacgaaatattactaataatttaatagagttagttgcgacgaggattagtattgaagtggagtgttgagtaacagtaattttacagactcagcgatgcaaatgaaatggcaacaagtcgcaaagatgagtgatatcttctgctgcagataggaccaacaattcttttgttcttttctttctgttttccccaaattaagcataagattgcgtgccatagttatttccagcatcatcatcatcatcatcatggcattgggaagagtaatatacgttgctcacaccgtatgtatcagatcagagcttcaacccatggcacctgaccgcattggttcttcctcttcttctcgccaaagggacctcgttttcgtcgtcaaccctctaggtgctaatgggaggacaggtaaagaatggaggaagttagttccatatctacggtctcgtcttggtaaagagtgcaatatatgtgaatccataacgtcgggtccttgtcatgctattgacataacaagagaggctataagggagggggctgatgctgtcattgctgttggaggagatggaactcttcatgaggttgttaatgggtttttctgggctggaaaacctgttgttagtcaagtgaaagagtctacacactcaactgctcttagtctcatccccttgggaactggttctgattttgcaagaacatttgggtggaaaaatgatccccatgaggccattgaacgtgttgctagagggttgagatcaatgatagatgtcggtgttatcactggagagagttgcgaccatcattacttcataaatgtcgctgacattcatttgagtgcaaaggcgggtttttatgcttctagatacaagagatttggcaacctgtgctatgtcattggtgcattgcaagccttcattgggcatcaaaaccaggacatgagaatcaggttcaatgatggtccatgggagacatgtcctcaagtgacagccctttgcattggaaatgcaaaatactttggtggtggcatgaaaattacaccaaatgctgatcctttcagtagaaatttagaggttgtaactcttcagaacttcaagtggtatgattttgtcttcaaattacataagctatacagtgggacacatctctcagtaaaaaatgtatctgatagaagtgtactttctattgaggtggaggacatatcaggcatgggtggtggtatttatattcaatctgatggggagcatttggggttccttccaaaaaagattagtgttgtgcctgctgctattgagatgatattgtgatttaactggagaaggacagaatctgtgaaatagagatgatgctgttcatgccttgtaatttgccagatttagtagaagaaataattttttgttttaaagtgtgtaggcatcggagtaggcttcttactatcttttgctgtggcctgagggagagtaattgtaattttgaatcaccaatgtgttgtcatataatttattttccaactgt

SEQ ID NO: 51433 - protein, 349 aa, Glycine max
  peptide (1)..(349): Ceres Seq. ID no. 14311558
MALGRVIYVAHTVCIRSELQPMAPDRIGSSSSSRQRDLVFVVNPLGANGRTGKEWRKLVPYLRSRLGKECNICESITSGPCHAIDITREAIREGADAVIAVGGDGTLHEVVNGFFWAGKPVVSQVKESTHSTALSLIPLGTGSDFARTFGWKNDPHEAIERVARGLRSMIDVGVITGESCDHHYFINVADIHLSAKAGFYASRYKRFGNLCYVIGALQAFIGHQNQDMRIRFNDGPWETCPQVTALCIGNAKYFGGGMKITPNADPFSRNLEVVTLQNFKWYDFVFKLHKLYSGTHLSVKNVSDRSVLSIEVEDISGMGGGIYIQSDGEHLGFLPKKISVVPAAIEMIL

SEQ ID NO: 51434 - protein, 328 aa, Glycine max
  peptide (1)..(328): Ceres Seq. ID no. 14311559
MAPDRIGSSSSSRQRDLVFVVNPLGANGRTGKEWRKLVPYLRSRLGKECNICESITSGPCHAIDITREAIREGADAVIAVGGDGTLHEVVNGFFWAGKPVVSQVKESTHSTALSLIPLGTGSDFARTFGWKNDPHEAIERVARGLRSMIDVGVITGESCDHHYFINVADIHLSAKAGFYASRYKRFGNLCYVIGALQAFIGHQNQDMRIRFNDGPWETCPQVTALCIGNAKYFGGGMKITPNADPFSRNLEVVTLQNFKWYDFVFKLHKLYSGTHLSVKNVSDRSVLSIEVEDISGMGGGIYIQSDGEHLGFLPKKISVVPAAIEMIL

SEQ ID NO: 51435 - protein, 181 aa, Glycine max
  peptide (1)..(181): Ceres Seq. ID no. 14311560
MIDVGVITGESCDHHYFINVADIHLSAKAGFYASRYKRFGNLCYVIGALQAFIGHQNQDMRIRFNDGPWETCPQVTALCIGNAKYFGGGMKITPNADPFSRNLEVVTLQNFKWYDFVFKLHKLYSGTHLSVKNVSDRSVLSIEVEDISGMGGGIYIQSDGEHLGFLPKKISVVPAAIEMIL

SEQ ID NO: 51436 - DNA, 1106 bp, Glycine max
  misc_feature (1)..(1106): Ceres Seq. ID no. 13638510
acatcctaatcgaaaaaaaaatcagaaggcatcatggcagccaaagcaaaaggaaggggttggcttacaataaagaatgggagaaaaggaaagaagcacgttgccaaccccatcttagtagattcacatacttcagcagcaaaagcctcttcttcttcttcttcttcttcttcactctcttcacaaatgaaaatactttgctctcttcctccaactctctcatactttcacttttctttgttcatgcaagatccaaagaacgattcaaacacaaggaagccatggtaccaaagagcaattgaggtgactagcctatggaaaagtgtatcaaaatccacagaaattccaacacctaattcttcaactttatggaagagatcatcatcaatgccaaaatcccctcaagtccctactacaccaagtcctaacaacaagaacaagctaagaaaatgtgcctctctaaaggttgcatcatccttcacaagggtttgtctttgtgctccaatctattcctacaacgagattttaagagctgaggtgccacctagaagaagcaatagttatccaagatcaaagccattgcatgcttcacatgagagaactcctagtgctagacttagcactgagggaaggagggtatttaggggcaaatcattgactgatgatgttctaataaggaggtttgtgattgaggaagaggcaatgatgcaaattagaagaagaaatcaaatggaagttattaggaagaggagtatgatgaggagaaaaaagcttgggcctagtcctcttagtagaatggttatggcaaatgatattggacaattttaatttgattggtccaatttggttagtgtccagtcccattggtgaattttgattctccatattaatgcctcacctttcccttttttttttctttggccttaatttcattcactgaactttttcacctcgtgtgacaagtttctactactgggattatcttataattgcaacatatctttagttttagaagacccaattttaagtgggtttgatttaatgatattgctatgtatagctccgatcagaatcacaacttttaatttcatttctatattcattcc

SEQ ID NO: 51437 - protein, 264 aa, Glycine max
  peptide (1)..(264): Ceres Seq. ID no. 13638511
MAAKAKGRGWLTIKNGRKGKKHVANPILVDSHTSAAKASSSSSSSSSLSSQMKILCSLPPTLSYFHFSLFMQDPKNDSNTRKPWYQRAIEVTSLWKSVSKSTEIPTPNSSTLWKRSSSMPKSPQVPTTPSPNNKNKLRKCASLKVASSFTRVCLCAPIYSYNEILRAEVPPRRSNSYPRSKPLHASHERTPSARLSTEGRRVFRGKSLTDDVLIRRFVIEEEAMMQIRRRNQMEVIRKRSMMRRKKLGPSPLSRMVMANDIGQF

SEQ ID NO: 51438 - protein, 213 aa, Glycine max
  peptide (1)..(213): Ceres Seq. ID no. 13638512
MKILCSLPPTLSYFHFSLFMQDPKNDSNTRKPWYQRAIEVTSLWKSVSKSTEIPTPNSSTLWKRSSSMPKSPQVPTTPSPNNKNKLRKCASLKVASSFTRVCLCAPIYSYNEILRAEVPPRRSNSYPRSKPLHASHERTPSARLSTEGRRVFRGKSLTDDVLIRRFVIEEEAMMQIRRRNQMEVIRKRSMMRRKKLGPSPLSRMVMANDIGQF

SEQ ID NO: 51439 - protein, 194 aa, Glycine max
  peptide (1)..(194): Ceres Seq. ID no. 13638513
MQDPKNDSNTRKPWYQRAIEVTSLWKSVSKSTEIPTPNSSTLWKRSSSMPKSPQVPTTPSPNNKNKLRKCASLKVASSFTRVCLCAPIYSYNEILRAEVPPRRSNSYPRSKPLHASHERTPSARLSTEGRRVFRGKSLTDDVLIRRFVIEEEAMMQIRRRNQMEVIRKRSMMRRKKLGPSPLSRMVMANDIGQF

SEQ ID NO: 51440 - DNA, 1189 bp, Glycine max
  misc_feature (1)..(1189): Ceres Seq. ID no. 14311493
attcttttcactttttgggtcctcttcttctctctctcaatttaaatatcactctcctctcccctccaccacgactagtaaataaatggatccctcgtccgtgaacggcttctactcgttcctgacgctgggaatcgacgatctagagagagtgttcctgagcacaaacttcatgtcaatccaattcctccaaagagtggtctctgttctaagatcgttccacacccaattgaccctcctggtccagaaactccagctcccagtgggcgacaagtggctggacgagtacatggacgaaagctccaaactctgggacgcctgccacctcatcaagtccggcatttcggccatggatagctactactctgccgccctcaacatcacctcctccctcgactcccatcgccacatcaccccccaagtctctcgccaggtaataagggccattgccgggtgccgtcgggaggcggtggggctggaggaggagaacagggcgctgatggaggcgcggattgaggccttgtcgcttcggttccaagagaggctgtccatcgagtccaagctgaacggcttcaacggcttcagaggggtgctgtacgcaatgaggaacgtgagttcgttgctgctcatggtacttctgtacggactcgtgtactgctatggggactcctcggacttcgtgttgggcggttgcgggtacgaggggtgcctgttcctgggatcggcgttcatgatgtcgacggccaggttgcagcagcgggtggcggcggagatcgggcacatgggcggctcgccggggatgcttctgcacgagtttcggaggtcgaaggtggccatggaggagctgagaggggagttagagagaagagggtcagggtctcagggagtggagtgggagagtgaggttgctattagagagagagtggagaatctcagaacgtgttttggggttctcagatctggggcagacaacattgttgctcagcttgatgatttctttgacgagattgtggaagggaggaagaggcttttggacttttgcagtcataggtgactcagccaattcaaaatgaaataggtgtcttggctgcctacaaaaaatagaaacaaagacaaggtagaagaatagttgatggggttgttgtaccttttattaaccctttctttaattattattattgttattatc

SEQ ID NO: 51441 - protein, 322 aa, Glycine max
  peptide (1)..(322): Ceres Seq. ID no. 14311494
MDPSSVNGFYSFLTLGIDDLERVFLSTNFMSIQFLQRVVSVLRSFHTQLTLLVQKLQLPVGDKWLDEYMDESSKLWDACHLIKSGISAMDSYYSAALNITSSLDSHRHITPQVSRQVIRAIAGCRREAVGLEEENRALMEARIEALSLRFQERLSIESKLNGFNGFRGVLYAMRNVSSLLLMVLLYGLVYCYGDSSDFVLGGCGYEGCLFLGSAFMMSTARLQQRVAAEIGHMGGSPGMLLHEFRRSKVAMEELRGELERRGSGSQGVEWESEVAIRERVENLRTCFGVLRSGADNIVAQLDDFFDEIVEGRKRLLDFCSHR

SEQ ID NO: 51442 - protein, 293 aa, Glycine max
  peptide (1)..(293): Ceres Seq. ID no. 14311495
MSIQFLQRVVSVLRSFHTQLTLLVQKLQLPVGDKWLDEYMDESSKLWDACHLIKSGISAMDSYYSAALNITSSLDSHRHITPQVSRQVIRAIAGCRREAVGLEEENRALMEARIEALSLRFQERLSIESKLNGFNGFRGVLYAMRNVSSLLLMVLLYGLVYCYGDSSDFVLGGCGYEGCLFLGSAFMMSTARLQQRVAAEIGHMGGSPGMLLHEFRRSKVAMEELRGELERRGSGSQGVEWESEVAIRERVENLRTCFGVLRSGADNIVAQLDDFFDEIVEGRKRLLDFCSHR

SEQ ID NO: 51443 - protein, 254 aa, Glycine max
  peptide (1)..(254): Ceres Seq. ID no. 14311496
MDESSKLWDACHLIKSGISAMDSYYSAALNITSSLDSHRHITPQVSRQVIRAIAGCRREAVGLEEENRALMEARIEALSLRFQERLSIESKLNGFNGFRGVLYAMRNVSSLLLMVLLYGLVYCYGDSSDFVLGGCGYEGCLFLGSAFMMSTARLQQRVAAEIGHMGGSPGMLLHEFRRSKVAMEELRGELERRGSGSQGVEWESEVAIRERVENLRTCFGVLRSGADNIVAQLDDFFDEIVEGRKRLLDFCSHR

SEQ ID NO: 51444 - DNA, 1178 bp, Glycine max
  misc_feature (1)..(1178): Ceres Seq. ID no. 14311511
actctacttttactcggggcatagcagatgctgatacatgaaagcgaaacctagctatcatcatcatcacagaagaacaacaacagaggaaaaaagaaaaagaaaaatgttagaggtgaagagaatcggtgtggtggggagtggccaaatgggatcgggaatagcccaagtcgctgccatgcacggcatcgacgtttggcttcacgacctcgaccctcaagctctctccaaagcctcctcttccatctcttcctccatcaaccgtttcgtttccaaaaaccacatctctcaggttgcgggtgctgatgctttgaaacgactgcgtctcacgacggatttggaggatttacagctagcggatttgatcattgaggcgattgtggaatccgaagatgtgaaaaagagtttgtttgcgcaactcgataggattgccaagagttctgcgattttggcgtccaacaccagttccatttccgtcacgcgtctagccacctctaccagcaggccacgtcaggtgataggaatgcattttatgaacccacctcctgtgatgaaattgattgagattgtacgaggtgcagacacttctgaggagacattcgttgctacgaaagcattgtcagagaggcttggcaaggtagtgataacctcccatgattattcaggcttcatagtgaatcgaatccttatgcctatgataaatgaagcattttttgctctctacactggtgttgcaaccaaagaggatattgacacaggaatgaagctgggtactaaccatccaatgggtcctttagagcttgcagacttcattggattggatgtgtgcttgtcaataatgagagttcttcatgctggccttggtgacaacaaatatgcaccttgccctctacttgtgcagtatgttgatgctggaagacttggaagaaaacgaggtattggtgtgtatgaatatagtaaagatccaaggtctacaaaatcatcttcccgtctctaaaatgtttgtttcacttggaagaacaagttttcaacacccccattttaattaccttgtgtctgaccgtgggggtggtgcacacggctgaagttgaatacttgaatgtgtcttctatttcttttatgcatacaagcaaaaagaaaattgcaggaactaatagtaaaacatgcatagttaaaac

SEQ ID NO: 51445 - protein, 319 aa, Glycine max
  peptide (1)..(319): Ceres Seq. ID no. 14311512
MKAKPSYHHHHRRTTTEEKRKRKMLEVKRIGVVGSGQMGSGIAQVAAMHGIDVWLHDLDPQALSKASSSISSSINRFVSKNHISQVAGADALKRLRLTTDLEDLQLADLIIEAIVESEDVKKSLFAQLDRIAKSSAILASNTSSISVTRLATSTSRPRQVIGMHFMNPPPVMKLIEIVRGADTSEETFVATKALSERLGKVVITSHDYSGFIVNRILMPMINEAFFALYTGVATKEDIDTGMKLGTNHPMGPLELADFIGLDVCLSIMRVLHAGLGDNKYAPCPLLVQYVDAGRLGRKRGIGVYEYSKDPRSTKSSSRL

SEQ ID NO: 51446 - protein, 296 aa, Glycine max
  peptide (1)..(296): Ceres Seq. ID no. 14311513
MLEVKRIGVVGSGQMGSGIAQVAAMHGIDVWLHDLDPQALSKASSSISSSINRFVSKNHISQVAGADALKRLRLTTDLEDLQLADLIIEAIVESEDVKKSLFAQLDRIAKSSAILASNTSSISVTRLATSTSRPRQVIGMHFMNPPPVMKLIEIVRGADTSEETFVATKALSERLGKVVITSHDYSGFIVNRILMPMINEAFFALYTGVATKEDIDTGMKLGTNHPMGPLELADFIGLDVCLSIMRVLHAGLGDNKYAPCPLLVQYVDAGRLGRKRGIGVYEYSKDPRSTKSSSRL

SEQ ID NO: 51447 - protein, 282 aa, Glycine max
  peptide (1)..(282): Ceres Seq. ID no. 14311514
MGSGIAQVAAMHGIDVWLHDLDPQALSKASSSISSSINRFVSKNHISQVAGADALKRLRLTTDLEDLQLADLIIEAIVESEDVKKSLFAQLDRIAKSSAILASNTSSISVTRLATSTSRPRQVIGMHFMNPPPVMKLIEIVRGADTSEETFVATKALSERLGKVVITSHDYSGFIVNRILMPMINEAFFALYTGVATKEDIDTGMKLGTNHPMGPLELADFIGLDVCLSIMRVLHAGLGDNKYAPCPLLVQYVDAGRLGRKRGIGVYEYSKDPRSTKSSSRL

SEQ ID NO: 51448 - DNA, 1292 bp, Glycine max
  misc_feature (1)..(1292): Ceres Seq. ID no. 15176227
aacggagtttgcgtgtgggtgaaaccagcaccagcgcagtgcgtaaaggcagagagagagagagagtgaaatgagtgagttacaaaatgaagagtgacgaagccatttcgccattatcactcctctcgcaccaaaagcgatgaaagtctaggtttttacatttctggagtagctgaatcagatgaggcggatggtcttttgttaattacttcaacttaggtagacgaatctgccttggtgaatctgtcaagattgaagaatagactgcagattacttgtctggcagaaaggattcaaaatgagttggaacccacacatggagctccattacaataccattagctatccctataatacagcaggaagctttatcgaatattttgaaggtctcacctatgaacatgtcaacttcattttttctggtgcatcacatgctcaggagagttcatacccttcaaattcaagcttttacaagtttggaatttctgaaccagtgaatacttcatactatcgttacggtcatggttatgaggtaaatcatcacgaacctctggtggatgagtataggagaccttcagagaactcattgacaatcaatgaacagtcagcagctgtaagcacagaatgggttgaaggtggaaacactggcacacgagacaattctattgaatgtcctcgaagacatcatagtaattcaaatgattatcaggttatttggcaagacaatattgatcccgacaacatgacctatgaggaactacttgaattgggtgaagctgttggaactcaaagccgtggtctcacccaagaacagatctcctcacttccggtgtcaaagtacaaatgtgggttcttctcgaggaagaagtcacgggatgagagatgtgtgatttgccagatggaatataaaagaggggacaagcgcatcaccttgccatgtaaacatgtttatcatgctagttgtgggaacaaatggcttagcatcaataaggcctgccctatatgttacacggaagtgtttgccgacaagtcaaaacacaaataatctcaagcggataagtaacctgcatatgtttctgtttctccttgagtgtgggggtctttcatagaaatacatttttatttgatttttcccttttcgtagtgaggtcagccctgggtttagtaaaaatacagagaatctaaagttttataaaaggatatggacatgtatcaattgtcattgttgtactggagaggttggattacggtttgttttcataatagctaatacggtgtgctatgatttcacg

SEQ ID NO: 51449 - protein, 248 aa, Glycine max
  peptide (1)..(248): Ceres Seq. ID no. 15176228
MSWNPHMELHYNTISYPYNTAGSFIEYFEGLTYEHVNFIFSGASHAQESSYPSNSSFYKFGISEPVNTSYYRYGHGYEVNHHEPLVDEYRRPSENSLTINEQSAAVSTEWVEGGNTGTRDNSIECPRRHHSNSNDYQVIWQDNIDPDNMTYEELLELGEAVGTQSRGLTQEQISSLPVSKYKCGFFSRKKSRDERCVICQMEYKRGDKRITLPCKHVYHASCGNKWLSINKACPICYTEVFADKSKHK

SEQ ID NO: 51450 - protein, 242 aa, Glycine max
  peptide (1)..(242): Ceres Seq. ID no. 15176229
MELHYNTISYPYNTAGSFIEYFEGLTYEHVNFIFSGASHAQESSYPSNSSFYKFGISEPVNTSYYRYGHGYEVNHHEPLVDEYRRPSENSLTINEQSAAVSTEWVEGGNTGTRDNSIECPRRHHSNSNDYQVIWQDNIDPDNMTYEELLELGEAVGTQSRGLTQEQISSLPVSKYKCGFFSRKKSRDERCVICQMEYKRGDKRITLPCKHVYHASCGNKWLSINKACPICYTEVFADKSKHK

SEQ ID NO: 51451 - DNA, 919 bp, Glycine max
  misc_feature (1)..(919): Ceres Seq. ID no. 14311545
gcattagtattttaagtagtacatattcacttgaaaaaaaaatattatcgtgcaaagaacaagcttggaaaagaaaaatcttttaaaacgagttattcattttccaaaatcttttaactagtactttattaaaactcaattatctaattttgtttttgttgggttgcggtgtttctccgagttgcttcaattgaatggctcttcagcttccaccacttcctggccgtgccatgcgcttcaactcaagcgtgtgctcccttcctgcacgaaaatctagcacctttgccactctgtcacaaccccgaagcgactgggttgaagccactaacagtttcttcgaccaagacaaacgacccatcatgttatttgacggagtatgcaacttgtgcaacgggggtgtgaagttcgttcgtgataacgatcgaaataagacaattagatatgaacctcttcagagtgaaacgggtaaaatcttactcaggagatcaggaagagctcctgatgatatctcaagtgttgtacttgttgaaaaggaaagatcctatattaagtcagaagccgtgctgaagataatggaatatatagacttaccctttccacagctagcaattcttcttcaatttgtgcctctgtttatcagagattttgtttatgacaatgttgcaaacaatcgttacctgatttttggtcgttcggaatcatgtgaaatatagcatcatcctggcatgagtactggaggtaacagtaatgtgctaagttcaaaaactgggcttctttatagtccaagtcatatcctgttctcaaatattttgaagattctgtgtactactgtatagaagctttacttgtcgttttatttgataagctcatagaagcagaggacatcatcaattcgtaataatattttctgtcccaaatg

SEQ ID NO: 51452 - protein, 172 aa, Glycine max
  peptide (1)..(172): Ceres Seq. ID no. 14311546
MALQLPPLPGRAMRFNSSVCSLPARKSSTFATLSQPRSDWVEATNSFFDQDKRPIMLFDGVCNLCNGGVKFVRDNDRNKTIRYEPLQSETGKILLRRSGRAPDDISSVVLVEKERSYIKSEAVLKIMEYIDLPFPQLAILLQFVPLFIRDFVYDNVANNRYLIFGRSESCEI

SEQ ID NO: 51453 - protein, 160 aa, Glycine max
  peptide (1)..(160): Ceres Seq. ID no. 14311547
MRFNSSVCSLPARKSSTFATLSQPRSDWVEATNSFFDQDKRPIMLFDGVCNLCNGGVKFVRDNDRNKTIRYEPLQSETGKILLRRSGRAPDDISSVVLVEKERSYIKSEAVLKIMEYIDLPFPQLAILLQFVPLFIRDFVYDNVANNRYLIFGRSESCEI

SEQ ID NO: 51454 - protein, 117 aa, Glycine max
  peptide (1)..(117): Ceres Seq. ID no. 14311548
MLFDGVCNLCNGGVKFVRDNDRNKTIRYEPLQSETGKILLRRSGRAPDDISSVVLVEKERSYIKSEAVLKIMEYIDLPFPQLAILLQFVPLFIRDFVYDNVANNRYLIFGRSESCEI

SEQ ID NO: 51455 - DNA, 1408 bp, Glycine max
  misc_feature (1)..(1408): Ceres Seq. ID no. 14311854
agattagtagtatatgctttcaacaatggaagattagaaagcgccagtgtgcgcacgttagcacccaaccccatggattcctctcccccaattcgtaagggaaggaaactataacggaggagggggcaataaacaataagaaaatgttgcggataacgagattctcggggtttttctccgccgcaatgttcgtgactgttcttgttattctctccccctccttccaatccgaagccattcgatcctcccaccgattttccttccggaaagcccctcctttccgcaatgccgccgaatgcgcttctgtttccggccaaaccaccaccgtctgcgacccttccttggtccacgtggccataaccctcgacgtcgactacctccgcggctcaatcgccgccgtgcactccatcctccacaactccctctgtccggagaacatcttcttccatttcctcgtctccgacaccaacctccaaaccctagttgagtccacgttcccaaacctgaaattcaacgtctatttcttcgatccgaacatcgtcgctcacttgatctcctcctccgtgcggcaggcgctggagcagcctctcaattacgcgagaaattacctcgttgaccttctggagagttgcgtggagagggtgatttacttggactccgatctggtggtagtggatgacgtggcgaaactgtggagcgcgagtctggactcgcgtgccatcggcgcgccggagtactgccacgcgaacttcaccaagtatttcacggcggggttctggtctgagtcgaggttgtcggggacgttcgcgcagcggagggcgtgctacttcaacacgggggtgatggtgatggatctggtgaagtggaggaaggaaggatacacgaagagaattgagcgttggatggagattcagaagagtgataggatctatgagcttggttctctgccgccgtttttgctggtgttcgcgggacacgtggcacccattgagcaccggtggaaccagcacggtttgggcggggataacgtgaagggtagttgccgtgacttgcaccctggtccggttagtttgttgcattggtccggtagcggtaagccatggctccgtttaagctccaaacggccttgccctctggattctctatgggctccttttgacttgtatacacacccatcgtcttaactaattcttgctgcatgctacatacatacattcattagtcattcctgatttgaaaataaattgttgaattttattaagttaagtttgtttattataataaatactaattgttagaagaaaaaataaatatttaaagaacactagctggttatatatgttgaagccgtcgtaattagattcaggtgtctagtttgtaaaagttattgttagtactgttctggctg

SEQ ID NO: 51456 - protein, 346 aa, Glycine max
  peptide (1)..(346): Ceres Seq. ID no. 14311855
MLRITRFSGFFSAAMFVTVLVILSPSFQSEAIRSSHRFSFRKAPPFRNAAECASVSGQTTTVCDPSLVHVAITLDVDYLRGSIAAVHSILHNSLCPENIFFHFLVSDTNLQTLVESTFPNLKFNVYFFDPNIVAHLISSSVRQALEQPLNYARNYLVDLLESCVERVIYLDSDLVVVDDVAKLWSASLDSRAIGAPEYCHANFTKYFTAGFWSESRLSGTFAQRRACYFNTGVMVMDLVKWRKEGYTKRIERWMEIQKSDRIYELGSLPPFLLVFAGHVAPIEHRWNQHGLGGDNVKGSCRDLHPGPVSLLHWSGSGKPWLRLSSKRPCPLDSLWAPFDLYTHPSS

SEQ ID NO: 51457 - protein, 332 aa, Glycine max
  peptide (1)..(332): Ceres Seq. ID no. 14311856
MFVTVLVILSPSFQSEAIRSSHRFSFRKAPPFRNAAECASVSGQTTTVCDPSLVHVAITLDVDYLRGSIAAVHSILHNSLCPENIFFHFLVSDTNLQTLVESTFPNLKFNVYFFDPNIVAHLISSSVRQALEQPLNYARNYLVDLLESCVERVIYLDSDLVVVDDVAKLWSASLDSRAIGAPEYCHANFTKYFTAGFWSESRLSGTFAQRRACYFNTGVMVMDLVKWRKEGYTKRIERWMEIQKSDRIYELGSLPPFLLVFAGHVAPIEHRWNQHGLGGDNVKGSCRDLHPGPVSLLHWSGSGKPWLRLSSKRPCPLDSLWAPFDLYTHPSS

SEQ ID NO: 51458 - DNA, 1676 bp, Glycine max
  misc_feature (1)..(1676): Ceres Seq. ID no. 15171297
ttcaaccttctcttctccccattgtgcacagttcacacctaacacaaacccacttcctctcttttccggcggcttttccggccaccatgctcctccgcctccaccacccaacctccctcgcctagatctactcagatcacaatcccaaatctctcaaatccggcgtcgtcgttttagctcaccttatataaaaaaagcagaaaggatgtcgtttcctctataattcgcttactcgcgctgtgtgctgtgtttctttctaacattcgtgttcgcgtgtgtgcgtttctttttttgttcctttgttcttttcggagcttctttgatttttccggcgagaagaggatgacgtccgtcgcgaggcagccaacgtggaaggagcgggagaacaacaagaggcgagagaggaggaggagagccatcgcggcgaagatcttctccggcctgcgaatgtacggcaactacaagctccccaaacactgcgacaacaacgaagttctcaaggctctctgcaacgaagccggctggaccgtagaagccgatggcaccacctatcgcaagggatgcaagcctcctgttgaacgcatggacatagtaggtggttctgcagcagcaagcccatgctcatcttaccatccaagtccctgtgcttcctacaaccctagtccaggctcttcttgcttaccgagccctcgcgcatccccctttcctccaaacccaaatgctgatggcaattctctcattccatggctcaaaaacctttcatcaggatcatcatcggcatcctcttccaagcttccgcagctgtacattccgaatggctccatcagtgctccagtcactcctccaatcagctctccatcatcccgaaagccccagatcagagctgattgggaggatcagtccaattgtccgacagcgtggggcggactggcatacacctttgtgccctcttcaactcctccaagccccggccgccaggttgccgaaacagattggttttccaagatcaggattcctcagggaggactagcaccaacttctccaaccttcagcctggtctcttccaacccatttggcctcaaggaagatgctatggttggcagcggttcccggatgtggacgacaccaggggcaagtggaacatgttctccagccgtagctgcaggctccgaaaacacttctgacattccaatggctgaagcagtttcagatgaatttgcctttggaagcagctcatcaggtttagtgaatgcctggaaaggagagaggatccatgaagcttcttttggaacagatgatcttgagctcactcttgggagctccaagaccaggttgctccataagtgaatagtcaatggtcccttcaacaacatgaactttgactctgtttattctgtagaaaggctagaggagggaattaagatgagcagcaagtagttgttcttattacataccagaaaaaaaaaatagcagtttattttattcttttattttctcttagtttttattggttcctaagttatatatacagctttagctaggtgtcgggtggttttcaaccctttcatttggtcaatgttgttaaaacctttattactctgggaaagatcatcatatacctgtatggattggcttggtttgatattgaaaggaaaaaattactcgatttcaactgt

SEQ ID NO: 51459 - protein, 334 aa, Glycine max
  peptide (1)..(334): Ceres Seq. ID no. 15171298
MTSVARQPTWKERENNKRRERRRRAIAAKIFSGLRMYGNYKLPKHCDNNEVLKALCNEAGWTVEADGTTYRKGCKPPVERMDIVGGSAAASPCSSYHPSPCASYNPSPGSSCLPSPRASPFPPNPNADGNSLIPWLKNLSSGSSSASSSKLPQLYIPNGSISAPVTPPISSPSSRKPQIRADWEDQSNCPTAWGGLAYTFVPSSTPPSPGRQVAETDWFSKIRIPQGGLAPTSPTFSLVSSNPFGLKEDAMVGSGSRMWTTPGASGTCSPAVAAGSENTSDIPMAEAVSDEFAFGSSSSGLVNAWKGERIHEASFGTDDLELTLGSSKTRLLHK

SEQ ID NO: 51460 - protein, 299 aa, Glycine max
  peptide (1)..(299): Ceres Seq. ID no. 15171299
MYGNYKLPKHCDNNEVLKALCNEAGWTVEADGTTYRKGCKPPVERMDIVGGSAAASPCSSYHPSPCASYNPSPGSSCLPSPRASPFPPNPNADGNSLIPWLKNLSSGSSSASSSKLPQLYIPNGSISAPVTPPISSPSSRKPQIRADWEDQSNCPTAWGGLAYTFVPSSTPPSPGRQVAETDWFSKIRIPQGGLAPTSPTFSLVSSNPFGLKEDAMVGSGSRMWTTPGASGTCSPAVAAGSENTSDIPMAEAVSDEFAFGSSSSGLVNAWKGERIHEASFGTDDLELTLGSSKTRLLHK

SEQ ID NO: 51461 - protein, 254 aa, Glycine max
  peptide (1)..(254): Ceres Seq. ID no. 15171300
MDIVGGSAAASPCSSYHPSPCASYNPSPGSSCLPSPRASPFPPNPNADGNSLIPWLKNLSSGSSSASSSKLPQLYIPNGSISAPVTPPISSPSSRKPQIRADWEDQSNCPTAWGGLAYTFVPSSTPPSPGRQVAETDWFSKIRIPQGGLAPTSPTFSLVSSNPFGLKEDAMVGSGSRMWTTPGASGTCSPAVAAGSENTSDIPMAEAVSDEFAFGSSSSGLVNAWKGERIHEASFGTDDLELTLGSSKTRLLHK

SEQ ID NO: 51462 - DNA, 1647 bp, Glycine max
  misc_feature (1)..(1647): Ceres Seq. ID no. 14311553
aatttaccattcattttggtattttctatattggtctatgagtagcttagttttaaaattcagcagcaactcacaattaccaccacccttttgtttttgttcatgagtgtggcggcttcttatttatgacttcaagctaatcatcttttcttcttgttgtttgctatttttttagttataaactggcttgtgctgtatgttaggcttcttatttcatgttaatatgttatttaccttggcgatttcaacttgtactttatcttaagaataagcttcaaggctaaaccaatgtacacaccttgtgcaggacagacaaagctgattcacttaggagcctcaagagctatgtctacatcttctcgtgctcttcccactcccttggaaaacaagtatatgaaacccccagattcttttcagctttcacccgtcagatctgactgcaaattctgcctcatcaaattcaatcagaagtgctgggaagatgttgtcttcaccttctgaatgtcccgatgatatccctttttcctttgtttctcagacatcaggtgacaatgtgtcttccgaaattcattcaacagcattgatttctcaccctcaagataatgaagatctttcctggggaccagatccatttcaggatattcttggctttcctgaaaatgtttctgtccagcatgatcaggtgcaaaacaatggttgttacataaatgatgataatgtcaaaagatctgattttggggagtgggttgatcagttaatgtcaattgatgattctcttcacccgaactggagtcaacttcttggtgatgacaatgtagcagaaccaaaaccaaaggcatctcatgttcctcagcagcagcatatagcatctgtagaagttgttggcaattcagcatcaactgcaccgcagactaagcctagaatgcgttggactccagaacttcacgaggcctttgtggaagcagttaatcagcttggtggtagtgataaggctactccaaagggtgtgttgaatctaatgaaagttgagggccttactatctatcatgtaaaaagccacttgcagaagtatagaactgccagatataaaccagagccgtcagaaggaaattctgagaaaaaggtgactccaatggaagaaatgaaatctctagatttgaaaacgagtaaggggatcactgaagcattacgtttacagatggaactccagaagcgacttcacgaacaacttgagatccaaagaaagttgcagattcaaattgaagaccaagggaaacgtcttcagatgatgtttgagaaacagggagagatgggtgacaacaaggttaatggctcctcggacacaaacgaggaaggcgacaaatttgaaagcattccaaaagccatgcctgaagagaaggattcaagcacaagaaaacaaatagcaggtgaagctgaagaagtgatcaatgaagatgaagctgcaccacccacaaaacgggtgaaaagttcataacagcaagatcgttttatggttctagatttgtttaatattcttagactggtttggactgcatggaacttgtaaaaatattattggatccaaggatgtttcgacttgctcatttatcactgccagaagtaaaatcttgttttatatttgttatc

SEQ ID NO: 51463 - protein, 337 aa, Glycine max
  peptide (1)..(337): Ceres Seq. ID no. 14311554
MLSSPSECPDDIPFSFVSQTSGDNVSSEIHSTALISHPQDNEDLSWGPDPFQDILGFPENVSVQHDQVQNNGCYINDDNVKRSDFGEWVDQLMSIDDSLHPNWSQLLGDDNVAEPKPKASHVPQQQHIASVEVVGNSASTAPQTKPRMRWTPELHEAFVEAVNQLGGSDKATPKGVLNLMKVEGLTIYHVKSHLQKYRTARYKPEPSEGNSEKKVTPMEEMKSLDLKTSKGITEALRLQMELQKRLHEQLEIQRKLQIQIEDQGKRLQMMFEKQGEMGDNKVNGSSDTNEEGDKFESIPKAMPEEKDSSTRKQIAGEAEEVINEDEAAPPTKRVKSS

SEQ ID NO: 51464 - protein, 245 aa, Glycine max
  peptide (1)..(245): Ceres Seq. ID no. 14311555
MSIDDSLHPNWSQLLGDDNVAEPKPKASHVPQQQHIASVEVVGNSASTAPQTKPRMRWTPELHEAFVEAVNQLGGSDKATPKGVLNLMKVEGLTIYHVKSHLQKYRTARYKPEPSEGNSEKKVTPMEEMKSLDLKTSKGITEALRLQMELQKRLHEQLEIQRKLQIQIEDQGKRLQMMFEKQGEMGDNKVNGSSDTNEEGDKFESIPKAMPEEKDSSTRKQIAGEAEEVINEDEAAPPTKRVKSS

SEQ ID NO: 51465 - protein, 190 aa, Glycine max
  peptide (1)..(190): Ceres Seq. ID no. 14311556
MRWTPELHEAFVEAVNQLGGSDKATPKGVLNLMKVEGLTIYHVKSHLQKYRTARYKPEPSEGNSEKKVTPMEEMKSLDLKTSKGITEALRLQMELQKRLHEQLEIQRKLQIQIEDQGKRLQMMFEKQGEMGDNKVNGSSDTNEEGDKFESIPKAMPEEKDSSTRKQIAGEAEEVINEDEAAPPTKRVKSS

SEQ ID NO: 51466 - DNA, 1254 bp, Glycine max
  misc_feature (1)..(1254): Ceres Seq. ID no. 14311531
ctttcataaatatttctttcgtataactcggtcccacttgccttcttctgtaacgtgtaaaaaacaaacactaaatctcccgcacccccgagcccggaaagagatctagtgtgtctgtgactgtcagaaacaaacattatttggttttctgaattgtttggattgcgagaaaaaaaaaaaaaggaaaaatggcaaaggatattcgattcttcgacctcaacacgggcgccaagatcccttcagtcggcttgggaacttggcagtccgatcctggccttgttgctgaagccgtcgcggcggccatcaaggttggttaccgccacattgattgtgctcaaatctatggcaatgagaaggagattggctctttgttgaagaatctgtttgaggagggtgtattgaagcgcgaggatttgtggattacatctaaactctggaatactgatcatgctccagaagatgtaccactggcactggaccggaccttgaaagatttgcagctggattatgtagatttgtatcttatccactggcctgctccgatgaagaaaggatcagctggctttaagcctgaaaatcttgtgcaaccaaacatacctaacacctggaaggcgatggaagcactctatgactctggcaaggctcggaccatcggtgtaagcaatttttccaccaagaagctctcggatttgctgctaattgctcgtgttcctcccgctgtcaaccaggtggagtgtcatccttcctggcagcaggacaagctgcaggctttctgcaattccaaaggtgtccacctctctggatattcacctttgggttcccctggaacaacctggcttaaaagtgatgtcctcaagcatcaagttataaatatgattgcggagaaactaggcaagacgcctgcacaagtagctcttcgctggggacttcaaatgggccatagtgttcttcccaagagtacaaacgaaactagaataaaggaaaattttgatgtttttggctggtctatacctgaggacctgctcgccaaattttctgagattcaacaggcaagattactcaggggtaccacatttgcccatgaaacttatggtgcctacagatcccttgaggaactttgggatggtgaaatctgagaaatctatctgtaaatttgataagtgaatggatcgaggagtgagagttctgtgaaactgtgaatcagtatactcctttgttgacttgagcaaattttattttattcctggtttgacg

SEQ ID NO: 51467 - protein, 315 aa, Glycine max
  peptide (1)..(315): Ceres Seq. ID no. 14311532
MAKDIRFFDLNTGAKIPSVGLGTWQSDPGLVAEAVAAAIKVGYRHIDCAQIYGNEKEIGSLLKNLFEEGVLKREDLWITSKLWNTDHAPEDVPLALDRTLKDLQLDYVDLYLIHWPAPMKKGSAGFKPENLVQPNIPNTWKAMEALYDSGKARTIGVSNFSTKKLSDLLLIARVPPAVNQVECHPSWQQDKLQAFCNSKGVHLSGYSPLGSPGTTWLKSDVLKHQVINMIAEKLGKTPAQVALRWGLQMGHSVLPKSTNETRIKENFDVFGWSIPEDLLAKFSEIQQARLLRGTTFAHETYGAYRSLEELWDGEI

SEQ ID NO: 51468 - protein, 197 aa, Glycine max
  peptide (1)..(197): Ceres Seq. ID no. 14311533
MKKGSAGFKPENLVQPNIPNTWKAMEALYDSGKARTIGVSNFSTKKLSDLLLIARVPPAVNQVECHPSWQQDKLQAFCNSKGVHLSGYSPLGSPGTTWLKSDVLKHQVINMIAEKLGKTPAQVALRWGLQMGHSVLPKSTNETRIKENFDVFGWSIPEDLLAKFSEIQQARLLRGTTFAHETYGAYRSLEELWDGEI

SEQ ID NO: 51469 - protein, 173 aa, Glycine max
  peptide (1)..(173): Ceres Seq. ID no. 14311534
MEALYDSGKARTIGVSNFSTKKLSDLLLIARVPPAVNQVECHPSWQQDKLQAFCNSKGVHLSGYSPLGSPGTTWLKSDVLKHQVINMIAEKLGKTPAQVALRWGLQMGHSVLPKSTNETRIKENFDVFGWSIPEDLLAKFSEIQQARLLRGTTFAHETYGAYRSLEELWDGEI

SEQ ID NO: 51470 - DNA, 973 bp, Glycine max
  misc_feature (1)..(973): Ceres Seq. ID no. 12608863
aactgcgtgcactatctcatttctttctattcatttcttcattccaccatcaccatggtcaaggagaagaagaacgtggtggtcaagaacaagaagccaaacaacaatgccgacgagcttcacttccgcggcgtccggaagcgaccatggggccgctacgccgccgagatccgtgaccccggcaagaagacccgcgtctggctcggcaccttcgacaccgccgaggacgccgcccgcgcctatgacgccgccgcccgcaacttccgcggccccaaagccaaaaccaacttccccgtgccccccgacgacaacaacaacaacaacgttaacgtgaacaaaaacaagagtgttaacgttaaatctcacagtcccagccagagcagcaccgtggagtccgccaccccggagcgtgaagccacgcgccgctccacctccgccgcaatcgaccgtttcccgttcctacccatccagcagcaaatcctcatgacccaccccgtcgcagcacccatgcgcccggttttctttctcgaccgggcccacttcatgacccagtctttcccgctccggttcgaacccggtccggtccagagcgactccgactcctcctccgtcgtcgtcgattgtcagcccaaaagagagatcaatctcgatcttaacttggctccgcctaatgaatattaacccttttttttatctctttattttttcataaaaaaagatagcagaaagaaaggactaaggagattttttttctctctttttttttttttggaagattaatcttccattaagaagttaattagtacatcctttgatgtaaataggttgattttctcttcttttttgttttttaggtccttgatagtattatcagaggacatgatctgaaattgtctagatctgatataatttttcatgtaacatctgaatatctgatgtaattctggctaatatcaattaatcttcttttatt

SEQ ID NO: 51471 - protein, 226 aa, Glycine max
  peptide (1)..(226): Ceres Seq. ID no. 12608864
NCVHYLISFYSFLHSTITMVKEKKNVVVKNKKPNNNADELHFRGVRKRPWGRYAAEIRDPGKKTRVWLGTFDTAEDAARAYDAAARNFRGPKAKTNFPVPPDDNNNNNVNVNKNKSVNVKSHSPSQSSTVESATPEREATRRSTSAAIDRFPFLPIQQQILMTHPVAAPMRPVFFLDRAHFMTQSFPLRFEPGPVQSDSDSSSVVVDCQPKREINLDLNLAPPNEY

SEQ ID NO: 51472 - protein, 208 aa, Glycine max
  peptide (1)..(208): Ceres Seq. ID no. 12608865
MVKEKKNVVVKNKKPNNNADELHFRGVRKRPWGRYAAEIRDPGKKTRVWLGTFDTAEDAARAYDAAARNFRGPKAKTNFPVPPDDNNNNNVNVNKNKSVNVKSHSPSQSSTVESATPEREATRRSTSAAIDRFPFLPIQQQILMTHPVAAPMRPVFFLDRAHFMTQSFPLRFEPGPVQSDSDSSSVVVDCQPKREINLDLNLAPPNEY

SEQ ID NO: 51473 - DNA, 1832 bp, Glycine max
  misc_feature (1)..(1832): Ceres Seq. ID no. 14311857
attttcgttatcttcttcgtttcgttataaccctagctgggaacaaataccatctctcgtccattgtctgcgtctcactcatcctctcccttctcttacattgttcatttctcaactctttctctcttttcttccaaaccctaatctggattagcctctcatcggatttcaattctcacggtcttcaccgaccgccagatctcttagcaccgctcttcttttcatcgattaaataacaaaaaattggcttaattttattctaacatcctaagcaaaaactaacgttttcacccgattttaacattcgagagaagagttagtttattttattgtatttttttattaagttactgtttctatttaaatcgataaacggcgaggtcgagcgttagaattcgaaatccggagaaaaaaaattacaggtattattatcaggggaatcgcgtggaagcgttgttgaggagagtgttgtgtttgatctgaggaagaagaaagaaaaaaaataatggtgggaggtggaagcaggagggatgaagggtcgttggtgttgaacaacacgaacgtgtttgcagcgctggatactctgaagaagaagaagaagtccgataaggagaagaagagcaagggctcgtcgacgaaatcgcaggcccagtccgcgaaggctgaggccccagtgttttgggccccggcgccgctgaacgccaagtcctgggccgacgtcgacgacgaggacgacgacgattactacgccaccacggcgccgccccaatcggtgtggggcgtttctgaacctcatcacagtaaggaggacaaacatgggaattttgaggaaagtgagagtgaggaagatattttggatgaaggggatgatgaggttgaggaagagcatgatcatgaaccagaagaatctttgaaacctgaacatgaggttaagaaggatactgaagtccctttgccgccaccaaaggagacagaaaggcagctctctaaaaaggaaaggaagaagaaggaacttgcagaacttgaggctcttctagctgattttggagtggcgccaaaacaaagtaacgatggtcaagatgagtctcaaggtgctcaggataagaaaggtgttgagactgatggagatggagaaaagaaagaaaatgtccctgcagaatccaaaacttccaagaagaagaagaagaaggataaagcttccaaggaggtgaaagaatctcaagatcaacccaacagttcagacacaaacaatgggcctgatttggccacaggcgctgaaaatgtggaggatacatctactgttgatgtgaaagagcgtctcaagaaagttgcttctacaaagaagaagaagtccagtaaagaaatggatgctgctgcaagagctgctgctcaagaggctgctgcaaggagtgcaaggcttgctgctgcaaaaaaaaaagagaagaaccattataaccagcaacccgtccggtaaaagaaccctgctccttaacatcaatacaggaatttgtatttcttgttcatatgttgatgccgaataaacagtggtctttaggttctggtgagaatggtgatgattctggtcgtattactgtggacctgggaaatttttcatgtagtttttttttgggaattagacaattagtgttgttcaattgttctggacttgctattttggcagagaaaattttagctttaaacattaccggaactacatagttgtgtattgtagttcttatatctctttgtggctgatcagtgatcaattagttctgactgagagtgtttatatttaactatagaaagtgctgtgttgctttaaatgttattat

SEQ ID NO: 51474 - protein, 322 aa, Glycine max
  peptide (1)..(322): Ceres Seq. ID no. 14311858
MVGGGSRRDEGSLVLNNTNVFAALDTLKKKKKSDKEKKSKGSSTKSQAQSAKAEAPVFWAPAPLNAKSWADVDDEDDDDYYATTAPPQSVWGVSEPHHSKEDKHGNFEESESEEDILDEGDDEVEEEHDHEPEESLKPEHEVKKDTEVPLPPPKETERQLSKKERKKKELAELEALLADFGVAPKQSNDGQDESQGAQDKKGVETDGDGEKKENVPAESKTSKKKKKKDKASKEVKESQDQPNSSDTNNGPDLATGAENVEDTSTVDVKERLKKVASTKKKKSSKEMDAAARAAAQEAAARSARLAAAKKKEKNHYNQQPVR

SEQ ID NO: 51475 - DNA, 1371 bp, Glycine max
  misc_feature (1)..(1371): Ceres Seq. ID no. 14311594
attgtcacattatactttgatagccattctggcatgctttctttgctccacagcggagtacaccaccactgtccactggtacactcttggcattttccctttcttttttcatttttatttttaaatcccactctcattttcccttccacttttccaattccttcacttcacactctcacactcacagacacagtctctctaatctaatggatgcaaagtctgctgaagctgttgttcccttagaaccattgaagtatcagacatggttcttgaaagtttcgatccactgtgaaggttgcaggaggaaagttaagaaggttctacagagcattgatggtgtttttaccacaacggttgacccgcaacagcaaaaagtaaccgtcactggaagcgttggagttgagacgctcataaggaaactggtcaaagccggaaaacacgccgagatttggccggagaatctcgccgccgggaagggaaagaactccggcaaagacaagaagcagcagcagcagcagaagaagaagaagaacgaacaaggagaaccagaaagcgcggtaaacaactctactacaacaaatgcagaacaaaacactaactctggcacaaaaaagggaattgaaaaaaatgctggcgaaaacaagagcaccggaaactcaaagtccggcggcggagaaagtgaggcagcgaaaccggagaacaagggtggtcaaagtgaagggggttctgggaagaaaaagaaaaagaaaggtcaaagcggtggagtgagtgcagcatgtggtgatgcacctgcgcacactggatcggaggtgcagtgttctgggcagatgaatctgagccctacacgtcagcaatcatacgtgtatcctgaaacatactgttatcctcaccaagtggtgtatctagcaactcacaacaacaacaggttatgtcccatgcccatgggaacaatgggtggtccttcttactatgtttcatcattgccctacatgtgtgcaggcttcgaccatgactctccttattatcgctttcaatctccacccttcgaaatcttcagtgatgagaatgccaacggttgttctattgtgtgaccaaagataaatcaaataaacatagtgctttttgtttctttgatggtcccaggtagaggtagtttttttttttttttgttttgttatgtttttgtattttgaggagggaaaaatcgagcttatggcatatacgttgtgctctgtccttggattttctaggggctcactttgctgcatttactactccaacactgaaatatgcccaaccttaccttattttgatcttttggaccaagctgtaaataatattctaatatggacccttttaatatttcatgtc

SEQ ID NO: 51476 - protein, 294 aa, Glycine max
  peptide (1)..(294): Ceres Seq. ID no. 14311595
MDAKSAEAVVPLEPLKYQTWFLKVSIHCEGCRRKVKKVLQSIDGVFTTTVDPQQQKVTVTGSVGVETLIRKLVKAGKHAEIWPENLAAGKGKNSGKDKKQQQQQKKKKNEQGEPESAVNNSTTTNAEQNTNSGTKKGIEKNAGENKSTGNSKSGGGESEAAKPENKGGQSEGGSGKKKKKKGQSGGVSAACGDAPAHTGSEVQCSGQMNLSPTRQQSYVYPETYCYPHQVVYLATHNNNRLCPMPMGTMGGPSYYVSSLPYMCAGFDHDSPYYRFQSPPFEIFSDENANGCSIV

SEQ ID NO: 51477 - DNA, 956 bp, Glycine max
  misc_feature (1)..(956): Ceres Seq. ID no. 12609770
gtggtgcaaggcataaagaggagaattggtggggataggcgaaggaggtggcgactgagtagtgaatagggtttttgattgattgatagcaataattggtgttagcgaagcttgagaattgagatttatgggtcgcaatcgcagtcgcagtcgcagtgtgtcacgctctccttccaattcccgcagaagaaggtactctccatcccctgtttctcatcgccactcgagaacttccaggcgccgctctccttcccacaagcgccgtcgaaggcacagaacctcttcctccccctctctttcacgcagccccactcccaaacccaagaaagatcaaaacaaaagcaagcgtcaacacgaggaagagttgaaactattggaagaagagactgcaagaagactggaagaagcaattcgaaaaaatgttgaggagaaacttaacacagaggaagtcaagttagaaatagaaaagcgcgtagcagagggagtgaagaaattgtttgatgatgttgaagctcaacttgaaaaagaaaaggaagatgctcttactgaagctagaaggaaggaagaacaagcccgtaaagaaagagaagagctggacaagatgcttgaagagaataggaggagagtggaagaatctcagagaagagaagctctagagcagcaaagaaaggaggaggaacgacaaagggaattggagatgattcagagacaaaaagaagaggctgctcggagaaagaagctggaggaggaagaagaacatgcaaatcgaattaattctttgggtaagaacaaatctaggcctaaatcttatggtttctaattactactatatgtgatatcattttgtaccccaaattatttgtaccctttatgtggaacaatgatcttgaatgaaagatttgatactcctatgtttgagcttgcaacctactttattaaaagatctaagaaaatcg

SEQ ID NO: 51478 - protein, 230 aa, Glycine max
  peptide (1)..(230): Ceres Seq. ID no. 12609771
MGRNRSRSRSVSRSPSNSRRRRYSPSPVSHRHSRTSRRRSPSHKRRRRHRTSSSPSLSRSPTPKPKKDQNKSKRQHEEELKLLEEETARRLEEAIRKNVEEKLNTEEVKLEIEKRVAEGVKKLFDDVEAQLEKEKEDALTEARRKEEQARKEREELDKMLEENRRRVEESQRREALEQQRKEEERQRELEMIQRQKEEAARRKKLEEEEEHANRINSLGKNKSRPKSYGF

SEQ ID NO: 51479 - DNA, 1548 bp, Glycine max
  misc_feature (1)..(1548): Ceres Seq. ID no. 15171386
ctatttgacatctatttgcttcattatattctgtagcaacttaattgtaactccgatttccttggaactctttcaacttggctgctgttgttagtcattattacgtattttcaacactctctggtgcagagggccatcttggtgtggtatacagaaaggtgagcaaagaaagactgaaaaagtgcaagtgtttatggattggaatttgaaagcaccttcttgggatttgagtgaagtggatcaggcaaacttacccaacatggaaacaatggaaggctcaagcagatatggaatgtatagaactaagggggaattttctgttgacttgaagcttggccaagtgggaaattctggcagggaatcatcagtgttgactaagtccaaagatggtggtgctgttggagtctccaaaatgatatcctcatcttcttcagggtcagctaagagagctcgttcccttagcaacgggacacaaacagtgtcatgccttgtggacgggtgccactctgatctcagtaactgcagagactatcataggcgccataaggtctgtgaagtccattccaagactgcacaggtcacaattggaggccagaaacaaaggttctgccagcagtgtagcaggttccattcactggaggaatttgatgaggggaaaaggagctgcaggaagcggttagatgggcacaaccgacggagaagaaagccacaaccagaagttgttctaacgcggtctgctagttttttgtcgaattaccaccaaggcacacaattgctatctttctcaagttcacatgtgtacccatccactactgtggtgaatcctactttgggtggagttgttacttctggtgatgtaaggcttcatgggcagaaccaccaccaccaccaaatgcatttggttgataaacaggacctgtttcttggatcttctccaaccggttacaaggaagggaagcatttggcattcatgcaaggtgaccacaccctcaacaaccagagcccacatcttccaggtgcttccgtgggcccggcccagatgtttcttaggaccagcccgtattcagaaagcggtggattgagatgcaaaatgttctgcgatagcctaacaggttcggcccacggcaacacctctcgtgctctctctcttctgtcatcaccaccacagccgcacagtcctggaaatggattaaaccaaatggtgaaccctcactcgccacttatgcaacccttgggcctgagcctgcatgataacagcctgggctccgtggacccggttttgggccccaacgggagtgaccattcctcatcaatgcatcacataggttctaatggatcccaggtgaatgaggcccctccactatttccctttcaatgggaatagacttcaattataaggactcgtcctttggttgttgattctttccctcgtactatttcaatgttcaatttatcttttaatgaaggcaatgaactatatccatcacgtttaacaaaatggtgtggaaatttttcatgtctttaaaagtgatgagtttgttgctgtgc

SEQ ID NO: 51480 - protein, 396 aa, Glycine max
  peptide (1)..(396): Ceres Seq. ID no. 15171387
MDWNLKAPSWDLSEVDQANLPNMETMEGSSRYGMYRTKGEFSVDLKLGQVGNSGRESSVLTKSKDGGAVGVSKMISSSSSGSAKRARSLSNGTQTVSCLVDGCHSDLSNCRDYHRRHKVCEVHSKTAQVTIGGQKQRFCQQCSRFHSLEEFDEGKRSCRKRLDGHNRRRRKPQPEVVLTRSASFLSNYHQGTQLLSFSSSHVYPSTTVVNPTLGGVVTSGDVRLHGQNHHHHQMHLVDKQDLFLGSSPTGYKEGKHLAFMQGDHTLNNQSPHLPGASVGPAQMFLRTSPYSESGGLRCKMFCDSLTGSAHGNTSRALSLLSSPPQPHSPGNGLNQMVNPHSPLMQPLGLSLHDNSLGSVDPVLGPNGSDHSSSMHHIGSNGSQVNEAPPLFPFQWE

SEQ ID NO: 51481 - protein, 374 aa, Glycine max
  peptide (1)..(374): Ceres Seq. ID no. 15171388
METMEGSSRYGMYRTKGEFSVDLKLGQVGNSGRESSVLTKSKDGGAVGVSKMISSSSSGSAKRARSLSNGTQTVSCLVDGCHSDLSNCRDYHRRHKVCEVHSKTAQVTIGGQKQRFCQQCSRFHSLEEFDEGKRSCRKRLDGHNRRRRKPQPEVVLTRSASFLSNYHQGTQLLSFSSSHVYPSTTVVNPTLGGVVTSGDVRLHGQNHHHHQMHLVDKQDLFLGSSPTGYKEGKHLAFMQGDHTLNNQSPHLPGASVGPAQMFLRTSPYSESGGLRCKMFCDSLTGSAHGNTSRALSLLSSPPQPHSPGNGLNQMVNPHSPLMQPLGLSLHDNSLGSVDPVLGPNGSDHSSSMHHIGSNGSQVNEAPPLFPFQWE

SEQ ID NO: 51482 - protein, 371 aa, Glycine max
  peptide (1)..(371): Ceres Seq. ID no. 15171389
MEGSSRYGMYRTKGEFSVDLKLGQVGNSGRESSVLTKSKDGGAVGVSKMISSSSSGSAKRARSLSNGTQTVSCLVDGCHSDLSNCRDYHRRHKVCEVHSKTAQVTIGGQKQRFCQQCSRFHSLEEFDEGKRSCRKRLDGHNRRRRKPQPEVVLTRSASFLSNYHQGTQLLSFSSSHVYPSTTVVNPTLGGVVTSGDVRLHGQNHHHHQMHLVDKQDLFLGSSPTGYKEGKHLAFMQGDHTLNNQSPHLPGASVGPAQMFLRTSPYSESGGLRCKMFCDSLTGSAHGNTSRALSLLSSPPQPHSPGNGLNQMVNPHSPLMQPLGLSLHDNSLGSVDPVLGPNGSDHSSSMHHIGSNGSQVNEAPPLFPFQWE

SEQ ID NO: 51483 - DNA, 647 bp, Glycine max
  misc_feature (1)..(647): Ceres Seq. ID no. 13638509
aatcgaaaaactcacaaaacaatataacttaattgccttaaggaacgttcgagaccacagaggtttctctagtcttcttctgtggagagcttgttttctcttgttcattcatctcacttccaattaaggaacaagctttccaccaatttgaatcaccaatggctcgctctttctccaacctcaaggttctctctgctcttgtcgccgacggattctccaacactctcaccaggcgtgggtacgcagtagcgacacaaagcgcaacaagaggaggagcagcctccatcagcggcaagtcaggggaagacaaggtactaggaggaggtgctgaaaaggtttcgtgggtcccagaccctgtcactggttactacaaaccggagaacatcaaagagattgatgttgctgagctgagagccacggttttgggcaaaaaattcaaccactaggctctacttaatttcaataattaacctttttggtctcacgtgaatatgttatatgatatatgaagttcacagaaccttcggggattattcagcatggggtttttttcttgtatttctctcttgagaatttggactagcatatgaccaaattaatgtttactagtgtgattggatctcccgttgaaaactcaataaagtggg

SEQ ID NO: 51484 - protein, 95 aa, Glycine max
  peptide (1)..(95): Ceres Seq. ID no. 15220420
MARSFSNLKVLSALVADGFSNTLTRRGYAVATQSATRGGAASISGKSGEDKVLGGGAEKVSWVPDPVTGYYKPENIKEIDVAELRATVLGKKFNH

SEQ ID NO: 51485 - DNA, 1546 bp, Glycine max
  misc_feature (1)..(1546): Ceres Seq. ID no. 15171355
agcattaacatgtacattgagtattccccttcccaatctcaaacggcaaaggtgccacatacatttcctgcttctcacctgatatttttccaatttgtttaatcttcctttcttttctctacccattttcttcttcttcttctcccctccttttttccttcttctaccagcttctagaacaaggatgtgcccatttcctgcttacttgaatctcaaacacaaaactgaatctttgacaacaatttcaagattttcccaccaacccaccacagcaaagcacctggtcgcttcaaagatctgatttttagttctttggggtggggtttctaccgtttttccttccaccattggcacctgcagcagaaccaaattttgaacaaccagaatggtcaacactttatggtcactttgtgtggtttaaacttgttggattcttggtgggtttagtttaatttttgactgaacgaatgagatcttgatgagggttggaaccagtttccttgcactgctctcactgttgccactgcttctttctcttcaattttcaagtgctcagcttccagctgacactgacaacatctcatcacgcacccttgatgccattctccaagattgcgcctttaaggcatttttgaggccaaaaactggggtaccctatgatggcaaagtgcccagaagcctaaatgggattagagtttcagcaatgaggctcaggagtggtagtttgaggacaagaggtgttgaaagctataaagagtttcagatcccaattggggtttttgaacagccttatgtagagaggctggtttttgtgtaccataacttaggcaattggtctgagaagttttatcctttgcctggttacatatatttggctcctgttttaggtctaatgtcatatagtggtgccaatttgtctgattctgagttgcctgaattggacataagagcttctgataagccaattttgatcaagttccctcatgtggaatcagcaccattagggtcagtgccaacgtgtgtgtactttgatctacatggttcagtgcaatttgacatcctattacatgggaatgtttgttcaactttccaacaagggcacttctctattgttgtggagtctaatgccccttccccagcacctgctgctgttgctgttgctgctgatgttgggagaagtggtagtgggaggaacaattccatggtgtggataattgttgcatctttggttggtggatgcttcttgttgattatgttgagtttattggttgctaaagtgaggagaaccagacaagggatgaagatccagcaattggaatgggcagctgagagcaatgaaactttgcagattgcatctattgggggcaccaaagcaccattggcaatagggactcgcacaagaccaaccattgaaaatgattacataccttagatttgagggattcttgtaggaccaatttttttcttttttttttcttcttgcttggtattgtaatttttgtgttcatacttgataatgagttaaaaaaaaattctttccttgtcc

SEQ ID NO: 51486 - protein, 317 aa, Glycine max
  peptide (1)..(317): Ceres Seq. ID no. 15171356
MRVGTSFLALLSLLPLLLSLQFSSAQLPADTDNISSRTLDAILQDCAFKAFLRPKTGVPYDGKVPRSLNGIRVSAMRLRSGSLRTRGVESYKEFQIPIGVFEQPYVERLVFVYHNLGNWSEKFYPLPGYIYLAPVLGLMSYSGANLSDSELPELDIRASDKPILIKFPHVESAPLGSVPTCVYFDLHGSVQFDILLHGNVCSTFQQGHFSIVVESNAPSPAPAAVAVAADVGRSGSGRNNSMVWIIVASLVGGCFLLIMLSLLVAKVRRTRQGMKIQQLEWAAESNETLQIASIGGTKAPLAIGTRTRPTIENDYIP

SEQ ID NO: 51487 - protein, 242 aa, Glycine max
  peptide (1)..(242): Ceres Seq. ID no. 15171357
MRLRSGSLRTRGVESYKEFQIPIGVFEQPYVERLVFVYHNLGNWSEKFYPLPGYIYLAPVLGLMSYSGANLSDSELPELDIRASDKPILIKFPHVESAPLGSVPTCVYFDLHGSVQFDILLHGNVCSTFQQGHFSIVVESNAPSPAPAAVAVAADVGRSGSGRNNSMVWIIVASLVGGCFLLIMLSLLVAKVRRTRQGMKIQQLEWAAESNETLQIASIGGTKAPLAIGTRTRPTIENDYIP

SEQ ID NO: 51488 - protein, 179 aa, Glycine max
  peptide (1)..(179): Ceres Seq. ID no. 15171358
MSYSGANLSDSELPELDIRASDKPILIKFPHVESAPLGSVPTCVYFDLHGSVQFDILLHGNVCSTFQQGHFSIVVESNAPSPAPAAVAVAADVGRSGSGRNNSMVWIIVASLVGGCFLLIMLSLLVAKVRRTRQGMKIQQLEWAAESNETLQIASIGGTKAPLAIGTRTRPTIENDYIP

SEQ ID NO: 51489 - DNA, 1154 bp, Glycine max
  misc_feature (1)..(1154): Ceres Seq. ID no. 12582736
aactatttcagttgttcggctggctataaaatcctcttaaccagttgttgctgctgcgttgcacttcagtttacagctcccgaaaatggctcctccaagaggtcgtggtggttttggtggtggcggtgggttcaggggtggtggtaggggtgacagaggcagaggaaggggcggtggaggaagaggaggagacaggggcactcccttcaaagctagaggaggtggcagaggtggtggtggccgtggcggaggcaggggtggtggccgtggtggtggcagaggtggaatgaagggaggtagcaaggttgtggttcagccccatagacatgatggtattttcattgccaagggtaaagaagacgctcttgttactaagaatcttgttcctggtgaagctgtttacaatgagaaaaggattactgttcagaacgaagatggttccaaagatgagtacagagtttggaatccttttcgatccaagttggctgctgccatccttggtggagttgacaacatatggattaaacctggagccagagtcctttacctaggagctgcttctggaaccactgtttctcatgtatcagacgttgttggccctactggagttgtctatgcagtagaattttcccatagaagtggacgtgacctggttaatatggcaaagaagcgaactaatgttattcccattattgaagatgctagacatccagctaagtataggatgctggtcggaatggttgatgtcatattttctgatgttgctcagcccgatcaggcaaggattttggggctgaatgcttcatattatctgaaagcaggaggtcattttgttatttcaatcaaggctaactgcatagactccacagtccctgccgaggcagtgtttgaaagcgaagtgaacaagttgaaggcagatcaattcaaaccattcgagcaagtcacccttgaaccatttgagagggaccatgcctgtgtggttggtggatacagaatgcccaagaagaaaaaagatgctgctgagtagattgctttccggtagccagtaggcttaatgtcatttcaggagattgtgttaattttgttttgaaacctcggttatcaaacatactttgtaccttttctatagtagtaatgtagtcaagtttgccttc

SEQ ID NO: 51490 - protein, 313 aa, Glycine max
  peptide (1)..(313): Ceres Seq. ID no. 12582737
MAPPRGRGGFGGGGGFRGGGRGDRGRGRGGGGRGGDRGTPFKARGGGRGGGGRGGGRGGGRGGGRGGMKGGSKVVVQPHRHDGIFIAKGKEDALVTKNLVPGEAVYNEKRITVQNEDGSKDEYRVWNPFRSKLAAAILGGVDNIWIKPGARVLYLGAASGTTVSHVSDVVGPTGVVYAVEFSHRSGRDLVNMAKKRTNVIPIIEDARHPAKYRMLVGMVDVIFSDVAQPDQARILGLNASYYLKAGGHFVISIKANCIDSTVPAEAVFESEVNKLKADQFKPFEQVTLEPFERDHACVVGGYRMPKKKKDAAE

SEQ ID NO: 51491 - protein, 246 aa, Glycine max
  peptide (1)..(246): Ceres Seq. ID no. 12582738
MKGGSKVVVQPHRHDGIFIAKGKEDALVTKNLVPGEAVYNEKRITVQNEDGSKDEYRVWNPFRSKLAAAILGGVDNIWIKPGARVLYLGAASGTTVSHVSDVVGPTGVVYAVEFSHRSGRDLVNMAKKRTNVIPIIEDARHPAKYRMLVGMVDVIFSDVAQPDQARILGLNASYYLKAGGHFVISIKANCIDSTVPAEAVFESEVNKLKADQFKPFEQVTLEPFERDHACVVGGYRMPKKKKDAAE

SEQ ID NO: 51492 - DNA, 1223 bp, Glycine max
  misc_feature (1)..(1223): Ceres Seq. ID no. 15171370
actccttcctcttcctctctctcgtccattttagttgtaagactaagatctcatcttagattccattttgtctcttcattgcccccaaaataactttattttctctgaattattgcctacagcaactttgaataattctccttcgtatcaagtcttcctcatcttcaccacctttttatatttatgtgtctaagaacataaactaaaaaaccaaggcgagtgaaagaaaaaaaatgtcaggtgtgtctctagcagtgtctggtccaccagcagcaacagtggctgaagcagcaggtacaaagcctaaacgaagaacagaacaggcaccaatgggtggcatgatgggttcactgcgcgtgatagaacttcagctggtggccttcatcttggtgttctcagcaagtggcctcgtcccactccttgatctagtgttccctgcattcgcctctgcatacatcttggcactttcacaattcgcatttccatcggcgtcttcgtcggggactgagatcttcaaagggagcagattgttccgaatgtatgttgtttttggcaccaccgtggggctgttcttgccgctggcttacgtgcttggtgggtttgcaagaggggatgagcatgcagtgcgttctgccaccccgcacttgttcttgctatcgtttcagatactcactgagaacattattggtggtttgtctctgttttcgccacccgtgagggcgttggtgccaatcatctacacaattcggaggatctttgtggatattgattggattcatgatgtctggctcaacaagactttgcctgtcaatgccaaatttcaggacttggcatggtattggttcggaaagggtctggcagtggccaatctggcttatttctccattaatctatttgggttcttgatacccaggttccttccaagagcttttgagaggtatttccaagagaagggagagatctataccaagtcagcagaggataaaagatctgtggttgtcaacagaacccaattatcagaaaagaagacagattaagagctatagccaattttgacttcacttgcaattttaaacactttcagcattttttttccttagaaaatagtaatgaatgtgtatgatgatatgtgagcctggacttaaaaatctggctctccgttacattatgaaactatatatggcttttggataaattttatgtatcatacaggttaattcaat

SEQ ID NO: 51493 - protein, 267 aa, Glycine max
  peptide (1)..(267): Ceres Seq. ID no. 15171371
MSGVSLAVSGPPAATVAEAAGTKPKRRTEQAPMGGMMGSLRVIELQLVAFILVFSASGLVPLLDLVFPAFASAYILALSQFAFPSASSSGTEIFKGSRLFRMYVVFGTTVGLFLPLAYVLGGFARGDEHAVRSATPHLFLLSFQILTENIIGGLSLFSPPVRALVPIIYTIRRIFVDIDWIHDVWLNKTLPVNAKFQDLAWYWFGKGLAVANLAYFSINLFGFLIPRFLPRAFERYFQEKGEIYTKSAEDKRSVVVNRTQLSEKKTD

SEQ ID NO: 51494 - protein, 235 aa, Glycine max
  peptide (1)..(235): Ceres Seq. ID no. 15171372
MGGMMGSLRVIELQLVAFILVFSASGLVPLLDLVFPAFASAYILALSQFAFPSASSSGTEIFKGSRLFRMYVVFGTTVGLFLPLAYVLGGFARGDEHAVRSATPHLFLLSFQILTENIIGGLSLFSPPVRALVPIIYTIRRIFVDIDWIHDVWLNKTLPVNAKFQDLAWYWFGKGLAVANLAYFSINLFGFLIPRFLPRAFERYFQEKGEIYTKSAEDKRSVVVNRTQLSEKKTD

SEQ ID NO: 51495 - protein, 232 aa, Glycine max
  peptide (1)..(232): Ceres Seq. ID no. 15171373
MMGSLRVIELQLVAFILVFSASGLVPLLDLVFPAFASAYILALSQFAFPSASSSGTEIFKGSRLFRMYVVFGTTVGLFLPLAYVLGGFARGDEHAVRSATPHLFLLSFQILTENIIGGLSLFSPPVRALVPIIYTIRRIFVDIDWIHDVWLNKTLPVNAKFQDLAWYWFGKGLAVANLAYFSINLFGFLIPRFLPRAFERYFQEKGEIYTKSAEDKRSVVVNRTQLSEKKTD

SEQ ID NO: 51496 - DNA, 1061 bp, Glycine max
  misc_feature (1)..(1061): Ceres Seq. ID no. 13594515
ctagaacatcctaatcgaaaaatttttcaactttgcattcgtctagttgtggaatccttcttaatagtactgttttagaattgctaagatgaagtcaagttttgaagaattgaagaagaagaagaagaaaggcgaaggagagcattcgaaggcataaacataaagaaattgaagataatgcgaaccctttgcgacgtatgcgagagcgccgctgccattctcttctgcgccgctgatgaggccgctctctgctccgcttgtgaccacaagatccatatgtgtaacaaacttgctagtaggcatgttcgagttggccttgctgaccccactgatgttccacgctgtgacatatgtgaaaatgcacctgctttcttttactgtgagatagatggtagttcgctgtgtctgcaatgtgatatgattgtgcatgttggtggtaaaagaacccatggaagatatcttctattgaggcaaagagctcagtttccaggtgataaacctgcccaaatggaagaactagagctgcaacctatggatcaaaatgaatcgagaagggatgaaagtcagtcactcaagctaaaaacaagagatagtcagcagaatcacagtgtctcaccttttccaaggcaagaaaataatattgatggtcatggaaaaatggataaaaagttaattgatcttaataccaggccactgcggttaaatggatcagcaccaaacaaccaggaacaatgcatggatattttaagaggcaataatcatgaatctgccagtgtgccaccagtagaatccttcaaacaagagtctgagaagtaacaaaggtacaacatatagggtgtgccagtgtgggcagaggctacagaaatattatgtttactcaaatttcttttacactgttgaccttgtttatgtgaatcttgtttttttttttgcttaaaatttgaattgtttggctgcagacctaattaatgacggaaaatagttgctttcatatggatgagctgcataaacaaggttactactgcataaattcgagggtataacataaattgttgtccagg

SEQ ID NO: 51497 - protein, 212 aa, Glycine max
  peptide (1)..(212): Ceres Seq. ID no. 15221370
MRTLCDVCESAAAILFCAADEAALCSACDHKIHMCNKLASRHVRVGLADPTDVPRCDICENAPAFFYCEIDGSSLCLQCDMIVHVGGKRTHGRYLLLRQRAQFPGDKPAQMEELELQPMDQNESRRDESQSLKLKTRDSQQNHSVSPFPRQENNIDGHGKMDKKLIDLNTRPLRLNGSAPNNQEQCMDILRGNNHESASVPPVESFKQESEK

SEQ ID NO: 51498 - protein, 179 aa, Glycine max
  peptide (1)..(179): Ceres Seq. ID no. 15221371
MCNKLASRHVRVGLADPTDVPRCDICENAPAFFYCEIDGSSLCLQCDMIVHVGGKRTHGRYLLLRQRAQFPGDKPAQMEELELQPMDQNESRRDESQSLKLKTRDSQQNHSVSPFPRQENNIDGHGKMDKKLIDLNTRPLRLNGSAPNNQEQCMDILRGNNHESASVPPVESFKQESEK

SEQ ID NO: 51499 - protein, 132 aa, Glycine max
  peptide (1)..(132): Ceres Seq. ID no. 15221372
MIVHVGGKRTHGRYLLLRQRAQFPGDKPAQMEELELQPMDQNESRRDESQSLKLKTRDSQQNHSVSPFPRQENNIDGHGKMDKKLIDLNTRPLRLNGSAPNNQEQCMDILRGNNHESASVPPVESFKQESEK

SEQ ID NO: 51500 - DNA, 1847 bp, Glycine max
  misc_feature (1)..(1847): Ceres Seq. ID no. 15171430
aagtcaaccagttgtggttttctttcgtccccctctctcccttgatggtcaaaagtcaaaaaagcatgaagcttccaagatcacccacaaggcaatcacgttcacacacacagaaaacaaaagaaacaagctagactttggaacaggaagccagcatttgcattcaataaggctgttaaaaaccgcgcttgacagctaacccttcatgtggaaatagttcctttcacacttgcattgtttttttttttttttttctccttttcacgggctttctcttcttttcctctggcttcatcatctctcatctgcaccccttttgagaacttcaacttgttacctaattactctactccccctctcttgcttctgtgttcttcttcttcgcttctctcttcatggggtgctgcttaagtgccaggatcaaagctgagagccctccacgcaatggtttgagttcaaaggatggtaacaaggaagaagatggcttaagcagcaaggtctcaactccctccgatcctccaactccacggacggagggagagatcttgaagtcttcaaacatgaagagcttcaacttcagtgagctaaaaactgctacaaggaactttcgtccggatagtgtggtgggtgaaggtgggtttggttgtgtttttaaggggtggattgatgaacagacacttgcaccagttagaccagggactggcgtggtcattgctgttaagaggcttaaccaagaaggtctgcagggacacagtgaatggttgacagaaattaattatctggggcagctgcgtcatcctaatcttgtgaaactgattggttactgcttagaggacgatcaacggcttttggtgtatgagtttttgaccaaaggaagtttggataatcatttatttaggagagcttcttactttcaaccactttcttggaacttccgtatgaaggttgctcttgatgctgctaagggtcttgcatatcttcatagcgatgaagcaaaagtgatatatcgagacttcaaagcttcaaatatcttacttgattcgaattacaatgcaaaactttctgattttggcttggcaaaggatggaccagctggtgataagagccatgtctctacaagggtaatgggcacatatggctatgctgctcctgaatatatggccacaggtcacttgacaaagaagagtgatgtatacagcttcggggttgttctgcttgaaattatgtccggcaaacgtgcacttgacagcaacaggccaagtggggagcacaatttaattgaatgggccaaaccttacctcagcaacaagcgcaggatcttccaagtcatggatgcgcgcattgaaggccaatacacgttgcgcgaatcaatgaaagtagccaaccttgccattcaatgtctgtctgtggaaccaagatttagaccaaaaatggatgaagtggtgagagcattagaggaacttcaggattcagaagacagagctggaggggtgggaagctctcgagatcaaactgctagaaggagtggccatagctcaagcagcagtgggcctagacaacatagaggtagacaacatgaaacaacaaggaagtgaaaagtgaatgttgatttcatgctgtgatcatctgattttgctagagttggtacattgtatttacgtgtatcatgatgaacttaagcatggctctagatgtctgattgctgtacagttgttgattgagcaataatattgaaatcttcatttcttccgatacttctcttcccttcccacccatcatctatcgttgtaaaataggaatattttcttatgtcatgctatttattaatcagatgtggtgataagatg

SEQ ID NO: 51501 - protein, 399 aa, Glycine max
  peptide (1)..(399): Ceres Seq. ID no. 15171431
MGCCLSARIKAESPPRNGLSSKDGNKEEDGLSSKVSTPSDPPTPRTEGEILKSSNMKSFNFSELKTATRNFRPDSVVGEGGFGCVFKGWIDEQTLAPVRPGTGVVIAVKRLNQEGLQGHSEWLTEINYLGQLRHPNLVKLIGYCLEDDQRLLVYEFLTKGSLDNHLFRRASYFQPLSWNFRMKVALDAAKGLAYLHSDEAKVIYRDFKASNILLDSNYNAKLSDFGLAKDGPAGDKSHVSTRVMGTYGYAAPEYMATGHLTKKSDVYSFGVVLLEIMSGKRALDSNRPSGEHNLIEWAKPYLSNKRRIFQVMDARIEGQYTLRESMKVANLAIQCLSVEPRFRPKMDEVVRALEELQDSEDRAGGVGSSRDQTARRSGHSSSSSGPRQHRGRQHETTRK

SEQ ID NO: 51502 - protein, 344 aa, Glycine max
  peptide (1)..(344): Ceres Seq. ID no. 15171432
MKSFNFSELKTATRNFRPDSVVGEGGFGCVFKGWIDEQTLAPVRPGTGVVIAVKRLNQEGLQGHSEWLTEINYLGQLRHPNLVKLIGYCLEDDQRLLVYEFLTKGSLDNHLFRRASYFQPLSWNFRMKVALDAAKGLAYLHSDEAKVIYRDFKASNILLDSNYNAKLSDFGLAKDGPAGDKSHVSTRVMGTYGYAAPEYMATGHLTKKSDVYSFGVVLLEIMSGKRALDSNRPSGEHNLIEWAKPYLSNKRRIFQVMDARIEGQYTLRESMKVANLAIQCLSVEPRFRPKMDEVVRALEELQDSEDRAGGVGSSRDQTARRSGHSSSSSGPRQHRGRQHETTRK

SEQ ID NO: 51503 - protein, 218 aa, Glycine max
  peptide (1)..(218): Ceres Seq. ID no. 15171433
MKVALDAAKGLAYLHSDEAKVIYRDFKASNILLDSNYNAKLSDFGLAKDGPAGDKSHVSTRVMGTYGYAAPEYMATGHLTKKSDVYSFGVVLLEIMSGKRALDSNRPSGEHNLIEWAKPYLSNKRRIFQVMDARIEGQYTLRESMKVANLAIQCLSVEPRFRPKMDEVVRALEELQDSEDRAGGVGSSRDQTARRSGHSSSSSGPRQHRGRQHETTRK

SEQ ID NO: 51504 - DNA, 1365 bp, Glycine max
  misc_feature (1)..(1365): Ceres Seq. ID no. 14311890
cctttcctcctcttctgttcttttattctagggttacaaagttttccttccatacttgccggcagccgtgtggtcttgatagagcgacaccgtgccaccgcgccaccacccaaccttgcagccccaagtctgcgtttccgcagatccactgtccgcacataaaggtgtatactctgctcagttatatcatttgctaataattttcactatctttacgacgccgccaccgaccccaagcccgccgtctgcgccgcgcactccgacgccgcggcggcccatctgatcaagatcaacgggaggtttactcgttcgtgtcaagctcaaaggttgaaacaaacacgaaggcgctgaaacaaccctaagaagtaagaaccagattttatctccatacagtagaagtaaaacagtatattgtagccattcggttgagttcaaattgaaagagacaagatggccgggcaatcaaaccatgacctttcattgttttcagctgaggagcttgagttcattgctgaagatgagatcgtggacattgtacccaatctcaaaatgagtgctctcaatttcatttctggagattttggcccatttacgccccagattgttacccaagtaccactgtggttggccactgctctcaagaagagaggcaagtgctccatttgccctccccaatggatgtctgttgagaagttgagtcaagttttggaggcagagcgagactctcaagagatgtcagatcaattgccatttcattatgtggaaatctcaagacttctttttgatcatgcacgtgacaacattcctgatgtatatatggtgaggtctctaattgaggacatcagaaatgttcggtttcataaagttgaaactgatttggaagcatttaatggtcgtacaattgctgttaagattaaaaatttatctgcaatggaagtgaatattgttcgtccatttattggaagagctttacaggcattttataagcatgatagtccagagctgataccagacccagagagagtttctgataggcgcccccaagttatcaacaatgctccaagaagacaactacgaagatagtcattgtcacctattggtaacatctcttctagaatcataagcatttggcccgcttcaaaggggcatctttcatgagaaatacttcacaactttctttgctgctgacttcagtgtaaatgaatggcttgagacatggtcgaatcttcagaaagtaatgttctctcaaaatattctcataattatttgtcaagagtctgaaaaagcaaagcacttcatgggattaacatggccatgcccccatatactttatgttgttaattctattagtagtgttaagtattt

SEQ ID NO: 51505 - protein, 210 aa, Glycine max
  peptide (1)..(210): Ceres Seq. ID no. 14311891
MAGQSNHDLSLFSAEELEFIAEDEIVDIVPNLKMSALNFISGDFGPFTPQIVTQVPLWLATALKKRGKCSICPPQWMSVEKLSQVLEAERDSQEMSDQLPFHYVEISRLLFDHARDNIPDVYMVRSLIEDIRNVRFHKVETDLEAFNGRTIAVKIKNLSAMEVNIVRPFIGRALQAFYKHDSPELIPDPERVSDRRPQVINNAPRRQLRR

SEQ ID NO: 51506 - protein, 177 aa, Glycine max
  peptide (1)..(177): Ceres Seq. ID no. 14311892
MSALNFISGDFGPFTPQIVTQVPLWLATALKKRGKCSICPPQWMSVEKLSQVLEAERDSQEMSDQLPFHYVEISRLLFDHARDNIPDVYMVRSLIEDIRNVRFHKVETDLEAFNGRTIAVKIKNLSAMEVNIVRPFIGRALQAFYKHDSPELIPDPERVSDRRPQVINNAPRRQLRR

SEQ ID NO: 51507 - protein, 134 aa, Glycine max
  peptide (1)..(134): Ceres Seq. ID no. 14311893
MSVEKLSQVLEAERDSQEMSDQLPFHYVEISRLLFDHARDNIPDVYMVRSLIEDIRNVRFHKVETDLEAFNGRTIAVKIKNLSAMEVNIVRPFIGRALQAFYKHDSPELIPDPERVSDRRPQVINNAPRRQLRR

SEQ ID NO: 51508 - DNA, 1385 bp, Glycine max
  misc_feature (1)..(1385): Ceres Seq. ID no. 13581800
atactctattatcggccttcgtttcgttcgttagtttctcagtcgtttgttctgagatcaaccttgcatcaggtgtttctcttcacttcttcttttttccctttcacaaaaacttgaattgaaccatcaacgctcaatgccgaaccctaccaattccttctattcttctattccttcaattttctcaatattaacttgtatttggttcaaccaccatttgtttctccccctttaattcaatattctcttcacacttttttcggtttgaatccttgtgaataattgtttcgcttcaacttaatcatttcaatttgaaataaatagtacactgcgttggattctctaatgttttcataaatttccagggttagggaatggctgctatcttagctcggaaatcactccttgctcttcgtgcgcgccaattggctgtaagcggtcaagggctgcacagctcccaaaactatggccttcgattaagtgcacactcctactctaccaaaagagaggatgaagaaagggagcaactcgcaaaggaaatttcaaaggattggagttctgtttttgaacgtagcatcaacactctctttctcactgaaatggttcgaggtctaatgctgactctgaaatacttctttgaaacaaaagttacaatcaattatccatttgagaaaggccctttgagcccccgtttccggggtgaacatgcactccgacgatatccaacaggagaggaacgctgcattgcttgcaaactttgtgaagctatatgtcctgcacaagcaatcacaattgaggctgaggagcgagaagatggaagccgcaggacaactcggtatgatattgacatgaccaagtgcatttattgtggattttgtcaagaggcatgccctgttgatgcgattgttgaagggccaaactttgaatttgctacagagactcatgaggagcttttatatgacaaggagaagctgcttgaaaatggggaccgatgggagactgaaattgcagagaacctgagatctgaaagcctttaccgctgaaattttccatgtgatccttgcctgttgctttttgggtctaattgggcaatgataaataaaatgaccagtgaatggttttaaagagctgtatgcatacacaattgttacatcagtttttttttttcttttgtcaatgcttgcattgctgttaagtgtacaatattgatgacgtttatctccttgaaatcttgaacaaatgtggaaataattgaatttttcagcaaattgatgccctttcagcatactggcaacttgtaggcttgtagtcataattgatcctttgaaaatggaagcactgatgcagtgcagctttcagaatctaaattcattggggattcggtg

SEQ ID NO: 51509 - protein, 222 aa, Glycine max
  peptide (1)..(222): Ceres Seq. ID no. 13581801
MAAILARKSLLALRARQLAVSGQGLHSSQNYGLRLSAHSYSTKREDEEREQLAKEISKDWSSVFERSINTLFLTEMVRGLMLTLKYFFETKVTINYPFEKGPLSPRFRGEHALRRYPTGEERCIACKLCEAICPAQAITIEAEEREDGSRRTTRYDIDMTKCIYCGFCQEACPVDAIVEGPNFEFATETHEELLYDKEKLLENGDRWETEIAENLRSESLYR

SEQ ID NO: 51510 - protein, 147 aa, Glycine max
  peptide (1)..(147): Ceres Seq. ID no. 13581802
MVRGLMLTLKYFFETKVTINYPFEKGPLSPRFRGEHALRRYPTGEERCIACKLCEAICPAQAITIEAEEREDGSRRTTRYDIDMTKCIYCGFCQEACPVDAIVEGPNFEFATETHEELLYDKEKLLENGDRWETEIAENLRSESLYR

SEQ ID NO: 51511 - protein, 142 aa, Glycine max
  peptide (1)..(142): Ceres Seq. ID no. 13581803
MLTLKYFFETKVTINYPFEKGPLSPRFRGEHALRRYPTGEERCIACKLCEAICPAQAITIEAEEREDGSRRTTRYDIDMTKCIYCGFCQEACPVDAIVEGPNFEFATETHEELLYDKEKLLENGDRWETEIAENLRSESLYR

SEQ ID NO: 51512 - DNA, 1341 bp, Glycine max
  misc_feature (1)..(1341): Ceres Seq. ID no. 14311961
taatcgaaaattttttcttgttgccgccaccactcttctaatgtctagttctgagagcacaaacgcgagaactagaacagcgtcatggttttctaccccattctttgttatcgttctcccggtggccgtggctgcgcttctctaccggctcgaaccattcaagccggttcttttgccggtccagctgggccggtccaccgtggcggttccggctcgtaacggccacatgcaagatggatcggaacgtgtgggtgagggacacttggagggcccggaagacttggcctacgacgctgcggcacgtgtcgtttataccgggtgtgaggatgggtggatcaagcgagtcacggtgaatgactcggtggttgactcggcggttgaagattgggtcaacacaggaggaaggccacttggactagttttgaagccgaatggagaactcatagttgctgatgcggaaaagggactgctgagagtgtcaagtgagaaggagattgagttgctggtagatgagtttgaggggttaaaattcaaactcacagatggtgttgatatagcagatgatggtacaatttatttcacagatgcatcacacaaataccccgtgaaggatgctgtgtttgacgtcttagaagggaagccaaatggaagattcttcagctataatccagcaacaaagaagacaaccctgcttgcccaagacctctactttgccaatggggttgcagtttcagcagatcaacaatttgtggtcttctgtgaatctgtcttgatgagatgcaataaatatttcgtcctgggccctaaaacaggaaccatagagaagttctgtgacctgcctggcatgcctgataacattcattatgatggacaagggcactatttaattgcaatgttcacggccctttctcccgaattggaattggcatatagataccctttcattaggaaggcttttgcaatgtttacaaagtatgtagggagtctatctatctcgaagaatggaggagttctagtcgtggatttagaaggaaaaccaactgcacattattatgatcccaaattagcattgactagtgcgattaaaattgggaatcatatatatgctggttccattttctacccctttgtaacacgttttgatgttgagaaatatcctgctctccccacagtttgagcaacagtgaacatcttgtaaggttaatgatgtacaagaaaatgtttagtttctggagtgtcatgatgtgaaaatgtttagtttctggagtgtcatgatgtgaaaattccattcatgaatctgttatatatatttttatataataaaaatggaatttcttttac

SEQ ID NO: 51513 - protein, 391 aa, Glycine max
  peptide (1)..(391): Ceres Seq. ID no. 14311962
NRKFFLVAATTLLMSSSESTNARTRTASWFSTPFFVIVLPVAVAALLYRLEPFKPVLLPVQLGRSTVAVPARNGHMQDGSERVGEGHLEGPEDLAYDAAARVVYTGCEDGWIKRVTVNDSVVDSAVEDWVNTGGRPLGLVLKPNGELIVADAEKGLLRVSSEKEIELLVDEFEGLKFKLTDGVDIADDGTIYFTDASHKYPVKDAVFDVLEGKPNGRFFSYNPATKKTTLLAQDLYFANGVAVSADQQFVVFCESVLMRCNKYFVLGPKTGTIEKFCDLPGMPDNIHYDGQGHYLIAMFTALSPELELAYRYPFIRKAFAMFTKYVGSLSISKNGGVLVVDLEGKPTAHYYDPKLALTSAIKIGNHIYAGSIFYPFVTRFDVEKYPALPTV

SEQ ID NO: 51514 - protein, 378 aa, Glycine max
  peptide (1)..(378): Ceres Seq. ID no. 14311963
MSSSESTNARTRTASWFSTPFFVIVLPVAVAALLYRLEPFKPVLLPVQLGRSTVAVPARNGHMQDGSERVGEGHLEGPEDLAYDAAARVVYTGCEDGWIKRVTVNDSVVDSAVEDWVNTGGRPLGLVLKPNGELIVADAEKGLLRVSSEKEIELLVDEFEGLKFKLTDGVDIADDGTIYFTDASHKYPVKDAVFDVLEGKPNGRFFSYNPATKKTTLLAQDLYFANGVAVSADQQFVVFCESVLMRCNKYFVLGPKTGTIEKFCDLPGMPDNIHYDGQGHYLIAMFTALSPELELAYRYPFIRKAFAMFTKYVGSLSISKNGGVLVVDLEGKPTAHYYDPKLALTSAIKIGNHIYAGSIFYPFVTRFDVEKYPALPTV

SEQ ID NO: 51515 - protein, 316 aa, Glycine max
  peptide (1)..(316): Ceres Seq. ID no. 14311964
MQDGSERVGEGHLEGPEDLAYDAAARVVYTGCEDGWIKRVTVNDSVVDSAVEDWVNTGGRPLGLVLKPNGELIVADAEKGLLRVSSEKEIELLVDEFEGLKFKLTDGVDIADDGTIYFTDASHKYPVKDAVFDVLEGKPNGRFFSYNPATKKTTLLAQDLYFANGVAVSADQQFVVFCESVLMRCNKYFVLGPKTGTIEKFCDLPGMPDNIHYDGQGHYLIAMFTALSPELELAYRYPFIRKAFAMFTKYVGSLSISKNGGVLVVDLEGKPTAHYYDPKLALTSAIKIGNHIYAGSIFYPFVTRFDVEKYPALPTV

SEQ ID NO: 51516 - DNA, 1917 bp, Glycine max
  misc_feature (1)..(1917): Ceres Seq. ID no. 14311942
atctcatttcatttatctgggtagcggagccaaacaggcttacgcggaatctgactgctgcccgaagtcattctcagtaactgctaatcactgacacggtcagctaagctaagctaccccttctctctctaaaacctttgccattgtctcccacaacaccttacaacttacaacttcaatgtctgagtcaagactcatttatttataaccaccaccagctcaggtggcgcagccaaaccaaacccacaagaggttaagaacaagtagaataacaaaacccattcttcacctctctcccatcgtaataatgggtcagagcctgagttgcagtggcaaccatgaccacggcctcttcaccgccgtgctgcacggcgaccttcaaattgtcacaactctcttggattccgacccttctctcttgcaccaaacaactctctacgatcgccactctcctcttcatattgctgcagccaatggccagatcgagattctgtctaggctcttagatggatctcttaacccagatgttttaaatcgccacaaacagactccgcttatgttggcagcaatgcacgggaacatcgcctgtgtggagaagcttcttcaagccggagctaatgttttgatgtttgatactatttacgggagaacctgcttacactattccgcttactacggccattcttcttgccttaaggctattctttccgctgctcaatctagtccagtggctgcttcttgggggtttgctcggtttgtgaatattagagatggaaaaggtgcaacgccattgcacttggcggctcgtcagaggcggtctgaatgtgtacatattctattagacagtggagctcttgtttgtgcttcaactggtggatatggctgtcctgggagcactcctcttcatctagcagctagaggaggatctctggattgcattcgtgaattgttggcatggggtgcagatcgtcttcaacgcgatgcatctgggcgtataccatatatggttgcccttaaacacaaacatggagcctgtgcatcattgctaaatcctacatctgcagaacctcttgtctggccgtctccattgaagttcatcagtgagcttaatcctgaagccaaagctttattagagcaggccttgatggatgcaaacagagaaagagagaaaaacatattgaaagggagttcttactctctgccatctccatctcattctgatggggtagctgataatacgtctgaggttagtgaatccgaattatgttgcatctgctttgagcaggtgtgcacaattgaagttcagaactgtggccaccagatgtgtgcacaatgcacactagccctgtgttgccacaacaagcccaaccctgccactgcctgtcttactccaccagtttgtccattttgtcgaagcaccataacaagacttgttgttgtgaagacggaatgccacgatgaaactgatcaagacagtgttgatatcaactgttccaagctgagcaagtcatcaaggaaactcagaaacttgaatgacattggtagcagcagcttcaagggactatctagtgttagttcattcgggaaattgggtagccgcagctctggaaggattgctgcagagtggcttgataaacagtgatggcaatttgcaattacttgtggtaatcaatgattccatattggcaaagatacggtaactacaaaggtgcttaaccggcaaggcaaaaatcaaagttaaaagggaaaggaatattatgtaattttgggaaataagcaaagtgagttgaagtgaagttcgcggtaggtaccaagtgttgttgggaaaaaaagagaaggggatgtcatgttgtagtagtattattattacttgagaatgaagaagcatcacctgcgtcgatgattttgggcatcgtc

SEQ ID NO: 51517 - protein, 444 aa, Glycine max
  peptide (1)..(444): Ceres Seq. ID no. 14311943
MGQSLSCSGNHDHGLFTAVLHGDLQIVTTLLDSDPSLLHQTTLYDRHSPLHIAAANGQIEILSRLLDGSLNPDVLNRHKQTPLMLAAMHGNIACVEKLLQAGANVLMFDTIYGRTCLHYSAYYGHSSCLKAILSAAQSSPVAASWGFARFVNIRDGKGATPLHLAARQRRSECVHILLDSGALVCASTGGYGCPGSTPLHLAARGGSLDCIRELLAWGADRLQRDASGRIPYMVALKHKHGACASLLNPTSAEPLVWPSPLKFISELNPEAKALLEQALMDANREREKNILKGSSYSLPSPSHSDGVADNTSEVSESELCCICFEQVCTIEVQNCGHQMCAQCTLALCCHNKPNPATACLTPPVCPFCRSTITRLVVVKTECHDETDQDSVDINCSKLSKSSRKLRNLNDIGSSSFKGLSSVSSFGKLGSRSSGRIAAEWLDKQ

SEQ ID NO: 51518 - protein, 361 aa, Glycine max
  peptide (1)..(361): Ceres Seq. ID no. 14311944
MLAAMHGNIACVEKLLQAGANVLMFDTIYGRTCLHYSAYYGHSSCLKAILSAAQSSPVAASWGFARFVNIRDGKGATPLHLAARQRRSECVHILLDSGALVCASTGGYGCPGSTPLHLAARGGSLDCIRELLAWGADRLQRDASGRIPYMVALKHKHGACASLLNPTSAEPLVWPSPLKFISELNPEAKALLEQALMDANREREKNILKGSSYSLPSPSHSDGVADNTSEVSESELCCICFEQVCTIEVQNCGHQMCAQCTLALCCHNKPNPATACLTPPVCPFCRSTITRLVVVKTECHDETDQDSVDINCSKLSKSSRKLRNLNDIGSSSFKGLSSVSSFGKLGSRSSGRIAAEWLDKQ

SEQ ID NO: 51519 - protein, 357 aa, Glycine max
  peptide (1)..(357): Ceres Seq. ID no. 14311945
MHGNIACVEKLLQAGANVLMFDTIYGRTCLHYSAYYGHSSCLKAILSAAQSSPVAASWGFARFVNIRDGKGATPLHLAARQRRSECVHILLDSGALVCASTGGYGCPGSTPLHLAARGGSLDCIRELLAWGADRLQRDASGRIPYMVALKHKHGACASLLNPTSAEPLVWPSPLKFISELNPEAKALLEQALMDANREREKNILKGSSYSLPSPSHSDGVADNTSEVSESELCCICFEQVCTIEVQNCGHQMCAQCTLALCCHNKPNPATACLTPPVCPFCRSTITRLVVVKTECHDETDQDSVDINCSKLSKSSRKLRNLNDIGSSSFKGLSSVSSFGKLGSRSSGRIAAEWLDKQ

SEQ ID NO: 51520 - DNA, 1714 bp, Glycine max
  misc_feature (1)..(1714): Ceres Seq. ID no. 15171442
gaatgaatagggagtgttggcgaagtagatctgaaaggtgaagaatttgagtaggtaaaacccaaagttttcaactttgaatcaaagggtcatcaaatgctttaacgttttggttttttctgccttccgacactctaagaaaatgccgcacccttctttccacaagcttcttctaccctccactgtccaacccaaccaacaactgaggcttccggataattttatgaggaaatatgggggtgaactctctccaattgttaccctctctgttcctgatggtagtgtctggcatgtaggattgaaaaaagcagacaacaagtattgtttccttgatggttggaaagagtttgttcaacgctattccattggtgttggatacttgttggtattcagatacgaaggaaagtcatctttcaatgtccatatttttaatttggctacttctgagataaactatcaatcagtcacacgaagcagtaatgaagggcttcacttcacaaattgtcttaaattttttgaagaaatggaaggtgaagattccattgaaatctcggattcatcaccctcccacctttcacccagttcattgcaaaatcaagctcttgctggatcagtagataaaatgatgcccggaaagagttataatacacctccagcattgcagaatctgttcaatggatctaaacttaatagcataaactggggagaaggtggtaatgcccattcttcaagaagtgccaattcactagataatcgattgaccagagacataggacttcagtttaatgcagtcgagtttaaaagatctactgaagaattgaaattgcgtgcttccatcgaggaaaggatgaaaaaaactacaagaaagaagcgaaaatcagatggccaggaaccctctgctgggcacgaagaggaggtagaaatgcgctttagattttatgaaagtgcttctgcaagaaaaagaactgtgacagctgaagaaagagagagggtcatcaacgaagcaaaagcatttgaaccatctaatcctttctgtcgagttgtcctgcggccctcatatttatataggggatgcataatgtatctgccatcatgctttgcagagaagcatttgaatggagtttcagggtttattaaacttcagatctctaatggtagacagtggccggttcgctgcctttataaaggaggtagagccaagttaagccaggggtggtttgaattttcattagagaacaatttaggggaaggtgatgtctgtgtgtttgagctgcttagaatgaaagaagtagtgctgcaagttaccatctttcatgttaccgaggatgtgggactgttgagccctcctttgcagcataaccaaaacatgacctcagctaaactgttaagcactcccttgcagcaacacctcacttcaactaaaatggttagaaattagcagcaggttcattctcgatagctcaactgtatcaaaataaccccttgcttctgtgtggaacttagatgctttttctgtccaaaatttcagggtgacttgagtggaacatagttatagtttttataccttttctttcccttttgacttgggttgtaaatagattgttcaatctagctgattaggaaccgagtcaatgcttgtcctattgtgtatcttggttttaattttttttttttttctgtttgaagataaattatatagcttcttctgcctgac

SEQ ID NO: 51521 - protein, 431 aa, Glycine max
  peptide (1)..(431): Ceres Seq. ID no. 15171443
MPHPSFHKLLLPSTVQPNQQLRLPDNFMRKYGGELSPIVTLSVPDGSVWHVGLKKADNKYCFLDGWKEFVQRYSIGVGYLLVFRYEGKSSFNVHIFNLATSEINYQSVTRSSNEGLHFTNCLKFFEEMEGEDSIEISDSSPSHLSPSSLQNQALAGSVDKMMPGKSYNTPPALQNLFNGSKLNSINWGEGGNAHSSRSANSLDNRLTRDIGLQFNAVEFKRSTEELKLRASIEERMKKTTRKKRKSDGQEPSAGHEEEVEMRFRFYESASARKRTVTAEERERVINEAKAFEPSNPFCRVVLRPSYLYRGCIMYLPSCFAEKHLNGVSGFIKLQISNGRQWPVRCLYKGGRAKLSQGWFEFSLENNLGEGDVCVFELLRMKEVVLQVTIFHVTEDVGLLSPPLQHNQNMTSAKLLSTPLQQHLTSTKMVRN

SEQ ID NO: 51522 - protein, 404 aa, Glycine max
  peptide (1)..(404): Ceres Seq. ID no. 15171444
MRKYGGELSPIVTLSVPDGSVWHVGLKKADNKYCFLDGWKEFVQRYSIGVGYLLVFRYEGKSSFNVHIFNLATSEINYQSVTRSSNEGLHFTNCLKFFEEMEGEDSIEISDSSPSHLSPSSLQNQALAGSVDKMMPGKSYNTPPALQNLFNGSKLNSINWGEGGNAHSSRSANSLDNRLTRDIGLQFNAVEFKRSTEELKLRASIEERMKKTTRKKRKSDGQEPSAGHEEEVEMRFRFYESASARKRTVTAEERERVINEAKAFEPSNPFCRVVLRPSYLYRGCIMYLPSCFAEKHLNGVSGFIKLQISNGRQWPVRCLYKGGRAKLSQGWFEFSLENNLGEGDVCVFELLRMKEVVLQVTIFHVTEDVGLLSPPLQHNQNMTSAKLLSTPLQQHLTSTKMVRN

SEQ ID NO: 51523 - protein, 304 aa, Glycine max
  peptide (1)..(304): Ceres Seq. ID no. 15171445
MEGEDSIEISDSSPSHLSPSSLQNQALAGSVDKMMPGKSYNTPPALQNLFNGSKLNSINWGEGGNAHSSRSANSLDNRLTRDIGLQFNAVEFKRSTEELKLRASIEERMKKTTRKKRKSDGQEPSAGHEEEVEMRFRFYESASARKRTVTAEERERVINEAKAFEPSNPFCRVVLRPSYLYRGCIMYLPSCFAEKHLNGVSGFIKLQISNGRQWPVRCLYKGGRAKLSQGWFEFSLENNLGEGDVCVFELLRMKEVVLQVTIFHVTEDVGLLSPPLQHNQNMTSAKLLSTPLQQHLTSTKMVRN

SEQ ID NO: 51524 - DNA, 1112 bp, Glycine max
  misc_feature (1)..(1112): Ceres Seq. ID no. 12609304
atcaagtcttgatttcatatggaagagtcctccaaggcggttgaggttgagcaggaagcaagtgaagcaaaggctcctcacgaggctttgtttcttgtcttgtcatatcttcctgtgtacgaggttgtggtcatgtctcaagtctgcacatcactaagggatgcagtgaacaatgacatattactatggttgaatgttattgttcaaaggcccctcagttggcgactcaacgatgagattctaatcaaaatcacctcaaaggccaatggtaggctcaaaactctcgctctcatcaactgcatgcacgttaccgaccacggcctccaaagggtcgttcaacaaaatcctctcattaacaagttgcatataccagcatgcactggcataacccctgaaggagttctaggagccgtgaaaacactatgccaaagaagcaattgcttaaagaccttaagtataaacggcatctacaacatacagaaggagcatcttgacatgcttatcatgaaccttggaaagaatcaaccactagaggagcagcaaaagcagcagcagcctgtctactatcatgaacgatgtagcttttcagtattcaagcaggaagaaagctggcggcttattgatttggagatatgtcccaggtgctttgaggtgaggatggtttatgattgccccaaagagcactgcacgagaagggaatggcccctagctccatgtaggggttgcaatttttgtattccaaggtgcgaaaactgtggtggatgcattgaatccggagaagtggaagagggagcttgtgaagatatcttctgccttgaatgttggttacagcttcccaagtgcagtttctgcaacaaaccatattgtaagcaacacacaaactggtggtgcacttcttcagactcttcattgatctgtaaagtttgtgatgaaaattctcacggatatacgtatactgatgttctataatgacgtgcaacttgggataagtttcaactatcatgcatcaagccatcaagtaagtttatagatgatgaatgattatattatttgcattcatgaatgtacttaaagtttgattgttctggattataaaatgaaggtttttctct

SEQ ID NO: 51525 - protein, 316 aa, Glycine max
  peptide (1)..(316): Ceres Seq. ID no. 12609305
MEESSKAVEVEQEASEAKAPHEALFLVLSYLPVYEVVVMSQVCTSLRDAVNNDILLWLNVIVQRPLSWRLNDEILIKITSKANGRLKTLALINCMHVTDHGLQRVVQQNPLINKLHIPACTGITPEGVLGAVKTLCQRSNCLKTLSINGIYNIQKEHLDMLIMNLGKNQPLEEQQKQQQPVYYHERCSFSVFKQEESWRLIDLEICPRCFEVRMVYDCPKEHCTRREWPLAPCRGCNFCIPRCENCGGCIESGEVEEGACEDIFCLECWLQLPKCSFCNKPYCKQHTNWWCTSSDSSLICKVCDENSHGYTYTDVL

SEQ ID NO: 51526 - protein, 278 aa, Glycine max
  peptide (1)..(278): Ceres Seq. ID no. 12609306
MSQVCTSLRDAVNNDILLWLNVIVQRPLSWRLNDEILIKITSKANGRLKTLALINCMHVTDHGLQRVVQQNPLINKLHIPACTGITPEGVLGAVKTLCQRSNCLKTLSINGIYNIQKEHLDMLIMNLGKNQPLEEQQKQQQPVYYHERCSFSVFKQEESWRLIDLEICPRCFEVRMVYDCPKEHCTRREWPLAPCRGCNFCIPRCENCGGCIESGEVEEGACEDIFCLECWLQLPKCSFCNKPYCKQHTNWWCTSSDSSLICKVCDENSHGYTYTDVL

SEQ ID NO: 51527 - protein, 222 aa, Glycine max
  peptide (1)..(222): Ceres Seq. ID no. 12609307
MHVTDHGLQRVVQQNPLINKLHIPACTGITPEGVLGAVKTLCQRSNCLKTLSINGIYNIQKEHLDMLIMNLGKNQPLEEQQKQQQPVYYHERCSFSVFKQEESWRLIDLEICPRCFEVRMVYDCPKEHCTRREWPLAPCRGCNFCIPRCENCGGCIESGEVEEGACEDIFCLECWLQLPKCSFCNKPYCKQHTNWWCTSSDSSLICKVCDENSHGYTYTDVL

SEQ ID NO: 51528 - DNA, 1374 bp, Glycine max
  misc_feature (1)..(1374): Ceres Seq. ID no. 15224418
aaaggaacaaattactattttagtgacaaaatcaattggattttgaaaaatctgccttaaaaatgatttgtaccaaaatttatgatccttaaccacggagaacacttttttacattgtaaatttgtaattgcatggaaatgaaactttgaaaattatccttataaaataattatttaatttataatttataaaagtaaaaaataattttaatttgaaaagtataatatgaacacgacagggtttctttccgaagagaagagaagagagatctgagagaagcagagctgaagaggtgaagtgaagatgatgtccggaaaatatacgtcgattgacgcgcagcagcttcagggatctgttcctgccgttccagattcacgacccgccaccgtcaatttcgcagattcaaatcttcagacttttcctccttctggagctcagggcaagatcaccgctgcttccgggcctcctcgtgacgctgatgattcattttcaaaacctgtatctggttctgatgaaccgcagcagggtggttggtttcagacttttacaattgctgcttacaaaccatactttgatgttgacacttcagatgttctagagaggattatcgactcactatttccatttagaggatctttcaatgaaaaaactgctaccaaccctgatttgtatggtccattctggatttgcactaccttgatatttgtagcggcatctattggcacctttgtgacatacatagcgcacaagctaaagagcaaagaatgggattatgacataaatctggtgacttggtctgctggtttgttttatggctatgttaccattgttcctctttgcctgtatgtaatcctcaaatatttctctgcaccggctggccttgtgcaactattctgtctgtatgggtattccctgtttgtctttattccagccctgtgtatgtccgttgtgccactggatatatttagatgggtggttgcaggtgtggcagggttcatgtcagcaacatttgtggcactgaacctccgggcacatatcaaatcagcaggtgaaaggtggttcttgattgttgctggcatttttctgttgcagctggctctagctgtggtactaaagctttacctcttcactgtatcagtttaagaggaaactggacagtatggatgaaatatacagaatgaaggtatagctttttggcattgtaggttttcatggatacaatttgtagctgaagcatgattcacagattaaaccatcgtgtattcattcttttgttgcaatatagaggcgaataacttgtgatcatcataaaagcacttgtctttgacgttgttaatgcaagttataatgcaggcttctgtgattcttttgtt

SEQ ID NO: 51529 - protein, 279 aa, Glycine max
  peptide (1)..(279): Ceres Seq. ID no. 15224419
MMSGKYTSIDAQQLQGSVPAVPDSRPATVNFADSNLQTFPPSGAQGKITAASGPPRDADDSFSKPVSGSDEPQQGGWFQTFTIAAYKPYFDVDTSDVLERIIDSLFPFRGSFNEKTATNPDLYGPFWICTTLIFVAASIGTFVTYIAHKLKSKEWDYDINLVTWSAGLFYGYVTIVPLCLYVILKYFSAPAGLVQLFCLYGYSLFVFIPALCMSVVPLDIFRWVVAGVAGFMSATFVALNLRAHIKSAGERWFLIVAGIFLLQLALAVVLKLYLFTVSV

SEQ ID NO: 51530 - protein, 278 aa, Glycine max
  peptide (1)..(278): Ceres Seq. ID no. 15224420
MSGKYTSIDAQQLQGSVPAVPDSRPATVNFADSNLQTFPPSGAQGKITAASGPPRDADDSFSKPVSGSDEPQQGGWFQTFTIAAYKPYFDVDTSDVLERIIDSLFPFRGSFNEKTATNPDLYGPFWICTTLIFVAASIGTFVTYIAHKLKSKEWDYDINLVTWSAGLFYGYVTIVPLCLYVILKYFSAPAGLVQLFCLYGYSLFVFIPALCMSVVPLDIFRWVVAGVAGFMSATFVALNLRAHIKSAGERWFLIVAGIFLLQLALAVVLKLYLFTVSV

SEQ ID NO: 51531 - DNA, 1239 bp, Glycine max
  misc_feature (1)..(1239): Ceres Seq. ID no. 13638540
aaaacaaaaacccctcgtccgctccaaaaccctaaaacctgaaagcatacgctacttctgcttcgttgcgatgttggaaatcaaaaccgccaagacccgcaagggcaagcgggagctagagaaacgcgctcccaagctcgtggaatcggggaagaagacgctgatcctgcacggaacgaagaccagcggcgtgctgaacgccgtgctggcgcagatttatcacctgaagaaggactgtgccgtcaagtacagccgcaggaacgagaacgtcaagcccttcgaggccggcggcgagacttcgcttgagttcttctctctcaaaaccgattgcagtatctttgtgtatggatctcactcgaagaagcggcctgataaccttgttattgggagaacttatgatcatcatatctatgatttagtggaggttggagttgaaaattttaaacccatggagtcttttagttatgataagaagttggctcctaaggaagggtcaaagccttttattgtttttattggagaaggatttgaggctgtggaagagctaaagcatttgaaggaagttttgctcgatcttcttcgcggtgaggttgtggagaatctaaatcttgctggagtggatcgtgcatatgtatgtgctgccctttctccgaatcgtgtgttttttacacactgtgcattgcggctgaaaaagtcaggcaccgttgtgccaaggatggaattggaagaagttggcccgtccatggattttgttcttcgtaggcatcgtcctcctaatgaaagtttgaggaaggaagcactgaaaacgtcgagggagaagccgaagaaaaaggagaagaatgttaaaaaggatgaattacagggaaagattggaagtatttatatcccagatcagaaggttggagaaactcctttaccttacaaagcaaaaggagtgaagagggagcgccgagaatcgaagcggaaaaatgagagtgatggaagtgcttcaaaacggaagaaggaagattcttaatacttacaaattacacttgttgtctttccctggcatctgattataatagaatgatcaattgtagatcatatgatattaaactgcatgttgtttaggtgtcatgaatattcatgattttcccctataagggggggttttgccatcattttattcagcgtatttttttccccttcatattttgccaagttgaaatgcagtcctttgaaccatgagtcttagctttt

SEQ ID NO: 51532 - protein, 337 aa, Glycine max
  peptide (1)..(337): Ceres Seq. ID no. 13638541
KQKPLVRSKTLKPESIRYFCFVAMLEIKTAKTRKGKRELEKRAPKLVESGKKTLILHGTKTSGVLNAVLAQIYHLKKDCAVKYSRRNENVKPFEAGGETSLEFFSLKTDCSIFVYGSHSKKRPDNLVIGRTYDHHIYDLVEVGVENFKPMESFSYDKKLAPKEGSKPFIVFIGEGFEAVEELKHLKEVLLDLLRGEVVENLNLAGVDRAYVCAALSPNRVFFTHCALRLKKSGTVVPRMELEEVGPSMDFVLRRHRPPNESLRKEALKTSREKPKKKEKNVKKDELQGKIGSIYIPDQKVGETPLPYKAKGVKRERRESKRKNESDGSASKRKKEDS

SEQ ID NO: 51533 - protein, 314 aa, Glycine max
  peptide (1)..(314): Ceres Seq. ID no. 13638542
MLEIKTAKTRKGKRELEKRAPKLVESGKKTLILHGTKTSGVLNAVLAQIYHLKKDCAVKYSRRNENVKPFEAGGETSLEFFSLKTDCSIFVYGSHSKKRPDNLVIGRTYDHHIYDLVEVGVENFKPMESFSYDKKLAPKEGSKPFIVFIGEGFEAVEELKHLKEVLLDLLRGEVVENLNLAGVDRAYVCAALSPNRVFFTHCALRLKKSGTVVPRMELEEVGPSMDFVLRRHRPPNESLRKEALKTSREKPKKKEKNVKKDELQGKIGSIYIPDQKVGETPLPYKAKGVKRERRESKRKNESDGSASKRKKEDS

SEQ ID NO: 51534 - protein, 188 aa, Glycine max
  peptide (1)..(188): Ceres Seq. ID no. 13638543
MESFSYDKKLAPKEGSKPFIVFIGEGFEAVEELKHLKEVLLDLLRGEVVENLNLAGVDRAYVCAALSPNRVFFTHCALRLKKSGTVVPRMELEEVGPSMDFVLRRHRPPNESLRKEALKTSREKPKKKEKNVKKDELQGKIGSIYIPDQKVGETPLPYKAKGVKRERRESKRKNESDGSASKRKKEDS

SEQ ID NO: 51535 - DNA, 1658 bp, Glycine max
  misc_feature (1)..(1658): Ceres Seq. ID no. 15176223
ttttccaattcgagagcttcggaataaacctgaagctaacgaaccaaccataaaccctatctatggccaccctcgacccaatccaaaacggcgtctcttcggacaatccagccgccgaaccgtcctccacccccgccgaagaccccaccccagaccccgccgccgccgagaagcggtggccggggtggcctggccactgcgttttccgcctaatcgtgccggtgctcaaggtcggtagcatcatcggccgcaagggggagctcatcaagaagacctgcgaggaaacgaaagctcgcattcgagtcctcgacggcgccgtcggcacctccgatcgaatcgtactcatatcagggaaggaagagccggaggcacctctttctcctgcaatgaatgctgtaataagggtttttaaacgtgtctctgggttttctgaaattgatgccgagaataaagcatcagcagttgcattttgttctgtccgtttattggtggcctcaacacaggctataaatttgattggaaagcagggttcattaattaaatctatacaggaaaataccggtgcttctgttagagtgctgtctggagatgaggttcccttttatgctgctgcggacgagaggatcgtggaactacagggagaagccatgaaggtccttaaggctttagaagcagtagttgggcacctgaggaagtttttggttgataatagtgttcttcccttatttgagaaaacttacaatgcaacaatctcccaagagcaccaggcagatactacctgggttgataaaccatcactgcatagtgcttcacaacctagcattgtaactgatcttcctctttcaacaaaaagggattctctctttgctgaccgtgaaagtcagttggactcattgctccctccttccacaatgtcaatatatgggcaagattcttcactttctggtcttcgttcttcggctctcagtcgacccagtgctcctcctattgttacaacggtaatacaaaccatgcaaataccattgtcctatgcagaggacataattggtatacaagggactaatattgaatacattcgctgtactagtggagccatattgactgttcaggagagcccggtgcctgatgaaatcattgtggaaataaaaggtacctcatctcaggttcaaacggcacaacagttgattcaggaagttataagtaatcacaaagaacctcttgctagtaattacagcaggttagatacaggcctgaggtcttcttaccctcagttgggcagttcatcgtattcctcatcttccttgtcctcgcaaccctatagcggtgggtacggatcttctggtcttggaggctataggactttcagactttgaatttagtctctaggtctcacactgacttcatttgttctaattgggtctgatttgagagtcgatgctggaatgtattatggagccaccaaaatcacgtttttattatctgttatcatcatcataattgggtaatcttcgatgtggccaaagagttgagtagtgccatagaaaatgtaatgaaatattaaccatttccaggatgtttagtttgtagtgtatatgtgcattgatttaaagcttaatcgtggaatctataggggcatgaagctatgttatatttatttt

SEQ ID NO: 51536 - protein, 436 aa, Glycine max
  peptide (1)..(436): Ceres Seq. ID no. 15176224
MATLDPIQNGVSSDNPAAEPSSTPAEDPTPDPAAAEKRWPGWPGHCVFRLIVPVLKVGSIIGRKGELIKKTCEETKARIRVLDGAVGTSDRIVLISGKEEPEAPLSPAMNAVIRVFKRVSGFSEIDAENKASAVAFCSVRLLVASTQAINLIGKQGSLIKSIQENTGASVRVLSGDEVPFYAAADERIVELQGEAMKVLKALEAVVGHLRKFLVDNSVLPLFEKTYNATISQEHQADTTWVDKPSLHSASQPSIVTDLPLSTKRDSLFADRESQLDSLLPPSTMSIYGQDSSLSGLRSSALSRPSAPPIVTTVIQTMQIPLSYAEDIIGIQGTNIEYIRCTSGAILTVQESPVPDEIIVEIKGTSSQVQTAQQLIQEVISNHKEPLASNYSRLDTGLRSSYPQLGSSSYSSSSLSSQPYSGGYGSSGLGGYRTFRL

SEQ ID NO: 51537 - protein, 328 aa, Glycine max
  peptide (1)..(328): Ceres Seq. ID no. 15176225
MNAVIRVFKRVSGFSEIDAENKASAVAFCSVRLLVASTQAINLIGKQGSLIKSIQENTGASVRVLSGDEVPFYAAADERIVELQGEAMKVLKALEAVVGHLRKFLVDNSVLPLFEKTYNATISQEHQADTTWVDKPSLHSASQPSIVTDLPLSTKRDSLFADRESQLDSLLPPSTMSIYGQDSSLSGLRSSALSRPSAPPIVTTVIQTMQIPLSYAEDIIGIQGTNIEYIRCTSGAILTVQESPVPDEIIVEIKGTSSQVQTAQQLIQEVISNHKEPLASNYSRLDTGLRSSYPQLGSSSYSSSSLSSQPYSGGYGSSGLGGYRTFRL

SEQ ID NO: 51538 - protein, 241 aa, Glycine max
  peptide (1)..(241): Ceres Seq. ID no. 15176226
MKVLKALEAVVGHLRKFLVDNSVLPLFEKTYNATISQEHQADTTWVDKPSLHSASQPSIVTDLPLSTKRDSLFADRESQLDSLLPPSTMSIYGQDSSLSGLRSSALSRPSAPPIVTTVIQTMQIPLSYAEDIIGIQGTNIEYIRCTSGAILTVQESPVPDEIIVEIKGTSSQVQTAQQLIQEVISNHKEPLASNYSRLDTGLRSSYPQLGSSSYSSSSLSSQPYSGGYGSSGLGGYRTFRL

SEQ ID NO: 51539 - DNA, 1480 bp, Glycine max
  misc_feature (1)..(1480): Ceres Seq. ID no. 14311922
acttttcctttcatccttgagaccttgacactttcactttctcgcataacccttaaggtgccgcagatacgggcacagcctccctcccttgcgagtcttacaccgtcataagtcacggttgtcatcggagctcttgcggttgctcctcacagtcacagattgttaaaaattgtggtaaatcatggaaaatatcgcgaaccacaacgatgatagcaaacaaaaagaagcgcctcagctggcggcgttgttgaaagaaatgaaggaaggacttgataccgtaaggcataaaattcaatctttaactgccatggtgaaagaaggtctatatcctacagcagatggatttagttaccttgaagttaaaaatttgttgcttctgaattattgtcaatcccttgtttattatttattgcggaaggctaagggattatcaatagaagatcatcctgttgttcgaagtgttgtagagatacgattgtttttggaaaagattcggccaattgacaagaaacaacaataccagatccagaaactgatgcaagctagtgaaaatgcaatcagaagtgatattctaaacaaggagccagttgcatccaataagagcgaggacgcatcaaagtatcgtcccaatcctgacatgcttgttagcaaagtagacctaacctcgcaggctgacaatgagtattatcaacctgtaaaatttgcgcctacttctatggatctagagaaatcttcaaagcatgaaagaaatgccttgcgaagagaaaaagaaattctgaaacaagctaagcagagtgattatcttaggacattgatgaatgatatggaggaaagacctgaagagataagagattttgagggagctagcagagaagttgatagatatattgccaagatggacgaacgtgctcggcaagaggaggagctgttcacacgcgttcctcttacgaaacaggaaaggaaacgagaaaagtatttgaagaaatcaagaaatgggttgcaaggtctaacagaaagtttctatgatgaaatcaaaacattaccctttgaagataaaactggagagcaagtagtgggctctagtaatggtagcagaacaaacaatagactgaagaagcgaaagaggaaacattaaaggaagaaaatttgggttttgagctaaagggctgaaatgctctctggaaaacagaccacttcatgctgttgtcggaagtaatgctagatttaacgaaaacgacagagttggtgttggtgctttcctccgtgtttgtttgtagattttagttacattattgtctttttatttatttatttacttattattattattattataggctcgggtgcttaattgggtacgtgaatttgagattttcgcagagatgaaatgtgtttttttttttgctattacagatgtgcacccatttttgcgatgcaagtggatttttttaacccacctttatatatttaggtggagtac

SEQ ID NO: 51540 - protein, 317 aa, Glycine max
  peptide (1)..(317): Ceres Seq. ID no. 14311923
MENIANHNDDSKQKEAPQLAALLKEMKEGLDTVRHKIQSLTAMVKEGLYPTADGFSYLEVKNLLLLNYCQSLVYYLLRKAKGLSIEDHPVVRSVVEIRLFLEKIRPIDKKQQYQIQKLMQASENAIRSDILNKEPVASNKSEDASKYRPNPDMLVSKVDLTSQADNEYYQPVKFAPTSMDLEKSSKHERNALRREKEILKQAKQSDYLRTLMNDMEERPEEIRDFEGASREVDRYIAKMDERARQEEELFTRVPLTKQERKREKYLKKSRNGLQGLTESFYDEIKTLPFEDKTGEQVVGSSNGSRTNNRLKKRKRKH

SEQ ID NO: 51541 - protein, 292 aa, Glycine max
  peptide (1)..(292): Ceres Seq. ID no. 14311924
MKEGLDTVRHKIQSLTAMVKEGLYPTADGFSYLEVKNLLLLNYCQSLVYYLLRKAKGLSIEDHPVVRSVVEIRLFLEKIRPIDKKQQYQIQKLMQASENAIRSDILNKEPVASNKSEDASKYRPNPDMLVSKVDLTSQADNEYYQPVKFAPTSMDLEKSSKHERNALRREKEILKQAKQSDYLRTLMNDMEERPEEIRDFEGASREVDRYIAKMDERARQEEELFTRVPLTKQERKREKYLKKSRNGLQGLTESFYDEIKTLPFEDKTGEQVVGSSNGSRTNNRLKKRKRKH

SEQ ID NO: 51542 - protein, 275 aa, Glycine max
  peptide (1)..(275): Ceres Seq. ID no. 14311925
MVKEGLYPTADGFSYLEVKNLLLLNYCQSLVYYLLRKAKGLSIEDHPVVRSVVEIRLFLEKIRPIDKKQQYQIQKLMQASENAIRSDILNKEPVASNKSEDASKYRPNPDMLVSKVDLTSQADNEYYQPVKFAPTSMDLEKSSKHERNALRREKEILKQAKQSDYLRTLMNDMEERPEEIRDFEGASREVDRYIAKMDERARQEEELFTRVPLTKQERKREKYLKKSRNGLQGLTESFYDEIKTLPFEDKTGEQVVGSSNGSRTNNRLKKRKRKH

SEQ ID NO: 51543 - DNA, 1177 bp, Glycine max
  misc_feature (1)..(1177): Ceres Seq. ID no. 15171426
attattttgcattcccctaagttggtgcagtagaagtaaccagtccctagtagaccctagtcgtgtcccagacgggccagagtcagtttccaacaccaacacagcagcaaccctcaaacgccacctagggttagggtttctgcaattccccaatctctatcttccaaaaattagggttttttcaagccatggcggacggctactggaaccggcaacaggcgtttctgcctcactccggcatgctcaaacggccgcgttccgactacggtaatgagatgcataatcatattgctcgtgatgatgaccgtactggtcaccgaatgctaaaggacacacaaacaattggatctgcttatgaccgctaccttcagagtgggcaactttcttcatttacttctggggaagtcagtacagttggtggtcttgggttggctaggggtggtggtggtggattatcaggccattcactagctgatcctgctgtcatggggcgtcatgggggtagtggttcagatctagcaccaaatggacggggtgttaattatggtggtcagctaccagtagatgcggtttccagacctggacctgagacaggatctctacctccagatgcttcaagtactttatatgttgaaggtctcccttctgatagcaccagaagggaagtagctcatattttccgcccttttgttggatatagagaagttagacttgtgagcaaagaatcgaaacatcgtggtggagatcctcattacctttgttttgtggactttgcaaatccagcttgtgcagcaaccgctatgagtgccttgcaaggttataaagttgatgaactcaatcccgagtccagtcacttgcggcttcagttttctcggtatcctggtccaagaagtggacctgcttttcgcagtaaaagatgatctggttcacataagccatctaggttttatgctcatcagaatgtctgtggttcttcgttttgggggcgatactccacatgcaattttattcacccctctggacacaatccttattagagcccttgaaatgcataaattattaacaggccgagatcaaagtacaatttcaattagcaaaaaaggatttttagttcatgtattcaattactctgccgtaccattatttgctaaactttagtatattcacctggtgtctg

SEQ ID NO: 51544 - protein, 243 aa, Glycine max
  peptide (1)..(243): Ceres Seq. ID no. 15171427
MADGYWNRQQAFLPHSGMLKRPRSDYGNEMHNHIARDDDRTGHRMLKDTQTIGSAYDRYLQSGQLSSFTSGEVSTVGGLGLARGGGGGLSGHSLADPAVMGRHGGSGSDLAPNGRGVNYGGQLPVDAVSRPGPETGSLPPDASSTLYVEGLPSDSTRREVAHIFRPFVGYREVRLVSKESKHRGGDPHYLCFVDFANPACAATAMSALQGYKVDELNPESSHLRLQFSRYPGPRSGPAFRSKR

SEQ ID NO: 51545 - protein, 226 aa, Glycine max
  peptide (1)..(226): Ceres Seq. ID no. 15171428
MLKRPRSDYGNEMHNHIARDDDRTGHRMLKDTQTIGSAYDRYLQSGQLSSFTSGEVSTVGGLGLARGGGGGLSGHSLADPAVMGRHGGSGSDLAPNGRGVNYGGQLPVDAVSRPGPETGSLPPDASSTLYVEGLPSDSTRREVAHIFRPFVGYREVRLVSKESKHRGGDPHYLCFVDFANPACAATAMSALQGYKVDELNPESSHLRLQFSRYPGPRSGPAFRSKR

SEQ ID NO: 51546 - protein, 214 aa, Glycine max
  peptide (1)..(214): Ceres Seq. ID no. 15171429
MHNHIARDDDRTGHRMLKDTQTIGSAYDRYLQSGQLSSFTSGEVSTVGGLGLARGGGGGLSGHSLADPAVMGRHGGSGSDLAPNGRGVNYGGQLPVDAVSRPGPETGSLPPDASSTLYVEGLPSDSTRREVAHIFRPFVGYREVRLVSKESKHRGGDPHYLCFVDFANPACAATAMSALQGYKVDELNPESSHLRLQFSRYPGPRSGPAFRSKR

SEQ ID NO: 51547 - DNA, 1277 bp, Glycine max
  misc_feature (1)..(1277): Ceres Seq. ID no. 15177842
ctgaacacatttcatttttggatttttatacttccttctttcttttacactgcacacacacacagaggtattttcacttctctcgctttcattttgcgatgcgtcgattaaaaattgaacaaccttcactgactcgttcagcgttgggttattgactttgatggttccaaattgtgttctgtttagagacaacaccgctaaccaaacgcctttctctcaacttcaacgtctttgctatttaaatttaaatcactgcacaacctattgcagtgtacctcattcttcgtttggttttggtttcaatttgcgtcgcacaagttgacgtttcctcggatacacaatgataggatcttttattacaagggcacttgtgatggtttttggctatgccttccctgcctatgaatgctataaagcagttgaaaagaataggccagaaattgaacaacttcgtttttggtgccagtactggattttggtagctgttttgtcagtatgtgagcggattgctgatgcttttatatcatgggtcccaatgtatagtgaagctaagttggcatttgtcatatacttgtggtacccgaaaacaaagggaacaacatatgtgtatgattccttctttagaccatatgttgcgaaacatgagacagaaattgaccgcaacttgttggaactaaggacaagggcaggagatactgcagttttgtattggcaaaaagctgctagttatggccagactagaatatttgaaattttgcagtatgttgctgcacagtcaacaccttcgccacgccctgctcagcaacaaccagctatgagggtgcgtcaagccgcaactagtaatagccaaccagcatctgcgacagaaccacaagctgagaatccatcttctcctacttctagttcatccagtcagcaacagaaggaagtagcagaggaggagttgggttcttcacaagtgcctaaagcaccttatactgtagcaggtttaagtagccagaagtctaatcctatacctgaaacggccaatcaatcggtacctgaagaggatgagccaatgcagattgaagcagcagcaccttcatcctcttctgcaaatgaaaatgagaaccctcccttggaagatacaataatggaagaaagcattagggtaacgcgtggtagactaagaaaaaatcgatcagctcgaatccgttagatatcattgttttcaagttttagcctggaaaacatgggtagatggataatagtgggtgtggaatagtaaagttgtgtgt

SEQ ID NO: 51548 - protein, 285 aa, Glycine max
  peptide (1)..(285): Ceres Seq. ID no. 15177843
MIGSFITRALVMVFGYAFPAYECYKAVEKNRPEIEQLRFWCQYWILVAVLSVCERIADAFISWVPMYSEAKLAFVIYLWYPKTKGTTYVYDSFFRPYVAKHETEIDRNLLELRTRAGDTAVLYWQKAASYGQTRIFEILQYVAAQSTPSPRPAQQQPAMRVRQAATSNSQPASATEPQAENPSSPTSSSSSQQQKEVAEEELGSSQVPKAPYTVAGLSSQKSNPIPETANQSVPEEDEPMQIEAAAPSSSSANENENPPLEDTIMEESIRVTRGRLRKNRSARIR

SEQ ID NO: 51549 - protein, 274 aa, Glycine max
  peptide (1)..(274): Ceres Seq. ID no. 15177844
MVFGYAFPAYECYKAVEKNRPEIEQLRFWCQYWILVAVLSVCERIADAFISWVPMYSEAKLAFVIYLWYPKTKGTTYVYDSFFRPYVAKHETEIDRNLLELRTRAGDTAVLYWQKAASYGQTRIFEILQYVAAQSTPSPRPAQQQPAMRVRQAATSNSQPASATEPQAENPSSPTSSSSSQQQKEVAEEELGSSQVPKAPYTVAGLSSQKSNPIPETANQSVPEEDEPMQIEAAAPSSSSANENENPPLEDTIMEESIRVTRGRLRKNRSARIR

SEQ ID NO: 51550 - protein, 220 aa, Glycine max
  peptide (1)..(220): Ceres Seq. ID no. 15177845
MYSEAKLAFVIYLWYPKTKGTTYVYDSFFRPYVAKHETEIDRNLLELRTRAGDTAVLYWQKAASYGQTRIFEILQYVAAQSTPSPRPAQQQPAMRVRQAATSNSQPASATEPQAENPSSPTSSSSSQQQKEVAEEELGSSQVPKAPYTVAGLSSQKSNPIPETANQSVPEEDEPMQIEAAAPSSSSANENENPPLEDTIMEESIRVTRGRLRKNRSARIR

SEQ ID NO: 51551 - DNA, 1381 bp, Glycine max
  misc_feature (1)..(1381): Ceres Seq. ID no. 14311576
agagaactctattctcctccatcaacgcaaccaccaccatcgtgtttaggtcattcttctctctttccgtaccctaaaaccgaaaaaattgttccttttacttttctcctctcacacacattcccacttcccccttttcttccaccgttatgtcgggtagaaaccgcggacaaccccttcctccgccgcacgcggcgggaatatcgccgccgctccacgatccgctgtacggcccgcgggcccaccaccaccaccatcatcatcatcatctagtgggccccgtcccgccccacccccaccaccttctagaagacttccgcgactcgcagctagggctgggcccaacgcgcggcgggtccatcccattgcacccggcggcggcgatcatcgaggagcgccttgccgcccagcatcaggacatccagggtctgctgggcgacaaccagcgcctcgccgccacccacgttgccctcaagcaggagctcgaggccgcccgccacgagctccagcgcgtggcgcacttccgcgagtcgctccgggccgataccgaggcccgcatgcgcgagctctacgacaaggcggcccagctcgaggccgagcttcgtggcgctgaggccgcccgcaccgagctcctccaggtccgctccgacgtcaaggagctcaccgccgtccgccaggacctgtccggacaggtgcaggccatgacgcaggacttggcccgcatgaccgcagacgcgaaacgggttccggcgctgagggctgatgttgaggccatgaaacaagagttgcagtgtgcaagggctgccattgagtatgagaagaagggatttgcagaaaactatgaacatggtcaagtgatggagaagaaattggttgcgatggctcgggagatggagaagcttcgtgcggagattgccaatgcagagaaaagagcacgggctgctgcagcggctgggaatccaggtcaagggtataatgcaaattatggcactgctgatgttggatatgctggaaatccttaccctggcatttatggcatgaatccagtacagcctggagtggagaattttcctcagtatggacctgggcctgctgcttggggcgcatatgacatgcagcgagttcaaggacaccgataaattcctgttgaggaatcttataactggtatcttgggttgcaactatctagatgattgattcagggttttaagagttatctactcatgaacgtcatggaatttgtctattagatggtccttgaagttgtacttatattaaaaagctcatatgtaggttgatggtgcagtagatgatgtttatctacggtgtcaaataaaggacattttgctttatattatctttttattgtgatgtggctgtc

SEQ ID NO: 51552 - protein, 329 aa, Glycine max
  peptide (1)..(329): Ceres Seq. ID no. 14311577
MSGRNRGQPLPPPHAAGISPPLHDPLYGPRAHHHHHHHHHLVGPVPPHPHHLLEDFRDSQLGLGPTRGGSIPLHPAAAIIEERLAAQHQDIQGLLGDNQRLAATHVALKQELEAARHELQRVAHFRESLRADTEARMRELYDKAAQLEAELRGAEAARTELLQVRSDVKELTAVRQDLSGQVQAMTQDLARMTADAKRVPALRADVEAMKQELQCARAAIEYEKKGFAENYEHGQVMEKKLVAMAREMEKLRAEIANAEKRARAAAAAGNPGQGYNANYGTADVGYAGNPYPGIYGMNPVQPGVENFPQYGPGPAAWGAYDMQRVQGHR

SEQ ID NO: 51553 - protein, 193 aa, Glycine max
  peptide (1)..(193): Ceres Seq. ID no. 14311578
MRELYDKAAQLEAELRGAEAARTELLQVRSDVKELTAVRQDLSGQVQAMTQDLARMTADAKRVPALRADVEAMKQELQCARAAIEYEKKGFAENYEHGQVMEKKLVAMAREMEKLRAEIANAEKRARAAAAAGNPGQGYNANYGTADVGYAGNPYPGIYGMNPVQPGVENFPQYGPGPAAWGAYDMQRVQGHR

SEQ ID NO: 51554 - DNA, 1249 bp, Glycine max
  misc_feature (1)..(1249): Ceres Seq. ID no. 14315083
aaagattaccgttctcacttaaaccaataaacaaacccacccaatcactaaagcaaccttcttgattatcctaaagccgcagcgcaagcaatcactctttttctttctcataataatgcaaattcttccccactctgcagcaacaaattctcatttgcaaaccccataaaggcatatcatctttatactttaccgggatctgtgtctccttttatttttccccaagacaaagtagacattgtcttccactcacttcaaaaaagagagtgagagagagaaactttgtggtctgtgttctgtgaaactgaagtgttcttcctcaatcattgtcttttacagtcaaattcagcgtctaagatctcatttcaaaaaaatttccgcttgttaaagttggtttctcactcacaagtcacaagtcacaccctttatttacttcagcatccaacaaagtgttccttacttgttctgttcaatgactcagatcttcaaatgtgagtgttgtagcatcattgcatgagtcacccatcaaacattgttcaagtaactgtttttagtttattttgtaaatgagggtgtggagggttcacccacaagagcaaaagctttgtccaaatggtgttttgaggtgggttttggtttggatgagtgtttgttttcttgtgttcacggttggtccaccgtctcgctcgagggtgaggaagagtgtatcttctcaactttcttgtcctccatgtgattgtttctgctcttcagctgaatatctcctcgatcctctaggactggtcaacagctcaatttccaattgtggtaaacatgatccgattttgaatgaggaaatgaacaagggtctactgacaatgctatctgaggagctaaatttgcagaaaattgtggccaacgagaccatggaacacaccaaacagttaataatggatgccaggaaaaccttttcacattaccagaaggaagcagaaaagtgcaacattggggtggaaacttgtgaagaagcaagggagagggcagaggcagagctcattgaagaacacaagctgacaacattatgggaaaatcgtgcaagtgaatatgggtgggtggaatgactgaagaacacactgaaggagtttagttaaccattgctacattatgttatgttaccccttaattgtatcatagcttttatagccaatacacagatctcttgtgatgatttcaaccaggttaacaattctattgaaacaagttttgtgcc

SEQ ID NO: 51555 - protein, 177 aa, Glycine max
  peptide (1)..(177): Ceres Seq. ID no. 14315084
MRVWRVHPQEQKLCPNGVLRWVLVWMSVCFLVFTVGPPSRSRVRKSVSSQLSCPPCDCFCSSAEYLLDPLGLVNSSISNCGKHDPILNEEMNKGLLTMLSEELNLQKIVANETMEHTKQLIMDARKTFSHYQKEAEKCNIGVETCEEARERAEAELIEEHKLTTLWENRASEYGWVE

SEQ ID NO: 51556 - protein, 152 aa, Glycine max
  peptide (1)..(152): Ceres Seq. ID no. 14315085
MSVCFLVFTVGPPSRSRVRKSVSSQLSCPPCDCFCSSAEYLLDPLGLVNSSISNCGKHDPILNEEMNKGLLTMLSEELNLQKIVANETMEHTKQLIMDARKTFSHYQKEAEKCNIGVETCEEARERAEAELIEEHKLTTLWENRASEYGWVE

SEQ ID NO: 51557 - DNA, 942 bp, Glycine max
  misc_feature (1)..(942): Ceres Seq. ID no. 14315090
attcaccccactttcttttttcgttcacagcttggcttccctttaggcaaagcttgatccttcaagccttttaaggtacacaggtactcattgtgctcttttcttcttaattagaaatttttatgggcatcatttatctaacagcttgagtcaaaataggtagcatcctttggccaaaattggaagaaacatgagcgataaaaaaggaagcacttcaaaccatggcttgaatttgaacatacccccaccaagggttgccaatcagatacctgattcaccaactcgattaccaatagcgccaccaacatcaccaacaagctcatgtgtgtccagcgaactaagccaagatgacaacagcagcagcagcagcagaaaaaacaacaaccgcggctgcactcggagccctgaagacatttccatggtgctagtagggtgttctcgctgccttatgtatatgatggtcaatgagggtgaacccaagtgccccaaatgcaaaagcaccactttgattcattttcttaattacaacaacatcccataaggaggggacacaatgctatgctaccttgctgtgatttctgtattttgtgccgcaagtaggataagttagcttaaaaaaaaaaaggaatctcctttttaggacatttcttttatcttatgttttctatctttttcctaaacctttctttatgagttgtgctgcttgcgctccactttttccctttatctcctattcttaggaaggaaatcacaaaagagtttaagtgtaagtagcactacatgtcagggaggttacttttaataaatggttgtctcaccaagtttaccatcttaaatataaggttaggaaatttcctccatcagtatggctaattaacatatcatgtaaacctgattacataaaataagagaatgaatcgcaaggtatttcaattatctacc

SEQ ID NO: 51558 - protein, 116 aa, Glycine max
  peptide (1)..(116): Ceres Seq. ID no. 14315091
MSDKKGSTSNHGLNLNIPPPRVANQIPDSPTRLPIAPPTSPTSSCVSSELSQDDNSSSSSRKNNNRGCTRSPEDISMVLVGCSRCLMYMMVNEGEPKCPKCKSTTLIHFLNYNNIP

SEQ ID NO: 51559 - DNA, 1745 bp, Glycine max
  misc_feature (1)..(1745): Ceres Seq. ID no. 14311535
atcatcatcactctcatcttcttcttcttttcaagataacatctctgaagtgatctttcatggagagagagattgaacattgtgacaaggtgatgagccaaagcagcatggatgcttgtcccaaatcagggcctggttatgcttcaccactagcagccatttctggtcccagagagactctcctttatgtcactgctatctactcaggaacaggaagggataagcctgactttctggccacagtggatgtggatccaagctctccaacgtattcaaaagttatccataggctacctgtaccttatttaggtgatgaactgcaccattttgggtggaattcatgcagctcttgctatggagatccaacagcagttcggcgatatctgattttgccttcactggtatcaggccgcatttatgtggttgacacaaaagcaaatccaaggtctccatctttgcacaaagttgttgagccagaagacattataagtaagactggattagcttatgcacacacatctcattgccttgcttctggtgacgtgttgatctcatttcttggagacaaagatggaaatgcagaaggaagtggatttcttctccttgatcatgaatttaatttgaaaggaaggtgggagaaacctgggcacagtccatcatttgggtatgacttctggtaccaaccacagcataagactatgattagctcatcatggggtgctcctgctgctttcaccaaaggttttaatttacagcatgtctctgatggtctttatgggaggcatctacatgtatacagctggcctgggggtgaactgagacaaacattggaccttggtgagtcagggcttctacccttggaggtaagatttctgcatgatccttctaaagatacaggtttcgttgggtgtgcattgtcaagtaacatggtacgctttttcaagactgaagatgaatcatggagtcatgaggttgcaatatcagtgaaaccattgaaagtgcaaaactggattcttccagaaatgccagggcttataactgattttctgatatctctcgatgatcggtttctgtactttgtgaattggcttcatggtgatataagacaatataacattgaggaccctaaaaatcctgtacggactggccaagtatgggttgggggactgctacagaaaggaagccctatagtagctataactgaagatggtaatacttggcattctgatgttccagacatcctgggaaataagttgagagctggccctcagatgattcagttgagtttggatggtaagcggctatatgttacaaactcactcttcagtgcatgggataaacaattttatccagagcttgtagagaaaggatcccacatgttacagattgatgttgatactgaaaatggtggtctgaaaattaaccctaacttttttgttgactttggagctgagcctggaggttcctgccttgcacatgagatgagatatcctggtggtgactgcacttcagatatatggatttgatagctatgccacttgaggccaggctacaagcaatatccatgtgaataaattccttagtcctagaatgaatagaggtgggctaatgttataaataaataatagatgcatatgcatgatggtttcattgtaataaagttatattttcatgtagttttcagtacttcctcatttacatcttcctaaacagagttctctgtaaaataaatcttgctcacctcc

SEQ ID NO: 51560 - protein, 488 aa, Glycine max
  peptide (1)..(488): Ceres Seq. ID no. 14311536
MEREIEHCDKVMSQSSMDACPKSGPGYASPLAAISGPRETLLYVTAIYSGTGRDKPDFLATVDVDPSSPTYSKVIHRLPVPYLGDELHHFGWNSCSSCYGDPTAVRRYLILPSLVSGRIYVVDTKANPRSPSLHKVVEPEDIISKTGLAYAHTSHCLASGDVLISFLGDKDGNAEGSGFLLLDHEFNLKGRWEKPGHSPSFGYDFWYQPQHKTMISSSWGAPAAFTKGFNLQHVSDGLYGRHLHVYSWPGGELRQTLDLGESGLLPLEVRFLHDPSKDTGFVGCALSSNMVRFFKTEDESWSHEVAISVKPLKVQNWILPEMPGLITDFLISLDDRFLYFVNWLHGDIRQYNIEDPKNPVRTGQVWVGGLLQKGSPIVAITEDGNTWHSDVPDILGNKLRAGPQMIQLSLDGKRLYVTNSLFSAWDKQFYPELVEKGSHMLQIDVDTENGGLKINPNFFVDFGAEPGGSCLAHEMRYPGGDCTSDIWI

SEQ ID NO: 51561 - protein, 477 aa, Glycine max
  peptide (1)..(477): Ceres Seq. ID no. 14311537
MSQSSMDACPKSGPGYASPLAAISGPRETLLYVTAIYSGTGRDKPDFLATVDVDPSSPTYSKVIHRLPVPYLGDELHHFGWNSCSSCYGDPTAVRRYLILPSLVSGRIYVVDTKANPRSPSLHKVVEPEDIISKTGLAYAHTSHCLASGDVLISFLGDKDGNAEGSGFLLLDHEFNLKGRWEKPGHSPSFGYDFWYQPQHKTMISSSWGAPAAFTKGFNLQHVSDGLYGRHLHVYSWPGGELRQTLDLGESGLLPLEVRFLHDPSKDTGFVGCALSSNMVRFFKTEDESWSHEVAISVKPLKVQNWILPEMPGLITDFLISLDDRFLYFVNWLHGDIRQYNIEDPKNPVRTGQVWVGGLLQKGSPIVAITEDGNTWHSDVPDILGNKLRAGPQMIQLSLDGKRLYVTNSLFSAWDKQFYPELVEKGSHMLQIDVDTENGGLKINPNFFVDFGAEPGGSCLAHEMRYPGGDCTSDIWI

SEQ ID NO: 51562 - protein, 472 aa, Glycine max
  peptide (1)..(472): Ceres Seq. ID no. 14311538
MDACPKSGPGYASPLAAISGPRETLLYVTAIYSGTGRDKPDFLATVDVDPSSPTYSKVIHRLPVPYLGDELHHFGWNSCSSCYGDPTAVRRYLILPSLVSGRIYVVDTKANPRSPSLHKVVEPEDIISKTGLAYAHTSHCLASGDVLISFLGDKDGNAEGSGFLLLDHEFNLKGRWEKPGHSPSFGYDFWYQPQHKTMISSSWGAPAAFTKGFNLQHVSDGLYGRHLHVYSWPGGELRQTLDLGESGLLPLEVRFLHDPSKDTGFVGCALSSNMVRFFKTEDESWSHEVAISVKPLKVQNWILPEMPGLITDFLISLDDRFLYFVNWLHGDIRQYNIEDPKNPVRTGQVWVGGLLQKGSPIVAITEDGNTWHSDVPDILGNKLRAGPQMIQLSLDGKRLYVTNSLFSAWDKQFYPELVEKGSHMLQIDVDTENGGLKINPNFFVDFGAEPGGSCLAHEMRYPGGDCTSDIWI

SEQ ID NO: 51563 - DNA, 1009 bp, Glycine max
  misc_feature (1)..(1009): Ceres Seq. ID no. 14312715
attctcttcttaatcccacaccatctaattagttcattctcttccttttctttttctttttattcgccgaatctattcaattgctataatattataaactctgatctgatcgatcagtcgcgttgtatgtctcaacggagaagttcgccggtggttgtcgcccggaagaataagccgccgcatccgtcgccgtcgccccgtcgtaggacgaagagcaagtcgaggcctatcaagatcctgaagcgctgttcgtcggcgcctctactttcacgccgtgataacgacgatggtgacgttgaccttgacggtgacgaccattattcgaggacgagcggaggaggctcgtttttccgccctaaaaccttttcggatgcctttctgtcttccccttctcccttttcctctccacggattcacaccaaacagataataaaggggtacaagtacgacaaagaagcaaaggtggtagttaatgtgaccgttgagggaagtccagggccagtccaaacgatggttaaactggggtccagtgtggaggatactatcaagcgtgtggtcgataaatatacagaagaaggcaggagcccccagatcgatgctaatatggcttcttcattccaattgcatcactcctatttcagtctccatagtttggacaaatcagaagtcattgcggatgtgggtagtagaagtttttatctgcggaagaataatgatgcatcatctactttgacttcttcatttcattggggaagtgctcccgaattagccacacatacttccactccatccatagcaaatcctccgttgttgatcccatctttcattgcccgcaggatttgcaaaattgtcagaagagctcaccgcctttggaagattttggtttgctctcagtgaggacattcaaaatcctaccccccccccccagtcaattataggaaaaagcaacgattttttttctgttgcttttcaacccttcatttccacattttatattcgatctacatat

SEQ ID NO: 51564 - protein, 298 aa, Glycine max
  peptide (1)..(298): Ceres Seq. ID no. 14312716
ILFLIPHHLISSFSSFSFSFYSPNLFNCYNIINSDLIDQSRCMSQRRSSPVVVARKNKPPHPSPSPRRRTKSKSRPIKILKRCSSAPLLSRRDNDDGDVDLDGDDHYSRTSGGGSFFRPKTFSDAFLSSPSPFSSPRIHTKQIIKGYKYDKEAKVVVNVTVEGSPGPVQTMVKLGSSVEDTIKRVVDKYTEEGRSPQIDANMASSFQLHHSYFSLHSLDKSEVIADVGSRSFYLRKNNDASSTLTSSFHWGSAPELATHTSTPSIANPPLLIPSFIARRICKIVRRAHRLWKILVCSQ

SEQ ID NO: 51565 - protein, 256 aa, Glycine max
  peptide (1)..(256): Ceres Seq. ID no. 14312717
MSQRRSSPVVVARKNKPPHPSPSPRRRTKSKSRPIKILKRCSSAPLLSRRDNDDGDVDLDGDDHYSRTSGGGSFFRPKTFSDAFLSSPSPFSSPRIHTKQIIKGYKYDKEAKVVVNVTVEGSPGPVQTMVKLGSSVEDTIKRVVDKYTEEGRSPQIDANMASSFQLHHSYFSLHSLDKSEVIADVGSRSFYLRKNNDASSTLTSSFHWGSAPELATHTSTPSIANPPLLIPSFIARRICKIVRRAHRLWKILVCSQ

SEQ ID NO: 51566 - DNA, 1181 bp, Glycine max
  misc_feature (1)..(1181): Ceres Seq. ID no. 14311812
ttttttctctctccttctactctccccctctttctcattttccggtgacatggagtccaagtggggtggcgcccccgccagcatcatggcggcgaatttcgacgacttcaagtggatcgcctccatgttcgatcccggaaacgacgacgtcaagcccttctccgacgcagctttccaaaaccaggatgcagtaactgcattttcaacttgtggtggagtaacagatgatacccttgttcgttcccaaaacctcactcccattcaatccaccatttctgcaactattgattctcagtcttccttttgtggtaccgttgggagcccagtgtctgctaacaaaccaaacgtgagagataatcaagtaaaaggggtcgccaccactacaagtggttcctcacgtgagccatctgatgaggatgatgaagcaggtccttgtgaacaaagcacaaacgctattgatatgaagcgccttagaaggaaggtttctaatagagagtctgcaaggaggtccaggagaagaaaacaagcccatttggctgacctggagtggcaagttgaacggctgagactggaaaatgcaaacctatttaagcagcttacagatgccagccaacaatttcgtgacgctgatacgaataaccgagtcctaaaatcagatgtcgaagctttgagagctaaggtgaaattagctgaggatatggtcactcgtggcacactcacccctatcaacaaccagattcttcaaaatcagagttcactaaacaccccacctcaactcaacacaaataatctacaccgcatgacacatgtttcgccaaccatcaccgtccgtgggaatgatgatgcttcatatggaggtggaattacagttagtggacaaaattcacctcttggtgggcttggaaacttggataatattccttgcagcgatttcaatagtggaatcaatagtaataatgctgtgagctctatgactagcatgtggccttaacgttattcttattgcaccacatgacttgtgttgtagtagtactgtccggttagatccaactttatgcatgtcttggttttattagatttgtggttatattgtggaaaatattatataggtaacaaaaatgtggtatctacgtgtaagaatccatctagaatatttagcatggtgtgtgttaaatggtttc

SEQ ID NO: 51567 - protein, 329 aa, Glycine max
  peptide (1)..(329): Ceres Seq. ID no. 14311813
FFSLLLLSPSFSFSGDMESKWGGAPASIMAANFDDFKWIASMFDPGNDDVKPFSDAAFQNQDAVTAFSTCGGVTDDTLVRSQNLTPIQSTISATIDSQSSFCGTVGSPVSANKPNVRDNQVKGVATTTSGSSREPSDEDDEAGPCEQSTNAIDMKRLRRKVSNRESARRSRRRKQAHLADLEWQVERLRLENANLFKQLTDASQQFRDADTNNRVLKSDVEALRAKVKLAEDMVTRGTLTPINNQILQNQSSLNTPPQLNTNNLHRMTHVSPTITVRGNDDASYGGGITVSGQNSPLGGLGNLDNIPCSDFNSGINSNNAVSSMTSMWP

SEQ ID NO: 51568 - protein, 313 aa, Glycine max
  peptide (1)..(313): Ceres Seq. ID no. 14311814
MESKWGGAPASIMAANFDDFKWIASMFDPGNDDVKPFSDAAFQNQDAVTAFSTCGGVTDDTLVRSQNLTPIQSTISATIDSQSSFCGTVGSPVSANKPNVRDNQVKGVATTTSGSSREPSDEDDEAGPCEQSTNAIDMKRLRRKVSNRESARRSRRRKQAHLADLEWQVERLRLENANLFKQLTDASQQFRDADTNNRVLKSDVEALRAKVKLAEDMVTRGTLTPINNQILQNQSSLNTPPQLNTNNLHRMTHVSPTITVRGNDDASYGGGITVSGQNSPLGGLGNLDNIPCSDFNSGINSNNAVSSMTSMWP

SEQ ID NO: 51569 - protein, 301 aa, Glycine max
  peptide (1)..(301): Ceres Seq. ID no. 14311815
MAANFDDFKWIASMFDPGNDDVKPFSDAAFQNQDAVTAFSTCGGVTDDTLVRSQNLTPIQSTISATIDSQSSFCGTVGSPVSANKPNVRDNQVKGVATTTSGSSREPSDEDDEAGPCEQSTNAIDMKRLRRKVSNRESARRSRRRKQAHLADLEWQVERLRLENANLFKQLTDASQQFRDADTNNRVLKSDVEALRAKVKLAEDMVTRGTLTPINNQILQNQSSLNTPPQLNTNNLHRMTHVSPTITVRGNDDASYGGGITVSGQNSPLGGLGNLDNIPCSDFNSGINSNNAVSSMTSMWP

SEQ ID NO: 51570 - DNA, 1416 bp, Glycine max
  misc_feature (1)..(1416): Ceres Seq. ID no. 15171289
ccaatgctccaccgcaataactcagccacagccacaacacacaaacacaaacccttcgttcctctctcgttcccttcttcaattcgatcaaacacagaatagtacttttttattatgatggccgtggcccgaaaggaaatggaccggatcaagggcccgtggagcccggaggaggacgaggctcttcagaagctcgtggagcggcatgggcccagaaactggtccctcatcagcaggtccattccgggccggtctgggaaatcgtgcaggctccgatggtgcaaccagctgtcgccacaggtcgagcaccgggccttcacgccggaagaggacgagaccataattagggcccatgctcggttcggtaacaagtgggccaccatagcccgcctcctctcgggccgcaccgataacgccatcaagaatcactggaactcaacgcttaaacgcaagtgcgcgtccttcatgaccgccgatgaagccgccgccggcggcttcagcccgaggccgctcaagcgatcgttcagcgccggcacggcggtgcctcctccaggaagcccctcaggatccgacgtgagcgagtccagcgctgctcccggcgtggtctctgtctctgtctctccttcacaagtgtttcgccccgtgccggttcggccggttgtcgaaacggcgtcgtcgcaagacgacgccgatgccgacgccgaggatgctggacctactacctcgctgtcgctgtctcttcccggggtggagtcatcggaaatctctaatcgcacctcgacggttccggtgatgccggtgcacaccgtggctgcggcggctccggttccgttaccggcgccggaggttggattaggagcgttgaatttgaatgcggagtttatggcggtgatgcatgagatgataaggaaggaggtgaggagttacatggagcagcagaatgggatgatgtgttttcagggtatggaaatgatggaagggtttaggaacgtgtcggtgaagagaattgggattagcagggtggattcgtaattattattattattattattattatgacctaattagtgttttcacaaaatgaggtttatgaagaactatgatcaagggaagagaaaaaaaaaaaaggaagctgttttcctttttttattttatttttagggaataataatattggttagtgtacagtgggaacgggacgagagaagccaagagtagtagcctggaatggaatgatggaaagtgaaatttcatggcaaatttgaaatttctttggcttgtttctgagcctctttggatgatcctgtgcttcaggtttatttagtttggaaaaaaacataaatgaggggttagatgcgaaaaaagaaagagaggggttggatttaaaaatgaatggaatatcctcaaattttcaag

SEQ ID NO: 51571 - protein, 305 aa, Glycine max
  peptide (1)..(305): Ceres Seq. ID no. 15171290
MMAVARKEMDRIKGPWSPEEDEALQKLVERHGPRNWSLISRSIPGRSGKSCRLRWCNQLSPQVEHRAFTPEEDETIIRAHARFGNKWATIARLLSGRTDNAIKNHWNSTLKRKCASFMTADEAAAGGFSPRPLKRSFSAGTAVPPPGSPSGSDVSESSAAPGVVSVSVSPSQVFRPVPVRPVVETASSQDDADADAEDAGPTTSLSLSLPGVESSEISNRTSTVPVMPVHTVAAAAPVPLPAPEVGLGALNLNAEFMAVMHEMIRKEVRSYMEQQNGMMCFQGMEMMEGFRNVSVKRIGISRVDS

SEQ ID NO: 51572 - protein, 304 aa, Glycine max
  peptide (1)..(304): Ceres Seq. ID no. 15171291
MAVARKEMDRIKGPWSPEEDEALQKLVERHGPRNWSLISRSIPGRSGKSCRLRWCNQLSPQVEHRAFTPEEDETIIRAHARFGNKWATIARLLSGRTDNAIKNHWNSTLKRKCASFMTADEAAAGGFSPRPLKRSFSAGTAVPPPGSPSGSDVSESSAAPGVVSVSVSPSQVFRPVPVRPVVETASSQDDADADAEDAGPTTSLSLSLPGVESSEISNRTSTVPVMPVHTVAAAAPVPLPAPEVGLGALNLNAEFMAVMHEMIRKEVRSYMEQQNGMMCFQGMEMMEGFRNVSVKRIGISRVDS

SEQ ID NO: 51573 - protein, 297 aa, Glycine max
  peptide (1)..(297): Ceres Seq. ID no. 15171292
MDRIKGPWSPEEDEALQKLVERHGPRNWSLISRSIPGRSGKSCRLRWCNQLSPQVEHRAFTPEEDETIIRAHARFGNKWATIARLLSGRTDNAIKNHWNSTLKRKCASFMTADEAAAGGFSPRPLKRSFSAGTAVPPPGSPSGSDVSESSAAPGVVSVSVSPSQVFRPVPVRPVVETASSQDDADADAEDAGPTTSLSLSLPGVESSEISNRTSTVPVMPVHTVAAAAPVPLPAPEVGLGALNLNAEFMAVMHEMIRKEVRSYMEQQNGMMCFQGMEMMEGFRNVSVKRIGISRVDS

SEQ ID NO: 51574 - DNA, 1429 bp, Glycine max
  misc_feature (1)..(1429): Ceres Seq. ID no. 14311870
atgaagatgtgtccacgactccgaaattcctatggcattggtgtgatctccttagttctgatattggtatcagtaaatgtaaaggtagcgagtggggtgtactatgccataaattgcagaaagcatagtgcagttttgacagattttggtggggttggtgatggcataacatccaacacaaaggcctttcaatctgcaataagcaaacttagccaatatgcatctgatggaggtgcaatgcttgttgtgccacctgggaaatggctaaccggaccctttaatctcacaagccattttactctttttctcgactttggtgctgttattcttgcatctcaggatgaatcagaatggccccaacttcctgtattaccttcatatggaagaggaagagatgctcccggaggaaggtttagcagtctaatttttggaactcacctcacagatgttgttataactggtaacaatggtctaattgatgggcaaggagcttattggtggaacaagttccatcagggtcaattgactctcactaggccatatttgatagagatcatgtactctgatcaaatccagatatcatttctcactttggtcaactcgcctacctggtttgtccatccagtatacagtagtaacataataataaaagggctaaccattaaagcaccagtggactctcccaacacagatgggataaacccagattcatgttcaaacattaggattgaagattgcaacattacttccggtgatgattgcattgcggtaaaaagtggctgggatgagtatggaattagatttggaatgccaacccaacacttaatcattaggaggattacttgtgtatcccctgatagtgctatgattgctttagggagtgaaatgtctggtggaatctatgatgttagagctgaagatctcactgccatcaacactgaagcagcagttagaatcaaaacagcaattggtagaggtggatatgtgaaaaacatatttgtcaaaggaatgaatctcaacaccatgaaatatgtattttggattactggcacttatggagaccaccctgaccctggctatgatcccaaagcactaccttacattaccgggataaattatagagacgttgttgcaacgaatgtcacaaagtccgcaagacttgaaggaatttccaatgatcctttcacaggaatctgcatttctaatgtgagtattcaagtgagtgaacaacagaagaagcttcaatggaattgcagtaacatttctggagttacaagcaatgtcactccttacccttgtgcattgctgccagagaaagggcaattggagtgtccttttccaactgacacacttcccattgacaatgttcagctcaagtcttgtaactaataacatggctatatttgaattctgatcactagttttcatt

SEQ ID NO: 51575 - protein, 462 aa, Glycine max
  peptide (1)..(462): Ceres Seq. ID no. 14311871
MKMCPRLRNSYGIGVISLVLILVSVNVKVASGVYYAINCRKHSAVLTDFGGVGDGITSNTKAFQSAISKLSQYASDGGAMLVVPPGKWLTGPFNLTSHFTLFLDFGAVILASQDESEWPQLPVLPSYGRGRDAPGGRFSSLIFGTHLTDVVITGNNGLIDGQGAYWWNKFHQGQLTLTRPYLIEIMYSDQIQISFLTLVNSPTWFVHPVYSSNIIIKGLTIKAPVDSPNTDGINPDSCSNIRIEDCNITSGDDCIAVKSGWDEYGIRFGMPTQHLIIRRITCVSPDSAMIALGSEMSGGIYDVRAEDLTAINTEAAVRIKTAIGRGGYVKNIFVKGMNLNTMKYVFWITGTYGDHPDPGYDPKALPYITGINYRDVVATNVTKSARLEGISNDPFTGICISNVSIQVSEQQKKLQWNCSNISGVTSNVTPYPCALLPEKGQLECPFPTDTLPIDNVQLKSCN

SEQ ID NO: 51576 - protein, 460 aa, Glycine max
  peptide (1)..(460): Ceres Seq. ID no. 14311872
MCPRLRNSYGIGVISLVLILVSVNVKVASGVYYAINCRKHSAVLTDFGGVGDGITSNTKAFQSAISKLSQYASDGGAMLVVPPGKWLTGPFNLTSHFTLFLDFGAVILASQDESEWPQLPVLPSYGRGRDAPGGRFSSLIFGTHLTDVVITGNNGLIDGQGAYWWNKFHQGQLTLTRPYLIEIMYSDQIQISFLTLVNSPTWFVHPVYSSNIIIKGLTIKAPVDSPNTDGINPDSCSNIRIEDCNITSGDDCIAVKSGWDEYGIRFGMPTQHLIIRRITCVSPDSAMIALGSEMSGGIYDVRAEDLTAINTEAAVRIKTAIGRGGYVKNIFVKGMNLNTMKYVFWITGTYGDHPDPGYDPKALPYITGINYRDVVATNVTKSARLEGISNDPFTGICISNVSIQVSEQQKKLQWNCSNISGVTSNVTPYPCALLPEKGQLECPFPTDTLPIDNVQLKSCN

SEQ ID NO: 51577 - protein, 383 aa, Glycine max
  peptide (1)..(383): Ceres Seq. ID no. 14311873
MLVVPPGKWLTGPFNLTSHFTLFLDFGAVILASQDESEWPQLPVLPSYGRGRDAPGGRFSSLIFGTHLTDVVITGNNGLIDGQGAYWWNKFHQGQLTLTRPYLIEIMYSDQIQISFLTLVNSPTWFVHPVYSSNIIIKGLTIKAPVDSPNTDGINPDSCSNIRIEDCNITSGDDCIAVKSGWDEYGIRFGMPTQHLIIRRITCVSPDSAMIALGSEMSGGIYDVRAEDLTAINTEAAVRIKTAIGRGGYVKNIFVKGMNLNTMKYVFWITGTYGDHPDPGYDPKALPYITGINYRDVVATNVTKSARLEGISNDPFTGICISNVSIQVSEQQKKLQWNCSNISGVTSNVTPYPCALLPEKGQLECPFPTDTLPIDNVQLKSCN

SEQ ID NO: 51578 - DNA, 1140 bp, Glycine max
  misc_feature (1)..(1140): Ceres Seq. ID no. 15171366
aaaacccaaaacctcttcttcttactctcttacgttaattcttcgttgtctatgatggcattggatatgattgatgttgttcccaggacgaggatggaagaagaaaatatagcaatacaagaagcagcttccgctgggttaaagagcatggagcatctcattcgtctcctttctccttcttcttctcttcacaacaaccttaataatctcaatctcaaccacctcgactgctccgaaatcaccggcttcactgtctccaagttcaaacaagtcatcaaccttctcaaccgcaccggccacgcccgcttccgccgctctccaccccaagcccaagcccaagcccaaactaatcctcaaccacaacctcagatccaacaacaagggttcagtttagatttcgtgaagcccaccattctaaactcaaagcccatcaacaaagacgaaactttgactctttcaacaacctcttcttccttcatgtcctccgtcaccaacgacgccagcgtctccaacggcaagatcggacctttcctccctccctccgccgccaaaccccctctctcctccgcccaccggaaaaagtgccgcgacgccgccgcagcactctccgccaaaccctcctgccactgctccaagaaaaggaaatcacgcgtgaaacgaacgattcgggtgccggcgataagctcaaagatcgcagatatcccaccggacgagtattcgtggagaaaatacggtcaaaaaccgatcaagggctcaccttaccctcgagggtactacaagtgcagcaccgtgagagggtgtccggcgaggaagcacgtggagcgagcgcaggatgaccccaagatgctaatagtgacttacgagggtgagcaccgtcacgtgctgccgttaacttccgctgccggcgttagtttcggccattgagttaatcgacggcgtcttttggaaacttggcgggggacgttaaatgagcgtcggatcgtgaagtaacggcggatgcgaacaaggatcgattcggttcgaggacggaaaaagaaaagtggcaactaaagtcaactttcgcgttgtggaatgattttgttgacgaggacttttgtgtaaatttgaccccaagtaaagtagtgcaggtctcaaagaatg

SEQ ID NO: 51579 - protein, 307 aa, Glycine max
  peptide (1)..(307): Ceres Seq. ID no. 15171367
KTQNLFFLLSYVNSSLSMMALDMIDVVPRTRMEEENIAIQEAASAGLKSMEHLIRLLSPSSSLHNNLNNLNLNHLDCSEITGFTVSKFKQVINLLNRTGHARFRRSPPQAQAQAQTNPQPQPQIQQQGFSLDFVKPTILNSKPINKDETLTLSTTSSSFMSSVTNDASVSNGKIGPFLPPSAAKPPLSSAHRKKCRDAAAALSAKPSCHCSKKRKSRVKRTIRVPAISSKIADIPPDEYSWRKYGQKPIKGSPYPRGYYKCSTVRGCPARKHVERAQDDPKMLIVTYEGEHRHVLPLTSAAGVSFGH

SEQ ID NO: 51580 - protein, 290 aa, Glycine max
  peptide (1)..(290): Ceres Seq. ID no. 15171368
MMALDMIDVVPRTRMEEENIAIQEAASAGLKSMEHLIRLLSPSSSLHNNLNNLNLNHLDCSEITGFTVSKFKQVINLLNRTGHARFRRSPPQAQAQAQTNPQPQPQIQQQGFSLDFVKPTILNSKPINKDETLTLSTTSSSFMSSVTNDASVSNGKIGPFLPPSAAKPPLSSAHRKKCRDAAAALSAKPSCHCSKKRKSRVKRTIRVPAISSKIADIPPDEYSWRKYGQKPIKGSPYPRGYYKCSTVRGCPARKHVERAQDDPKMLIVTYEGEHRHVLPLTSAAGVSFGH

SEQ ID NO: 51581 - protein, 289 aa, Glycine max
  peptide (1)..(289): Ceres Seq. ID no. 15171369
MALDMIDVVPRTRMEEENIAIQEAASAGLKSMEHLIRLLSPSSSLHNNLNNLNLNHLDCSEITGFTVSKFKQVINLLNRTGHARFRRSPPQAQAQAQTNPQPQPQIQQQGFSLDFVKPTILNSKPINKDETLTLSTTSSSFMSSVTNDASVSNGKIGPFLPPSAAKPPLSSAHRKKCRDAAAALSAKPSCHCSKKRKSRVKRTIRVPAISSKIADIPPDEYSWRKYGQKPIKGSPYPRGYYKCSTVRGCPARKHVERAQDDPKMLIVTYEGEHRHVLPLTSAAGVSFGH

SEQ ID NO: 51582 - DNA, 1332 bp, Glycine max
  misc_feature (1)..(1332): Ceres Seq. ID no. 15171378
aacattgttttcaattgtagaacctgaaaggaaggatatggtcattgtaaggtcactctcaatattattttcccttcccattgcttacactctctcttcttgtaatttaaatcaaaccttccaccccaattctcccccagagctcagaatcttcagctctacttcttcttccagaaaacaaagagatattcattcaaaaatcacctatctcatccctctcttgacccctccaacatgaagaacactaacagcaacacaaaactaatccttctccacccatatatccagaaacaaggaagctcaaaccgcttatggcttctagccttcatatccttcttcaccttagttttccttgccacactcatttacacaagagacacaacctcatctaccactaccactacctcttccacccctttatctagtttcaccaacacccttttatcatccactgtaataaacaccctcctccactatgcctcaaaatccaacgacacctttcacatgccccactcagacctcaaaaccatctccgacatgctccgaaagtgtccctcgccatgcaacttcctcgtcttcggcctcacccacgagaccctcctttggaaagccctcaaccacaacggaagaaccgtcttcatcgacgaaaaccggtactacgccgcgtatttcgaagaaaaacaccccgaaatcgatgcttacgacgtggcatacacgactaaaaggagtgagttgaaggagctgatagcttcggcgaaagaacaagtaggaaatgaatgcaggccagtgcagaatcttctgttttctgagtgcaagttgggtctcaatgaccttccgaaccatgtttatgaagtggattgggatgtgatattggtggatggaccgaggggggattggccggacgctcccggaagaatgtcgccgatcttcaccgccggcgttcttgcccggagcaaaaagggtgggaacccgaagacgcatgtgtttgtgcatgacttctcggggaaagtggagaaggtttctgggaatgagtttctgtgcaaggaaaatttggtggaggctactcatagtttgggacactatgtgctggaaaaaatggacgagagtagcgttcagtattgtaagaatcactcatcaggattcgcttcttcttcgtcttagttggtgtctttaatgttgctctctatatatatcgaccatctgggtatttatatagttgcactgtttacttctggagcttgtaaaagataattctttctttctttcttctttttctcgtttttcgttttctggcactgaagattgtaatttcttcaagaaggtcatgcttcc

SEQ ID NO: 51583 - protein, 308 aa, Glycine max
  peptide (1)..(308): Ceres Seq. ID no. 15171379
MKNTNSNTKLILLHPYIQKQGSSNRLWLLAFISFFTLVFLATLIYTRDTTSSTTTTTSSTPLSSFTNTLLSSTVINTLLHYASKSNDTFHMPHSDLKTISDMLRKCPSPCNFLVFGLTHETLLWKALNHNGRTVFIDENRYYAAYFEEKHPEIDAYDVAYTTKRSELKELIASAKEQVGNECRPVQNLLFSECKLGLNDLPNHVYEVDWDVILVDGPRGDWPDAPGRMSPIFTAGVLARSKKGGNPKTHVFVHDFSGKVEKVSGNEFLCKENLVEATHSLGHYVLEKMDESSVQYCKNHSSGFASSSS

SEQ ID NO: 51584 - protein, 218 aa, Glycine max
  peptide (1)..(218): Ceres Seq. ID no. 15171380
MPHSDLKTISDMLRKCPSPCNFLVFGLTHETLLWKALNHNGRTVFIDENRYYAAYFEEKHPEIDAYDVAYTTKRSELKELIASAKEQVGNECRPVQNLLFSECKLGLNDLPNHVYEVDWDVILVDGPRGDWPDAPGRMSPIFTAGVLARSKKGGNPKTHVFVHDFSGKVEKVSGNEFLCKENLVEATHSLGHYVLEKMDESSVQYCKNHSSGFASSSS

SEQ ID NO: 51585 - protein, 207 aa, Glycine max
  peptide (1)..(207): Ceres Seq. ID no. 15171381
MLRKCPSPCNFLVFGLTHETLLWKALNHNGRTVFIDENRYYAAYFEEKHPEIDAYDVAYTTKRSELKELIASAKEQVGNECRPVQNLLFSECKLGLNDLPNHVYEVDWDVILVDGPRGDWPDAPGRMSPIFTAGVLARSKKGGNPKTHVFVHDFSGKVEKVSGNEFLCKENLVEATHSLGHYVLEKMDESSVQYCKNHSSGFASSSS

SEQ ID NO: 51586 - DNA, 1168 bp, Glycine max
  misc_feature (1)..(1168): Ceres Seq. ID no. 15169979
aacttgtcggggtttggatttttttcattccgcataggttccgttttccaaacaatgagtttgagtatgagcttgtgcggtaattacagtcttcagcttcaaaatcgcagaatcgtaagctgcaatcttcaccaggatggcaggcatattgttcccatcaatacgcaccaaaaaccttccaaacctgaaaagtgtcttcggtccaaatggaagattaatggcaataacattgggacatgcattggagtcatgacagtggcacacttggttgctccagtcgctgcaaaagctgaagtggctgcttctatttatgctttggctgatggaagcctcggtgactggtttggaggctttctattttcagctggacagcaggccaatgaagctgttcagggccaattaacctctctcagtttcactagtttggctgtaatttatggggctgggcttgttaccagcctttctccctgtacacttagtgtcttaccactgacccttggttacattggggcatttggctctggcaaaagcagagcacaggttgtaggagattccattgcattctccttaggccttgcaaccacgttagcactgttgggtgtaggagcttcatttgcaggaaaggcttatggacagattggccaaggattacctttggcagcttctggtttggctataattatgggtctgaatcttcttgagatcattgaattacggctcccctcattctttgacagttttgatccacgtgcagcagctgccaatttcccatccagtgtgcaagcatacctcgccgggcttacatttgccttagctgcctcaccttgtagtacacctgtcttggccacccttctgggatatgttgctgcatccaaggacccggtgattggaggcagcttacttttaacatacacaactggctatgtttctcctttactcttggctgcttcttttgctggagcactacagagcttgctctcattccgcaagttctcggcatggatcaatcctataagcggagcaatgctgttaggtggtggtgtatatacgttcttagataggctgttcccagtcacaatggtgatgtagaaaatctcttggctcttaacatgctgtgatattttacattaacagttcaatgtatatatgtcatacaagtattcaattc

SEQ ID NO: 51587 - protein, 362 aa, Glycine max
  peptide (1)..(362): Ceres Seq. ID no. 15169980
NLSGFGFFSFRIGSVFQTMSLSMSLCGNYSLQLQNRRIVSCNLHQDGRHIVPINTHQKPSKPEKCLRSKWKINGNNIGTCIGVMTVAHLVAPVAAKAEVAASIYALADGSLGDWFGGFLFSAGQQANEAVQGQLTSLSFTSLAVIYGAGLVTSLSPCTLSVLPLTLGYIGAFGSGKSRAQVVGDSIAFSLGLATTLALLGVGASFAGKAYGQIGQGLPLAASGLAIIMGLNLLEIIELRLPSFFDSFDPRAAAANFPSSVQAYLAGLTFALAASPCSTPVLATLLGYVAASKDPVIGGSLLLTYTTGYVSPLLLAASFAGALQSLLSFRKFSAWINPISGAMLLGGGVYTFLDRLFPVTMVM

SEQ ID NO: 51588 - protein, 344 aa, Glycine max
  peptide (1)..(344): Ceres Seq. ID no. 15169981
MSLSMSLCGNYSLQLQNRRIVSCNLHQDGRHIVPINTHQKPSKPEKCLRSKWKINGNNIGTCIGVMTVAHLVAPVAAKAEVAASIYALADGSLGDWFGGFLFSAGQQANEAVQGQLTSLSFTSLAVIYGAGLVTSLSPCTLSVLPLTLGYIGAFGSGKSRAQVVGDSIAFSLGLATTLALLGVGASFAGKAYGQIGQGLPLAASGLAIIMGLNLLEIIELRLPSFFDSFDPRAAAANFPSSVQAYLAGLTFALAASPCSTPVLATLLGYVAASKDPVIGGSLLLTYTTGYVSPLLLAASFAGALQSLLSFRKFSAWINPISGAMLLGGGVYTFLDRLFPVTMVM

SEQ ID NO: 51589 - protein, 340 aa, Glycine max
  peptide (1)..(340): Ceres Seq. ID no. 15169982
MSLCGNYSLQLQNRRIVSCNLHQDGRHIVPINTHQKPSKPEKCLRSKWKINGNNIGTCIGVMTVAHLVAPVAAKAEVAASIYALADGSLGDWFGGFLFSAGQQANEAVQGQLTSLSFTSLAVIYGAGLVTSLSPCTLSVLPLTLGYIGAFGSGKSRAQVVGDSIAFSLGLATTLALLGVGASFAGKAYGQIGQGLPLAASGLAIIMGLNLLEIIELRLPSFFDSFDPRAAAANFPSSVQAYLAGLTFALAASPCSTPVLATLLGYVAASKDPVIGGSLLLTYTTGYVSPLLLAASFAGALQSLLSFRKFSAWINPISGAMLLGGGVYTFLDRLFPVTMVM

SEQ ID NO: 51590 - DNA, 2040 bp, Glycine max
  misc_feature (1)..(2040): Ceres Seq. ID no. 15171446
ctcttcatcaacgcacagcttcttcttcttctcatgccttcatagcttcctctcctctccctctttttccacatcttgtttcctaccccagcttctctttctctctgtttcgtccactctcttcatctgcacctgctacattgatggaggtggtcaaagcaattgccaagcacgaacctgcagctcctgaaagtgttgctatcagagctgatcagaagagttatagttacaagcaactcatcacatcggcacagaagatatctaatctcttgtgtggcagtgatgcacagacaggaaatctcggtggagctcgaataggaattgtagccaaaccttctgctgaatttgttgctggaatacttgggatttggcttagtggaggtgttgctgttccgcttgcaaccagctatccagaagtagagctcttgtatgtgattaataattcggatgtatctgcaatactgagtactgaggatcatactgaaataatgcaaagcgtagccaataaaagctcttctcagttttttcatcttccacctgttctcaacaagtcttctgagaaaagcagagataaacattcacagaatgggggaattcatacagataaaattttgttggataagtttggaagatcaagtgaagatccagcactgattttgtacactagtgggacaacgggtaaacctaagggagttgttcatacacacagaagcatcatttcccaggtacaaactttgacaaaagcttgggagtactcatctgctgaccagtttctgcattgtctaccactacatcatgttcatgggcttttcaatggtttaatggcccctctctatgcaggttccacggttgagtttttgccaaaatttagtgtgagaggagtttggcagagatggcgtgagtcatatccaaccgatggttctaaggctgaagaggctataactgtgttcactggagttccaactatctatgcccgattgatacaaggttatcatgcaatggatcctgagctacaagctgcttcagtatctgctgcaaagaacttgcgtcttatgatgtgtgggtcctctgcacttccactgcctgttatgcaagaatgggaagccatcactgggcatcgcttattggaacgatatggcatgactgaatttgttatggcattgtcgaatccattgaaaggtgagcgcaagcctggaaccgttggcaaaccatttcctggtatacaggtcaagattattgcagatgaagagagtgtgaatggaaatactggaatgggtgagctttgcattaaaagcccttcattgtttaaagaatattggaaacttcctgaggtaacgaaggaatcatttactgatgatggattctttaagactggagatgcagttactacagatgaagatggatatttcatcattctaggacgtactaatgctgatataatcaaggctggtggatataagctgtctgcattagaaattgaatcggttataatagagcatccagctgtctcagaatgttgcgttttaggcctaccagacaaagactatggagagattgttagtgcaatcgttgtgccagaggccgatgttaaacgaaaacaagatcaagaatcaaagcctgttctaagcctagaagaattatccaactgggccaaagacaaaattgcaccttacaagattccaactcagctaatcgtgtgggataaactccctcgcaatgccatggggaaggtaaataaaaaagagctgaagaagctgcttgtttcagaacagtgaacaccatttgatcatttattcatattcactaggcaaagttaatttattgaaaccagtttaagatggtggcaatctcaaataaaattgcaccaattattgagtgaaatagaaacctttatattatgacatttataagttgaataagttttagcatattattagggggaagataaaggagaaagtatagcataattttagcattttagctgtatgaaggcgattgattgaatgtgtttaataagaagtatttattgtattgaaaatg

SEQ ID NO: 51591 - protein, 590 aa, Glycine max
  peptide (1)..(590): Ceres Seq. ID no. 15171447
LHQRTASSSSHAFIASSPLPLFPHLVSYPSFSFSLFRPLSSSAPATLMEVVKAIAKHEPAAPESVAIRADQKSYSYKQLITSAQKISNLLCGSDAQTGNLGGARIGIVAKPSAEFVAGILGIWLSGGVAVPLATSYPEVELLYVINNSDVSAILSTEDHTEIMQSVANKSSSQFFHLPPVLNKSSEKSRDKHSQNGGIHTDKILLDKFGRSSEDPALILYTSGTTGKPKGVVHTHRSIISQVQTLTKAWEYSSADQFLHCLPLHHVHGLFNGLMAPLYAGSTVEFLPKFSVRGVWQRWRESYPTDGSKAEEAITVFTGVPTIYARLIQGYHAMDPELQAASVSAAKNLRLMMCGSSALPLPVMQEWEAITGHRLLERYGMTEFVMALSNPLKGERKPGTVGKPFPGIQVKIIADEESVNGNTGMGELCIKSPSLFKEYWKLPEVTKESFTDDGFFKTGDAVTTDEDGYFIILGRTNADIIKAGGYKLSALEIESVIIEHPAVSECCVLGLPDKDYGEIVSAIVVPEADVKRKQDQESKPVLSLEELSNWAKDKIAPYKIPTQLIVWDKLPRNAMGKVNKKELKKLLVSEQ

SEQ ID NO: 51592 - protein, 543 aa, Glycine max
  peptide (1)..(543): Ceres Seq. ID no. 15171448
MEVVKAIAKHEPAAPESVAIRADQKSYSYKQLITSAQKISNLLCGSDAQTGNLGGARIGIVAKPSAEFVAGILGIWLSGGVAVPLATSYPEVELLYVINNSDVSAILSTEDHTEIMQSVANKSSSQFFHLPPVLNKSSEKSRDKHSQNGGIHTDKILLDKFGRSSEDPALILYTSGTTGKPKGVVHTHRSIISQVQTLTKAWEYSSADQFLHCLPLHHVHGLFNGLMAPLYAGSTVEFLPKFSVRGVWQRWRESYPTDGSKAEEAITVFTGVPTIYARLIQGYHAMDPELQAASVSAAKNLRLMMCGSSALPLPVMQEWEAITGHRLLERYGMTEFVMALSNPLKGERKPGTVGKPFPGIQVKIIADEESVNGNTGMGELCIKSPSLFKEYWKLPEVTKESFTDDGFFKTGDAVTTDEDGYFIILGRTNADIIKAGGYKLSALEIESVIIEHPAVSECCVLGLPDKDYGEIVSAIVVPEADVKRKQDQESKPVLSLEELSNWAKDKIAPYKIPTQLIVWDKLPRNAMGKVNKKELKKLLVSEQ

SEQ ID NO: 51593 - protein, 428 aa, Glycine max
  peptide (1)..(428): Ceres Seq. ID no. 15171449
MQSVANKSSSQFFHLPPVLNKSSEKSRDKHSQNGGIHTDKILLDKFGRSSEDPALILYTSGTTGKPKGVVHTHRSIISQVQTLTKAWEYSSADQFLHCLPLHHVHGLFNGLMAPLYAGSTVEFLPKFSVRGVWQRWRESYPTDGSKAEEAITVFTGVPTIYARLIQGYHAMDPELQAASVSAAKNLRLMMCGSSALPLPVMQEWEAITGHRLLERYGMTEFVMALSNPLKGERKPGTVGKPFPGIQVKIIADEESVNGNTGMGELCIKSPSLFKEYWKLPEVTKESFTDDGFFKTGDAVTTDEDGYFIILGRTNADIIKAGGYKLSALEIESVIIEHPAVSECCVLGLPDKDYGEIVSAIVVPEADVKRKQDQESKPVLSLEELSNWAKDKIAPYKIPTQLIVWDKLPRNAMGKVNKKELKKLLVSEQ

SEQ ID NO: 51594 - DNA, 803 bp, Glycine max
  misc_feature (1)..(803): Ceres Seq. ID no. 12612361
cctagaacatcctaatcaaaaatcaaaatcacattttgtctctctccatttcttgtgttgtatatatcatccaatgaagagagatcaaattgcgatgtgttaggagaatagctgtatgagtataaatatgaagacgtagaaagtatggtcttgaatattattttactaaacctcttctcatcaatctatctatctcatgtggacaagcgagtgctccatgttccgcaggctcctctgcacctctcttccccgtctttcaaaaccccaatcttcaagctccttaaccattctcaactcctcactcacccaaaaacaaaaacaaaagcccttatctccccaaaccatcaaatccttctcctcttccaaaatgggggacgcgcgaagacccttattcgtcccaatccccactttggaaaaagcagaacgctccgacctcctccgcgccctagaagcttccatgggctcccctttcagctccgagcctctctctccaaaccctaaccctctaatcatcgtcatcagcggccccagcggcgtcggcaaggacaccctcatcgcgcgcctccgcgactcccgccgcgccctccacttcgttgtcaccgccaccacgcgcccccgccgccccgccgaggtcgacgggaaggactacatcttcgtctccnaggaggagtttctcgggatggtggagcgggaggagctgctggagtacgcgctggtctacggtgactacnagggcgtgccgaagcagcagattcgggagtgtctcgcgcaaggctgcgacgtcgttttgagggttgatattc

SEQ ID NO: 51595 - protein, 202 aa, Glycine max
  peptide (1)..(202): Ceres Seq. ID no. 12612362
  misc_feature (156)..(156): Xaa is any aa, unknown or other
  misc_feature (179)..(179): Xaa is any aa, unknown or other
MWTSECSMFRRLLCTSLPRLSKPQSSSSLTILNSSLTQKQKQKPLSPQTIKSFSSSKMGDARRPLFVPIPTLEKAERSDLLRALEASMGSPFSSEPLSPNPNPLIIVISGPSGVGKDTLIARLRDSRRALHFVVTATTRPRRPAEVDGKDYIFVSXEEFLGMVEREELLEYALVYGDYXGVPKQQIRECLAQGCDVVLRVDI

SEQ ID NO: 51596 - protein, 195 aa, Glycine max
  peptide (1)..(195): Ceres Seq. ID no. 12612363
  misc_feature (149)..(149): Xaa is any aa, unknown or other
  misc_feature (172)..(172): Xaa is any aa, unknown or other
MFRRLLCTSLPRLSKPQSSSSLTILNSSLTQKQKQKPLSPQTIKSFSSSKMGDARRPLFVPIPTLEKAERSDLLRALEASMGSPFSSEPLSPNPNPLIIVISGPSGVGKDTLIARLRDSRRALHFVVTATTRPRRPAEVDGKDYIFVSXEEFLGMVEREELLEYALVYGDYXGVPKQQIRECLAQGCDVVLRVDI

SEQ ID NO: 51597 - protein, 145 aa, Glycine max
  peptide (1)..(145): Ceres Seq. ID no. 12612364
  misc_feature (99)..(99): Xaa is any aa, unknown or other
  misc_feature (122)..(122): Xaa is any aa, unknown or other
MGDARRPLFVPIPTLEKAERSDLLRALEASMGSPFSSEPLSPNPNPLIIVISGPSGVGKDTLIARLRDSRRALHFVVTATTRPRRPAEVDGKDYIFVSXEEFLGMVEREELLEYALVYGDYXGVPKQQIRECLAQGCDVVLRVDI

SEQ ID NO: 51598 - DNA, 1486 bp, Glycine max
  misc_feature (1)..(1486): Ceres Seq. ID no. 15177361
aaaccgaatatttcaaaacttgttctactttttattatcactgttgcatttatttcagatatttagtatttgcctacaagtttgttctttagtttaaacacagacaagacgactctttatggcggctataaccaatttgaacttttcttccttgtgtaaaaaaaggttttgtgtgcgtttgtgcgtgttggagttggctttttgaagtgggtgcatgctgaagttatatgtgtatgtgaaagatgaagaacaatagagataaagaaaagggtaacgacgttgaccagagttacagacagcatcacacgttgtcaatgccaatgatgttttctggtttgaacagagagaaggagatgtcagccatgatctctgctttgacacatgtggtttgtggagaagatgagcatcatggtgctgattactctcttcttaatcacaatattaataatactaatagtgcagttgttggtgatgatgattttactgtaacatcaaatatggcttctggttctatgccaccttcttctacttgttcatctcaaggtggcaactctgttctcaagagaagacgggaatatgataatacaaatgatttctcacgtggaggttcattccctgctatttcaacaattgctgaaagttcaagcacggtaacaagaagaacggcgaatacagtatacgattacgaatacagaacagagaacgtgaaagtagtggaggaagaaccgaggagaaaatacagaggagtgagacagaggccatggggaaaatgggctgcggaaataagagaccctttcaaagctactagggtgtggttaggaacatttgaaaccgctgaggacgcagccagagcctacgatcaagcttcattgcgtttcagaggcaacaaagccaaactcaacttccctgaaaacgttagactcagacaacaacaagaacctccgttgaacttgaaccctccaccacctaatcatggggctattttgtcaattccttcaaccactgttcacactgaggctcttcagggttcacttggttcaagcaatttttatgagcattcttattcgcatcttcatgagtttcccgtgagtctctacgatcagattgcagagtcaacatctactactatggcttctcatcatcttcaatttttgccgccagcttcttcctcaactatgactatgacatctccgcaggcaccaccttcgatttatcctacgcatccagcggcatggtcttctggttatagttataatagctcttcttctgcttcggggtgatgtaaattgcgttttatttcaagtctctctcgtttttgccccttgtattgtatcattgttactctcctctgttttttgcatttgcaccacgaccatttccatccaggagtggttttttgtgaccatgttattatgatcaagcaaatcatataattcacagttaacagtttagtatctgtgtataatagagttttatttatcctccc

SEQ ID NO: 51599 - protein, 345 aa, Glycine max
  peptide (1)..(345): Ceres Seq. ID no. 15177362
MKNNRDKEKGNDVDQSYRQHHTLSMPMMFSGLNREKEMSAMISALTHVVCGEDEHHGADYSLLNHNINNTNSAVVGDDDFTVTSNMASGSMPPSSTCSSQGGNSVLKRRREYDNTNDFSRGGSFPAISTIAESSSTVTRRTANTVYDYEYRTENVKVVEEEPRRKYRGVRQRPWGKWAAEIRDPFKATRVWLGTFETAEDAARAYDQASLRFRGNKAKLNFPENVRLRQQQEPPLNLNPPPPNHGAILSIPSTTVHTEALQGSLGSSNFYEHSYSHLHEFPVSLYDQIAESTSTTMASHHLQFLPPASSSTMTMTSPQAPPSIYPTHPAAWSSGYSYNSSSSASG

SEQ ID NO: 51600 - protein, 321 aa, Glycine max
  peptide (1)..(321): Ceres Seq. ID no. 15177363
MPMMFSGLNREKEMSAMISALTHVVCGEDEHHGADYSLLNHNINNTNSAVVGDDDFTVTSNMASGSMPPSSTCSSQGGNSVLKRRREYDNTNDFSRGGSFPAISTIAESSSTVTRRTANTVYDYEYRTENVKVVEEEPRRKYRGVRQRPWGKWAAEIRDPFKATRVWLGTFETAEDAARAYDQASLRFRGNKAKLNFPENVRLRQQQEPPLNLNPPPPNHGAILSIPSTTVHTEALQGSLGSSNFYEHSYSHLHEFPVSLYDQIAESTSTTMASHHLQFLPPASSSTMTMTSPQAPPSIYPTHPAAWSSGYSYNSSSSASG

SEQ ID NO: 51601 - protein, 319 aa, Glycine max
  peptide (1)..(319): Ceres Seq. ID no. 15177364
MMFSGLNREKEMSAMISALTHVVCGEDEHHGADYSLLNHNINNTNSAVVGDDDFTVTSNMASGSMPPSSTCSSQGGNSVLKRRREYDNTNDFSRGGSFPAISTIAESSSTVTRRTANTVYDYEYRTENVKVVEEEPRRKYRGVRQRPWGKWAAEIRDPFKATRVWLGTFETAEDAARAYDQASLRFRGNKAKLNFPENVRLRQQQEPPLNLNPPPPNHGAILSIPSTTVHTEALQGSLGSSNFYEHSYSHLHEFPVSLYDQIAESTSTTMASHHLQFLPPASSSTMTMTSPQAPPSIYPTHPAAWSSGYSYNSSSSASG

SEQ ID NO: 51602 - DNA, 1573 bp, Glycine max
  misc_feature (1)..(1573): Ceres Seq. ID no. 15171450
acatcctaatcgaaaaaaaaacttgttaacgattttcaactcatgccggctaatttttgctcacaacactctctgcacgtccattcatcacccttaactcaacaaagtcacctttttttgcttcaaagaaaacccagaaggcatatccccttttgtccactttggaccactccataaagttgcaaactcaacatcttgctaccctttattaataattcaaaacaaaaccctctttatggcattctttttatttcactcttagatgcttctttgttaggtttgaatcaatcaaattgactggcctgctgctaacttttttttggccccatttataccctctgctgtaccctcttgtttctcttatcaaacccccattttctcttttctcttttttttgccttctggggggttccaaattccatagtttcctcagaggttgaatgaaatggcagttgatctttgctcagaaaactgtgtggctgcttcctcttcctcttcttctgtgagtccaagaatctcattctcacatgacttctcccaatctgatgtcatccctgttgagcaactcccttttagatcaaactcttctggcttgaatcccaccattgattttgatttttgtgtcagtgagagttttgagcttgagtcatcttcagccgatgagcttttctcacatgggaggatccttcccactgaggtcaagagaaagaataatgctgttccacctatgaagcaattagcaccaaagagtacttctccattgcctcctccttatgctgctcctaacggtgtctccactagtaaaaacttgaagaaagagattaaccccaaagaaagcaagtgtttgaatgatgaagtgtatgagaagcaaagttcaaagtcttccttttggatcttcaagagaagtagtagttgtggaagtggacctagaaggagcttttgtcctttgccacttctatctagaagcaattcaactggatcatcaaccccaagtgttaagaggagtcatcctctttcaaaggagggtactgttaacaacaatattaaacagaaacattcttccacaaggttgatgccaaacggttatcttcatcatcatcatcatcaaaagcctccattgaattacaagagtactcatcatggatcttatggtaacagtgttagagtcaatcctgtcctcaatgttccacctgcaaacctatttggtttggcttcaatcttctccaacaatagagacaagagcaagaagtagttttagtttacttgcaaaccggtggggtctatcttcttttttccatgtacttcttaggtttacaattgccatgtgaactagcaaaattgaggtatagcctataggtaaaattttgaaaggtaaatggtttgcatcatgaagacaaattggtacaaagagatgtatgtgaaggtgatggacacgaatgatacaatgcaagcacatgttttggggcacaaaatgactggtaactgttgttttcgtggctgtaccttgcctgttttttgttcctctgcttttgttctttggactatgtgtaaatacattgactttgattgctgc

SEQ ID NO: 51603 - protein, 268 aa, Glycine max
  peptide (1)..(268): Ceres Seq. ID no. 15171451
MAVDLCSENCVAASSSSSSVSPRISFSHDFSQSDVIPVEQLPFRSNSSGLNPTIDFDFCVSESFELESSSADELFSHGRILPTEVKRKNNAVPPMKQLAPKSTSPLPPPYAAPNGVSTSKNLKKEINPKESKCLNDEVYEKQSSKSSFWIFKRSSSCGSGPRRSFCPLPLLSRSNSTGSSTPSVKRSHPLSKEGTVNNNIKQKHSSTRLMPNGYLHHHHHQKPPLNYKSTHHGSYGNSVRVNPVLNVPPANLFGLASIFSNNRDKSKK

SEQ ID NO: 51604 - protein, 174 aa, Glycine max
  peptide (1)..(174): Ceres Seq. ID no. 15171452
MKQLAPKSTSPLPPPYAAPNGVSTSKNLKKEINPKESKCLNDEVYEKQSSKSSFWIFKRSSSCGSGPRRSFCPLPLLSRSNSTGSSTPSVKRSHPLSKEGTVNNNIKQKHSSTRLMPNGYLHHHHHQKPPLNYKSTHHGSYGNSVRVNPVLNVPPANLFGLASIFSNNRDKSKK

SEQ ID NO: 51605 - DNA, 1382 bp, Glycine max
  misc_feature (1)..(1382): Ceres Seq. ID no. 14311934
atttttaaaacatatgtgtcccctcatccaagctgtgtctcccttctctctcttatattaatcactcactcacacattcgccacttccacacagcatagatcacctttccttttttcccacagaaaaaaacaccacctttctttttccgactaaaggttcgccggaaaatgcctctatcctcctcttcctcctccgccgtagactccgccgtctccggcgagatcatgctctttggcgttagagtcgtggtggactccatgcggaagagtgtgagtatgaacaacctctcgcagtacgagcttcctcgcgacgctgccaacgccaaagacgacgccgcaggatacgcctccgccgatgatgcagctccgatcaactccgacaagaaccgcgaccgcaagcgagggattccatggactaaggaagagcacaagctattcttggtggggttgcagaaagtggggaaaggtgattggagagggatctcaaggaactatgtcaaaacgaggacgccaacacaggttgctagccatgctcagaagtactttctccgccgcaccaacctcaatcgccgtcgccggagatccagcctctttgacatcaccaccgactcggtctctacaacccctatggaggaaggagtacagatccagcatcaagataatgtgtctctctttcatccagtgtaccctgtaacccctgaaggaagcaacatgaatggatttccaaagatgtccatgtatccaaaggatgttggttctggagtcatgtcagttcaagctgggaatccaatggaaacactcactttgggacaaggaaatgtggaacagaatgggccaagtactaagctagtttgtacaacccctattgttccagatcatagaggctccacagtgtctgatatcactgcaagtttgagttccattgatccaccaacactgtctctggggttatctttgtcatccagtccaagacaaacatcatcatcaatacatgcagctttacatgcactgccatacttcaacaatcaagatagcatcataagtgctgcttgaaaaagataaacatatatctgtggcccattatctatagctactttggattcacagagatgtttatcactaatctactttctctttttggcgggagaaatataaaacatgttaaaggaaaagatgatgaattagatccttctgaaggcaaggtaataagtcatgagaccaatttgatccttctgttccttgtacagaccatggaaaggtcctgtcatgtttttgtttattgtttattggccacttttatgtttgtagttactataactgaaaataaccaagtacttcctgttaatttttaatgaatataaatctggactatatcaaagcat

SEQ ID NO: 51606 - protein, 294 aa, Glycine max
  peptide (1)..(294): Ceres Seq. ID no. 14311935
MPLSSSSSSAVDSAVSGEIMLFGVRVVVDSMRKSVSMNNLSQYELPRDAANAKDDAAGYASADDAAPINSDKNRDRKRGIPWTKEEHKLFLVGLQKVGKGDWRGISRNYVKTRTPTQVASHAQKYFLRRTNLNRRRRRSSLFDITTDSVSTTPMEEGVQIQHQDNVSLFHPVYPVTPEGSNMNGFPKMSMYPKDVGSGVMSVQAGNPMETLTLGQGNVEQNGPSTKLVCTTPIVPDHRGSTVSDITASLSSIDPPTLSLGLSLSSSPRQTSSSIHAALHALPYFNNQDSIISAA

SEQ ID NO: 51607 - protein, 275 aa, Glycine max
  peptide (1)..(275): Ceres Seq. ID no. 14311936
MLFGVRVVVDSMRKSVSMNNLSQYELPRDAANAKDDAAGYASADDAAPINSDKNRDRKRGIPWTKEEHKLFLVGLQKVGKGDWRGISRNYVKTRTPTQVASHAQKYFLRRTNLNRRRRRSSLFDITTDSVSTTPMEEGVQIQHQDNVSLFHPVYPVTPEGSNMNGFPKMSMYPKDVGSGVMSVQAGNPMETLTLGQGNVEQNGPSTKLVCTTPIVPDHRGSTVSDITASLSSIDPPTLSLGLSLSSSPRQTSSSIHAALHALPYFNNQDSIISAA

SEQ ID NO: 51608 - protein, 264 aa, Glycine max
  peptide (1)..(264): Ceres Seq. ID no. 14311937
MRKSVSMNNLSQYELPRDAANAKDDAAGYASADDAAPINSDKNRDRKRGIPWTKEEHKLFLVGLQKVGKGDWRGISRNYVKTRTPTQVASHAQKYFLRRTNLNRRRRRSSLFDITTDSVSTTPMEEGVQIQHQDNVSLFHPVYPVTPEGSNMNGFPKMSMYPKDVGSGVMSVQAGNPMETLTLGQGNVEQNGPSTKLVCTTPIVPDHRGSTVSDITASLSSIDPPTLSLGLSLSSSPRQTSSSIHAALHALPYFNNQDSIISAA

SEQ ID NO: 51609 - DNA, 1259 bp, Glycine max
  misc_feature (1)..(1259): Ceres Seq. ID no. 14311912
ataaaatctcattgtctccgaactcttctttcctcgtactccatcatttccttgttcttcttccttctcttcattctgtctctacccttcaacgcaactttctttcttttctattgagcttccaatattctcacgccttgcaatcgtagttgcaccctccaaactccttcccttttctttcatctaaaccagaaaccttttttccctcaaagagaggaatagagattaacaatcgtggatactgtgatatggttagttgtagagagagaactacaatttttgagaaatataattagggtgcgtgacaaacaatcgtggttcaggtacttgcagtaagagaacatattgtaaaactaaaagggaaaaatggccttagatcactttgaggagactgtgcaccaaaaaggaaattggaaatcttccagtgaaatcattgcagattctgatagaaatgcctctggtgactttgactgcaacatctgcctggagtgtgtgcaagatccagtggtgacactttgtggtcatctttattgctggccctgcatatacaaatggcttcattttcaaagcacctctttggatgatgaagaacaacagaggccacaatgtcctgtatgcaaatcagaagtttctcaatcctcccttgttccattatacggccgtggccaaaccacattaccttctaaagggaagccacgtcaagtaggcactgtcataccacaaagacctcatggtccaagaacacttaacactagaagtgtttcacaacctatttctcaaagttaccatccctatagtaatccttatcatcctcaacaacacttcaactcgattccaagcggttacacctcacctatgattagaacaactggttcaatagacaacacatttggaatctttggtgagatgatatatgcaagggtctttggtaaccacgtgtcaaacattcatacatacgccaattcgtacaatctttcggggaccagtaacccaaggatgagaagacatttaatgcaagttgataaatcactcagcagaataagttgtttcctcctttgctgcctagttttgtgtctgctcttattctgattgctacttcattttcatcattagttatagtgcatccttacatagaatacattcactcattgatccagatgtattctatgttagagaagctgcaaattgatgctgagttatgtgtaaattaccaatctctctacgagctatatgaagtgaataatgatattctcataccg

SEQ ID NO: 51610 - protein, 240 aa, Glycine max
  peptide (1)..(240): Ceres Seq. ID no. 14311913
MALDHFEETVHQKGNWKSSSEIIADSDRNASGDFDCNICLECVQDPVVTLCGHLYCWPCIYKWLHFQSTSLDDEEQQRPQCPVCKSEVSQSSLVPLYGRGQTTLPSKGKPRQVGTVIPQRPHGPRTLNTRSVSQPISQSYHPYSNPYHPQQHFNSIPSGYTSPMIRTTGSIDNTFGIFGEMIYARVFGNHVSNIHTYANSYNLSGTSNPRMRRHLMQVDKSLSRISCFLLCCLVLCLLLF

SEQ ID NO: 51611 - DNA, 1246 bp, Glycine max
  misc_feature (1)..(1246): Ceres Seq. ID no. 14311878
ttactccattcgtccttttccttttatttacaccacatagccccaccctcaccctcttacagaatgggaaggactccggtcaggtttgagagggtagcggcggcctttgacgctgacgtggcgcgtgtgaggctctgcaatagcagcgagaatgagcagcactcgccggaggactcggctgatttgtcagatctggtgaaatcgttcatggagagagggggagagggagaagatgcggttggtgttcgttcggatgatggggttgagaattttgattctgagaagagggagattttggagggaatatttgatgatgacgacggggatgccaaagaaaagattagaagagaagttcaacttgcatgggggcttgttgccgaaaaggataactcatcaccccaattcaaacaacagttgatgtctctcctacggtacagaggttttgatgctgggctctgcaaatgcaagtgggaaaaaaatacaagattcccagctggtgactatgagtacatcgacgtaaattttgcaggaaatcgctacattgttgaaatttcccttgtcacagaattcgaaatagctcgttccacagaccaatatgccgcgttacttgatgttttccctctaatatttgttggtaaaatggaagaactcaagcaggttgtgaggctaatgtgcactgctattaagggttctatgaaaagcatgaatatgtatatacctccgtggagaagaattgggtacatgcaagctaagtggtttagttcttacaaaagaataacggacgaggttgcaactaacagggcatcatcagcttttttcactacaaggtccattggatttgatgcaaggccagtgaaatcctacaattgcagggatgattatgggactaaacctgcattcagagtttgccatttgactactgcattttatgtggacagccctgggatgcaattatagtcaaatgctgcggcatgtgcattcatctaattgctttttggtgaattaatggtgttgataaatgagtgagtggaagtgccttagctcgggcataaaaagcgcttaagcaaagattttggtgcagtgttctggcggaattttgtttttattactagggatagtatcatagcaaggatgattggtaggagataataattagtgaaatcaatgtaaagtagataattggttggttggttgctccaaaatgtaatttctcttcaaattatatatattagtgatggttgtgttt

SEQ ID NO: 51612 - protein, 318 aa, Glycine max
  peptide (1)..(318): Ceres Seq. ID no. 14311879
LLHSSFSFYLHHIAPPSPSYRMGRTPVRFERVAAAFDADVARVRLCNSSENEQHSPEDSADLSDLVKSFMERGGEGEDAVGVRSDDGVENFDSEKREILEGIFDDDDGDAKEKIRREVQLAWGLVAEKDNSSPQFKQQLMSLLRYRGFDAGLCKCKWEKNTRFPAGDYEYIDVNFAGNRYIVEISLVTEFEIARSTDQYAALLDVFPLIFVGKMEELKQVVRLMCTAIKGSMKSMNMYIPPWRRIGYMQAKWFSSYKRITDEVATNRASSAFFTTRSIGFDARPVKSYNCRDDYGTKPAFRVCHLTTAFYVDSPGMQL

SEQ ID NO: 51613 - protein, 297 aa, Glycine max
  peptide (1)..(297): Ceres Seq. ID no. 14311880
MGRTPVRFERVAAAFDADVARVRLCNSSENEQHSPEDSADLSDLVKSFMERGGEGEDAVGVRSDDGVENFDSEKREILEGIFDDDDGDAKEKIRREVQLAWGLVAEKDNSSPQFKQQLMSLLRYRGFDAGLCKCKWEKNTRFPAGDYEYIDVNFAGNRYIVEISLVTEFEIARSTDQYAALLDVFPLIFVGKMEELKQVVRLMCTAIKGSMKSMNMYIPPWRRIGYMQAKWFSSYKRITDEVATNRASSAFFTTRSIGFDARPVKSYNCRDDYGTKPAFRVCHLTTAFYVDSPGMQL

SEQ ID NO: 51614 - protein, 249 aa, Glycine max
  peptide (1)..(249): Ceres Seq. ID no. 14311881
MERGGEGEDAVGVRSDDGVENFDSEKREILEGIFDDDDGDAKEKIRREVQLAWGLVAEKDNSSPQFKQQLMSLLRYRGFDAGLCKCKWEKNTRFPAGDYEYIDVNFAGNRYIVEISLVTEFEIARSTDQYAALLDVFPLIFVGKMEELKQVVRLMCTAIKGSMKSMNMYIPPWRRIGYMQAKWFSSYKRITDEVATNRASSAFFTTRSIGFDARPVKSYNCRDDYGTKPAFRVCHLTTAFYVDSPGMQL

SEQ ID NO: 51615 - DNA, 1493 bp, Glycine max
  misc_feature (1)..(1493): Ceres Seq. ID no. 14311938
gtccttcctttttctctccctcactcatccgttccgttggttcagaatattcatcaccatcgggcccagcaccaaaccccttcccctctcccccaaattagggtttctctctgggaatgtgattcagcgcgcggcagcatcaatggcggagaagagattcggcgtgatagggtacgctctggcgccgaagaagcagaacagcttcatccgcgactcgctggtgagcctagcgaaatcgcgagggattgagctcgtgcgcgtggactccgacaagcccctcgcggatcagggccccttcgactgcgtcctccacaagctctacggcgacgactggaagcgccagctccaggaattccacaccctctacccaaacgccgtcatcctcgacgcccccgaggcgatcgagcgcctccacaaccgaatctcgatgctgcaggtcgtgtcggagctccgaattgaggaccgacccgagacctttgggatccccaagcagattgtgatatacgacaaggccaccctcctggacccgcaggcctgggagagcctcaagtttcccgtgatagcgaagcctctcgttgccgacggcagcgccaagtcgcacaagatggcgctcgtgttcacgcgcgacgcactgaacaagctcaagccgccgatcgtgctgcaggagttcgtgaaccacggtggcgtgatcttcaaggtgtacgtggtgggcgagcacgtgcgctgcgtgaagcgcaagtccctccccgacgtgtccgacgaggagaaggcgctcggcggcgtttccgaggacctgatgtcgttctcgcaggtctccaacctcgccaccgtgaacgactgcgacggctattaccgtttgatgcatctcgacgacgacaccgaaatgccccccgacgccttcgtcgtcgacatcgctgggggcctcaggcgcgccctcaagctcaacctcttcaatttcgatgtcataagagacgctcgatacgggaaccgttatcttatcattgatatcaactatttccctgggtacgccaaaatgcccggctacgaggccgttttgacccagtttttctgcgaagtaatgctcaagaagaaacagcaagaggaacaacagcaagaagagggtaacgctcctaaggagaaagaggaatctcttcaagcttgagataattttgtcacacagatgttgttctgtcggtgtcggtgtttggtggtttttgggtaacccgaatttccccagtggacccattggttggcacgagttgcaaatttcgatttagggtgcagttggtacagtagggttgtttgtggctagttttttttaaccctcttcaacaacatgtatattcctttcaccattgctctctggagataggtaccttttcaaataccctcaacatttaggaaagttgtattttgcggcttaagattaccaagctagaaactgtttactttgtgttttttttactcaataacttcatttttcccattttgcc

SEQ ID NO: 51616 - protein, 386 aa, Glycine max
  peptide (1)..(386): Ceres Seq. ID no. 14311939
SFLFLSLTHPFRWFRIFITIGPSTKPLPLSPKLGFLSGNVIQRAAASMAEKRFGVIGYALAPKKQNSFIRDSLVSLAKSRGIELVRVDSDKPLADQGPFDCVLHKLYGDDWKRQLQEFHTLYPNAVILDAPEAIERLHNRISMLQVVSELRIEDRPETFGIPKQIVIYDKATLLDPQAWESLKFPVIAKPLVADGSAKSHKMALVFTRDALNKLKPPIVLQEFVNHGGVIFKVYVVGEHVRCVKRKSLPDVSDEEKALGGVSEDLMSFSQVSNLATVNDCDGYYRLMHLDDDTEMPPDAFVVDIAGGLRRALKLNLFNFDVIRDARYGNRYLIIDINYFPGYAKMPGYEAVLTQFFCEVMLKKKQQEEQQQEEGNAPKEKEESLQA

SEQ ID NO: 51617 - protein, 339 aa, Glycine max
  peptide (1)..(339): Ceres Seq. ID no. 14311940
MAEKRFGVIGYALAPKKQNSFIRDSLVSLAKSRGIELVRVDSDKPLADQGPFDCVLHKLYGDDWKRQLQEFHTLYPNAVILDAPEAIERLHNRISMLQVVSELRIEDRPETFGIPKQIVIYDKATLLDPQAWESLKFPVIAKPLVADGSAKSHKMALVFTRDALNKLKPPIVLQEFVNHGGVIFKVYVVGEHVRCVKRKSLPDVSDEEKALGGVSEDLMSFSQVSNLATVNDCDGYYRLMHLDDDTEMPPDAFVVDIAGGLRRALKLNLFNFDVIRDARYGNRYLIIDINYFPGYAKMPGYEAVLTQFFCEVMLKKKQQEEQQQEEGNAPKEKEESLQA

SEQ ID NO: 51618 - protein, 244 aa, Glycine max
  peptide (1)..(244): Ceres Seq. ID no. 14311941
MLQVVSELRIEDRPETFGIPKQIVIYDKATLLDPQAWESLKFPVIAKPLVADGSAKSHKMALVFTRDALNKLKPPIVLQEFVNHGGVIFKVYVVGEHVRCVKRKSLPDVSDEEKALGGVSEDLMSFSQVSNLATVNDCDGYYRLMHLDDDTEMPPDAFVVDIAGGLRRALKLNLFNFDVIRDARYGNRYLIIDINYFPGYAKMPGYEAVLTQFFCEVMLKKKQQEEQQQEEGNAPKEKEESLQA

SEQ ID NO: 51619 - DNA, 1427 bp, Glycine max
  misc_feature (1)..(1427): Ceres Seq. ID no. 14311543
aaccctctttggcgtggctaacaaaacgacgttttgagtaacgcggcagcgtgtgccgggagtgtcgtttaatcgcccgccaagacattttcctttttcatttcatcgctgagtccctaaagtgcagtgaaatggtccttcttcacctcccaaggttccctctctacctcgttaccttatctccctccctcactccccgagcctactccaaaaccaccctcttacggccacccaaatccactctcaccgcctcagaacccgtaggtgttaacccttccccaacagagctatccctcgagaagctcttcgttccgccggagaccaccgtgtccctcgaaagttccagagtcttgaacggttccaacattctgttgagtaactacgccaatgatgctctggtattgcaggccgagtttgtgaaaagcagcgtgaagaccgaggattgtccctccgatggacttgctgagttcgctctcgttggccgctccaacgtcggaaaatcctcgctcctcaactccctcgtgcgccgcaagaagctcgccttaacttcgaagaaacctggcaaaacgcaatgtataaaccattttcggattaataatagctggtacctggttgatttgcctggatatgggtatgcatctgcaccgcatgaacttaggatggattgggaaaaattcaccaaaaactatttccttaaccgctcaacgttagtttcagtattccttctaatagatgctagcattcctgctaaacaaattgatcttgactatgccagttggttgggtcagaatcagatcccaatgacattaatcttcaccaaatgtgacaagcggaaaaagaaaaagaatggaggcaaaagaccagaagaaaatgttaatgattttcaggatttgattcgaggtttcttccaatcagtgcctccatggatcatgaccagtagtgttaccaatcagggtcgtgatgagatactcctccatatggcccagctacggaactactggctcaagcactagttctgagaaacatgatatcgttagagcagatacgcatttccagatagacttgcttgattaccagctaatatggttatcaatttatctattttcctggtgtgccttctctgtattgcccaagtacctacaaggcctaaagctagtgacatgaaagctggataaagaaaactatttagaacaaagcttgatactgtactgtacaacaccatgcctgcgtgaggttctctactcccagccctgtacgattgttctaatgaagtttgttttggatgttcacaaatggttattatcacctgtaaattagtaatgatattttcattcaaataattggatacttccaaagtactattgtcgttgattttaaagaacttatatgtgagatttttgccactcccccgaagtgacacttcatag

SEQ ID NO: 51620 - protein, 293 aa, Glycine max
  peptide (1)..(293): Ceres Seq. ID no. 14311544
MVLLHLPRFPLYLVTLSPSLTPRAYSKTTLLRPPKSTLTASEPVGVNPSPTELSLEKLFVPPETTVSLESSRVLNGSNILLSNYANDALVLQAEFVKSSVKTEDCPSDGLAEFALVGRSNVGKSSLLNSLVRRKKLALTSKKPGKTQCINHFRINNSWYLVDLPGYGYASAPHELRMDWEKFTKNYFLNRSTLVSVFLLIDASIPAKQIDLDYASWLGQNQIPMTLIFTKCDKRKKKKNGGKRPEENVNDFQDLIRGFFQSVPPWIMTSSVTNQGRDEILLHMAQLRNYWLKH

SEQ ID NO: 51621 - DNA, 999 bp, Glycine max
  misc_feature (1)..(999): Ceres Seq. ID no. 14313302
accatgataggaactccaataagcaaaagccaattgatacgtgcatatcacaaaaactactcttacacaccaaaaaaatcctctatcaccaaactcacctataccctcaaactcaaggccctatagtccaagcaagtgagtgagtgttacaacttacacagcatggaatatagtcaatatactacttattcagcagaaggtgttgaggcagaaacttacacaagtagctgcaccaccccatcaagatcaaagaagagaaacaacaacaacacaagaaggttcagtgatgaacaaatcaaatcattggagaccatgtttgagtcagagacaaggcttgagcctagaaagaagttgcagcttgcaagagagcttggattgcagccaaggcaagttgctatatggtttcagaacaagagggctagatggaagtcaaagcaacttgagagagactatggcatactccaatccaattataacactttggcttcacgttttgaagctctgaagaaggaaaaacaaacattactaattcagttgcagaagctgaatcatctaatgcagaagccaatggagccaagtcagagatgcacacaagttgaagcagcaaacagcatggacagtgaatcagaaaatggaggcaccatgaaatgtaaagctgagggaaagccaagcccatcatcattggaaagatcagaacatgtacttggtgttctgtctgatgatgacactagcataaaggtggaagactttaacctagaagatgaacatggccttctgaattttgttgagcatgctgatggttccttgacttcaccagaagattggagtgcttttgaatccaatgatctatttggccaatcaaccactgatgattaccaatggtgggacttctggtcctgaatgaaacagaataaccaaaattttgtggaggaaatatatatatatatatatatatatatatatatatatatatatgatgaatgcttcatgtttggttcc

SEQ ID NO: 51622 - protein, 245 aa, Glycine max
  peptide (1)..(245): Ceres Seq. ID no. 14313303
MEYSQYTTYSAEGVEAETYTSSCTTPSRSKKRNNNNTRRFSDEQIKSLETMFESETRLEPRKKLQLARELGLQPRQVAIWFQNKRARWKSKQLERDYGILQSNYNTLASRFEALKKEKQTLLIQLQKLNHLMQKPMEPSQRCTQVEAANSMDSESENGGTMKCKAEGKPSPSSLERSEHVLGVLSDDDTSIKVEDFNLEDEHGLLNFVEHADGSLTSPEDWSAFESNDLFGQSTTDDYQWWDFWS

SEQ ID NO: 51623 - protein, 195 aa, Glycine max
  peptide (1)..(195): Ceres Seq. ID no. 14313304
MFESETRLEPRKKLQLARELGLQPRQVAIWFQNKRARWKSKQLERDYGILQSNYNTLASRFEALKKEKQTLLIQLQKLNHLMQKPMEPSQRCTQVEAANSMDSESENGGTMKCKAEGKPSPSSLERSEHVLGVLSDDDTSIKVEDFNLEDEHGLLNFVEHADGSLTSPEDWSAFESNDLFGQSTTDDYQWWDFWS

SEQ ID NO: 51624 - DNA, 1221 bp, Glycine max
  misc_feature (1)..(1221): Ceres Seq. ID no. 15177858
cattacggaaaaactttgtgcttgtgtacgagttacttgatgaagttattgattttggttatgttcaaacaacatctactgaattgttgaagtcctatgttttcaatgagccgcttgtaattgatgctgcacgtctgccacctcttggacctgctgcaatttttacgcaaggaacaaaaagaatgccagggatagctgtcacaaaatctgttgttgctacagagcctgggggtagaaagagggaagagatttttgtagacataattgagaaaatcagcatcactttcagctccagtggatatatactgacttctgagattgatggcaccatacaaatgaagagctatctttctggcaatcctgaaattcgattagcacttaatgatgacctctccattggaagaagccagggatcagctttcggttataggagctcatctggctcaggaacagttatattagatgactgtaatttccatgaatctgttcgtcttgatagttttgatatagacagaactctatccctggtaccaccggatggtgaatttccagtcatgaactaccgtttgacacaggaatttagtcctccttttcgtattaatgctttgattgaagaagcagggtcacttaaggcagaagtaattcttaaagtaagtgccgagtttccctcaagtgtaacagctaacactatcaaagtgcagatgccactaccaaaatgtacctccagagttagttttgagctggaacctggagctgtaggacaaacaactgattttaaggaagcaaataagaggctagaatggagtttaagaaagatcgtcgggggatcggagcacactctacatgcaaaactaaccttttctcaggaatctcacgttaatataacaaaagaatcaggacctgtgagcatgacatttactataccaatgcataacgtttcacggcttcaggtaaagtatttgcagatagcaaagaaatctgcaacgcatgaaccataccggtgggttagatatgttacacaggcgaattcctacgtcgctcgtatatgatgccgttaagaacactgtcccctcccccgctctttgtttttctattttgttttcctgctcttattgctctttacacacatgctttgtttatttacttattctttatttgtaaattacactctaagtttacattctaagtcgaatatagatgacgttttcagtttgcctgatt

SEQ ID NO: 51625 - protein, 348 aa, Glycine max
  peptide (1)..(348): Ceres Seq. ID no. 15177859
LRKNFVLVYELLDEVIDFGYVQTTSTELLKSYVFNEPLVIDAARLPPLGPAAIFTQGTKRMPGIAVTKSVVATEPGGRKREEIFVDIIEKISITFSSSGYILTSEIDGTIQMKSYLSGNPEIRLALNDDLSIGRSQGSAFGYRSSSGSGTVILDDCNFHESVRLDSFDIDRTLSLVPPDGEFPVMNYRLTQEFSPPFRINALIEEAGSLKAEVILKVSAEFPSSVTANTIKVQMPLPKCTSRVSFELEPGAVGQTTDFKEANKRLEWSLRKIVGGSEHTLHAKLTFSQESHVNITKESGPVSMTFTIPMHNVSRLQVKYLQIAKKSATHEPYRWVRYVTQANSYVARI

SEQ ID NO: 51626 - protein, 288 aa, Glycine max
  peptide (1)..(288): Ceres Seq. ID no. 15177860
MPGIAVTKSVVATEPGGRKREEIFVDIIEKISITFSSSGYILTSEIDGTIQMKSYLSGNPEIRLALNDDLSIGRSQGSAFGYRSSSGSGTVILDDCNFHESVRLDSFDIDRTLSLVPPDGEFPVMNYRLTQEFSPPFRINALIEEAGSLKAEVILKVSAEFPSSVTANTIKVQMPLPKCTSRVSFELEPGAVGQTTDFKEANKRLEWSLRKIVGGSEHTLHAKLTFSQESHVNITKESGPVSMTFTIPMHNVSRLQVKYLQIAKKSATHEPYRWVRYVTQANSYVARI

SEQ ID NO: 51627 - protein, 237 aa, Glycine max
  peptide (1)..(237): Ceres Seq. ID no. 15177861
MKSYLSGNPEIRLALNDDLSIGRSQGSAFGYRSSSGSGTVILDDCNFHESVRLDSFDIDRTLSLVPPDGEFPVMNYRLTQEFSPPFRINALIEEAGSLKAEVILKVSAEFPSSVTANTIKVQMPLPKCTSRVSFELEPGAVGQTTDFKEANKRLEWSLRKIVGGSEHTLHAKLTFSQESHVNITKESGPVSMTFTIPMHNVSRLQVKYLQIAKKSATHEPYRWVRYVTQANSYVARI

SEQ ID NO: 51628 - DNA, 1294 bp, Glycine max
  misc_feature (1)..(1294): Ceres Seq. ID no. 14311957
gccattttcttctctacctatctgccactccacttcccttcttttctacttctcggtgagtcccatcctatcccctccttccaccaagcctacagtaacggaatcatccaatatttcaaaggaaaacatagccattagcagaatcaagggtagctagcgtatatggaagcaggagtaggaggaggaagggtaggtggtgcatgcgacaacgaaattagcgacggaatgcaatgcatgaaccaccctcacaacaacagcaacaacaatcccggtgggatttgcgccttctgtctccaagataaactccgcaaccttctctcttcttcacctcctctttcttcctcgtcttctccttccccttctttcactcctccacctcctccctctgttaaaaccgaccacgaccacaacacgcgctctcgcctccccttcctcgtacccaagaaaaacaacaacaaaaaaccctcctcctacaccaacatttcttcatcagctaatatcattttcaaacgcagcaagtccactgccacacccaaaaggaaccagtttctcgaggagaaggacttcagtcccagaaaaagaaacggtttttggtctttcctctatccttcttcttcaaaggaagctaagagctttggtccaaatggtaagtacagaggcaagtgcttgggaaaaaagagtgatcacgtgattattgtggaagaggacaagtgtttgagctcttcttcttcttcttcttcttctaaggtttcgagatctagatctgttgggtgtggtagcagaagcttctccagtgatttcttcgagaggatctcttctggcctcggcgactgcactctacggagagtggagtctcagcgtgaaggaggaaaacctaagctagctgcttctgctaatactatgaaccattgcatgaaggaaagagtgagatgtggaggaatattcagtggcttcgttatgaattcgtcttcatcaacaacgtcttcttcgtcttgggtttcttcttctgttgatgatggcagaggaaggagttggggttgggcgtttgctagtcctatgagagctttcaccaccaaagggtctcctccttcttcttcttcgaagagagatgcttctgataagaacaacgccacgcctaacttatcagccattcctaccttgctcactgttagaggctgaaagagaataaaaaatgataaactattcggaggcttttatttatttggtttatatgcacattagcatgctctgtttatcttcgctaataataataatgtaatactcagtttactcc

SEQ ID NO: 51629 - protein, 338 aa, Glycine max
  peptide (1)..(338): Ceres Seq. ID no. 14311958
MEAGVGGGRVGGACDNEISDGMQCMNHPHNNSNNNPGGICAFCLQDKLRNLLSSSPPLSSSSSPSPSFTPPPPPSVKTDHDHNTRSRLPFLVPKKNNNKKPSSYTNISSSANIIFKRSKSTATPKRNQFLEEKDFSPRKRNGFWSFLYPSSSKEAKSFGPNGKYRGKCLGKKSDHVIIVEEDKCLSSSSSSSSSKVSRSRSVGCGSRSFSSDFFERISSGLGDCTLRRVESQREGGKPKLAASANTMNHCMKERVRCGGIFSGFVMNSSSSTTSSSSWVSSSVDDGRGRSWGWAFASPMRAFTTKGSPPSSSSKRDASDKNNATPNLSAIPTLLTVRG

SEQ ID NO: 51630 - protein, 317 aa, Glycine max
  peptide (1)..(317): Ceres Seq. ID no. 14311959
MQCMNHPHNNSNNNPGGICAFCLQDKLRNLLSSSPPLSSSSSPSPSFTPPPPPSVKTDHDHNTRSRLPFLVPKKNNNKKPSSYTNISSSANIIFKRSKSTATPKRNQFLEEKDFSPRKRNGFWSFLYPSSSKEAKSFGPNGKYRGKCLGKKSDHVIIVEEDKCLSSSSSSSSSKVSRSRSVGCGSRSFSSDFFERISSGLGDCTLRRVESQREGGKPKLAASANTMNHCMKERVRCGGIFSGFVMNSSSSTTSSSSWVSSSVDDGRGRSWGWAFASPMRAFTTKGSPPSSSSKRDASDKNNATPNLSAIPTLLTVRG

SEQ ID NO: 51631 - protein, 314 aa, Glycine max
  peptide (1)..(314): Ceres Seq. ID no. 14311960
MNHPHNNSNNNPGGICAFCLQDKLRNLLSSSPPLSSSSSPSPSFTPPPPPSVKTDHDHNTRSRLPFLVPKKNNNKKPSSYTNISSSANIIFKRSKSTATPKRNQFLEEKDFSPRKRNGFWSFLYPSSSKEAKSFGPNGKYRGKCLGKKSDHVIIVEEDKCLSSSSSSSSSKVSRSRSVGCGSRSFSSDFFERISSGLGDCTLRRVESQREGGKPKLAASANTMNHCMKERVRCGGIFSGFVMNSSSSTTSSSSWVSSSVDDGRGRSWGWAFASPMRAFTTKGSPPSSSSKRDASDKNNATPNLSAIPTLLTVRG

SEQ ID NO: 51632 - DNA, 1547 bp, Glycine max
  misc_feature (1)..(1547): Ceres Seq. ID no. 14311731
gttgcccgttactcctcctatctatcgtgcgtatctctttctctctccatttttatttatatatttctctccattatttggtgtgcatgctctagacacacacacaccccaccaccaccaacactgagttttagcagaaggatagagagcagaatgattcaaagaactgtgtcctttcccagtttaaggaaattgcttcttcgggctggttgttctaaatctgcttcgtccaagatcggaacttacaattgctttgcttctcagtcctcccctctaccgagccacaaccctagttaccgtgatgacgagtatgctgatgtggactgggacagtcttggatttggactgatgcccactgattatatgtatattactaaatgttgtgagggccaaaattttggacaaggacaactcagtcgttatgggaacattgaactcagtccatcagctggtgtcctaaattatggtcagggtttattcgaaggcacgaaagcatacagaaaagaaaatgggggcttgctactcttccgtccagaagaaaatgccattcgcatgaagactggtgcccaaagaatgtgcatggcatcgccttccattgatcattttgttgatgctttgaagcaaactgtcttggctaataagcgttgggttcctccaccgggcaaaggatccttgtaccttaggcctctgctcctaggaactggtccggttttgggtttggctcctgcacctgaatacacattcctcatatttgcttcccctgttcgcaactatttcaaggagggctctgctccactcaacttgtacgtggaggaaaactttgaccgtgcttctagccgcggcactggaaacgttaaaaccatttccaattatgcaccggtcttgatggcacaaattcaagccaagaaaagaggattttcggatgtgctataccttgattcagacaccaagaaaaatctcgaggaggtctcttcttgtaacatttttattgccaagggcaaatgcatctcaacacctgctactaatggaactattctttccggaattacccgaaaaagtgtcattgaaattgctcgcgatcatggctatcaggtagaagagcgtgctgttgccgtggatgaattgattgaggctgatgaagttttctgcacaggaactgcggtcggtgttgctccagtagggagtatcacataccaggataaaaggatggaatatataacaggttctggaaccatttgtcaagagctgaacaataccatttcaggaattcaaacgggtactattgaagataagaagggatggattgtcgaagttgattaacaacgagtgtttataatttataattgtttattccaatgttattaaaccaattttaaactgtaataatgattgcccatacgaaaaatggcgcatatactgttgttcgttatctaaaagcatgttatatgtgtaaaatgttttttttggatacatatatatgtaaaatgatgtgcacattataaattataatgattatataaagtaaaggacttgcaaatcatattccg

SEQ ID NO: 51633 - protein, 439 aa, Glycine max
  peptide (1)..(439): Ceres Seq. ID no. 14311732
VARYSSYLSCVSLSLSIFIYIFLSIIWCACSRHTHTPPPPTLSFSRRIESRMIQRTVSFPSLRKLLLRAGCSKSASSKIGTYNCFASQSSPLPSHNPSYRDDEYADVDWDSLGFGLMPTDYMYITKCCEGQNFGQGQLSRYGNIELSPSAGVLNYGQGLFEGTKAYRKENGGLLLFRPEENAIRMKTGAQRMCMASPSIDHFVDALKQTVLANKRWVPPPGKGSLYLRPLLLGTGPVLGLAPAPEYTFLIFASPVRNYFKEGSAPLNLYVEENFDRASSRGTGNVKTISNYAPVLMAQIQAKKRGFSDVLYLDSDTKKNLEEVSSCNIFIAKGKCISTPATNGTILSGITRKSVIEIARDHGYQVEERAVAVDELIEADEVFCTGTAVGVAPVGSITYQDKRMEYITGSGTICQELNNTISGIQTGTIEDKKGWIVEVD

SEQ ID NO: 51634 - protein, 388 aa, Glycine max
  peptide (1)..(388): Ceres Seq. ID no. 14311733
MIQRTVSFPSLRKLLLRAGCSKSASSKIGTYNCFASQSSPLPSHNPSYRDDEYADVDWDSLGFGLMPTDYMYITKCCEGQNFGQGQLSRYGNIELSPSAGVLNYGQGLFEGTKAYRKENGGLLLFRPEENAIRMKTGAQRMCMASPSIDHFVDALKQTVLANKRWVPPPGKGSLYLRPLLLGTGPVLGLAPAPEYTFLIFASPVRNYFKEGSAPLNLYVEENFDRASSRGTGNVKTISNYAPVLMAQIQAKKRGFSDVLYLDSDTKKNLEEVSSCNIFIAKGKCISTPATNGTILSGITRKSVIEIARDHGYQVEERAVAVDELIEADEVFCTGTAVGVAPVGSITYQDKRMEYITGSGTICQELNNTISGIQTGTIEDKKGWIVEVD

SEQ ID NO: 51635 - protein, 323 aa, Glycine max
  peptide (1)..(323): Ceres Seq. ID no. 14311734
MPTDYMYITKCCEGQNFGQGQLSRYGNIELSPSAGVLNYGQGLFEGTKAYRKENGGLLLFRPEENAIRMKTGAQRMCMASPSIDHFVDALKQTVLANKRWVPPPGKGSLYLRPLLLGTGPVLGLAPAPEYTFLIFASPVRNYFKEGSAPLNLYVEENFDRASSRGTGNVKTISNYAPVLMAQIQAKKRGFSDVLYLDSDTKKNLEEVSSCNIFIAKGKCISTPATNGTILSGITRKSVIEIARDHGYQVEERAVAVDELIEADEVFCTGTAVGVAPVGSITYQDKRMEYITGSGTICQELNNTISGIQTGTIEDKKGWIVEVD

SEQ ID NO: 51636 - DNA, 1233 bp, Glycine max
  misc_feature (1)..(1233): Ceres Seq. ID no. 14311725
aacaaaatagaaaagtagcagcaccctgctcatttgttgggatcccattcttccacaacagttcaaagtttgctctctcattcctcacccctccgcctcctctctcacgtacgcacactgttttcacctaaaaagctgctacccaatactccgtacaccgtatacctaaaccaccccaactacaacggacactaacaaatcattattattactgttactattacatcacattcttcacacactaatcaaaatcatcattttccatatatatcgccagcaagatacaagaagaaagaaagatgcttccgtttcggagattctatgggttcgagagctggctagaccacgacgctggccatgctcagagttcgctgatcaaaaaggcggtggagttggacggcgccagatcgaaaacggagcggaaatcaacggaagcgtgcaagagtcacagggaagctgagaggagacgcaggcagagaatcaactctcacctctccaccttacgtaccctccttcctaacgccgccaagtcggacaaggcgtcgttgctgggggaagtggtggagcacgtgaagcggctgaggaagcaagccgatgacgtgacgtgcggggactcgtactcctcgcgcagcggcgaaccgggttcggtccggtcggaggcatggccgtttccgggggagtgcgatgaggtgacggtgagttactgtgacggcgaggacggggaaccgaagcgggtgaaggcgacggtgtgctgcggggaccggaccggtctgaaccgggacgtgtcccaagcgatccggtcggttcgggccaaagcggttcgcgcggagatgatgacggttgggggaaggacgaagagtgttgtggtggtggagtgggaaaaggaagaagaggaggttggggcgctggaacgggctttgaaggctgtggtggagaatcgggctttggtgggctttggaatgggcccagtcattctgggccagaaacggggtagggattgctgtgcttcgcctagtagtgaggttgactctgacttcttgctgaggaatgggagcttttgctaattcgtaattagtttctttttttggtaaaagaaataattagatgcttagttagctttcgggttggtaatcttggagatgcctttttttttatttatataggcatgatgctttagtctataccatagtctaaaatctaaaatttataataatatataattgtggtaatttt

SEQ ID NO: 51637 - protein, 254 aa, Glycine max
  peptide (1)..(254): Ceres Seq. ID no. 14311726
MLPFRRFYGFESWLDHDAGHAQSSLIKKAVELDGARSKTERKSTEACKSHREAERRRRQRINSHLSTLRTLLPNAAKSDKASLLGEVVEHVKRLRKQADDVTCGDSYSSRSGEPGSVRSEAWPFPGECDEVTVSYCDGEDGEPKRVKATVCCGDRTGLNRDVSQAIRSVRAKAVRAEMMTVGGRTKSVVVVEWEKEEEEVGALERALKAVVENRALVGFGMGPVILGQKRGRDCCASPSSEVDSDFLLRNGSFC

SEQ ID NO: 51638 - DNA, 1482 bp, Glycine max
  misc_feature (1)..(1482): Ceres Seq. ID no. 14311882
atataaaaataaattaaaaatatcttttaaaaaaattgcagtggcagcacacacatctttgtgtttcaaaaatggaacctaatgacaaccaactcacctctttcttccaccaccaccaccaacagcaccaacaccaccagccgccgccaccaccgcagaccacggcgtctccgaccaacgggctcttgccgaacgcggatgggtcccacatactttacccccactctgtggcgtccgctgtttcgtcgcagcttgaaccggcgaagcggaagcgcgggcggccgaggaagtacggaacgccggagcaagctctggccgcgaagaaagccgctacgacgttgtctcattcgttctctgtggacaagaagccccactccccgacgttcccttcctccaagaaatcccattccttcgctctaggcaatgcagggcaagggttcactccgcatgtcatttctgttgctgctggtgaggatgttggccagaaaattatgttatttatgcaacaaagtaggcgtgagatgtgtattctgtctgcatctggttccatctctaatgcctctcttcgccagccagcaacctcaggaggcagcattgcatatgagggtcggtttgagattatttcacttactggttcttatgtccgtaatgaacttggaactcgaactggtggtctcagtgtatgcttatctaatactgatggacaaatcataggtggtggagttggtgggccgcttaaagcagctggtccagttcaggtcatcgttggaacattctttattgacaacaagaaggatactggtgctggtgttaaaggtgacatctctgccagcaagttgccatctccagttggtgaaccggtatcaagtttaggtttccgccaatcagttgactctcccagtggtaatccaatccggggaaatgatgagcatcaagctatggggggaagtcatttcatgattcaacagcttggtttgcatgggacgcctccccggtccacagactggggtcatccggattcaagaaatactggttttgagttgacaggtcatggggcgcaccagtctcctgagaatggaggctatgaacaaattcccgattgaagaaccaagatggcttttggatttgatagcagtgatgaatttgcggtagatgtatgatatctctacataccaccagtctttgtcacgtgatgctgtttatagtatgcaccattcattaaggatcgcggcttctgaaaattaatactcgtgcatctccttgaaaatattgttctgcctcgtttactgatgttgtatttataaatcactaaatcagggctgcttcatttttgcgggcctgttagtttataccgggataaatataatagatatatgcttcctagattagctaatctattgtggactatattttccttccattttcaaggtgcagtcttaatattgttcaaaattctatcaagcatatattattatggttctt

SEQ ID NO: 51639 - protein, 343 aa, Glycine max
  peptide (1)..(343): Ceres Seq. ID no. 14311883
MEPNDNQLTSFFHHHHQQHQHHQPPPPPQTTASPTNGLLPNADGSHILYPHSVASAVSSQLEPAKRKRGRPRKYGTPEQALAAKKAATTLSHSFSVDKKPHSPTFPSSKKSHSFALGNAGQGFTPHVISVAAGEDVGQKIMLFMQQSRREMCILSASGSISNASLRQPATSGGSIAYEGRFEIISLTGSYVRNELGTRTGGLSVCLSNTDGQIIGGGVGGPLKAAGPVQVIVGTFFIDNKKDTGAGVKGDISASKLPSPVGEPVSSLGFRQSVDSPSGNPIRGNDEHQAMGGSHFMIQQLGLHGTPPRSTDWGHPDSRNTGFELTGHGAHQSPENGGYEQIPD

SEQ ID NO: 51640 - protein, 203 aa, Glycine max
  peptide (1)..(203): Ceres Seq. ID no. 14311884
MLFMQQSRREMCILSASGSISNASLRQPATSGGSIAYEGRFEIISLTGSYVRNELGTRTGGLSVCLSNTDGQIIGGGVGGPLKAAGPVQVIVGTFFIDNKKDTGAGVKGDISASKLPSPVGEPVSSLGFRQSVDSPSGNPIRGNDEHQAMGGSHFMIQQLGLHGTPPRSTDWGHPDSRNTGFELTGHGAHQSPENGGYEQIPD

SEQ ID NO: 51641 - protein, 200 aa, Glycine max
  peptide (1)..(200): Ceres Seq. ID no. 14311885
MQQSRREMCILSASGSISNASLRQPATSGGSIAYEGRFEIISLTGSYVRNELGTRTGGLSVCLSNTDGQIIGGGVGGPLKAAGPVQVIVGTFFIDNKKDTGAGVKGDISASKLPSPVGEPVSSLGFRQSVDSPSGNPIRGNDEHQAMGGSHFMIQQLGLHGTPPRSTDWGHPDSRNTGFELTGHGAHQSPENGGYEQIPD

SEQ ID NO: 51642 - DNA, 1540 bp, Glycine max
  misc_feature (1)..(1540): Ceres Seq. ID no. 15171382
tttgcataatgttcaaaaccaagaaaaataataataatttgcataatgtgtattatgagagtgacctaactaacccacacttcatatcttctcgtgtggacacaaattggaattggaattgaaattccccactactttttcaatgccatatgctgcaaacccttcacttttcacttcttttctagctctcatttgatattcccaatctctctgtttctatttctttgttcgttgcttcacactatggcttcttggtgggatttaagacccttctttcgttttcagtctgttaggacccgatttcaggaattcaggacgagggaagtccaacttggttcacatactgtgagttctcatggatatgcagttgcaagaacacacaaacatgattggctcattctcttgctcctcgtgttgattgttatcagcctgtacattatccatcctttccatcgctttgttgggaaggatatgatgactgatctcaaatatccactgaagagtaatacagttcctgcttgggctattcctatatatgcaattttattgcccatagtgatctttcttggtgtctacatccgaaggagagacgtctatgatcttcatcatgctgtgctgggtttattgttctccgttttaataacagcagtatttactgaggcaataaaaaatgcagtaggtcgacctcgaccagacttcttctggcgatgttttccagatggaaaggatgtttatgataaatggggagatgtcatttgtcatggtgaccaaaaggtcataaaggaaggatacaagagtttcccaagtggtcatacttcagggtcattttctggtctgggttttttatcattgtacttatctggaaaaataaaagcatttgatcgcaaaggtcatgttgcaaaactttgcattgtttttctaccactacttgttgcatcacttgttggcatttctcgagttgatgactactggcaccactggcaagacgtgtttgcgggaggtcttttagggcttacagtggctacattttgctatttgcagttttttcctcctccttatcattctgaaggctggggtccttatgcgtattttaggatgttggaagaatctcgtggtatgacccaagttcctagtgttcaaaattctggtcaagcgcagttagcagaggctcaggctgagagccaagaggaacaaggtctccacgggtgtatggggttaactttatcacgggatcatcatgcagcattgaatgactgtgaatctgggaggggataaagtctgtacatttcatgatcttgctctctgtaaaatgtaaatcagatgttagttcgtagcctaggattttaaccagtatttaaaactaacacattttgttgaatagttgtttctattcagtcactagtgtctctgaaaactttgaagcgtagttgtttgtaagagtcaggtttgggacaattaacctttgttatttcaatattttgtgaatatgttgacataagaaaatacgaaatctcttgagaagattgccgttcattcaaac

SEQ ID NO: 51643 - protein, 343 aa, Glycine max
  peptide (1)..(343): Ceres Seq. ID no. 15171383
MASWWDLRPFFRFQSVRTRFQEFRTREVQLGSHTVSSHGYAVARTHKHDWLILLLLVLIVISLYIIHPFHRFVGKDMMTDLKYPLKSNTVPAWAIPIYAILLPIVIFLGVYIRRRDVYDLHHAVLGLLFSVLITAVFTEAIKNAVGRPRPDFFWRCFPDGKDVYDKWGDVICHGDQKVIKEGYKSFPSGHTSGSFSGLGFLSLYLSGKIKAFDRKGHVAKLCIVFLPLLVASLVGISRVDDYWHHWQDVFAGGLLGLTVATFCYLQFFPPPYHSEGWGPYAYFRMLEESRGMTQVPSVQNSGQAQLAEAQAESQEEQGLHGCMGLTLSRDHHAALNDCESGRG

SEQ ID NO: 51644 - protein, 267 aa, Glycine max
  peptide (1)..(267): Ceres Seq. ID no. 15171384
MMTDLKYPLKSNTVPAWAIPIYAILLPIVIFLGVYIRRRDVYDLHHAVLGLLFSVLITAVFTEAIKNAVGRPRPDFFWRCFPDGKDVYDKWGDVICHGDQKVIKEGYKSFPSGHTSGSFSGLGFLSLYLSGKIKAFDRKGHVAKLCIVFLPLLVASLVGISRVDDYWHHWQDVFAGGLLGLTVATFCYLQFFPPPYHSEGWGPYAYFRMLEESRGMTQVPSVQNSGQAQLAEAQAESQEEQGLHGCMGLTLSRDHHAALNDCESGRG

SEQ ID NO: 51645 - protein, 266 aa, Glycine max
  peptide (1)..(266): Ceres Seq. ID no. 15171385
MTDLKYPLKSNTVPAWAIPIYAILLPIVIFLGVYIRRRDVYDLHHAVLGLLFSVLITAVFTEAIKNAVGRPRPDFFWRCFPDGKDVYDKWGDVICHGDQKVIKEGYKSFPSGHTSGSFSGLGFLSLYLSGKIKAFDRKGHVAKLCIVFLPLLVASLVGISRVDDYWHHWQDVFAGGLLGLTVATFCYLQFFPPPYHSEGWGPYAYFRMLEESRGMTQVPSVQNSGQAQLAEAQAESQEEQGLHGCMGLTLSRDHHAALNDCESGRG

SEQ ID NO: 51646 - DNA, 882 bp, Glycine max
  misc_feature (1)..(882): Ceres Seq. ID no. 13588995
cttcttcctagtgttacaacattccacaaacaactctttcttttaaattttataatattcttctgagtctgttttttttttttctcacaagaccattataccagatccagtttgaagagatcgagtagtatgagcagccagacgtcgaagccgaacgtggatggagtgcacatcgatgtgaaggttgtggagaggccaatgagagaaaggccctacgatctgttgctgcggtttcttggcctttcactcactcttgtggcagtcatcattgttggtgttgacaatgagaccaaagtcatctcctatgccgaaatgcagttcaaagccactgctaagtgggaatatgtctctgccattgtgtttttcttggtgataaacgcgatagcatgctcatacgcagctgcatcattggttatcacattgatggcaagaagcaatggaagaaaaaacgatgtgacactgttggggctaacagcgctagatcttgtgatgatggctttgttgttctcggccaatggtgcagcttgtgcagtgggagtgatagcacagaaggggaactcgcacgtgcaatggatgaaagtgtgcaacgtctttgatgcctattgtcgccacgtcactgcagcattggtcctctccatcattggatccacggtctttctcttgctcgtgctcctttctgttcttaaactccattacagaacaggaatttagatctcgatatgatatgatacacgctataatatatatttgtagggttaattaattaattgagggtgttcttgtacgtgtgaatcgtgtttttggcatagaccttgtgcacttgttgtggttgatgaagaacgccaaagcacttaaaagatatagatgctatatttaatttgg

SEQ ID NO: 51647 - protein, 193 aa, Glycine max; identical to SEQ ID NO: 51345
  peptide (1)..(193): Ceres Seq. ID no. 15220927

SEQ ID NO: 51648 - protein, 170 aa, Glycine max; identical to SEQ ID NO: 51346
  peptide (1)..(170): Ceres Seq. ID no. 15220928

SEQ ID NO: 51649 - protein, 132 aa, Glycine max; identical to SEQ ID NO: 51347
  peptide (1)..(132): Ceres Seq. ID no. 15220929

SEQ ID NO: 51650 - DNA, 1207 bp, Glycine max
  misc_feature (1)..(1207): Ceres Seq. ID no. 15171390
atatatgtattgcgcgcaattcagatctagcttttgcacaatgcaagttctataggctcgtttggttttgccgattagtgtttactgaaacaacgttttttgtgatatcgagaaaaaaaaaaagagtgatgtcgaggagaccggggaatcctactagaaggttcggtgacaatggcggtggattgttctcttcgaaatctaggtcgccaccggttttgtctattgcgcttgtaattgtgggaggtttgtttctcattggctatatgtatagaggctcaggtggatctagcagccgtatagattctgttagcagggttgaaggtgattatttgtgcagtggagaggtccaacaagcaattccccttttacagaaagcatatggagatagcatgcataaagttttgcatgttggtcctgatacttgttatgtggtctctaaattgctgaaggaggatgaaactgacgcctggggaatagaaccatatgatatagaggatgctgataataattgcaaagcacttatacgtagaggcagtgtgcgtgtgtctgatatcaagtttcctcttccatacaggccaaaatctttctctcttgtaattgtttcagatgctctggattacctgtctcccagatacctcaataaaactcttccagatttggtgagagtagcatctgatggtgtagtgatatttactggttttcccaccactcaaaaggccaaggtagcggatgtttctaaatttggaaaagcggccaagatgaggagttcatcctggtgggtcaagtttttcctccagattaacttagaggagaatgaagctgctgttaagaagtttgaactggcttcatccaagagttcatatgttccgaaatgccagatattccacttgaagtcactccattgacttgtgggatgattcagcattggagctctgttgctgcttctccattttcatttaaaacactttcttctctataaaggtaatttaattcttggaaatatactcgccatagatggtgtatcatttttgttgatagatttttattctttgaattccagcccctgactgtaaaagacacatcaatttagtatttttactaaattattagttgaattaggcaatctataagtaagtcgcagtgattgttgtgcgaaagtaatattacttcttttgttgagatataaagataaaaattaaatgtcatc

SEQ ID NO: 51651 - protein, 300 aa, Glycine max
  peptide (1)..(300): Ceres Seq. ID no. 15171391
ICIARNSDLAFAQCKFYRLVWFCRLVFTETTFFVISRKKKRVMSRRPGNPTRRFGDNGGGLFSSKSRSPPVLSIALVIVGGLFLIGYMYRGSGGSSSRIDSVSRVEGDYLCSGEVQQAIPLLQKAYGDSMHKVLHVGPDTCYVVSKLLKEDETDAWGIEPYDIEDADNNCKALIRRGSVRVSDIKFPLPYRPKSFSLVIVSDALDYLSPRYLNKTLPDLVRVASDGVVIFTGFPTTQKAKVADVSKFGKAAKMRSSSWWVKFFLQINLEENEAAVKKFELASSKSSYVPKCQIFHLKSLH

SEQ ID NO: 51652 - protein, 258 aa, Glycine max
  peptide (1)..(258): Ceres Seq. ID no. 15171392
MSRRPGNPTRRFGDNGGGLFSSKSRSPPVLSIALVIVGGLFLIGYMYRGSGGSSSRIDSVSRVEGDYLCSGEVQQAIPLLQKAYGDSMHKVLHVGPDTCYVVSKLLKEDETDAWGIEPYDIEDADNNCKALIRRGSVRVSDIKFPLPYRPKSFSLVIVSDALDYLSPRYLNKTLPDLVRVASDGVVIFTGFPTTQKAKVADVSKFGKAAKMRSSSWWVKFFLQINLEENEAAVKKFELASSKSSYVPKCQIFHLKSLH

SEQ ID NO: 51653 - protein, 213 aa, Glycine max
  peptide (1)..(213): Ceres Seq. ID no. 15171393
MYRGSGGSSSRIDSVSRVEGDYLCSGEVQQAIPLLQKAYGDSMHKVLHVGPDTCYVVSKLLKEDETDAWGIEPYDIEDADNNCKALIRRGSVRVSDIKFPLPYRPKSFSLVIVSDALDYLSPRYLNKTLPDLVRVASDGVVIFTGFPTTQKAKVADVSKFGKAAKMRSSSWWVKFFLQINLEENEAAVKKFELASSKSSYVPKCQIFHLKSLH

SEQ ID NO: 51654 - DNA, 1259 bp, Glycine max
  misc_feature (1)..(1259): Ceres Seq. ID no. 14311862
acaaatattgaaaaacgatttgctttgttaatttgatggcgttgattctccttttatttcttggtatgagcatatcatactacgaagttgatgcaaggagcaaaaatctaccagatatgcaacagagttttaccagatcactaaatttgaagagcattcttcctacaatgaacagtgactttgagtgcatcggtatatacaagcaaccagcttttaaacatcgtttgttgaaaaaccacaaaatccagcttaatccgactttctcaaggtacacgatgcaaaccagactgccgttcatggaaaaaacttttcaaattcataattccaacaaaggatgcccttcaggaaaagtgcctattcgcatgctaaaactgaggcaagaaatcaactataatttttcagaatcacaacctgaaaattttcgtcaatattcccggaacccctatcaacattttgctacccttgagacaactccaagtacaacctatcacggagcaagtgcatggatcagcgccagtgataatctattggtgcaagggacccaatatagcctttcccagatttggcttcaaaatggtcctctttcagaacttaacagtattcaagtcggagtcggtgttaatcccagagtatatggagacgataagccacatctcgctagcttttggacaggggataattttaaaaaaaccggatgttttgatgctatctgcccaggttttgtgcaagtgcatcctcgtattaccttaggacaaaccattgaaccctcatttacaggtggattagatggcaaagactatattgctatcaaagtgacacaggattcagtatcaggccattggtggttgcatgtagaaggaagtgatggaagtgaagatgttgggtattggccaaaggaaatattcactcacttacgcaaaggatcatctttgattaaatttggaggtgaagcttatggaccccctaatattggaagtcctccaatgggtactggaaaattgccaaagacttcatttcctaactcaggtttctttgcaagacttcaaattgtggattcaaaatttagggaacttgatgtgaatcctatagacatgaagtcatattgtgacaccagttcagattgctatgatttgttgtatcatggagatcaaggggctcaatttaggcaagcttttctctttggtggtcctggcggccaatgtggtgtataactaaatttataattacatccattttcaataaatgttcagtttattatc

SEQ ID NO: 51655 - protein, 391 aa, Glycine max
  peptide (1)..(391): Ceres Seq. ID no. 14311863
MALILLLFLGMSISYYEVDARSKNLPDMQQSFTRSLNLKSILPTMNSDFECIGIYKQPAFKHRLLKNHKIQLNPTFSRYTMQTRLPFMEKTFQIHNSNKGCPSGKVPIRMLKLRQEINYNFSESQPENFRQYSRNPYQHFATLETTPSTTYHGASAWISASDNLLVQGTQYSLSQIWLQNGPLSELNSIQVGVGVNPRVYGDDKPHLASFWTGDNFKKTGCFDAICPGFVQVHPRITLGQTIEPSFTGGLDGKDYIAIKVTQDSVSGHWWLHVEGSDGSEDVGYWPKEIFTHLRKGSSLIKFGGEAYGPPNIGSPPMGTGKLPKTSFPNSGFFARLQIVDSKFRELDVNPIDMKSYCDTSSDCYDLLYHGDQGAQFRQAFLFGGPGGQCGV

SEQ ID NO: 51656 - protein, 381 aa, Glycine max
  peptide (1)..(381): Ceres Seq. ID no. 14311864
MSISYYEVDARSKNLPDMQQSFTRSLNLKSILPTMNSDFECIGIYKQPAFKHRLLKNHKIQLNPTFSRYTMQTRLPFMEKTFQIHNSNKGCPSGKVPIRMLKLRQEINYNFSESQPENFRQYSRNPYQHFATLETTPSTTYHGASAWISASDNLLVQGTQYSLSQIWLQNGPLSELNSIQVGVGVNPRVYGDDKPHLASFWTGDNFKKTGCFDAICPGFVQVHPRITLGQTIEPSFTGGLDGKDYIAIKVTQDSVSGHWWLHVEGSDGSEDVGYWPKEIFTHLRKGSSLIKFGGEAYGPPNIGSPPMGTGKLPKTSFPNSGFFARLQIVDSKFRELDVNPIDMKSYCDTSSDCYDLLYHGDQGAQFRQAFLFGGPGGQCGV

SEQ ID NO: 51657 - protein, 364 aa, Glycine max
  peptide (1)..(364): Ceres Seq. ID no. 14311865
MQQSFTRSLNLKSILPTMNSDFECIGIYKQPAFKHRLLKNHKIQLNPTFSRYTMQTRLPFMEKTFQIHNSNKGCPSGKVPIRMLKLRQEINYNFSESQPENFRQYSRNPYQHFATLETTPSTTYHGASAWISASDNLLVQGTQYSLSQIWLQNGPLSELNSIQVGVGVNPRVYGDDKPHLASFWTGDNFKKTGCFDAICPGFVQVHPRITLGQTIEPSFTGGLDGKDYIAIKVTQDSVSGHWWLHVEGSDGSEDVGYWPKEIFTHLRKGSSLIKFGGEAYGPPNIGSPPMGTGKLPKTSFPNSGFFARLQIVDSKFRELDVNPIDMKSYCDTSSDCYDLLYHGDQGAQFRQAFLFGGPGGQCGV

SEQ ID NO: 51658 - DNA, 1217 bp, Glycine max
  misc_feature (1)..(1217): Ceres Seq. ID no. 14311859
gttgtgttgttaggcttgtttgtattgtgttagtaccattttctaatctcatcatctaacccttccatcgtagtttccacatttctcctaccgaaaagtcaaaactacccactcacccaggtaggcacaggcagcgatggacgtaggagccggcgacgatcattccccggaagccgtcatatcgcggtggaaattcgcggtgtcgcagcagtaccagcacatgctggacaaaacgacgccgcacgttctccggcggtggatcgggtgcctggtggttgccgccgtgtacgtgctccgcgtgtacttggtccaaggcttctacatcgtctcctacgccctcggcatttacatcctcaacctcctcatcggcttcctctcccctcaggtcgatcccgagattagcgacggccccaccctccccacccgaggatccgacgagttccgccctttcgttcgacgcctccccgagttcaagttctggtactcgatcacaaaggctttttgcattgcatttgtgatgactttctttagtgcatttgatgttccagtattctggccaatactccttttctactgggtggttctattcacacttacaatgaggagacaaatatcacacatgatcaaatacaaatatgtaccattctcatttgggaaactgcgctatgatggaaagagagcagcagaaggcacaagcccgaccatggactgaaattttcagcttaattgaactttatttgccacattttttaagtcacaaccccgcatgtggcttgatatcattggctgaagaagattctttgaggtctagtatgggcgtatacatctggatgttcaattcccaattgagcaactgtttggacatcatcattgtttctatgccctggtagtggtagaagctttagctttggggagatgttgagggctctctctttacatcccccttctagtaaaatcatttttctttattttcttttttctaaataggtgggcaaatgccaaactcttattgttaaattcatagttaaataacgagaattttaagaagcctgtgcagaaggaatccccttcattatttgcaatgggggtattaacgatctgtcttttccattgtattttttttttcttcattttaatcatgtgattctcatgaacttaatttttttttatatagatttgcccatataatactattacctccttgaggttttcttggt

SEQ ID NO: 51659 - protein, 191 aa, Glycine max
  peptide (1)..(191): Ceres Seq. ID no. 14311860
MDVGAGDDHSPEAVISRWKFAVSQQYQHMLDKTTPHVLRRWIGCLVVAAVYVLRVYLVQGFYIVSYALGIYILNLLIGFLSPQVDPEISDGPTLPTRGSDEFRPFVRRLPEFKFWYSITKAFCIAFVMTFFSAFDVPVFWPILLFYWVVLFTLTMRRQISHMIKYKYVPFSFGKLRYDGKRAAEGTSPTMD

SEQ ID NO: 51660 - protein, 163 aa, Glycine max
  peptide (1)..(163): Ceres Seq. ID no. 14311861
MLDKTTPHVLRRWIGCLVVAAVYVLRVYLVQGFYIVSYALGIYILNLLIGFLSPQVDPEISDGPTLPTRGSDEFRPFVRRLPEFKFWYSITKAFCIAFVMTFFSAFDVPVFWPILLFYWVVLFTLTMRRQISHMIKYKYVPFSFGKLRYDGKRAAEGTSPTMD

SEQ ID NO: 51661 - DNA, 1234 bp, Glycine max
  misc_feature (1)..(1234): Ceres Seq. ID no. 15171406
aaaaccaaccaaattaccaaagttacaaactcccttaagagaagaaaacaaaaataaaaataaaattaaaaaaaaacacatgtttttgttcactaaacaattaaagaaaaaataaatgcttcttaaccacattggcgccggattctgttgggtggacccgccacgacccgacccgaatcccagaacccgaataggcccctcgcgttttcatcgacggggggcctcgacgccgcgtccggcgaggcatgcggcgttccacggagtgcgaatggagaagaaaggcggcaagcggcggtcgatatgcaccgccgacgagcttcaccgcgtggcagtttcgaactccaattggaagctcgctctgtggcgctaccgtccttctcctgaggccctgtcgaggaatcacccgcttttgttgttgtcaggggttgctaccaatgcaataggctatgatctttctcctgagtcttcatttgctcggtacatgtcagcccaaggtttcgatacatggattcttgaggttcgaggtgctgggttgagcacacttggagatagcttggaggaagatgaggaatgcctcaagaatttttctaagattgattctgttattaatgatgatattggtgaaagcagtgcttcttttgtatcagaagttcctcatatgaaaacgagaggatcagaggtagtaactaaatatgaggaaatgcagctaatgacgaggttcatggagattcttacaaggatatctgaaaggcttgcaggatttctcaatggagatttgttggaaggacagaactctgcaattgctggacaaatcaaggatttcaatcggaggcttcgagctattattgaaggtcagctgttgttcccagcaaaaattttagaattgcaagaccgttttgctgccaatctagaagagttccagaaacagcttgagctgatggtcaagtatgattgggactttgaccattatttggaagaggacgtacctgctgctgtgagatgactttcctttgggatacattacttttagcaagatctgtacttttaactattttgttacttcttttgtgtaattttaatatttgtttgttccactatatattggcctaaaatttttggatgttctcattaaatttgtttttcaattgttggtttgataattcgtacattagatggagtacataagggctcaatgccaaccaagagatggaaaattgctggcaattggtcactc

SEQ ID NO: 51662 - protein, 295 aa, Glycine max
  peptide (1)..(295): Ceres Seq. ID no. 15171407
MLLNHIGAGFCWVDPPRPDPNPRTRIGPSRFHRRGASTPRPARHAAFHGVRMEKKGGKRRSICTADELHRVAVSNSNWKLALWRYRPSPEALSRNHPLLLLSGVATNAIGYDLSPESSFARYMSAQGFDTWILEVRGAGLSTLGDSLEEDEECLKNFSKIDSVINDDIGESSASFVSEVPHMKTRGSEVVTKYEEMQLMTRFMEILTRISERLAGFLNGDLLEGQNSAIAGQIKDFNRRLRAIIEGQLLFPAKILELQDRFAANLEEFQKQLELMVKYDWDFDHYLEEDVPAAVR

SEQ ID NO: 51663 - protein, 244 aa, Glycine max
  peptide (1)..(244): Ceres Seq. ID no. 15171408
MEKKGGKRRSICTADELHRVAVSNSNWKLALWRYRPSPEALSRNHPLLLLSGVATNAIGYDLSPESSFARYMSAQGFDTWILEVRGAGLSTLGDSLEEDEECLKNFSKIDSVINDDIGESSASFVSEVPHMKTRGSEVVTKYEEMQLMTRFMEILTRISERLAGFLNGDLLEGQNSAIAGQIKDFNRRLRAIIEGQLLFPAKILELQDRFAANLEEFQKQLELMVKYDWDFDHYLEEDVPAAVR

SEQ ID NO: 51664 - protein, 173 aa, Glycine max
  peptide (1)..(173): Ceres Seq. ID no. 15171409
MSAQGFDTWILEVRGAGLSTLGDSLEEDEECLKNFSKIDSVINDDIGESSASFVSEVPHMKTRGSEVVTKYEEMQLMTRFMEILTRISERLAGFLNGDLLEGQNSAIAGQIKDFNRRLRAIIEGQLLFPAKILELQDRFAANLEEFQKQLELMVKYDWDFDHYLEEDVPAAVR

SEQ ID NO: 51665 - DNA, 1854 bp, Glycine max
  misc_feature (1)..(1854): Ceres Seq. ID no. 15171438
agtttccattttccaatcaaagtctcttattcctctttgtattaattttttcctcttctcccttttcattttccggtggcaattcaaatcgcactctttgcgtttgtgctgatccactgtgaatgaaaaaaacaaaactaagagagagaagagagaaaaattacaacaacattattatttattgtaactaattagctaattaattggttattaaaaattataaggccatgtttggcgaaaccgttccgcgaccacagttcatgcaatcggagccgagaatgtcgacgacggaggcgctcaccgacgacgagttcacgatgcaaagcagtagcacggcgtcaccgatgagcccttactactacgagcagggaaggttaagcggcgaaggctcgccaatgacgatgtcaccgtggaaccagacaacgaactccccattctccaaacctcaatggtctcaagaacaaaacagcgtcccgcaaaacgcgctcgtaggttctcttgtccgagaagagggacacatctattcgcttgctgcttccggcgatcttctgtacaccggttccgacagcaagaatattcgtgtctggaagaacctcgaggaatattccgggttcaaatccaacagtggtttggtgaaaaccataatattgtctggtcagaagatcttcaccggtcaccaagacggcaaaatccgcgtctggaaggtctcccctaagaaccctagcttacacaaacgtgccggcacgttgccaacgcttaaagacatcttcaagagctcaattaagcccagcaactacgtcgaggttcgacgacacaaaacggcgttatggatcagacactccgatgccgtttcgtgtttgagcctttcagcagacaaaacgtatttatactccgcatcgtgggacaggacaatcaaggtgtggaggatttcagactccaaatgcttggaatcaatccacgcccacgacgacgcggtgaacgccgtcgtgtgcggggacgggggcgtgatgttttccggctcggcggacggcaccgtcaaggtgtggcggcgggagccgcgagggaaaggcctgaagcacgccccggtgaagactctgctgaagcaggagtgcgcggtgacggcgctggcgatggacgcggcggggggatcgatggtgtactgcggcgcctccgacggactggtgaacttttgggaaagcgacaagaattacgcgcacggtggggttttgaagggccacaagctcgcggtgctgtgcctcaccgcagcggggacgttagtgttcagcggttccgcggataagaccatatgcgtgtggaaacgcgagggtttgattcacacgtgcatgtcggttctcacgggccacgacggtccggtgaagtgcctcgccgtggaggaggaccgcaaagccgccgcgaaaggtgaccgggaacggctttggagtttgtacagtgggagtttggataagtcggtgaagatttggagtgtttccgaatcaatgaataatgataataataataacaatagtaatgatcaggtgaggcaccaccgcatggcatctgatgcggactcgttgccttctgtatcagatagtagtttctcttcgggcaggaccaatgggaggaactgagaatgggccacgtgtctttatgagatgattgagcatttgtgtttttttttttttttttttttgtgattgattgattgattgtgagagattgtggtcgaagatgtttatgaaatttgatgtaatataatgtaatttgtgtatgaatgaacggatgaagtagttaaagaaatgactatatatatggttaatggttttcttgaatagaaatatcagattttgatgaatt

SEQ ID NO: 51666 - protein, 466 aa, Glycine max
  peptide (1)..(466): Ceres Seq. ID no. 15171439
MFGETVPRPQFMQSEPRMSTTEALTDDEFTMQSSSTASPMSPYYYEQGRLSGEGSPMTMSPWNQTTNSPFSKPQWSQEQNSVPQNALVGSLVREEGHIYSLAASGDLLYTGSDSKNIRVWKNLEEYSGFKSNSGLVKTIILSGQKIFTGHQDGKIRVWKVSPKNPSLHKRAGTLPTLKDIFKSSIKPSNYVEVRRHKTALWIRHSDAVSCLSLSADKTYLYSASWDRTIKVWRISDSKCLESIHAHDDAVNAVVCGDGGVMFSGSADGTVKVWRREPRGKGLKHAPVKTLLKQECAVTALAMDAAGGSMVYCGASDGLVNFWESDKNYAHGGVLKGHKLAVLCLTAAGTLVFSGSADKTICVWKREGLIHTCMSVLTGHDGPVKCLAVEEDRKAAAKGDRERLWSLYSGSLDKSVKIWSVSESMNNDNNNNNSNDQVRHHRMASDADSLPSVSDSSFSSGRTNGRN

SEQ ID NO: 51667 - protein, 455 aa, Glycine max
  peptide (1)..(455): Ceres Seq. ID no. 15171440
MQSEPRMSTTEALTDDEFTMQSSSTASPMSPYYYEQGRLSGEGSPMTMSPWNQTTNSPFSKPQWSQEQNSVPQNALVGSLVREEGHIYSLAASGDLLYTGSDSKNIRVWKNLEEYSGFKSNSGLVKTIILSGQKIFTGHQDGKIRVWKVSPKNPSLHKRAGTLPTLKDIFKSSIKPSNYVEVRRHKTALWIRHSDAVSCLSLSADKTYLYSASWDRTIKVWRISDSKCLESIHAHDDAVNAVVCGDGGVMFSGSADGTVKVWRREPRGKGLKHAPVKTLLKQECAVTALAMDAAGGSMVYCGASDGLVNFWESDKNYAHGGVLKGHKLAVLCLTAAGTLVFSGSADKTICVWKREGLIHTCMSVLTGHDGPVKCLAVEEDRKAAAKGDRERLWSLYSGSLDKSVKIWSVSESMNNDNNNNNSNDQVRHHRMASDADSLPSVSDSSFSSGRTNGRN

SEQ ID NO: 51668 - protein, 449 aa, Glycine max
  peptide (1)..(449): Ceres Seq. ID no. 15171441
MSTTEALTDDEFTMQSSSTASPMSPYYYEQGRLSGEGSPMTMSPWNQTTNSPFSKPQWSQEQNSVPQNALVGSLVREEGHIYSLAASGDLLYTGSDSKNIRVWKNLEEYSGFKSNSGLVKTIILSGQKIFTGHQDGKIRVWKVSPKNPSLHKRAGTLPTLKDIFKSSIKPSNYVEVRRHKTALWIRHSDAVSCLSLSADKTYLYSASWDRTIKVWRISDSKCLESIHAHDDAVNAVVCGDGGVMFSGSADGTVKVWRREPRGKGLKHAPVKTLLKQECAVTALAMDAAGGSMVYCGASDGLVNFWESDKNYAHGGVLKGHKLAVLCLTAAGTLVFSGSADKTICVWKREGLIHTCMSVLTGHDGPVKCLAVEEDRKAAAKGDRERLWSLYSGSLDKSVKIWSVSESMNNDNNNNNSNDQVRHHRMASDADSLPSVSDSSFSSGRTNGRN

SEQ ID NO: 51669 - DNA, 1538 bp, Glycine max
  misc_feature (1)..(1538): Ceres Seq. ID no. 14315106
acaactttcaacagaagaaactaacaccttccgttactggctttttctgtgtccttggcaaccctttttgctgattttcactgccacaatcacaatcaattgaagaaggaagaaataagaagtttctgggtaatggttcgcggttatatagcctgagctgtgccccattccatacgcaacttttcctccatcattctccttttttttctcaccttaataagtgatggacatcgaagaaatttcagagtcgaatttgggtggttcttcttcttctcacgaggctttggaatcagaagagaagaacatgggtacccagagaatcttggtttcagatcacataaacgcatatcagtattcggctgaggaagctgatagctttgtgattgatatggattccttctcttccggcatcaacaaagatagcaataatgctaattccagaattacattgcagcggagcctttccaggaaaggatctcagcgtgggggcgacaggaaggtgaatggcaatgtcacacttcatgatagggatactgccccaactacatgctcaccaaaagctgctctagcagggtcctgcacggctgaaaagtcagcggtggtggcagtagggtccacacatcattccacaaacacacaagttcatcatcagattactattactgccagtaacatgtgcaccaccaccacccccaccaccgaaagcaaatgtataactcgaagaaatagttttaaacgatcttcttcatggctccttgatcctaaaagagtccttcttttctttgccaccttgtcaagcatgggaacaatgttgctgatatacttcactcttactctcagcaagcaaaatgcagatgaatatgggggtgactggcagcagtgactgatgccactgatttatattggacaaatgagataatgggtcgtgtaaattataaatcctaggattggagcaaaactcaggaacaagaagttgaggacaaatttgcagaactacctgtcagactcaattacctatttgggagctacaaaaggcaaatacaatgacacaatgcactatgatagagaggaaggaatatatttcttttatctgaatggaagccagcaagttagcaacagataaaaaagatcacatgtaagagagtgctctgtagtttattgggagtgtcatttaagggcataacggagttggaggatcagaaagtcactgtttcgctctttctactcagatcttatttttatcccccgtatcttttgttttgctcttgcatgtaatggcaagtgaacctttttctaatgtgtgtaactttagttttaacagtggaaaaaggggaggggaaagtaaaaccaaaaccatgagagctacctacctctacaagctacaaaagtaggcacaaacggcatgcgtgctgaaatacatttttccttacggaagaaactgaaatccacgagtgctttttctagggacaaagaatgtttatatatggggaaacctttcgaaataaactatgtgtataaaagattaagattagtttggt

SEQ ID NO: 51670 - protein, 219 aa, Glycine max
  peptide (1)..(219): Ceres Seq. ID no. 14315107
MDIEEISESNLGGSSSSHEALESEEKNMGTQRILVSDHINAYQYSAEEADSFVIDMDSFSSGINKDSNNANSRITLQRSLSRKGSQRGGDRKVNGNVTLHDRDTAPTTCSPKAALAGSCTAEKSAVVAVGSTHHSTNTQVHHQITITASNMCTTTTPTTESKCITRRNSFKRSSSWLLDPKRVLLFFATLSSMGTMLLIYFTLTLSKQNADEYGGDWQQ

SEQ ID NO: 51671 - protein, 192 aa, Glycine max
  peptide (1)..(192): Ceres Seq. ID no. 14315108
MGTQRILVSDHINAYQYSAEEADSFVIDMDSFSSGINKDSNNANSRITLQRSLSRKGSQRGGDRKVNGNVTLHDRDTAPTTCSPKAALAGSCTAEKSAVVAVGSTHHSTNTQVHHQITITASNMCTTTTPTTESKCITRRNSFKRSSSWLLDPKRVLLFFATLSSMGTMLLIYFTLTLSKQNADEYGGDWQQ

SEQ ID NO: 51672 - protein, 164 aa, Glycine max
  peptide (1)..(164): Ceres Seq. ID no. 14315109
MDSFSSGINKDSNNANSRITLQRSLSRKGSQRGGDRKVNGNVTLHDRDTAPTTCSPKAALAGSCTAEKSAVVAVGSTHHSTNTQVHHQITITASNMCTTTTPTTESKCITRRNSFKRSSSWLLDPKRVLLFFATLSSMGTMLLIYFTLTLSKQNADEYGGDWQQ

SEQ ID NO: 51673 - DNA, 1240 bp, Glycine max
  misc_feature (1)..(1240): Ceres Seq. ID no. 14311894
gccatttcggtcttctccaaacccctttttcctttcgctctcgcgaaacccagcagttcccactctcacaaaccctaaccacggcaccaccacattctctcgcttccccctcccttcagccatgccccaatcacgtcaccgtcgcgtaaccgtcgtcgacctcgccgcctccttagcccgccgccgcgtctcatttatcttcaacgaagctccgactctccgtacccctccaagaaccgccgccttcggtcgcggaagagctcgcgcttctccccgctcccagaacataccgccatcaactgcgcgacgtggtagaggacgcgttccgttacgctccgtgcttccggcgtggttccctaggacaccactccgtgacattactgctgtcgttcaggtaaaagtctaaactaaacgcagcgccgttttttcgtttctttcactttttgattcaatctttttatgtttttgcgtgcgtttttggttaatgctaaggcgatcgagaggagaagtgcgaggctaggagaagtcgaaggccagcgaatcggaaacactgatcctgcttcagatcgtttagtttcggaaccttccgaacctgcttctgcttctgcctctgcctctgcggtgaaatcgccgaaatcagttggagtgaaactccgaacgccgttcgggagcaaggtcccgaagatcttcctcgacatatccgagttaccggaacacgacgaatcggaggctctgacgccgcagaagaagcttctcgacaacatcgatcaggttgaggaagcggtgcgcgaagaactgaacaagctgaagagaactccgagcgcgaagaaaacagagagggaaaagcgggttcgcacattgatgtccatgaggtaaacgaattgagattttgatttttttttcatccacagagccataggcagcagagcaggggtattatagtcattttactctggactgagttgattcagcgggacagtgtttttccggttcgctttgcttgcgtcttcggcttgaagttgcaagatattattctctagttttgtttttactaactttcttgttggaacttttttgattagtagtgttcgttgatagatatatccatcattttcttgtgatggttagtgattcccagctcctgttgtacatatttcccatacatttcgggttggtgattacttcttgtgtaccaattgtaaaacagttcaagataacaatcgattcgttttttggtgcc

SEQ ID NO: 51674 - protein, 138 aa, Glycine max
  peptide (1)..(138): Ceres Seq. ID no. 14311895
MFLRAFLVNAKAIERRSARLGEVEGQRIGNTDPASDRLVSEPSEPASASASASAVKSPKSVGVKLRTPFGSKVPKIFLDISELPEHDESEALTPQKKLLDNIDQVEEAVREELNKLKRTPSAKKTEREKRVRTLMSMR

SEQ ID NO: 51675 - protein, 134 aa, Glycine max
  peptide (1)..(134): Ceres Seq. ID no. 14311896
PFRSSPNPFFLSLSRNPAVPTLTNPNHGTTTFSRFPLPSAMPQSRHRRVTVVDLAASLARRRVSFIFNEAPTLRTPPRTAAFGRGRARASPRSQNIPPSTARRGRGRVPLRSVLPAWFPRTPLRDITAVVQVKV

SEQ ID NO: 51676 - protein, 94 aa, Glycine max
  peptide (1)..(94): Ceres Seq. ID no. 14311897
MPQSRHRRVTVVDLAASLARRRVSFIFNEAPTLRTPPRTAAFGRGRARASPRSQNIPPSTARRGRGRVPLRSVLPAWFPRTPLRDITAVVQVKV

SEQ ID NO: 51677 - DNA, 1252 bp, Glycine max
  misc_feature (1)..(1252): Ceres Seq. ID no. 14311950
ctttcgttgccatttcactccatcagtacagtcacctagcgtttaaccctagagttttggtttggcctttcttctcttctcttcttatttcccacaaaatcatttcacaaagagaagagacagtggatcgcggtttcatttcagaccaaagatggtgcagtggcagagacacgttttcccctttcttcgccacattcacaagcgagcagtggaaccccacgccacccattctgctccaagccttgtaatttctcgcttagcctcttctctttcacaaggtcagttaggaaggagaacatggacaacaacaactttgccctgtttctctagacccatttttctcggtttccaacatcagggaatttcaagttctgctaacttgctggcaaattcatctgaggaaacacctgttttgtcacctttagtcccagtttcattattgggtagttcaaaaggtgaagaccagaagcagaaagttgttactaagcaagaaaaagttcaagcggtattaaaggcaataaaacagagtccaaagaaggtcaacttggttgctgctctggttcgtggtatgcttgttaaagatgcattgatgcagttggaattgacaataaaacgagcagcaaaaactgtatatcaggttattcattcagcccgagcaaatgcctctcacaatcatgggttagatccagaacgactcattgttgcggaagcatttgtaggaaaggggttttacaaaaagagactttggccccatgctaaaggaaaatcgtcgcttagagtaagaccagaatgcaggctaacagttgtagtaagagagataactgctgaagaagaggcagagattgctaggctgagggtccacaacttcaagaaacgcaccaagcgtcagcaacgacttgtgcctcatcagctcattgtgtccaatcctatttggggccgcaaaaacaaatctagtggtaaaaacttgagtgctacacctgcataagctgagcttttgcttgtttccatgcttatgtcatttttcgtgtatggaaacagttgagaaatatatgtctgtcccttgttgcagatgatagaattttgtactggatcatgtttagtattgttctcatttattagcttatttttcttcctactaggtactataaagaatgtcttgttcaatcaccagcatgaatctcctcttgttttgtggggaagtataaacatatgttttttttatttttatttttaaataaaggcgtattcttgc

SEQ ID NO: 51678 - protein, 277 aa, Glycine max
  peptide (1)..(277): Ceres Seq. ID no. 14311951
MVQWQRHVFPFLRHIHKRAVEPHATHSAPSLVISRLASSLSQGQLGRRTWTTTTLPCFSRPIFLGFQHQGISSSANLLANSSEETPVLSPLVPVSLLGSSKGEDQKQKVVTKQEKVQAVLKAIKQSPKKVNLVAALVRGMLVKDALMQLELTIKRAAKTVYQVIHSARANASHNHGLDPERLIVAEAFVGKGFYKKRLWPHAKGKSSLRVRPECRLTVVVREITAEEEAEIARLRVHNFKKRTKRQQRLVPHQLIVSNPIWGRKNKSSGKNLSATPA

SEQ ID NO: 51679 - protein, 138 aa, Glycine max
  peptide (1)..(138): Ceres Seq. ID no. 14311952
MLVKDALMQLELTIKRAAKTVYQVIHSARANASHNHGLDPERLIVAEAFVGKGFYKKRLWPHAKGKSSLRVRPECRLTVVVREITAEEEAEIARLRVHNFKKRTKRQQRLVPHQLIVSNPIWGRKNKSSGKNLSATPA

SEQ ID NO: 51680 - DNA, 1282 bp, Glycine max
  misc_feature (1)..(1282): Ceres Seq. ID no. 14311515
acaataaactatctattttccaacttcaatattcactgttgttgagtattctaattctaatgaggaacaggggtgtgtgggaagatgcaagcacagcaacagtgcttgtacttgtgctatgttcatcgtatggaattgcagaagtaaagtcacagtcacagaaggtatctggtttgtttgtttttggagattcattggttgaagtaggcaacaataacttcctaaacaccatagcaagggcaaattactttccttacggcatcgacttcggcaggggttccactggccgattttctaatggcaaatccctcattgacttcattggagacttgctgggcattccttctcctccaccttttgcagatccctccactgttggaaccagaatactttatggtgtcaattatgcatcagcttctgccggcattctggatgagtcagggagacactatggtgatcggtatagcctgagccagcaagtcctgaactttgagaacacactgaatcagtataggacaatgatgaatggaagtgcattgaatcagttcttagccaagtctatagcagttgtggtaactggaagcaatgactacatcaacaactacctcctgcctggcttatatggctccagtcgaaattatactgcccaagactttggcaatctacttgttaatagctatgtgcgacaaattttggcactacatagcgtaggattaaggaagttcttcctagcaggaattgggccactgggttgcatccctagtcttcgagccgctgctttagccccaacaggaagatgcgtggacttggttaatcagatggttggaacttttaatgaagggcttagatcaatggtggaccaactcaacagaaaccatcctaatgctatctttgtatacggtaacacttaccgtgtctttggtgatatcctaaataaccccgcggccttcgcgtttaatgttgtggatagagcatgttgtggaataggaaggaaccgaggtcaactaacatgcctcccattacaatttccatgcacaagcagaaaccagtatgtgttttgggatgccttccacccaacagaatctgcaacttatgtcttcgcatggagagttgttaatggagcgcccgatgatagttatccaattaatatgcaacaaatggctaccatttaatccactctatcttcctgtattctcctttcatttataaaccaaaaaagtgtaccaaaagtgaagccaaattctacatctattgttgggtataaaataattacttttgggct

SEQ ID NO: 51681 - protein, 389 aa, Glycine max
  peptide (1)..(389): Ceres Seq. ID no. 14311516
NKLSIFQLQYSLLLSILILMRNRGVWEDASTATVLVLVLCSSYGIAEVKSQSQKVSGLFVFGDSLVEVGNNNFLNTIARANYFPYGIDFGRGSTGRFSNGKSLIDFIGDLLGIPSPPPFADPSTVGTRILYGVNYASASAGILDESGRHYGDRYSLSQQVLNFENTLNQYRTMMNGSALNQFLAKSIAVVVTGSNDYINNYLLPGLYGSSRNYTAQDFGNLLVNSYVRQILALHSVGLRKFFLAGIGPLGCIPSLRAAALAPTGRCVDLVNQMVGTFNEGLRSMVDQLNRNHPNAIFVYGNTYRVFGDILNNPAAFAFNVVDRACCGIGRNRGQLTCLPLQFPCTSRNQYVFWDAFHPTESATYVFAWRVVNGAPDDSYPINMQQMATI

SEQ ID NO: 51682 - protein, 370 aa, Glycine max
  peptide (1)..(370): Ceres Seq. ID no. 14311517
MRNRGVWEDASTATVLVLVLCSSYGIAEVKSQSQKVSGLFVFGDSLVEVGNNNFLNTIARANYFPYGIDFGRGSTGRFSNGKSLIDFIGDLLGIPSPPPFADPSTVGTRILYGVNYASASAGILDESGRHYGDRYSLSQQVLNFENTLNQYRTMMNGSALNQFLAKSIAVVVTGSNDYINNYLLPGLYGSSRNYTAQDFGNLLVNSYVRQILALHSVGLRKFFLAGIGPLGCIPSLRAAALAPTGRCVDLVNQMVGTFNEGLRSMVDQLNRNHPNAIFVYGNTYRVFGDILNNPAAFAFNVVDRACCGIGRNRGQLTCLPLQFPCTSRNQYVFWDAFHPTESATYVFAWRVVNGAPDDSYPINMQQMATI

SEQ ID NO: 51683 - protein, 217 aa, Glycine max
  peptide (1)..(217): Ceres Seq. ID no. 14311518
MMNGSALNQFLAKSIAVVVTGSNDYINNYLLPGLYGSSRNYTAQDFGNLLVNSYVRQILALHSVGLRKFFLAGIGPLGCIPSLRAAALAPTGRCVDLVNQMVGTFNEGLRSMVDQLNRNHPNAIFVYGNTYRVFGDILNNPAAFAFNVVDRACCGIGRNRGQLTCLPLQFPCTSRNQYVFWDAFHPTESATYVFAWRVVNGAPDDSYPINMQQMATI

SEQ ID NO: 51684 - DNA, 1042 bp, Glycine max
  misc_feature (1)..(1042): Ceres Seq. ID no. 14311918
aaaacaaccccctccaacttctctcattctttttttctttctcttaaattaactacaaaaccaacaaccctcctccaacttcactcatattttttctttctcttaaacttttttaaggaaaaaaaaaatctaaatccttttaaaaccctattaatactaaacatcatataacattcattgttcatcaagaactatctttgtggtcgtgtttgttcaataatgctacaaaattcctccatgtcttccctcctcctccaccggatcaacggtggcggtggtgcaaccacggccaccaactgtcacgacaccgtctttatgacggtgccggatggcgtagcgcgctaccacacccacgcggtagcgccgaaccagtgctgctcctcggtagcgcaggagatcggggcctcggtcgccaccgtgtggtcagtgttgcgccgcttcgacaacccgcaggcctacaagcacttcgtgaagagctgccatgtcatcggcggggacggcgacgtcggcacgctccgggaggttcacgtcatctccggcctgcccgctgccaggagcaccgagcgcctcgagatcctcgacgacgagcgccacgtcatcagcttcagcgtcgtgggcggggaccaccgcctcgccaactaccgctccgtcaccaccctccaccccaccgcttcctccgcctccggaggatgctccggcacggtggtcgtggagtcctacgtggtggacgtgcctcccgggaacacgcgcgaagacacgcgcgtgttcgtcgacactatcgtgaagtgcaaccttcagtcgctcgcgcaaaccgcagagaacttaacgctgcgaaagaacaacaacaacgattacaagtgctgttcttaattttcctcttctttttactattttttgatttacagtgttattatatcgatatatatatatgtgtgtggggggggaggggggtgattgttataattaagtgttgtagatatcgatataatacaatcttaattttacagtgtatattatggataattactggattgttgattgt

SEQ ID NO: 51685 - protein, 216 aa, Glycine max
  peptide (1)..(216): Ceres Seq. ID no. 14311919
MLQNSSMSSLLLHRINGGGGATTATNCHDTVFMTVPDGVARYHTHAVAPNQCCSSVAQEIGASVATVWSVLRRFDNPQAYKHFVKSCHVIGGDGDVGTLREVHVISGLPAARSTERLEILDDERHVISFSVVGGDHRLANYRSVTTLHPTASSASGGCSGTVVVESYVVDVPPGNTREDTRVFVDTIVKCNLQSLAQTAENLTLRKNNNNDYKCCS

SEQ ID NO: 51686 - protein, 210 aa, Glycine max
  peptide (1)..(210): Ceres Seq. ID no. 14311920
MSSLLLHRINGGGGATTATNCHDTVFMTVPDGVARYHTHAVAPNQCCSSVAQEIGASVATVWSVLRRFDNPQAYKHFVKSCHVIGGDGDVGTLREVHVISGLPAARSTERLEILDDERHVISFSVVGGDHRLANYRSVTTLHPTASSASGGCSGTVVVESYVVDVPPGNTREDTRVFVDTIVKCNLQSLAQTAENLTLRKNNNNDYKCCS

SEQ ID NO: 51687 - protein, 184 aa, Glycine max
  peptide (1)..(184): Ceres Seq. ID no. 14311921
MTVPDGVARYHTHAVAPNQCCSSVAQEIGASVATVWSVLRRFDNPQAYKHFVKSCHVIGGDGDVGTLREVHVISGLPAARSTERLEILDDERHVISFSVVGGDHRLANYRSVTTLHPTASSASGGCSGTVVVESYVVDVPPGNTREDTRVFVDTIVKCNLQSLAQTAENLTLRKNNNNDYKCCS

SEQ ID NO: 51688 - DNA, 1142 bp, Glycine max
  misc_feature (1)..(1142): Ceres Seq. ID no. 14311946
actacaaaatccaccaactcaaagaaagaaacagttcaagaaatgggtgaagcaaacgctcagtctcagagcgaacccttcatcgtaaactctccacaaccaacatttcagaaacacaaataccccgtcaccgcaaactcaccaccaccaccacactcaccaatgtgcgatcatcaccacattcttcaacaaaaccaagaagcggtggagcccacagacttgttctccatgatgcacctcaccaacggcaatggctgcagcaaccgtcagccaccctgctccgccgccaccaacaacaaccctatgaagcgccgatcgacgccatcttcctcctcctccggcgagccctgcgccaagaagctcttctgcgaccaagaggatctcaccctctacggcttctccgccgtctccattcccctcaacatcaaccccctcgtcaacaagcgcggctctttacccgtcctccgccgctgcgtctccgacccctgcacccctccggcgccgtcgccggaaccggagcaatccattcctccggagagaggctccgggctgccacccctgccgccgagattccaacggagcgtgtcggatctctctgttccttccccggacaaggctatgtcctgtttgagctctgaagaaaccgtcgcgcctgattccgtgaggctgagaaggatgaaggagcgtttgaaagagatgaggcagtggtgggatgaagttatgaaagatgagaaggaagatggtgtagaagaagagtgtgcagttgctgaagatgtcaaggtcctagctcaggatgatttgggaggtggagattctgaagaagctgttagtgttgattgggctgaacggtgcataaaccttgcgtttaggtgcccgtgtgggaaaggctatgaggttctcctctctgaaaataactgttactacaagttgatgtagaggaataagtaatgtgtttgactcctttcagtttgggatcacttctgtttttattctcttttagtttggcaaagtctttttctattctcatgtgtggcatttggttgtaactagaaccaaccaatgttatatcacttgctttcaataatgtaaataaaaatgttgtgtactatctccaagaaatagaggaaagtatattttgttcc

SEQ ID NO: 51689 - protein, 311 aa, Glycine max
  peptide (1)..(311): Ceres Seq. ID no. 14311947
TTKSTNSKKETVQEMGEANAQSQSEPFIVNSPQPTFQKHKYPVTANSPPPPHSPMCDHHHILQQNQEAVEPTDLFSMMHLTNGNGCSNRQPPCSAATNNNPMKRRSTPSSSSSGEPCAKKLFCDQEDLTLYGFSAVSIPLNINPLVNKRGSLPVLRRCVSDPCTPPAPSPEPEQSIPPERGSGLPPLPPRFQRSVSDLSVPSPDKAMSCLSSEETVAPDSVRLRRMKERLKEMRQWWDEVMKDEKEDGVEEECAVAEDVKVLAQDDLGGGDSEEAVSVDWAERCINLAFRCPCGKGYEVLLSENNCYYKLM

SEQ ID NO: 51690 - protein, 297 aa, Glycine max
  peptide (1)..(297): Ceres Seq. ID no. 14311948
MGEANAQSQSEPFIVNSPQPTFQKHKYPVTANSPPPPHSPMCDHHHILQQNQEAVEPTDLFSMMHLTNGNGCSNRQPPCSAATNNNPMKRRSTPSSSSSGEPCAKKLFCDQEDLTLYGFSAVSIPLNINPLVNKRGSLPVLRRCVSDPCTPPAPSPEPEQSIPPERGSGLPPLPPRFQRSVSDLSVPSPDKAMSCLSSEETVAPDSVRLRRMKERLKEMRQWWDEVMKDEKEDGVEEECAVAEDVKVLAQDDLGGGDSEEAVSVDWAERCINLAFRCPCGKGYEVLLSENNCYYKLM

SEQ ID NO: 51691 - protein, 257 aa, Glycine max
  peptide (1)..(257): Ceres Seq. ID no. 14311949
MCDHHHILQQNQEAVEPTDLFSMMHLTNGNGCSNRQPPCSAATNNNPMKRRSTPSSSSSGEPCAKKLFCDQEDLTLYGFSAVSIPLNINPLVNKRGSLPVLRRCVSDPCTPPAPSPEPEQSIPPERGSGLPPLPPRFQRSVSDLSVPSPDKAMSCLSSEETVAPDSVRLRRMKERLKEMRQWWDEVMKDEKEDGVEEECAVAEDVKVLAQDDLGGGDSEEAVSVDWAERCINLAFRCPCGKGYEVLLSENNCYYKLM

SEQ ID NO: 51692 - DNA, 1012 bp, Glycine max
  misc_feature (1)..(1012): Ceres Seq. ID no. 15169972
aaggtgacgatggaattggaagttgacgagaacgacttgaaagccgccggcgctgaactcttcgccgaaggtggccggcgaggcattcgtatcaatggctggttgatcgagactcggaggcactccatactgaactcttccacattccaagagtgggaacagaaactcgatacgtctcatttaccagaaatggtttttggggaaaacactttgattctaaaacacttgagcagtggaaccaacattcattttaatgcatttgatgctctacgtggctggaaacaggaagccttgccgccagttgaagttcctgcggcggctaaatggaaatttagaagcaagccctctcagcaagtaatactagattacgactatacatttacaacaccttattgtggaagtggcactattgagattgataaagatctgaatgagggagagacttctaaggaaaccagtgatatccattgggaagactgcaaggatcaaattgatgtagttgcacttgcatccaaggagcccatacttttctatgatgaggtggtgttatatgaggatgaactcgctgataatggagtatcacttcttactataaaagtgagagttatgcctagctcttggtttcttctgttgcgtttctggcttagagttgatggagtgttgattagactgagagaaacacgtatgcattgtgtatttggtggaagtacaaatcccattatacttcgagagagttgctggagataatctacatttcaagctttgtctgcaaaagggcacccttttgattctggtgcgtatggtgatccgagtttcatcagccagaagctccccatcataatgcataagacccaaaagcttgtaatttcctcttaaagttataagactgtaaatccccataatgcaaaagggttcttgttcatatttattcatctttaccatggctgtttggaaccataaattgcttcttatgagataagctcatagatgcatgctaatcatgttctgttct

SEQ ID NO: 51693 - protein, 248 aa, Glycine max
  peptide (1)..(248): Ceres Seq. ID no. 15169973
KVTMELEVDENDLKAAGAELFAEGGRRGIRINGWLIETRRHSILNSSTFQEWEQKLDTSHLPEMVFGENTLILKHLSSGTNIHFNAFDALRGWKQEALPPVEVPAAAKWKFRSKPSQQVILDYDYTFTTPYCGSGTIEIDKDLNEGETSKETSDIHWEDCKDQIDVVALASKEPILFYDEVVLYEDELADNGVSLLTIKVRVMPSSWFLLLRFWLRVDGVLIRLRETRMHCVFGGSTNPIILRESCWR

SEQ ID NO: 51694 - protein, 245 aa, Glycine max
  peptide (1)..(245): Ceres Seq. ID no. 15169974
MELEVDENDLKAAGAELFAEGGRRGIRINGWLIETRRHSILNSSTFQEWEQKLDTSHLPEMVFGENTLILKHLSSGTNIHFNAFDALRGWKQEALPPVEVPAAAKWKFRSKPSQQVILDYDYTFTTPYCGSGTIEIDKDLNEGETSKETSDIHWEDCKDQIDVVALASKEPILFYDEVVLYEDELADNGVSLLTIKVRVMPSSWFLLLRFWLRVDGVLIRLRETRMHCVFGGSTNPIILRESCWR

SEQ ID NO: 51695 - protein, 185 aa, Glycine max
  peptide (1)..(185): Ceres Seq. ID no. 15169975
MVFGENTLILKHLSSGTNIHFNAFDALRGWKQEALPPVEVPAAAKWKFRSKPSQQVILDYDYTFTTPYCGSGTIEIDKDLNEGETSKETSDIHWEDCKDQIDVVALASKEPILFYDEVVLYEDELADNGVSLLTIKVRVMPSSWFLLLRFWLRVDGVLIRLRETRMHCVFGGSTNPIILRESCWR

SEQ ID NO: 51696 - DNA, 588 bp, Glycine max
  misc_feature (1)..(588): Ceres Seq. ID no. 12609077
ataatgaaatgctcaaaatccctagctaagcaaagtgaggaggaggcatagcagataacacaaacacaaccttagccaacaacaaagcaaaggaaaggaaaggaaagcatgggtttactgtggtggcgaaaggggaataaaacccaagcccaacctgaagcaaagtcgaacggcgcagactcaacgaaacccctcactgaggccccagggatgaacggcgccgtggaggttccccggccctcgaacaccaccgtctcgattttcgagtttggctccgtggccgcctccaacgacaaggtcacgctcgccggctattgccccgtctccgaagacctcgagccctgccgctgggagatcctccccgccgttcagtccaacgccccccagtttcgcgtggtcttctgattctgatacccaactttttttctctcttttgccgcttgtgggattcaattttatctactttttttttttttttgctataaaacattcgagtttaagcgcatttttctttttgttatgttatgtgtctcttttcttttcgcctgttcggttttttactcccaatattacatgactgtcactgtt

SEQ ID NO: 51697 - protein, 98 aa, Glycine max
  peptide (1)..(98): Ceres Seq. ID no. 12609078
MGLLWWRKGNKTQAQPEAKSNGADSTKPLTEAPGMNGAVEVPRPSNTTVSIFEFGSVAASNDKVTLAGYCPVSEDLEPCRWEILPAVQSNAPQFRVVF

SEQ ID NO: 51698 - protein, 64 aa, Glycine max
  peptide (1)..(64): Ceres Seq. ID no. 12609079
MNGAVEVPRPSNTTVSIFEFGSVAASNDKVTLAGYCPVSEDLEPCRWEILPAVQSNAPQFRVVF

SEQ ID NO: 51699 - DNA, 867 bp, Glycine max
  misc_feature (1)..(867): Ceres Seq. ID no. 12582729
acacttttccagatctagcattccgttcccgttccgttcaaacagtttgtctttctcacatacactttcttcctttgtttgtcaccgcagtttcaatctcagatccaacattgttcagtccaaattcaacgcattccatggcaaatcctgcatccgcaagattctccgttcttattcttctcgtttctttgctagtcaacatcgccgccaccgccgccaccgccgccgaatcgccagctccgactccgacgccggattttcctccgtcgtcttctcctccttttccttctcctgcttcgaatccttccacggccaattttccgccatctccaactccggcgccttctcatcactcgccgccggctccttcgcctagtagcaatccttctccgtctccggctccggctccagtggatgatgcacatgacggagttagccacgccggcgtggacggcagcgacggaaaatcgtcctcctccggcggaatgagttccggcaagaaagcgggaatagcgttgggagttatcatcggtgccggagtggttgtgttgggagcgctggtgtacaagaggcgccgccagaacattcaacggtctcagtacggatacgcagccaggagagaacttctgtaggttataaacattcagtaatattctcggtagtttttttttttgtttctaatttcaattgcattatagagaattcgtgatctctgaatttcaatttcaaaattcattttacaaattactacaaatttgttttgttcctcctagtcctagctagtagcaaaatataggttgttcaaaaattatccattcgtgtattgaattttggctattctttggtctattgcccagggaatcctct

SEQ ID NO: 51700 - protein, 209 aa, Glycine max
  peptide (1)..(209): Ceres Seq. ID no. 12582730
TFPDLAFRSRSVQTVCLSHIHFLPLFVTAVSISDPTLFSPNSTHSMANPASARFSVLILLVSLLVNIAATAATAAESPAPTPTPDFPPSSSPPFPSPASNPSTANFPPSPTPAPSHHSPPAPSPSSNPSPSPAPAPVDDAHDGVSHAGVDGSDGKSSSSGGMSSGKKAGIALGVIIGAGVVVLGALVYKRRRQNIQRSQYGYAARRELL

SEQ ID NO: 51701 - protein, 164 aa, Glycine max
  peptide (1)..(164): Ceres Seq. ID no. 12582731
MANPASARFSVLILLVSLLVNIAATAATAAESPAPTPTPDFPPSSSPPFPSPASNPSTANFPPSPTPAPSHHSPPAPSPSSNPSPSPAPAPVDDAHDGVSHAGVDGSDGKSSSSGGMSSGKKAGIALGVIIGAGVVVLGALVYKRRRQNIQRSQYGYAARRELL

SEQ ID NO: 51702 - protein, 124 aa, Glycine max
  peptide (1)..(124): Ceres Seq. ID no. 12582732
HFSRSSIPFPFRSNSLSFSHTLSSFVCHRSFNLRSNIVQSKFNAFHGKSCIRKILRSYSSRFFASQHRRHRRHRRRIASSDSDAGFSSVVFSSFSFSCFESFHGQFSAISNSGAFSSLAAGSFA

SEQ ID NO: 51703 - DNA, 1534 bp, Glycine max
  misc_feature (1)..(1534): Ceres Seq. ID no. 15177270
accttctttatctctcaaaagagagacacaacaaaaggaaccagagtggattaattagggacatgagaacaaggagaggagcgtgttactctggagtagtctcaaggatgtgttccgatgcgagggtttccaagaaaaaaaacaaggatctgcacatgcacatgcatatgcatatgcatgtccccgccggagactccattatttacagccggaaaaggcagaagaaaacgccggagaaaaccgccggcgctgattacgaatttttcgagtctttgccggacgacctcgtaatctccatcttctgcaaacttagttccaccgccactaaaccttccgatttcgtcaatattttaatcacgtgcaaaagattaaacagattagcacttcattcgcttgtattatccaaagcctcgccgaaaactttcactattaaagcaagagattggtgcgattcggcacacaaattcctcaaacactgtgccgatgccggaaacgttgaagcttgctatactttaggcatgattcggttctactgtttgcaaaaccgagggagcggcgcgtcgtttatggcgaaggcggccattaactctcacgcgcgggctctgtatgcgctggccgtgattcagttcaacggcagcggtggcacgaagagcgacaaggacctacgcgccggcgtggcgctgtgcgccagagcggcgtttcttggccacgtcgatgcgatgcgcgaactcggccactgcctgcaggacggttacggcgtgcggcagaacatcgccgagggacggcggttcctcgtgcaggcaaacgcgcgcgagctcgccgccgtgctgtctaccggcgccgccgcgcgcacctggctgagttggaatcttcagccgcagcagctccggcaggggtccgggtgtccgcttctcagcgatttcggatgcaacgtaccggcgccggaggtgcaccccgcgagcctgttcatggcggagtggttcgccgcgcggggcggttcgccgggaccggggctgagactctgttctcacgcggggtgcgggaggcccgagacgaggaagcacgagtttcgaaggtgttctgtgtgcggcgtggtgaattattgctcacgcgcgtgccaagcgcttgattggaagttccggcacaaggcggagtgctcccccgtgcaacggtggctcgaggaggacggcgaagatgtcggtaacgacgacggtgacggagaggtggaggttatggtagatagttagacaatttttacaacagtaacggtaacggaagtcgctttggacggaaaaatgaatatttttggcgaagtgaaagaaaaaaaggaattacttgtgatgatttattcgccgtctcaaaaaggtagaaaagagtatatggcttcttttcttttttccttgtataggtcgaaaattctcccgaaaaaaacgagaggagattatttttctttttttattttattttgcaatttcggagtttaaagttaatttagaaattcaatgctaaaactaagaggttactagttactgct

SEQ ID NO: 51704 - protein, 414 aa, Glycine max
  peptide (1)..(414): Ceres Seq. ID no. 15177271
LLYLSKERHNKRNQSGLIRDMRTRRGACYSGVVSRMCSDARVSKKKNKDLHMHMHMHMHVPAGDSIIYSRKRQKKTPEKTAGADYEFFESLPDDLVISIFCKLSSTATKPSDFVNILITCKRLNRLALHSLVLSKASPKTFTIKARDWCDSAHKFLKHCADAGNVEACYTLGMIRFYCLQNRGSGASFMAKAAINSHARALYALAVIQFNGSGGTKSDKDLRAGVALCARAAFLGHVDAMRELGHCLQDGYGVRQNIAEGRRFLVQANARELAAVLSTGAAARTWLSWNLQPQQLRQGSGCPLLSDFGCNVPAPEVHPASLFMAEWFAARGGSPGPGLRLCSHAGCGRPETRKHEFRRCSVCGVVNYCSRACQALDWKFRHKAECSPVQRWLEEDGEDVGNDDGDGEVEVMVDS

SEQ ID NO: 51705 - protein, 394 aa, Glycine max
  peptide (1)..(394): Ceres Seq. ID no. 15177272
MRTRRGACYSGVVSRMCSDARVSKKKNKDLHMHMHMHMHVPAGDSIIYSRKRQKKTPEKTAGADYEFFESLPDDLVISIFCKLSSTATKPSDFVNILITCKRLNRLALHSLVLSKASPKTFTIKARDWCDSAHKFLKHCADAGNVEACYTLGMIRFYCLQNRGSGASFMAKAAINSHARALYALAVIQFNGSGGTKSDKDLRAGVALCARAAFLGHVDAMRELGHCLQDGYGVRQNIAEGRRFLVQANARELAAVLSTGAAARTWLSWNLQPQQLRQGSGCPLLSDFGCNVPAPEVHPASLFMAEWFAARGGSPGPGLRLCSHAGCGRPETRKHEFRRCSVCGVVNYCSRACQALDWKFRHKAECSPVQRWLEEDGEDVGNDDGDGEVEVMVDS

SEQ ID NO: 51706 - protein, 379 aa, Glycine max
  peptide (1)..(379): Ceres Seq. ID no. 15177273
MCSDARVSKKKNKDLHMHMHMHMHVPAGDSIIYSRKRQKKTPEKTAGADYEFFESLPDDLVISIFCKLSSTATKPSDFVNILITCKRLNRLALHSLVLSKASPKTFTIKARDWCDSAHKFLKHCADAGNVEACYTLGMIRFYCLQNRGSGASFMAKAAINSHARALYALAVIQFNGSGGTKSDKDLRAGVALCARAAFLGHVDAMRELGHCLQDGYGVRQNIAEGRRFLVQANARELAAVLSTGAAARTWLSWNLQPQQLRQGSGCPLLSDFGCNVPAPEVHPASLFMAEWFAARGGSPGPGLRLCSHAGCGRPETRKHEFRRCSVCGVVNYCSRACQALDWKFRHKAECSPVQRWLEEDGEDVGNDDGDGEVEVMVDS

SEQ ID NO: 51707 - DNA, 1178 bp, Glycine max
  misc_feature (1)..(1178): Ceres Seq. ID no. 13594549
atcgaaaactcttatctctattcatctttgtttttttgttagcaaagcaaaactattgtttctcgggaaatttaagataattcaattggataacctgaacgaaaatctcaattttgtgctgttgtcggagtgactcagaaaaaaatgcaatgcacgattctaatagcattaattatgatacattttctgttgttgaaggtagcgtaggttaattttcattttcagttttttgtgcagctccaatggcaacctctcaaatcacttcatcattgaggaacttgcctgcatttgaaaggtttcaaccttcaacgcttcgatttccttctgctgggcacgtcagaattgggacactgacacaaacctcgtttccctctttcgttgtcaaagccgccactgttgtcgcccccaagcacaccactgttaagcctctgggtgatagagtactggtgaaaattaaggatgcagaggagaagactgcaggtgggattttactgccagcaactgctcaaggcaagcctcaaggaggtgaagtggttgctgttggggatgggaagtcggttgggaagagcaaagtggatgttagtgtgaagacaggtttgcaggttgtgtattcaaagtatgcagggactgaggtggagttcaatggttcaaaacatcttattctgaaggacgatgacatcgttggtatccttgaaacagatgaggtcaaggatcttaaacccttaaatgatagagtcttgataaaggttgcagaagcggatgaaaaaactgctggagggttgttgctcacagaggcaaccaaggaaaaaccatctattggaacagtgatagcagttggtccggggcctctggatgaggaaggtaatagaaagccattgtctgtcgtgcccgggaatacagttctgtactccaagtatgcagggaatgacttcaagggcaaagatggttctgactacattgccttgagggcctcagatgtcatggctatcctgtcctagtcagtatttagtagcaaatattttttttgttccctaacccaaaattttgagttaatgccgagggaaatggatatttatgttgtgaagacagcttgaaatatagttgattgcaactctgttccttagacaattttgcgttaaattgaaacgtttgaaatatattattttctacggcctttc

SEQ ID NO: 51708 - protein, 251 aa, Glycine max
  peptide (1)..(251): Ceres Seq. ID no. 13594550
MATSQITSSLRNLPAFERFQPSTLRFPSAGHVRIGTLTQTSFPSFVVKAATVVAPKHTTVKPLGDRVLVKIKDAEEKTAGGILLPATAQGKPQGGEVVAVGDGKSVGKSKVDVSVKTGLQVVYSKYAGTEVEFNGSKHLILKDDDIVGILETDEVKDLKPLNDRVLIKVAEADEKTAGGLLLTEATKEKPSIGTVIAVGPGPLDEEGNRKPLSVVPGNTVLYSKYAGNDFKGKDGSDYIALRASDVMAILS

SEQ ID NO: 51709 - DNA, 1442 bp, Glycine max
  misc_feature (1)..(1442): Ceres Seq. ID no. 14311590
ataaattagaaccgattgaaagtaatcaatccgtggattctctgaacttatcgcttcttcccggtaggtccatttcgcttttgtttctgtttcccatatcctgcctgtgttatcttattagggtttcgttcccaattgcaattcaattcaaattcgcacactatttactaggtttgaatttgggtgtttccgtttcaatggatgacggcgagcttgatttctccaaccatgaagtgttttcgagtcccaacatgggtgagcttcccagcagcggttcaatggacagtttcttcgacgagcttctcaaggacacgcacgcctgcacccacacccacacctgtaaccctcccggccccgatttctcccacactcacacgtgctaccatgtccacaccaaaatcgtccccgcccctgaggaggaccatgtcgccaccgatgacaccgccgagtccgccgagaagaagtcgtcgtcgtcgaagaagcggtctctggggaacaaagaggccgtccggaagtaccgcgagaagaagaaggcgcgtgcggcgtcgctggaggacgaggttgtgaagttgagggctctgaaccagcacttgatgaagaagctgaaggggcaggcggctctcgaggccgaaatcgcgaggctcaagtgtttgttggttgacataagggggaggattgaaggggaaattgggtcgtttccctatcagaaaccaacgccgaatgcgaaccctccggtggctaacttgcctggttcttatgtgatgaacccttgtaacttgcaatgtgatgatcgggtgtattgccatcacccctatgggaaaattggggagagtgcggctttgaatggggaagagtttgatggttgtgaatttgagaacctgcagtgtctggcaagccagaatttggggctcaaggatcttcgtgcctgtggggttggacaggcaaggtctaatgtaaattcttctgcatcaaataaaagaaaagggggatctcatgctgtgacagctggttgaagaattaataaattggtggttttcatctttgccatgaacttagggaagatgggggtgtgtttcatctttcagtacttagtgctgtggacagcatttttgctggacaagggtagaaggaactgttcctttaactgaagattttgcatatgggcatgtcttctacaagttaagacagacaagtgatttgttttgtatttgagaacgcaaagtaactgtttcgatgatgggaaaagcatatctgcctgtctgcccttagagaacaagtcttgaatagatttcggtaaattaaaaatgctcttgctgatcctcttttggaatgattaataaaacattacattattgtatcttctacttcgaccgccgttgtggacaaaatttgtaataattttactttgcgttagagtctctatagtaaataattgcttaaat

SEQ ID NO: 51710 - protein, 336 aa, Glycine max
  peptide (1)..(336): Ceres Seq. ID no. 14311591
KLEPIESNQSVDSLNLSLLPGRSISLLFLFPISCLCYLIRVSFPIAIQFKFAHYLLGLNLGVSVSMDDGELDFSNHEVFSSPNMGELPSSGSMDSFFDELLKDTHACTHTHTCNPPGPDFSHTHTCYHVHTKIVPAPEEDHVATDDTAESAEKKSSSSKKRSLGNKEAVRKYREKKKARAASLEDEVVKLRALNQHLMKKLKGQAALEAEIARLKCLLVDIRGRIEGEIGSFPYQKPTPNANPPVANLPGSYVMNPCNLQCDDRVYCHHPYGKIGESAALNGEEFDGCEFENLQCLASQNLGLKDLRACGVGQARSNVNSSASNKRKGGSHAVTAG

SEQ ID NO: 51711 - protein, 271 aa, Glycine max
  peptide (1)..(271): Ceres Seq. ID no. 14311592
MDDGELDFSNHEVFSSPNMGELPSSGSMDSFFDELLKDTHACTHTHTCNPPGPDFSHTHTCYHVHTKIVPAPEEDHVATDDTAESAEKKSSSSKKRSLGNKEAVRKYREKKKARAASLEDEVVKLRALNQHLMKKLKGQAALEAEIARLKCLLVDIRGRIEGEIGSFPYQKPTPNANPPVANLPGSYVMNPCNLQCDDRVYCHHPYGKIGESAALNGEEFDGCEFENLQCLASQNLGLKDLRACGVGQARSNVNSSASNKRKGGSHAVTAG

SEQ ID NO: 51712 - protein, 253 aa, Glycine max
  peptide (1)..(253): Ceres Seq. ID no. 14311593
MGELPSSGSMDSFFDELLKDTHACTHTHTCNPPGPDFSHTHTCYHVHTKIVPAPEEDHVATDDTAESAEKKSSSSKKRSLGNKEAVRKYREKKKARAASLEDEVVKLRALNQHLMKKLKGQAALEAEIARLKCLLVDIRGRIEGEIGSFPYQKPTPNANPPVANLPGSYVMNPCNLQCDDRVYCHHPYGKIGESAALNGEEFDGCEFENLQCLASQNLGLKDLRACGVGQARSNVNSSASNKRKGGSHAVTAG

SEQ ID NO: 51713 - DNA, 1179 bp, Glycine max
  misc_feature (1)..(1179): Ceres Seq. ID no. 14311572
atcgatccaaaaccttctaagccttcactatgacagatcctaagtccaatttatacactgaaaccttcaacttcatgcccctctattctcacctctcttcttttagtacttctcaatcaaacttattctcttcttactcaaacaacaacactttcgccattcaatctgaaacctcttcctcttatgctcctccttctcctcctctcagagaagcccttcctctcataaacaacataagcctcagaaaacaaaaggaaaaaaatgaaccatcaaagagtggtggtggtatggttgaagaggaaggaggaaagaaaagggacatggatgagacgacccttttgatgactagtactactactgaagagggtgatgctgaaactgtgacagtagcactgcaaatagggcttcctagcgtggctgcttctgatgatcttaatgggtcaaggaagatccctgcagcttgtgcacaaatgaatgaaaaggaggatgcgaggagtgtgatttctggacacccttttgatagattgaacaaggttcagtattggattcccaccccttctcagattctcattggtcctactcagtttttgtgtcatgtgtgctctaagagtttcaacagatataataatcttcagatgcatatgtggggacatggatctcaatatagaaagggccctgattctctaaaaggaacacaaccatcagcaatgctacggcttccatgcttttgttgtgcaccaggttgcaagcacaacatagaccacccaagagcaaggcctctgaaggacttcagaacccttcaaacacactacaagagaaaacacggcattaaaccctacatgtgcagaaaatgtgacaaaacgtttgcggtgaaaggtgattggaggacacacgagaagaactgtggcaaaatatggtactgtttatgtgggtctgatttcaaacacaaaagatctctaaaggatcacataaaggcctttggccatggccacggtgctgttgacattgattgcatgcaagaagatgaagcggcctccgaaattgaacatgatggggatatctcaatgtgaaaattaataagtttggaaaatcaaaattgaagtgacttttcatgtaattaattaattaatttcacatacatgcttaattgtaatagattgtataaggtgtattttatat

SEQ ID NO: 51714 - protein, 346 aa, Glycine max
  peptide (1)..(346): Ceres Seq. ID no. 14311573
MTDPKSNLYTETFNFMPLYSHLSSFSTSQSNLFSSYSNNNTFAIQSETSSSYAPPSPPLREALPLINNISLRKQKEKNEPSKSGGGMVEEEGGKKRDMDETTLLMTSTTTEEGDAETVTVALQIGLPSVAASDDLNGSRKIPAACAQMNEKEDARSVISGHPFDRLNKVQYWIPTPSQILIGPTQFLCHVCSKSFNRYNNLQMHMWGHGSQYRKGPDSLKGTQPSAMLRLPCFCCAPGCKHNIDHPRARPLKDFRTLQTHYKRKHGIKPYMCRKCDKTFAVKGDWRTHEKNCGKIWYCLCGSDFKHKRSLKDHIKAFGHGHGAVDIDCMQEDEAASEIEHDGDISM

SEQ ID NO: 51715 - protein, 331 aa, Glycine max
  peptide (1)..(331): Ceres Seq. ID no. 14311574
MPLYSHLSSFSTSQSNLFSSYSNNNTFAIQSETSSSYAPPSPPLREALPLINNISLRKQKEKNEPSKSGGGMVEEEGGKKRDMDETTLLMTSTTTEEGDAETVTVALQIGLPSVAASDDLNGSRKIPAACAQMNEKEDARSVISGHPFDRLNKVQYWIPTPSQILIGPTQFLCHVCSKSFNRYNNLQMHMWGHGSQYRKGPDSLKGTQPSAMLRLPCFCCAPGCKHNIDHPRARPLKDFRTLQTHYKRKHGIKPYMCRKCDKTFAVKGDWRTHEKNCGKIWYCLCGSDFKHKRSLKDHIKAFGHGHGAVDIDCMQEDEAASEIEHDGDISM

SEQ ID NO: 51716 - protein, 260 aa, Glycine max
  peptide (1)..(260): Ceres Seq. ID no. 14311575
MVEEEGGKKRDMDETTLLMTSTTTEEGDAETVTVALQIGLPSVAASDDLNGSRKIPAACAQMNEKEDARSVISGHPFDRLNKVQYWIPTPSQILIGPTQFLCHVCSKSFNRYNNLQMHMWGHGSQYRKGPDSLKGTQPSAMLRLPCFCCAPGCKHNIDHPRARPLKDFRTLQTHYKRKHGIKPYMCRKCDKTFAVKGDWRTHEKNCGKIWYCLCGSDFKHKRSLKDHIKAFGHGHGAVDIDCMQEDEAASEIEHDGDISM

SEQ ID NO: 51717 - DNA, 1365 bp, Glycine max
  misc_feature (1)..(1365): Ceres Seq. ID no. 14311579
ccttaatcttaacagaaacacacacttgttctgttcctacggttttgttatggctcttccttcactatcctttctcttcatcttcacttccttcatcgtctccgtctcacactcaataccctttattgttattcatggaattggggatcagtgctctaatcgtggagtgaaaaaattcacacagcaattgagcagcttctctggtgctgaaggatattgtgtcgaggttggaaatggatcatgggattcatggtttgagcctttgaaagagcaggctgagattgtttgtgaaaaggtgaagcaaatgaaagaattgaaggaaggatacaacattgttggactttcccagggaaatttaattggtcgaggcgttgtggaattttgtgaaggaggacctcctgttaaaaactttatctctttagcaggccctcacgctggtactgcttcagttcccctatgtggttcaggtatcttctgcgttcttgcagacaccctcatcaagggagaggtttacagtagctatattcaagaacacttggctcctagtggatatcttaaattaccgaatgccatacctgattatttggagaactgtagatttcttccagtgcttaacaatgaaataccagataagagaaattctacttacaaggaaagatttagtagcttgcagaatttggtacttatcatgtttgagcacgacactgttttaataccaaaggaaacttcctggtttggatattacccagatggctacttcaagccagttttaccaccacaatcaacagaactctacattgaggattggataggcttaagaactctagatgaagctggaaaagttcacttcattagtgttccaggaaatcatcttggaatctcccaagaggatatgaaaaagcatgtagtgccatatttgaaggatcacatattcgtacaagatagtatcaataaggctaggttcaggttgcgaggagttaatcagaaagttattcaaagtaatatgatggaacaatctcaaaaggaggaggtggaaccatcatcctccccattacttgatggatcattgccatactggtggcctacaccattcaagactttccttggtgaattgattggcattaatgaagaggaatctatacaaaggaaataatcacattacacgttattgtgaaactaaatctattaaattgaacaaaatgtgtttggactgatcaaaagatttatcagatagatatagaaaaatagtattatatgttgatattagtttagttgataaatatcaaaatgcttcacttggaagtcttaggttctattttctttggtgaatacttatgaacacctaattttgtttgacttctctct

SEQ ID NO: 51718 - protein, 383 aa, Glycine max
  peptide (1)..(383): Ceres Seq. ID no. 14311580
LNLNRNTHLFCSYGFVMALPSLSFLFIFTSFIVSVSHSIPFIVIHGIGDQCSNRGVKKFTQQLSSFSGAEGYCVEVGNGSWDSWFEPLKEQAEIVCEKVKQMKELKEGYNIVGLSQGNLIGRGVVEFCEGGPPVKNFISLAGPHAGTASVPLCGSGIFCVLADTLIKGEVYSSYIQEHLAPSGYLKLPNAIPDYLENCRFLPVLNNEIPDKRNSTYKERFSSLQNLVLIMFEHDTVLIPKETSWFGYYPDGYFKPVLPPQSTELYIEDWIGLRTLDEAGKVHFISVPGNHLGISQEDMKKHVVPYLKDHIFVQDSINKARFRLRGVNQKVIQSNMMEQSQKEEVEPSSSPLLDGSLPYWWPTPFKTFLGELIGINEEESIQRK

SEQ ID NO: 51719 - protein, 367 aa, Glycine max
  peptide (1)..(367): Ceres Seq. ID no. 14311581
MALPSLSFLFIFTSFIVSVSHSIPFIVIHGIGDQCSNRGVKKFTQQLSSFSGAEGYCVEVGNGSWDSWFEPLKEQAEIVCEKVKQMKELKEGYNIVGLSQGNLIGRGVVEFCEGGPPVKNFISLAGPHAGTASVPLCGSGIFCVLADTLIKGEVYSSYIQEHLAPSGYLKLPNAIPDYLENCRFLPVLNNEIPDKRNSTYKERFSSLQNLVLIMFEHDTVLIPKETSWFGYYPDGYFKPVLPPQSTELYIEDWIGLRTLDEAGKVHFISVPGNHLGISQEDMKKHVVPYLKDHIFVQDSINKARFRLRGVNQKVIQSNMMEQSQKEEVEPSSSPLLDGSLPYWWPTPFKTFLGELIGINEEESIQRK

SEQ ID NO: 51720 - protein, 282 aa, Glycine max
  peptide (1)..(282): Ceres Seq. ID no. 14311582
MKELKEGYNIVGLSQGNLIGRGVVEFCEGGPPVKNFISLAGPHAGTASVPLCGSGIFCVLADTLIKGEVYSSYIQEHLAPSGYLKLPNAIPDYLENCRFLPVLNNEIPDKRNSTYKERFSSLQNLVLIMFEHDTVLIPKETSWFGYYPDGYFKPVLPPQSTELYIEDWIGLRTLDEAGKVHFISVPGNHLGISQEDMKKHVVPYLKDHIFVQDSINKARFRLRGVNQKVIQSNMMEQSQKEEVEPSSSPLLDGSLPYWWPTPFKTFLGELIGINEEESIQRK

SEQ ID NO: 51721 - DNA, 1397 bp, Glycine max
  misc_feature (1)..(1397): Ceres Seq. ID no. 13594740
atctctctatccctccctccctctctctttctctttctctctttccctgggttggagaacttgcaggtccttaaaattaaaccatggcttcatctttaaaccaacgcatgttattccctcttatgttcgtaattggtatgttctgcttaatggtaactccttctattgcggaacttcccatattcaaacaccctccaaaaaaacaacaatctcttaatatattggtccttggagattggggaagaaaaggaacctacaatcaatctttggtcgccaatcagatgggaattgtgggagagaaactagacatagattttgtgatctccactggtgacaatttttacgaagatggactaaaaggggttgatgatccagcattctaccaatcattcgtcgacatgtacactgccccaagcttgcaaaagacatggtacactgttctgggtaaccatgactacagaggtgatgttggggcacaactaagtccaattctaaaacaaaaagatagcagatggctttgcatgagatcttttattctcgatggagaaattgtggaatttttctttgtggacaccactccatttgtagaagagtacttcacggacccaggagagcatacctatgactgggaaggcgttcttcctcgcctagcttacctttcagaactcttgaaggatgttgatttagctttggctcaatcaaaagcaaaatggaagatggtggtgggtcatcataccatcaacagtgctgggcatcatggtaacaccgaagagcttaaacagctacttgttcccatcttagaggcgaacgatgttgatgcatacataaatggacatgaccactgcttgcagcatataattgacaataatagtggaattcactttataacaagtggaggtggatcaaaggcatggtcgggcgatgtcaagccatggaaactggaagaactgaagttgtattatgatgggcaaggattcatgtctatgcagatcaccaaaagcaaagcagatatcatattttatgatgcctttggcaaagttttgcatacatggagcatatccaaagaccgtaacgtagcagcctggatataataagctaaagtacacacattaccggctctatgttatgaaaatggaggtccctctggctgacaattagggcaacttaaaaatgtactatttgtaacaaagaaaagaagaaaaaagaacgtttagagaaattctaatgtccttgcagtagctgtagtatgcaccctaactcgtgctatagaagtttcagaaacaaaggcatacactactttgtagtatttgtaagtacttctgtaagtgatcattgagccttgaggcttgccctgaccctggtgagcccttgggacccaatcacataaacttttcctt

SEQ ID NO: 51722 - protein, 335 aa, Glycine max
  peptide (1)..(335): Ceres Seq. ID no. 13594741
MASSLNQRMLFPLMFVIGMFCLMVTPSIAELPIFKHPPKKQQSLNILVLGDWGRKGTYNQSLVANQMGIVGEKLDIDFVISTGDNFYEDGLKGVDDPAFYQSFVDMYTAPSLQKTWYTVLGNHDYRGDVGAQLSPILKQKDSRWLCMRSFILDGEIVEFFFVDTTPFVEEYFTDPGEHTYDWEGVLPRLAYLSELLKDVDLALAQSKAKWKMVVGHHTINSAGHHGNTEELKQLLVPILEANDVDAYINGHDHCLQHIIDNNSGIHFITSGGGSKAWSGDVKPWKLEELKLYYDGQGFMSMQITKSKADIIFYDAFGKVLHTWSISKDRNVAAWI

SEQ ID NO: 51723 - protein, 327 aa, Glycine max
  peptide (1)..(327): Ceres Seq. ID no. 13594742
MLFPLMFVIGMFCLMVTPSIAELPIFKHPPKKQQSLNILVLGDWGRKGTYNQSLVANQMGIVGEKLDIDFVISTGDNFYEDGLKGVDDPAFYQSFVDMYTAPSLQKTWYTVLGNHDYRGDVGAQLSPILKQKDSRWLCMRSFILDGEIVEFFFVDTTPFVEEYFTDPGEHTYDWEGVLPRLAYLSELLKDVDLALAQSKAKWKMVVGHHTINSAGHHGNTEELKQLLVPILEANDVDAYINGHDHCLQHIIDNNSGIHFITSGGGSKAWSGDVKPWKLEELKLYYDGQGFMSMQITKSKADIIFYDAFGKVLHTWSISKDRNVAAWI

SEQ ID NO: 51724 - protein, 322 aa, Glycine max
  peptide (1)..(322): Ceres Seq. ID no. 13594743
MFVIGMFCLMVTPSIAELPIFKHPPKKQQSLNILVLGDWGRKGTYNQSLVANQMGIVGEKLDIDFVISTGDNFYEDGLKGVDDPAFYQSFVDMYTAPSLQKTWYTVLGNHDYRGDVGAQLSPILKQKDSRWLCMRSFILDGEIVEFFFVDTTPFVEEYFTDPGEHTYDWEGVLPRLAYLSELLKDVDLALAQSKAKWKMVVGHHTINSAGHHGNTEELKQLLVPILEANDVDAYINGHDHCLQHIIDNNSGIHFITSGGGSKAWSGDVKPWKLEELKLYYDGQGFMSMQITKSKADIIFYDAFGKVLHTWSISKDRNVAAWI

SEQ ID NO: 51725 - DNA, 637 bp, Glycine max
  misc_feature (1)..(637): Ceres Seq. ID no. 15172982
gttagaaataaaacaaaggagattggtctgggagaaagaagcaaagaagaaaaatggcagcaacatttgcagctccatcgacagtgataggtctcggaggatcatctgtttctcccatcaaggccaaagctctctcttcatcctttttgaaaccaacattaagagcaaagaaccctctgaaagtcgccggagcatcaggaggaagattcacttgctttgagaggaactggctgaggagagatctgaacgtggtggggttcgggcttgtcggatggctagctccgtctagcattccggcgataaacgggaagagcctgacgggtctcttctttgagagcataggaactgagctcgctcacttcccaactcctccagctctcacgtcacagttctggttgtggctgatcacctggcacttaggcctcttcatctgcctcaccttcggacaaatcggatttaagggcaggaccgaagattacttcaagaaataaaccattccctcttgttccatctgtacttattatcttactctctcttggttctctgtgtaatagtatgactctatatgaagctttctttcgattcctatatttgatgttttgagtattcaaaaccggttcgatgaccgagttcaacc

SEQ ID NO: 51726 - protein, 145 aa, Glycine max; identical to SEQ ID NO: 126
  peptide (1)..(145): Ceres Seq. ID no. 15172983

SEQ ID NO: 51727 - protein, 72 aa, Glycine max
  peptide (1)..(72): Ceres Seq. ID no. 15172984
LEIKQRRLVWEKEAKKKNGSNICSSIDSDRSRRIICFSHQGQSSLFILFETNIKSKEPSESRRSIRRKIHLL

SEQ ID NO: 51728 - DNA, 1157 bp, Glycine max
  misc_feature (1)..(1157): Ceres Seq. ID no. 14311596
atcctaatttgttattgttatctcgtcctagcacactccagactctgcgaacagctaccactgtcgaccatcaccatgcagtccagctccaaggccggcggcaatggcgacgaggagcacctggtttgcgtgacgggggcggggagcttcatcgggtcgtgggtggtcaaggagctcctcctccgtggctaccatgtccggggaaccgccagagatcccgctgaccgcaagaacgcgcatctgctggcgctggacggcgccgaggagaggctcaccctgtgccgcgccgacgtcatggacggcgacagcctcggcgccgcattccatggctgccgcggcgtgttccatgtcgcctccccggtctccaatgaccctgagctcatgcctgaggccgtggaggggacgaggaacgtgatcaacgcggcagcagacgcgggcgtgcggcgtgtggtgttcacttcctcctacggtgccgtgcacatggacccaaagcggagcccggacaccgtcgtcgatgagtcgtgctggagcgactacgactactgcaaacaaaccggcaatctgtactgctgcgccaagatgatggcggaggtcgccgcgaaggaggaggcgaccaagagggggctggagctggcggtggtggtgccggcgacgaccatcggtcctgccctgcagcagacgctcaacttcagcagtgaccacgtcgcccgctacctcacaggcgccaagccggcctaccagaacgtcgtcaccgcctacatcgatgtccgagacgtcgcccgcgcgcacgccctcgtctacgagcaccctgacgcgcgcggcgatcgctacctctgcgtcagcgccgtgatgcaccgcgctcacttcgtccggctcctcaaggacctctacccgcagtaccccgtcaccgccaagcgcgaagacgacggcaagccgatggcgagggagtacaggttctcgaatcagaagctcggggatttgggcttggagttcactgacatgaggacaagtttgtacgacacggtgatttgcctgcagcacaggggccatgtccctgtcatcgtgccacgtcatcgtgcatgtttgtgaaaattataatgtgtacacaaattgaactcgattataagcaaataaatgaggataagtactctgttttc

SEQ ID NO: 51729 - protein, 362 aa, Glycine max
  peptide (1)..(362): Ceres Seq. ID no. 14311597
ILICYCYLVLAHSRLCEQLPLSTITMQSSSKAGGNGDEEHLVCVTGAGSFIGSWVVKELLLRGYHVRGTARDPADRKNAHLLALDGAEERLTLCRADVMDGDSLGAAFHGCRGVFHVASPVSNDPELMPEAVEGTRNVINAAADAGVRRVVFTSSYGAVHMDPKRSPDTVVDESCWSDYDYCKQTGNLYCCAKMMAEVAAKEEATKRGLELAVVVPATTIGPALQQTLNFSSDHVARYLTGAKPAYQNVVTAYIDVRDVARAHALVYEHPDARGDRYLCVSAVMHRAHFVRLLKDLYPQYPVTAKREDDGKPMAREYRFSNQKLGDLGLEFTDMRTSLYDTVICLQHRGHVPVIVPRHRACL

SEQ ID NO: 51730 - protein, 337 aa, Glycine max
  peptide (1)..(337): Ceres Seq. ID no. 14311598
MQSSSKAGGNGDEEHLVCVTGAGSFIGSWVVKELLLRGYHVRGTARDPADRKNAHLLALDGAEERLTLCRADVMDGDSLGAAFHGCRGVFHVASPVSNDPELMPEAVEGTRNVINAAADAGVRRVVFTSSYGAVHMDPKRSPDTVVDESCWSDYDYCKQTGNLYCCAKMMAEVAAKEEATKRGLELAVVVPATTIGPALQQTLNFSSDHVARYLTGAKPAYQNVVTAYIDVRDVARAHALVYEHPDARGDRYLCVSAVMHRAHFVRLLKDLYPQYPVTAKREDDGKPMAREYRFSNQKLGDLGLEFTDMRTSLYDTVICLQHRGHVPVIVPRHRACL

SEQ ID NO: 51731 - protein, 264 aa, Glycine max
  peptide (1)..(264): Ceres Seq. ID no. 14311599
MDGDSLGAAFHGCRGVFHVASPVSNDPELMPEAVEGTRNVINAAADAGVRRVVFTSSYGAVHMDPKRSPDTVVDESCWSDYDYCKQTGNLYCCAKMMAEVAAKEEATKRGLELAVVVPATTIGPALQQTLNFSSDHVARYLTGAKPAYQNVVTAYIDVRDVARAHALVYEHPDARGDRYLCVSAVMHRAHFVRLLKDLYPQYPVTAKREDDGKPMAREYRFSNQKLGDLGLEFTDMRTSLYDTVICLQHRGHVPVIVPRHRACL

SEQ ID NO: 51732 - DNA, 1320 bp, Glycine max
  misc_feature (1)..(1320): Ceres Seq. ID no. 14311568
tttacttaaatttgtctactgctagagggcataaaagcaactccacctagtggggggataagactagattattgttctaactcccattattgcaatttcctttggttcttggttttattatgagaatgggtaatagttataccagaatcttgcatatttcttttgcttgacagtttttttggggggtagagaagtggatttagcctgagaacttgagtggctgaacgactgataacgtaccaattcaggaagggtttttccttagaggcctatggaatatggaatgttgcttttgttaccattcttaataatcttagcaatacattcttatgtaattaatatatttctattcccttttactgttagataattactttttcctttctaaaacatatatgtttgggatttgaggccatatacatatttgtttggtcaattatggctgctgacattttattcatgactgtatctactactccaccggtgtccctagaaaaaaaattattgactggattttctttattacaatattatctgctcctagcgttgaaattgatggctcgttgggggattctgacagtctcaaagagtctggctcaaagaaaagggttaggtctgagtcatgtgctgcttctggctccaaggcatgtcgggagaagttgagaagggataggcttaatgacaagtttgttgaattgggcgccattttggagcctggaaggcctgccaaaacagacaaggctgctatcctgattgatgctgtccgaatggtgacccagttacggggtgaagcccagaagttgaaagacactaatcagggtcttcaagaaaagattaaagagttaaaggctgagaagaacgaacttcgcgatgagaaacagaggctcaaggcagagaaggagaaactggagcagcagctgaaatctttgaatgcacagcctagtttcatgcctccccctgctgcaatgcctgctgcatttgcggcacaaggccaagcccatggcaacaagttggtaccttttattagttatcccggagttgcaatgtggcaattcatgccacctgctgcagtggatacctcacaggatcatgttctccgtccaccagttgcctaagctggcactgtacaattctctgggccagcattttggctcaaggttgtatccattttaccaataccttcttggctttgttagttctcttctaagtattctaactggactcagtggtgacttctgactatatctggcatatgatactattatgattaatgctggtagttgcatgtaaatcagtcaatgttaaataagcttgtctggc

SEQ ID NO: 51733 - protein, 115 aa, Glycine max
  peptide (1)..(115): Ceres Seq. ID no. 14311569
MVTQLRGEAQKLKDTNQGLQEKIKELKAEKNELRDEKQRLKAEKEKLEQQLKSLNAQPSFMPPPAAMPAAFAAQGQAHGNKLVPFISYPGVAMWQFMPPAAVDTSQDHVLRPPVA

SEQ ID NO: 51734 - protein, 102 aa, Glycine max
  peptide (1)..(102): Ceres Seq. ID no. 14311570
MHSLVSCLPLLQCLLHLRHKAKPMATSWYLLLVIPELQCGNSCHLLQWIPHRIMFSVHQLPKLALYNSLGQHFGSRLYPFYQYLLGFVSSLLSILTGLSGDF

SEQ ID NO: 51735 - protein, 79 aa, Glycine max
  peptide (1)..(79): Ceres Seq. ID no. 14311571
MATSWYLLLVIPELQCGNSCHLLQWIPHRIMFSVHQLPKLALYNSLGQHFGSRLYPFYQYLLGFVSSLLSILTGLSGDF

SEQ ID NO: 51736 - DNA, 780 bp, Glycine max
  misc_feature (1)..(780): Ceres Seq. ID no. 15172970
atcccaagctagcaaagcccacctagcgctcagccacaagccagtacactctagctagctactagtgttatccacatagcaatggcgcccttcaagctcgccctcttcctcgccatgaacctggccatcctcttggccgtgcatggctgcgggtcatgcggcaacacaccgcccgtcccagtcccaagcccgcccatcgccgtgcccccaccagctcccgtgccgtctccgccttcgtccggtggtgggggcggcacctgctccatcgacacgctgaagctgaaggtatgcgccaacgtgttgaacctgctgaagctaaacctcggcgtgccgacggacgagcagtgctgcccccttctgagcggcctcgccgacctagacgccgccgtgtgcctctgcaccgccatcaaggccaatgtcctcggcatcaagctcaacgtccctgtcgacctcgttctcctcctcaaccagtgcggcaagacctgccctgccgatttcacctgccctagctgatccatccatcacaaaccatgcatttcatacttgcatcatcatcatcatcgccgtacttgcaattacaatgttttctcgtatacgcatgcacctatatatttcctcgtaattacaatatgttatatgtcagtcgcgtgcatgcatgggctccctccctcgtgcatgcatgcttcaggcattcagttagtcatttgccgttacggtattccagtatttgtaaaagggtatatgtgcgtggaataaaaagtttgttcatgttgtcttttt

SEQ ID NO: 51737 - protein, 143 aa, Glycine max
  peptide (1)..(143): Ceres Seq. ID no. 15172971
MAPFKLALFLAMNLAILLAVHGCGSCGNTPPVPVPSPPIAVPPPAPVPSPPSSGGGGGTCSIDTLKLKVCANVLNLLKLNLGVPTDEQCCPLLSGLADLDAAVCLCTAIKANVLGIKLNVPVDLVLLLNQCGKTCPADFTCPS

SEQ ID NO: 51738 - protein, 132 aa, Glycine max
  peptide (1)..(132): Ceres Seq. ID no. 15172972
MNLAILLAVHGCGSCGNTPPVPVPSPPIAVPPPAPVPSPPSSGGGGGTCSIDTLKLKVCANVLNLLKLNLGVPTDEQCCPLLSGLADLDAAVCLCTAIKANVLGIKLNVPVDLVLLLNQCGKTCPADFTCPS

SEQ ID NO: 51739 - protein, 117 aa, Glycine max
  peptide (1)..(117): Ceres Seq. ID no. 15172973
MRQHTARPSPKPAHRRAPTSSRAVSAFVRWWGRHLLHRHAEAEGMRQRVEPAEAKPRRADGRAVLPPSERPRRPRRRRVPLHRHQGQCPRHQAQRPCRPRSPPQPVRQDLPCRFHLP

SEQ ID NO: 51740 - DNA, 1369 bp, Glycine max
  misc_feature (1)..(1369): Ceres Seq. ID no. 13594719
cctagagcatcctaatcgaaaacctgcttggttgctgagaaaattttccaaatatttcccctttcgattttctcccctttccgggattgcgaaaaacgacgctaattcgtgtagctgcatttagaatcgccaactcagaagcagtcctaattcctcaatggagagttctgaagaggaaactgatggagtctctggtaatcatgctcctaaggaactgattcgtttggcatcaaatggtgcaaaatttatagatgaagtactcaatggtcaaaatgaatgctgtctggataattttcgcatggataaacatgtattctataagttgtgtgatatcctgcaagccaagggtttattgcgtcacacaaatcgaatcaaaattgaggagcaactgggcatatttatgttcattattgggcataatctacggacaagggcggttcaagagttattccgttattctggagaaactattagtcgtcactttaacaatgttttgaatgctataatgtcaatttctctggatctctttcagcctcccggctctggtgttccttcagaaatcattgaagatcctagattctatccatattttaaagattgtgtcggagtaatagatggtatacatgtaccagtaacggtaggtgtagatgagcaaggaccattccgcaataagaatggtttgctttcacagaatattctggcagcttgctcatttgacctcaagtttcattatgttttggctggatgggaaggatctgccacagacttactagtttttaattcagcaatcacaaggaggaacaaattgcaggtccccgaaggtaaatactacatcgtagacagcaagtacccaaatgtgccaggtttcattgctccatattccagtactccctactactccaaggaatttctcagcgattaccacccacaagatgccagtgaactgttcaatcaacgacattcattattacgacatgttacagatcgaacttttgggatcttaaaggcacggtttcctatattgatgtctgctccttcttatccattacaaacacaagtgaagttagtggtggctgcatgtgcgttgcacaattacattcgcagagagaagccagatgattggcttttcaagatgtatgaagaagggtcatttccaatggaggaaccacaacccccattggagatggaagtacctccaaagatggatgttgagacccagacccagccatctgttcatacttttgattcagaagaaattggacttgcttcacagttaagggactccattgctactgaaatgtggaatgattttatccacgatttcccccccatgtaaatttctttagttaagcttatatatgatcatatt

SEQ ID NO: 51741 - protein, 392 aa, Glycine max
  peptide (1)..(392): Ceres Seq. ID no. 15221410
MESSEEETDGVSGNHAPKELIRLASNGAKFIDEVLNGQNECCLDNFRMDKHVFYKLCDILQAKGLLRHTNRIKIEEQLGIFMFIIGHNLRTRAVQELFRYSGETISRHFNNVLNAIMSISLDLFQPPGSGVPSEIIEDPRFYPYFKDCVGVIDGIHVPVTVGVDEQGPFRNKNGLLSQNILAACSFDLKFHYVLAGWEGSATDLLVFNSAITRRNKLQVPEGKYYIVDSKYPNVPGFIAPYSSTPYYSKEFLSDYHPQDASELFNQRHSLLRHVTDRTFGILKARFPILMSAPSYPLQTQVKLVVAACALHNYIRREKPDDWLFKMYEEGSFPMEEPQPPLEMEVPPKMDVETQTQPSVHTFDSEEIGLASQLRDSIATEMWNDFIHDFPPM

SEQ ID NO: 51742 - protein, 345 aa, Glycine max
  peptide (1)..(345): Ceres Seq. ID no. 15221411
MDKHVFYKLCDILQAKGLLRHTNRIKIEEQLGIFMFIIGHNLRTRAVQELFRYSGETISRHFNNVLNAIMSISLDLFQPPGSGVPSEIIEDPRFYPYFKDCVGVIDGIHVPVTVGVDEQGPFRNKNGLLSQNILAACSFDLKFHYVLAGWEGSATDLLVFNSAITRRNKLQVPEGKYYIVDSKYPNVPGFIAPYSSTPYYSKEFLSDYHPQDASELFNQRHSLLRHVTDRTFGILKARFPILMSAPSYPLQTQVKLVVAACALHNYIRREKPDDWLFKMYEEGSFPMEEPQPPLEMEVPPKMDVETQTQPSVHTFDSEEIGLASQLRDSIATEMWNDFIHDFPPM

SEQ ID NO: 51743 - protein, 311 aa, Glycine max
  peptide (1)..(311): Ceres Seq. ID no. 15221412
MFIIGHNLRTRAVQELFRYSGETISRHFNNVLNAIMSISLDLFQPPGSGVPSEIIEDPRFYPYFKDCVGVIDGIHVPVTVGVDEQGPFRNKNGLLSQNILAACSFDLKFHYVLAGWEGSATDLLVFNSAITRRNKLQVPEGKYYIVDSKYPNVPGFIAPYSSTPYYSKEFLSDYHPQDASELFNQRHSLLRHVTDRTFGILKARFPILMSAPSYPLQTQVKLVVAACALHNYIRREKPDDWLFKMYEEGSFPMEEPQPPLEMEVPPKMDVETQTQPSVHTFDSEEIGLASQLRDSIATEMWNDFIHDFPPM

SEQ ID NO: 51744 - DNA, 1502 bp, Glycine max
  misc_feature (1)..(1502): Ceres Seq. ID no. 15171293
acatgatgtaacagacttacatgccttgtgactctttcatttttctccataccttttcttgttccttctgagcttaatcgtattcctcacttcggctgcttggcaatccaagccaaaagcagatcctgcagacgtcataagaaaatcttatgaagaaggatatgataactaatgttaccgagtatgaggcaattgcaaaggaaaaattgccaaagatggtttatgacttctatgcatcaggggctgaggatcagtggactttgaaagagaaccgaaatgcgttctcaaggattctgttccagccgcgtattcttattgatgtaagcaagatagacttgactacaactgtaatgggcttcaaaatatcaatgcctatcatgattgctccaacagccatgcaaaagatggctcaccctgaaggagaattagctactgctagagcagcatcagcagctggcacaatcatgacactatcctcaactgcgacttccagtgtcgaggaggttgcttcaacaggtcccggcattcgtttttttcaactttatgtgttaaaagacagaaatgtggttgctcaggttgtgagaagagctgaaaaagcaggtttcaaggcaattacccttactgtggacagtccaattcttggtcgtagggaggctgatatcaaaaacagatttacattgccaccaaacctggttttgaagaattttgaagggttggatcttggaaagctgaacaagactagtgactcttttgctgcctcttatgctgctgaactatacgatcggtcactcaactggaaggatatcaaatggattcaaacaatcacttctttgcctattttattaaagggtgtacttactcctgaagatacaatgatagccatacaagctggagctgctggaatcattgtttccaatcacggagctcgccaacttgactatgtccctgcaactattatggctttggaagaggtggttaaagctacacaaggaagaattccagtttttctggatggcggaattcgccgagggacagatgtttttaaagcactagctcttggagcagccggtgtattcattggtagacctgtggtgttctcattggcagctgatggtgaggctggtgtgagaaaagtacttcaaatgcttcgtgatgagtttgaattaactatggcactaagtggttgtcgttcactcaaggagataactcgtgaccatgttctcacagagtgggatcgtccaagattttctcccaagttataatatggcaggactccaccttcttctatattctaaaataggagggattttagaataacctttgttcttatttcatgctttagtagaaatcttatgagtgaggcgttagtcatccattagtaattgctacttctttattcactgtacaaaataagtttttacttgaactcatttcattgcacttggtgcgatttggtaaactctagaaacatgatagcctataaaatgtacttttttcttgac

SEQ ID NO: 51745 - protein, 370 aa, Glycine max
  peptide (1)..(370): Ceres Seq. ID no. 15171294
MKKDMITNVTEYEAIAKEKLPKMVYDFYASGAEDQWTLKENRNAFSRILFQPRILIDVSKIDLTTTVMGFKISMPIMIAPTAMQKMAHPEGELATARAASAAGTIMTLSSTATSSVEEVASTGPGIRFFQLYVLKDRNVVAQVVRRAEKAGFKAITLTVDSPILGRREADIKNRFTLPPNLVLKNFEGLDLGKLNKTSDSFAASYAAELYDRSLNWKDIKWIQTITSLPILLKGVLTPEDTMIAIQAGAAGIIVSNHGARQLDYVPATIMALEEVVKATQGRIPVFLDGGIRRGTDVFKALALGAAGVFIGRPVVFSLAADGEAGVRKVLQMLRDEFELTMALSGCRSLKEITRDHVLTEWDRPRFSPKL

SEQ ID NO: 51746 - protein, 366 aa, Glycine max
  peptide (1)..(366): Ceres Seq. ID no. 15171295
MITNVTEYEAIAKEKLPKMVYDFYASGAEDQWTLKENRNAFSRILFQPRILIDVSKIDLTTTVMGFKISMPIMIAPTAMQKMAHPEGELATARAASAAGTIMTLSSTATSSVEEVASTGPGIRFFQLYVLKDRNVVAQVVRRAEKAGFKAITLTVDSPILGRREADIKNRFTLPPNLVLKNFEGLDLGKLNKTSDSFAASYAAELYDRSLNWKDIKWIQTITSLPILLKGVLTPEDTMIAIQAGAAGIIVSNHGARQLDYVPATIMALEEVVKATQGRIPVFLDGGIRRGTDVFKALALGAAGVFIGRPVVFSLAADGEAGVRKVLQMLRDEFELTMALSGCRSLKEITRDHVLTEWDRPRFSPKL

SEQ ID NO: 51747 - protein, 348 aa, Glycine max
  peptide (1)..(348): Ceres Seq. ID no. 15171296
MVYDFYASGAEDQWTLKENRNAFSRILFQPRILIDVSKIDLTTTVMGFKISMPIMIAPTAMQKMAHPEGELATARAASAAGTIMTLSSTATSSVEEVASTGPGIRFFQLYVLKDRNVVAQVVRRAEKAGFKAITLTVDSPILGRREADIKNRFTLPPNLVLKNFEGLDLGKLNKTSDSFAASYAAELYDRSLNWKDIKWIQTITSLPILLKGVLTPEDTMIAIQAGAAGIIVSNHGARQLDYVPATIMALEEVVKATQGRIPVFLDGGIRRGTDVFKALALGAAGVFIGRPVVFSLAADGEAGVRKVLQMLRDEFELTMALSGCRSLKEITRDHVLTEWDRPRFSPKL

SEQ ID NO: 51748 - DNA, 1394 bp, Glycine max
  misc_feature (1)..(1394): Ceres Seq. ID no. 15171329
atcctcgtccattcgatctctctctctgatatgcggtaaacaccagccctttgagtttcaaaaatcttttcttctaaaccactctaatcaccattttcaaatcaagaaatttagctagctttctttcaactctcttgggagcttgcttagggctttaggaggcttgggtggagcaactcatcacctctttttctcctctcttcgcatagttcaacttgagaaattcggcggtgggaactgatggtggctctgagcttccagggtgtgcgggcaagtcctgcccaaccccaacacccatcattgtgtagtggaagagccgctggagtcatcaggattcggtgtgggatagctgagccatctggtgaacctgctcctttaggacaaaagacgcggtactatgacggcatttttgagaaggccttcatgactctcttcgcacgtaagatggagaaattttcagatccaccagcaggaaaagctagagagaataagggttggtgggattggggttatgactatgagagtttcgtggatgtgtcaaggagggtaatgcagcgtaggtctcgtatccagcaacaacaagtggttcgagaggttctcctgtctatgcttcctccaggtgcgcctgcccagttccggaaattgtttccgccaacaaaatgggctgcagagtttaatgctgcattgacagtgcctttcttcgactggttagttgggccatctgaggttgtggaagtagagataaatggagtgaagcaaaaaagtggcgtgcatataaagaagtgcaggtacctggagaatagtggctgtgttggaatgtgtgtcaatatgtgcaagattcctacccaagattttttcactaatgaatttggacttccgttaacaatgactcctaattttgaagatatgagttgtgatatggtgtatggccaatccccacctacatttgaagaggaccctgtttcaaaacaaccttgctatgcggatatatgttctatggcaaaaccaagctctagtgtgtgtcctaaactacaggcatgagaaggcattccttttggatttaattttccattgcagaattagtgtttagtaagcttttttttttttttttttaaatcagcaaagataagtatatatatttaatatgtggtgggtacaaagggtatccaaatctatatacatgtctagtaagcttctaattcgacccgaggtgctcttcccgctctagcttcagaaaatttcatttttcatgtgtaataatattaataccagccttgctaggcttttacttctttcatagagtcattacattcacaaacgagagaacattgtctacaaatacttcatgtaaatttgtaattatagtgtcaaatatcggtattgccagattgtac

SEQ ID NO: 51749 - protein, 266 aa, Glycine max
  peptide (1)..(266): Ceres Seq. ID no. 15171330
MVALSFQGVRASPAQPQHPSLCSGRAAGVIRIRCGIAEPSGEPAPLGQKTRYYDGIFEKAFMTLFARKMEKFSDPPAGKARENKGWWDWGYDYESFVDVSRRVMQRRSRIQQQQVVREVLLSMLPPGAPAQFRKLFPPTKWAAEFNAALTVPFFDWLVGPSEVVEVEINGVKQKSGVHIKKCRYLENSGCVGMCVNMCKIPTQDFFTNEFGLPLTMTPNFEDMSCDMVYGQSPPTFEEDPVSKQPCYADICSMAKPSSSVCPKLQA

SEQ ID NO: 51750 - protein, 205 aa, Glycine max
  peptide (1)..(205): Ceres Seq. ID no. 15171331
MTLFARKMEKFSDPPAGKARENKGWWDWGYDYESFVDVSRRVMQRRSRIQQQQVVREVLLSMLPPGAPAQFRKLFPPTKWAAEFNAALTVPFFDWLVGPSEVVEVEINGVKQKSGVHIKKCRYLENSGCVGMCVNMCKIPTQDFFTNEFGLPLTMTPNFEDMSCDMVYGQSPPTFEEDPVSKQPCYADICSMAKPSSSVCPKLQA

SEQ ID NO: 51751 - protein, 198 aa, Glycine max
  peptide (1)..(198): Ceres Seq. ID no. 15171332
MEKFSDPPAGKARENKGWWDWGYDYESFVDVSRRVMQRRSRIQQQQVVREVLLSMLPPGAPAQFRKLFPPTKWAAEFNAALTVPFFDWLVGPSEVVEVEINGVKQKSGVHIKKCRYLENSGCVGMCVNMCKIPTQDFFTNEFGLPLTMTPNFEDMSCDMVYGQSPPTFEEDPVSKQPCYADICSMAKPSSSVCPKLQA

SEQ ID NO: 51752 - DNA, 1232 bp, Glycine max
  misc_feature (1)..(1232): Ceres Seq. ID no. 15177100
cccgaggacagatctgggctctcccttccgacggcgacgcagatccgccgccgtcgatggccgccgccgcccccctccccgtcctcctcctcctcctcgccgccgccctcctcctcccggccgccgacgccatctactgcgatgaggacgactgctacgacctcctcggggtgaagcaggatgccaacgcgtcggagatcaagaaggcctactacaagctctccctcaaacaccacccggacaagaaccccgacccggagtcgcgcgcgctcttcgtcaaggtcgccaatgcctacgagatactgaaagatgaagaaactagggagaagtatgactatgctgttgcacatccagaggagttcttctacaacactgctcaatactacagggcttactacggatataaaacggatactcgttctgtgttgattggccttcttttaatcgtgtcagcattccaatacataaaccagttgacatcatatagtcaggccatcgaaagtgtgaagcaaactcctgcctacagaaataggttgaaagcattggagtttgagcgaacaggaggaatttcaagcaaaaagaagggtaacaagcagatggataaaaaggtggaagatgagcttagaagtgaagtcgacttgcaaattcagggagttcagaaaccttctgtgtggaatctctgcggtgtccaattgatacttctgccttacttaattggcaagctgcttatttggcaaatttgttggttttggagataccgggtaaagaaatcaccatatgcatgggaggatgcttgctatttgactcggacatcccttaggatgcctgctaacacatggcaaaatattgatgagtttacgaaggaggatctcgtcatgaagcgcctctgggagaaggccaacatggagaggcacatagcggaggcgagaagaggatcgaagcagcgcagaagatagcttctcttgtagcagctcaattttgactgaagattacgagatgaggctgtttaacagcatgtcatgtaggaggacaactacatacctgagtggaaagggaaggcatacatgagtcaggcctgggttcgtcgacccataaacatgggacattgatactgaagaaacataagatacaggggattcttttaccatatcgtacaccgtggaggagttatgtggtgatgataacatttcttacgtctatttggattctatagatacatctacttggatgct

SEQ ID NO: 51753 - protein, 317 aa, Glycine max
  peptide (1)..(317): Ceres Seq. ID no. 15177101
RGQIWALPSDGDADPPPSMAAAAPLPVLLLLLAAALLLPAADAIYCDEDDCYDLLGVKQDANASEIKKAYYKLSLKHHPDKNPDPESRALFVKVANAYEILKDEETREKYDYAVAHPEEFFYNTAQYYRAYYGYKTDTRSVLIGLLLIVSAFQYINQLTSYSQAIESVKQTPAYRNRLKALEFERTGGISSKKKGNKQMDKKVEDELRSEVDLQIQGVQKPSVWNLCGVQLILLPYLIGKLLIWQICWFWRYRVKKSPYAWEDACYLTRTSLRMPANTWQNIDEFTKEDLVMKRLWEKANMERHIAEARRGSKQRRR

SEQ ID NO: 51754 - protein, 299 aa, Glycine max
  peptide (1)..(299): Ceres Seq. ID no. 15177102
MAAAAPLPVLLLLLAAALLLPAADAIYCDEDDCYDLLGVKQDANASEIKKAYYKLSLKHHPDKNPDPESRALFVKVANAYEILKDEETREKYDYAVAHPEEFFYNTAQYYRAYYGYKTDTRSVLIGLLLIVSAFQYINQLTSYSQAIESVKQTPAYRNRLKALEFERTGGISSKKKGNKQMDKKVEDELRSEVDLQIQGVQKPSVWNLCGVQLILLPYLIGKLLIWQICWFWRYRVKKSPYAWEDACYLTRTSLRMPANTWQNIDEFTKEDLVMKRLWEKANMERHIAEARRGSKQRRR

SEQ ID NO: 51755 - DNA, 793 bp, Glycine max
  misc_feature (1)..(793): Ceres Seq. ID no. 15172968
agcatcagcaattcagcgtcaagtatcctcttccttcttctgcatcaactcatcttattagagtttttgactaatcaattatggcctatgagataactgagataaagaagattggcataggcctaattggtttcggcatatttttcgcatttcttggcataattcttttctttgaccgtggtttgcttgctctgggaaatattttttccttggcaggggtagccattttgcttggttggcgttccacgtgggcactcttcacatatagagcaaactttaagggttctgcatcatttctactaggtctctttttcatttgtgtgaggtggccaattgttggtataatacttgaaatatacagttgtgtttttctcttcagtggattttggtcatctatcaaagtgttcctctatcatatccctgttgttggatggattatacagtttatctctcctccttgattgtcacagaagggataactgatgccttagtatatggctaatcatgggtttcgattgtattggtaatttttccaatgacttgtgcatgaatgcaatgttaagctagtttttccaagagtttgcatcaggcagattagcttcctttagtgagaagtatcgcagcatgttatttatgtagaagagttggtacttggtagccatattttgttgctttaaatgtaaacaagaatacaagctggttatgctgttcagttgtctgatagcatgagggcttgctactgatgtcagactgaacatatattaaccttcggctttatgcgccttgtcattgt

SEQ ID NO: 51756 - protein, 126 aa, Glycine max
  peptide (1)..(126): Ceres Seq. ID no. 15172969
MAYEITEIKKIGIGLIGFGIFFAFLGIILFFDRGLLALGNIFSLAGVAILLGWRSTWALFTYRANFKGSASFLLGLFFICVRWPIVGIILEIYSCVFLFSGFWSSIKVFLYHIPVVGWIIQFISPP

SEQ ID NO: 51757 - DNA, 826 bp, Glycine max
  misc_feature (1)..(826): Ceres Seq. ID no. 15172961
atcctgtccgggagcacggagccgcttcgttatccgctggccgctgctgctgcttctctgcgagtgagcgagtgaggaaagaggacggcgacgatggccggcatggcggcgctgcagggcgccatgggggcgctctccgtctcggccgcgagcaccagcgcattctggggcaacccgctcgccgccaccttctccgccgcgccgtctggggtcagattcatggccaagacaagcccaattgaaatgaggcttaagcgatgggaacggaagaagtgtaagccaaacagtcttcctatgctgcacaagatgcatgttagggtcggcgacacggtgcaggtcatcgcaggccgtgagaaaggtaaagttggggaagtcgtacggctttataagcacaacagcactgtgatagtgaaggatctgaacttgaagtcaaagcacaagaaaggcactgaggatgaaccgggtgaaattgtcatgattgaaggccccattcatagctcgaacatgatgctctactcaaaggagaagaacgtgacgagtagggttgggcacaaaatcctcgaggatggcaccaaggtccgctacctgaagaagaccggtgaagtaatcgacagcgttgacaactgggtgaaggtgttcaaggaaggagattctgagtcatcatcgtagtatggaaatgctgcgcatgctctcaaccttagctgcgcttattgctgcccaaacgcttactcggctggtgccactgcttgtactgtcagtttttttctagcttcagagcctcttttgtaaattactactactactacaaagttgtcaccatttttgc

SEQ ID NO: 51758 - protein, 191 aa, Glycine max
  peptide (1)..(191): Ceres Seq. ID no. 15172962
MAGMAALQGAMGALSVSAASTSAFWGNPLAATFSAAPSGVRFMAKTSPIEMRLKRWERKKCKPNSLPMLHKMHVRVGDTVQVIAGREKGKVGEVVRLYKHNSTVIVKDLNLKSKHKKGTEDEPGEIVMIEGPIHSSNMMLYSKEKNVTSRVGHKILEDGTKVRYLKKTGEVIDSVDNWVKVFKEGDSESSS

SEQ ID NO: 51759 - protein, 188 aa, Glycine max
  peptide (1)..(188): Ceres Seq. ID no. 15172963
MAALQGAMGALSVSAASTSAFWGNPLAATFSAAPSGVRFMAKTSPIEMRLKRWERKKCKPNSLPMLHKMHVRVGDTVQVIAGREKGKVGEVVRLYKHNSTVIVKDLNLKSKHKKGTEDEPGEIVMIEGPIHSSNMMLYSKEKNVTSRVGHKILEDGTKVRYLKKTGEVIDSVDNWVKVFKEGDSESSS

SEQ ID NO: 51760 - protein, 181 aa, Glycine max
  peptide (1)..(181): Ceres Seq. ID no. 15172964
MGALSVSAASTSAFWGNPLAATFSAAPSGVRFMAKTSPIEMRLKRWERKKCKPNSLPMLHKMHVRVGDTVQVIAGREKGKVGEVVRLYKHNSTVIVKDLNLKSKHKKGTEDEPGEIVMIEGPIHSSNMMLYSKEKNVTSRVGHKILEDGTKVRYLKKTGEVIDSVDNWVKVFKEGDSESSS

SEQ ID NO: 51761 - DNA, 787 bp, Glycine max
  misc_feature (1)..(787): Ceres Seq. ID no. 13594794
agacacacgtctatagcacgattcataagtagaaagatatggtttcagagactgaatcaccaccgttgattggacctcgtatctctttctctgacggtggagatttcatctgcacagagctggagaaagaaatcgtcaaagggtcagtgaaagtctccgactttgagttcttgtcggagaatgcgagtccagagaggatgcacaccgccgacgaactcttctctgaaggaaagttgcttcctttatggcaagaaaagcactcagagaagcttaaaaacgttaacttgaagaccaacgaagaagaagagagtcgtaaagtggaagcagcgatgacgagtgacgatagtagtaagaacagagtgtgttggtttatagacgaagacccatctccacgtcctccgaaatgcacagttctttggaaagagcttttgcgtttgaagaaacagaggagctcttcgtcggtgaagtcctctctgtctccgtcatcgtccacgtcatcatctagctcgcttgaggataagagagaagggaagagaggtaagaaaggattagagaggacgagatcgtcgacgagtgtgaggataaggccgatgattcacgtccctgtttgcactcctccttctaaatcctctgtttcattgcctcctctgtttccgtcgcttaggcttaagaagaacagagcagagaaaagcaagctttaatctttttatttgacacagcttatttggttgattagttcggtttctcatgtgatatgtaactctaatgcatgtgattaagcattttt

SEQ ID NO: 51762 - protein, 220 aa, Glycine max
  peptide (1)..(220): Ceres Seq. ID no. 13594795
MVSETESPPLIGPRISFSDGGDFICTELEKEIVKGSVKVSDFEFLSENASPERMHTADELFSEGKLLPLWQEKHSEKLKNVNLKTNEEEESRKVEAAMTSDDSSKNRVCWFIDEDPSPRPPKCTVLWKELLRLKKQRSSSSVKSSLSPSSSTSSSSSLEDKREGKRGKKGLERTRSSTSVRIRPMIHVPVCTPPSKSSVSLPPLFPSLRLKKNRAEKSKL

SEQ ID NO: 51763 - protein, 167 aa, Glycine max
  peptide (1)..(167): Ceres Seq. ID no. 13594796
MHTADELFSEGKLLPLWQEKHSEKLKNVNLKTNEEEESRKVEAAMTSDDSSKNRVCWFIDEDPSPRPPKCTVLWKELLRLKKQRSSSSVKSSLSPSSSTSSSSSLEDKREGKRGKKGLERTRSSTSVRIRPMIHVPVCTPPSKSSVSLPPLFPSLRLKKNRAEKSKL

SEQ ID NO: 51764 - protein, 123 aa, Glycine max
  peptide (1)..(123): Ceres Seq. ID no. 13594797
MTSDDSSKNRVCWFIDEDPSPRPPKCTVLWKELLRLKKQRSSSSVKSSLSPSSSTSSSSSLEDKREGKRGKKGLERTRSSTSVRIRPMIHVPVCTPPSKSSVSLPPLFPSLRLKKNRAEKSKL

SEQ ID NO: 51765 - DNA, 1157 bp, Glycine max
  misc_feature (1)..(1157): Ceres Seq. ID no. 15177850
agcacagcaccaccacccgccacctcaacgcacgcaaaggccgaggaggacaagctaggaggagcgagcagccatggcttcgtcggtggccgccgcggcgagcgcgttcctcgggacccggctggcggacccggcgccgcagaacgggcgcatcgtggcgcggttcggcttcggcaagaagaaggccccgccgaagaaggccaaggcgcccccgaccaccgaccggccgctgtggttccccggcgcgcaggcgcccgagtacctcgacgggacgctcgtcggcgactacggcttcgaccccttcggccttgggaagcccgcggagtacctgcagtacgacgtggactccctggaccagaacctggcccagaacctggcgggcgagatcatcggcacccggttcgaggacgccgacgtcaagtccaccccgttccagccctacgccgaggtgttcggcctccagaggttccgcgagtgcgagctcatccacggtcgctgggccatgctcgccaccctcggcgccctcaccgtcgagtggctcaccggcgtcacctggcaggacgccggcaaggtggagctggtggacgggtcgtcgtacctggggcagccgctgccgttcacgctcaccacgctgatctggatcgaggtgctggtgatcgggtacatcgagttccagcgcaacgcggagctggacccggagaggaggctctaccccggtggctcctacttcgacccgctggggctcgcggcggacccggagaagaaggagactctgcagctggcggagatcaagcacgcccgcctcgccatggtcgccttcctcggcttcgccgtgcaggccgccgccaccggcaaggggcctctcaacaactgggccacccacctcagcgacccgctgcacaccaccatcttcgacaccttgggttcctcttaagtggtcggtggtcgagcaatttctgtcagctcagcagcaaaatggacgaacgcgcgtccgtgtaacgaacgtgctttggttttgtatgacgagtgatggatgagagggtatcgcacagatcctttgttgattaatgcaggtctgatcacataggagagctgctgggacttggtgatttgtaaaatatgaaccaatggtaacttaatgcatccacttgtacatc

SEQ ID NO: 51766 - protein, 332 aa, Glycine max
  peptide (1)..(332): Ceres Seq. ID no. 15177851
STAPPPATSTHAKAEEDKLGGASSHGFVGGRRGERVPRDPAGGPGAAERAHRGAVRLRQEEGPAEEGQGAPDHRPAAVVPRRAGARVPRRDARRRLRLRPLRPWEARGVPAVRRGLPGPEPGPEPGGRDHRHPVRGRRRQVHPVPALRRGVRPPEVPRVRAHPRSLGHARHPRRPHRRVAHRRHLAGRRQGGAGGRVVVPGAAAAVHAHHADLDRGAGDRVHRVPAQRGAGPGEEALPRWLLLRPAGARGGPGEEGDSAAGGDQARPPRHGRLPRLRRAGRRHRQGASQQLGHPPQRPAAHHHLRHLGFLLSGRWSSNFCQLSSKMDERASV

SEQ ID NO: 51767 - protein, 286 aa, Glycine max
  peptide (1)..(286): Ceres Seq. ID no. 15177852
MASSVAAAASAFLGTRLADPAPQNGRIVARFGFGKKKAPPKKAKAPPTTDRPLWFPGAQAPEYLDGTLVGDYGFDPFGLGKPAEYLQYDVDSLDQNLAQNLAGEIIGTRFEDADVKSTPFQPYAEVFGLQRFRECELIHGRWAMLATLGALTVEWLTGVTWQDAGKVELVDGSSYLGQPLPFTLTTLIWIEVLVIGYIEFQRNAELDPERRLYPGGSYFDPLGLAADPEKKETLQLAEIKHARLAMVAFLGFAVQAAATGKGPLNNWATHLSDPLHTTIFDTLGSS

SEQ ID NO: 51768 - protein, 210 aa, Glycine max
  peptide (1)..(210): Ceres Seq. ID no. 15177853
HSTTTRHLNARKGRGGQARRSEQPWLRRWPPRRARSSGPGWRTRRRRTGASWRGSASARRRPRRRRPRRPRPPTGRCGSPARRRPSTSTGRSSATTASTPSALGSPRSTCSTTWTPWTRTWPRTWRARSSAPGSRTPTSSPPRSSPTPRCSASRGSASASSSTVAGPCSPPSAPSPSSGSPASPGRTPARWSWWTGRRTWGSRCRSRSPR

SEQ ID NO: 51769 - DNA, 713 bp, Glycine max
  misc_feature (1)..(713): Ceres Seq. ID no. 12609671
ttcaaagcaaacgcacaagcaagctcagtaagcacgccatgggaatgaagcgatgcgtcgttcctagcatcctgctgatgcttgcactgcaggcagccctcctcgtcgccggcgacgtggatgccattctcctgccgagccaaggccaagacgaagcagccatggcggccaagaagaggccgtggaagtgctgcgaccaggcggtgtgcaccaggtccatcccgccgatctgccgctgcatggaccaggtcttcgagtgcccctccacctgcaaggcctgcgggccgtccgtgggcgacccgtcccgccgcgtctgccaagaccagtacgtcggcgaccccgggcccatctgcaggccctgggactgctgcgacctgcccctgtgcaccaggtccaacccgccgacgtgccaatgcatggacgaggtcgacaagtgtgctccgacctgcaagacctgcctgccgtccaggtcgcgcccttctctccgcgtctgcatcgaccgctactttggacccttcccgcccgcgtgcacgccgtcagaggctgttgccgccggcggtaactagcacgctcacgcgttgatcacccgatcaacgccgtcgagtgtcctctcccgccctgctgcagcagcagtgtctaagaataaaatagaaatggatggcctatatgtgtggtggacacacaattatgaataagacaacgtggcaatgttc

SEQ ID NO: 51770 - protein, 187 aa, Glycine max
  peptide (1)..(187): Ceres Seq. ID no. 12609672
QSKRTSKLSKHAMGMKRCVVPSILLMLALQAALLVAGDVDAILLPSQGQDEAAMAAKKRPWKCCDQAVCTRSIPPICRCMDQVFECPSTCKACGPSVGDPSRRVCQDQYVGDPGPICRPWDCCDLPLCTRSNPPTCQCMDEVDKCAPTCKTCLPSRSRPSLRVCIDRYFGPFPPACTPSEAVAAGGN

SEQ ID NO: 51771 - protein, 175 aa, Glycine max
  peptide (1)..(175): Ceres Seq. ID no. 12609673
MGMKRCVVPSILLMLALQAALLVAGDVDAILLPSQGQDEAAMAAKKRPWKCCDQAVCTRSIPPICRCMDQVFECPSTCKACGPSVGDPSRRVCQDQYVGDPGPICRPWDCCDLPLCTRSNPPTCQCMDEVDKCAPTCKTCLPSRSRPSLRVCIDRYFGPFPPACTPSEAVAAGGN

SEQ ID NO: 51772 - protein, 173 aa, Glycine max
  peptide (1)..(173): Ceres Seq. ID no. 12609674
MKRCVVPSILLMLALQAALLVAGDVDAILLPSQGQDEAAMAAKKRPWKCCDQAVCTRSIPPICRCMDQVFECPSTCKACGPSVGDPSRRVCQDQYVGDPGPICRPWDCCDLPLCTRSNPPTCQCMDEVDKCAPTCKTCLPSRSRPSLRVCIDRYFGPFPPACTPSEAVAAGGN

SEQ ID NO: 51773 - DNA, 769 bp, Glycine max
  misc_feature (1)..(769): Ceres Seq. ID no. 13638769
accacaccaccaccagacagagagaacacacgcaaggagcacgaggaggaggcaagggaagccgccgccgccgccgccccgtccctcctcgccggccggccgccacaggtttcaagatgtcaacctgcacgtttgcagcttcctgtgccctcttgggcaatgctcgaacaaccgatgccccccagaaagcggtcaagagccgcctgagcttcctcggccgaggcgcgccgcagctgcggagcctgaggtcctccttcccctccaagaagctggacgtctccgcggcggccacgtacaaggtgaagctggtgaccccggaaggggacgagcacgagtttgaggcgccggacgacgcctacatcctggactcggcggagacggcgggggtggagctgccctactcgtgccgggcgggggcgtgctcgacctgcgcgggcaagatcgaggctggcgcggtggaccagtcggacgggtcgttcctggacgacgcgcagcaggaggagggctacgtgctgacatgcgtggcctaccccaagtcggactgcgtcatccacacccacaaggagggcgacctgtattaggagggctctcatctctggtgcccccagttggttgtgtgttgagtagaacaaaccttggtggttgtttatcccgtgcctgcctgtgtgcgtgctttggtcgttattagtcggaggtggttaagattgttgggtgaagaggccacccatggagaaggcgaataaaatctggctgtgactgatggcatcat

SEQ ID NO: 51774 - protein, 192 aa, Glycine max
  peptide (1)..(192): Ceres Seq. ID no. 13638770
HTTTRQREHTQGARGGGKGSRRRRRPVPPRRPAATGFKMSTCTFAASCALLGNARTTDAPQKAVKSRLSFLGRGAPQLRSLRSSFPSKKLDVSAAATYKVKLVTPEGDEHEFEAPDDAYILDSAETAGVELPYSCRAGACSTCAGKIEAGAVDQSDGSFLDDAQQEEGYVLTCVAYPKSDCVIHTHKEGDLY

SEQ ID NO: 51775 - protein, 154 aa, Glycine max
  peptide (1)..(154): Ceres Seq. ID no. 13638771
MSTCTFAASCALLGNARTTDAPQKAVKSRLSFLGRGAPQLRSLRSSFPSKKLDVSAAATYKVKLVTPEGDEHEFEAPDDAYILDSAETAGVELPYSCRAGACSTCAGKIEAGAVDQSDGSFLDDAQQEEGYVLTCVAYPKSDCVIHTHKEGDLY

SEQ ID NO: 51776 - protein, 112 aa, Glycine max
  peptide (1)..(112): Ceres Seq. ID no. 13638772
PHHHQTERTHARSTRRRQGKPPPPPPRPSSPAGRHRFQDVNLHVCSFLCPLGQCSNNRCPPESGQEPPELPRPRRAAAAEPEVLLPLQEAGRLRGGHVQGEAGDPGRGRARV

SEQ ID NO: 51777 - DNA, 845 bp, Glycine max
  misc_feature (1)..(845): Ceres Seq. ID no. 15172948
gtttcgatttatagacctttgccttttgcattttacacaccaacaacgcgcttcactctagtttctcccttttcgattccaaaagatgagtgaagagcagcagcgacctgcgcctcgtctgaacgagaggatcctctcttccttgtccagacgttccgttgctgctcatccttggcatgatcttgagattggacctggagctccccagattttcaatgttgtcgttgagattacaaagggaagcaaagtcaaatatgaacttgacaaaaagactggactcatcaaggttgatcgtattctctactcatcagttgtttacccacacaactatggtttcgttcctcgcacattgtgtgaagacaatgaccctattgatgttttagtcatcatgcaggaacctgtgcttcctggttgttttctacgtgctcgtgctattggattaatgcctatgattgaccagggtgagaaagatgacaagatcatagcagtctgtgttgatgatcctgagtacaagcattacactgacatcaaagaacttcctcctcaccgtctctctgagatccgtcgtttctttgaagactacaagaagaacgagaacaaggaagttgcggttaatgattttctgccatctgagaatgctattgaagctatccagtactctatggacctctatgcggagtacattctccataccctgagacgttgaagcttcttctcctcagaacatctcttgcaacatcttggtttctgtttacctttttatctttaattgatacttcctctgcattttcttgtaagactttggatctttcatttgtccttgtcaactcattacgattgaatct

SEQ ID NO: 51778 - protein, 206 aa, Glycine max
  peptide (1)..(206): Ceres Seq. ID no. 15172949
MSEEQQRPAPRLNERILSSLSRRSVAAHPWHDLEIGPGAPQIFNVVVEITKGSKVKYELDKKTGLIKVDRILYSSVVYPHNYGFVPRTLCEDNDPIDVLVIMQEPVLPGCFLRARAIGLMPMIDQGEKDDKIIAVCVDDPEYKHYTDIKELPPHRLSEIRRFFEDYKKNENKEVAVNDFLPSENAIEAIQYSMDLYAEYILHTLRR

SEQ ID NO: 51779 - protein, 105 aa, Glycine max
  peptide (1)..(105): Ceres Seq. ID no. 15172950
MQEPVLPGCFLRARAIGLMPMIDQGEKDDKIIAVCVDDPEYKHYTDIKELPPHRLSEIRRFFEDYKKNENKEVAVNDFLPSENAIEAIQYSMDLYAEYILHTLRR

SEQ ID NO: 51780 - DNA, 888 bp, Glycine max
  misc_feature (1)..(888): Ceres Seq. ID no. 12609339
acatctagtagtggaggaagaggagaaaggggtagcaggcagcaatggcgacggccaagcccatcctgtacggcgcctggatcagctcttgctctcaccgtgtccggatcgctctcactctcaaaggtgtggactatgagtacaaggcagtcaatcctcggacagatccagactatgaaaaaataaacccgatcaaatacataccagcattggtagatggggactttgttctatctgattctctcgctatcatgttgtatctggaagataagtatcctcagcatcctctcgtacctaaagatatcaaaacgaaaggtcttgatcttcagattgcgaacatagtttgctcaagcatccaacctctccaaggctacggcgtaattggtttgcatgagggtaggttgagccccgatgagagccttgaggtggttcaacgttatattgacaagggcttcaaagcaatagaaaagctcttggatggatgtgacagcaaatattgcgtcggagatgaagtccatttgggagatgtgtgtctagccccacagatccatgccgccatcaatcgcttccagattgatttgacgaagtacccaaccttgtcgcgacttcacgatgcctacatggaaattccggcatttcaagccgcactgccccagaatcagccagatgcaccttcagcaaaataatcaagaaatcaagccagttacaactatacgcgtgtaatttccacaataatgaggaatgtagtctgcaatgcatggaagaacctctcataagtcataacttgtcagtttgtctgcgtgtacacgactttgtcgtccatctagatgccatggcgagctgccggccgggctccggtaccatgtaaaattagtattgatcgattcg

SEQ ID NO: 51781 - protein, 213 aa, Glycine max
  peptide (1)..(213): Ceres Seq. ID no. 12609340
MATAKPILYGAWISSCSHRVRIALTLKGVDYEYKAVNPRTDPDYEKINPIKYIPALVDGDFVLSDSLAIMLYLEDKYPQHPLVPKDIKTKGLDLQIANIVCSSIQPLQGYGVIGLHEGRLSPDESLEVVQRYIDKGFKAIEKLLDGCDSKYCVGDEVHLGDVCLAPQIHAAINRFQIDLTKYPTLSRLHDAYMEIPAFQAALPQNQPDAPSAK

SEQ ID NO: 51782 - protein, 144 aa, Glycine max
  peptide (1)..(144): Ceres Seq. ID no. 12609341
MLYLEDKYPQHPLVPKDIKTKGLDLQIANIVCSSIQPLQGYGVIGLHEGRLSPDESLEVVQRYIDKGFKAIEKLLDGCDSKYCVGDEVHLGDVCLAPQIHAAINRFQIDLTKYPTLSRLHDAYMEIPAFQAALPQNQPDAPSAK

SEQ ID NO: 51783 - DNA, 855 bp, Glycine max
  misc_feature (1)..(855): Ceres Seq. ID no. 15172934
cccatcctcgtcgtctccacgctaccgcctcctcccccccaaactcccaactacccgctctgctcctgagttccgagcccgctcgatctccgccgacgccgctccgtcaactcgcacggggaatctcgccatggccgccgcgtcctccgccacctccgtccacgacttcaccgtcaaggatgcaagcggcaaggacgtcgacctgagcgtctacaaggggaaggttcttctcattgttaacgtcgcttcgcagtgtggcttgaccaactccaactacaccgagctgagccagctgtacccgaagtacaaggaccaaggctttgagatcttggctttcccatgcaatcagtttggtgggcaggagcctggcaccaatgatgagatcgttcagtttgcctgcactcgcttcaaggccgagtaccccattttcgacaaggttgatgtcaatggcaacaatgtttctcccctatacaagttcctgaagtctagcaaaggtggccttttcggcgacagcatcaagtggaacttctccaagttcttggttgacaaggagggtcgcgttgtagaccgctatgccccgaccacttcccccctgagcattgagaaggatatcaagaagctgcttgggagctcttagacccgccgctggctggagcgtctggagaaatcggcactctgtattctagaaacaagaataatgtcgtgttgaaataaaatctgtacccagcatttcagaggatgcatctgctatattttcagcatcctgctctgtacttgttgtatatgtcgtgttaatgaatgaattcaaatattgtagctgttcggtgtgcctttcattggatcgtgttgttgtcg

SEQ ID NO: 51784 - protein, 211 aa, Glycine max
  peptide (1)..(211): Ceres Seq. ID no. 15172935
PSSSSPRYRLLPPKLPTTRSAPEFRARSISADAAPSTRTGNLAMAAASSATSVHDFTVKDASGKDVDLSVYKGKVLLIVNVASQCGLTNSNYTELSQLYPKYKDQGFEILAFPCNQFGGQEPGTNDEIVQFACTRFKAEYPIFDKVDVNGNNVSPLYKFLKSSKGGLFGDSIKWNFSKFLVDKEGRVVDRYAPTTSPLSIEKDIKKLLGSS

SEQ ID NO: 51785 - protein, 168 aa, Glycine max
  peptide (1)..(168): Ceres Seq. ID no. 15172936
MAAASSATSVHDFTVKDASGKDVDLSVYKGKVLLIVNVASQCGLTNSNYTELSQLYPKYKDQGFEILAFPCNQFGGQEPGTNDEIVQFACTRFKAEYPIFDKVDVNGNNVSPLYKFLKSSKGGLFGDSIKWNFSKFLVDKEGRVVDRYAPTTSPLSIEKDIKKLLGSS

SEQ ID NO: 51786 - DNA, 403 bp, Glycine max
  misc_feature (1)..(403): Ceres Seq. ID no. 13581929
aagctatgtgaaggccttctctaggcagtatgctgctgagatatggccccatgttgagaagttggatgcagaggtattgacagaagatgcacctcttctttttcggtcagctgtttattctggtcttcgaagaccaattcacgaggcttgatcaatttgatatttcacttctaagttgtgtttttttagaattaactaaaattcattctttagtctgtcagttaagcattttcttagtcaaccaaaagcgtaaagctgtatgcaattgtaatgtaagtgacaaggttggtatgacgagtctccgctgtttagattctaacgggaacttgaccactgctactgtacattatttcgattatagctactaatttattggaccttaaatacaaagaatgaagtttgt

SEQ ID NO: 51787 - protein, 93 aa, Glycine max
  peptide (1)..(93): Ceres Seq. ID no. 13581930
MHLFFFGQLFILVFEDQFTRLDQFDISLLSCVFLELTKIHSLVCQLSIFLVNQKRKAVCNCNVSDKVGMTSLRCLDSNGNLTTATVHYFDYSY

SEQ ID NO: 51788 - protein, 49 aa, Glycine max
  peptide (1)..(49): Ceres Seq. ID no. 13581931
SYVKAFSRQYAAEIWPHVEKLDAEVLTEDAPLLFRSAVYSGLRRPIHEA

SEQ ID NO: 51789 - DNA, 937 bp, Glycine max
  misc_feature (1)..(937): Ceres Seq. ID no. 14301396
attccttcccagtctcgcactcgctctgcagtagcacctgcctctgtctcacactcgctatctcctacccacctatcccccgtccgtccgtccgtctaggtctggagaagcggcgatggcggcgcccgtgacggtctacgggccggcgatctcgccggcggtggcccgcgtggcggcgtgcctgctggagaaggacgtggccttccagctcgaggcggtggacatgtccaagggcgagcacaagtccccctccttcctcaagctccagcccttcggccaggtccccgccttcaaagaccacctcaccaccgtcttcgagtcaagggctatttgccgttacatctgtgaccagtactcggaccgtggcaaccggactctcctaggccggaaggaagacggcgcggtaggccgcgccgccatcgagcaatgggtagaatctgaaggccaggcatttaaccctccgagcttggccatcgcattccagctcaccttcgcgccgctcatgggtatggccaccgacatggccgtggtcgagcagaatgaggcgaagctcgccaaggtgcttgatgtatacgagcggcggctggcggagagccagtatttcgccggcgacgagttcacccttgccgaccttgtgcacatgcccaacactgatcttctcgtgagcaagaccggcaaggcgggtctgatcaccgagagaaagaacctgtccagatggtgggacgaggtctcggctcgtccgtcgtggaagaaggttgtcgagttgcagagtgtaccacgaccctctaaagcttgaggcccccttcatcttttagtcgagcagcttctggtggtaattagtcacattctgttatgtgttgccattgctgttaaagtgtgaattgtgaaagactcgggccgctttgtactactccttctatctatctctgctattatt

SEQ ID NO: 51790 - protein, 226 aa, Glycine max
  peptide (1)..(226): Ceres Seq. ID no. 14301397
MAAPVTVYGPAISPAVARVAACLLEKDVAFQLEAVDMSKGEHKSPSFLKLQPFGQVPAFKDHLTTVFESRAICRYICDQYSDRGNRTLLGRKEDGAVGRAAIEQWVESEGQAFNPPSLAIAFQLTFAPLMGMATDMAVVEQNEAKLAKVLDVYERRLAESQYFAGDEFTLADLVHMPNTDLLVSKTGKAGLITERKNLSRWWDEVSARPSWKKVVELQSVPRPSKA

SEQ ID NO: 51791 - protein, 190 aa, Glycine max
  peptide (1)..(190): Ceres Seq. ID no. 14301398
MSKGEHKSPSFLKLQPFGQVPAFKDHLTTVFESRAICRYICDQYSDRGNRTLLGRKEDGAVGRAAIEQWVESEGQAFNPPSLAIAFQLTFAPLMGMATDMAVVEQNEAKLAKVLDVYERRLAESQYFAGDEFTLADLVHMPNTDLLVSKTGKAGLITERKNLSRWWDEVSARPSWKKVVELQSVPRPSKA

SEQ ID NO: 51792 - DNA, 631 bp, Glycine max
  misc_feature (1)..(631): Ceres Seq. ID no. 12609890
aacgcactcggcaatcagcagtcaagcaatccccactcacatctctccacttcccgaatcctttgtccagctcgccatggacgcctcagccaccgtagccaccgggaaggggaagaagggcgtggccgggcgcaaggcgggcggccccaggaagaagtccgtgtcgcggtccgtcaaggccgggctccagttccccgtcagccgcatcgggcgcttcctcaagaagggccgctacgcgcagcgcgtcggctccggcgcccccgtctacctcgcggccgtcctcgagtacctcgccgccgagctgctggagctcgcgggcaacgccgccaaggacaacaagaagagccggatcatcccccgccacctgctgctcgccatcaggaacgacgaggagctcggcaagctgctcgccggcatcaccatcgcgcacggcggcgtgattcccaacatcaacccggtgctgctccccaagaagacggccgagaagtcccccaaggagcccaagtcgcccaagaagaccgccaagtcccccaagaaggcttaggttccttgcgtagttaggctgtagctggggtgtatggatgggtgtgcttgaggatacttcagttcgaagtagactgttcttgctttg

SEQ ID NO: 51793 - protein, 186 aa, Glycine max
  peptide (1)..(186): Ceres Seq. ID no. 12609891
NALGNQQSSNPHSHLSTSRILCPARHGRLSHRSHREGEEGRGRAQGGRPQEEVRVAVRQGRAPVPRQPHRALPQEGPLRAARRLRRPRLPRGRPRVPRRRAAGARGQRRQGQQEEPDHPPPPAARHQERRGARQAARRHHHRARRRDSQHQPGAAPQEDGREVPQGAQVAQEDRQVPQEGLGSLRS

SEQ ID NO: 51794 - protein, 180 aa, Glycine max
  peptide (1)..(180): Ceres Seq. ID no. 12609892
THSAISSQAIPTHISPLPESFVQLAMDASATVATGKGKKGVAGRKAGGPRKKSVSRSVKAGLQFPVSRIGRFLKKGRYAQRVGSGAPVYLAAVLEYLAAELLELAGNAAKDNKKSRIIPRHLLLAIRNDEELGKLLAGITIAHGGVIPNINPVLLPKKTAEKSPKEPKSPKKTAKSPKKA

SEQ ID NO: 51795 - protein, 155 aa, Glycine max
  peptide (1)..(155): Ceres Seq. ID no. 12609893
MDASATVATGKGKKGVAGRKAGGPRKKSVSRSVKAGLQFPVSRIGRFLKKGRYAQRVGSGAPVYLAAVLEYLAAELLELAGNAAKDNKKSRIIPRHLLLAIRNDEELGKLLAGITIAHGGVIPNINPVLLPKKTAEKSPKEPKSPKKTAKSPKKA

SEQ ID NO: 51796 - DNA, 1027 bp, Glycine max
  misc_feature (1)..(1027): Ceres Seq. ID no. 12609314
aggcggacaagaagaggaaagtgagaaagcttaaagcaatcgtcgtgagagactctcgagtcttccctgagtcactcccctctcttctctcggcggcgttctcgttcgattagggtttttgtatcaccttgcagattcttcaacacacaatgcataagttgagtagaagcaaccgggataaacttcagcagttcgtggctatcactggagctagtgataagaatgctcttcaggctctcaaagccagcgattggcagctggaagcagcttttgatatgttttacagccagccccagccaagaagcaatggtgatatgagacgcttggaggagctctacaatagatataaagacccatattctgatatgattctggccgaaggtatctcggttctgtgtagtgatcttcaggtggaaccccaagacattgtcacgctggttctgtcgtggcatatgaatgctgccacagcgtgtgaattttccaaggaagaattttttggtgggttacacgcattaggtgtagattccactggaaagttgcaagaaaagctgtcatttatgcgttctgagcttaaagatgaacaaaagttccatgaaatatacaactttgcttttgggtgggcgaaagagaagggacagaagtctcttgctttagatacagctattggtatatggcagctgctttttgcagaaagagagtggccgttggtaaaccactggtgtgatttcttacaggatcgtcacaacaaggccatatctaaagacacatgggcacagctcctggagtttgcaaggacggtggacccggcgctgtcgaactacgatgcagaaggagcatggccttacctcatcgatgagttcgttgagtacctgtatgacaagagcgttgttgagaagtaacatgccaattgggagaagtactcagctctatttttacagtggtccttgctcattatttatgaatagacttgtgtgttcttgtccgaatcttcatcttcttattttgatgatcaaataactaagatgtt

SEQ ID NO: 51797 - protein, 249 aa, Glycine max
  peptide (1)..(249): Ceres Seq. ID no. 12609315
MHKLSRSNRDKLQQFVAITGASDKNALQALKASDWQLEAAFDMFYSQPQPRSNGDMRRLEELYNRYKDPYSDMILAEGISVLCSDLQVEPQDIVTLVLSWHMNAATACEFSKEEFFGGLHALGVDSTGKLQEKLSFMRSELKDEQKFHEIYNFAFGWAKEKGQKSLALDTAIGIWQLLFAEREWPLVNHWCDFLQDRHNKAISKDTWAQLLEFARTVDPALSNYDAEGAWPYLIDEFVEYLYDKSVVEK

SEQ ID NO: 51798 - protein, 207 aa, Glycine max
  peptide (1)..(207): Ceres Seq. ID no. 12609316
MFYSQPQPRSNGDMRRLEELYNRYKDPYSDMILAEGISVLCSDLQVEPQDIVTLVLSWHMNAATACEFSKEEFFGGLHALGVDSTGKLQEKLSFMRSELKDEQKFHEIYNFAFGWAKEKGQKSLALDTAIGIWQLLFAEREWPLVNHWCDFLQDRHNKAISKDTWAQLLEFARTVDPALSNYDAEGAWPYLIDEFVEYLYDKSVVEK

SEQ ID NO: 51799 - protein, 194 aa, Glycine max
  peptide (1)..(194): Ceres Seq. ID no. 12609317
MRRLEELYNRYKDPYSDMILAEGISVLCSDLQVEPQDIVTLVLSWHMNAATACEFSKEEFFGGLHALGVDSTGKLQEKLSFMRSELKDEQKFHEIYNFAFGWAKEKGQKSLALDTAIGIWQLLFAEREWPLVNHWCDFLQDRHNKAISKDTWAQLLEFARTVDPALSNYDAEGAWPYLIDEFVEYLYDKSVVEK

SEQ ID NO: 51800 - DNA, 1326 bp, Glycine max
  misc_feature (1)..(1326): Ceres Seq. ID no. 13594671
tttttcccgcgcatttgcccccgaatctcccgcgctcgccccctcttatccccgtctcctccgatcccgaccccgaccccgccagacgccaccacccgccgccgccgccgccagaagagatccgtccatccggccaagccgagagcagagcatagcaggggaaggagacgggagagaggacccgcagccatgatgttctccagccaggtcgacgccttctcgccgtcgcagttcaccccgtcgcagaacgcctccgccgactccacccccaacaagttccggggcgcgtcgggtacgatgccgctgacggtgaagcagatcgcggacgcgcagctggccggcaccggcgagaagggcgcgcccttcgtcgtcgacggcgtcgagacggccaacgtcaggctcgtggggatggtgagcggcaaggcggagcggaacacggacgtctccttcacgctcgacgacggcaccggccgcatcgacttcatcagatgggtgaatgatgctgcagattctgctgaaactgctgccattcagaatggtatgtacgtcgctgtcatcggtagcctcaagggagttcaggacaagaagcgtgctactgcttttgcagtcagacctataactgattacaacgaggtcacgctgcatttcattcagtgtgtacggatgcatatagagaacacaaaatcaaaggttggcagtcctgcacacaccaattcttctgtgggaaccccattctccaacagattgagcgaagcagccactccaccctctgtgaagtccaacccggcaccagtgaccagcggaacaaatggatccgagactgatttttacacgcaggtgctgaatgtcttccgcgaaccagcaaacattgagagtgaccatggtgtgcatgtggatgacattgccaagcggttcagactaccagcactcaagatcaaggaggctatcgactaccacgttgacgtcgggcacatctactcgaccattgatgatttccactacaagtcagcgttcgtcgactgagtctgtaaccgagtgccgtcgtcactcgctagcatctgtccttagatgtgctgtttaggtagcctcccaaaggaagcatcttctcgctggagtttgagagacatgactcactgttggcctgagaggatgctccaggggcatgtattactttaaattcctgttgatcagaggcgtatgagccttgatgcgatgagagtctcgtcttgtgaaattatggttagcgtctctcatgttctgctctgagtgtgatatggtgggatggatttacattttacagtcaaagtttgacagttacatcgctct

SEQ ID NO: 51801 - protein, 340 aa, Glycine max
  peptide (1)..(340): Ceres Seq. ID no. 13594672
FFPRICPRISRARPLLSPSPPIPTPTPPDATTRRRRRQKRSVHPAKPRAEHSRGRRRERGPAAMMFSSQVDAFSPSQFTPSQNASADSTPNKFRGASGTMPLTVKQIADAQLAGTGEKGAPFVVDGVETANVRLVGMVSGKAERNTDVSFTLDDGTGRIDFIRWVNDAADSAETAAIQNGMYVAVIGSLKGVQDKKRATAFAVRPITDYNEVTLHFIQCVRMHIENTKSKVGSPAHTNSSVGTPFSNRLSEAATPPSVKSNPAPVTSGTNGSETDFYTQVLNVFREPANIESDHGVHVDDIAKRFRLPALKIKEAIDYHVDVGHIYSTIDDFHYKSAFVD

SEQ ID NO: 51802 - protein, 277 aa, Glycine max
  peptide (1)..(277): Ceres Seq. ID no. 13594673
MMFSSQVDAFSPSQFTPSQNASADSTPNKFRGASGTMPLTVKQIADAQLAGTGEKGAPFVVDGVETANVRLVGMVSGKAERNTDVSFTLDDGTGRIDFIRWVNDAADSAETAAIQNGMYVAVIGSLKGVQDKKRATAFAVRPITDYNEVTLHFIQCVRMHIENTKSKVGSPAHTNSSVGTPFSNRLSEAATPPSVKSNPAPVTSGTNGSETDFYTQVLNVFREPANIESDHGVHVDDIAKRFRLPALKIKEAIDYHVDVGHIYSTIDDFHYKSAFVD

SEQ ID NO: 51803 - protein, 276 aa, Glycine max
  peptide (1)..(276): Ceres Seq. ID no. 13594674
MFSSQVDAFSPSQFTPSQNASADSTPNKFRGASGTMPLTVKQIADAQLAGTGEKGAPFVVDGVETANVRLVGMVSGKAERNTDVSFTLDDGTGRIDFIRWVNDAADSAETAAIQNGMYVAVIGSLKGVQDKKRATAFAVRPITDYNEVTLHFIQCVRMHIENTKSKVGSPAHTNSSVGTPFSNRLSEAATPPSVKSNPAPVTSGTNGSETDFYTQVLNVFREPANIESDHGVHVDDIAKRFRLPALKIKEAIDYHVDVGHIYSTIDDFHYKSAFVD

SEQ ID NO: 51804 - DNA, 1219 bp, Glycine max
  misc_feature (1)..(1219): Ceres Seq. ID no. 13594910
gtcgttgttcttatcttatcccatcacccatttcttcctctctctctctctctctctctctctcttacacaagttgctgctgagttggtgttgtccttgttcctggacggacacatccgacatgtcgacggcggtggcgcggcccttcggcgggttccccggatcggggaggaccaagggggatgagctgctcggcaagaagatgagcgacgggttcttcatcgaggaggaggaggaagaggaggcggaggaggtgctgacggagagctcctccatcggcgccccgtcgccgtcgagctcctccatcggggaggactcctcgtcggaggttggcggggaaggggaggacgaggaggtggagagcaagctcaaggaggagcccgggctcggctgcctggacgccttggaggactccttgcccatcaagaacgggctgtcgagcttctacgccggaaagtcaaagtccttcaccagcctcgcggaggcggcggcgcgggacgccgtgaaggagctcgccaagccggagaaccccttcaacaagcgccgccgcatcctggccacctggtcccggcgcgcctcctgcagctcgctggcgacggccacctacctgcccccgttcctcgccccggaccacgccctccccgagggcgacgaaggcgaggaggacgacgactccgactccggctccgacgagcagcaccgcggcaagaacgggtgggaggcgccggcattgccgcccccgaggctcagcgtgaacacccagatgggcgcatcggcggcgaggaggggcggcagcttcaggtcgccgagatcgtattcactgtcagaccttcgaaacggcggtgatgctagttataatcagtagctgcgaattcgcagccattgatctgtcttgtgtcccgtagatctgttactactacttactccttaattatatataagtaagtaatcgcaagagcatgtgtaagtgtcttgagctaaattcgttgtgttcttgtatccatcagttggatcccgttgacctcgttcacctgatgtacgcagacatgtatgaactgctccggtgaactgaaccgaactgatccaacaccctggccatcattaactaatgatgaacgatcctcgagataagattagttagttaattaatggcatcgctcctgatcctttcgccctgtacaaacatatatatacaatttgttgatgcaatttgatttgc

SEQ ID NO: 51805 - protein, 287 aa, Glycine max
  peptide (1)..(287): Ceres Seq. ID no. 13594911
SLFLSYPITHFFLSLSLSLSLLHKLLLSWCCPCSWTDTSDMSTAVARPFGGFPGSGRTKGDELLGKKMSDGFFIEEEEEEEAEEVLTESSSIGAPSPSSSSIGEDSSSEVGGEGEDEEVESKLKEEPGLGCLDALEDSLPIKNGLSSFYAGKSKSFTSLAEAAARDAVKELAKPENPFNKRRRILATWSRRASCSSLATATYLPPFLAPDHALPEGDEGEEDDDSDSGSDEQHRGKNGWEAPALPPPRLSVNTQMGASAARRGGSFRSPRSYSLSDLRNGGDASYNQ

SEQ ID NO: 51806 - protein, 247 aa, Glycine max
  peptide (1)..(247): Ceres Seq. ID no. 13594912
MSTAVARPFGGFPGSGRTKGDELLGKKMSDGFFIEEEEEEEAEEVLTESSSIGAPSPSSSSIGEDSSSEVGGEGEDEEVESKLKEEPGLGCLDALEDSLPIKNGLSSFYAGKSKSFTSLAEAAARDAVKELAKPENPFNKRRRILATWSRRASCSSLATATYLPPFLAPDHALPEGDEGEEDDDSDSGSDEQHRGKNGWEAPALPPPRLSVNTQMGASAARRGGSFRSPRSYSLSDLRNGGDASYNQ

SEQ ID NO: 51807 - protein, 220 aa, Glycine max
  peptide (1)..(220): Ceres Seq. ID no. 13594913
MSDGFFIEEEEEEEAEEVLTESSSIGAPSPSSSSIGEDSSSEVGGEGEDEEVESKLKEEPGLGCLDALEDSLPIKNGLSSFYAGKSKSFTSLAEAAARDAVKELAKPENPFNKRRRILATWSRRASCSSLATATYLPPFLAPDHALPEGDEGEEDDDSDSGSDEQHRGKNGWEAPALPPPRLSVNTQMGASAARRGGSFRSPRSYSLSDLRNGGDASYNQ

SEQ ID NO: 51808 - DNA, 695 bp, Glycine max
  misc_feature (1)..(695): Ceres Seq. ID no. 12609898
acatccacagccaattccgagctcttccgagtccctgaatccatctctcatctcctccatcgttccacagacgcacgagctctcgtcgagcaggccataccggactggctagccgagctccgatggtttcctcaatgaagcagtgcagagatgaggcccaggaggtgcccctgtccctctcgctctccctcggcgtcatggccgaccgcagcaagaagcagcgccgcggcggcgcagatggcgagttcgtctgcaagacgtgcagccgcgccttcccgtcgttccaggcgctgggcgggcaccggactagccacctccgcggccgccacgggctagcgctcggcctcacttcagggtccgatcagccggggaccaagaagacgacggaccagaagcaggcgcaccagtgccacgtctgcgggctggagttcgagatggggcaggcgatgggcggccacatgcgccgacaccgcgagcaggaggccgccaccacggcgcaggcgccgcccgttctgctccagctcttcgtctagcaccgcactgatttctctcaagttacatagctaggcatttctggttctagtagagatttacaggttggcctatgtgcgcggtttggtttgtacatttgctgcacactactgtagctcgttggtctgttcgctcttgttaggtatatatgcacatattttagg

SEQ ID NO: 51809 - protein, 136 aa, Glycine max
  peptide (1)..(136): Ceres Seq. ID no. 12609899
MVSSMKQCRDEAQEVPLSLSLSLGVMADRSKKQRRGGADGEFVCKTCSRAFPSFQALGGHRTSHLRGRHGLALGLTSGSDQPGTKKTTDQKQAHQCHVCGLEFEMGQAMGGHMRRHREQEAATTAQAPPVLLQLFV

SEQ ID NO: 51810 - protein, 132 aa, Glycine max
  peptide (1)..(132): Ceres Seq. ID no. 12609900
MKQCRDEAQEVPLSLSLSLGVMADRSKKQRRGGADGEFVCKTCSRAFPSFQALGGHRTSHLRGRHGLALGLTSGSDQPGTKKTTDQKQAHQCHVCGLEFEMGQAMGGHMRRHREQEAATTAQAPPVLLQLFV

SEQ ID NO: 51811 - protein, 111 aa, Glycine max
  peptide (1)..(111): Ceres Seq. ID no. 12609901
MADRSKKQRRGGADGEFVCKTCSRAFPSFQALGGHRTSHLRGRHGLALGLTSGSDQPGTKKTTDQKQAHQCHVCGLEFEMGQAMGGHMRRHREQEAATTAQAPPVLLQLFV

SEQ ID NO: 51812 - DNA, 1296 bp, Glycine max
  misc_feature (1)..(1296): Ceres Seq. ID no. 13581947
gacctttccaccacgcccccgtcctctttcccttcccgtcgctcgctccccccctacccgaaccttctcgactccctcttcgcatggccgacgccaaggccgaggcggcgaggcaggcgccgcagtcctcccaggaggaggaggaggactggaaggaggccgagggggacgtcgaggtcgcggacaggtccacgagcaatggcggcggcgccggcgaggggatcacggacaggccgatccgggtctacgccgacggcatctacgacctcttccacttcggccacgcgcgctcgctcgagcaggccaagaaatcgttccctaatgcatatcttcttgtcgggtgctgcaatgatgagctgacacatcaatacaaaggaagaactgtcatgacagaggacgagagatatgaatcacttcgccattgcaagtgggttgatgaagtcattcctgacgctccgtgggtagtaacagaagagttcttgaacaagcataacatcgattttgtcgcacatgattctctgccgtatcatgatgctagtggagctagtaatgatgtctatgaatttgtaaaaaagcttggtaaatttaaggagaccaagcgcacagaaggaatatcaacctcagacattataatgaggattgttaaagattataatgagtatgttatgcgcaatctggccagggggtacagcagaaatgatcttggtgtcagctatgtcaaggaaaaacgactaagagttaatatgggattgaaaaccctgcgtgacaaagtgaagcagcaccaagaaaaagtaggggagaagtggagtacggtggcaaaactccaagaagagtgggttgaaaacgcagatcgctgggttgttggttttctagagaaattcgaggaaggttgccattcaatgggaactgccattaaggaaagaatccaggaaaggctgaaggaggcgcagtctagggacttcagccttctacaatacgacagtgacgactttgacgactttgaagaagaagacgatgaagttgccaaagatgccaaatacgtgaaagaatagcgccactgtaaaattttacgtcaaaagtataatacaggcatgcaatgcatgttaacagtcttcgtcaaccacaatccttcaccatgtatctgtccctttgattgtgagcttcactgtcaaggtagatctgcgtgctgtgtttgtagctgtacttgatgtttttctaggcattagcgtacgctcatgtaaaagttctactgtgaggcataacactctttatttggaggatatcgatttcaattcc

SEQ ID NO: 51813 - protein, 349 aa, Glycine max
  peptide (1)..(349): Ceres Seq. ID no. 13581948
PFHHAPVLFPFPSLAPPLPEPSRLPLRMADAKAEAARQAPQSSQEEEEDWKEAEGDVEVADRSTSNGGGAGEGITDRPIRVYADGIYDLFHFGHARSLEQAKKSFPNAYLLVGCCNDELTHQYKGRTVMTEDERYESLRHCKWVDEVIPDAPWVVTEEFLNKHNIDFVAHDSLPYHDASGASNDVYEFVKKLGKFKETKRTEGISTSDIIMRIVKDYNEYVMRNLARGYSRNDLGVSYVKEKRLRVNMGLKTLRDKVKQHQEKVGEKWSTVAKLQEEWVENADRWVVGFLEKFEEGCHSMGTAIKERIQERLKEAQSRDFSLLQYDSDDFDDFEEEDDEVAKDAKYVKE

SEQ ID NO: 51814 - protein, 322 aa, Glycine max
  peptide (1)..(322): Ceres Seq. ID no. 13581949
MADAKAEAARQAPQSSQEEEEDWKEAEGDVEVADRSTSNGGGAGEGITDRPIRVYADGIYDLFHFGHARSLEQAKKSFPNAYLLVGCCNDELTHQYKGRTVMTEDERYESLRHCKWVDEVIPDAPWVVTEEFLNKHNIDFVAHDSLPYHDASGASNDVYEFVKKLGKFKETKRTEGISTSDIIMRIVKDYNEYVMRNLARGYSRNDLGVSYVKEKRLRVNMGLKTLRDKVKQHQEKVGEKWSTVAKLQEEWVENADRWVVGFLEKFEEGCHSMGTAIKERIQERLKEAQSRDFSLLQYDSDDFDDFEEEDDEVAKDAKYVKE

SEQ ID NO: 51815 - protein, 221 aa, Glycine max
  peptide (1)..(221): Ceres Seq. ID no. 13581950
MTEDERYESLRHCKWVDEVIPDAPWVVTEEFLNKHNIDFVAHDSLPYHDASGASNDVYEFVKKLGKFKETKRTEGISTSDIIMRIVKDYNEYVMRNLARGYSRNDLGVSYVKEKRLRVNMGLKTLRDKVKQHQEKVGEKWSTVAKLQEEWVENADRWVVGFLEKFEEGCHSMGTAIKERIQERLKEAQSRDFSLLQYDSDDFDDFEEEDDEVAKDAKYVKE

SEQ ID NO: 51816 - DNA, 1296 bp, Glycine max
  misc_feature (1)..(1296): Ceres Seq. ID no. 12609902
atcgcttttcgaatttttttatttattttctcttgaaattataaaatacaaaaagtcaaagacttttacttactttcgtcgcctctctctgaatcgatcttttcggacggagttttccatctcctcaactctcacagttaaacaactgtgtctctatgtgttcgatggccaccaccgtcgcagcaacaaaactcacctccttgaaagccaccgccgggaagctcggttaccgtgagatctgccaggtccgtcaatggtctccgcttcagtctgcgatgcctcatttcggtatgctgcgatgtagacagccatttgcaacctccactgttgtgaacgctcaagctcaagctcaagctcaagccacgggtgttgagcaaacaacgacagaagaagaagaagctgttccaaaagtggaatctccagttgtggttgtgactggtgcctctcgaggcattggtaaagctattgctctttccttgggcaaagctggctgtaaggtcttggtgaattatgctaggtctgcaaaggaggctgaagaagtttccaaacagattgaagaatatggtggccaggctattacttttggaggtgatgtctcgaaagaggctgatgtggatgccatgatgaaaaccgctgttgataaatggggaaccattgacgtcgtggttaacaatgcaggaattaccagggataccttgttgattcgaatgaagaaatctcaatgggatgaagtgatggatttgaatctcactggagtgtttctctgttcccaggcagcaacaaagatcatgatgaagaagagaaagggaaggatcatcaacatagcatcagttgttggtctcattggtaacattgggcaagcaaactacgctgcagctaaagctggagttattgggttttccaagactgccgccagagagggtgctagcaggaatataaatgtgaacgtggtttgccctggattcattgcatctgacatgactgccaagcttggagaagacatggaaaagaaaatcttgggaacaatcccattaggacgatatggacaaccagaagatgtggctggcttggtcgaattcttggctctcagtccggcagccagttacataactggacagacattcaccatcgatggaggtattgccatctaggcctttaagcaaaaaaaaaaaattggtaaaacagacaaagttgagttgtttctggcacttggtcggatttctgttttgcggtttctgtttggagagagagatctataactcatttgcttaaactcagttacataataatcttatt

SEQ ID NO: 51817 - protein, 331 aa, Glycine max
  peptide (1)..(331): Ceres Seq. ID no. 12609903
MCSMATTVAATKLTSLKATAGKLGYREICQVRQWSPLQSAMPHFGMLRCRQPFATSTVVNAQAQAQAQATGVEQTTTEEEEAVPKVESPVVVVTGASRGIGKAIALSLGKAGCKVLVNYARSAKEAEEVSKQIEEYGGQAITFGGDVSKEADVDAMMKTAVDKWGTIDVVVNNAGITRDTLLIRMKKSQWDEVMDLNLTGVFLCSQAATKIMMKKRKGRIINIASVVGLIGNIGQANYAAAKAGVIGFSKTAAREGASRNINVNVVCPGFIASDMTAKLGEDMEKKILGTIPLGRYGQPEDVAGLVEFLALSPAASYITGQTFTIDGGIAI

SEQ ID NO: 51818 - protein, 328 aa, Glycine max
  peptide (1)..(328): Ceres Seq. ID no. 12609904
MATTVAATKLTSLKATAGKLGYREICQVRQWSPLQSAMPHFGMLRCRQPFATSTVVNAQAQAQAQATGVEQTTTEEEEAVPKVESPVVVVTGASRGIGKAIALSLGKAGCKVLVNYARSAKEAEEVSKQIEEYGGQAITFGGDVSKEADVDAMMKTAVDKWGTIDVVVNNAGITRDTLLIRMKKSQWDEVMDLNLTGVFLCSQAATKIMMKKRKGRIINIASVVGLIGNIGQANYAAAKAGVIGFSKTAAREGASRNINVNVVCPGFIASDMTAKLGEDMEKKILGTIPLGRYGQPEDVAGLVEFLALSPAASYITGQTFTIDGGIAI

SEQ ID NO: 51819 - protein, 291 aa, Glycine max
  peptide (1)..(291): Ceres Seq. ID no. 12609905
MPHFGMLRCRQPFATSTVVNAQAQAQAQATGVEQTTTEEEEAVPKVESPVVVVTGASRGIGKAIALSLGKAGCKVLVNYARSAKEAEEVSKQIEEYGGQAITFGGDVSKEADVDAMMKTAVDKWGTIDVVVNNAGITRDTLLIRMKKSQWDEVMDLNLTGVFLCSQAATKIMMKKRKGRIINIASVVGLIGNIGQANYAAAKAGVIGFSKTAAREGASRNINVNVVCPGFIASDMTAKLGEDMEKKILGTIPLGRYGQPEDVAGLVEFLALSPAASYITGQTFTIDGGIAI

SEQ ID NO: 51820 - DNA, 631 bp, Glycine max
  misc_feature (1)..(631): Ceres Seq. ID no. 12609907
atatcattatacacaatcgtaggatctctccctctctcttgctctctccatattctgagattgctatatatataggtatttcttttgcagacttcctatgaagcaaacaaatgctcatatggagaggcaaattatgaacaagagaaaacgagttttttctgtccaagaaaagaagaacccgaaggcagtctttgcgaaaagatacgtgagtcacttggttccagctctcaagaagatcaacatgaacaaaccctcttcgcaaatcaacagcaaaagtttcgagcaaaccgtgaaacatgaagtagacatggctttggctttgtctgctcaagaattcgcgtggagccgtttcttgcaacacaagctattatcttcccctcatgaagatcctagttactcttccaagattctagaaacatctagctgtaaacaagacggcaaagaaggagcagagataaagaagaaactgaaggaattgcaaaagcttgtgccaggaggagaagagctgaatatggaggagatattgagtgaggtcggaagctacattgtatgtcttgagttgcagatgattgttctaaaatcacttgttcaagataacatttcttgattattatataattaaatgtttcat

SEQ ID NO: 51821 - protein, 169 aa, Glycine max
  peptide (1)..(169): Ceres Seq. ID no. 12609908
MKQTNAHMERQIMNKRKRVFSVQEKKNPKAVFAKRYVSHLVPALKKINMNKPSSQINSKSFEQTVKHEVDMALALSAQEFAWSRFLQHKLLSSPHEDPSYSSKILETSSCKQDGKEGAEIKKKLKELQKLVPGGEELNMEEILSEVGSYIVCLELQMIVLKSLVQDNIS

SEQ ID NO: 51822 - protein, 162 aa, Glycine max
  peptide (1)..(162): Ceres Seq. ID no. 12609909
MERQIMNKRKRVFSVQEKKNPKAVFAKRYVSHLVPALKKINMNKPSSQINSKSFEQTVKHEVDMALALSAQEFAWSRFLQHKLLSSPHEDPSYSSKILETSSCKQDGKEGAEIKKKLKELQKLVPGGEELNMEEILSEVGSYIVCLELQMIVLKSLVQDNIS

SEQ ID NO: 51823 - protein, 157 aa, Glycine max
  peptide (1)..(157): Ceres Seq. ID no. 12609910
MNKRKRVFSVQEKKNPKAVFAKRYVSHLVPALKKINMNKPSSQINSKSFEQTVKHEVDMALALSAQEFAWSRFLQHKLLSSPHEDPSYSSKILETSSCKQDGKEGAEIKKKLKELQKLVPGGEELNMEEILSEVGSYIVCLELQMIVLKSLVQDNIS

SEQ ID NO: 51824 - DNA, 854 bp, Glycine max
  misc_feature (1)..(854): Ceres Seq. ID no. 15172913
gcgggcaccaacaaaccaaagctctccctcccgctgtcccgatcactctcccttccaggaagcttggaccgaaggaaggagctgagaggagcccatgggggaattctccaaggaatcttgcccttctgtgaagaacattttgctattggattctgaggggaagcgtgttgctgtgaagtacttctcggatgattggccaaataacgcatctaggttgacctttgaaaagtccatttttactaaaactctgaagacaaatgcacgctccgaagctgagataacattgcttgatggttttattgttgtttacaaatttgtacaagacctacactttttcgtcactgccggagatgatgagaatgagctcatcatagcaaatgtgctacagggttttgctgattcggttggtcttctactcaggggtgatgtcgagaagaggactgcacttgagaacttggacttgatacttctctgcattgatgagattattgatggcggcataattcttgaaacagatgcgaacaccattgcggggaaggttgcaaccaatgctgctgacggctctgttcccttctctgagcagacaatatctcaagctctggccacagccagggaacactttgcaagatctcttctgaaatgagaagccgccgtttcttctttcacccctgtgtgttcgaggttgggctactatgctaggcctggcagcggtcacttaaccaaaagcgcaactgtggcagacagatgtgtctggattattcttaaatgctatgtaataccattttcttgttaaatgcatgctgtgtatcttacattttctggaggtatagagaaataatttttgaagttgatcc

SEQ ID NO: 51825 - protein, 182 aa, Glycine max
  peptide (1)..(182): Ceres Seq. ID no. 15172914
MGEFSKESCPSVKNILLLDSEGKRVAVKYFSDDWPNNASRLTFEKSIFTKTLKTNARSEAEITLLDGFIVVYKFVQDLHFFVTAGDDENELIIANVLQGFADSVGLLLRGDVEKRTALENLDLILLCIDEIIDGGIILETDANTIAGKVATNAADGSVPFSEQTISQALATAREHFARSLLK

SEQ ID NO: 51826 - DNA, 721 bp, Glycine max
  misc_feature (1)..(721): Ceres Seq. ID no. 15178067
atttttcttcttagcatacaatgaatcacaaggcacctagtttttttctggggatggatgtgaagagaatcatgggtggtgatagagatgggaacaccaattgggtgattaaggaagatggtgaagaagatagcaatgattcatcatccattggactcaactcaatggactctatgtgctcgtcttcttcatcagagctgagcgaggacgcttcatcttcaacatcatcaacacattcaaatggacctttgtttgaattatcagacctcatgagccacctccctatgaagagagggctatctatgttctatcaagggaaggcccagtctttcacttctttagcaagggtggagagcatagaagatcttcccaagaaaggcataccttatagaaagagaacgaaatcatgcaagagttttgggggaggcttggatagtcagagaatattgtgctgtccaaaggctacaatatcaaagaaaacttcaagagtgtcttttgcatctgtactaagcaaaagaggaagtttcctaggagggtctagatcttccattgcagttcaacacaagaacttctgaaattcagactgttaaaagttattgcttatttcatgtacaaaatccggaaaattttgagtcctgcagcttcagtttattgagtcaaagccatatgatcaattagctacatatttgagattcattattcgtttgttttccatggtggt

SEQ ID NO: 51827 - protein, 184 aa, Glycine max
  peptide (1)..(184): Ceres Seq. ID no. 15178068
MNHKAPSFFLGMDVKRIMGGDRDGNTNWVIKEDGEEDSNDSSSIGLNSMDSMCSSSSSELSEDASSSTSSTHSNGPLFELSDLMSHLPMKRGLSMFYQGKAQSFTSLARVESIEDLPKKGIPYRKRTKSCKSFGGGLDSQRILCCPKATISKKTSRVSFASVLSKRGSFLGGSRSSIAVQHKNF

SEQ ID NO: 51828 - protein, 173 aa, Glycine max
  peptide (1)..(173): Ceres Seq. ID no. 15178069
MDVKRIMGGDRDGNTNWVIKEDGEEDSNDSSSIGLNSMDSMCSSSSSELSEDASSSTSSTHSNGPLFELSDLMSHLPMKRGLSMFYQGKAQSFTSLARVESIEDLPKKGIPYRKRTKSCKSFGGGLDSQRILCCPKATISKKTSRVSFASVLSKRGSFLGGSRSSIAVQHKNF

SEQ ID NO: 51829 - protein, 167 aa, Glycine max
  peptide (1)..(167): Ceres Seq. ID no. 15178070
MGGDRDGNTNWVIKEDGEEDSNDSSSIGLNSMDSMCSSSSSELSEDASSSTSSTHSNGPLFELSDLMSHLPMKRGLSMFYQGKAQSFTSLARVESIEDLPKKGIPYRKRTKSCKSFGGGLDSQRILCCPKATISKKTSRVSFASVLSKRGSFLGGSRSSIAVQHKNF

SEQ ID NO: 51830 - DNA, 1050 bp, Glycine max
  misc_feature (1)..(1050): Ceres Seq. ID no. 13638673
atctatctggagtctacctaatcccctccccggcactccccgcctgacaaccgcggccatggcgtgcgccttctccgcctccaccgtgtccacggcggccgcgctcgtcgcgtccccgaagccagccggggcgccgcagtgcctgtcgtttccccgcgccatcgcaggcgccgccgccaggccttcccgcctcgccgccgccagctcgaggacggccagggcccgcagcttcgtcgcccgcgcctcagcggagtacgacctgccgctggtggggaacaaagcaccggacttcgccgcggaggccgtgttcgaccaggagttcatcaacgtcaagctatctgattacattgggaagaagtatgtgattcttttcttctaccctctggacttcaccttcgtctgcccaactgagattacggctttcagcgacagacatgaggagttcgagaagataaacactgaaattcttggtgtttcagttgatagtgtgttttcccatcttgcatgggtgcagacagagaggaaatctggtggacttggtgatctgaaatatccgctggtttctgacgtcaccaaatcaatctcaaagtcttttggtgtattgatccctgatcagggaattgctctgagaggattattcatcattgacaaggagggtgtgattcagcattccactattaacaaccttggtattggccgtagtgtggatgagaccttgagaacccttcaggctctgcaatacgtccaagaaaacccagacgaggtctgcccggcgggatggaaacctggggaaaagtcgatgaagcctgaccccaagggcagcaaggagtacttcgctgctatctagatgtgtccttgtcctttgcactcgctgtcagttttgtcatggccgtttcttggttacatgtgtttttgtgacccgagttgtagttatcatgcgtacaattgactctgtaatttctgcaataagggtttgtctgtgtgtggattttccctgctccaatttggaaagaacaatacaagattggaaataaaatcttatcttatgtc

SEQ ID NO: 51831 - protein, 281 aa, Glycine max
  peptide (1)..(281): Ceres Seq. ID no. 13638674
SIWSLPNPLPGTPRLTTAAMACAFSASTVSTAAALVASPKPAGAPQCLSFPRAIAGAAARPSRLAAASSRTARARSFVARASAEYDLPLVGNKAPDFAAEAVFDQEFINVKLSDYIGKKYVILFFYPLDFTFVCPTEITAFSDRHEEFEKINTEILGVSVDSVFSHLAWVQTERKSGGLGDLKYPLVSDVTKSISKSFGVLIPDQGIALRGLFIIDKEGVIQHSTINNLGIGRSVDETLRTLQALQYVQENPDEVCPAGWKPGEKSMKPDPKGSKEYFAAI

SEQ ID NO: 51832 - protein, 262 aa, Glycine max
  peptide (1)..(262): Ceres Seq. ID no. 13638675
MACAFSASTVSTAAALVASPKPAGAPQCLSFPRAIAGAAARPSRLAAASSRTARARSFVARASAEYDLPLVGNKAPDFAAEAVFDQEFINVKLSDYIGKKYVILFFYPLDFTFVCPTEITAFSDRHEEFEKINTEILGVSVDSVFSHLAWVQTERKSGGLGDLKYPLVSDVTKSISKSFGVLIPDQGIALRGLFIIDKEGVIQHSTINNLGIGRSVDETLRTLQALQYVQENPDEVCPAGWKPGEKSMKPDPKGSKEYFAAI

SEQ ID NO: 51833 - DNA, 731 bp, Glycine max
  misc_feature (1)..(731): Ceres Seq. ID no. 12609333
gcgcaaccagttactagcgagagatattcatcgatagataagctccttggtctactccatacgttccattccctccctcgagctaggtccgagccttcacttcgaccatggcctcgtcctccgcgctgatagcgctccttgtggtccttggctgcgctgcggcggcctccgcggccacgttcaccgtcggagatgggcaaggctggacgaccggcgccaattacgccacctgggccagtggcaagaccttcgcggttggagacaagctcgtgttcaactacgccagccaggcccacacagtgaccgaagtcaccaagagcgagtacgacgcctgctccagcaacgccaacggtgacaacagcggcgccaccaccatgaccctcaaagccggcgcgaactactacatctgcaccatcggcacccactgcgccgccggcatgaagctcgccgtcaccgccggcgactccagttccggttccggtacccccgcggcggggacgccacctaccaccccgtccgggtccggcggccaccgcatggaggtcggccccgttctcgcggccaccgctggcgtcctcctcaagctcgccctcttctgatccgccgatgattcgatgttggaaagtttcgtcgatcgttctatgtttgattctgacggccacgcacacgctagtttgtaccggacagtggttgcctgtgcttcctgatgtgatatgattggttggtttcgt

SEQ ID NO: 51834 - protein, 163 aa, Glycine max
  peptide (1)..(163): Ceres Seq. ID no. 12609334
MASSSALIALLVVLGCAAAASAATFTVGDGQGWTTGANYATWASGKTFAVGDKLVFNYASQAHTVTEVTKSEYDACSSNANGDNSGATTMTLKAGANYYICTIGTHCAAGMKLAVTAGDSSSGSGTPAAGTPPTTPSGSGGHRMEVGPVLAATAGVLLKLALF

SEQ ID NO: 51835 - DNA, 986 bp, Glycine max
  misc_feature (1)..(986): Ceres Seq. ID no. 12609335
gccgcaagaatccaaaatcatcacagcagagagagagggaaagaggagagagaaagaggagagagagaccatggcctccgccgtcgtttgcaagggcgagggtgccgcgccggccagcctcctcaagtccgctgctcccgtggccttctgcccgctccgctcccccgccgtcaccgccgcccgctgcccgtacaacacccaggtcaaggaggtcagccgctacgacgacgacaacgacgacgaccgcgacctcgtcatccccagcttcttctcgcaggacgtgctcgacccgctcggcgcgccgaccagcatggcccgtctgctgtctctgatggaggacgtcgcaactaagaccggcggcctctcctccactgctggtgctggggcgtcgcggctcggacggtgggtggccaaggaggacgacgacgcggtgtacctcaaggtgccgatgccggggctgaccaaggagcacgtgaaggtgcgcgcggacaagaacatcctggtgatcgagggcgagggcgagaagcagccctgggacggcgacgacgactccgcggtgccaaagtacaaccgccgcatcgagatgcccgctgctgacgcgtacaagatggacaagatcaaggccgagatgaagaatggcgtgctctgggtcaccctgctcaaggtcaaggaggaggagcgcacggacgtcttccacgtcaaggtcgagtaggcagtgccgtcgtggtagtgctcatggaggatggccgacgcgagagtgtgagagacgccttgttgatgtgggcatgtttggtgtctttctccttgttttgcttcgttgatcgtcttggatccagtaggtagtggtctgatggtgaagttggtcgcgaactctgtcaaatttgctctagtttcggcatatgatgaacttgctttggtggtgaaattggtcatgaaattctgttgatttcctcaagtttggcatatgatgaactgatttggtggcg

SEQ ID NO: 51836 - protein, 236 aa, Glycine max
  peptide (1)..(236): Ceres Seq. ID no. 12609336
PQESKIITAEREGKRREKEERETMASAVVCKGEGAAPASLLKSAAPVAFCPLRSPAVTAARCPYNTQVKEVSRYDDDNDDDRDLVIPSFFSQDVLDPLGAPTSMARLLSLMEDVATKTGGLSSTAGAGASRLGRWVAKEDDDAVYLKVPMPGLTKEHVKVRADKNILVIEGEGEKQPWDGDDDSAVPKYNRRIEMPAADAYKMDKIKAEMKNGVLWVTLLKVKEEERTDVFHVKVE

SEQ ID NO: 51837 - protein, 213 aa, Glycine max
  peptide (1)..(213): Ceres Seq. ID no. 12609337
MASAVVCKGEGAAPASLLKSAAPVAFCPLRSPAVTAARCPYNTQVKEVSRYDDDNDDDRDLVIPSFFSQDVLDPLGAPTSMARLLSLMEDVATKTGGLSSTAGAGASRLGRWVAKEDDDAVYLKVPMPGLTKEHVKVRADKNILVIEGEGEKQPWDGDDDSAVPKYNRRIEMPAADAYKMDKIKAEMKNGVLWVTLLKVKEEERTDVFHVKVE

SEQ ID NO: 51838 - protein, 133 aa, Glycine max
  peptide (1)..(133): Ceres Seq. ID no. 12609338
MARLLSLMEDVATKTGGLSSTAGAGASRLGRWVAKEDDDAVYLKVPMPGLTKEHVKVRADKNILVIEGEGEKQPWDGDDDSAVPKYNRRIEMPAADAYKMDKIKAEMKNGVLWVTLLKVKEEERTDVFHVKVE

SEQ ID NO: 51839 - DNA, 1022 bp, Glycine max
  misc_feature (1)..(1022): Ceres Seq. ID no. 15172903
catccaccacagcttagcagcaaccaccagtgcctcaaagactcttgatcaacaaactctagctgaccagtgctagctaagcttgctgcatagcaagcaatggggtactctaaaaacctagcggctggcctgttcgccatgctgttcctagctccggccgtcctggcatccgaccccgatcctcttcaggacttctgtgttgccgacctcgatggcagggcagtctcggtgaacgggcatccatgcaagcccatgtcggaggctggtgacgacttcctcttctcgtccaagctggccaaggccggcaacacgtccaccccgaatggctcggccgtgacggagctcgacgtggccgagtggcccggtacgaacacgctgggtgtgtccatgaaccgtgtggacttcgcgccgggaggcaccaacccgccgcacgtccacccgcgtgggaccgagatcggcatggtgatgaaaggtgagctcctcgttggaatcctcggcagcctcgactccggaaacaagctctactccagggtggtgcgtgctggagagacgttcctcatcccgcgcgggctcatgcacttccagttcaacgttggtaagacggaagcctacatggttgtctccttcaacagccagaaccccggcatcgttttcgtgccgctcactctcttcggttccaacccgccaatccccacgccggtgctcaccaaggcgctaaggatagaggccggggtcgtcgaacttctcaagtccaagttcgctggtgggtcttaatccctgggagcttgccctggaatgatcagtatataatttgatatatgcataccagtgaaatttaataattgttcagcataagacacgtattcaagcttctagctaagctcgcatgcagttgtaataagattgaataagttagcctcgcggtttagccttcagagccaatacgaggaatcgaaatgtactgctttttattgttgtgtttgttcttttcattgaacggaatatataattatcattttcgc

SEQ ID NO: 51840 - protein, 224 aa, Glycine max
  peptide (1)..(224): Ceres Seq. ID no. 15172904
MGYSKNLAAGLFAMLFLAPAVLASDPDPLQDFCVADLDGRAVSVNGHPCKPMSEAGDDFLFSSKLAKAGNTSTPNGSAVTELDVAEWPGTNTLGVSMNRVDFAPGGTNPPHVHPRGTEIGMVMKGELLVGILGSLDSGNKLYSRVVRAGETFLIPRGLMHFQFNVGKTEAYMVVSFNSQNPGIVFVPLTLFGSNPPIPTPVLTKALRIEAGVVELLKSKFAGGS

SEQ ID NO: 51841 - protein, 211 aa, Glycine max
  peptide (1)..(211): Ceres Seq. ID no. 15172905
MLFLAPAVLASDPDPLQDFCVADLDGRAVSVNGHPCKPMSEAGDDFLFSSKLAKAGNTSTPNGSAVTELDVAEWPGTNTLGVSMNRVDFAPGGTNPPHVHPRGTEIGMVMKGELLVGILGSLDSGNKLYSRVVRAGETFLIPRGLMHFQFNVGKTEAYMVVSFNSQNPGIVFVPLTLFGSNPPIPTPVLTKALRIEAGVVELLKSKFAGGS

SEQ ID NO: 51842 - protein, 173 aa, Glycine max
  peptide (1)..(173): Ceres Seq. ID no. 15172906
MSEAGDDFLFSSKLAKAGNTSTPNGSAVTELDVAEWPGTNTLGVSMNRVDFAPGGTNPPHVHPRGTEIGMVMKGELLVGILGSLDSGNKLYSRVVRAGETFLIPRGLMHFQFNVGKTEAYMVVSFNSQNPGIVFVPLTLFGSNPPIPTPVLTKALRIEAGVVELLKSKFAGGS

SEQ ID NO: 51843 - DNA, 1040 bp, Glycine max
  misc_feature (1)..(1040): Ceres Seq. ID no. 13594655
atcagaaactcattcagacgactcgagcaaccactgcctcttacacttgtcacgtccctaccacgtactcgcaatggccgcagctgcagcactagccagttccacgaaagaagtgctcccgcctgcactgggcgccgtctccgagccccctaccctcttcgatggcaccaccagactgtacatttgctacacctgcccgtttgctcagcgcgcctgggttacccggaactgcaagggtctgcaggaggagatcaagcttgtcgccatcaatctggaggacaaaccagcatggtacaaggagaatgtttacccacagggcacggtgccttccctggagcacgacggcaaggtcaccggagagagcttggatttgatcaagtacatcgacaccaatttccaaggcccggcactgcttcctcaagatccggctaagaggcagttcgccgatgagctgattgcttacgctgatgcctttaccaaagcactctactcgcccttgatctcccagtggccatttcagatgaagctgttgctgctctagacaagatcgaagctgtcctgtccaagttcagtgacggcccgttcttccttggccaatttagcttggtggatattgcgtacgtgaccatcttggagagggttcagatatactactctcacgtgaggaactacgagatcgccaaagacaggcccaaccttgagagatacgccgaggagatgaacaagatcgaagcctataagcaaaccaaaaatgtcccgctgaccttgcttgatgctgccaagaggcatctcaagattgcctgaagaagtggtgattcgccaagaattacggcggctgccagggaacggcggcatttgagtaggccaagactgaactctcgtcaccgggggttggggcttcttttactaccattattatcacaatgagttgtagtagtatatgttctcttcccaataaatgacaccatgttgtaacctgtaagggctatgctttttatgaaacaataatgtactccatctgttctatgtgcattacagtt

SEQ ID NO: 51844 - protein, 179 aa, Glycine max
  peptide (1)..(179): Ceres Seq. ID no. 13594656
SETHSDDSSNHCLLHLSRPYHVLAMAAAAALASSTKEVLPPALGAVSEPPTLFDGTTRLYICYTCPFAQRAWVTRNCKGLQEEIKLVAINLEDKPAWYKENVYPQGTVPSLEHDGKVTGESLDLIKYIDTNFQGPALLPQDPAKRQFADELIAYADAFTKALYSPLISQWPFQMKLLLL

SEQ ID NO: 51845 - protein, 155 aa, Glycine max
  peptide (1)..(155): Ceres Seq. ID no. 13594657
MAAAAALASSTKEVLPPALGAVSEPPTLFDGTTRLYICYTCPFAQRAWVTRNCKGLQEEIKLVAINLEDKPAWYKENVYPQGTVPSLEHDGKVTGESLDLIKYIDTNFQGPALLPQDPAKRQFADELIAYADAFTKALYSPLISQWPFQMKLLLL

SEQ ID NO: 51846 - protein, 143 aa, Glycine max
  peptide (1)..(143): Ceres Seq. ID no. 13594658
IRNSFRRLEQPLPLTLVTSLPRTRNGRSCSTSQFHERSAPACTGRRLRAPYPLRWHHQTVHLLHLPVCSARLGYPELQGSAGGDQACRHQSGGQTSMVQGECLPTGHGAFPGARRQGHRRELGFDQVHRHQFPRPGTASSRSG

SEQ ID NO: 51847 - DNA, 700 bp, Glycine max
  misc_feature (1)..(700): Ceres Seq. ID no. 13594809
ctctgcctctgcctctcagtttaccaaaaccctagtttcaaagctttactctccagaaatggctttctgcaaaaatctcggtggtctattgaggcaaggtgcggtttctcagacagggaatgtacccgttcagtctatgctcgggtctctccggtacatgtctaccaagctctttgtcggtggtctctcatggggaactgatgaccagtcattgagggaggctttctccaacttcggtgaagtgatcgattctaaggtcattgttgatagggaaaccggaaggtcaagggggtttggatttgtcaatttctctgatgagagtgctgctaatgctgcaatttcagagatggacggaaaggaactgaatggacgcaacatccgagtgaatgttgctaacgatagaccaagtgctccccgggcttatggaggtggtggcggctacggtggaggtggtggtggctatggaggaggtggtgatggaggcggttactaaacagaggagcttcttgtgataagaagaattgatctttctgtttgtttttttttattatttaaatcgagcttgtgctagtacaaaacctgaatgggatttgttgagactctagtagtcagtactcttatctaagacacggcttttcactcagtttgtgttagcttcaaatattgtccgttaataattctggaggaaagccgaattgag

SEQ ID NO: 51848 - protein, 163 aa, Glycine max
  peptide (1)..(163): Ceres Seq. ID no. 13594810
SASASQFTKTLVSKLYSPEMAFCKNLGGLLRQGAVSQTGNVPVQSMLGSLRYMSTKLFVGGLSWGTDDQSLREAFSNFGEVIDSKVIVDRETGRSRGFGFVNFSDESAANAAISEMDGKELNGRNIRVNVANDRPSAPRAYGGGGGYGGGGGGYGGGGDGGGY

SEQ ID NO: 51849 - protein, 144 aa, Glycine max
  peptide (1)..(144): Ceres Seq. ID no. 13594811
MAFCKNLGGLLRQGAVSQTGNVPVQSMLGSLRYMSTKLFVGGLSWGTDDQSLREAFSNFGEVIDSKVIVDRETGRSRGFGFVNFSDESAANAAISEMDGKELNGRNIRVNVANDRPSAPRAYGGGGGYGGGGGGYGGGGDGGGY

SEQ ID NO: 51850 - protein, 118 aa, Glycine max
  peptide (1)..(118): Ceres Seq. ID no. 13594812
MLGSLRYMSTKLFVGGLSWGTDDQSLREAFSNFGEVIDSKVIVDRETGRSRGFGFVNFSDESAANAAISEMDGKELNGRNIRVNVANDRPSAPRAYGGGGGYGGGGGGYGGGGDGGGY

SEQ ID NO: 51851 - DNA, 1470 bp, Glycine max
  misc_feature (1)..(1470): Ceres Seq. ID no. 15177854
cacagacataaagagcagagttcagaagcaagtaacagagcataccatcgtactgtacgtatttgcgctgcacaatctgcatccagtgcacacaagatagtagcgagcaagatggtggccaaggaggcgatcccgctgctgacgccgcacaagatgggccagttcgagctctcccaccgggtggtgctcgcgccgctcacgcgctgccgctcctacgccaacgtgccgcagccgcacgccgcggcgtactactcacagcgggccaccagaggcggcctcctcatcgccgaggccaccggcgtctccgccaccgcgcaggggtacccggagacacccggcatctggacgcagcagcaggtcgacgcctggaagcccatcgtcgatgccgtccaccgcaagggcgctctcttcttctgccagatttggcacgttgggagggtctccaccaacgattttcagccggacggacaggcgccgatctccagcactgacaagcaaataacgcctgatgccgagtctggtatggtctactccaagccccgacagcttcaaacggacgagataccgctgatcgttgatgacttcagacgcgctgccagaaacgcaatcgaggcggggttcgacggcgtggagatccacggggcacacgggtacctattggagcagttcatgaaagacagctctaacaaccgcaccgacgagtatggtggcagcctcgagaaccgatgccgctttgcagtagaggtaatcgatgctatcgtccatgagattggtgcggatcgtgtaggcatcaggttgtctccattcgtggattacatggactgcttcgactccgacccacatgcactcgggatgtacatggtacaacaacttaacaagcatcaaggatttgtctattgccatatggtagagccgcggatggccattgtggatggccgcaggcagataccccatgggctcctgcccttcaggaaagcattcaagggcactttcattgccgctggagggtatgatcgggaggaaggcaacaaagtggtggccgacggttatgctgatctcgttgcttacgggagaatctttctggctaatccagatttgcctaagagattcgagctcgactcaccattgaacaagtacgaccgcaacactttctacacgcaagatcctgtcattggctacacagattatcctttccttgaaggctcgaatgccgagtagttcacccactcgacttccatagtgatgtgcttgattttatacaatatgtaatggtttattcaatgtgtgtatgcacggggcatgcgcattgtatcatttccaccaataatttacttttattctcccatgaaatgccaatatgtcaagatattatttttcccatcaatagtgatatcactgtcttcaacaacctgtaagacaagttctatcccaacgatacccaaaatagtggtgcgtccttaccggttaaag

SEQ ID NO: 51852 - protein, 405 aa, Glycine max
  peptide (1)..(405): Ceres Seq. ID no. 15177855
HRHKEQSSEASNRAYHRTVRICAAQSASSAHKIVASKMVAKEAIPLLTPHKMGQFELSHRVVLAPLTRCRSYANVPQPHAAAYYSQRATRGGLLIAEATGVSATAQGYPETPGIWTQQQVDAWKPIVDAVHRKGALFFCQIWHVGRVSTNDFQPDGQAPISSTDKQITPDAESGMVYSKPRQLQTDEIPLIVDDFRRAARNAIEAGFDGVEIHGAHGYLLEQFMKDSSNNRTDEYGGSLENRCRFAVEVIDAIVHEIGADRVGIRLSPFVDYMDCFDSDPHALGMYMVQQLNKHQGFVYCHMVEPRMAIVDGRRQIPHGLLPFRKAFKGTFIAAGGYDREEGNKVVADGYADLVAYGRIFLANPDLPKRFELDSPLNKYDRNTFYTQDPVIGYTDYPFLEGSNAE

SEQ ID NO: 51853 - protein, 368 aa, Glycine max
  peptide (1)..(368): Ceres Seq. ID no. 15177856
MVAKEAIPLLTPHKMGQFELSHRVVLAPLTRCRSYANVPQPHAAAYYSQRATRGGLLIAEATGVSATAQGYPETPGIWTQQQVDAWKPIVDAVHRKGALFFCQIWHVGRVSTNDFQPDGQAPISSTDKQITPDAESGMVYSKPRQLQTDEIPLIVDDFRRAARNAIEAGFDGVEIHGAHGYLLEQFMKDSSNNRTDEYGGSLENRCRFAVEVIDAIVHEIGADRVGIRLSPFVDYMDCFDSDPHALGMYMVQQLNKHQGFVYCHMVEPRMAIVDGRRQIPHGLLPFRKAFKGTFIAAGGYDREEGNKVVADGYADLVAYGRIFLANPDLPKRFELDSPLNKYDRNTFYTQDPVIGYTDYPFLEGSNAE

SEQ ID NO: 51854 - protein, 354 aa, Glycine max
  peptide (1)..(354): Ceres Seq. ID no. 15177857
MGQFELSHRVVLAPLTRCRSYANVPQPHAAAYYSQRATRGGLLIAEATGVSATAQGYPETPGIWTQQQVDAWKPIVDAVHRKGALFFCQIWHVGRVSTNDFQPDGQAPISSTDKQITPDAESGMVYSKPRQLQTDEIPLIVDDFRRAARNAIEAGFDGVEIHGAHGYLLEQFMKDSSNNRTDEYGGSLENRCRFAVEVIDAIVHEIGADRVGIRLSPFVDYMDCFDSDPHALGMYMVQQLNKHQGFVYCHMVEPRMAIVDGRRQIPHGLLPFRKAFKGTFIAAGGYDREEGNKVVADGYADLVAYGRIFLANPDLPKRFELDSPLNKYDRNTFYTQDPVIGYTDYPFLEGSNAE

SEQ ID NO: 51855 - DNA, 712 bp, Glycine max
  misc_feature (1)..(712): Ceres Seq. ID no. 14302035
gattactcaacttgtttggtcaaataatggaagcggcgacgaagcagagcgttacaaaccgccttctcaccgtcaagtcagcctccggcaagacttacagtcaattagcggcggagacagggctcaccaacgtctacgtggctcagctgctccgtcgccaagcccagctcaaacccgaaacagtccccaagctccgtgaagccttacctgctctgaccgaagaactcatcgccgccatgatgtctccgccgtggagatcgtatgatccaaacctcatccaagaacccaccgtctacaggttgaatgaagcagtgatgcatttcggtgagagtataaaggagatcatcaatgaagatttcggcgatggcatcatgtcggcaatagacttctattgctctgtggacaaagttaaaggagttgacggtaataaccgcgttgtcgtgacacttgatgggaagtatctttctcattccgaacagaggactgagaatatggtctcaaggctaaacctcaagggaagtacaagcgaatgatatgaaaatgtaagaataaaacgattcatatgaatgtaagcagcaatccatgaaggcttttatgtctaaagctgtaaacattgtaatatttatggtgtttgtttattctgtactctatgcaactccagcctcgagctgtttcaagttgaataacagtgaataaaataaaataaacaatg

SEQ ID NO: 51856 - protein, 176 aa, Glycine max
  peptide (1)..(176): Ceres Seq. ID no. 14302036
LLNLFGQIMEAATKQSVTNRLLTVKSASGKTYSQLAAETGLTNVYVAQLLRRQAQLKPETVPKLREALPALTEELIAAMMSPPWRSYDPNLIQEPTVYRLNEAVMHFGESIKEIINEDFGDGIMSAIDFYCSVDKVKGVDGNNRVVVTLDGKYLSHSEQRTENMVSRLNLKGSTSE

SEQ ID NO: 51857 - protein, 168 aa, Glycine max
  peptide (1)..(168): Ceres Seq. ID no. 14302037
MEAATKQSVTNRLLTVKSASGKTYSQLAAETGLTNVYVAQLLRRQAQLKPETVPKLREALPALTEELIAAMMSPPWRSYDPNLIQEPTVYRLNEAVMHFGESIKEIINEDFGDGIMSAIDFYCSVDKVKGVDGNNRVVVTLDGKYLSHSEQRTENMVSRLNLKGSTSE

SEQ ID NO: 51858 - protein, 98 aa, Glycine max
  peptide (1)..(98): Ceres Seq. ID no. 14302038
MMSPPWRSYDPNLIQEPTVYRLNEAVMHFGESIKEIINEDFGDGIMSAIDFYCSVDKVKGVDGNNRVVVTLDGKYLSHSEQRTENMVSRLNLKGSTSE

SEQ ID NO: 51859 - DNA, 721 bp, Glycine max
  misc_feature (1)..(721): Ceres Seq. ID no. 15172900
atcgcttccctcaaaaacaaataaaaatctctaaaatcaaaaaagatgtcgacgaagaagattgtgttgaagagctccgacaacgagtctttcgaggttgacgaggccgtggctcgcgagtctcagaccctagctcacatggtcgaagacgactgcaccgacaacggcatccctcttcccaacgtcaccggcaagatcctcgccaaggtgatcgagtactgcaagaagcacgtcgacgccgctgctgccaagaccgaggcggccgccgatggtggcgcttcctccgacgatgacctcaaggcttgggatgccgagttcatgaagatcgatcaggctaccctcttcgaactcatcctggctgctaactatctgaacatcaagaaccttctcgacctcacgtgccagacggtggctgatatgatcaaaggcaagactccagatgagattcgcacgaccttcaacatcaagaacgacttctcgcctgaggaggaagaggaggtgcgcagggagaaccaatgggcttttgaatgatctcaccaaagagaagccttgttgaagctatagcagaacctgcaaagctttcttcctttatcttatttgcgtctttatgttcttaggaaaaattaatgacttatgttggttccgttcctcctagtgcttttctatttaccgattaagaaccaattgttggataatttgtggttataatcagtctttggtt

SEQ ID NO: 51860 - protein, 161 aa, Glycine max
  peptide (1)..(161): Ceres Seq. ID no. 15172901
MSTKKIVLKSSDNESFEVDEAVARESQTLAHMVEDDCTDNGIPLPNVTGKILAKVIEYCKKHVDAAAAKTEAAADGGASSDDDLKAWDAEFMKIDQATLFELILAANYLNIKNLLDLTCQTVADMIKGKTPDEIRTTFNIKNDFSPEEEEEVRRENQWAFE

SEQ ID NO: 51861 - protein, 130 aa, Glycine max
  peptide (1)..(130): Ceres Seq. ID no. 15172902
MVEDDCTDNGIPLPNVTGKILAKVIEYCKKHVDAAAAKTEAAADGGASSDDDLKAWDAEFMKIDQATLFELILAANYLNIKNLLDLTCQTVADMIKGKTPDEIRTTFNIKNDFSPEEEEEVRRENQWAFE

SEQ ID NO: 51862 - DNA, 608 bp, Glycine max
  misc_feature (1)..(608): Ceres Seq. ID no. 12609631
acaacggctcgccacaaagccaacaaacccagcagccccagccctttccgcctccccccgctcccaaaccaagccccgcccccgttctgtccctccgcaaaaccctagctccgtacacgcgcggcgacctccaccatgaagggcaaggccgacacctccaagaagggcgagggcaggctcaaggccgccggcggcgccagcaagaggaagaaggacgccgctgccgctggcaagcccaagcgcccaccctccgccttcttcgtcttcatgtctgagttcaggcagcagtacaacgcggagaaccccaacaacaagagtgtcgccaacgtgagcaaggcggcgggtgagaagtggagagctatgtctgatgaggacaaagcaccttatgtggaaaaggctgaacagaagaagaaggactatgagaagaccaaagccacctttgataacaaggagagtgcgagctccaagaaggccaagactcagaacgatgaggaggtcaaatctgaggtcgaagatgagggtagcgatgaggaaaacgaggacgatgatgagtaaatagtgtatcagagtatgaggtagcaaattgggtgttgggtccccgcttagtg

SEQ ID NO: 51863 - protein, 139 aa, Glycine max
  peptide (1)..(139): Ceres Seq. ID no. 12609632
MKGKADTSKKGEGRLKAAGGASKRKKDAAAAGKPKRPPSAFFVFMSEFRQQYNAENPNNKSVANVSKAAGEKWRAMSDEDKAPYVEKAEQKKKDYEKTKATFDNKESASSKKAKTQNDEEVKSEVEDEGSDEENEDDDE

SEQ ID NO: 51864 - protein, 95 aa, Glycine max
  peptide (1)..(95): Ceres Seq. ID no. 12609633
MSEFRQQYNAENPNNKSVANVSKAAGEKWRAMSDEDKAPYVEKAEQKKKDYEKTKATFDNKESASSKKAKTQNDEEVKSEVEDEGSDEENEDDDE

SEQ ID NO: 51865 - protein, 90 aa, Glycine max
  peptide (1)..(90): Ceres Seq. ID no. 12609634
NGSPQSQQTQQPQPFPPPPAPKPSPAPVLSLRKTLAPYTRGDLHHEGQGRHLQEGRGQAQGRRRRQQEEEGRRCRWQAQAPTLRLLRLHV

SEQ ID NO: 51866 - DNA, 1124 bp, Glycine max
  misc_feature (1)..(1124): Ceres Seq. ID no. 13638599
agggagtaaaaagataaaagataaatatactccagatccgccaccgccgcgtgctatttcttccatccgcctccgtgttgcagcgggacatcggcggccattatttgatccgcggcaggcgcgtcccagccctgcgccgtcttctagtctagaatggcgggcgtcgggtcggcggtgcggcggctctacctctccgtctacaactgggtcgtcttcgtcggatgggcgcaggtgctctactacgcggtgacggcgctgctggccggcggccatgagggcgtctacgccgccgtcgagcgcccgctgcagctcgcgcagaccgccgccgtcatggagattcttcatgggctcgtagggttggtgaggtctccggtcactgcaactcttccacaaataggatcgaggttgtttcttacatggggcatcctgtggagctttcctgagacacaatctcatattcttgtaacttctttggtcataagctggtccatcaccgagatcattagatattctttcttcggcttgaaggagatgcttggatttgcaccttcttggcttttatggcttaggtatagcacatttctgatattgtatcctatcggtatccttagcgaagttggtctaatctacattgctctgccttatatgaaggtatctgaaaaatactttgttaaaatgcctaacaaatggaatttctccttcgactacttctacacatgtgttatcgccattggtgtctatgttccaggtgggccgcacatgttcacgtacatgcttgcccagaggaagaaggccctgtcaaaggcaaagactgcatgaagttgatgtgagccttatagttggagcatgcaatgcaaaccctgcagtctcatgttgtacgaatagtcggtgtgagttgtcattgttagacatgaattacccggcatgtgttgtaacgatgatgattgttggatttctcatggttgaattaatcattgatcaacctctgcattgagacaatgattatgaccatcagataaaaacaatattcatctttggaagtgctcatccattatgagccaatgacaagatctcatcttaacaaggaaaactttgtggagcaaatggtacactggttattccag

SEQ ID NO: 51867 - protein, 221 aa, Glycine max
  peptide (1)..(221): Ceres Seq. ID no. 13638600
MAGVGSAVRRLYLSVYNWVVFVGWAQVLYYAVTALLAGGHEGVYAAVERPLQLAQTAAVMEILHGLVGLVRSPVTATLPQIGSRLFLTWGILWSFPETQSHILVTSLVISWSITEIIRYSFFGLKEMLGFAPSWLLWLRYSTFLILYPIGILSEVGLIYIALPYMKVSEKYFVKMPNKWNFSFDYFYTCVIAIGVYVPGGPHMFTYMLAQRKKALSKAKTA

SEQ ID NO: 51868 - protein, 162 aa, Glycine max
  peptide (1)..(162): Ceres Seq. ID no. 13638601
MEILHGLVGLVRSPVTATLPQIGSRLFLTWGILWSFPETQSHILVTSLVISWSITEIIRYSFFGLKEMLGFAPSWLLWLRYSTFLILYPIGILSEVGLIYIALPYMKVSEKYFVKMPNKWNFSFDYFYTCVIAIGVYVPGGPHMFTYMLAQRKKALSKAKTA

SEQ ID NO: 51869 - DNA, 878 bp, Glycine max
  misc_feature (1)..(878): Ceres Seq. ID no. 15172893
gattcccatccagcgtacagactaggcgacccccgcttcccgtcccctctctcctccacacgcctcgctccctctcccctcgtccgccgccgccgccgccaccatgggcaggggcaagttcaagggcaagccaaccggccgccgcaacttctccaccccggaggagatcgcttctggaacttcagggcgtccacgctcatttaagaagaatgtagctgaagcagaagaggaagaggaagaggtagaagaatctgaagaggaagaatccgaagacgacggtgaagagaagaaacataaaggaaccgaaggtgttattcaaattgaaaatccaaacctggtgaaagcaaagaatataaaagccaaagaagctgatcttggaaagacaactgaactctcgaggcgtgagagagaggagattgagaaacaaaaatctcatgagcgctatatgaagcttcaggagcaaggcaaaacagaacaggcgaagaaagatttggaacgtcttgctttaataaggcagcaaagagcagatgctgcaaagaaacgtgaagaggagaaagctgctaaagaacagaggaagactgaagcgcgcaaataactgcgaaggttgtggaggcatgagctaagctgagttgtgttgtctggatatttatttctatgcatcctagtatatttaaaccgggtctctgttccatcatctacatttccataaaaacagtgcattgacaagtgtaaagtagtcctgtcggcgtggcttgctgtaaacttgagcttggcagggtacacatttagtgagatcagcttatgtgagatttgctttcactcaaaaattggtatgaaaaataactattgaaatttaatgtgttggaggcccgagctgt

SEQ ID NO: 51870 - protein, 163 aa, Glycine max
  peptide (1)..(163): Ceres Seq. ID no. 15172894
MGRGKFKGKPTGRRNFSTPEEIASGTSGRPRSFKKNVAEAEEEEEEVEESEEEESEDDGEEKKHKGTEGVIQIENPNLVKAKNIKAKEADLGKTTELSRREREEIEKQKSHERYMKLQEQGKTEQAKKDLERLALIRQQRADAAKKREEEKAAKEQRKTEARK

SEQ ID NO: 51871 - DNA, 917 bp, Glycine max
  misc_feature (1)..(917): Ceres Seq. ID no. 13638685
gcagttcccaaggcagagagagacgaaacagttagagagaagttgagagagagagagagagagtgcttccatggaatccgaacccacggttggtgtctctgcatcagcaccaccaccaccagccaccgatgatctccaatcgagcaacgcatcgtctccagccgacgccgccgcgcgtttgatccacgccgtggagcagcgccaacagcatcttctcgacaagacggtgcctcacgttctctaccgatggatcgcctgcctcgtcgtcgtgttgatctacttcgttcgcgtctacttggtggaaggcttctacatcatcacctacgcaatcggaatctaccttctcaacctcatcatcgctttcctctcccctcaagaagatcccgaggcttcgctcagcggcgggacgcttcctactcgtagatccgatgagtatcgaccgttcgttcgccgtctccccgagttcaaattctggttatcgatcattagggcatttgtcatcggttttatgatgacgttctttgaggtctttgacgtacctgttttctggccaatacttcttttctactgggtgatgctttttatcctcaccatgaggaaacagatacaacatatgatcaaatacagatatgttcctttctctttcggcaaacagaaatatggaaagaaacctgctccagcagagagcagtgaatgatcaaatcaaccgttctgttcagcaggtcttttcttttcttttgattgcctgaaactttgttagggatgaaatagaagaaacaatcaagcaggtagactctcgtagcctgtctcagacaagttttttttactcttttatcatcctgactatgtactggtttcacccgaagacaatgtatcttattattccagttttttgtcagtgagaataatgttttttt

SEQ ID NO: 51872 - protein, 208 aa, Glycine max
  peptide (1)..(208): Ceres Seq. ID no. 13638686
MESEPTVGVSASAPPPPATDDLQSSNASSPADAAARLIHAVEQRQQHLLDKTVPHVLYRWIACLVVVLIYFVRVYLVEGFYIITYAIGIYLLNLIIAFLSPQEDPEASLSGGTLPTRRSDEYRPFVRRLPEFKFWLSIIRAFVIGFMMTFFEVFDVPVFWPILLFYWVMLFILTMRKQIQHMIKYRYVPFSFGKQKYGKKPAPAESSE

SEQ ID NO: 51873 - DNA, 649 bp, Glycine max
  misc_feature (1)..(649): Ceres Seq. ID no. 13638602
cacacttctagcaccccaatacaatgactttgcacctacctctctccctatttaaaacttcaatacacttcattgtgagtgtattttaatcttctttatcttcattcattggttctctctaaccaaccctctcttttcctaaatcctaattaaacacccctcaaccaaaaaaagcatgaagaagctcaatctaatactcagtaagtgcaagaacttgtcaaagcatctaggaagatcttcatcatttaatagcctaaggtccaagtttgctaaggaagacttatgggaaggaaatggcatgcaagaaggtgaacattgtgaaactgtatttgttggcagcacaaggaaacggtacgtgataagctccaagtatttgaaccatcctctcctcaaagctctcatcaacaattccaagcaaaagggcagtgatgaaagtgttttggtggtcaactgtgaggtggttctctttgatcatctactgtggatgctagaaaatgcagatcctaagtttggttctgactctttggaggaattggctgaactctatgtgttttaagagctttcaaagtgctaattgcatgcagatgcctaatgtatgaaaatatgtatgttgggttgtgcttgcatttttcagaatgttattgttaag

SEQ ID NO: 51874 - protein, 126 aa, Glycine max
  peptide (1)..(126): Ceres Seq. ID no. 13638603
MKKLNLILSKCKNLSKHLGRSSSFNSLRSKFAKEDLWEGNGMQEGEHCETVFVGSTRKRYVISSKYLNHPLLKALINNSKQKGSDESVLVVNCEVVLFDHLLWMLENADPKFGSDSLEELAELYVF

SEQ ID NO: 51875 - protein, 85 aa, Glycine max
  peptide (1)..(85): Ceres Seq. ID no. 13638604
MQEGEHCETVFVGSTRKRYVISSKYLNHPLLKALINNSKQKGSDESVLVVNCEVVLFDHLLWMLENADPKFGSDSLEELAELYVF

SEQ ID NO: 51876 - DNA, 761 bp, Glycine max
  misc_feature (1)..(761): Ceres Seq. ID no. 13594814
aaaaacgactgtatccgcgtcctttactttccaaaaaataaatatttttcttcttgaagagattacaccttatccaattattggttgcattaggagaagccaaattttctttgtgtctctgagctgcgtatcgagctacaactccttcaatggcttccctatcaaccagttctctaagcttcaaagctccctccatacaatctaccagaacttctcaggtgttaagaaaacccttgagtttccagcctatctcctttggacgttttcagtcttcaaagaaccttcgtcttcagatcagttgtgcagcaaaaccagagacggtgcagaaagtgagtgacattgtcagggaacaattagctttgtctgccgacactgctctcactgccgagtccaagttctctgctcttggcgcagattctctcgacaccgtggagatagtgatggctttggaggaaaagtttaacataagtgtggaggaagctgatgctcaaaacattacgacgattcaggaggcagctgatttgattgaggatcttgctcagaagaaacctgcggcttaagcttcctaaactatcccggtttaacacaaaccggctgtccttttttttttctcctcctttctgagctttcttgttttcagatcattttattgtggtttattagaccatgtgttattattttttgttttcttcttttggaagttaagattggatgttgatgatgagaaaactttggtacgttgagattgattctttgtggtg

SEQ ID NO: 51877 - protein, 136 aa, Glycine max
  peptide (1)..(136): Ceres Seq. ID no. 13594815
MASLSTSSLSFKAPSIQSTRTSQVLRKPLSFQPISFGRFQSSKNLRLQISCAAKPETVQKVSDIVREQLALSADTALTAESKFSALGADSLDTVEIVMALEEKFNISVEEADAQNITTIQEAADLIEDLAQKKPAA

SEQ ID NO: 51878 - protein, 111 aa, Glycine max
  peptide (1)..(111): Ceres Seq. ID no. 13594816
KTTVSASFTFQKINIFLLEEITPYPIIGCIRRSQIFFVSLSCVSSYNSFNGFPINQFSKLQSSLHTIYQNFSGVKKTLEFPAYLLWTFSVFKEPSSSDQLCSKTRDGAESE

SEQ ID NO: 51879 - DNA, 557 bp, Glycine max
  misc_feature (1)..(557): Ceres Seq. ID no. 12609643
accttgcgttggccctccaccaccaccaaatcaccataagcgactagatctgattcgcaacacctccgaccatggcgaatgtggcgattcttgagctcaatggaaactgtggtaatacagtggaagagatagtgaaaatggagagagagatctttcccgagcatgaatcactgacttcattctttcacgatgaacttagaaagaagaacagtggattgctttatcttcacgtggatggcgaacttgtaggctatgtcatgtattcttggccttcttcctcgtatgccactatcaccgagctcgcagttaaggagcaatggaggggacaaggccacggagaggctttgttgaaagcagcaattcagaaatgcagtacaaggaaagttttgcgcataatgcttcatgtggatcccttgaggactcctgcagtgaatctttacaagaaacatggtttccaagttgacactttggttgaagtgtactactcctcagatagaaatgcttatagaatgtacttggacttcgattcaagttgaaggagaaaatgaataacattt

SEQ ID NO: 51880 - protein, 154 aa, Glycine max
  peptide (1)..(154): Ceres Seq. ID no. 12609644
MANVAILELNGNCGNTVEEIVKMEREIFPEHESLTSFFHDELRKKNSGLLYLHVDGELVGYVMYSWPSSSYATITELAVKEQWRGQGHGEALLKAAIQKCSTRKVLRIMLHVDPLRTPAVNLYKKHGFQVDTLVEVYYSSDRNAYRMYLDFDSS

SEQ ID NO: 51881 - protein, 132 aa, Glycine max
  peptide (1)..(132): Ceres Seq. ID no. 12609645
MEREIFPEHESLTSFFHDELRKKNSGLLYLHVDGELVGYVMYSWPSSSYATITELAVKEQWRGQGHGEALLKAAIQKCSTRKVLRIMLHVDPLRTPAVNLYKKHGFQVDTLVEVYYSSDRNAYRMYLDFDSS

SEQ ID NO: 51882 - protein, 92 aa, Glycine max
  peptide (1)..(92): Ceres Seq. ID no. 12609646
MYSWPSSSYATITELAVKEQWRGQGHGEALLKAAIQKCSTRKVLRIMLHVDPLRTPAVNLYKKHGFQVDTLVEVYYSSDRNAYRMYLDFDSS

SEQ ID NO: 51883 - DNA, 625 bp, Glycine max
  misc_feature (1)..(625): Ceres Seq. ID no. 15172885
atttttcccactttcctttgagaaaacagagcaaaatggcactgagaatgtgggcttcctctacagcaaacgctcttaagctctcttcttctacctccaaatctcatctccttcctgctttctccatctccagatgcttctcctcagtgttggaaggactcaagtatgcaaattcacacgagtgggtgaaacatgatggctcagtggctaccattggcatcactgaccatgcccaggaccatttaggagaagttgtgtttgtggaactgccagaagagaaaagctcagtgagcaaagaaaagaactttggagctgtggagagtgtgaaggccacaagtgagattctatctccaatctctggtgaagtcattgaggttaacacaaagctaaccgattcacctggtttgatcaactcaagcccctatgaagatggttggatgataaaggtgaaaccaagcaaccctgcagagttggaaaccttgatgggtccaaaggaatacaccaagttctgcgaagaggaagatgctgctcactagagggtttcacctgtctatgtttcgtaccctatctctctcagctttgtatctctgtaatactaatttggttgaaagatgatcattcaaat

SEQ ID NO: 51884 - protein, 177 aa, Glycine max
  peptide (1)..(177): Ceres Seq. ID no. 15172886
FSHFPLRKQSKMALRMWASSTANALKLSSSTSKSHLLPAFSISRCFSSVLEGLKYANSHEWVKHDGSVATIGITDHAQDHLGEVVFVELPEEKSSVSKEKNFGAVESVKATSEILSPISGEVIEVNTKLTDSPGLINSSPYEDGWMIKVKPSNPAELETLMGPKEYTKFCEEEDAAH

SEQ ID NO: 51885 - protein, 166 aa, Glycine max
  peptide (1)..(166): Ceres Seq. ID no. 15172887
MALRMWASSTANALKLSSSTSKSHLLPAFSISRCFSSVLEGLKYANSHEWVKHDGSVATIGITDHAQDHLGEVVFVELPEEKSSVSKEKNFGAVESVKATSEILSPISGEVIEVNTKLTDSPGLINSSPYEDGWMIKVKPSNPAELETLMGPKEYTKFCEEEDAAH

SEQ ID NO: 51886 - protein, 162 aa, Glycine max
  peptide (1)..(162): Ceres Seq. ID no. 15172888
MWASSTANALKLSSSTSKSHLLPAFSISRCFSSVLEGLKYANSHEWVKHDGSVATIGITDHAQDHLGEVVFVELPEEKSSVSKEKNFGAVESVKATSEILSPISGEVIEVNTKLTDSPGLINSSPYEDGWMIKVKPSNPAELETLMGPKEYTKFCEEEDAAH

SEQ ID NO: 51887 - DNA, 1111 bp, Glycine max
  misc_feature (1)..(1111): Ceres Seq. ID no. 12609518
atcctcaggagtcaggacagggcttcagctaacctcgtggagcttttactccccgagctgccctcccccgttccaagagcaaatcagacgcagaggggagcggccgcagagcgagtcaaccaggcatggcgatggcgagctcgacgaggaggctggcgtttgtgctgctcgggctggccttttcggccgcgctcgcagagagcagagatgcatatatgaggagcgcagatcgatatgcctgcatactgacccaggagagcttccctgttgcaagcaaagggtcaggattaacttcggcaaacggaaagctgtgtgtactatgtgagcaatactcaaccgaagctctgatctacctgcgacaaaacgaaacacaggccgagattctcagtgccctccaccacacgtgtgcaagccttggtcctctaagacagcagtgcatcacgctggtcgactactacattcccgtgttcttcttggaggtttctgtagttaaacctgaggagttatgtgaatcagcgcacctctgcccaaagggggcggcgactcggtcgtccacacgaggggatgcctgtggtctatgccatcatgttcttgttgaagttcttatgatgcttaaggatcccaacaccaagctggagatagtcgggcttcttttcaaaacatgcagcaaggcgaagaactacgaaccgcagtgcaagaggcttgtccttgactacatcccactgattctggtgaagacccaggagttccttgagacgacggacgtctgctttgcgacacatgcctgtaaaacaggcatgcaagcaaccattcctctctccgccgctttgtgaagaacaaatatgtagggatcatacaggggcaaagaagcctgtaaatgttcctcctgtattttgctcaagcactgccaagctatgaaacttggttgtgcgagggtttgtctgtacaatttgagctctgctctctgaagtttatgcagcaagccagcagctgtactatcattcatttgctcagcacataatcttctcggagcagcatactgagcaattgtgaaagttacatcacattgtatctactggctatatatccagtcatgatggtactattatcc

SEQ ID NO: 51888 - protein, 235 aa, Glycine max
  peptide (1)..(235): Ceres Seq. ID no. 12609519
MAMASSTRRLAFVLLGLAFSAALAESRDAYMRSADRYACILTQESFPVASKGSGLTSANGKLCVLCEQYSTEALIYLRQNETQAEILSALHHTCASLGPLRQQCITLVDYYIPVFFLEVSVVKPEELCESAHLCPKGAATRSSTRGDACGLCHHVLVEVLMMLKDPNTKLEIVGLLFKTCSKAKNYEPQCKRLVLDYIPLILVKTQEFLETTDVCFATHACKTGMQATIPLSAAL

SEQ ID NO: 51889 - protein, 233 aa, Glycine max
  peptide (1)..(233): Ceres Seq. ID no. 12609520
MASSTRRLAFVLLGLAFSAALAESRDAYMRSADRYACILTQESFPVASKGSGLTSANGKLCVLCEQYSTEALIYLRQNETQAEILSALHHTCASLGPLRQQCITLVDYYIPVFFLEVSVVKPEELCESAHLCPKGAATRSSTRGDACGLCHHVLVEVLMMLKDPNTKLEIVGLLFKTCSKAKNYEPQCKRLVLDYIPLILVKTQEFLETTDVCFATHACKTGMQATIPLSAAL

SEQ ID NO: 51890 - protein, 205 aa, Glycine max
  peptide (1)..(205): Ceres Seq. ID no. 12609521
MRSADRYACILTQESFPVASKGSGLTSANGKLCVLCEQYSTEALIYLRQNETQAEILSALHHTCASLGPLRQQCITLVDYYIPVFFLEVSVVKPEELCESAHLCPKGAATRSSTRGDACGLCHHVLVEVLMMLKDPNTKLEIVGLLFKTCSKAKNYEPQCKRLVLDYIPLILVKTQEFLETTDVCFATHACKTGMQATIPLSAAL

SEQ ID NO: 51891 - DNA, 727 bp, Glycine max
  misc_feature (1)..(727): Ceres Seq. ID no. 12609656
gaccgatacaaaaaagctctccgaccgcaaaacgaaatcgaaaagcggagaaatcaaataaaaaatgtctcgtctcccgattctcatcgctgcttgtctcttcctctaccatctaccttctccactcgccgctgaaacagattcgccgatggcgtattctctcctccagagctacaacttccctgtcggaatccttccaaaaggagtcgtcgcttatgatttagatacatcgacaggcaaattccacgcctatttcaaagactcctgcagcttctcgctcgtgggttcttaccagctgaactacaaatcgacgatcagcggttacatctccgagaacaagctcacgaagctgactggtatcaaggtgaaagttctgttcttgtggctcaacatcgtcgaggtcatcaggaacggagacgagatggagttttccgttgggatcacgtcggcgaatttcgggatcaatgagttcttggcgtcgcctcagtgtggctgtggctttgagtgcaaggaatcgaagaaagagacgtatgacacaagcttaccttttgtttcttcttcttgaaaaggtacttttgatgagtgcccttttgaaaagatcgtgtctttatatatatatgtttcactctcttgtccaataagatcatagtttctgaatgtatatctcttattgccattggtcgaggaatcaaaacttatatatatgttcctggatggagtttgctct

SEQ ID NO: 51892 - protein, 166 aa, Glycine max
  peptide (1)..(166): Ceres Seq. ID no. 12609657
MSRLPILIAACLFLYHLPSPLAAETDSPMAYSLLQSYNFPVGILPKGVVAYDLDTSTGKFHAYFKDSCSFSLVGSYQLNYKSTISGYISENKLTKLTGIKVKVLFLWLNIVEVIRNGDEMEFSVGITSANFGINEFLASPQCGCGFECKESKKETYDTSLPFVSSS

SEQ ID NO: 51893 - protein, 138 aa, Glycine max
  peptide (1)..(138): Ceres Seq. ID no. 12609658
MAYSLLQSYNFPVGILPKGVVAYDLDTSTGKFHAYFKDSCSFSLVGSYQLNYKSTISGYISENKLTKLTGIKVKVLFLWLNIVEVIRNGDEMEFSVGITSANFGINEFLASPQCGCGFECKESKKETYDTSLPFVSSS

SEQ ID NO: 51894 - DNA, 744 bp, Glycine max
  misc_feature (1)..(744): Ceres Seq. ID no. 13594663
aagagctctctttaccatcttcccacttccctttgagaaagaaaacagaacaaagaaaaagaaagaaagcaaacagaaacaaatggcactgagaatgtgggcttcctctacagcaaacgctctcaagctctcttcttctgcatccagatctcatctccttccagctttctccatctccagatgcttctcctcagtgttggaaggacttaagtatgcaaattcacatgagtgggtgaaacatgaaggctcagtggctactattggcatcagtgaccatgcccaggatcatttaggagaagttgtgtttgtggagctgcctgaagaaaaaagttcagtgaccaaagaaaaaaactttggagcagtggagagtgtgaaggcaacaagtgagattatatctccaatctctggtgaagtcatcgaggttaacacaaagctcgctgattcacctggcttgattaactcaagcccttacgaagatggttggatgataaaggtgaaaccaagcaaccccgcagagctggaatccttgatgggtccaaaggaatacaccaagttctgcgaagaggaagatgctgctcactagggtttcttcgtctttcccagtatgtcctaaacaaaaagcaaaacaagagagaacccatgctaaatgtttcaatcttttcactacttctcaatgtttcctacctctgtatcaaatttgtatctctgtaatactgttttggttaaaaatcattcgatgagtcc

SEQ ID NO: 51895 - protein, 193 aa, Glycine max
  peptide (1)..(193): Ceres Seq. ID no. 13594664
RALFTIFPLPFEKENRTKKKKESKQKQMALRMWASSTANALKLSSSASRSHLLPAFSISRCFSSVLEGLKYANSHEWVKHEGSVATIGISDHAQDHLGEVVFVELPEEKSSVTKEKNFGAVESVKATSEIISPISGEVIEVNTKLADSPGLINSSPYEDGWMIKVKPSNPAELESLMGPKEYTKFCEEEDAAH

SEQ ID NO: 51896 - protein, 166 aa, Glycine max
  peptide (1)..(166): Ceres Seq. ID no. 13594665
MALRMWASSTANALKLSSSASRSHLLPAFSISRCFSSVLEGLKYANSHEWVKHEGSVATIGISDHAQDHLGEVVFVELPEEKSSVTKEKNFGAVESVKATSEIISPISGEVIEVNTKLADSPGLINSSPYEDGWMIKVKPSNPAELESLMGPKEYTKFCEEEDAAH

SEQ ID NO: 51897 - protein, 162 aa, Glycine max
  peptide (1)..(162): Ceres Seq. ID no. 13594666
MWASSTANALKLSSSASRSHLLPAFSISRCFSSVLEGLKYANSHEWVKHEGSVATIGISDHAQDHLGEVVFVELPEEKSSVTKEKNFGAVESVKATSEIISPISGEVIEVNTKLADSPGLINSSPYEDGWMIKVKPSNPAELESLMGPKEYTKFCEEEDAAH

SEQ ID NO: 51898 - DNA, 1213 bp, Glycine max
  misc_feature (1)..(1213): Ceres Seq. ID no. 13594758
acccaatacccacgagaacctctagctaccgtagcttagctgagcttcctagctgtagccatggccaagtatttccagagtgctcctgttagcaatgaagcattgaagcacaaggagattctgttggacggcctgtacatgcaccaggaccttgacggatcaccaaatcagaaccagaaaactatagtgaatcctaacctccctctgcagtttggctgcacagtggctaatgactggaccatatatgatggccttggccccgataagaagcttgttgcgcgtgcacaagggccacatatgggggcaggagtagccaaaggaagctggttcatatgtttcaacatggtgttcgtcgatgacaggtttgcgggttccagccttaaggtgctcggacattttgaagagccggtagaaggtgagtgggcaatccttggcgggacaggagagtttgcctatgcacaaggtgtggtcaccttcaagaaactccaggacggaagcactagggtcagacagcttcagatacgtgccatctgcctcagctttccatcgtcactttcaatgcctacgaagatggggccatggggtgaaaatggaggctccattcaagacatcaccacaggaaccccgatgcgcctgcaaagtgtgacactcagcagcgagagcagctggattgtctctcttgcatttacttatattgacaaacttggaaagaggcgcaacgaaggcccctggggtcctgacaaagggaacagtcaaaccatcgagttcggacctaaagaatatgtgacggaaatatcagggacaattgacaatgtcatatcgtcacttgttatcacgacaaacatcaaaaagtatggaccgtttgggcatgagaagggcaaccgtttcagcgccgccgtgccagaaaacacatgtgttgtgggattctttgccaggaccgggaatgctcttgatgccattggcgtttaccacggacccatagtggtttgaactggatttaatgctgctttgctttagtttatggcaatctcatgcgagttcattttaagggaaagtgtgtttgttccacatttgttttccagcaataacatggcaagggtcatgcttacgtctgtgatccatgtctctctagtgcaagagtactttctttagtttgtcagctgctatattctagctatgatttaataaagtgatgcaaggttgttttctagtg

SEQ ID NO: 51899 - protein, 309 aa, Glycine max
  peptide (1)..(309): Ceres Seq. ID no. 13594759
MAKYFQSAPVSNEALKHKEILLDGLYMHQDLDGSPNQNQKTIVNPNLPLQFGCTVANDWTIYDGLGPDKKLVARAQGPHMGAGVAKGSWFICFNMVFVDDRFAGSSLKVLGHFEEPVEGEWAILGGTGEFAYAQGVVTFKKLQDGSTRVRQLQIRAICLSFPSSLSMPTKMGPWGENGGSIQDITTGTPMRLQSVTLSSESSWIVSLAFTYIDKLGKRRNEGPWGPDKGNSQTIEFGPKEYVTEISGTIDNVISSLVITTNIKKYGPFGHEKGNRFSAAVPENTCVVGFFARTGNALDAIGVYHGPIVV

SEQ ID NO: 51900 - protein, 283 aa, Glycine max
  peptide (1)..(283): Ceres Seq. ID no. 13594760
MHQDLDGSPNQNQKTIVNPNLPLQFGCTVANDWTIYDGLGPDKKLVARAQGPHMGAGVAKGSWFICFNMVFVDDRFAGSSLKVLGHFEEPVEGEWAILGGTGEFAYAQGVVTFKKLQDGSTRVRQLQIRAICLSFPSSLSMPTKMGPWGENGGSIQDITTGTPMRLQSVTLSSESSWIVSLAFTYIDKLGKRRNEGPWGPDKGNSQTIEFGPKEYVTEISGTIDNVISSLVITTNIKKYGPFGHEKGNRFSAAVPENTCVVGFFARTGNALDAIGVYHGPIVV

SEQ ID NO: 51901 - protein, 230 aa, Glycine max
  peptide (1)..(230): Ceres Seq. ID no. 13594761
MGAGVAKGSWFICFNMVFVDDRFAGSSLKVLGHFEEPVEGEWAILGGTGEFAYAQGVVTFKKLQDGSTRVRQLQIRAICLSFPSSLSMPTKMGPWGENGGSIQDITTGTPMRLQSVTLSSESSWIVSLAFTYIDKLGKRRNEGPWGPDKGNSQTIEFGPKEYVTEISGTIDNVISSLVITTNIKKYGPFGHEKGNRFSAAVPENTCVVGFFARTGNALDAIGVYHGPIVV

SEQ ID NO: 51902 - DNA, 1245 bp, Glycine max
  misc_feature (1)..(1245): Ceres Seq. ID no. 12609528
atcagttagattagggtttctggtcggctagttcatacggcgaggagcacgggaagggaggcggaactcgggagaggagatgggtgcgccgaagcagaagtggacgtcggaggaggaggaggcgctgcggcgcggcgtgctcaagcacggcgctggcaagtggcgcaccatccagaaggatcccgagttcagccccgtcctctcctctcgctccaacatcgacctcaaggacaaatggaggaatttgagttttagtgcaagtggactgggttcaagggataaacaaagggttccaaggccgaaagcaccttcgtcctccccatcacctagcccgcagcttctgcttctctcagccccgaataatgttgccgaggcttctccaccagaagattgtgaaaaaagcccacaggatgacaagactccgagtccaaagttgtacagttccatgatcctggaagctctcggcgaactgaaagagccaaatggttcagaagttgctacaatttgcaatttcatagagcaaaggcatgaggtgcaaccaaattttagaaggttgctttgtgccaaattacgaaggcttataggcgtgaacaaagttgagaagattgataagtcctataagctgacggattcatatgcaaaaagggctctggctccaatgaaagatccatctctaaagaagaaggattcagccaagtcatccaaggcagcaaagggtctaggccagtcgagtcctgcactggacgcagctgaagctgcagcgatgaaagtagcggacgcggaggccaaatcgcacctcgcaaacgagcacatgatggaggttgaaaggatcggcaagatggccgaggagaccgagtctctcctcgagctcgcctcagagctctacgagcgatgttcaagaggagaggcgctcacaatactgcaagtggcgcacagggagttttgatggtgttgtcgaccccgtcagctgcgcgccgacatctgctctcttgtacatggatggatggaagcgttggcccagcctgttgtcttcttgtccgcgtgttgtctctgttgtatcataactcgaatcaattcgttggttgtacctgagagggcatgcctttcattgcctaggaatgattttgagttggtgcattttggatactgtcctgtgttgaagtcagggaataatgtgtatctcgtcctgccgccttttcctgtatgtactctaatgcaagtttggtcatatgctccctccttggc

SEQ ID NO: 51903 - protein, 288 aa, Glycine max
  peptide (1)..(288): Ceres Seq. ID no. 12609529
MGAPKQKWTSEEEEALRRGVLKHGAGKWRTIQKDPEFSPVLSSRSNIDLKDKWRNLSFSASGLGSRDKQRVPRPKAPSSSPSPSPQLLLLSAPNNVAEASPPEDCEKSPQDDKTPSPKLYSSMILEALGELKEPNGSEVATICNFIEQRHEVQPNFRRLLCAKLRRLIGVNKVEKIDKSYKLTDSYAKRALAPMKDPSLKKKDSAKSSKAAKGLGQSSPALDAAEAAAMKVADAEAKSHLANEHMMEVERIGKMAEETESLLELASELYERCSRGEALTILQVAHREF

SEQ ID NO: 51904 - protein, 166 aa, Glycine max
  peptide (1)..(166): Ceres Seq. ID no. 12609530
MILEALGELKEPNGSEVATICNFIEQRHEVQPNFRRLLCAKLRRLIGVNKVEKIDKSYKLTDSYAKRALAPMKDPSLKKKDSAKSSKAAKGLGQSSPALDAAEAAAMKVADAEAKSHLANEHMMEVERIGKMAEETESLLELASELYERCSRGEALTILQVAHREF

SEQ ID NO: 51905 - DNA, 892 bp, Glycine max
  misc_feature (1)..(892): Ceres Seq. ID no. 12582856
aaaaaatcaatcaccgacctctcacgcacgcaagccttttcccccattctccggcggcggcagctatggcggcggtggcggcaaggtccgggctccgacggatgttctccatcgccgacttcgcgacgccgaacacgcgcatgttctccatctcggccttcgcgccgccgagcccgcccacgcctcccccgaaggccgacccctcccccaacctcttcgtctccgggctaagcaagcgtacaacaactgatggacttagagaagcttttgcaaagtttggggaagttgaacacgctcgagttgtcacagatcgtgtcactggtttttctaaggggtttggctttgtaaggtatgtttcggttgaagatgcaactaaaggaatagaaggaatggatggaaaatttctggatggatgggttatttttgccgaatatgctagacccagaccaccgccgcagatgggaggggcaactccgcagccacaacaatcatggggcactccttctggttcctggggctcacagtagatgaagggacaatcattctacctggctgtgcgtctgacagcgtatcagtcagccatcgcagtctacatttagatcatagctaccatggtgttgtcccaggtgtgaacacccttgcctgatccaatattcttgtcgtgttggactggtcgtttacggcctccacatggagaagcactaggggaaccttatatggaccgagcaggtattactgtcagcatgcaacagcttcggaccattgctaataatgtcttcttgtcccttttatttgaattgtcgtaagccttatcagctgctgatggcatgtgctgctcttgtactactggataatgactcgtagctcggaataagaacacgtttgcaagcgg

SEQ ID NO: 51906 - protein, 174 aa, Glycine max
  peptide (1)..(174): Ceres Seq. ID no. 12582857
KINHRPLTHASLFPHSPAAAAMAAVAARSGLRRMFSIADFATPNTRMFSISAFAPPSPPTPPPKADPSPNLFVSGLSKRTTTDGLREAFAKFGEVEHARVVTDRVTGFSKGFGFVRYVSVEDATKGIEGMDGKFLDGWVIFAEYARPRPPPQMGGATPQPQQSWGTPSGSWGSQ

SEQ ID NO: 51907 - protein, 153 aa, Glycine max
  peptide (1)..(153): Ceres Seq. ID no. 12582858
MAAVAARSGLRRMFSIADFATPNTRMFSISAFAPPSPPTPPPKADPSPNLFVSGLSKRTTTDGLREAFAKFGEVEHARVVTDRVTGFSKGFGFVRYVSVEDATKGIEGMDGKFLDGWVIFAEYARPRPPPQMGGATPQPQQSWGTPSGSWGSQ

SEQ ID NO: 51908 - protein, 141 aa, Glycine max
  peptide (1)..(141): Ceres Seq. ID no. 12582859
MFSIADFATPNTRMFSISAFAPPSPPTPPPKADPSPNLFVSGLSKRTTTDGLREAFAKFGEVEHARVVTDRVTGFSKGFGFVRYVSVEDATKGIEGMDGKFLDGWVIFAEYARPRPPPQMGGATPQPQQSWGTPSGSWGSQ

SEQ ID NO: 51909 - DNA, 805 bp, Glycine max
  misc_feature (1)..(805): Ceres Seq. ID no. 13594762
gctagcttctcaagagggataagagagaaacacagagcaagaagataagagagaagcaaagcttgagatggcgcaaaccatggcgtccatgaccggcctgtcgcagggcgtgcgtctcccaggcccggccggcaggcgcgccagcaggttcaccgtgagggcgtcgtcggcggaggccgaggccgccggccgccgcgcggtccttggcctcatggccagcggagtcgtcgggagcgcgttcgctcaggtggtgcacgccggcaccgtcgcggccatcaaggttggccccccgccgccgctctccggtggactccccggaacggacaactcggacgaggcaagggacttcgacctgcccctgaagaaccggttctacctgcagccgctgccaccggcggaggcggcggtgcgggccaaggagtcggcccaggacatcctcaacctcaagccgctcatcgacaagaagcaatggccgtacgtcatgaacgacctccgcctcagggcctcctacctgcgctacgacctcaagaccgtcatctcctccaagaccaccaaggaggagaagaaggacctcaaggacctcaccggcaagctcttcgccaccctcgacgggcttgaccatgcagccaagatcaagagccccaccgaggccgagaagtactacggcgagaccaagactgttctcggcgatgtcctcgccaagctaggctagatggatcggcataatggccgtgttgctttcaggccttttatgtttgttcatatttggaagccggcaatgtaacttccctgttgataatatgtc

SEQ ID NO: 51910 - protein, 214 aa, Glycine max
  peptide (1)..(214): Ceres Seq. ID no. 13594763
MAQTMASMTGLSQGVRLPGPAGRRASRFTVRASSAEAEAAGRRAVLGLMASGVVGSAFAQVVHAGTVAAIKVGPPPPLSGGLPGTDNSDEARDFDLPLKNRFYLQPLPPAEAAVRAKESAQDILNLKPLIDKKQWPYVMNDLRLRASYLRYDLKTVISSKTTKEEKKDLKDLTGKLFATLDGLDHAAKIKSPTEAEKYYGETKTVLGDVLAKLG

SEQ ID NO: 51911 - protein, 210 aa, Glycine max
  peptide (1)..(210): Ceres Seq. ID no. 13594764
MASMTGLSQGVRLPGPAGRRASRFTVRASSAEAEAAGRRAVLGLMASGVVGSAFAQVVHAGTVAAIKVGPPPPLSGGLPGTDNSDEARDFDLPLKNRFYLQPLPPAEAAVRAKESAQDILNLKPLIDKKQWPYVMNDLRLRASYLRYDLKTVISSKTTKEEKKDLKDLTGKLFATLDGLDHAAKIKSPTEAEKYYGETKTVLGDVLAKLG

SEQ ID NO: 51912 - protein, 207 aa, Glycine max
  peptide (1)..(207): Ceres Seq. ID no. 13594765
MTGLSQGVRLPGPAGRRASRFTVRASSAEAEAAGRRAVLGLMASGVVGSAFAQVVHAGTVAAIKVGPPPPLSGGLPGTDNSDEARDFDLPLKNRFYLQPLPPAEAAVRAKESAQDILNLKPLIDKKQWPYVMNDLRLRASYLRYDLKTVISSKTTKEEKKDLKDLTGKLFATLDGLDHAAKIKSPTEAEKYYGETKTVLGDVLAKLG

SEQ ID NO: 51913 - DNA, 796 bp, Glycine max
  misc_feature (1)..(796): Ceres Seq. ID no. 13594766
atcaagctagcagcacggcattaaactaatttgacagcgatcccgatccgtcatcacatctcacacgagacagtcgttcgatccgtccgtggagcagccatggcgcagctgatggacaaggccaaggggttcgtggccgagaagatatcgggggtgcagaagccggaggcggacctgtcggacatgtcggtgcagcacgttggccgcgacggcgccaccctgtccggccgcctcgacgtgcgcaacccctactcgcacaccatccccatctgcgagatcagctactccctcaagagcgccggccgcgacgtggcctccgggaccatgccggacccggggtcgctggtggccagcgacaccaccagcctcgacataccggtgaaggtgccgtacgacttcctgatgagcctggtgaaggacgccggcaaggactgggacctcgactacgagatgcgcgtcggcctcaccgtcgacctccccatcgtcggcaacttcacgctgccgctcaccaaggccggcgagctcaagctccccacgctctccgacctgttctaaacttaccgccgcacccagctaagtaggttcgaccgtgccgtactagctgctgcgctctccatcgcctgtacgggtgatgggtagtactgggctgggcgagcgggacgatcgatcgctgcctagctctgtttttacttcggatcgcggtgtgggtgtgcacgacgtaataatgatgtattgcgtgttgtatttctagacttttatacgtgaataaaataaacagacgggtttactgtactcc

SEQ ID NO: 51914 - protein, 151 aa, Glycine max
  peptide (1)..(151): Ceres Seq. ID no. 13594767
MAQLMDKAKGFVAEKISGVQKPEADLSDMSVQHVGRDGATLSGRLDVRNPYSHTIPICEISYSLKSAGRDVASGTMPDPGSLVASDTTSLDIPVKVPYDFLMSLVKDAGKDWDLDYEMRVGLTVDLPIVGNFTLPLTKAGELKLPTLSDLF

SEQ ID NO: 51915 - protein, 147 aa, Glycine max
  peptide (1)..(147): Ceres Seq. ID no. 13594768
MDKAKGFVAEKISGVQKPEADLSDMSVQHVGRDGATLSGRLDVRNPYSHTIPICEISYSLKSAGRDVASGTMPDPGSLVASDTTSLDIPVKVPYDFLMSLVKDAGKDWDLDYEMRVGLTVDLPIVGNFTLPLTKAGELKLPTLSDLF

SEQ ID NO: 51916 - protein, 123 aa, Glycine max
  peptide (1)..(123): Ceres Seq. ID no. 13594769
MSVQHVGRDGATLSGRLDVRNPYSHTIPICEISYSLKSAGRDVASGTMPDPGSLVASDTTSLDIPVKVPYDFLMSLVKDAGKDWDLDYEMRVGLTVDLPIVGNFTLPLTKAGELKLPTLSDLF

SEQ ID NO: 51917 - DNA, 1173 bp, Glycine max
  misc_feature (1)..(1173): Ceres Seq. ID no. 15177083
aaaccaatgcaaagcaatccatttgagcttcacaaaactaccactccaacgtgtgctcctctctcaagtgtgtgtccgtgtgctagtagcctacagcaccgtttctctcgggaggtactccatatacacgttgattaacacgtatacacatccttcaacgacaatcatggtcggcgctcaagagcaagggctgaagctgctggtgccgcggagcggcgtgagcatatatgccatccgcgtccagatgccgcttgccatgaagggtctggcctacgactacctccccaaggaccccgggtgcaagagcgacctactcctcgcgtccaaccccgtgcacaagacgctgcccgtcctcatccacggcggcaggcccgtctgcgagtcgctcatcatcatggagtacctcgacaacgcattccccggcaacggcgcctccatcctccccgccgacccctaccgccgcgccgtcgctcgcttctgggccgcctacatcgacaacaaggtttgttcccttccctctcgtctagctagctagtttgagcttgaagaattggagttgcatcccagaggggctgttttgttgccacagatgttcccttcgtgcatcggcattctcagtacggcgaagcagcaggagaaagccgacaaggtggaggagaccttggcggcgttcgggctcctagaagccgccctggcagagtgctccaaagaaggggaggcggaggcagaggcgccgtttttcggtggtggctccatcgggttcctggacattgcgctcgggtgctatattccctggttcgaagcgataggccgccttgctggcatgccgccgttcctagacgcaacgaggacaccaaagcttgctgcgtgggcggggcggttcagggccgccgagccggtcattgccctgctgactgcggtggacaaggtggaggagtacatcactaaggtgctttatccaaagtggaacgtcgcggtcacagttggtaactaattaaagatggtgtctttccattgccggcgggggattgtgtcgatccaataattactctgccattgccggagcaggcgtgcactctcttcgatctgagttgttgacatgctgttgcgtgaatacattgaagcttcgtcatcttgcatctctctgtcaagaacgtttccaaatgcaatctt

SEQ ID NO: 51918 - protein, 177 aa, Glycine max
  peptide (1)..(177): Ceres Seq. ID no. 15177084
NQCKAIHLSFTKLPLQRVLLSQVCVRVLVAYSTVSLGRYSIYTLINTYTHPSTTIMVGAQEQGLKLLVPRSGVSIYAIRVQMPLAMKGLAYDYLPKDPGCKSDLLLASNPVHKTLPVLIHGGRPVCESLIIMEYLDNAFPGNGASILPADPYRRAVARFWAAYIDNKVCSLPSRLAS

SEQ ID NO: 51919 - protein, 134 aa, Glycine max
  peptide (1)..(134): Ceres Seq. ID no. 15177085
MFPSCIGILSTAKQQEKADKVEETLAAFGLLEAALAECSKEGEAEAEAPFFGGGSIGFLDIALGCYIPWFEAIGRLAGMPPFLDATRTPKLAAWAGRFRAAEPVIALLTAVDKVEEYITKVLYPKWNVAVTVGN

SEQ ID NO: 51920 - protein, 122 aa, Glycine max
  peptide (1)..(122): Ceres Seq. ID no. 15177086
MVGAQEQGLKLLVPRSGVSIYAIRVQMPLAMKGLAYDYLPKDPGCKSDLLLASNPVHKTLPVLIHGGRPVCESLIIMEYLDNAFPGNGASILPADPYRRAVARFWAAYIDNKVCSLPSRLAS

SEQ ID NO: 51921 - DNA, 795 bp, Glycine max
  misc_feature (1)..(795): Ceres Seq. ID no. 13638658
acctggacatccagacccgcgcgcccgtcccctctaacaacagatcaaccgatccttgaaaagtccaccctccaccacgggcaacaccatgtcgagcaccggcgcgtcgggcccggacgccgacgcggcggcnggcgaggggctggagctggcgcagttcggggcgggctgcttctggagcgtggagctggcgtaccagcggctccccggcgtggcgcgcaccgaggtgggctactcgcaggggcacctcgacgggcccacctaccgcgacgtgtgcggcggcggcaccggccacgccgaggtggtgcgcgtgcactacgaccccaaggagtgcccctacgccgtgcttctcgacgtcttctgggccaagcacaaccccaccacgctcaacaagcagggcaacgacgtcgggacgcagtaccggtcgggcatctactactacacggcggagcaggagcggcaggcgcgggagtcgctggcggagaagcagcgggagtggaaggagaagatcgtgacggaggtcctcccggcgaggaggttctacgcggccgaggactaccaccagcagtacctcgagaagggcggccagtccgccaagaagcgctgctccgaccccatccgctgctacggctgaaaccactgcccccgtccccgaccgcctaagctattggtgctgcattgccagtagcatcataaaggacaccgtctacctgactgttgttgttgttacaataaacaaacccattcgtgcagcgttttaaggtgaggtctggcactttgtttgctcgatgatct

SEQ ID NO: 51922 - protein, 220 aa, Glycine max
  peptide (1)..(220): Ceres Seq. ID no. 13638659
  misc_feature (45)..(45): Xaa is any aa, unknown or other
TWTSRPARPSPLTTDQPILEKSTLHHGQHHVEHRRVGPGRRRGGXRGAGAGAVRGGLLLERGAGVPAAPRRGAHRGGLLAGAPRRAHLPRRVRRRHRPRRGGARALRPQGVPLRRASRRLLGQAQPHHAQQAGQRRRDAVPVGHLLLHGGAGAAGAGVAGGEAAGVEGEDRDGGPPGEEVLRGRGLPPAVPREGRPVRQEALLRPHPLLRLKPLPPSPTA

SEQ ID NO: 51923 - protein, 181 aa, Glycine max
  peptide (1)..(181): Ceres Seq. ID no. 13638660
  misc_feature (15)..(15): Xaa is any aa, unknown or other
MSSTGASGPDADAAXGEGLELAQFGAGCFWSVELAYQRLPGVARTEVGYSQGHLDGPTYRDVCGGGTGHAEVVRVHYDPKECPYAVLLDVFWAKHNPTTLNKQGNDVGTQYRSGIYYYTAEQERQARESLAEKQREWKEKIVTEVLPARRFYAAEDYHQQYLEKGGQSAKKRCSDPIRCYG

SEQ ID NO: 51924 - DNA, 908 bp, Glycine max
  misc_feature (1)..(908): Ceres Seq. ID no. 15172878
ttgattcaccgctccccctccacctccacccggacccgcaagatcccgacccgccgcggcccccgctcctcgatcgattgatatcagacgcggccgggtgggcggaagaaggcggcggcggcggcgatgagcgcggtgaacatcaccaacgtggcggtgctggacaaccccaccgccttcctcaaccccttccagttcgagatctcctacgagtgcctcgtcccgctcgacgacgatctggaatggaagctcacatatgttggatcagctgaagacgaaacctatgatcagcaacttgagagcgtgcttgttggacctgtcaatgttgggacctaccgttttgtcttccaggctgacccaccggaccctttgaagatacgtgaagaagacatcattggtgtcaccgtgctgctgttgacatgctcctacgtgggtcaggagttcatgagggtgggttattatgtgaacaatgattacgacgaggagcagctgagagaagagcccccggcaaagctattacttgacagggtgtgagaaacattttggctgacaagccccgtgtcaccaagttcccaatcaacttccaccctgaacctggcacgagctcagaacagccgcaacaggatgcagaacagcagcagcagccgacttcaccggaaccacagacggctccagtagagccacatatggcgccactagagaatgtccccattgccgccgaccaatgatcagagttggggtgctaacggtctgttctccatgccttctatggtgtcttaatgttacgaatcgagagtggtggttctgcaatgtactgatctgttgtttacatttcacaatctgttctgtggcaaatgttgggtgtctagctatttcttgataaagagtacttctgcctattttgttac

SEQ ID NO: 51925 - protein, 135 aa, Glycine max
  peptide (1)..(135): Ceres Seq. ID no. 15172879
MSAVNITNVAVLDNPTAFLNPFQFEISYECLVPLDDDLEWKLTYVGSAEDETYDQQLESVLVGPVNVGTYRFVFQADPPDPLKIREEDIIGVTVLLLTCSYVGQEFMRVGYYVNNDYDEEQLREEPPAKLLLDRV

SEQ ID NO: 51926 - protein, 89 aa, Glycine max
  peptide (1)..(89): Ceres Seq. ID no. 15172880
DSPLPLHLHPDPQDPDPPRPPLLDRLISDAAGWAEEGGGGGDERGEHHQRGGAGQPHRLPQPLPVRDLLRVPRPARRRSGMEAHICWIS

SEQ ID NO: 51927 - DNA, 930 bp, Glycine max
  misc_feature (1)..(930): Ceres Seq. ID no. 12609694
acacagacacatacgcctcacactctctatcagtcacgtcaggctcggtggatcacggtagcactagcttcagctagccagcctctgccactccgggcattttcttgcatccacgacggcaatggccaccgctgatgtccagaacccgacggccgcgctgacggaggaggcgcccacggtggagacgcccgtcgccgccgaggaggtcgcgaagacggaggaggcccccgcgccggccgaggccgaggtcaaggcgcctgctgcccccgtcgaggtcgaggagaccaaggaggtggcacctgccgccgctgagacggaggaggccaaggagcccgagccagcagctgcggccgagccggaggccgaggcccccaaagagacagaggcgccagccgtggtcgagacagagaccaaggaggccgtggctgaggcagagccagcggcgcccgaggaggtgaaggaggaggccgcgcctcctgccgagccagaagcaccggccgtcgccgaggaggcaccggctgcaccggaggaggcgcccgcggccgcggcagaggagccggccgccgcggtggccagcgtcagcgtgtgaggcgccggcgcgcgcggaggaggagctggccgggtcagcttccacggcggcggccgtgtgctcctacgtggcacggcgtgatgctgagtcagccagtggagtggagtggaatgatactttttactaggtgtggagtgggagtgctatgcgcggggtcgcgtgacgtgggctaaataaaagtgttgtcgggtcgggtcgacgcccagtgtcggtcagcagcgagcgacgcagtgccactctcgccggcctgcgtctgcgtctgcttagctggagccttgttacggtgtgtgtcacagtgtcagttccacctatgatcgatcggtatcctaaccggtttgcgt

SEQ ID NO: 51928 - protein, 155 aa, Glycine max
  peptide (1)..(155): Ceres Seq. ID no. 12609695
MATADVQNPTAALTEEAPTVETPVAAEEVAKTEEAPAPAEAEVKAPAAPVEVEETKEVAPAAAETEEAKEPEPAAAAEPEAEAPKETEAPAVVETETKEAVAEAEPAAPEEVKEEAAPPAEPEAPAVAEEAPAAPEEAPAAAAEEPAAAVASVSV

SEQ ID NO: 51929 - DNA, 851 bp, Glycine max
  misc_feature (1)..(851): Ceres Seq. ID no. 13594870
atgttattatctcgattccctctcgattttgtgcatatcgatctctgtttggtgtttaattgctagatttcgattgcgtttcctctttgttcgctgatctagtgatttttcacctgcagaatcggccatgaaaggaggtaattcgaagactgactccagaaactccaagctctctgtgaacaagaagcctacgaaggcgagcaaagctgctgctaaagatcctaacaaacctaagaggccggccagtgctttcttcgtcttcatggaggacttccgtcagacttacaagaaggaacaccccagcaacaaatctgtcgctgctgttggaaaagctggtggagagaagtggaaatcactgtctgactctgagaaagctccctacgtagccaaggctgataagcgcaaggttgagtatgagaagaccatgaaggcctacaacaaaaagctggaggaaggtccaaaggaggacgaggaatctgacgacaagtcagtgtctgaggttagtgaagaggaggatgcggatgataggagtgatgaggaggaagacgattgactaagaagttgaagttggcagcattatataaggacctctgcaaggatctctctgatgccttttttttttttttttttttaatcttcttttcccttgcaatgttaacgaggctggttaaaattaaaatggggggttttctgcttttatatttactgctgtttctatttagtaagctaccactatctcccactgactctgattttacgggtaatggaaaaaaatgttttagatggtgatcttgatatttgcagctctatattttatggctgctctatgtttgttatgatcgtagattctt

SEQ ID NO: 51930 - protein, 141 aa, Glycine max
  peptide (1)..(141): Ceres Seq. ID no. 13594871
MKGGNSKTDSRNSKLSVNKKPTKASKAAAKDPNKPKRPASAFFVFMEDFRQTYKKEHPSNKSVAAVGKAGGEKWKSLSDSEKAPYVAKADKRKVEYEKTMKAYNKKLEEGPKEDEESDDKSVSEVSEEEDADDRSDEEEDD

SEQ ID NO: 51931 - protein, 96 aa, Glycine max
  peptide (1)..(96): Ceres Seq. ID no. 13594872
MEDFRQTYKKEHPSNKSVAAVGKAGGEKWKSLSDSEKAPYVAKADKRKVEYEKTMKAYNKKLEEGPKEDEESDDKSVSEVSEEEDADDRSDEEEDD

SEQ ID NO: 51932 - DNA, 1294 bp, Glycine max
  misc_feature (1)..(1294): Ceres Seq. ID no. 15177087
ccactcactgggcatcttcttcttcctcctcgttctgcatatcacacaagctagctagcagctgctgtcattgatcaaccttcgggagcccaagagagaacttcagcccttcaacaatggagcccatccctctcctgacgccgtacaagatgggccagctcaacctcgcccaccggatcgtcctggccccgctcacccgccagcgctcctacggcaacgtgccgcagccgcacgccgccttgtactactcccagcgcgcctccgccggcgggttgctcatcaccgaggccaccggggtctccgacacggcccaggggtaccgcgatacaccgggcgtctggacggcggagcacgtcgaggcatggaagccaattgtcgatgcagtgcacgccaagggcgcgctcatcttctgccagatctggcacgtcggccgcgtgtccacctatgagtaccagcccggcggtgccgcgccgctgtcgtgcacggacaagggggtgggcccgcaaatgagctatgacgggaggctggaggagttcgcgccgccgaggaggctcaaggtggaggagataccggccatcgtcgacgacttcaggaaggcggccaggaacgccatcgacgctggttttgacggtgtggagatccacggggcgaatgggtacctaattgagcagttcctcaaggacagtgcgaatgaccgcaccgacgagtatggtggcagcatcgagaaccggtgtcgctttgctctcgaggtggtggatgccgtcgtgaaggaggtcggtggccaccgtgtgggcatccgcctctcccccttcaccgactacatggactgccacgactctgacccgcacgccctcgcgctccacatgtccaccaaactcaacaactacaacatcatctatctccacatggtcgagccgaggatggccatcgttgatggacgaagggtggtcccgaagcgcttgctgccatacagggaggcgttcaagggtacatttatggccaatggcgggtacgaccgcgaggaagggggcaaggtggtcgctgatgggtacactgatttggtctccttcgggcgatcgttcttggcgaatccagacctgccaaagaggtttgagatcggcgcagagctgaacaagtatgataggatgaccttctacatctctgaccccgtcatcggctacactgactaccccttcctcgattaatagttgatgggggttctttgttcagtgatgcaactaattgtaccacacatcattaataaaatgtatcgtgcaagtgttgtgttttatcc

SEQ ID NO: 51933 - protein, 362 aa, Glycine max
  peptide (1)..(362): Ceres Seq. ID no. 15177088
MEPIPLLTPYKMGQLNLAHRIVLAPLTRQRSYGNVPQPHAALYYSQRASAGGLLITEATGVSDTAQGYRDTPGVWTAEHVEAWKPIVDAVHAKGALIFCQIWHVGRVSTYEYQPGGAAPLSCTDKGVGPQMSYDGRLEEFAPPRRLKVEEIPAIVDDFRKAARNAIDAGFDGVEIHGANGYLIEQFLKDSANDRTDEYGGSIENRCRFALEVVDAVVKEVGGHRVGIRLSPFTDYMDCHDSDPHALALHMSTKLNNYNIIYLHMVEPRMAIVDGRRVVPKRLLPYREAFKGTFMANGGYDREEGGKVVADGYTDLVSFGRSFLANPDLPKRFEIGAELNKYDRMTFYISDPVIGYTDYPFLD

SEQ ID NO: 51934 - protein, 351 aa, Glycine max
  peptide (1)..(351): Ceres Seq. ID no. 15177089
MGQLNLAHRIVLAPLTRQRSYGNVPQPHAALYYSQRASAGGLLITEATGVSDTAQGYRDTPGVWTAEHVEAWKPIVDAVHAKGALIFCQIWHVGRVSTYEYQPGGAAPLSCTDKGVGPQMSYDGRLEEFAPPRRLKVEEIPAIVDDFRKAARNAIDAGFDGVEIHGANGYLIEQFLKDSANDRTDEYGGSIENRCRFALEVVDAVVKEVGGHRVGIRLSPFTDYMDCHDSDPHALALHMSTKLNNYNIIYLHMVEPRMAIVDGRRVVPKRLLPYREAFKGTFMANGGYDREEGGKVVADGYTDLVSFGRSFLANPDLPKRFEIGAELNKYDRMTFYISDPVIGYTDYPFLD

SEQ ID NO: 51935 - protein, 232 aa, Glycine max
  peptide (1)..(232): Ceres Seq. ID no. 15177090
MSYDGRLEEFAPPRRLKVEEIPAIVDDFRKAARNAIDAGFDGVEIHGANGYLIEQFLKDSANDRTDEYGGSIENRCRFALEVVDAVVKEVGGHRVGIRLSPFTDYMDCHDSDPHALALHMSTKLNNYNIIYLHMVEPRMAIVDGRRVVPKRLLPYREAFKGTFMANGGYDREEGGKVVADGYTDLVSFGRSFLANPDLPKRFEIGAELNKYDRMTFYISDPVIGYTDYPFLD

SEQ ID NO: 51936 - DNA, 628 bp, Glycine max
  misc_feature (1)..(628): Ceres Seq. ID no. 12609201
aacaacagaacttacttacagaagcctctttaatttccaccccctctagattttctctctaactggttttccttagatctctcacaatgacctttaatcttatgcttttgttctgtttggttgcagtgatcagcaatgttgttgttccaactagtgcaagacaactcatgagtaccaccactacttcaccagacgagaaagaagtgatgatgaatattggcactgcaaatagaggacatgatgaaaaacatgatcatcaagtacaagtagatgatccaacaagcaagaactataacgtggaaaagaaagaagaaagatttgacaaaaaccaaatcatccctcccattcttccattcccatttggttttccatttccacgtccttcttttccatttccacgtgctgcttttccatttccacgttttccacttccaacaccattcgttccagggcttccatggccaataagccctgatgcggtttcttcatttccgtatcctcctgtagacatgcctgcttctccttaccttcatacaacaccttcatctccacctaactaaacatgtttccatgtgatgcatgggggtgatatccatttgcatgctatgtgcttctcgtgcggcacgag

SEQ ID NO: 51937 - protein, 157 aa, Glycine max
  peptide (1)..(157): Ceres Seq. ID no. 12609202
MTFNLMLLFCLVAVISNVVVPTSARQLMSTTTTSPDEKEVMMNIGTANRGHDEKHDHQVQVDDPTSKNYNVEKKEERFDKNQIIPPILPFPFGFPFPRPSFPFPRAAFPFPRFPLPTPFVPGLPWPISPDAVSSFPYPPVDMPASPYLHTTPSSPPN

SEQ ID NO: 51938 - protein, 152 aa, Glycine max
  peptide (1)..(152): Ceres Seq. ID no. 12609203
MLLFCLVAVISNVVVPTSARQLMSTTTTSPDEKEVMMNIGTANRGHDEKHDHQVQVDDPTSKNYNVEKKEERFDKNQIIPPILPFPFGFPFPRPSFPFPRAAFPFPRFPLPTPFVPGLPWPISPDAVSSFPYPPVDMPASPYLHTTPSSPPN

SEQ ID NO: 51939 - protein, 130 aa, Glycine max
  peptide (1)..(130): Ceres Seq. ID no. 12609204
MSTTTTSPDEKEVMMNIGTANRGHDEKHDHQVQVDDPTSKNYNVEKKEERFDKNQIIPPILPFPFGFPFPRPSFPFPRAAFPFPRFPLPTPFVPGLPWPISPDAVSSFPYPPVDMPASPYLHTTPSSPPN

SEQ ID NO: 51940 - DNA, 1075 bp, Glycine max
  misc_feature (1)..(1075): Ceres Seq. ID no. 13594845
aaaaaacgcattttctcggatctgagatcttagatcccaaacaccattgttcgtcctccaacatattgatccaagagattgaatagcttgagcttgctagctagtaatggcgagaaggcaagtaggttcaacacggcgtgtaggggatggtggaagcttcccttttgccggagctttgcactccaagtctagatcttctccgctactatctatttgccttgttcttgtgggggcttgcctactcataggttatgcttacagtggtccaggaatctttaaaagtatcaaagaagtcagcaaggttacaggtgactattcttgcacagcagaagtccaaagagccgtttctgttctgaagaaggcttatggagatgggatgcgcaaggtcttgcacgtaggccctgagacgtgctctgtggtttccactctcttgaaagaagatgagactgaagcatggggtgtcgaaccctatgacatcgaggatgctgattctcactgcaagagtcttgtcagcaaaggccttgtacgtgtcgctgatatcaagttccctctgccttaccgcccaaaatccttctctcttgttatcgtctcagatgctctggattatctctctcccaagtaccttaacaagaccgttcctgaactcgcaagggttgcttcagatggtgtagttctatttgcaggtctccccggtcagcagagagctaaagttgccgaactatctaaattcggtcgtcccgctaaaatgcgtagcgcatcgtggtggaaccgtttcttcgtccagacatccttagaagaaaacgaagcaccaagcaagaagtttgaacaggctgtatccaaaggatcatacaaaccagcctgccaagtcttccaccttaagccactacattaacaagccaccaccaatccccctactgttccacactaaagcatattcacacgtagagcccctcgcgaaacaagaacaacaaaaaatagcgtaagcgatattctccttgtattttgtaacaagtcagtttttttttttgtcatgttgtatccatcaacacagttttttttatattttattgagttt

SEQ ID NO: 51941 - protein, 261 aa, Glycine max
  peptide (1)..(261): Ceres Seq. ID no. 13594846
MARRQVGSTRRVGDGGSFPFAGALHSKSRSSPLLSICLVLVGACLLIGYAYSGPGIFKSIKEVSKVTGDYSCTAEVQRAVSVLKKAYGDGMRKVLHVGPETCSVVSTLLKEDETEAWGVEPYDIEDADSHCKSLVSKGLVRVADIKFPLPYRPKSFSLVIVSDALDYLSPKYLNKTVPELARVASDGVVLFAGLPGQQRAKVAELSKFGRPAKMRSASWWNRFFVQTSLEENEAPSKKFEQAVSKGSYKPACQVFHLKPLH

SEQ ID NO: 51942 - protein, 171 aa, Glycine max
  peptide (1)..(171): Ceres Seq. ID no. 13594847
MRKVLHVGPETCSVVSTLLKEDETEAWGVEPYDIEDADSHCKSLVSKGLVRVADIKFPLPYRPKSFSLVIVSDALDYLSPKYLNKTVPELARVASDGVVLFAGLPGQQRAKVAELSKFGRPAKMRSASWWNRFFVQTSLEENEAPSKKFEQAVSKGSYKPACQVFHLKPLH

SEQ ID NO: 51943 - DNA, 1059 bp, Glycine max
  misc_feature (1)..(1059): Ceres Seq. ID no. 15172862
agtcggccgcctcccccctccacctcctcccccagcgtcgcctcccgttcggaaccccaagctccccccgccgccggcgaaatggccccgaagcgaggcggcaaggcgccggtgccggcgaagaagaaggcggcggacaaggtggtgaacccactgttcgagaagaggccgaagcagttcggcatcggcggggcgctgccgcccaagaaggacctccaccggttcgtcaagtggcccaaggtcgtgcggatccagcgccagcgccgcatcctcaagcagcgcctcaaggttcccccggcgctccaccagttcacccgcaccctcgacaagaacctcgccaccaacctgtttaagatgcttctcaagtaccgccccgaggacaaggtggctaagaaggagaggcttctgaagagggcccaggctgaggctgaggggaaaaccgttgaggccaagaagccaattgttgtcaagtatggtcttaaccatgtcacttacctcatcgagcagagcaaggctcagctggtcgtcatcgctcatgatgttgacccaattgagctggttgtgtggctcccagccctgtgcaggaagatggaggttccatactgcattgttaagggaaaatcacgccttggatcgatcgttcacaagaagactgcctcagttctgtgcctcaccactgtgaagaacgaggacaagcttgagttcagcaagatcttggaggctatcaaggctaacttcaacgacaagtttgacgaggtcaggaagaagtggggcggtggtgtcatgggatccaagtcgcaggccaagaccaaggccagggaaaggctcatcgccaaggaggctgcgcagaggatgaactaagcctagccttatatgcgagagcatatgccatgtagtttccctttcagtgtgtcctgattttgacgaggaactcgaacccttttagcagcactgtggaatcgtattgtggttttctgattctctgttccgttctccagacttatgcaaagatcagatgaggtttacccatgtttggattctatatagttttatgtcccc

SEQ ID NO: 51944 - protein, 286 aa, Glycine max
  peptide (1)..(286): Ceres Seq. ID no. 15172863
SRPPPPSTSSPSVASRSEPQAPPAAGEMAPKRGGKAPVPAKKKAADKVVNPLFEKRPKQFGIGGALPPKKDLHRFVKWPKVVRIQRQRRILKQRLKVPPALHQFTRTLDKNLATNLFKMLLKYRPEDKVAKKERLLKRAQAEAEGKTVEAKKPIVVKYGLNHVTYLIEQSKAQLVVIAHDVDPIELVVWLPALCRKMEVPYCIVKGKSRLGSIVHKKTASVLCLTTVKNEDKLEFSKILEAIKANFNDKFDEVRKKWGGGVMGSKSQAKTKARERLIAKEAAQRMN

SEQ ID NO: 51945 - protein, 259 aa, Glycine max
  peptide (1)..(259): Ceres Seq. ID no. 15172864
MAPKRGGKAPVPAKKKAADKVVNPLFEKRPKQFGIGGALPPKKDLHRFVKWPKVVRIQRQRRILKQRLKVPPALHQFTRTLDKNLATNLFKMLLKYRPEDKVAKKERLLKRAQAEAEGKTVEAKKPIVVKYGLNHVTYLIEQSKAQLVVIAHDVDPIELVVWLPALCRKMEVPYCIVKGKSRLGSIVHKKTASVLCLTTVKNEDKLEFSKILEAIKANFNDKFDEVRKKWGGGVMGSKSQAKTKARERLIAKEAAQRMN

SEQ ID NO: 51946 - protein, 168 aa, Glycine max
  peptide (1)..(168): Ceres Seq. ID no. 15172865
MLLKYRPEDKVAKKERLLKRAQAEAEGKTVEAKKPIVVKYGLNHVTYLIEQSKAQLVVIAHDVDPIELVVWLPALCRKMEVPYCIVKGKSRLGSIVHKKTASVLCLTTVKNEDKLEFSKILEAIKANFNDKFDEVRKKWGGGVMGSKSQAKTKARERLIAKEAAQRMN

SEQ ID NO: 51947 - DNA, 683 bp, Glycine max
  misc_feature (1)..(683): Ceres Seq. ID no. 13581918
aactttacttttcaccgtcggagctaagttcgcgcgccggtcatcctaaacccatatcagcgatcagccggccaggaactcgccgtagtgccgtggcgtgttctggtagcgtggaaagagtacttctgtcatggaaccaagtcagcccgagctcgaggagttctcagctgccaccgcgggcgaggtgctgaaaccagtggaggccccatccgatggtgaaggatgccccatatgcttgggtcaagaggaggccacggagaccacttggatgaagacagcgtgcggacacatctttcatgggcggtgcgtggagaggtggctcaagatgaagggaagttgccccgtgtgccggcgccagctttcgataccgcatgttggtgcaaaacaagatgttccatttatacatccctttgacttgaggacgatagagtcaatgcggaggtttcctcacatattcccagatccagatggatatttctcaatgtatacgcaggatatgtttgaaggccattgaagatgatgttgccacgtacattatgctttcggtagctctacatataagaccggtgctaagaatgttatgtaaagtatggatctcttcactttcaaactaatagaacacgtgatttccgaaaaaaaaaataaaaaaaaaaaaaaaaaagctggacaataccgtcgactgt

SEQ ID NO: 51948 - protein, 127 aa, Glycine max
  peptide (1)..(127): Ceres Seq. ID no. 13581919
MEPSQPELEEFSAATAGEVLKPVEAPSDGEGCPICLGQEEATETTWMKTACGHIFHGRCVERWLKMKGSCPVCRRQLSIPHVGAKQDVPFIHPFDLRTIESMRRFPHIFPDPDGYFSMYTQDMFEGH

SEQ ID NO: 51949 - protein, 81 aa, Glycine max
  peptide (1)..(81): Ceres Seq. ID no. 13581920
MKTACGHIFHGRCVERWLKMKGSCPVCRRQLSIPHVGAKQDVPFIHPFDLRTIESMRRFPHIFPDPDGYFSMYTQDMFEGH

SEQ ID NO: 51950 - protein, 63 aa, Glycine max
  peptide (1)..(63): Ceres Seq. ID no. 13581921
MPHMLGSRGGHGDHLDEDSVRTHLSWAVRGEVAQDEGKLPRVPAPAFDTACWCKTRCSIYTSL

SEQ ID NO: 51951 - DNA, 1022 bp, Glycine max
  misc_feature (1)..(1022): Ceres Seq. ID no. 13638808
atcaacaacctccccgctttctccttcccgtctctctcctctcctctggtcccgattcccttctccgagcttcctccctataaataaggcggcccgcggcggccatcaattcccgtcaccgcccaccgaggccgcgaattattcctccgccccgcccgccgcgaaaaccctagccgccgccgatcccatggccaccgcctccagccaggcgagcctcctcctccagaagcagctccgagatctcgcgaagcaccccgtcgatgggttttcagccgggctcgtcgacgacagcaacgtcttcgagtggcaggtcaccatcatcggcccgcccgagaccctatatgatggaggctatttcaatgcaataatgagcttcccacaaaattatccgaacagccctccaacagtcagattcacttctgaaatgtggcatcctaatgtttatccggatgggcgggtatgcatttctattcttcatccacctggtgatgatcccaacggatacgagctcgcgagtgagcgttggacaccagtccatacggttgagagtatagtattaagcatcatttcgatgctttctagtccaaatgatgaatcaccggcaaatattgaagcagctaaggactggagagagaagcaggatgagttcaagaagaaggtcaggcgcgccgtacggaaatcccaggaaatgctctgaataaaatgggagtactggggaagttagccatgccatttcaggtgtggagggttttgctgtcgatctccaaatgtccatccgacactagcaatttcacttctcccctgtatattttccattagcctgtctcctgtggaggtcttggttttgactctgaaaacgcaacgcatattctaagggtctggttgttgtaattgtgtggcttcggctatcaatattgagaaacttgggagagctgctacttaccataattctttaacgaacctgatataaacggacacctgcctgatcagctaatgttgaagtctgctctcatctggaagcg

SEQ ID NO: 51952 - protein, 231 aa, Glycine max
  peptide (1)..(231): Ceres Seq. ID no. 13638809
STTSPLSPSRLSPLLWSRFPSPSFLPINKAARGGHQFPSPPTEAANYSSAPPAAKTLAAADPMATASSQASLLLQKQLRDLAKHPVDGFSAGLVDDSNVFEWQVTIIGPPETLYDGGYFNAIMSFPQNYPNSPPTVRFTSEMWHPNVYPDGRVCISILHPPGDDPNGYELASERWTPVHTVESIVLSIISMLSSPNDESPANIEAAKDWREKQDEFKKKVRRAVRKSQEML

SEQ ID NO: 51953 - protein, 169 aa, Glycine max
  peptide (1)..(169): Ceres Seq. ID no. 13638810
MATASSQASLLLQKQLRDLAKHPVDGFSAGLVDDSNVFEWQVTIIGPPETLYDGGYFNAIMSFPQNYPNSPPTVRFTSEMWHPNVYPDGRVCISILHPPGDDPNGYELASERWTPVHTVESIVLSIISMLSSPNDESPANIEAAKDWREKQDEFKKKVRRAVRKSQEML

SEQ ID NO: 51954 - DNA, 714 bp, Glycine max
  misc_feature (1)..(714): Ceres Seq. ID no. 12609797
ctccccccgctcggcctagctgccaccactcttcctcctcctcctcctcctagtcccggtcacagcctccttccatggcggatcggcacggcgagggcggcgtggcctcggcgcggcggccggggcgcacggacctggacgacctgtcgacgacgctgctgcagcgcgtgcaggcgcacctcccgaacgcgacgcaggtggtgggcctgctgaccctgctgctcgccggcgcggcgctgctggtgctggcggggctgacgttcacgggcgccgtggtggcgctcgtcttcctcggcccgctggcgctgctgaccagccccatctgggtgccgttctccttcgcgctcctcgtggtcgtcgtggcggcgctctccttcgtcgggttcgccgtggccgcgctcgccgcggccacctgggcgtaccggtacttcacggggcggcaccccgtgggcgccgaccgcgtggaccgcgcccgcagccgcctcgccgacaccgccagccacgtcaaggactacgcccgccgcgagtacgacggctacctcggcaaccggaccaaggacgccgcccccggcgcctagtcgccgcgcgtgcgtgcgtgcacgtcgtggctagatcgttattacgatatgctcttctctctttgcgtctctgtactctcccaggtgttggtgatcacgtcgtcttcacgtgtatgatctactattagtttcgttc

SEQ ID NO: 51955 - protein, 167 aa, Glycine max
  peptide (1)..(167): Ceres Seq. ID no. 12609798
MADRHGEGGVASARRPGRTDLDDLSTTLLQRVQAHLPNATQVVGLLTLLLAGAALLVLAGLTFTGAVVALVFLGPLALLTSPIWVPFSFALLVVVVAALSFVGFAVAALAAATWAYRYFTGRHPVGADRVDRARSRLADTASHVKDYARREYDGYLGNRTKDAAPGA

SEQ ID NO: 51956 - DNA, 822 bp, Glycine max
  misc_feature (1)..(822): Ceres Seq. ID no. 13594852
atatctatcacttcccggagttcatcgtttggccacgctgatcaattgagatcaagaccatggcaaactgtaagaagtggcttctgctcgttgtgggcctcgcggccatggtttcctcgtcggaggcgtacgtcttctacgccggcggccgcgacggctgggtcgtcgaccccgccgagagctacaaccactgggccgagcgcaaccggtttcagatcaacgacaccatcgtgtttgcgcgcggcgaaggcgagggcgcggactcggtgctgctggtgaccgagccggacttcgacgcgtgcaacacgcgcagccctgtccgccggctagaggacgccggtggccgcccggagttccggttcgaccggtcgggtgccttcttcttcatcagcggcgacgaggaccggtgccagaagggcaagaagttgtacgtcgtcgtgatggcgcctcggtcccaggagtgggagctcgcaccggcgcccggatcgccgccgctctgggcctcagcgccagagcacgcggaggccccggacatgagccctggtgacgaggggatgtcgcgcagctcgctgaaggcgccaccgccgatggcgagcgcggcacggttggacttggaggtgatagtcgtcggcgttgtagtcggggttttaggtgctctggtgctctgagatgccgtacggatcagaccggacgttgtgttcgcgcggtcatggtgtggtctgcggatggtttgttcgttgtgtgatacgctgttggtgttagttgttatatgtagttcaaggagttgagattcgtatacagaataaaatgatgtttatatgt

SEQ ID NO: 51957 - protein, 202 aa, Glycine max
  peptide (1)..(202): Ceres Seq. ID no. 13594853
MANCKKWLLLVVGLAAMVSSSEAYVFYAGGRDGWVVDPAESYNHWAERNRFQINDTIVFARGEGEGADSVLLVTEPDFDACNTRSPVRRLEDAGGRPEFRFDRSGAFFFISGDEDRCQKGKKLYVVVMAPRSQEWELAPAPGSPPLWASAPEHAEAPDMSPGDEGMSRSSLKAPPPMASAARLDLEVIVVGVVVGVLGALVL

SEQ ID NO: 51958 - protein, 186 aa, Glycine max
  peptide (1)..(186): Ceres Seq. ID no. 13594854
MVSSSEAYVFYAGGRDGWVVDPAESYNHWAERNRFQINDTIVFARGEGEGADSVLLVTEPDFDACNTRSPVRRLEDAGGRPEFRFDRSGAFFFISGDEDRCQKGKKLYVVVMAPRSQEWELAPAPGSPPLWASAPEHAEAPDMSPGDEGMSRSSLKAPPPMASAARLDLEVIVVGVVVGVLGALVL

SEQ ID NO: 51959 - DNA, 778 bp, Glycine max
  misc_feature (1)..(778): Ceres Seq. ID no. 12609803
attcctgtgcttttgaatcatattcttcgatctgttcttcaacatattttctgctttcaaccgttcgcgtcgtgactcagcttcgaattgttcagtataagttggaacttggaacatgtacgggagtaaagctagtcaacttgtgaaagaatttgcaagtggagaaaaaggtcagcttaccacatacaataatgacttgattcgagaagtagttgcagagtgtactcaacatcaccttgattttcagtccttgataaggaagatgcaggaagaaggtttggatatccaaacggcaaaaaatgcagatcactatggagcccttatccaccatcttgctgtagtccgaaataaacgttgcctaatggcctatatgtataatcgagcagaaattatacgaaacttgttatggaagatagggcatgtgcttcctcaagaaattaaagtgaagctttgtaatacggaggaagaacatttcaagaatcattctaaagcactgaaaaattatatgttgaaagtggaggttgatttgactgtggatatggtaccgccaaaagatccatacatcaaagtgagggtcattgatgacattggagaaggcattctgctcagtgatgataagagtgccaattttgccctccattcaatgcaccttctgaagcgaactgatgcagagcaatttatcgcacagggaaaaatggaagagctcacgggttgaccggtaagatatatagacgagaaaactacttgtgaacttgataccaattatgtaatagtgttt

SEQ ID NO: 51960 - protein, 199 aa, Glycine max
  peptide (1)..(199): Ceres Seq. ID no. 12609804
MYGSKASQLVKEFASGEKGQLTTYNNDLIREVVAECTQHHLDFQSLIRKMQEEGLDIQTAKNADHYGALIHHLAVVRNKRCLMAYMYNRAEIIRNLLWKIGHVLPQEIKVKLCNTEEEHFKNHSKALKNYMLKVEVDLTVDMVPPKDPYIKVRVIDDIGEGILLSDDKSANFALHSMHLLKRTDAEQFIAQGKMEELTG

SEQ ID NO: 51961 - protein, 150 aa, Glycine max
  peptide (1)..(150): Ceres Seq. ID no. 12609805
MQEEGLDIQTAKNADHYGALIHHLAVVRNKRCLMAYMYNRAEIIRNLLWKIGHVLPQEIKVKLCNTEEEHFKNHSKALKNYMLKVEVDLTVDMVPPKDPYIKVRVIDDIGEGILLSDDKSANFALHSMHLLKRTDAEQFIAQGKMEELTG

SEQ ID NO: 51962 - protein, 117 aa, Glycine max
  peptide (1)..(117): Ceres Seq. ID no. 12609806
MAYMYNRAEIIRNLLWKIGHVLPQEIKVKLCNTEEEHFKNHSKALKNYMLKVEVDLTVDMVPPKDPYIKVRVIDDIGEGILLSDDKSANFALHSMHLLKRTDAEQFIAQGKMEELTG

SEQ ID NO: 51963 - DNA, 868 bp, Glycine max
  misc_feature (1)..(868): Ceres Seq. ID no. 13595022
agcactagattagtggaatctttttttttcttttctatcgcttcctccacccaactctaatctcatcgcttccttcttcagctctaatcggagaaaaatggaggcagtaacggcgataaagccactaatcaaagtcgctgcaatctccggttctctccggaaaggctctttcaacaccggtctcctccgcgccgcgatggagttgacgaaagaatcggttccggggatgcatattgagcatatagacatctctccgttgccgttgatcaacaccgatcttgaatccaacgggacttaccctcccgtcgtcgaagctttccggcagaagattcttgaagccgacagcattctcttcgcttcccctgagtacaacttctctgtctcagctccacttaagaacgcgatcgattgggcttcaaggtcacctaacgtttgggctgacaaacctgctgccatcataagcaccggtggaggttttggtggaggaaggtcgcagtaccatcttcgacagattggagtgttccttgatcttcatttcatcaacaaaccggagtttactctcaatgcgtttcagccgcctcagaagttcgatgcagaaggaaacttggtcgatgaagtggctagggagaggttaaaacaagtccttgtctcgttacaggcgtttactctgcgacttcaaggtaaataagtggagggccgttcttgatcatttgtgtgagagattgatgttcgtgtgatgaaaataatgtcagattcttgtgataagaaacattgccacttatcctatgtaaatttatatttctgattaatgtcgtatgtgtttacatgataaaactgtgtttattaaacgagtgattcttgttgtttc

SEQ ID NO: 51964 - protein, 196 aa, Glycine max
  peptide (1)..(196): Ceres Seq. ID no. 13595023
MEAVTAIKPLIKVAAISGSLRKGSFNTGLLRAAMELTKESVPGMHIEHIDISPLPLINTDLESNGTYPPVVEAFRQKILEADSILFASPEYNFSVSAPLKNAIDWASRSPNVWADKPAAIISTGGGFGGGRSQYHLRQIGVFLDLHFINKPEFTLNAFQPPQKFDAEGNLVDEVARERLKQVLVSLQAFTLRLQGK

SEQ ID NO: 51965 - protein, 163 aa, Glycine max
  peptide (1)..(163): Ceres Seq. ID no. 13595024
MELTKESVPGMHIEHIDISPLPLINTDLESNGTYPPVVEAFRQKILEADSILFASPEYNFSVSAPLKNAIDWASRSPNVWADKPAAIISTGGGFGGGRSQYHLRQIGVFLDLHFINKPEFTLNAFQPPQKFDAEGNLVDEVARERLKQVLVSLQAFTLRLQGK

SEQ ID NO: 51966 - protein, 153 aa, Glycine max
  peptide (1)..(153): Ceres Seq. ID no. 13595025
MHIEHIDISPLPLINTDLESNGTYPPVVEAFRQKILEADSILFASPEYNFSVSAPLKNAIDWASRSPNVWADKPAAIISTGGGFGGGRSQYHLRQIGVFLDLHFINKPEFTLNAFQPPQKFDAEGNLVDEVARERLKQVLVSLQAFTLRLQGK

SEQ ID NO: 51967 - DNA, 885 bp, Glycine max
  misc_feature (1)..(885): Ceres Seq. ID no. 13638785
acctcatacttccactaccaagagaaagtcgttgacacaccacagataagcttctcgtcgctcacagcgaagagtcacacaatggcgtctgtcacttctccaaccactctcatctcctcctccacgagggctttcccagccaagtcttattcgcttccttctccctcagtctctttccttcgaaccctatcctctccttcctcatccgcttctctccgctccgcgtttgctcaacgctcttccctcagctccagttctcgccgtagcttcgctgtcaaggctcagaccgatgatcttccattggttggaaacaaggcccctgattttgaggcagaggcagtgtttgatcaggagttcatcaaggttaagctctctgagtacattgggaagaagtatgtgattctctttttctacccattggacttcactttcgtctgcccaacagagattactgccttcagtgaccggtacgcagagtttgagaagctgaacacggaagtgttaggtgtctcagtcgatagtgtgttctcccaccttgcgtgggtccagacagacagaaaatctggagggctcggtgatctgaactatcccctgatctcagatgtaactaaatcaatctcaaagtcatttggagtgctcatccatgatcagggaatagcactgagggggcttttcatcatcgacaaggaaggagtgatccaacattccaccatcaacaatcttggtattggacgaagtgttgatgagacaatgagaaccctccaggcgttacagtacatccaggagaaccctgatgaagtctgccctgcagggtggaaacctggtgagaagtcaatgaaacctgaccccaagctcagcaaagagtacttctcagctatttagaat

SEQ ID NO: 51968 - protein, 293 aa, Glycine max
  peptide (1)..(293): Ceres Seq. ID no. 13638786
TSYFHYQEKVVDTPQISFSSLTAKSHTMASVTSPTTLISSSTRAFPAKSYSLPSPSVSFLRTLSSPSSSASLRSAFAQRSSLSSSSRRSFAVKAQTDDLPLVGNKAPDFEAEAVFDQEFIKVKLSEYIGKKYVILFFYPLDFTFVCPTEITAFSDRYAEFEKLNTEVLGVSVDSVFSHLAWVQTDRKSGGLGDLNYPLISDVTKSISKSFGVLIHDQGIALRGLFIIDKEGVIQHSTINNLGIGRSVDETMRTLQALQYIQENPDEVCPAGWKPGEKSMKPDPKLSKEYFSAI

SEQ ID NO: 51969 - protein, 266 aa, Glycine max
  peptide (1)..(266): Ceres Seq. ID no. 13638787
MASVTSPTTLISSSTRAFPAKSYSLPSPSVSFLRTLSSPSSSASLRSAFAQRSSLSSSSRRSFAVKAQTDDLPLVGNKAPDFEAEAVFDQEFIKVKLSEYIGKKYVILFFYPLDFTFVCPTEITAFSDRYAEFEKLNTEVLGVSVDSVFSHLAWVQTDRKSGGLGDLNYPLISDVTKSISKSFGVLIHDQGIALRGLFIIDKEGVIQHSTINNLGIGRSVDETMRTLQALQYIQENPDEVCPAGWKPGEKSMKPDPKLSKEYFSAI

SEQ ID NO: 51970 - DNA, 897 bp, Glycine max
  misc_feature (1)..(897): Ceres Seq. ID no. 13594855
attcagattgacaacaacaacaaaaatctacgatgctacttgtgcgatccctctgccgtaccgctgcggcggcctccgtcgctacgctccgatcattgagatccgcccctccaaatcagctattgcgcaatcgttccctcctcacgcgaggattcttcgctgtttcttcatttccttcaaatcgaactccttacgattgtcggtatcctcgggcaattggcataggaagtgtgcgcaactttagcgaagatgtctcacatgcctgaactcaaagacagtgatgttcttaatgctttcaaaggtttgatggctacagactggtcagcgctgccttctgctgttgttaacgaggcgaaaaaggcagtctcgaaaaacacagacgacaaggcagggcaagaggccttgacgaatgtgttccgagcagctgaagctgttgaagaatttggtgggattctcaattccctaaagatggaaatcgacgatagcattgggatgagtggagaggatgtgaagagcttaccagaagatataaccaaagcgctgcgtcttgcttatcataggtatgctacctacctagatgcgtttggacctgaagaagtttatttgaagaagaaggttgagacggagttggggacaaagatgatccacttgaagatgagatgcagcgggcttggttcagaatggggaaaggttaccgttcttggaacatcaggactctcggggtcttacgtggagcaaagggcttaaaacggacagagaagaatcttaaataatgtttgttatttgcgttattgtgtcttcaacacataataaggtcaataactgaccaaagacatataaggtgagtttttgttcattgtcgctgcctcgaaaaattttaaacaagcttttgtgttc

SEQ ID NO: 51971 - protein, 165 aa, Glycine max
  peptide (1)..(165): Ceres Seq. ID no. 13594856
MSHMPELKDSDVLNAFKGLMATDWSALPSAVVNEAKKAVSKNTDDKAGQEALTNVFRAAEAVEEFGGILNSLKMEIDDSIGMSGEDVKSLPEDITKALRLAYHRYATYLDAFGPEEVYLKKKVETELGTKMIHLKMRCSGLGSEWGKVTVLGTSGLSGSYVEQRA

SEQ ID NO: 51972 - protein, 162 aa, Glycine max
  peptide (1)..(162): Ceres Seq. ID no. 13594857
MPELKDSDVLNAFKGLMATDWSALPSAVVNEAKKAVSKNTDDKAGQEALTNVFRAAEAVEEFGGILNSLKMEIDDSIGMSGEDVKSLPEDITKALRLAYHRYATYLDAFGPEEVYLKKKVETELGTKMIHLKMRCSGLGSEWGKVTVLGTSGLSGSYVEQRA

SEQ ID NO: 51973 - protein, 146 aa, Glycine max
  peptide (1)..(146): Ceres Seq. ID no. 13594858
MATDWSALPSAVVNEAKKAVSKNTDDKAGQEALTNVFRAAEAVEEFGGILNSLKMEIDDSIGMSGEDVKSLPEDITKALRLAYHRYATYLDAFGPEEVYLKKKVETELGTKMIHLKMRCSGLGSEWGKVTVLGTSGLSGSYVEQRA

SEQ ID NO: 51974 - DNA, 1425 bp, Glycine max
  misc_feature (1)..(1425): Ceres Seq. ID no. 13594859
aaggcaaacccctcttttgaattccctccccctctcccctcggccgcctcgccgccgacccggcccgggacggaggccccctccctcccggaacctcctggaagcttccgcggctccctcccctgctccggcaacagcccgcgtcgtcgccgccgccgagggccagcacctcgcgctgccggcccgttgcttgcagcgggaggaaaggggtcaagatggttgtcggatcattcatcaccagagctttaatacttgttcttggatatgcatatccagcttatgattgttacaagacagtggagctgaataggcctgagattgagcagttgcggttctggtgtcagtactggattttacttgcaatgcttactgttttcgagagagttggggataatttcatatcatggttgccaatgtatagtgaagcaaagctggcttttattgtgtatttgtggtatcctaagacacaggggacttcatatgtctatgagtcgttcttcaagccttatatcgcaaaacacgaatctgagattgatcgcaatcttcttgagttgaggacaagggctagtgatattgctgttacttacttccacaaggttgcagactacagccagtcaaggttccatgaaatcttgcaatatattgcttctcaatcacaaggatctcgttctcaggcacagcaacagcagcagcgtccaccacctccacggactcggatggcgaatcctgcaccaccacctgttcccgcaccaacggcaccaccgatgccgccacaggccgcccaagttcctcctactccaccaaggatgcaggtgcaagataaaggcccagttccagttgcccctcctggcgcagtgcctcctgtgcagcaacaaacaccttcctgtcctggccctgtcgccggcaacagccccccaaaagagtgaagacatgctggttgatcaatctgggccttcgacaagcaacgtgccaccccgcccaaacaatgcctgaagacgaggagacgctcatccaggaggctattcggttgactcggggccggctcaggaggcgcatgggtggatctggacctccatccaactagctcttctcacacttacgacgatggcaggggaaatgctgggttggtccatcaggcatggctgaatttcctcgcacagttgcaagctcacgtccaccttgtaaaacgatgaatcctggttcctgttgtttcacagcccagattgtgtatataaacccaccccatgccaggggtaaaaacgctgggatgccagtggaccaccagtttagctaggcggtagcagaagatggtggttaagatgctcggtgaaatcggttccaacttagttctgtcgaaattcgttggtggtgacttcgtctgtattggaaagtggttcaaaggtgaagtgaaataatcttaggctg

SEQ ID NO: 51975 - protein, 236 aa, Glycine max
  peptide (1)..(236): Ceres Seq. ID no. 15221426
MVVGSFITRALILVLGYAYPAYDCYKTVELNRPEIEQLRFWCQYWILLAMLTVFERVGDNFISWLPMYSEAKLAFIVYLWYPKTQGTSYVYESFFKPYIAKHESEIDRNLLELRTRASDIAVTYFHKVADYSQSRFHEILQYIASQSQGSRSQAQQQQQRPPPPRTRMANPAPPPVPAPTAPPMPPQAAQVPPTPPRMQVQDKGPVPVAPPGAVPPVQQQTPSCPGPVAGNSPPKE

SEQ ID NO: 51976 - protein, 187 aa, Glycine max
  peptide (1)..(187): Ceres Seq. ID no. 15221427
MLTVFERVGDNFISWLPMYSEAKLAFIVYLWYPKTQGTSYVYESFFKPYIAKHESEIDRNLLELRTRASDIAVTYFHKVADYSQSRFHEILQYIASQSQGSRSQAQQQQQRPPPPRTRMANPAPPPVPAPTAPPMPPQAAQVPPTPPRMQVQDKGPVPVAPPGAVPPVQQQTPSCPGPVAGNSPPKE

SEQ ID NO: 51977 - protein, 170 aa, Glycine max
  peptide (1)..(170): Ceres Seq. ID no. 15221428
MYSEAKLAFIVYLWYPKTQGTSYVYESFFKPYIAKHESEIDRNLLELRTRASDIAVTYFHKVADYSQSRFHEILQYIASQSQGSRSQAQQQQQRPPPPRTRMANPAPPPVPAPTAPPMPPQAAQVPPTPPRMQVQDKGPVPVAPPGAVPPVQQQTPSCPGPVAGNSPPKE

SEQ ID NO: 51978 - DNA, 821 bp, Glycine max
  misc_feature (1)..(821): Ceres Seq. ID no. 15172846
ccccttcctcttcccctccccccatctcctcccccgacgccgaaccgaatcgccgcagcagccgccggagaagaacaaattgagcgccagcagccatgtccggcgtggaggaggaggagaacgccgccgagctcaagatcggcgaagagttcctcaaggccaagtgcctgatgaactgcgaggtggcgataatcctggagcacaagtgggagcagctgcagcacatgtcggacggcggcgccgaccaggtctcgcaggtgttcgagaagtcgcaggcctacgtcaagcgcttcagccgctacaagaaccccgacgcggtccgccaggtccgcgagacgctctcccgctacagcctcgtcgagttcgagctctgcaccctggggaacctctgccccgacaccgccgacgaggccaaggcgctcgtcccctccctcgtccccggcggcaggttcgacagcgacgaccgcgtcgacaagatgctcaacgacctctccctcatcaagaagttcgagtagctcttcttgtgttcctccaatggacatgatggacatggagaccatgtgtcatttatcagtctcaagaagtacttactagctactagtagcctagtttggtgatatgtttaatcttcagattatctcctcctatgctatgatcataaagcatcagcagtgtcaatctcaaatgtatggagttgattaaaccttgttgttatgctgtcttggagaaaaatgtagcagcttcttgttggagatatatggagtttacgctcctatatgctatgactataagacggagttgattaaacatttgttgatatc

SEQ ID NO: 51979 - protein, 180 aa, Glycine max
  peptide (1)..(180): Ceres Seq. ID no. 15172847
PFLFPSPHLLPRRRTESPQQPPEKNKLSASSHVRRGGGGERRRAQDRRRVPQGQVPDELRGGDNPGAQVGAAAAHVGRRRRPGLAGVREVAGLRQALQPLQEPRRGPPGPRDALPLQPRRVRALHPGEPLPRHRRRGQGARPLPRPRRQVRQRRPRRQDAQRPLPHQEVRVALLVFLQWT

SEQ ID NO: 51980 - protein, 139 aa, Glycine max
  peptide (1)..(139): Ceres Seq. ID no. 15172848
MSGVEEEENAAELKIGEEFLKAKCLMNCEVAIILEHKWEQLQHMSDGGADQVSQVFEKSQAYVKRFSRYKNPDAVRQVRETLSRYSLVEFELCTLGNLCPDTADEAKALVPSLVPGGRFDSDDRVDKMLNDLSLIKKFE

SEQ ID NO: 51981 - protein, 114 aa, Glycine max
  peptide (1)..(114): Ceres Seq. ID no. 15172849
MNCEVAIILEHKWEQLQHMSDGGADQVSQVFEKSQAYVKRFSRYKNPDAVRQVRETLSRYSLVEFELCTLGNLCPDTADEAKALVPSLVPGGRFDSDDRVDKMLNDLSLIKKFE

SEQ ID NO: 51982 - DNA, 695 bp, Glycine max
  misc_feature (1)..(695): Ceres Seq. ID no. 13594700
accattacctagaacatcctaatcgaaaaaatctttttgttcttttatggttttggaatcgatctgtaatctcattctgactttgatccaatcgcttcttatctagaaacccgacccgaaaagccatgagagtccatccaattcttaacaacaacacattgatccaccaccaccaccatcatcaccataacccgacccgagaacccggaaagaatctccgtcgcttacctcacatcttcaaccgcgttctcgagcttccgctaaggtccgaagcagacgtctccgtggaagagaaacccgattgcttcagattcgtggcggagacggacggtcttcgcggcggcggaggggagatgacggcgtatatggtggagatccatccgggtattaccaagatcgtcgttaggacaaatgggttgtctttgggtttgtcgttggatgagttggagcttgatgtctggcgttttaggcttccggagacgacgaggcctgagcttgttaccgtggcttgtgttgatggggctttggttgttacggttcctaagatggtttcagaggaagatgatgatggttttggacaaggtgtgggaactgggaggctagttcttgttttgtaaaatcgagccatgtctctgctttggattaagacagcttatgtaattatatctatgaacgttttcatttgaatctttgtg

SEQ ID NO: 51983 - protein, 163 aa, Glycine max
  peptide (1)..(163): Ceres Seq. ID no. 13594701
MRVHPILNNNTLIHHHHHHHHNPTREPGKNLRRLPHIFNRVLELPLRSEADVSVEEKPDCFRFVAETDGLRGGGGEMTAYMVEIHPGITKIVVRTNGLSLGLSLDELELDVWRFRLPETTRPELVTVACVDGALVVTVPKMVSEEDDDGFGQGVGTGRLVLVL

SEQ ID NO: 51984 - protein, 87 aa, Glycine max
  peptide (1)..(87): Ceres Seq. ID no. 13594702
MTAYMVEIHPGITKIVVRTNGLSLGLSLDELELDVWRFRLPETTRPELVTVACVDGALVVTVPKMVSEEDDDGFGQGVGTGRLVLVL

SEQ ID NO: 51985 - protein, 83 aa, Glycine max
  peptide (1)..(83): Ceres Seq. ID no. 13594703
MVEIHPGITKIVVRTNGLSLGLSLDELELDVWRFRLPETTRPELVTVACVDGALVVTVPKMVSEEDDDGFGQGVGTGRLVLVL

SEQ ID NO: 51986 - DNA, 803 bp, Glycine max
  misc_feature (1)..(803): Ceres Seq. ID no. 13594582
aaaattcccacgaccatcggaccaaagaatcatacccctctcttctagccattcaaactagtaaacaatggggatactcaggaagaaaaaacacgagcgaaagccgtcgtttaagagtgttttaacctcaatattagctacacaagccgtaacattcctcttgttgatctccggtgtatccctcgccggcacagccgccgcatttatcgctaccatgccactattcgtagtattcagtccgattctcgtaccagctggtattaccactggtttactgactacgggtttagcagccgccggtggcgccggtgcgactgctgtcaccatcatcctgtggctctacaagcaagcaacgggcaaggagccgccagcagtcctgtcaaaagtcttgaaaaagataataccaggtgctgcagccgcgccagcagccgcaccagcagccgctccagcagccgcaccagctgccgcgccagcagccgcaccagcacctaagcccgcagccgcaccagcacctaagccagcagccccaccggcactatgaaaagaagtggtgggcatgagtaaaggctgatatggaaaatttgatacatggaaacaaaagagtaatccaactttttaaaaataaataacaacttcacgtggggatagaaaaaaattcaaatattattctactaatggatgtcgtggtacaaagtagtaacaaatgtaagcatatttattgtatagcattttaagaacgaagctgtgtatcgttgatattagtaccttattcaagttattcraggggggaaaaaaaaaaaaaa

SEQ ID NO: 51987 - protein, 157 aa, Glycine max
  peptide (1)..(157): Ceres Seq. ID no. 15221393
MGILRKKKHERKPSFKSVLTSILATQAVTFLLLISGVSLAGTAAAFIATMPLFVVFSPILVPAGITTGLLTTGLAAAGGAGATAVTIILWLYKQATGKEPPAVLSKVLKKIIPGAAAAPAAAPAAAPAAAPAAAPAAAPAPKPAAAPAPKPAAPPAL

SEQ ID NO: 51988 - protein, 108 aa, Glycine max
  peptide (1)..(108): Ceres Seq. ID no. 15221394
MPLFVVFSPILVPAGITTGLLTTGLAAAGGAGATAVTIILWLYKQATGKEPPAVLSKVLKKIIPGAAAAPAAAPAAAPAAAPAAAPAAAPAPKPAAAPAPKPAAPPAL

SEQ ID NO: 51989 - DNA, 1339 bp, Glycine max
  misc_feature (1)..(1339): Ceres Seq. ID no. 15177079
aaacacgcggaaaaaaatggaggcatgaacacgcccccctcctcctccgtccccgcctcctccgtccccgatcccgtcgacagcccagcggccccgcccccgccccctcctcgccggcggcacccttgctcgtaggcgggcgtgaggggagcggcgcgcagcgacgatgccgtcgcactcggatctggaccggcagatctcgctgctgcgggactgcaagttcctgccggacgccgaggtcaaggccctctgcgagcaggccaaggcgatcctcatggaggagtggaacgtgcagcccgtgcgctgccccgtcaccgtctgcggcgacatccacggccagttctacgacctcatcgagctcttccgcatcgggggcgacacccccgacaccaactaccttttcatgggcgactacgtcgaccgtggctactattcagtggagactgtttcattattagtggctctcaaagttcgttatagagacagaatcacaatcttgagaggaaatcacgagagccgacaaatcactcaagtgtatggcttctatgatgaatgcttacggaagtacggaaatgcaaatgtctggaagtacttcacagatttgtttgattatttgcctctcacagctcttatagaaaaccaggtgttttgcctccatggtggtctctctccatcattagatacattggacaatattcgttctcttgatcgcatacaagaggtcccgcatgaaggacctatgtgtgatcttttgtggtctgatccggatgaccgatgcgggtggggaatttcaccaagaggagcaggctacacatttggacaagatatagcacaacaatttaaccatacaaatggtcttagccttatttcaagggcccatcaacttgtgatggaagggttcaactgggcacaggagaagaatgttgtcacagttttcagtgcgccaaactactgttaccggtgtggtaacatggctgcgattctcgaaattggggagaacatggatcagaacttcctccaattcgatccagcgccgcggcaaatcgagccagacacaacgcgcaagacccccgactactttttgtaatcgtggtgttgactttttttaactcttctgctgcctggctggatctgtagatctctgtccttagaaaatgggattccttgagctgagttgtgtaccccccctctcattcttttgtttggagattttggttgccgcttctcaggacctcataggacatgttaaaagtacattgcattggtattttttttgtatctccattttgtattatttccgagacagagaagggaagctgcaatagaatcgtctcgtaac

SEQ ID NO: 51990 - protein, 306 aa, Glycine max
  peptide (1)..(306): Ceres Seq. ID no. 15177080
MPSHSDLDRQISLLRDCKFLPDAEVKALCEQAKAILMEEWNVQPVRCPVTVCGDIHGQFYDLIELFRIGGDTPDTNYLFMGDYVDRGYYSVETVSLLVALKVRYRDRITILRGNHESRQITQVYGFYDECLRKYGNANVWKYFTDLFDYLPLTALIENQVFCLHGGLSPSLDTLDNIRSLDRIQEVPHEGPMCDLLWSDPDDRCGWGISPRGAGYTFGQDIAQQFNHTNGLSLISRAHQLVMEGFNWAQEKNVVTVFSAPNYCYRCGNMAAILEIGENMDQNFLQFDPAPRQIEPDTTRKTPDYFL

SEQ ID NO: 51991 - protein, 270 aa, Glycine max
  peptide (1)..(270): Ceres Seq. ID no. 15177081
MEEWNVQPVRCPVTVCGDIHGQFYDLIELFRIGGDTPDTNYLFMGDYVDRGYYSVETVSLLVALKVRYRDRITILRGNHESRQITQVYGFYDECLRKYGNANVWKYFTDLFDYLPLTALIENQVFCLHGGLSPSLDTLDNIRSLDRIQEVPHEGPMCDLLWSDPDDRCGWGISPRGAGYTFGQDIAQQFNHTNGLSLISRAHQLVMEGFNWAQEKNVVTVFSAPNYCYRCGNMAAILEIGENMDQNFLQFDPAPRQIEPDTTRKTPDYFL

SEQ ID NO: 51992 - protein, 227 aa, Glycine max
  peptide (1)..(227): Ceres Seq. ID no. 15177082
MGDYVDRGYYSVETVSLLVALKVRYRDRITILRGNHESRQITQVYGFYDECLRKYGNANVWKYFTDLFDYLPLTALIENQVFCLHGGLSPSLDTLDNIRSLDRIQEVPHEGPMCDLLWSDPDDRCGWGISPRGAGYTFGQDIAQQFNHTNGLSLISRAHQLVMEGFNWAQEKNVVTVFSAPNYCYRCGNMAAILEIGENMDQNFLQFDPAPRQIEPDTTRKTPDYFL

SEQ ID NO: 51993 - DNA, 917 bp, Glycine max
  misc_feature (1)..(917): Ceres Seq. ID no. 12610267
gtcaagagacaagaggactgccaaacccacacccatacaagaggcaggcaaggggcaccctcctcaagcctcaagcaaccaacgcagttcttccaccgatatttccttccctcgccggcaccgccgacgatctgcagccatggcaatggcttacaagatggcgacggaggggatgaacatcaaggaggagtgcaagcggtggttcacggagatgaagtggaagaaggtgcaccgcttcgtggtctacaagatcgacgagcggacgcgcgccgtgctggtggacaaggtgggcggccccggggaggggtacgacgagctcgtcgccgcgctgcccggcgacgactgccgctacgccgtcttcgacttcgacttcgtctccgtcgacaactgccagaagagcaagatcttcttcatcgcatggtcgccggcggcgtcgaggataagggccaagattctgtacgcgacgtcgaagcaaggcctgcggcgggtgctggagggggtccactacgaggtgcaggccaccgagcgctccgagatgggcttcgacgtcatcagagagcgcgcgcaatgagcgagcttgctgccgggagtgagttttatgtctgcagtctgcgcgacgatcgccgctgtactataatcggacggacgctgattggggctggttgggtgtgctctgccggcagcctcgatgcaacctgacgagggtttgggctttgatttagaaaaattatccgtggtttgagattgtgccgtgtgatgtataggcggagctgagagagtggcagcggattaatgaaacgtcccatctctgcgtgcgacgtggaaattccactgacgctggggatgccccgacttcgtttgctattgtgcttcaacacttcaaccgttcaagatagtacttctacggttgattgctc

SEQ ID NO: 51994 - protein, 232 aa, Glycine max
  peptide (1)..(232): Ceres Seq. ID no. 12610268
VKRQEDCQTHTHTRGRQGAPSSSLKQPTQFFHRYFLPSPAPPTICSHGNGLQDGDGGDEHQGGVQAVVHGDEVEEGAPLRGLQDRRADARRAGGQGGRPRGGVRRARRRAARRRLPLRRLRLRLRLRRQLPEEQDLLHRMVAGGVEDKGQDSVRDVEARPAAGAGGGPLRGAGHRALRDGLRRHQRARAMSELAAGSEFYVCSLRDDRRCTIIGRTLIGAGWVCSAGSLDAT

SEQ ID NO: 51995 - protein, 189 aa, Glycine max
  peptide (1)..(189): Ceres Seq. ID no. 12610269
SRDKRTAKPTPIQEAGKGHPPQASSNQRSSSTDISFPRRHRRRSAAMAMAYKMATEGMNIKEECKRWFTEMKWKKVHRFVVYKIDERTRAVLVDKVGGPGEGYDELVAALPGDDCRYAVFDFDFVSVDNCQKSKIFFIAWSPAASRIRAKILYATSKQGLRRVLEGVHYEVQATERSEMGFDVIRERAQ

SEQ ID NO: 51996 - protein, 143 aa, Glycine max
  peptide (1)..(143): Ceres Seq. ID no. 12610270
MAMAYKMATEGMNIKEECKRWFTEMKWKKVHRFVVYKIDERTRAVLVDKVGGPGEGYDELVAALPGDDCRYAVFDFDFVSVDNCQKSKIFFIAWSPAASRIRAKILYATSKQGLRRVLEGVHYEVQATERSEMGFDVIRERAQ

SEQ ID NO: 51997 - DNA, 1342 bp, Glycine max
  misc_feature (1)..(1342): Ceres Seq. ID no. 12781552
aatcgaaaactcacttctagatttccgggcctcaggattgcccctccctaccgtagctttgctaagtagttgcttcttcttcttggtttcttttcttgattgctttgggtctccgattttttgggtcctcggtttcttggtcctcccctgaatcttgtagagtctgttcctttcgccgccggtagccatggacgacaggattccgccgccgtctcacctgcagcagtactcgcagtcccctgtccattcttcgcctcatcaccaccacctcaattccatgaggtactctgcctcctctgagagagaaaggtatctggctgagttgcttgctgagaggcagaagttaggcccattcattcaagttcttccctactgcaccaggctcttgaaccaagagattttgcgggcatcttctttgccacctaaccataattttgttgatgctgagagaattgagcatggtagcccgttaaggttacctggccacccagtgaatggtcaaccaatggatctggagggatggtcaggaaggcaagcagagcatatgggggttctgcaagcatcaccaatgagctggaatggtgctccagcacttggtggtactcctgttgtcaagaaacttgtgaggctagatgttcctgtggacaagtatcctaacttcaactttgttggccgtctattggggccacgaggaaactccctgaaaagagttgaagctacgactcaatgcagagtttacattcgtgggcgtggatcagttaaagactctgtgaaggaagagaagctgagagataagcctggatatgagcacctcaatgaggcactgcacgtgcttgtggaagcagagttcccagcagacattattgatgtgcgtctaaaccaagctgtgaccatcctggaagatcttctcaaaccaatggatgagtccatggactactacaagaagcagcagctgagagagctggccatcctgaatggcactctgagggaggaaagccccagcccccaccttagcccgagcgtgtccccctttaactccgccgggatgaagcgtccgaaaacggggcggtgatctaaaaagacttggtctgtctgaatctgatgacaagggtggagatgattggtgttgcatttgccgggatgatgagtgctggcctatgcctgtcatgatctgcgtgctttaccaaccgtagatgggtccgtgggcgaatgatgatcctcggtgggcttgattgatgtttgacgctgttcctattatttattctttctgtgcaatctgactttggaaaaaatgacattgtttattggtttggggtaagttaacaaggccaggtggccatcc

SEQ ID NO: 51998 - protein, 294 aa, Glycine max
  peptide (1)..(294): Ceres Seq. ID no. 12781553
MDDRIPPPSHLQQYSQSPVHSSPHHHHLNSMRYSASSERERYLAELLAERQKLGPFIQVLPYCTRLLNQEILRASSLPPNHNFVDAERIEHGSPLRLPGHPVNGQPMDLEGWSGRQAEHMGVLQASPMSWNGAPALGGTPVVKKLVRLDVPVDKYPNFNFVGRLLGPRGNSLKRVEATTQCRVYIRGRGSVKDSVKEEKLRDKPGYEHLNEALHVLVEAEFPADIIDVRLNQAVTILEDLLKPMDESMDYYKKQQLRELAILNGTLREESPSPHLSPSVSPFNSAGMKRPKTGR

SEQ ID NO: 51999 - protein, 264 aa, Glycine max
  peptide (1)..(264): Ceres Seq. ID no. 12781554
MRYSASSERERYLAELLAERQKLGPFIQVLPYCTRLLNQEILRASSLPPNHNFVDAERIEHGSPLRLPGHPVNGQPMDLEGWSGRQAEHMGVLQASPMSWNGAPALGGTPVVKKLVRLDVPVDKYPNFNFVGRLLGPRGNSLKRVEATTQCRVYIRGRGSVKDSVKEEKLRDKPGYEHLNEALHVLVEAEFPADIIDVRLNQAVTILEDLLKPMDESMDYYKKQQLRELAILNGTLREESPSPHLSPSVSPFNSAGMKRPKTGR

SEQ ID NO: 52000 - protein, 188 aa, Glycine max
  peptide (1)..(188): Ceres Seq. ID no. 12781555
MDLEGWSGRQAEHMGVLQASPMSWNGAPALGGTPVVKKLVRLDVPVDKYPNFNFVGRLLGPRGNSLKRVEATTQCRVYIRGRGSVKDSVKEEKLRDKPGYEHLNEALHVLVEAEFPADIIDVRLNQAVTILEDLLKPMDESMDYYKKQQLRELAILNGTLREESPSPHLSPSVSPFNSAGMKRPKTGR

SEQ ID NO: 52001 - DNA, 467 bp, Glycine max
  misc_feature (1)..(467): Ceres Seq. ID no. 13594583
aaatcagacaaaacacgatggcatcagcagcgccattctccggcaccggcagtctccttcgcctgacaaaaccaggaacgccacagccccagttcttctcccctccgccgtctcgctcccacttccaccttcgaacccgccccgccaaggcaaagagcccaatcgccggagccatcgcctcctcttccatggcggcagcccagccccagacgtgcgacggccaacaacaacgggcggaggaggccatgaagctgctgttcgtcgagatgggcgtcgggtacgaccagcacggacaggacatcacctccgccgcggtgcgcgcctgcaaggatgccatctcctccaactccatccccgccttccgccgcgggtcgataccaggggtgaacagtgaacagatgaaactgcagatcaagctgggtgtcccgaggccggtgcagcatctgttggactttgagagaatcaag

SEQ ID NO: 52002 - protein, 155 aa, Glycine max
  peptide (1)..(155): Ceres Seq. ID no. 13594584
IRQNTMASAAPFSGTGSLLRLTKPGTPQPQFFSPPPSRSHFHLRTRPAKAKSPIAGAIASSSMAAAQPQTCDGQQQRAEEAMKLLFVEMGVGYDQHGQDITSAAVRACKDAISSNSIPAFRRGSIPGVNSEQMKLQIKLGVPRPVQHLLDFERIK

SEQ ID NO: 52003 - protein, 150 aa, Glycine max
  peptide (1)..(150): Ceres Seq. ID no. 13594585
MASAAPFSGTGSLLRLTKPGTPQPQFFSPPPSRSHFHLRTRPAKAKSPIAGAIASSSMAAAQPQTCDGQQQRAEEAMKLLFVEMGVGYDQHGQDITSAAVRACKDAISSNSIPAFRRGSIPGVNSEQMKLQIKLGVPRPVQHLLDFERIK

SEQ ID NO: 52004 - protein, 130 aa, Glycine max
  peptide (1)..(130): Ceres Seq. ID no. 13594586
NQTKHDGISSAILRHRQSPSPDKTRNATAPVLLPSAVSLPLPPSNPPRQGKEPNRRSHRLLFHGGSPAPDVRRPTTTGGGGHEAAVRRDGRRVRPARTGHHLRRGARLQGCHLLQLHPRLPPRVDTRGEQ

SEQ ID NO: 52005 - DNA, 1032 bp, Glycine max
  misc_feature (1)..(1032): Ceres Seq. ID no. 13638835
agcgactagaatatcccggcccgaaacagcaaggtctctctctcgcgctcgcctctctcctcctcgtcttcggcggcggcgacggcggtggcgatgctgtccggcgacgttcccccgaaccagaccgtctacttcaggaacctcaacgagaaggtcaagaaagaagagctgaagagatcactttatgcattgtgctctcagtatggaaggatagtggatgttgtggccttgaaaactcataaactgagggggcaagcctgggtggcattcagtgaaattacagcggctaccaacgctttccggggcctacaggacttcgatttttacggcaaaaaaatgcgggtacaatatgcaaaaacaaagtctgactgttttgcaaaagcagatgggtcttatgctcctaaagagaaaaggaagaagcaagaggagaaagctgctgagaaaaaacggcgaactgaagatgggcaacaacctggtgctagtgctcctgttgccccaagcaatggaactggtcatcaaccttctcgttttgccaagcctccgcaagagccagctgctccgccgaacaacatcctcttcctccagaacatgccggaccagaccacgagcatgatgctccagatcctgttccagcaataccctggtttccgggaggtgcggatgatcgaagccaagccaggcattgcttttgtggagtacgaggatgagaaccagtccatggttgcaatggaagccctccagggtttcaagatcagcccagagaacccaatggccatctcatacgccaaaaagtgaaaacgatccatgtgatctcggaaccggccaaaagaaatctgtaactgtaagattttccaccttaagctttcaagctgctgtgctgtgcttgtgctggctttctaaccctgtatttcttggaagtgacttgcttgttgtttaagaagttaaaaagtatgtgctactttaaatcaggtttggctctacgttttcatgtgaaccctggtattgtccttgtcaagtctggtatcgtggcct

SEQ ID NO: 52006 - protein, 233 aa, Glycine max
  peptide (1)..(233): Ceres Seq. ID no. 13638836
MLSGDVPPNQTVYFRNLNEKVKKEELKRSLYALCSQYGRIVDVVALKTHKLRGQAWVAFSEITAATNAFRGLQDFDFYGKKMRVQYAKTKSDCFAKADGSYAPKEKRKKQEEKAAEKKRRTEDGQQPGASAPVAPSNGTGHQPSRFAKPPQEPAAPPNNILFLQNMPDQTTSMMLQILFQQYPGFREVRMIEAKPGIAFVEYEDENQSMVAMEALQGFKISPENPMAISYAKK

SEQ ID NO: 52007 - protein, 152 aa, Glycine max
  peptide (1)..(152): Ceres Seq. ID no. 13638837
MRVQYAKTKSDCFAKADGSYAPKEKRKKQEEKAAEKKRRTEDGQQPGASAPVAPSNGTGHQPSRFAKPPQEPAAPPNNILFLQNMPDQTTSMMLQILFQQYPGFREVRMIEAKPGIAFVEYEDENQSMVAMEALQGFKISPENPMAISYAKK

SEQ ID NO: 52008 - DNA, 879 bp, Glycine max
  misc_feature (1)..(879): Ceres Seq. ID no. 12609093
cctcactgcagaaacaccacacgatctgaaaaaaccgacagaacatgtcgtcggggaagcaggagacggcggcggtgcgcgtgctgggcaggtggccgagcccgttcgtgatccgggtgctgatagctcttgggctcaagggcgtggaccacgagctcgtggaggaggcggcgggcaacaagagcgagctgctgctcgcctccaaccccgtgcacaagaagatccccgtgctcctgcaccacggcaggcccgtctccgagtccctcatcatcgtccagtacgtcgacgaggcctgggcctcccaagccccggcgctcatcccgtccgacccctacgcccgcgcggccgagcggttctgggcccagtacgtcgacgacaagtttcctacggcgatccgggtcctgaggggaaggctggacggagacaaggaagaagcggcggctcaggtgtgcgccgctctgcagcacctggaggtggccttcgtcgagtgcggccaagggaaggattacttcggcggcgacggcgtcggttacctggacattgctctcgggtcgcacctcggatgggtcagggcggtagagaggatcgctgaaatcaggctgctcgacgcggccaaggttcctaagctggcggcgtgggcggatcggttctgcgcccacccggcggtggcgaacgccatgcctaacgtggacaggttcgtggagttcagcgtcaagaatgacggcgttctgaaggcggctagtgctaattccaagtgagcgaactgttgtgggcactagacagcgctcgatggcatagccagaataagtaacctgctggctgttggtgtaaaccctcttttattatatggcaattgataaatctcgaatgtttggattt

SEQ ID NO: 52009 - protein, 237 aa, Glycine max
  peptide (1)..(237): Ceres Seq. ID no. 12609094
MSSGKQETAAVRVLGRWPSPFVIRVLIALGLKGVDHELVEEAAGNKSELLLASNPVHKKIPVLLHHGRPVSESLIIVQYVDEAWASQAPALIPSDPYARAAERFWAQYVDDKFPTAIRVLRGRLDGDKEEAAAQVCAALQHLEVAFVECGQGKDYFGGDGVGYLDIALGSHLGWVRAVERIAEIRLLDAAKVPKLAAWADRFCAHPAVANAMPNVDRFVEFSVKNDGVLKAASANSK

SEQ ID NO: 52010 - protein, 196 aa, Glycine max
  peptide (1)..(196): Ceres Seq. ID no. 12609095
LTAETPHDLKKPTEHVVGEAGDGGGARAGQVAEPVRDPGADSSWAQGRGPRARGGGGGQQERAAARLQPRAQEDPRAPAPRQARLRVPHHRPVRRRGLGLPSPGAHPVRPLRPRGRAVLGPVRRRQVSYGDPGPEGKAGRRQGRSGGSGVRRSAAPGGGLRRVRPREGLLRRRRRRLPGHCSRVAPRMGQGGREDR

SEQ ID NO: 52011 - DNA, 1015 bp, Glycine max
  misc_feature (1)..(1015): Ceres Seq. ID no. 13638838
ttttagatcacaccgtgggttttcttggtcggtaggaataggattcaggcccgggcggccgcgtcaaaatcgtctctttgctcctcctcctgtccgtccgtctccgtccgtccgcccgcccgccccgaagcgtctcgccgccccctccaccggagaaccccctcgaaggcgagcacccgccctccccttcctcccggattcttgtctgccatgggtgactacacaatccggataagcaccagcttgatcgagcagctcgcgcgcgatgacgagaagcagatgaagaggaggaccaggaaacccaagccgaggaaggtcgtggagcaaccagaggagcctcaggacaatggcagggaacttccaactgaacccaagagcagccctgctcctgttttgccttttccgccacccatgtacctgccagtgacccccgctcctccaccgcccccgcccgtgatccaggaggtggaagccatacgcgccgtggttgtggagagcgagaaggtgctggagaagctgcagaagaaggaggcgacgatgcgcgaggagctcaccaagagggccaaggagctgcacgacaaggagttcaagctgccctaccagaacccctcgccgtgcaccgacgagagggcaggctgcgctgagtgctacaggagcaacgtgcaggacccgctcaagtgcgccgaggcggtcaagaggttcgaggcgtgcgttcgcatggcgattcggggcggtaccaccatgggagctgctcagtaggcagtggcgctgggagtcggggctgagtgagcgaggtgtcgagcacacgattttgcttctgtcgggatgattgattgaataacctgcctggatttttgtttggtgagacctgaaacaccatcagttgtagattaattctggtaacgggttgctactggtgttggcaacaagaggccatgagtgtccttgaatttaggggagtggctccatgctacttgcatacatattacaaaatgagacatgaaatttgcagggt

SEQ ID NO: 52012 - protein, 182 aa, Glycine max
  peptide (1)..(182): Ceres Seq. ID no. 13638839
MGDYTIRISTSLIEQLARDDEKQMKRRTRKPKPRKVVEQPEEPQDNGRELPTEPKSSPAPVLPFPPPMYLPVTPAPPPPPPVIQEVEAIRAVVVESEKVLEKLQKKEATMREELTKRAKELHDKEFKLPYQNPSPCTDERAGCAECYRSNVQDPLKCAEAVKRFEACVRMAIRGGTTMGAAQ

SEQ ID NO: 52013 - protein, 159 aa, Glycine max
  peptide (1)..(159): Ceres Seq. ID no. 13638840
MKRRTRKPKPRKVVEQPEEPQDNGRELPTEPKSSPAPVLPFPPPMYLPVTPAPPPPPPVIQEVEAIRAVVVESEKVLEKLQKKEATMREELTKRAKELHDKEFKLPYQNPSPCTDERAGCAECYRSNVQDPLKCAEAVKRFEACVRMAIRGGTTMGAAQ

SEQ ID NO: 52014 - protein, 115 aa, Glycine max
  peptide (1)..(115): Ceres Seq. ID no. 13638841
MYLPVTPAPPPPPPVIQEVEAIRAVVVESEKVLEKLQKKEATMREELTKRAKELHDKEFKLPYQNPSPCTDERAGCAECYRSNVQDPLKCAEAVKRFEACVRMAIRGGTTMGAAQ

SEQ ID NO: 52015 - DNA, 1022 bp, Glycine max
  misc_feature (1)..(1022): Ceres Seq. ID no. 15177108
aactcatccaccacagctttgctgcaaccaccagtgaagcactcttgatcaacaaactctagctgatcagtgctagctaagcttgctacatagcaagccatgggttactccaaaaacctaggggctagcctgtttgccatgctgctgcttgctccggccgtcctggcctccgaccctgaccctctccaagacttctgcgttgctgacctcgacggcaaggcggtctctgtgaacgggcatccatgcaagcccatgtcggaggccggtgacgacttcctcttctcgaccaagctggccaaggccggcaacacgtccaccccgaatggctcggccgtgacggagctcgacgtggccgagtggcccggtacgaacacgctgggtgtgtccatgaaccgtgtggacttcgcgccgggaggcaccaacccgccgcatgtccacccgcgcgggaccgagatcggcatggtgatgaaaggtgagctcctcgttggaatcctcggaagcctcgactccggaaacaagctctactctagggtggtgcgtgctggagagacgttcctcatcccacgcgggctcatgcacttccagttcaacgttggtaagacagaggcctacatggttgtttccttcaacagccagaaccccggcatcgttttcgtgccgctcatgctcttcggttccaacccgccaatccccacgccggtgctcaccaaggcactaagggtggaggccggggtcgtcgaacttctcaagtccaagttcgctggtgggtcttaatccctgggagcttgccctgaaatgatgagtatataatttgatatatgcatgccaatgagatttaataattgttcagcagaagacacgtattcaagcttctagctaagctcgcatgcagttgtaataagattgaataagttagcctcgcggtttagccttcagagccaatacgaggaatcgaagtgtactgcttttcattgtcgtatttgttcttttcactgaatggaatatataattatcattttcgc

SEQ ID NO: 52016 - protein, 224 aa, Glycine max
  peptide (1)..(224): Ceres Seq. ID no. 15177109
MGYSKNLGASLFAMLLLAPAVLASDPDPLQDFCVADLDGKAVSVNGHPCKPMSEAGDDFLFSTKLAKAGNTSTPNGSAVTELDVAEWPGTNTLGVSMNRVDFAPGGTNPPHVHPRGTEIGMVMKGELLVGILGSLDSGNKLYSRVVRAGETFLIPRGLMHFQFNVGKTEAYMVVSFNSQNPGIVFVPLMLFGSNPPIPTPVLTKALRVEAGVVELLKSKFAGGS

SEQ ID NO: 52017 - protein, 211 aa, Glycine max
  peptide (1)..(211): Ceres Seq. ID no. 15177110
MLLLAPAVLASDPDPLQDFCVADLDGKAVSVNGHPCKPMSEAGDDFLFSTKLAKAGNTSTPNGSAVTELDVAEWPGTNTLGVSMNRVDFAPGGTNPPHVHPRGTEIGMVMKGELLVGILGSLDSGNKLYSRVVRAGETFLIPRGLMHFQFNVGKTEAYMVVSFNSQNPGIVFVPLMLFGSNPPIPTPVLTKALRVEAGVVELLKSKFAGGS

SEQ ID NO: 52018 - protein, 173 aa, Glycine max
  peptide (1)..(173): Ceres Seq. ID no. 15177111
MSEAGDDFLFSTKLAKAGNTSTPNGSAVTELDVAEWPGTNTLGVSMNRVDFAPGGTNPPHVHPRGTEIGMVMKGELLVGILGSLDSGNKLYSRVVRAGETFLIPRGLMHFQFNVGKTEAYMVVSFNSQNPGIVFVPLMLFGSNPPIPTPVLTKALRVEAGVVELLKSKFAGGS

SEQ ID NO: 52019 - DNA, 926 bp, Glycine max
  misc_feature (1)..(926): Ceres Seq. ID no. 12609096
atcaaaatattcaaacctaaccccaaactcaaaccatgtcttcttccaactgtccgtcaccgttacccaccgtcacgaaacttcaagttgattccgttacttttccaccgtccgtcatctcaccggcttcctccaaccctctcttcctcggtggcgcaggtgtgcgaggtttggatatccaaggaaaattcgtgatcttcaccgtcatcggagtttacctagatcctgtctccgtcccgtcactctccgttaagtggaaaggtaaaacgacagaggagttaacggaatccgtccctttcttccgtgaaatcgtcacaggctcgtttgagaaattcatcaaagtgacgatgaagctgccgttaacgggacaacaatattcagagaaagtaacggagaactgtgtggcgatatggaaatcgttagggatttacacagactctgaggctaaagctgtggagagatttttggaagtcttcaaagacgaaacgttccctcctggtgcatccatcctcttcgctctcgcctctaaaggctctcttacggttgcgttttcgaaagatgatagcattcctgaaacgggaaaagcggtgatcgaaaataagttgttggcagaggcagttcttgaatcgatcattggaaagaacggtgtgtctcctggggctaggttgagtgttgccgagagattagctcagctgatgaatagtgacaaggtcgaagaagatgcaacaaagactgatcaagaggaagctaacaatctccccctaggagataaactggccaaagagaactgatggaatgggagttttttcttggttttttagtgctttatgtttctatatctaataacgttctgtttagttcccattgtatgttttaaatctgtttctgttcgtaagacttattaaataatcacatggagttggttc

SEQ ID NO: 52020 - protein, 251 aa, Glycine max
  peptide (1)..(251): Ceres Seq. ID no. 12609097
MSSSNCPSPLPTVTKLQVDSVTFPPSVISPASSNPLFLGGAGVRGLDIQGKFVIFTVIGVYLDPVSVPSLSVKWKGKTTEELTESVPFFREIVTGSFEKFIKVTMKLPLTGQQYSEKVTENCVAIWKSLGIYTDSEAKAVERFLEVFKDETFPPGASILFALASKGSLTVAFSKDDSIPETGKAVIENKLLAEAVLESIIGKNGVSPGARLSVAERLAQLMNSDKVEEDATKTDQEEANNLPLGDKLAKEN

SEQ ID NO: 52021 - protein, 147 aa, Glycine max
  peptide (1)..(147): Ceres Seq. ID no. 12609098
MKLPLTGQQYSEKVTENCVAIWKSLGIYTDSEAKAVERFLEVFKDETFPPGASILFALASKGSLTVAFSKDDSIPETGKAVIENKLLAEAVLESIIGKNGVSPGARLSVAERLAQLMNSDKVEEDATKTDQEEANNLPLGDKLAKEN

SEQ ID NO: 52022 - DNA, 974 bp, Glycine max
  misc_feature (1)..(974): Ceres Seq. ID no. 12609839
acacttgcaaattgagcaaacttaagcgcacatacgtacacagcagagcaaatagtttacgagcaccaaatagtagcaaggaagagagatcgatcgaagaggaatatcggaaacgatggccggccaaggagatgacgatgtcaaggtactgggcaccgcggcgagcatgttcgcgatccgcgtgcgcatggcgctgcacgtcaatggcgtgagctacgagtacctggagcaggacctgttccacaagggcgagctcctcctcgcctccaacccggtgcgcaaggccgtcccggtgctcatccacgccggcaggcccgtctgcgagtcgctcgccatcgtcgagtacgtcgacgaggtctgggccggcgccgcctcgctcctcccggcggacccctacgaccgcgccgtcgcccgcttctgggccgcctacatcgatgacaaggctgtccccacgtggataggcatcatgagggcagccacggaggaagacagggcggagagcctgtccggtgcgctcgcggcggtcgcgcccttggaggacgccttcgcccagtgctctagcgggaaggccttctttgccggcgactccatcggttacctcgacctcgtgcttgggtgcaacctcttctggatcgaggcgctgcgccacatgttcggcatcacggtcatcgacgccggcaggactccgcgcctggccgcctgggctgaaaggttcgtcgagacggaggctgcaaagaaggcggcgccgcccatggaaagcatgttggaggaggccgggaagctgcgggctatgtgggctgctgctgccgccccggctgccaagtaattagtttggagatttgcagtggtcacctttttttacatcagcgtcattggtcacttgtttacctaaaggattatgaatttcattgttctaagttgtgtgattgatttcattgcataataaatggtcatctatctttgtaaaagttgtg

SEQ ID NO: 52023 - protein, 236 aa, Glycine max
  peptide (1)..(236): Ceres Seq. ID no. 12609840
MAGQGDDDVKVLGTAASMFAIRVRMALHVNGVSYEYLEQDLFHKGELLLASNPVRKAVPVLIHAGRPVCESLAIVEYVDEVWAGAASLLPADPYDRAVARFWAAYIDDKAVPTWIGIMRAATEEDRAESLSGALAAVAPLEDAFAQCSSGKAFFAGDSIGYLDLVLGCNLFWIEALRHMFGITVIDAGRTPRLAAWAERFVETEAAKKAAPPMESMLEEAGKLRAMWAAAAAPAAK

SEQ ID NO: 52024 - protein, 219 aa, Glycine max
  peptide (1)..(219): Ceres Seq. ID no. 12609841
MFAIRVRMALHVNGVSYEYLEQDLFHKGELLLASNPVRKAVPVLIHAGRPVCESLAIVEYVDEVWAGAASLLPADPYDRAVARFWAAYIDDKAVPTWIGIMRAATEEDRAESLSGALAAVAPLEDAFAQCSSGKAFFAGDSIGYLDLVLGCNLFWIEALRHMFGITVIDAGRTPRLAAWAERFVETEAAKKAAPPMESMLEEAGKLRAMWAAAAAPAAK

SEQ ID NO: 52025 - protein, 212 aa, Glycine max
  peptide (1)..(212): Ceres Seq. ID no. 12609842
MALHVNGVSYEYLEQDLFHKGELLLASNPVRKAVPVLIHAGRPVCESLAIVEYVDEVWAGAASLLPADPYDRAVARFWAAYIDDKAVPTWIGIMRAATEEDRAESLSGALAAVAPLEDAFAQCSSGKAFFAGDSIGYLDLVLGCNLFWIEALRHMFGITVIDAGRTPRLAAWAERFVETEAAKKAAPPMESMLEEAGKLRAMWAAAAAPAAK

SEQ ID NO: 52026 - DNA, 916 bp, Glycine max
  misc_feature (1)..(916): Ceres Seq. ID no. 13594593
ctcgaaaggaaatgccagtggcattccagtgaacccacccccgactaggtccggacaccgccgctgcaatggctacggccatctccgcctccgcgctcctctcctccacattcgccggcgataggcgccatcgccgcgcggcgaggcccgcgccccgccgcgccgtcccggctggcctcacggtgcggtgcgagcagagcgacaaacagaagcggcagcctctttccgcactcgttccccgcgagcagcgcttcatgttcgagggcgacgagctctgcggacccgacatatggaacacaacatggtaccctaaggctgctgatcacgtaactaccgagaagacgtggtatgttgttgatgcagaggacaagattcttggcaggctagcatctgctatcgcagtgcatatgagagggaaaaatgagcccacatacactccaagtgtggacatgggggcttttgttattgtggttaatgcagagaaggttgctgtttctggtaaaaagaggtcacagaagctctataaaaggcactctggacggcccggtggaatgaaagaagaaacttttgatcagcttcagaaaaggattccggagagaattatcgaacatgctgtgcgtggcatgcttcctaagggcaggctgggcagaagactatttacccacctcaaggtgtacaaaggatcagagcacccgcatgtggctcaaaaacctgttccgctgcccatcagagacaaaagaataatgaagtctggctagagaacccctggatattgagaaaagatacagcaaccgtgcttccccgcccagtgttaggagcgtgacccgaacattcatgtcatctgtccacaagagtggtgtgtaacttttttgtaatttaattatgtttctgcaaaagctttcgattcctttcggtc

SEQ ID NO: 52027 - protein, 229 aa, Glycine max
  peptide (1)..(229): Ceres Seq. ID no. 13594594
MATAISASALLSSTFAGDRRHRRAARPAPRRAVPAGLTVRCEQSDKQKRQPLSALVPREQRFMFEGDELCGPDIWNTTWYPKAADHVTTEKTWYVVDAEDKILGRLASAIAVHMRGKNEPTYTPSVDMGAFVIVVNAEKVAVSGKKRSQKLYKRHSGRPGGMKEETFDQLQKRIPERIIEHAVRGMLPKGRLGRRLFTHLKVYKGSEHPHVAQKPVPLPIRDKRIMKSG

SEQ ID NO: 52028 - protein, 167 aa, Glycine max
  peptide (1)..(167): Ceres Seq. ID no. 13594595
MFEGDELCGPDIWNTTWYPKAADHVTTEKTWYVVDAEDKILGRLASAIAVHMRGKNEPTYTPSVDMGAFVIVVNAEKVAVSGKKRSQKLYKRHSGRPGGMKEETFDQLQKRIPERIIEHAVRGMLPKGRLGRRLFTHLKVYKGSEHPHVAQKPVPLPIRDKRIMKSG

SEQ ID NO: 52029 - protein, 116 aa, Glycine max
  peptide (1)..(116): Ceres Seq. ID no. 13594596
MRGKNEPTYTPSVDMGAFVIVVNAEKVAVSGKKRSQKLYKRHSGRPGGMKEETFDQLQKRIPERIIEHAVRGMLPKGRLGRRLFTHLKVYKGSEHPHVAQKPVPLPIRDKRIMKSG

SEQ ID NO: 52030 - DNA, 873 bp, Glycine max
  misc_feature (1)..(873): Ceres Seq. ID no. 15178123
agattaacgttttcttcattcagtcatactaccgccctctgcagcaccagactgcatcacgcatggcagctccggcggcgcagccgccgccaaagaccgtcctgcgggtggcggcgatctccggctcgctgcgcagggcgtcggccaacaccggcctcatccgcgccgctgcggagatttgcagggagtccatcccgggcctgcacatcgaccacgtcgacatctcggagctgccgctgctcaacaccgacctcgaggccagcggccggttcccgccggccgtcgaggcgttccgcgacaaagtccgcgcggccgattgcttcctcttcgcctcgcccgagtacaactactccatttcagggcctctgaagaacgcgctggactggggatcacggccgcccaactgctgggccgaccgagccgcggcgatgctgagcgcgtcgggcggctccggcggcagccggtcgcagtaccacatccggcaggtcggggtgtttcttgacatccacttcatcaacaggccggagctcttcaccaaggcacacctgcccccgagaaagttcgacgcggacggcaacctcatcgactcggagaccaaggagcaggtcaggaagatgctcctctcgctgcaagccttcgcactcaagctccagggtgcagactctgtctgaacaggggaactgatgcctgaatttgtttcttcagacgaacggtggtgctctgctcattagatggactgagcagatcgtcacaaactccaaatgcgaaagccatatactggttgatgctccatgatatctggaataattcttcatctgcgactgaacattccggtggcacagtaatgcaaatctatttttattatcttgcccc

SEQ ID NO: 52031 - protein, 222 aa, Glycine max
  peptide (1)..(222): Ceres Seq. ID no. 15178124
INVFFIQSYYRPLQHQTASRMAAPAAQPPPKTVLRVAAISGSLRRASANTGLIRAAAEICRESIPGLHIDHVDISELPLLNTDLEASGRFPPAVEAFRDKVRAADCFLFASPEYNYSISGPLKNALDWGSRPPNCWADRAAAMLSASGGSGGSRSQYHIRQVGVFLDIHFINRPELFTKAHLPPRKFDADGNLIDSETKEQVRKMLLSLQAFALKLQGADSV

SEQ ID NO: 52032 - protein, 202 aa, Glycine max
  peptide (1)..(202): Ceres Seq. ID no. 15178125
MAAPAAQPPPKTVLRVAAISGSLRRASANTGLIRAAAEICRESIPGLHIDHVDISELPLLNTDLEASGRFPPAVEAFRDKVRAADCFLFASPEYNYSISGPLKNALDWGSRPPNCWADRAAAMLSASGGSGGSRSQYHIRQVGVFLDIHFINRPELFTKAHLPPRKFDADGNLIDSETKEQVRKMLLSLQAFALKLQGADSV

SEQ ID NO: 52033 - protein, 122 aa, Glycine max
  peptide (1)..(122): Ceres Seq. ID no. 15178126
RLTFSSFSHTTALCSTRLHHAWQLRRRSRRQRPSCGWRRSPARCAGRRPTPASSAPLRRFAGSPSRACTSTTSTSRSCRCSTPTSRPAAGSRRPSRRSATKSARPIASSSPRPSTTTPFQGL

SEQ ID NO: 52034 - DNA, 899 bp, Glycine max
  misc_feature (1)..(899): Ceres Seq. ID no. 13594705
aaaagatcagagcaaaacaggcagcgaaaagtacagcagacagggaaaaaagaagagatagctttgcacgggattcgccggcgccgccgcggagcagcacaagcacaggcagcagccagcagcagcagcgagccccggcgagcgagcgaggatgcactccttcgggcaccgcgcgaacgcggtggcgacgttcgcgctgacgatactcgccgccatgtgcttcgccgcctccttctccgacagcttcaactcccccacccccgccgcctccgtcaagatcctcaacatcaactggttccagaaggaggccaacgccaacgacgaggttagcatgacgctgaacatctccgccgacctttcgtcgctcttcacgtggaacacgaaacaggtgtttgttttcgtggcagctgagtatgagactccacaaaatgccctgaatcaagtgtccctttgggatggaatcataccggcgaaggagcacgccaagttcttgatccataccacaaacaagtacagatttatcgaccaggggagcaacctgaagggcagggacttcaacctgacgatgcactggcacatcatgcccaagacgggcaagatgttcgcggacaagatcgtcatgacggggtaccagctccccgagcagtacagataggccgccgccatctctgaacaagagctgctagccctatctatatatggtccgctgtgctgtgcaaacgcaggaagggtttagtggcagtggcagtggttgcgttgctggcgccgggccttttttgctctaaatcttggcgggacaggacatgtaaacttgctcatgagcttgtatgttggccgaatatgcgcgagacgaaaccgtaatgcaaaaaaaaaaaaaaaaaagcttatcgataccgtcg

SEQ ID NO: 52035 - protein, 167 aa, Glycine max
  peptide (1)..(167): Ceres Seq. ID no. 13594706
MHSFGHRANAVATFALTILAAMCFAASFSDSFNSPTPAASVKILNINWFQKEANANDEVSMTLNISADLSSLFTWNTKQVFVFVAAEYETPQNALNQVSLWDGIIPAKEHAKFLIHTTNKYRFIDQGSNLKGRDFNLTMHWHIMPKTGKMFADKIVMTGYQLPEQYR

SEQ ID NO: 52036 - protein, 146 aa, Glycine max
  peptide (1)..(146): Ceres Seq. ID no. 13594707
MCFAASFSDSFNSPTPAASVKILNINWFQKEANANDEVSMTLNISADLSSLFTWNTKQVFVFVAAEYETPQNALNQVSLWDGIIPAKEHAKFLIHTTNKYRFIDQGSNLKGRDFNLTMHWHIMPKTGKMFADKIVMTGYQLPEQYR

SEQ ID NO: 52037 - protein, 109 aa, Glycine max
  peptide (1)..(109): Ceres Seq. ID no. 13594708
KRSEQNRQRKVQQTGKKEEIALHGIRRRRRGAAQAQAAASSSSEPRRASEDALLRAPRERGGDVRADDTRRHVLRRLLLRQLQLPHPRRLRQDPQHQLVPEGGQRQRRG

SEQ ID NO: 52038 - DNA, 1517 bp, Glycine max
  misc_feature (1)..(1517): Ceres Seq. ID no. 15178246
ctctcctccccaccctcgcccgctgaggtttccgccgcgatctcgtctcgatccgcactctctatctgagatttggaatcgggcgaggcctgcagctcctgccgacatggcgctcgttttgcattcgggcagtggcaacaagaatgccttcaaggcacttattgctgcagagtactgtggggtcaaggttgagctgaccaagaactttgagatgggtgtctcaaacaaaacccctgaattcatcaagatgaatccccttggcaaggttcctgttcttgagactcctgatggtgctgtttttgagagcaatgctattgcacgctatgttgctcgctcaaagggtgacaacctgctttggggtggttctcttattgaatatgcgcgtgttgagcaatggatggactttggtgccacagaggttgatcccaatatcgcaaggtggctgtacccaaggcttggttatatgccttacaatgcccagtctgaggaattcggcattgctggattgaagagggcccttgaagcattgaacacacacctggcatcaaacacattccttgttgggcattctgtcactctggctgatattgtcatgacatgcaacctctaccatggttttgctcggatcttgaccaagactttcacatctgagttccctcatgttgagaggtacttctggaccatggttaaccagcctaacttcaagaaggtcattggcgatttcaagcaggcagaggttgtacctcctgttcagaagaaggctgctcctgctaaaccaaaggaggccaagaaagaggctcccaaggcggccccaaagccagcagaggttgaggcaccagaggaagaggcaccaaagccaaagcccaaaaatccccttgatctactgccaccaagcaagatggtacttgatgactggaagaggctatactcaaacactaagagcaacttccatgatgttgctgttaaaggtttctgggagatgtatgacccagagggctactctctctggttctgtgactacaagtaccaggaagagaacaccgtgtcctacgtgaccctgaacaaggtcggcgggttcctgcagcggatggatctgtgccgcaagtacgcttttggcaagatgctcgtgattggttctgaggcgcccttcaaagtcaaggggctgtggctcttccgtgggcaggacatccctgagttcgtcatgaatgaggtctatgacatggagctctacgagtggactaaggttgacctctccgacgaggcccagaagaagcgtgtcgaggccatgatcgaggaccttgagccgtttgaggggcaggccttgctggacgccaagtgcttcaagtaagcgaacagtgcctgggatcgtgatggcggtggcaaagaaactatctaggacttgaaattcagtgtcgaaacagttggtcttttttttggaagagtttgcttgttacttaatggctatttgacctggtgaactagttaattttgtgctatgctaagagtttttgggtatc

SEQ ID NO: 52039 - protein, 448 aa, Glycine max
  peptide (1)..(448): Ceres Seq. ID no. 15178247
SPPHPRPLRFPPRSRLDPHSLSEIWNRARPAAPADMALVLHSGSGNKNAFKALIAAEYCGVKVELTKNFEMGVSNKTPEFIKMNPLGKVPVLETPDGAVFESNAIARYVARSKGDNLLWGGSLIEYARVEQWMDFGATEVDPNIARWLYPRLGYMPYNAQSEEFGIAGLKRALEALNTHLASNTFLVGHSVTLADIVMTCNLYHGFARILTKTFTSEFPHVERYFWTMVNQPNFKKVIGDFKQAEVVPPVQKKAAPAKPKEAKKEAPKAAPKPAEVEAPEEEAPKPKPKNPLDLLPPSKMVLDDWKRLYSNTKSNFHDVAVKGFWEMYDPEGYSLWFCDYKYQEENTVSYVTLNKVGGFLQRMDLCRKYAFGKMLVIGSEAPFKVKGLWLFRGQDIPEFVMNEVYDMELYEWTKVDLSDEAQKKRVEAMIEDLEPFEGQALLDAKCFK

SEQ ID NO: 52040 - protein, 413 aa, Glycine max
  peptide (1)..(413): Ceres Seq. ID no. 15178248
MALVLHSGSGNKNAFKALIAAEYCGVKVELTKNFEMGVSNKTPEFIKMNPLGKVPVLETPDGAVFESNAIARYVARSKGDNLLWGGSLIEYARVEQWMDFGATEVDPNIARWLYPRLGYMPYNAQSEEFGIAGLKRALEALNTHLASNTFLVGHSVTLADIVMTCNLYHGFARILTKTFTSEFPHVERYFWTMVNQPNFKKVIGDFKQAEVVPPVQKKAAPAKPKEAKKEAPKAAPKPAEVEAPEEEAPKPKPKNPLDLLPPSKMVLDDWKRLYSNTKSNFHDVAVKGFWEMYDPEGYSLWFCDYKYQEENTVSYVTLNKVGGFLQRMDLCRKYAFGKMLVIGSEAPFKVKGLWLFRGQDIPEFVMNEVYDMELYEWTKVDLSDEAQKKRVEAMIEDLEPFEGQALLDAKCFK

SEQ ID NO: 52041 - protein, 378 aa, Glycine max
  peptide (1)..(378): Ceres Seq. ID no. 15178249
MGVSNKTPEFIKMNPLGKVPVLETPDGAVFESNAIARYVARSKGDNLLWGGSLIEYARVEQWMDFGATEVDPNIARWLYPRLGYMPYNAQSEEFGIAGLKRALEALNTHLASNTFLVGHSVTLADIVMTCNLYHGFARILTKTFTSEFPHVERYFWTMVNQPNFKKVIGDFKQAEVVPPVQKKAAPAKPKEAKKEAPKAAPKPAEVEAPEEEAPKPKPKNPLDLLPPSKMVLDDWKRLYSNTKSNFHDVAVKGFWEMYDPEGYSLWFCDYKYQEENTVSYVTLNKVGGFLQRMDLCRKYAFGKMLVIGSEAPFKVKGLWLFRGQDIPEFVMNEVYDMELYEWTKVDLSDEAQKKRVEAMIEDLEPFEGQALLDAKCFK

SEQ ID NO: 52042 - DNA, 679 bp, Glycine max
  misc_feature (1)..(679): Ceres Seq. ID no. 13594900
agattttgatcggtttctggaataagaagaagaggaaagaaaggatggggagattgttcttggtgaatttggaaggcaagtcttacagttgtaggcactgtaagactagtatcgctctctgcgatgatgtcgtctccaagtcttttcaatcacgccatgggaaagcttacctcttcagtaaggtagcgaatgtgtatgctgggaagaaggaagataggatgatgatgacgggtatgcacaccgttgtcgatatttactgcgtcaaatgcggctcttatgttggatggagatatgagtttgcttttgagaagaaccaaaagtacaaggaaggcaaatctgttctcgaaaggtacaaggtctgcggtccggatgggaacaattactgggtggcggctcaagaagttgaagccggagaaagtgatactgatgaatgaatgaatgaatgaatgaatgaatgaatgaatgaatgaatgaatgaatgatatgcttcttcatctcaataattcaccatatctgatttgtacattctcctctcctcttatcattcttttttcaatgtcttcttctcttttctcattttgtgaaccatccagcttccattaggactccttcggagatcaactgtttgtgttgcaactacttgtggaacacatgcaattataatttatctcattatctt

SEQ ID NO: 52043 - protein, 143 aa, Glycine max
  peptide (1)..(143): Ceres Seq. ID no. 13594901
ILIGFWNKKKRKERMGRLFLVNLEGKSYSCRHCKTSIALCDDVVSKSFQSRHGKAYLFSKVANVYAGKKEDRMMMTGMHTVVDIYCVKCGSYVGWRYEFAFEKNQKYKEGKSVLERYKVCGPDGNNYWVAAQEVEAGESDTDE

SEQ ID NO: 52044 - protein, 129 aa, Glycine max
  peptide (1)..(129): Ceres Seq. ID no. 13594902
MGRLFLVNLEGKSYSCRHCKTSIALCDDVVSKSFQSRHGKAYLFSKVANVYAGKKEDRMMMTGMHTVVDIYCVKCGSYVGWRYEFAFEKNQKYKEGKSVLERYKVCGPDGNNYWVAAQEVEAGESDTDE

SEQ ID NO: 52045 - protein, 71 aa, Glycine max
  peptide (1)..(71): Ceres Seq. ID no. 13594903
MMMTGMHTVVDIYCVKCGSYVGWRYEFAFEKNQKYKEGKSVLERYKVCGPDGNNYWVAAQEVEAGESDTDE

SEQ ID NO: 52046 - DNA, 971 bp, Glycine max
  misc_feature (1)..(971): Ceres Seq. ID no. 13638849
atccaacacaaaaccaaacaggtcttacgcaacaaatggagagcacccagagcaacacaagcgtgatgaaccatttcatcctggtgcacggcctctgccacggggcctggtgttggtacaaggtggttgcggcgcttcaggcagcggggcaccgtgtcacggcggtcgacctggccgcgtccggcgctcacccggcgcgcatcgacgaggtgcactcgttcgaggagtactcccagcctctgcttgacgtagtggccgcggcgccagagggtgacggcgagaggctgattctggtcgggcacagccacggcgggctcagcttggcgctagccatggagaggttccccggcaaggtcgccgccgccgtgttcgcagccgccgggatgccgtgcgttggcaagcacatgggcgtcaccaccgaggagttcatgcgaaggacatcatcggaaggactcatggactgcaagatgctgccaatcaataacaaccacggtgcaggggttgcaatgataatgggcccaaacttcttagcacacaagaactaccagcaaagttcacctgaggatttggccctggcaaaaatgttggtgagaccgggaaacctgttcatggaggatccggtgatgaaggatgcaagcctgctcaccgataccaactacgggtcggtgaagaaggtatatgtggtagcaaaggctgatggctccagcaccgaggagatgcagcgttggatggtgttgttgagccccggcacggaggctgaggagatcgcgggagctgaccacgccatcatgagctcaaggcctagggagctctgtgatgctctggtcaagatcgccgacagcttaaatacttgctaaattgtacgatatatatccctggaaatcaatgtaggtgtgtacttgattttcatctaaaaataaatatgttcagtgatactattaaatcaatggaaattaagtagtattaccttc

SEQ ID NO: 52047 - protein, 284 aa, Glycine max
  peptide (1)..(284): Ceres Seq. ID no. 13638850
PTQNQTGLTQQMESTQSNTSVMNHFILVHGLCHGAWCWYKVVAALQAAGHRVTAVDLAASGAHPARIDEVHSFEEYSQPLLDVVAAAPEGDGERLILVGHSHGGLSLALAMERFPGKVAAAVFAAAGMPCVGKHMGVTTEEFMRRTSSEGLMDCKMLPINNNHGAGVAMIMGPNFLAHKNYQQSSPEDLALAKMLVRPGNLFMEDPVMKDASLLTDTNYGSVKKVYVVAKADGSSTEEMQRWMVLLSPGTEAEEIAGADHAIMSSRPRELCDALVKIADSLNTC

SEQ ID NO: 52048 - protein, 273 aa, Glycine max
  peptide (1)..(273): Ceres Seq. ID no. 13638851
MESTQSNTSVMNHFILVHGLCHGAWCWYKVVAALQAAGHRVTAVDLAASGAHPARIDEVHSFEEYSQPLLDVVAAAPEGDGERLILVGHSHGGLSLALAMERFPGKVAAAVFAAAGMPCVGKHMGVTTEEFMRRTSSEGLMDCKMLPINNNHGAGVAMIMGPNFLAHKNYQQSSPEDLALAKMLVRPGNLFMEDPVMKDASLLTDTNYGSVKKVYVVAKADGSSTEEMQRWMVLLSPGTEAEEIAGADHAIMSSRPRELCDALVKIADSLNTC

SEQ ID NO: 52049 - protein, 263 aa, Glycine max
  peptide (1)..(263): Ceres Seq. ID no. 13638852
MNHFILVHGLCHGAWCWYKVVAALQAAGHRVTAVDLAASGAHPARIDEVHSFEEYSQPLLDVVAAAPEGDGERLILVGHSHGGLSLALAMERFPGKVAAAVFAAAGMPCVGKHMGVTTEEFMRRTSSEGLMDCKMLPINNNHGAGVAMIMGPNFLAHKNYQQSSPEDLALAKMLVRPGNLFMEDPVMKDASLLTDTNYGSVKKVYVVAKADGSSTEEMQRWMVLLSPGTEAEEIAGADHAIMSSRPRELCDALVKIADSLNTC

SEQ ID NO: 52050 - DNA, 1035 bp, Glycine max
  misc_feature (1)..(1035): Ceres Seq. ID no. 13638595
ccagtcatcctcagttacttcaccacggtgctaactacctagcgctgcaccaaccaaccagtagtcaattaagcagcgcttgaccatggcgcccaagcagctccccgctgtcctcctcgccgcctgcgccaccgtcctggccctcgccgcgccattgctcgccggcgaccccgacatgctccaggacttctgcgtcgccgactacaaatccctcgacggcccattgcggttgaacgggttcccgtgcaagaggccggagaacgtgacggcggacgacttcttctcctccgcgctggcactcccgggcaacaccggcaaccccgtcgggtctgcggtcacggcggcgaacgtggagaagctcccggggctcaacacgctgggcgtctccatgtcccgcgtggactacgcgccctggggcgtgaacccgccgcacacccacccacgtgccaccgagatcatctacgtgcttgagggctccctcgacgtcggcttcgtcaccactgccggcaagctcttcgcccgcaccgtctgcaagggcgagctcttcgtctttccccgcggcctcgtccactaccagaagaacaacggcggcgcgccggccatggcgatctcggcattcaacagtcagcttccgggcacgcagtccctcgccgtggcgatgttcggtgcctcaccaccggtgcccaccgacgtgctggccagggcgctccagatcgacggcggcctggtggagaccatcaagtccaagttcccgccaaagtaactagccttgcatttgcatgcatgaggttggttgggtctgttctacgtgcgtacgtgctgctaataatgacgacgaccaagtgcagtttcaattcatttgcttgacaatatcttttgtaccatactctgatcgattcctttgtgtcggtgcatgtttagtgaagggtgtcgcctgttttactgttaattgttgctttttgttcacgaatgagctaccggtgattaatttgtatgtgtccattattgctgaaaatgaatgtgccttattgcttt

SEQ ID NO: 52051 - protein, 225 aa, Glycine max
  peptide (1)..(225): Ceres Seq. ID no. 13638596
MAPKQLPAVLLAACATVLALAAPLLAGDPDMLQDFCVADYKSLDGPLRLNGFPCKRPENVTADDFFSSALALPGNTGNPVGSAVTAANVEKLPGLNTLGVSMSRVDYAPWGVNPPHTHPRATEIIYVLEGSLDVGFVTTAGKLFARTVCKGELFVFPRGLVHYQKNNGGAPAMAISAFNSQLPGTQSLAVAMFGASPPVPTDVLARALQIDGGLVETIKSKFPPK

SEQ ID NO: 52052 - protein, 195 aa, Glycine max
  peptide (1)..(195): Ceres Seq. ID no. 13638597
MLQDFCVADYKSLDGPLRLNGFPCKRPENVTADDFFSSALALPGNTGNPVGSAVTAANVEKLPGLNTLGVSMSRVDYAPWGVNPPHTHPRATEIIYVLEGSLDVGFVTTAGKLFARTVCKGELFVFPRGLVHYQKNNGGAPAMAISAFNSQLPGTQSLAVAMFGASPPVPTDVLARALQIDGGLVETIKSKFPPK

SEQ ID NO: 52053 - protein, 124 aa, Glycine max
  peptide (1)..(124): Ceres Seq. ID no. 13638598
MSRVDYAPWGVNPPHTHPRATEIIYVLEGSLDVGFVTTAGKLFARTVCKGELFVFPRGLVHYQKNNGGAPAMAISAFNSQLPGTQSLAVAMFGASPPVPTDVLARALQIDGGLVETIKSKFPPK

SEQ ID NO: 52054 - DNA, 748 bp, Glycine max
  misc_feature (1)..(748): Ceres Seq. ID no. 13594904
atccaccacaacgaaagcaacagccagcgatcgagacagcagcaagaggctcacttagctactgccactagtcgcgatcacatagccactcgatcgacatggcctgcaagtcggcgtccctgctgatcctcgcggcgctggtggcggccgcggcgtgcgcgggctcggcaacggcgcgcgacgtcccggccgggaaggaggatgcggtgaagcggccggagacgttccaggaggggacggtgctgatcccggggatcgggcggtacgagctgggcagccactacaggccggacatcggcgggctggaccacagcatcccggtcgccgccagggcgcagttcatccccggcgccgacgacacctgggtgcccaaccccggcttcgaggtgcccaaccccttccgccccgcagccaccacggagtccccctgatgcatggatcgagtcggccggccaacgcgtccacgttacgcctatcgatcaatgggtagctagcctgctacaattcaatttccgctagcttttggttgctacaataaaatagctgctatgcataggcaaggcatgcgtatgcatgtatcagcgactgcgtgcgagcgcgctgtcgacgttttttgtgtgtgattggagagtgtacctgtatggggtatgcatggatgcgtaggaaggaagcatccatcgcatatctcgctttgctttgttgttgccaagtaatgtgtagttcaatgtatttttctttttagttcggt

SEQ ID NO: 52055 - protein, 110 aa, Glycine max
  peptide (1)..(110): Ceres Seq. ID no. 13594905
MACKSASLLILAALVAAAACAGSATARDVPAGKEDAVKRPETFQEGTVLIPGIGRYELGSHYRPDIGGLDHSIPVAARAQFIPGADDTWVPNPGFEVPNPFRPAATTESP

SEQ ID NO: 52056 - DNA, 700 bp, Glycine max
  misc_feature (1)..(700): Ceres Seq. ID no. 12609863
gattagcccactttgcttggcttaggattgttcttgcatcatcttaaaaaaatggcttcgctttctttactcagcggcggtgctctccaggctcgttgcgcaagacatgcacatgttagcccacgcgcggcgcatgctaccaaagccgcgcctccgtcctactctctaaccggcgcctctcgcaggaacctgctgttttccctgacggcagcgacggtggtgacgggactgcagcctgcatcaatggcggagactattccgttattcgggatcagaaagaagctgaagaaggcagaagaagaagcggtggagatcgtgaaggaaggcttcgagacggcggagaaaggactagagacggcggagaaaggaatagaggcggcggagaagggagtagagacggcggagaaagaaatcgagacggcggttagttacaacggattgacacaggcgggagcagtcgtggctgctgagttcgtgggagttcttgtcgcaacttcggtcgtcaacggcattttaggacctgaagcccagaagtcgtagacttttatcatttcaagactgaaagacatttgatctttaagtgtaatattgtgtctaaaagtgttgttcattacgcgttgaacgtatcgtaattttgtttgagttttatatataatatattttaaatttattttcatttggaataagtgaactcgtgtgg

SEQ ID NO: 52057 - protein, 162 aa, Glycine max
  peptide (1)..(162): Ceres Seq. ID no. 12609864
MASLSLLSGGALQARCARHAHVSPRAAHATKAAPPSYSLTGASRRNLLFSLTAATVVTGLQPASMAETIPLFGIRKKLKKAEEEAVEIVKEGFETAEKGLETAEKGIEAAEKGVETAEKEIETAVSYNGLTQAGAVVAAEFVGVLVATSVVNGILGPEAQKS

SEQ ID NO: 52058 - protein, 98 aa, Glycine max
  peptide (1)..(98): Ceres Seq. ID no. 12609865
MAETIPLFGIRKKLKKAEEEAVEIVKEGFETAEKGLETAEKGIEAAEKGVETAEKEIETAVSYNGLTQAGAVVAAEFVGVLVATSVVNGILGPEAQKS

SEQ ID NO: 52059 - DNA, 1071 bp, Glycine max
  misc_feature (1)..(1071): Ceres Seq. ID no. 12609352
atcgaaacctccaccaactctgacgctcgttgattgagcgagagccacttggatcaccatgaccgccacctcgcggccacagcatcccaacgggagcctagccccggcctccgacggcggcgagtccttcgccaagttcttcgagtgctggatcttggagcagtcccgtgacctggccgcgctccgcgccgcggccacggcgcggcccgacgacgctgacctccggcgcctcgtcgatcgtgtcctcggccactacgagcactactaccgcgccaagtccgcggccgcctccgccgatgtgctccccatgttcgcgccctcgtggatctccgccaccgagagcctctacctctggtgcggcggctggcgccccacttccgcgatccagctgctctactccaagtccggcctgcagctcgaggcccagctcccggccttcctcgacggcggcagcctcggggacggtgacctgggcggcctctccgcggagcagctccaggccgccgaccagctgcagcgccgcaccatccggagggaacgggagatcgaggaggccgccgccggcgcgcaggagtcgttggcgacgacgaagatggtggagcttgccggaaagggagggatggacgcggcggaggggatggagctggagatggatgccaaggcggaggcgatgaagcgcgtgctggagatggcggacgggctgaggctggagacgctgcgcggcgtggtggggctgctccggcctgcccaggccgtgcacttcctcgtggccgccgcggagctccacctcgccgtgcacaagttcggccggcgcaaggacggcgccgcggcggcggagtgagcctgcaggctgctggtggcgcgcgcaagtggttgctctgctccgcgcaacgctcgtcgtctagctagctccgagctgccttcgttttgcctggtcaacgcgaggtgtcgcgataagctttgaccgtgatccccttctgtttggtcagcatgtgcgttctgcacattgtgtgaaacctgtggtaacttgtacgaagtgggctagctacttgtgtatgtataatgcacaag

SEQ ID NO: 52060 - protein, 260 aa, Glycine max
  peptide (1)..(260): Ceres Seq. ID no. 12609353
MTATSRPQHPNGSLAPASDGGESFAKFFECWILEQSRDLAALRAAATARPDDADLRRLVDRVLGHYEHYYRAKSAAASADVLPMFAPSWISATESLYLWCGGWRPTSAIQLLYSKSGLQLEAQLPAFLDGGSLGDGDLGGLSAEQLQAADQLQRRTIRREREIEEAAAGAQESLATTKMVELAGKGGMDAAEGMELEMDAKAEAMKRVLEMADGLRLETLRGVVGLLRPAQAVHFLVAAAELHLAVHKFGRRKDGAAAAE

SEQ ID NO: 52061 - protein, 177 aa, Glycine max
  peptide (1)..(177): Ceres Seq. ID no. 12609354
MFAPSWISATESLYLWCGGWRPTSAIQLLYSKSGLQLEAQLPAFLDGGSLGDGDLGGLSAEQLQAADQLQRRTIRREREIEEAAAGAQESLATTKMVELAGKGGMDAAEGMELEMDAKAEAMKRVLEMADGLRLETLRGVVGLLRPAQAVHFLVAAAELHLAVHKFGRRKDGAAAAE

SEQ ID NO: 52062 - DNA, 286 bp, Glycine max
  misc_feature (1)..(286): Ceres Seq. ID no. 13594684
aaatcgccattgttgctgcaccactctgattcatttcgattgagctttctttttttttcctgctaatggctcgtcggtctggagactgcatgagatgcctggtgatcttcgcggtggtatctgctttagtagtgtgcggacctgctctttactggagattcaacaaaggtttcgttggatccactcgtaaaagctctgtttgtcctccttgcgtctgtgattgcccacctcctgtatccctcctcgagatcgctcctgggcttgcaaatctcaccgttacagattg

SEQ ID NO: 52063 - protein, 73 aa, Glycine max
  peptide (1)..(73): Ceres Seq. ID no. 13594685
MARRSGDCMRCLVIFAVVSALVVCGPALYWRFNKGFVGSTRKSSVCPPCVCDCPPPVSLLEIAPGLANLTVTD

SEQ ID NO: 52064 - protein, 65 aa, Glycine max
  peptide (1)..(65): Ceres Seq. ID no. 13594686
MRCLVIFAVVSALVVCGPALYWRFNKGFVGSTRKSSVCPPCVCDCPPPVSLLEIAPGLANLTVTD

SEQ ID NO: 52065 - DNA, 1276 bp, Glycine max
  misc_feature (1)..(1276): Ceres Seq. ID no. 12609869
agaacatcctaatcgaaaactctgaccctctccaccctttttgttcctcgcccctcctcctcggcggccgcctccccgcaccccctccccccacgccgccgccgccatggccatgaagggacccggcctcttcaccgacatcggcaagaaggccaaggatctgctcaccagggactacacctacgaccagaagctctccgtctccaccgtcagctcctccggagtggccgtcacttccacagctgtgaagaagggagggctttattctcttgatgtagcatcagcttacaagtataagaataatcttgttgatgttaaagtggacacagaatcaaatatctctactaccttgactgtcttggatgtcctgccatccacaaagcttgtgacgtctatcaaatttcctgattacaatgctggaaaggtggaggtgcaatacttccacgaccatgcaacttttgctgccgctgttggcatgaagccctctcctgtggtcgatttttctttggtagtaggccctaaaggacttgccttcggtggggaggctgggtttgacacttcttcaggaaagtttaccaagtacactggtggtttcagtgtaaccaagcctgacttccatgcttcagctattctggccgacaaaggtgacaccatcaaagtgtcaggtgtgtatcaccttgatgagaagcagaaggcttcggccgtggctgaatttacccggaagctctcaacgaacgagaacacactgacagttggtggcctgtacaccgtcgaccctcagacagctgtgaaggcaaggctcaacaacactggaaagcttgctgctctcctccagcatgaggttaaaccaaagtcactcttgacgatatctggtgagttcgacaccaaggccttggacagagcacccaagtttgggctgtcactcgcgctcaagccctgatgagatcatacgtggatgatagcgattgaacatcggattctttggttattttttgtgaagctatggccaataatttgttccgcagacatgttctgttaaatctctggaggtttaggtgctctgtgggcaggatccgataggccttcacctggatttttgtccaggcgtttactttttgatgatcgaagtacttccccattgatagatgtatgcagcttgtttctttctactgtgagttccgagtagctttcacggtagtatgttacttgaagaagaagctacacttgatttttcatgcggtgttgattgattttaccgctagttgagatttactgc

SEQ ID NO: 52066 - protein, 277 aa, Glycine max
  peptide (1)..(277): Ceres Seq. ID no. 12609870
MAMKGPGLFTDIGKKAKDLLTRDYTYDQKLSVSTVSSSGVAVTSTAVKKGGLYSLDVASAYKYKNNLVDVKVDTESNISTTLTVLDVLPSTKLVTSIKFPDYNAGKVEVQYFHDHATFAAAVGMKPSPVVDFSLVVGPKGLAFGGEAGFDTSSGKFTKYTGGFSVTKPDFHASAILADKGDTIKVSGVYHLDEKQKASAVAEFTRKLSTNENTLTVGGLYTVDPQTAVKARLNNTGKLAALLQHEVKPKSLLTISGEFDTKALDRAPKFGLSLALKP

SEQ ID NO: 52067 - protein, 275 aa, Glycine max
  peptide (1)..(275): Ceres Seq. ID no. 12609871
MKGPGLFTDIGKKAKDLLTRDYTYDQKLSVSTVSSSGVAVTSTAVKKGGLYSLDVASAYKYKNNLVDVKVDTESNISTTLTVLDVLPSTKLVTSIKFPDYNAGKVEVQYFHDHATFAAAVGMKPSPVVDFSLVVGPKGLAFGGEAGFDTSSGKFTKYTGGFSVTKPDFHASAILADKGDTIKVSGVYHLDEKQKASAVAEFTRKLSTNENTLTVGGLYTVDPQTAVKARLNNTGKLAALLQHEVKPKSLLTISGEFDTKALDRAPKFGLSLALKP

SEQ ID NO: 52068 - protein, 154 aa, Glycine max
  peptide (1)..(154): Ceres Seq. ID no. 12609872
MKPSPVVDFSLVVGPKGLAFGGEAGFDTSSGKFTKYTGGFSVTKPDFHASAILADKGDTIKVSGVYHLDEKQKASAVAEFTRKLSTNENTLTVGGLYTVDPQTAVKARLNNTGKLAALLQHEVKPKSLLTISGEFDTKALDRAPKFGLSLALKP

SEQ ID NO: 52069 - DNA, 1024 bp, Glycine max
  misc_feature (1)..(1024): Ceres Seq. ID no. 13594687
aaaattcctcttgccctcccagcttcgctgatttcttcgtttggaggataccctcaaaggtgttctactgtgaaagttagccaattttgaagatgaattgttataatcttcagaagaatgccttctcagcctgtgaagagatgagaggctctcttcccattgctgatcagaatggacctgtcttttgccctaagccacgccgagctggggttttaatgaacttgcctattcgaccagtaaaatggcatttaggtcaacaagctgaggggtctgattcaaaagttggggcagaactacttgacattgttctcaagagggacattgttcttaagagggagagttatggggaagaatttgcaaatcagataccttcatctcctccatatttttgtggttctcctccagttcgggcttctaatcccttaatccaagatgctcgatttggagacgaagagtactctcttatatcaacaatttcatcgccttcaggtttactgtctccatcttcagcatctcgcaaagcaggatgtgctaggatgaagtttggacttaaaccggctgcagttagagtagaaggatttgattgcctcagcagggattgccagaattccggcatccctgctgttgcttaaactccattcatagaagtgtatatagaagaagccaagtgccattacttataaaacgtgacttaactagagagagttttgaatgtttcggagggaagtaagaaattcagttagttgtgtatatagcaaatgcttttttgtatggtgaggtgaatcatctcattgtgagtatccgtggcaagtttagggagctgcagaaaaagcaaaccttctgttcttgaagtttgatgtgtagagagcatgtctttttgtaatataaggaggttgtatcggagtgtcttttaaaccttttaggctatcaccgtaagagtgttctgtataggaattggtgattttggttgtcgtccctgtaaatatatggcttctcgtgccggcttatcgataccgtcgacctc

SEQ ID NO: 52070 - protein, 179 aa, Glycine max
  peptide (1)..(179): Ceres Seq. ID no. 15221403
MNCYNLQKNAFSACEEMRGSLPIADQNGPVFCPKPRRAGVLMNLPIRPVKWHLGQQAEGSDSKVGAELLDIVLKRDIVLKRESYGEEFANQIPSSPPYFCGSPPVRASNPLIQDARFGDEEYSLISTISSPSGLLSPSSASRKAGCARMKFGLKPAAVRVEGFDCLSRDCQNSGIPAVA

SEQ ID NO: 52071 - protein, 163 aa, Glycine max
  peptide (1)..(163): Ceres Seq. ID no. 15221404
MRGSLPIADQNGPVFCPKPRRAGVLMNLPIRPVKWHLGQQAEGSDSKVGAELLDIVLKRDIVLKRESYGEEFANQIPSSPPYFCGSPPVRASNPLIQDARFGDEEYSLISTISSPSGLLSPSSASRKAGCARMKFGLKPAAVRVEGFDCLSRDCQNSGIPAVA

SEQ ID NO: 52072 - protein, 138 aa, Glycine max
  peptide (1)..(138): Ceres Seq. ID no. 15221405
MNLPIRPVKWHLGQQAEGSDSKVGAELLDIVLKRDIVLKRESYGEEFANQIPSSPPYFCGSPPVRASNPLIQDARFGDEEYSLISTISSPSGLLSPSSASRKAGCARMKFGLKPAAVRVEGFDCLSRDCQNSGIPAVA

SEQ ID NO: 52073 - DNA, 987 bp, Glycine max
  misc_feature (1)..(987): Ceres Seq. ID no. 13638855
gcaccgctcgcttccgcccctccccaacctgcgtaccctcccccccaccgccgcgccgcccgcctcggctgaacgacggccgggccctctcggcggcggcgatcgacgatggtggtggccacggaggaaatggcggtctactgcttcgacaccctcgtcgcccactacagcggcgagcagccgccgccgcccgccttcgaggagggcgtccacccactgtttgtcacctggaagaaggctaccaatggttccgagccacgcctaaggggatgcattggaactttggagccccgtcagattgtaagtggcttcaaggattatgcgctgacaagtgccctgagggatcggcgcttttctccgatacagtccaaagagctgccatatttggaatgcacagtttctatattgactgaatacgaaactgcactcaaccaccttgattgggaggttggaaagcatggtttaattattgagttcaccgatcctgactataatgtaagacggagtggaacttatttacctgaggttgctgcccatgaaggatggacacaactagagaccattgactcgctcatgaggaaggctggctacaatggcaccatcactgagtctttgaggaagaaaatccgcgtcacccgctaccagagtaccctgtacaccatgcactatggtgaatatactgcatatgtcaagaagaacagaggttaaattaacggggaacccatagttaatggattcaaaccaggccagtgatttatctgtactgtagcaggtactacaactatttataatttggcttggaaggaattggcgtgagaattagtttaaaacaaatcaattctagtcattgatctgccatcatgccatttcattccaaagaatgtggggtgccatgtcaacagccctcgtgtcattctgggacacaaattaaatggtgatggttatgtatctgtaagcatatgcactttgattacaaataattgtgtg

SEQ ID NO: 52074 - protein, 199 aa, Glycine max
  peptide (1)..(199): Ceres Seq. ID no. 13638856
MVVATEEMAVYCFDTLVAHYSGEQPPPPAFEEGVHPLFVTWKKATNGSEPRLRGCIGTLEPRQIVSGFKDYALTSALRDRRFSPIQSKELPYLECTVSILTEYETALNHLDWEVGKHGLIIEFTDPDYNVRRSGTYLPEVAAHEGWTQLETIDSLMRKAGYNGTITESLRKKIRVTRYQSTLYTMHYGEYTAYVKKNRG

SEQ ID NO: 52075 - protein, 192 aa, Glycine max
  peptide (1)..(192): Ceres Seq. ID no. 13638857
MAVYCFDTLVAHYSGEQPPPPAFEEGVHPLFVTWKKATNGSEPRLRGCIGTLEPRQIVSGFKDYALTSALRDRRFSPIQSKELPYLECTVSILTEYETALNHLDWEVGKHGLIIEFTDPDYNVRRSGTYLPEVAAHEGWTQLETIDSLMRKAGYNGTITESLRKKIRVTRYQSTLYTMHYGEYTAYVKKNRG

SEQ ID NO: 52076 - protein, 136 aa, Glycine max
  peptide (1)..(136): Ceres Seq. ID no. 13638858
TARFRPSPTCVPSPPPPRRPPRLNDGRALSAAAIDDGGGHGGNGGLLLRHPRRPLQRRAAAAARLRGGRPPTVCHLEEGYQWFRATPKGMHWNFGAPSDCKWLQGLCADKCPEGSALFSDTVQRAAIFGMHSFYID

SEQ ID NO: 52077 - DNA, 937 bp, Glycine max
  misc_feature (1)..(937): Ceres Seq. ID no. 12609419
ccggtaaatctgggttttgacaaactacttgaaattgatcaagggaatgaggatcgttggactgacgggtggaatagcgtctggaaagagcaccgtttccaatctgttcaagtcccatgatgttcccattgtagatgctgacgttgtcgctcgcgaggtgttaatgaaagggagtggtggttggaagaaagtcgttgcagcttttggggacgaaattcttcttgaaaatggagaagtcaatagacccaggcttggccaaattgtcttctccgatccggataagcgtcaatttctcaaccgattgctagctccttacatatcacgtgggatattttggaaggttttgaagctatggatgaagggatacaaggtcattgttcttgatgtgcctttgttattcgaggccaagatggacaagttcacaaagcccattattgttgtatgggttgatcctgagacgcagattcagcggctcttggcgagagacaagtccagtgaggaggatgctcggaataggattaatgctcaaatgtcactggatgttaaaaggggtaaagctgatatagttatagataacactggttcattggatgacttgaatcaacagtttcagaaggtttttgttgaggtcacaagaccattgacatggactgagtttttgcgctccaggcagggagtcttcgccattcttgcttccttcacctcaggtgttgttctgtttatgaagacattcaacaatcatacccacatttcatagccacctgtgttctacacatttgttaatgtattatttacattccctctaaagccctaaacccatgagttcttttgtgtatctcttttcaaattccccaacaaatcctgctgttcaaagttgattaatttaaatttgaagatacaacttcaagttttaaataaccatgatattatatttccc

SEQ ID NO: 52078 - protein, 236 aa, Glycine max
  peptide (1)..(236): Ceres Seq. ID no. 12609420
MRIVGLTGGIASGKSTVSNLFKSHDVPIVDADVVAREVLMKGSGGWKKVVAAFGDEILLENGEVNRPRLGQIVFSDPDKRQFLNRLLAPYISRGIFWKVLKLWMKGYKVIVLDVPLLFEAKMDKFTKPIIVVWVDPETQIQRLLARDKSSEEDARNRINAQMSLDVKRGKADIVIDNTGSLDDLNQQFQKVFVEVTRPLTWTEFLRSRQGVFAILASFTSGVVLFMKTFNNHTHIS

SEQ ID NO: 52079 - protein, 197 aa, Glycine max
  peptide (1)..(197): Ceres Seq. ID no. 12609421
MKGSGGWKKVVAAFGDEILLENGEVNRPRLGQIVFSDPDKRQFLNRLLAPYISRGIFWKVLKLWMKGYKVIVLDVPLLFEAKMDKFTKPIIVVWVDPETQIQRLLARDKSSEEDARNRINAQMSLDVKRGKADIVIDNTGSLDDLNQQFQKVFVEVTRPLTWTEFLRSRQGVFAILASFTSGVVLFMKTFNNHTHIS

SEQ ID NO: 52080 - protein, 133 aa, Glycine max
  peptide (1)..(133): Ceres Seq. ID no. 12609422
MKGYKVIVLDVPLLFEAKMDKFTKPIIVVWVDPETQIQRLLARDKSSEEDARNRINAQMSLDVKRGKADIVIDNTGSLDDLNQQFQKVFVEVTRPLTWTEFLRSRQGVFAILASFTSGVVLFMKTFNNHTHIS

SEQ ID NO: 52081 - DNA, 834 bp, Glycine max
  misc_feature (1)..(834): Ceres Seq. ID no. 12609388
aatttctgtaagatcatcaaaagttgatacaccaagctgatttataaacctctacacactcaatttctagcatacaaaaataaaagaaatgggaacagagatggtaatgattcacgaggttccttttcctccacagatcatcacttccaagcccttctctcttcttggccaaggcatcactgacatcgagatccatttccttcaagtgaagttcacggccataggagtttacttagatccttcagatgttaaaacccatcttgacaaatggaaaggcaagaccggaaaggatcttgccggtgatgacgacttcttcgacgccctggcctccggggagattgaaaaggttataagagtggtggtgataaaggaaataaaaggagctcagtacggtgtgcagctagagaattcggtgagagatcgtttggctgctgaggataagtacgaggaagaagaagaaaacgagctcgagaaagttgtaggattttttcagtctaagtacttcaagactcattccatcatcacttaccgtttctcagccaaagatggtatctgcgagattggatttgaaacggaaggtaaagaagaggacaaattgaaagtagagaatgcgaatgtggtagggatgatgcagaaatggtacttgtctggaagtcgaggagtttcaccgtccaccatcgtctccctcgccgattctctgtccgcagttttaacctaaaactccttatataagcctatatcatctatgtgtgtgttttatgttgttgtattatgtcgttcttaagtgagacatcgtgtttggttatctttataaaatgttgaatggttgtcttt

SEQ ID NO: 52082 - protein, 209 aa, Glycine max
  peptide (1)..(209): Ceres Seq. ID no. 12609389
MGTEMVMIHEVPFPPQIITSKPFSLLGQGITDIEIHFLQVKFTAIGVYLDPSDVKTHLDKWKGKTGKDLAGDDDFFDALASGEIEKVIRVVVIKEIKGAQYGVQLENSVRDRLAAEDKYEEEEENELEKVVGFFQSKYFKTHSIITYRFSAKDGICEIGFETEGKEEDKLKVENANVVGMMQKWYLSGSRGVSPSTIVSLADSLSAVLT

SEQ ID NO: 52083 - protein, 205 aa, Glycine max
  peptide (1)..(205): Ceres Seq. ID no. 12609390
MVMIHEVPFPPQIITSKPFSLLGQGITDIEIHFLQVKFTAIGVYLDPSDVKTHLDKWKGKTGKDLAGDDDFFDALASGEIEKVIRVVVIKEIKGAQYGVQLENSVRDRLAAEDKYEEEEENELEKVVGFFQSKYFKTHSIITYRFSAKDGICEIGFETEGKEEDKLKVENANVVGMMQKWYLSGSRGVSPSTIVSLADSLSAVLT

SEQ ID NO: 52084 - protein, 203 aa, Glycine max
  peptide (1)..(203): Ceres Seq. ID no. 12609391
MIHEVPFPPQIITSKPFSLLGQGITDIEIHFLQVKFTAIGVYLDPSDVKTHLDKWKGKTGKDLAGDDDFFDALASGEIEKVIRVVVIKEIKGAQYGVQLENSVRDRLAAEDKYEEEEENELEKVVGFFQSKYFKTHSIITYRFSAKDGICEIGFETEGKEEDKLKVENANVVGMMQKWYLSGSRGVSPSTIVSLADSLSAVLT

SEQ ID NO: 52085 - DNA, 1048 bp, Glycine max
  misc_feature (1)..(1048): Ceres Seq. ID no. 15177067
atagatcttcttcttcgccaccggagagctcagccgtcgcactgaatcaaatcaacctagaaagcaatctctagatctgttgtctccttcacatcttcttccagagatgtataataacatgggacctcagcctgggatgcctatgcctcaggcagttcctcagcctaacccttttgggaatgccttctctggtcccggctctggacttatcagaagtggcttgggagcttatggggagaagattttcggatccagctctgagtatgtgcagagcaacataactcgttacttctccgatcctcaatactattttcaagtgaatgaccagtatgtgaggaacaagttgaaggttgttctgcttcctttccttcataggggacactggactagaatctcagagccagttgggggtaggctttcatacaagcccccgatatatgatattaatgcaccagacttatacattccgcttatggcattcggcacatacgttgttcttgctggtttgtctctaggactctatgggaagttttctccggaagctctgaactggctttttgtgaaaggaatggttggctggttcttgcaagtcatgctgctgaagataacattgctttcattgggtagcggcgaagcacccctcttggatatcgtggcgtatgctggctatactttcacgggtctctgcttagctgttcttggcaagatcatctggggatactcttactatgctctccttccgtggacctgcttgtgcagcggggtcttcctagtgaagacgatgaagcgagttctctatgcggaagctaggagttctgactcgagcaggcatcactacctcttgatctttgtagcgttagctcagtttcctcttttgatctggcttggtaacattagtgtcaattggctcttttgaattgcattatgtttaagatgttgtgaaaagaaacacctctgatgttatgttagcagaatttaagtttttatttatttcttggtttagacttttgtcaaacataaatatatgatgaaagaaaagtgttatccc

SEQ ID NO: 52086 - protein, 269 aa, Glycine max
  peptide (1)..(269): Ceres Seq. ID no. 15177068
MYNNMGPQPGMPMPQAVPQPNPFGNAFSGPGSGLIRSGLGAYGEKIFGSSSEYVQSNITRYFSDPQYYFQVNDQYVRNKLKVVLLPFLHRGHWTRISEPVGGRLSYKPPIYDINAPDLYIPLMAFGTYVVLAGLSLGLYGKFSPEALNWLFVKGMVGWFLQVMLLKITLLSLGSGEAPLLDIVAYAGYTFTGLCLAVLGKIIWGYSYYALLPWTCLCSGVFLVKTMKRVLYAEARSSDSSRHHYLLIFVALAQFPLLIWLGNISVNWLF

SEQ ID NO: 52087 - protein, 265 aa, Glycine max
  peptide (1)..(265): Ceres Seq. ID no. 15177069
MGPQPGMPMPQAVPQPNPFGNAFSGPGSGLIRSGLGAYGEKIFGSSSEYVQSNITRYFSDPQYYFQVNDQYVRNKLKVVLLPFLHRGHWTRISEPVGGRLSYKPPIYDINAPDLYIPLMAFGTYVVLAGLSLGLYGKFSPEALNWLFVKGMVGWFLQVMLLKITLLSLGSGEAPLLDIVAYAGYTFTGLCLAVLGKIIWGYSYYALLPWTCLCSGVFLVKTMKRVLYAEARSSDSSRHHYLLIFVALAQFPLLIWLGNISVNWLF

SEQ ID NO: 52088 - protein, 259 aa, Glycine max
  peptide (1)..(259): Ceres Seq. ID no. 15177070
MPMPQAVPQPNPFGNAFSGPGSGLIRSGLGAYGEKIFGSSSEYVQSNITRYFSDPQYYFQVNDQYVRNKLKVVLLPFLHRGHWTRISEPVGGRLSYKPPIYDINAPDLYIPLMAFGTYVVLAGLSLGLYGKFSPEALNWLFVKGMVGWFLQVMLLKITLLSLGSGEAPLLDIVAYAGYTFTGLCLAVLGKIIWGYSYYALLPWTCLCSGVFLVKTMKRVLYAEARSSDSSRHHYLLIFVALAQFPLLIWLGNISVNWLF

SEQ ID NO: 52089 - DNA, 965 bp, Glycine max
  misc_feature (1)..(965): Ceres Seq. ID no. 12609130
acacaaagtcacaagctcaacgtcggtcactgttgaggaagctagctagcttgccaggcatccgccatggccgccccgcatggcaccgtgctcgggggagccgactcgttctcccagctcccgctcgtccgagtcgccgcccagcagccggccgactccaccatccgcctcttcggctgcgacttctccaacgacgccgtcgctgccggcgaccagctgcccaaggcggacgccgcggcggcggccggggagggggagacccgcaagttcgagtgccactactgctgccgcaacttcccgacgtcgcaggcgctgggaggacaccagaacgcgcacaagcgggagcggcagcacgcgcgccgggcgcacctcgaggcctccctcgccgccgcctacctcccggccggcgcgcacgtctacggtgccctgttcggcggctatggccaccaccaggccgctccgatgccgccgccgcagtacccggtgtggccggggatgtacggcagcgtggcgcggtccgcggcatacggcggcatgaccgtgccggggatggtgtggaggccgacgccagtgggtgctgatgcttttggtgccgccggccggcacgatgaagcgacggcggccgttgctggcaccggagaggtgcctggtaagggtgggcacaatgcggtgatgagcgtggtggcgacgctgccgtcgtgcctcaccggcgggtcgcccacggagatcggtaggtccgaaatgatggggcagaaggagggcgttgtaagcttggacctctgtctgtagttcgttgcaattactgtcgatctaggtgttatctttaccggaattgttcaggtcaatcaccatgtttagtcttatataattactgttaccatctgtaaccgagggcgttcatttgtttttaaaattagaatgcatattaagttggcatgcatttaatttgaataatgtgtactcct

SEQ ID NO: 52090 - protein, 240 aa, Glycine max
  peptide (1)..(240): Ceres Seq. ID no. 12609131
MAAPHGTVLGGADSFSQLPLVRVAAQQPADSTIRLFGCDFSNDAVAAGDQLPKADAAAAAGEGETRKFECHYCCRNFPTSQALGGHQNAHKRERQHARRAHLEASLAAAYLPAGAHVYGALFGGYGHHQAAPMPPPQYPVWPGMYGSVARSAAYGGMTVPGMVWRPTPVGADAFGAAGRHDEATAAVAGTGEVPGKGGHNAVMSVVATLPSCLTGGSPTEIGRSEMMGQKEGVVSLDLCL

SEQ ID NO: 52091 - protein, 192 aa, Glycine max
  peptide (1)..(192): Ceres Seq. ID no. 12609132
TKSQAQRRSLLRKLASLPGIRHGRPAWHRARGSRLVLPAPARPSRRPAAGRLHHPPLRLRLLQRRRRCRRPAAQGGRRGGGRGGGDPQVRVPLLLPQLPDVAGAGRTPERAQAGAAARAPGAPRGLPRRRLPPGRRARLRCPVRRLWPPPGRSDAAAAVPGVAGDVRQRGAVRGIRRHDRAGDGVEADASGC

SEQ ID NO: 52092 - protein, 152 aa, Glycine max
  peptide (1)..(152): Ceres Seq. ID no. 12609133
MAPCSGEPTRSPSSRSSESPPSSRPTPPSASSAATSPTTPSLPATSCPRRTPRRRPGRGRPASSSATTAAATSRRRRRWEDTRTRTSGSGSTRAGRTSRPPSPPPTSRPARTSTVPCSAAMATTRPLRCRRRSTRCGRGCTAAWRGPRHTAA

SEQ ID NO: 52093 - DNA, 699 bp, Glycine max
  misc_feature (1)..(699): Ceres Seq. ID no. 14301998
aaatccttaacagcatccacgatctaagcgtgtgcacgtacgccgcagctccagaaccaggacacgcccactgtatacgcagtcgcacagctcgatcgcaatggcgtcgctcgtcgccgtccagccggtcgccgtgaggggcctggccggcagctccatctccggccgcaagctcgccgtccggccctcctccgccgccgtctcccgctccacccgcagggctcgcggggcggcggtggtggccaagtacggggagaagagcgtctacttcgacctggacgacatcgccaacacgacggggcagtgggacctgtacggcagcgacgccgcgtcgccctacaacggcctgcagagcaagttcttcaacaccttcgccgcgcccttcaccaagcgggggctgctgctcaaggtgctgctgctcggcggcggctcgctgctcgcctacgtcagcgccaccgcctcccccgacctgctccccatcaagaaggggccccagctgccgcccaccccgggaccacgcggcaagatctaaagctctgcaatcaaggccttcttcctcctcccgcctcgcctcgtgcttgtgtaccatggatctcgtcgattccccccttatctatgtgcttgctctgttgatacttgatctttgtactttgtatcagtaattggaaagatgctgcgtgcatggtgcatgcaattatc

SEQ ID NO: 52094 - protein, 143 aa, Glycine max
  peptide (1)..(143): Ceres Seq. ID no. 14301999
MASLVAVQPVAVRGLAGSSISGRKLAVRPSSAAVSRSTRRARGAAVVAKYGEKSVYFDLDDIANTTGQWDLYGSDAASPYNGLQSKFFNTFAAPFTKRGLLLKVLLLGGGSLLAYVSATASPDLLPIKKGPQLPPTPGPRGKI

SEQ ID NO: 52095 - DNA, 970 bp, Glycine max
  misc_feature (1)..(970): Ceres Seq. ID no. 12609394
acaaacacatttcttcttttaacaacttacaaacacattcttaatataggcaacgatggcagaaactacgcagaggaagagggaggtgtttgcgaccaagaatgaattgtcggtagcattggctaagtacactgctcatctctcggccaagttctgcaaggagaaaggaattttcaccgttgttctctccggctgtggcctcatcgattggctcggcaagttgttggaatcaccatacaaagaatcagtcgaatggtcaaagtggcacgtcttttgggtggacgagagggtctgttcacatgaagatcaaaacagcaactacaaactcgccatggatggttttatctccaaggttgggattccgaaggagaacatctacgcaatcgacaaacaatgtgccgctgatggtgacgcggagcgttgtgcgacgctctacgaggagtgcttgaggaacctggtgaaggaaaagatactcccactatgtccaaatggccaatttcctcagttcgatctccagctccaagggatgggtcctgatggccacatggcgtctctcttcccggaacgtcctcagatcaatgtgacggacaaatgggtcactcacattaccgactccccaaaaccgccaccaaggagaatcacattgactttaccggtcatcaactcgtctttgtacaatcttgtggccgtttgcgacgacaacacagagcaatgtgcacgctccatcgctgatatctttaagcacaacaatctcgccttacctgctgctcatcttactgcccaagtcgaacaaatgtggtaccttgacaaagcagctgcttcattgctttagagagctaaacacattaataaatggtgtcctttatatgaataataaaataatctctccaagtcatgctttgtggagcgtgttgttggagtttgcttgcttgcatgtgtgtcgaataaccggctaataatgcattttgcg

SEQ ID NO: 52096 - protein, 258 aa, Glycine max
  peptide (1)..(258): Ceres Seq. ID no. 12609395
MAETTQRKREVFATKNELSVALAKYTAHLSAKFCKEKGIFTVVLSGCGLIDWLGKLLESPYKESVEWSKWHVFWVDERVCSHEDQNSNYKLAMDGFISKVGIPKENIYAIDKQCAADGDAERCATLYEECLRNLVKEKILPLCPNGQFPQFDLQLQGMGPDGHMASLFPERPQINVTDKWVTHITDSPKPPPRRITLTLPVINSSLYNLVAVCDDNTEQCARSIADIFKHNNLALPAAHLTAQVEQMWYLDKAAASLL

SEQ ID NO: 52097 - protein, 166 aa, Glycine max
  peptide (1)..(166): Ceres Seq. ID no. 12609396
MDGFISKVGIPKENIYAIDKQCAADGDAERCATLYEECLRNLVKEKILPLCPNGQFPQFDLQLQGMGPDGHMASLFPERPQINVTDKWVTHITDSPKPPPRRITLTLPVINSSLYNLVAVCDDNTEQCARSIADIFKHNNLALPAAHLTAQVEQMWYLDKAAASLL

SEQ ID NO: 52098 - DNA, 877 bp, Glycine max
  misc_feature (1)..(877): Ceres Seq. ID no. 13594696
attcattcattctctcacagccatcgatccatctaaactaggtggagcagtacatacacaacaaagcaaggcataatggcctcaggagtgtttggtacccccatttcggagaagacggtgctagccactggagagtataaggaaccaattactcaaaaggatgttgcagactataccatgaagatgatcaacgccggtggtaaagatattaacgcacaaaccttcgtcgacaacctcaaggagaggtacggtaacggaatatctgtaaaatgcctcatctacaatgccaccggtgccactttgaacttggctaactacaaagattggcacggccatatctacgatacaccctacccatcagatattcagaatgggcaatggggggcatttctccacgtccacccaagtggtgctgcggttggttcagctggtgccgttgtgtatcgtaccaaggtcccctccagcaggagctcctgcgattggttgttctcctggaccgtcccctacattggtgccaatgggatctacaccgaaatccgtgaggaagggcactatccaagtgtgggaagctgggattatatctatgatgtgaagctggaaaatgcagatctcaactctactgataaaaactatggatatgtttccaagactaacatcggtgaaggctctaccatgaacgcccgtggagttttccagtttccctactagatctctttgcgagcatcgaggggttattgtggtcttcaaagtcttttgtggcgaggacgtttggagatattattttcctttactgtctttgtggtgcatttcctaatattcggtgttcatgaataatcaaggaagaagacaataaaagagatgtaatgtgcaattttat

SEQ ID NO: 52099 - protein, 210 aa, Glycine max
  peptide (1)..(210): Ceres Seq. ID no. 13594697
MASGVFGTPISEKTVLATGEYKEPITQKDVADYTMKMINAGGKDINAQTFVDNLKERYGNGISVKCLIYNATGATLNLANYKDWHGHIYDTPYPSDIQNGQWGAFLHVHPSGAAVGSAGAVVYRTKVPSSRSSCDWLFSWTVPYIGANGIYTEIREEGHYPSVGSWDYIYDVKLENADLNSTDKNYGYVSKTNIGEGSTMNARGVFQFPY

SEQ ID NO: 52100 - protein, 176 aa, Glycine max
  peptide (1)..(176): Ceres Seq. ID no. 13594698
MKMINAGGKDINAQTFVDNLKERYGNGISVKCLIYNATGATLNLANYKDWHGHIYDTPYPSDIQNGQWGAFLHVHPSGAAVGSAGAVVYRTKVPSSRSSCDWLFSWTVPYIGANGIYTEIREEGHYPSVGSWDYIYDVKLENADLNSTDKNYGYVSKTNIGEGSTMNARGVFQFPY

SEQ ID NO: 52101 - protein, 174 aa, Glycine max
  peptide (1)..(174): Ceres Seq. ID no. 13594699
MINAGGKDINAQTFVDNLKERYGNGISVKCLIYNATGATLNLANYKDWHGHIYDTPYPSDIQNGQWGAFLHVHPSGAAVGSAGAVVYRTKVPSSRSSCDWLFSWTVPYIGANGIYTEIREEGHYPSVGSWDYIYDVKLENADLNSTDKNYGYVSKTNIGEGSTMNARGVFQFPY

SEQ ID NO: 52102 - DNA, 1072 bp, Glycine max
  misc_feature (1)..(1072): Ceres Seq. ID no. 15172803
gatccacttcccccacttccgccgcctcccaccgaatgggccgcaagaggagggctagggtttcctgcgacagcgacggcgacgacgtcgagatgaacggcgatgagcccgcccccgccgccgcggagagcaagagcctctacgagatattaggggttgagagcacagcttcacaacaggagataaaaaaggcatatcacaagttggccttgcgtcttcacccagataagaatcctggagatgaggaagccaacgaaaaatttcagcagctgcagaaggtgatatctattcttggagaccaggagaaaagggcattgtatgatgagactggaattactgatgatgatgcactggttggagaagctgcagacaatctccaagcgtacttcagaacagtgtacagaaaggtcacagaggctgacattgaagaatttgaagctaagtacagagggtcagactctgagaaaaaggatttaaaggaactgtacacaaaatttaagggcaacatgaacagacttttctgctctatgatttgctcagatgccaagcttgattctcaccgcttcaaagatataattgatcaggcaattgctgaaggcgagctgaagtccaccaaagtgtatgcgaagtgggctaaaaagatttctgagatagaaccacccacaaacccattggagaggagagtgaagaaaaagaagagccaggagagcgacctcatcctggcgatctcgcagcgcagggaacagaggaaggagcggtttgactctgttctgtcatctataatgtccaagtgtgacgacaacaaggcgggcagctcagagcccacggaggaggagtttgagcgcgctcggcagaggcttgagaagaagcgcaccaaggggcgcaaatgatatgaatcttgacatgcatgcgcaaatgatatgaatcttgacatgcatgcaggcccttcgagaaaaaaatgggtgttgagtggactggagtggaggggttgtgtcgcaactctagtgtcgctttgttttatgagtgggcgtgtgtaagtaactgaatgcaagtgtggtgtggttttagatgt

SEQ ID NO: 52103 - protein, 295 aa, Glycine max
  peptide (1)..(295): Ceres Seq. ID no. 15172804
STSPTSAASHRMGRKRRARVSCDSDGDDVEMNGDEPAPAAAESKSLYEILGVESTASQQEIKKAYHKLALRLHPDKNPGDEEANEKFQQLQKVISILGDQEKRALYDETGITDDDALVGEAADNLQAYFRTVYRKVTEADIEEFEAKYRGSDSEKKDLKELYTKFKGNMNRLFCSMICSDAKLDSHRFKDIIDQAIAEGELKSTKVYAKWAKKISEIEPPTNPLERRVKKKKSQESDLILAISQRREQRKERFDSVLSSIMSKCDDNKAGSSEPTEEEFERARQRLEKKRTKGRK

SEQ ID NO: 52104 - protein, 284 aa, Glycine max
  peptide (1)..(284): Ceres Seq. ID no. 15172805
MGRKRRARVSCDSDGDDVEMNGDEPAPAAAESKSLYEILGVESTASQQEIKKAYHKLALRLHPDKNPGDEEANEKFQQLQKVISILGDQEKRALYDETGITDDDALVGEAADNLQAYFRTVYRKVTEADIEEFEAKYRGSDSEKKDLKELYTKFKGNMNRLFCSMICSDAKLDSHRFKDIIDQAIAEGELKSTKVYAKWAKKISEIEPPTNPLERRVKKKKSQESDLILAISQRREQRKERFDSVLSSIMSKCDDNKAGSSEPTEEEFERARQRLEKKRTKGRK

SEQ ID NO: 52105 - protein, 265 aa, Glycine max
  peptide (1)..(265): Ceres Seq. ID no. 15172806
MNGDEPAPAAAESKSLYEILGVESTASQQEIKKAYHKLALRLHPDKNPGDEEANEKFQQLQKVISILGDQEKRALYDETGITDDDALVGEAADNLQAYFRTVYRKVTEADIEEFEAKYRGSDSEKKDLKELYTKFKGNMNRLFCSMICSDAKLDSHRFKDIIDQAIAEGELKSTKVYAKWAKKISEIEPPTNPLERRVKKKKSQESDLILAISQRREQRKERFDSVLSSIMSKCDDNKAGSSEPTEEEFERARQRLEKKRTKGRK

SEQ ID NO: 52106 - DNA, 1109 bp, Glycine max
  misc_feature (1)..(1109): Ceres Seq. ID no. 13594604
agttaggtcaactattaggcatgggctcgtccttgtcgaatctcaacgacggggagacgaatgattcctccatggggcctagcctcggcgatataccggaaagctgcatcgccgccgtgttcatgtacctgactcccccggagatttgcaacctcgccggtcttaaccgttcgtttcgcggcgcggcttcgtcggatttcgtctgggagaagaagctcccgccgaattaccaggatctgctcgatttgttgccgccggagagggttcttggtctctcgaagaaggatatcttcgctgtgctctctcgtcctatccccttcgacggtgataacaaggagctgtggattgatagagttacgggacgggtttgtatggcgatttctgcgaggggaatggctattactgggattgaagaccggagatattggaattggattccgaccaatgagtccaggttccatgttgtagcctacttacagcagatttggtggtttgaagtcgatgggacagtgacattccatctcccaccgggtatctactctctatcattcagaatccatctaggcggattcgcaaagaagtcggggagacgtgtgtgcaactacgaacacactcacggctgggatttgaagcctgttaggttttcgctttcgacttctgatggtcaagaggcatcatgtgagtattacttggatgatgtaaagagagaagaatcaaccgggcaccacaagcgcggtttctggatcgattataaggttggggagttcgtagtgactggatcagaaccatctactgagatcaaatggtccatgaaacagattgactgcacccactcgaaaggcgggctatgtgttgattcagtcttcattaacccaattggtgatttgaaagattacagaacgaaatctttttgtgaaatagattgaagaaagaagattcttttgaaggtaattttcattttattgttgtgcatttcatggagttgagttttgtttttttttacttcatactcgtttttgctacatagtttaggcgagaggactctctttgtgcattttcacatgtttataagtttggatgactatgatgtatccaaccaaagttaatct

SEQ ID NO: 52107 - protein, 307 aa, Glycine max
  peptide (1)..(307): Ceres Seq. ID no. 13594605
LGQLLGMGSSLSNLNDGETNDSSMGPSLGDIPESCIAAVFMYLTPPEICNLAGLNRSFRGAASSDFVWEKKLPPNYQDLLDLLPPERVLGLSKKDIFAVLSRPIPFDGDNKELWIDRVTGRVCMAISARGMAITGIEDRRYWNWIPTNESRFHVVAYLQQIWWFEVDGTVTFHLPPGIYSLSFRIHLGGFAKKSGRRVCNYEHTHGWDLKPVRFSLSTSDGQEASCEYYLDDVKREESTGHHKRGFWIDYKVGEFVVTGSEPSTEIKWSMKQIDCTHSKGGLCVDSVFINPIGDLKDYRTKSFCEID

SEQ ID NO: 52108 - protein, 301 aa, Glycine max
  peptide (1)..(301): Ceres Seq. ID no. 13594606
MGSSLSNLNDGETNDSSMGPSLGDIPESCIAAVFMYLTPPEICNLAGLNRSFRGAASSDFVWEKKLPPNYQDLLDLLPPERVLGLSKKDIFAVLSRPIPFDGDNKELWIDRVTGRVCMAISARGMAITGIEDRRYWNWIPTNESRFHVVAYLQQIWWFEVDGTVTFHLPPGIYSLSFRIHLGGFAKKSGRRVCNYEHTHGWDLKPVRFSLSTSDGQEASCEYYLDDVKREESTGHHKRGFWIDYKVGEFVVTGSEPSTEIKWSMKQIDCTHSKGGLCVDSVFINPIGDLKDYRTKSFCEID

SEQ ID NO: 52109 - protein, 284 aa, Glycine max
  peptide (1)..(284): Ceres Seq. ID no. 13594607
MGPSLGDIPESCIAAVFMYLTPPEICNLAGLNRSFRGAASSDFVWEKKLPPNYQDLLDLLPPERVLGLSKKDIFAVLSRPIPFDGDNKELWIDRVTGRVCMAISARGMAITGIEDRRYWNWIPTNESRFHVVAYLQQIWWFEVDGTVTFHLPPGIYSLSFRIHLGGFAKKSGRRVCNYEHTHGWDLKPVRFSLSTSDGQEASCEYYLDDVKREESTGHHKRGFWIDYKVGEFVVTGSEPSTEIKWSMKQIDCTHSKGGLCVDSVFINPIGDLKDYRTKSFCEID

SEQ ID NO: 52110 - DNA, 849 bp, Glycine max
  misc_feature (1)..(849): Ceres Seq. ID no. 13638609
acccacactgatagcaacaaacatccacctaaaatgaagctgcacgtagccttcttcctcctggtagccatggccgcgacggcccgggccgtgacgttcgacgcgtcgaacacggcgtcgggcaccaccggcggcaagcgcttcgacaacgccgtcggcctcgcgtactcaaagcaggtcctctccgacgcctccaccttcatctggagcaccttcaaccagcgcgccgctgccgaccgcaagcccgtcgacgcggtcaccctcgtcgtggaggacatcgacggcgtcgccttcaccagcggcaacggcatccacctcagcgctagctacgtcggcggctacacctccggcgacgtcaagaaggaggtgaccggcgtgctgtaccacgaggcgacgcacgtgtggcagtggaacgggcagggcgcggcgaacggcggcctcatcgaggggatcgccgactacgtgcggctcaaggccgggctcgcgcctgggcactggaggccgcgggggagcggcagccggtgggatgaggggtacgacatcacggcgaggttcctcgactactgcgactcgctcaagcctgggttcgtcgcgcagctcaacgccaagatgaagagcgggtacagcgacgacttcttcgcgcagattctcggcaagaacgtgcagcagctgtggcaggactacaaagccaagttcggaggctgaatgggcttttgccttttagtcatctctcttgcacggtgtgatggcatagcaccctatacatattgaaataatcaacaagacatgtgctttacgttgtaatgaaatttaaataaaggattttgctaattcgaattgacgcgattg

SEQ ID NO: 52111 - protein, 234 aa, Glycine max
  peptide (1)..(234): Ceres Seq. ID no. 13638610
THTDSNKHPPKMKLHVAFFLLVAMAATARAVTFDASNTASGTTGGKRFDNAVGLAYSKQVLSDASTFIWSTFNQRAAADRKPVDAVTLVVEDIDGVAFTSGNGIHLSASYVGGYTSGDVKKEVTGVLYHEATHVWQWNGQGAANGGLIEGIADYVRLKAGLAPGHWRPRGSGSRWDEGYDITARFLDYCDSLKPGFVAQLNAKMKSGYSDDFFAQILGKNVQQLWQDYKAKFGG

SEQ ID NO: 52112 - protein, 223 aa, Glycine max
  peptide (1)..(223): Ceres Seq. ID no. 13638611
MKLHVAFFLLVAMAATARAVTFDASNTASGTTGGKRFDNAVGLAYSKQVLSDASTFIWSTFNQRAAADRKPVDAVTLVVEDIDGVAFTSGNGIHLSASYVGGYTSGDVKKEVTGVLYHEATHVWQWNGQGAANGGLIEGIADYVRLKAGLAPGHWRPRGSGSRWDEGYDITARFLDYCDSLKPGFVAQLNAKMKSGYSDDFFAQILGKNVQQLWQDYKAKFGG

SEQ ID NO: 52113 - protein, 211 aa, Glycine max
  peptide (1)..(211): Ceres Seq. ID no. 13638612
MAATARAVTFDASNTASGTTGGKRFDNAVGLAYSKQVLSDASTFIWSTFNQRAAADRKPVDAVTLVVEDIDGVAFTSGNGIHLSASYVGGYTSGDVKKEVTGVLYHEATHVWQWNGQGAANGGLIEGIADYVRLKAGLAPGHWRPRGSGSRWDEGYDITARFLDYCDSLKPGFVAQLNAKMKSGYSDDFFAQILGKNVQQLWQDYKAKFGG

SEQ ID NO: 52114 - DNA, 941 bp, Glycine max
  misc_feature (1)..(941): Ceres Seq. ID no. 13594748
catcccgtcatccaccacagcttagcagcagcaacaaccagtgtctaagacactctccatcaacaaactctagctgatcactcctagctaagctttgcatagcaagcaatggggtactccaaaaccctagcggctggcctgtttgccacgctgctcctagctccagtcgtcctggctaccgaccctgaccctctccaggacttctgtgtcgccgacctcgacggcaaggcggtctcggtgaacgggcatccgtgcaagcccatgtcgaaggccggcgatgacttcctcttctcgtccaagctggccaaggctggcaacacgtcgaccccgaacggctcggccgtgacggagcttgacgtggctgagtggcctggaacgaacacgttgggcgtgtcgatgaaccgcgtggacttcgctccaggaggcaccaacccgccgcacatccacccccgtgccaccgagatcggcatcgtgatgaaaggtgagctcctcgtgggaatcctcggcagcctcgactccgggaacaagctttactcgagggtggtgcgcgctggagagacgttcctcatcccacggggcctcatgcacttgcagttcaacgtcggtaagaccgaggcatccatggtagtctccttcaacagccagaaccccggtatcgtcttcgtgccattgacactcttcagctccaacccacccatcccgacgccggtcctcaccaaggcgcttcgggtggaggccggggtcgtggaacttctcaagtccaagttcgccgatgggttttaattatgggagccttccctgaaatgagcaatatgtaattcaatatatgcatgctagaaaattttaataattctcagcagaagacttgtattcaagtttcaggttaatctcgcatgcagttgtaataagattggagaagttagcctcctggtttagcctcc

SEQ ID NO: 52115 - protein, 224 aa, Glycine max
  peptide (1)..(224): Ceres Seq. ID no. 13594749
MGYSKTLAAGLFATLLLAPVVLATDPDPLQDFCVADLDGKAVSVNGHPCKPMSKAGDDFLFSSKLAKAGNTSTPNGSAVTELDVAEWPGTNTLGVSMNRVDFAPGGTNPPHIHPRATEIGIVMKGELLVGILGSLDSGNKLYSRVVRAGETFLIPRGLMHLQFNVGKTEASMVVSFNSQNPGIVFVPLTLFSSNPPIPTPVLTKALRVEAGVVELLKSKFADGF

SEQ ID NO: 52116 - protein, 173 aa, Glycine max
  peptide (1)..(173): Ceres Seq. ID no. 13594750
MSKAGDDFLFSSKLAKAGNTSTPNGSAVTELDVAEWPGTNTLGVSMNRVDFAPGGTNPPHIHPRATEIGIVMKGELLVGILGSLDSGNKLYSRVVRAGETFLIPRGLMHLQFNVGKTEASMVVSFNSQNPGIVFVPLTLFSSNPPIPTPVLTKALRVEAGVVELLKSKFADGF

SEQ ID NO: 52117 - protein, 128 aa, Glycine max
  peptide (1)..(128): Ceres Seq. ID no. 13594751
MNRVDFAPGGTNPPHIHPRATEIGIVMKGELLVGILGSLDSGNKLYSRVVRAGETFLIPRGLMHLQFNVGKTEASMVVSFNSQNPGIVFVPLTLFSSNPPIPTPVLTKALRVEAGVVELLKSKFADGF

SEQ ID NO: 52118 - DNA, 1177 bp, Glycine max
  misc_feature (1)..(1177): Ceres Seq. ID no. 12609146
cgatttctcctcttccttccttatttacgagcgccgaggccgcctgggaccattggttcttcttcttccctcgtcgctgcctgccatcaccggccgtgctgcgcttgcgcgttgaagaggaatccggccggccgtcgtcctcgaccgatacatggggcaccggggggacaccaagcctgtcagtggcggcgggttcagtgagaatggcaagtttagctatggttatgcgagcagtctagggaaaagatcttccatggaggacttccacgagacgagaatcgatggcgtcgatggagagaccgtcggattgttcggtgttttcgacggccatggtggagctcgagccgcggagttcgtcaagcagaaccttttcagcaacttaatcaagcacccaaagttcttcaccgataccaagtctgctattgctgaaactttcacccatacggattcagagctcctgaaggccgataccacccacaaccgagatgcagggtcgacggcctccacggccattctcgttggcgatcgcctggtggtggcaaacgttggggactctagggcggtcatttgtaggggtggtgatgccatagccgtgtcaagggaccataagcctgaccagacagatgaaaggcagaggatagaggacgccggaggtttcgtgatgtgggcaggtacatggcgtgggggcggcgtgcttgctgtttctcgggcatttggtgacaaactgttgaagcagtacgtggttgccgatccagagatcaaggaggaggtagtcgacagctccctggagttcctcatcctggcgagcgacgggctgtgggacgtcgtctccaacgaggaagccgtggccatggtgaagccgatcgtggactcgcaggaggcggccaagaagctcctcgtcgaggcaacgcggaggggaagcgccgacaacatcacctgcgtcgtcgtccgtttcctggaccagcagcccccggcggcggccaccaacggatccccagcccctgccgcagcgagcaagtgaacatttcctcctcgaagcgcgtaggtgttcacagggcaatgtgttgtgcaagcaatgtgtctgatgacgttgcccttcgcatgcgtgtttatttgcttcactccagtttacccatgcctgtactgatcatgtatgttctcagctgttctcatttcg

SEQ ID NO: 52119 - protein, 289 aa, Glycine max
  peptide (1)..(289): Ceres Seq. ID no. 12609147
MGHRGDTKPVSGGGFSENGKFSYGYASSLGKRSSMEDFHETRIDGVDGETVGLFGVFDGHGGARAAEFVKQNLFSNLIKHPKFFTDTKSAIAETFTHTDSELLKADTTHNRDAGSTASTAILVGDRLVVANVGDSRAVICRGGDAIAVSRDHKPDQTDERQRIEDAGGFVMWAGTWRGGGVLAVSRAFGDKLLKQYVVADPEIKEEVVDSSLEFLILASDGLWDVVSNEEAVAMVKPIVDSQEAAKKLLVEATRRGSADNITCVVVRFLDQQPPAAATNGSPAPAAASK

SEQ ID NO: 52120 - protein, 255 aa, Glycine max
  peptide (1)..(255): Ceres Seq. ID no. 12609148
MEDFHETRIDGVDGETVGLFGVFDGHGGARAAEFVKQNLFSNLIKHPKFFTDTKSAIAETFTHTDSELLKADTTHNRDAGSTASTAILVGDRLVVANVGDSRAVICRGGDAIAVSRDHKPDQTDERQRIEDAGGFVMWAGTWRGGGVLAVSRAFGDKLLKQYVVADPEIKEEVVDSSLEFLILASDGLWDVVSNEEAVAMVKPIVDSQEAAKKLLVEATRRGSADNITCVVVRFLDQQPPAAATNGSPAPAAASK

SEQ ID NO: 52121 - DNA, 976 bp, Glycine max
  misc_feature (1)..(976): Ceres Seq. ID no. 13594608
aatcgataaactatcctcatcattcacaacaaacccaaaaaccaaacctcctccttcctatcttgaacaaccgccgagagacctccccgtcgccgtcgccgcaaatggagctgctcaacgtggttccggcggacgccatggccttccccctctactccctccccgcggcggccaacaccgtcgcctcgctcttcgcctggctcgtcgcggccctcgccgccgccgtcggcctctggcgcatccgcgcggccggctcctccaacaaactacccggcgccggcgcccgcagcagcaccctcttggacgacaatcagcagccgcaggccgtttcgtcgtctgccgccgacgagccacggcccgcactcgccgtgccggtggagccgtcctccccgattagcgagccaagctcgccgtccaaggtccggttcacggcatactacggcggggccggagctgacgatggggtagtggacggcgtcaggaaatgcgcggacagggacgaggacgaggacggcgtgcccgtcgtcgacgaccagagcgagacacagccgagacggacggcgtcgatgaggatcaggtcggcagcctcgacggcggtgccctgctgggagaagagggagatggccgtgaggaggcggggagatttgggctggtaccgccaccttgacacggcggtgcttgacggcaccgttgtaaggctgtgggacggcgaggtcaccgcggcggtggcgtcgccgagggcgcggcggcggagggcaggattgaaaccgcgcctgtcactatagagatgtgtgtataatgtggttaggattattggattgttattaggtgggtatgacgattttgtccttcaatttgggcatgtcatatgtatgtgtatcgtctaagagggccgaggctgaaaaaatgaacagccttcgtctcagctctcaggagaaacgaaaatttggcaaataatggcagagtattcttgctc

SEQ ID NO: 52122 - protein, 260 aa, Glycine max
  peptide (1)..(260): Ceres Seq. ID no. 13594609
SINYPHHSQQTQKPNLLLPILNNRRETSPSPSPQMELLNVVPADAMAFPLYSLPAAANTVASLFAWLVAALAAAVGLWRIRAAGSSNKLPGAGARSSTLLDDNQQPQAVSSSAADEPRPALAVPVEPSSPISEPSSPSKVRFTAYYGGAGADDGVVDGVRKCADRDEDEDGVPVVDDQSETQPRRTASMRIRSAASTAVPCWEKREMAVRRRGDLGWYRHLDTAVLDGTVVRLWDGEVTAAVASPRARRRRAGLKPRLSL

SEQ ID NO: 52123 - protein, 226 aa, Glycine max
  peptide (1)..(226): Ceres Seq. ID no. 13594610
MELLNVVPADAMAFPLYSLPAAANTVASLFAWLVAALAAAVGLWRIRAAGSSNKLPGAGARSSTLLDDNQQPQAVSSSAADEPRPALAVPVEPSSPISEPSSPSKVRFTAYYGGAGADDGVVDGVRKCADRDEDEDGVPVVDDQSETQPRRTASMRIRSAASTAVPCWEKREMAVRRRGDLGWYRHLDTAVLDGTVVRLWDGEVTAAVASPRARRRRAGLKPRLSL

SEQ ID NO: 52124 - protein, 215 aa, Glycine max
  peptide (1)..(215): Ceres Seq. ID no. 13594611
MAFPLYSLPAAANTVASLFAWLVAALAAAVGLWRIRAAGSSNKLPGAGARSSTLLDDNQQPQAVSSSAADEPRPALAVPVEPSSPISEPSSPSKVRFTAYYGGAGADDGVVDGVRKCADRDEDEDGVPVVDDQSETQPRRTASMRIRSAASTAVPCWEKREMAVRRRGDLGWYRHLDTAVLDGTVVRLWDGEVTAAVASPRARRRRAGLKPRLSL

SEQ ID NO: 52125 - DNA, 1123 bp, Glycine max
  misc_feature (1)..(1123): Ceres Seq. ID no. 13594713
atcgaacggcctgggcttctctgcgcctacacagccctccctcctacgccgtcttctgcttcgtccagcataacccccaaaaccacctcacccgagagaacaggcggcggcggcggcggcggcatcgggcaagatgatcaagaggcgctacttcaggcaagaccacggcgacaatagcgcctcctcgtcctcctcctcgtcgggttcagattcggaccgcgaccccgcggaagaagaggtctcggaggaggaagtagaagaggatcaagaacaagtaaaagaagaagaagatgatgatgaagaagcggaggtggagtcgggggaagaacaggaaacggaagtagatgagcaggcggaagatgagggttcaggataccaaagtgaggatagctctggacatcatgttgatagtccttgtgcagatgagaacagcagtctggtgtatgaacaataccaagcaatcagtttgcctgttaagaaagcatcaagtggtgatgctgattctgccaaaggtgctgttaacaaggatgacgctgttgaggtcgatttcagtaactacattctgaagtgcaaatctgtgtataagtgcaagctttgtcccagaatcatgtgcttaagtgaggagatggtcagggtacatcttgaatcaaagatggtgctcaacagtgatggtgagctggaggaggaggcagagacacatgctgaacgacatgcccgaactatagctcttgctcagcaagtacaaaagcccaagaaggattcaggcaggcagcgacaaaatcggagaagacagaagaggtcgcagaatcgtctcaaggacaaagaccagagacacaactctggaaaggaaggtgcaaggccgaacaatggaactgctgataagaaaataccgaatattgaaactgctgctaagaaaatgccgaatcttgaaactgctgctaagaaaaggcgcaagactgaaaaataagtgggtgctgcagaaatatttcttgcgtgttatttcttcctatattgttgtaatttttaggagctttctgcggttttactgcttctgttttgccttcctttttgatccaagtgtagctgatgaaagctgagagattaaattgaaaggaaatacgac

SEQ ID NO: 52126 - protein, 277 aa, Glycine max
  peptide (1)..(277): Ceres Seq. ID no. 13594714
MIKRRYFRQDHGDNSASSSSSSSGSDSDRDPAEEEVSEEEVEEDQEQVKEEEDDDEEAEVESGEEQETEVDEQAEDEGSGYQSEDSSGHHVDSPCADENSSLVYEQYQAISLPVKKASSGDADSAKGAVNKDDAVEVDFSNYILKCKSVYKCKLCPRIMCLSEEMVRVHLESKMVLNSDGELEEEAETHAERHARTIALAQQVQKPKKDSGRQRQNRRRQKRSQNRLKDKDQRHNSGKEGARPNNGTADKKIPNIETAAKKMPNLETAAKKRRKTEK

SEQ ID NO: 52127 - DNA, 475 bp, Glycine max
  misc_feature (1)..(475): Ceres Seq. ID no. 13594613
tttttttcgtccccgtgagctctcsacacaagtctcgcccgcagccgccgtcagagcgcaacgcacgcccgcgagcccaccgaagcccaggcgcgcggagaccctagccaagcgagtcctcgccgcagatggcagtccccggcggccgcaacggcctcgtcgaggacgacgacgtcgccgaccacgccggcgccttcgtcgccccctccgacgacgaggaggcgccgctgcctccccacctccaggccctctccgacgccgcccagagcggcgacgtcgacgccctccgcaccgcgctcgataactatggtggcagcattgatgatccagttgaagatggtgatactgtgcttcacctggcatgcttatatggccatctactttgcgtgcagctactgctggaacgtggagcaagcttagagtccaaagatgaagaaggggcaattcctctccatgatgcttgtgctggaggctt

SEQ ID NO: 52128 - protein, 115 aa, Glycine max
  peptide (1)..(115): Ceres Seq. ID no. 13594614
MAVPGGRNGLVEDDDVADHAGAFVAPSDDEEAPLPPHLQALSDAAQSGDVDALRTALDNYGGSIDDPVEDGDTVLHLACLYGHLLCVQLLLERGASLESKDEEGAIPLHDACAGG

SEQ ID NO: 52129 - protein, 100 aa, Glycine max
  peptide (1)..(100): Ceres Seq. ID no. 13594615
  misc_feature (8)..(8): Xaa is any aa, unknown or other
FFRPRELXTQVSPAAAVRAQRTPASPPKPRRAETLAKRVLAADGSPRRPQRPRRGRRRRRPRRRLRRPLRRRGGAAASPPPGPLRRRPERRRRRPPHRAR

SEQ ID NO: 52130 - DNA, 591 bp, Glycine max
  misc_feature (1)..(591): Ceres Seq. ID no. 13581897
acaggagagcaaccaaagctatacgttggagtggaggtgaggggagtgtttgtgtccgagggaacaataaagggcaaacaaacaacaaaacaaaggaaagaaaagatgttacagttcccggcgtatatgacgcagtacccattgtccacgatgaccattccgacgtcgtttctgctacccgctcagtggccccagccccaaaacgaagaactccttctcgccatggaagagtccgatttcgaagaaaagtgcaacgagatcaggaagatgaacagcaacctaattgtgataggaaaaaccactaacgaaaatgataaggaagactttgacaatgaggcagatgacgatgatgctgacaatgcagaggaatctgagggcgaagaatttgagcaagaaactggttgagatagctgcacatcagcaagaacctgttagtatgtttttggactgctaggccaaatctatgtattgagtttttcttctattmatmttttggacctastattgagtattgacttgtcattcatatcaamctttgtattrtwtctgctcttttattatrcytaataaaatatttacaacctttaagtg

SEQ ID NO: 52131 - protein, 134 aa, Glycine max
  peptide (1)..(134): Ceres Seq. ID no. 15222743
TGEQPKLYVGVEVRGVFVSEGTIKGKQTTKQRKEKMLQFPAYMTQYPLSTMTIPTSFLLPAQWPQPQNEELLLAMEESDFEEKCNEIRKMNSNLIVIGKTTNENDKEDFDNEADDDDADNAEESEGEEFEQETG

SEQ ID NO: 52132 - protein, 100 aa, Glycine max
  peptide (1)..(100): Ceres Seq. ID no. 15222744
RRATKAIRWSGGEGSVCVRGNNKGQTNNKTKERKDVTVPGVYDAVPIVHDDHSDVVSATRSVAPAPKRRTPSRHGRVRFRRKVQRDQEDEQQPNCDRKNH

SEQ ID NO: 52133 - protein, 99 aa, Glycine max
  peptide (1)..(99): Ceres Seq. ID no. 15222745
MLQFPAYMTQYPLSTMTIPTSFLLPAQWPQPQNEELLLAMEESDFEEKCNEIRKMNSNLIVIGKTTNENDKEDFDNEADDDDADNAEESEGEEFEQETG

SEQ ID NO: 52134 - DNA, 1112 bp, Glycine max
  misc_feature (1)..(1112): Ceres Seq. ID no. 15172792
accgcagcccaaccaacccccaacccgagcgtagcgagggatacagccgcgcggttggaaggggaggttcccggccatggatttcctacaggggcagagcgtcgagaccatggtggccgtcgccgtcgcggtcgtcgccgtcgccgtgggcggcgcgctcctcctccgccgatccaagaggcccaagggctgcttggatcctgagaacttcaagaagtttaaacttgtggaaaagacacaaataagccataatgttgccaaattccgatttgctcttccaacccctacctctgtgttaggccttccaattggtcaacatatcagttgcaggggtcaagatgctaccggtgaagaagtaatcaagccttacacacctactacattggattctgatctaggaaattttcagcttgttataaagatgtaccctcaaggaagaatgtcgcatcacttccgtgaaatgaaagttggtgattatatgtctgtgaagggacctaagggtcgtttcaagtaccaagtaggacaagtgagagctttcggaatgctggctggtggatctggcattactccgatgttccaagttgcaagggcaattcttgagaaccctaatgacaaaacgaaggttcatctagtctatgcaaatgtcacacctgaagacattcttctgaaggaagagctggacagcctggccgaagaatatcctgaccgcttcaagatcttctacgtgttgaatcagcctcctgaagtctggaatggtggtgttgggtttgtgtcccaggacatgatcaagacccactgtccagcacctgctgaggatattcagatcttgagatgcggccctcctccgatgaacaaggcgatggctgcgcacctcgaggagctcggatacacaaaggagatgcagttccagttctaagtttccggagtacagaaaaataagccccccacgctctacattatccagcatggggactgtccgacccctcttgatatcttacagaagcaatgcatttttagtcttgtagtacctccattttcgtggccaaatgttagctgcacaccttggcagaggcccaaatttctttcgactccacttttatcattattggttg

SEQ ID NO: 52135 - protein, 279 aa, Glycine max
  peptide (1)..(279): Ceres Seq. ID no. 15172793
MDFLQGQSVETMVAVAVAVVAVAVGGALLLRRSKRPKGCLDPENFKKFKLVEKTQISHNVAKFRFALPTPTSVLGLPIGQHISCRGQDATGEEVIKPYTPTTLDSDLGNFQLVIKMYPQGRMSHHFREMKVGDYMSVKGPKGRFKYQVGQVRAFGMLAGGSGITPMFQVARAILENPNDKTKVHLVYANVTPEDILLKEELDSLAEEYPDRFKIFYVLNQPPEVWNGGVGFVSQDMIKTHCPAPAEDIQILRCGPPPMNKAMAAHLEELGYTKEMQFQF

SEQ ID NO: 52136 - protein, 268 aa, Glycine max
  peptide (1)..(268): Ceres Seq. ID no. 15172794
MVAVAVAVVAVAVGGALLLRRSKRPKGCLDPENFKKFKLVEKTQISHNVAKFRFALPTPTSVLGLPIGQHISCRGQDATGEEVIKPYTPTTLDSDLGNFQLVIKMYPQGRMSHHFREMKVGDYMSVKGPKGRFKYQVGQVRAFGMLAGGSGITPMFQVARAILENPNDKTKVHLVYANVTPEDILLKEELDSLAEEYPDRFKIFYVLNQPPEVWNGGVGFVSQDMIKTHCPAPAEDIQILRCGPPPMNKAMAAHLEELGYTKEMQFQF

SEQ ID NO: 52137 - protein, 164 aa, Glycine max
  peptide (1)..(164): Ceres Seq. ID no. 15172795
MYPQGRMSHHFREMKVGDYMSVKGPKGRFKYQVGQVRAFGMLAGGSGITPMFQVARAILENPNDKTKVHLVYANVTPEDILLKEELDSLAEEYPDRFKIFYVLNQPPEVWNGGVGFVSQDMIKTHCPAPAEDIQILRCGPPPMNKAMAAHLEELGYTKEMQFQF

SEQ ID NO: 52138 - DNA, 924 bp, Glycine max
  misc_feature (1)..(924): Ceres Seq. ID no. 14302025
aaccagtcaccgctctctttttcatttacagagatagccctaacttagtcactctctctcacacacactccagttcaaagttcaaacaatggctcctccacagaagctctttctcgccgccattgtcgctgccgtcattgtagccgccaccaccggatatgcacctaatagtgctgcggaagatattgtgcattcctcatgcgtgcacgcgagctatccatcgctatgcgtccgtacactctctacctactctggtccaaccatcacaaaccgtcgcgagctagctcaagccgccgtcaagataagcctctcccacgctcgagcagccgctaagaaactcgcggctgtgagagaaaccgtgggaaagaaacgggtgaaagcggcggttgtggactgcgtggagatgattggagactcggtggacgagctgagccgcacgctaggcgttttaaagcatctacacgtttcgggcgtttcggcgaacgagttcaggtggcagatgagcaacgcgcagacgtgggctagtgcggcgttgacggatgacgacacgtgtctcgatgggtttaaaggggtcgagggtaaggttaaaacggaggtgaagcattggatgacgaaagtggcgagggttacaagcaacgcgctttacatgatcaaccagctagatgaatcacgtggctagccccacgtagtacgttcttgatgttatgatgtgcttgtcctaatggacagttatgatttggtgttagtttttttcgtgtttgcttaattgcgagttatctactatttaaaaatgagaggcattgtccttttaagtagttctgataatggtatactaaataaatggtttatctcttttttcggacggtatgtcattgtatcgtattgtgttgttcccttcggattcgatagcatgtgattttgtct

SEQ ID NO: 52139 - protein, 196 aa, Glycine max
  peptide (1)..(196): Ceres Seq. ID no. 14302026
MAPPQKLFLAAIVAAVIVAATTGYAPNSAAEDIVHSSCVHASYPSLCVRTLSTYSGPTITNRRELAQAAVKISLSHARAAAKKLAAVRETVGKKRVKAAVVDCVEMIGDSVDELSRTLGVLKHLHVSGVSANEFRWQMSNAQTWASAALTDDDTCLDGFKGVEGKVKTEVKHWMTKVARVTSNALYMINQLDESRG

SEQ ID NO: 52140 - DNA, 1226 bp, Glycine max
  misc_feature (1)..(1226): Ceres Seq. ID no. 15177091
gtaaaccctatcttctcctgttccccttcgtccccggccggcgacgacgccgcgcgcgcagcgaacccagcccctcctccggttgcagtaagcaaggaaggatgagtaggcgctggagccggaccatttacgttgggaacctcccaggggatatcagggagcgggaggtggaggatctgttctacaagtatggacggatagttgaaattgacttgaaggtccccccaaggccacctggctttgcttttgttgagtttgaagatccccgtgatgctgaagatgcgattcatggtcgagatggttacaactttgatgggaatcgtctgcgggttgaacttgcacatggcgggagggccaactcttcatcccttccgaacagctatggtggcggaggacgccgtggtggtgtctctaggcatacagagtatcgtgttctggttactggactaccttcttctgcatcatggcaagatctaaaggatcatatgagaaaggctggtgatgtttgtttctctgaggtgtatcgtgagggtggtggtactattggaattgttgattatacaaactatgatgacatgaagtatgctataaggaagcttgatgatactgaatttaaaaatgcattctctcgagcgcctataagggtgaaggagtatgctggcaaaagcagccgctcctattcacgcagccgtagcagaagccgaagtggcagctacagcaggagtccgagtccaaagaaaaaaccatcacgccgttcagcgtcaagatctcggtcgagatcagtttcttcccattcaaggtcaccgtcaaagggacgctctccatcaagatcaccagcaaaatcccaatcccctgtcgctgcgtcccccgtcgtcaatggtgaagcagcaagccccaagagggacccaagcaagagcccatcacgttcccggtctcctgatgccaaatcagagtaaaacggatgcgaggctaggagcggtgagaggcggagccatggtcttcaaattcttcaaattttgtcttcgccaacttctgcatccgctgttatagtactatctctgtgttcggttattctaggttccttgatgtttctgtaaaaacttgtttggatggattcttgagatttatgtactctcttcattgtcagcatttttacttggattattatctatggtcgttggctcggaagatatttgaatacagtaacattgccgtttgtaatgctg

SEQ ID NO: 52141 - protein, 317 aa, Glycine max
  peptide (1)..(317): Ceres Seq. ID no. 15177092
KPYLLLFPFVPGRRRRRARSEPSPSSGCSKQGRMSRRWSRTIYVGNLPGDIREREVEDLFYKYGRIVEIDLKVPPRPPGFAFVEFEDPRDAEDAIHGRDGYNFDGNRLRVELAHGGRANSSSLPNSYGGGGRRGGVSRHTEYRVLVTGLPSSASWQDLKDHMRKAGDVCFSEVYREGGGTIGIVDYTNYDDMKYAIRKLDDTEFKNAFSRAPIRVKEYAGKSSRSYSRSRSRSRSGSYSRSPSPKKKPSRRSASRSRSRSVSSHSRSPSKGRSPSRSPAKSQSPVAASPVVNGEAASPKRDPSKSPSRSRSPDAKSE

SEQ ID NO: 52142 - protein, 284 aa, Glycine max
  peptide (1)..(284): Ceres Seq. ID no. 15177093
MSRRWSRTIYVGNLPGDIREREVEDLFYKYGRIVEIDLKVPPRPPGFAFVEFEDPRDAEDAIHGRDGYNFDGNRLRVELAHGGRANSSSLPNSYGGGGRRGGVSRHTEYRVLVTGLPSSASWQDLKDHMRKAGDVCFSEVYREGGGTIGIVDYTNYDDMKYAIRKLDDTEFKNAFSRAPIRVKEYAGKSSRSYSRSRSRSRSGSYSRSPSPKKKPSRRSASRSRSRSVSSHSRSPSKGRSPSRSPAKSQSPVAASPVVNGEAASPKRDPSKSPSRSRSPDAKSE

SEQ ID NO: 52143 - DNA, 799 bp, Glycine max
  misc_feature (1)..(799): Ceres Seq. ID no. 15172783
atcatccctcctcgtagctttccatcagtgtggtgaaattgagaaaaatgagcggagccgggaagaaagtggcggatgtggcgttcaaagcgtcgaggacaatagattgggaagggatggcgaaggtccttgtaaccgatgaggctcgcagagagttctccaacctccgtcgtgctttcgatgaggtcaacacccagctgcagaccaagttcagccaggagcctgaacccattgattgggatttttacagaaagggcattggcgctggcattgttgacatgtacaaggaagcttacgacagcattgagattcctaagtacgtggacaatgttacccctgaatacaagccaaagtttgatgctttgctggtggaactcaaagaagcagaacagacatctctcaaggagtctgaacggctggagaaagaaattattgatgtccaggagataagcaaaaagctcagcacgatgactgcagatgagtactttgagaagcacccagaactcaagaagaagtttgatgacgagatccgtaacgactactggggatactgatcatcatatcttttgtatctccggtctggaaatgaaactctctcctctcttttttcttttgatgtgattttgtgagagtcaatcgtaacataataaggaccactccatttacttaagcagtgtgttgagatatttcattggagatccaatgagacgatgacgataaaacccatttggtttcagttgtcaatgtcacaatattgtttcgttttgttctaaagagaataataagagtttaaatgacc

SEQ ID NO: 52144 - protein, 168 aa, Glycine max
  peptide (1)..(168): Ceres Seq. ID no. 15172784
MSGAGKKVADVAFKASRTIDWEGMAKVLVTDEARREFSNLRRAFDEVNTQLQTKFSQEPEPIDWDFYRKGIGAGIVDMYKEAYDSIEIPKYVDNVTPEYKPKFDALLVELKEAEQTSLKESERLEKEIIDVQEISKKLSTMTADEYFEKHPELKKKFDDEIRNDYWGY

SEQ ID NO: 52145 - protein, 145 aa, Glycine max
  peptide (1)..(145): Ceres Seq. ID no. 15172785
MAKVLVTDEARREFSNLRRAFDEVNTQLQTKFSQEPEPIDWDFYRKGIGAGIVDMYKEAYDSIEIPKYVDNVTPEYKPKFDALLVELKEAEQTSLKESERLEKEIIDVQEISKKLSTMTADEYFEKHPELKKKFDDEIRNDYWGY

SEQ ID NO: 52146 - protein, 103 aa, Glycine max
  peptide (1)..(103): Ceres Seq. ID no. 15172786
MRLAESSPTSVVLSMRSTPSCRPSSARSLNPLIGIFTERALALALLTCTRKLTTALRFLSTWTMLPLNTSQSLMLCWWNSKKQNRHLSRSLNGWRKKLLMSRR

SEQ ID NO: 52147 - DNA, 713 bp, Glycine max
  misc_feature (1)..(713): Ceres Seq. ID no. 13594720
acatcagttttcaattaaagatactgttacactcataaaaaaagatggcaaacttgagtacactcgttggttgcattgccatcatcttcttcactgtcgttgcacctgcctcctcagccactcattctgtcgaatggtcgcttgggaaggactatagctccttggctactggaaaaccttatgccattggcgatacaatcgtgttcaactacggtgcgggtcacacggtggacgaagtgagtgaaagtgactacaaaagttgcacattggggaactcaatttcttcggacagtagcggaacaacaagcatagctctaaagacagctggttctcactacttcatttgcgctatccccggccactgtgccggcggcatgaagctctctgtctacgtaggtgcagaagcctcttcagacggtggcggtgacagtggtgacggtaccacccccaaaactacaccttctccaactgtagagggcaggaaggctgctccttccgcttctgccactgctatgttgaagccgttcaaagctttggttttgacttgtgtagctgcattattatatgctttggctctttcttagttgtttttaatttctcgttgatttggtttggctcgtttgaaaatccaggctagaggcagtgctatgagccctattattattatatgcttcttgttgtgattaattattctatgatattttcctttgttt

SEQ ID NO: 52148 - protein, 179 aa, Glycine max
  peptide (1)..(179): Ceres Seq. ID no. 13594721
MANLSTLVGCIAIIFFTVVAPASSATHSVEWSLGKDYSSLATGKPYAIGDTIVFNYGAGHTVDEVSESDYKSCTLGNSISSDSSGTTSIALKTAGSHYFICAIPGHCAGGMKLSVYVGAEASSDGGGDSGDGTTPKTTPSPTVEGRKAAPSASATAMLKPFKALVLTCVAALLYALALS

SEQ ID NO: 52149 - DNA, 1112 bp, Glycine max
  misc_feature (1)..(1112): Ceres Seq. ID no. 13638643
atcgattagttcgctacgtctctcactatctctctcaccgcgaaaatgtcgaccggtttaatcggaagattagtcagaaccaaaccgtcgcgattaaccaccgcagcaaggttgatcccatcgcgattcacagcctccgtaaccgaaccggaatcaaaatctccgtcaggcggcggcggcggaaaagcatcgaacttcaaaacattccagatctaccgatggaaccccgacaaccccagcaagcccgagctccaagactacaagatcgacctcaaagactgcggccccatggttctcgacgctctgatcaaaatcaaaaacgagatggatccctctctcaccttccgccgctcctgccgcgaagggatctgcggctcgtgcgcgatgaacatcgacgggtgcaacgggctcgcgtgtctgacgaagatcgaggagggagccaaggagacgacgatcactcccttgcctcacatgttcgtgatcaaggatctggtggtggacatgactaacttttataatcagtacaagagtattgagccgtggctgaagaggaagaatccagcttctgagcctgggaaggagattctgcagagtaagaaggatagggcgaagcttgatgggatgtatgagtgtattctctgtgcttgttgtagcacttcttgtcctagttattggtggaaccctgagtcttaccttggtcctgccgctttgctacacgccaacaggtggataagcgacagtcgtgatgagtacactaaggaaaggcttgaggctattgacgatgagttcaagctttaccgttgtcatacgatcttgaactgtgctcgtgcgtgtcctaagggtttgaacccgggcaagcagatcgcgcacatcaagcaacttcagcgttgaagtattattgtgcggtcacagttaatgtttgaagctaataaatcttcacgaagtctttgattttggatttattcttgtattttgttgttgccgattattagcacctgtgaaagaaactattttggcaagttttccaaagttgatgagctttgtggttgaatcttgctgaaaaaaataatctctcttttaagtaataaaactgaagaacttaaatttcatct

SEQ ID NO: 52150 - protein, 281 aa, Glycine max
  peptide (1)..(281): Ceres Seq. ID no. 15220430
MSTGLIGRLVRTKPSRLTTAARLIPSRFTASVTEPESKSPSGGGGGKASNFKTFQIYRWNPDNPSKPELQDYKIDLKDCGPMVLDALIKIKNEMDPSLTFRRSCREGICGSCAMNIDGCNGLACLTKIEEGAKETTITPLPHMFVIKDLVVDMTNFYNQYKSIEPWLKRKNPASEPGKEILQSKKDRAKLDGMYECILCACCSTSCPSYWWNPESYLGPAALLHANRWISDSRDEYTKERLEAIDDEFKLYRCHTILNCARACPKGLNPGKQIAHIKQLQR

SEQ ID NO: 52151 - protein, 200 aa, Glycine max
  peptide (1)..(200): Ceres Seq. ID no. 15220431
MVLDALIKIKNEMDPSLTFRRSCREGICGSCAMNIDGCNGLACLTKIEEGAKETTITPLPHMFVIKDLVVDMTNFYNQYKSIEPWLKRKNPASEPGKEILQSKKDRAKLDGMYECILCACCSTSCPSYWWNPESYLGPAALLHANRWISDSRDEYTKERLEAIDDEFKLYRCHTILNCARACPKGLNPGKQIAHIKQLQR

SEQ ID NO: 52152 - protein, 188 aa, Glycine max
  peptide (1)..(188): Ceres Seq. ID no. 15220432
MDPSLTFRRSCREGICGSCAMNIDGCNGLACLTKIEEGAKETTITPLPHMFVIKDLVVDMTNFYNQYKSIEPWLKRKNPASEPGKEILQSKKDRAKLDGMYECILCACCSTSCPSYWWNPESYLGPAALLHANRWISDSRDEYTKERLEAIDDEFKLYRCHTILNCARACPKGLNPGKQIAHIKQLQR

SEQ ID NO: 52153 - DNA, 772 bp, Glycine max
  misc_feature (1)..(772): Ceres Seq. ID no. 15178329
cgccgcggaatcccgatatttatttttcttgcgttccggtccccaggcttcgagttatttccctggtctggtgctcgcgcggcggcggcggcggcggagggtttgcgtcggcgctctcgcgagctagggtttcgggccgaggaggaggaggagcgagatggaggaggtgacggagggggtcaagaacctggccgtcacggagccgcacaagaagaaccggatccaggtctccaacacgaagaagccgctcttcttctatgtcaacctcgccaagaggtacatgcagatgcataacgaggtggaactctccgctctcggcatggctatcgccactgtggtgacagttgccgaaattctgaaaaataatggccttgctgttgaaaagaaaatcatgacatccactgttgatgtcaatgatgaatcaaggggccgcccgatgcagaaggctaagattgaaatagtgctgggcaagacggagaacttcgacgagctgatggccgccgccgcggaggagagggaagtcgcagccgccgaggagggcgaggagcagggctaataaactgtcttgagccggctgttgtagcttttatttagtacttgctgctaggttgtgtgttatcttctcttggccagcaagagataggtacttgtgtaaccaaagagttctttgtatttgtttcgtctccgtggtagtttaatgtcgatggtattctggttcactcaaatgatatgccttgtgttttattcgttttattatttggtgctgtttgtc

SEQ ID NO: 52154 - protein, 132 aa, Glycine max
  peptide (1)..(132): Ceres Seq. ID no. 15178330
MEEVTEGVKNLAVTEPHKKNRIQVSNTKKPLFFYVNLAKRYMQMHNEVELSALGMAIATVVTVAEILKNNGLAVEKKIMTSTVDVNDESRGRPMQKAKIEIVLGKTENFDELMAAAAEEREVAAAEEGEEQG

SEQ ID NO: 52155 - protein, 97 aa, Glycine max
  peptide (1)..(97): Ceres Seq. ID no. 15178331
RRGIPIFIFLAFRSPGFELFPWSGARAAAAAAEGLRRRSRELGFRAEEEEERDGGGDGGGQEPGRHGAAQEEPDPGLQHEEAALLLCQPRQEVHADA

SEQ ID NO: 52156 - protein, 91 aa, Glycine max
  peptide (1)..(91): Ceres Seq. ID no. 15178332
MQMHNEVELSALGMAIATVVTVAEILKNNGLAVEKKIMTSTVDVNDESRGRPMQKAKIEIVLGKTENFDELMAAAAEEREVAAAEEGEEQG

SEQ ID NO: 52157 - DNA, 694 bp, Glycine max
  misc_feature (1)..(694): Ceres Seq. ID no. 13594776
aaatcgacccccgtggccgtgggaagcagggcgtcgcctcggtcaaatccggcggcggcggagggggagtcgtgggccgcaaggctgggctggcctgaccggaccgccgcgcgcgtgacccgcccggtgggatccttcgggccggcgccccaggaggatattcttcgcgctgggggtgcttgatttggatgaaaggagcgcgccgtcggcatgggtaccccctcgcagggctcggctgccgtggcggcggcccgggtcgacctctgcgcgctcgacctcatgcccgtcttcgccaaggagatgattgccggtggggtcgccggtgctttctccaagactgccatcgcgccgctcgagcgcctcaagatattgctacagactagaacaaatgagttcaggtctctcggagttctgaaatccttgaataaactgagaaaacatgatggcgtcttgggattttacaagggaaatggtgccagtgtgttaagaattgttccttatgctgcattacattatatttctttacagagggagtacgtagtaattgtgttgcatacttaccccacctgacatattcttttcgttatattttttcgagttcatttttattttttcaccaacatgtatactttacccactaggtggaatgttgtcactggatagtactatttgatgaagaaattgcagatacgtg

SEQ ID NO: 52158 - protein, 119 aa, Glycine max
  peptide (1)..(119): Ceres Seq. ID no. 13594777
MGTPSQGSAAVAAARVDLCALDLMPVFAKEMIAGGVAGAFSKTAIAPLERLKILLQTRTNEFRSLGVLKSLNKLRKHDGVLGFYKGNGASVLRIVPYAALHYISLQREYVVIVLHTYPT

SEQ ID NO: 52159 - protein, 96 aa, Glycine max
  peptide (1)..(96): Ceres Seq. ID no. 13594778
MPVFAKEMIAGGVAGAFSKTAIAPLERLKILLQTRTNEFRSLGVLKSLNKLRKHDGVLGFYKGNGASVLRIVPYAALHYISLQREYVVIVLHTYPT

SEQ ID NO: 52160 - protein, 89 aa, Glycine max
  peptide (1)..(89): Ceres Seq. ID no. 13594779
MIAGGVAGAFSKTAIAPLERLKILLQTRTNEFRSLGVLKSLNKLRKHDGVLGFYKGNGASVLRIVPYAALHYISLQREYVVIVLHTYPT

SEQ ID NO: 52161 - DNA, 758 bp, Glycine max
  misc_feature (1)..(758): Ceres Seq. ID no. 12609566
ttaaaaaaaaatgcgaaggctgctcgggaagatttctgggttcttgagcaatcgaactacggtgggagtggacaaaacagggaacaaatacttcaccagaaatgaagaggttgatggtatcatgaaagagaaaagatgggtgatatttaagggagaggaggatcctacctctattccagttgaatggatatgttggctgaatgggcagtgtaaaaaggctccaactccagaggaaatgatggaattgaaagcaagacgtgaatgtgttagacagaatgttgctattctcaagaaagaagaagaaaggatagccaaagaaggaagcaaaggaaaacgcgtcagcactggaaaagtcagtggtccagacttgaaaagttttattcagcaatttccagttgcttcagaaggtaaagaggttgaagaatcacctagtgcaatggatggcttaaggaatcctcaggagagcttagccgagaaagaaaaagatgagtctgagtcttcagagccaacaggatctggtgcatcttttagaccaggaacttggcaacctccaacttgagctttcattacaaccaagggccttgctgagcttgtattagccatgcgctgttttgaaaaatccatgcgtgatatatatttctccctcaagaattttgatataattcatgtgttatcaagtttctagaaatcttaattcattgataaacctttttgcttaaagaatatggccaataagacaacctgctttatgcatttgc

SEQ ID NO: 52162 - protein, 182 aa, Glycine max
  peptide (1)..(182): Ceres Seq. ID no. 12609567
MRRLLGKISGFLSNRTTVGVDKTGNKYFTRNEEVDGIMKEKRWVIFKGEEDPTSIPVEWICWLNGQCKKAPTPEEMMELKARRECVRQNVAILKKEEERIAKEGSKGKRVSTGKVSGPDLKSFIQQFPVASEGKEVEESPSAMDGLRNPQESLAEKEKDESESSEPTGSGASFRPGTWQPPT

SEQ ID NO: 52163 - protein, 145 aa, Glycine max
  peptide (1)..(145): Ceres Seq. ID no. 12609568
MKEKRWVIFKGEEDPTSIPVEWICWLNGQCKKAPTPEEMMELKARRECVRQNVAILKKEEERIAKEGSKGKRVSTGKVSGPDLKSFIQQFPVASEGKEVEESPSAMDGLRNPQESLAEKEKDESESSEPTGSGASFRPGTWQPPT

SEQ ID NO: 52164 - protein, 107 aa, Glycine max
  peptide (1)..(107): Ceres Seq. ID no. 12609569
MMELKARRECVRQNVAILKKEEERIAKEGSKGKRVSTGKVSGPDLKSFIQQFPVASEGKEVEESPSAMDGLRNPQESLAEKEKDESESSEPTGSGASFRPGTWQPPT

SEQ ID NO: 52165 - DNA, 1058 bp, Glycine max
  misc_feature (1)..(1058): Ceres Seq. ID no. 12609214
gatccgtagaatggcttcttcgtcttcgtctccgtctcctacggcgatgaaggaaggagactactacccaaactggacggagcttccaccggagctgacgtcatcgattcttcaccgcctcggcgcgatcgagatagtggaaaccgctcggagagtatgcagatcgtggcgtcgcgtctgcaaagacccttcgatgtggcgcaaaatcgacatgcgtaacctcggagaccatggggacatgtactacgaggaattgtgccgtcacgcagttgatcttagccaaggagggttggttgagatcaatctctgccacttcgctactgattctctcctcagctacatcgctgatagttcaagtaacctgagaagccttaaagttgcacaatgctacgaaataacaagcgagggacttatagaagcagctgccaagcttccgttgcttgaagaactcgaggtctcatactgctcattatcagaagagtctctcaaagtcataggcaagtcttgtccaaacctcaagaccttgaagaaaaactgcgtcggttacaggcgtcctcgagacgagtctgatgacgtcgctctagcaatcgccgaaacaatgccaggacttcgccacctccagctcttcggggacaggttaacagacgttggtttaaacgccattctcgacggttgtcctaacctggaacatcttgatctgcgccagtgtttcaacgttgaacttgttgggtatctggagaagcgatgtctcgagagggtcaaagttgtgagacgccctaatgactcggttcatgattacccgttcgatgcaacggttaacgacgtgtcttcatcagacgatggcgacccttatggtttatctgatgttgatataatgtcggaagatgagttttactatgatgacctgtcagaagatgctagtgacaactctgactttgacccgtacgaatattattattaggattggatctgtgtttctaaatgcaatggattcgcatgtaataaaaccttttaaaactccttcacgacctcctctaatcatgcttgtaatttcgttg

SEQ ID NO: 52166 - protein, 319 aa, Glycine max
  peptide (1)..(319): Ceres Seq. ID no. 12609215
IRRMASSSSSPSPTAMKEGDYYPNWTELPPELTSSILHRLGAIEIVETARRVCRSWRRVCKDPSMWRKIDMRNLGDHGDMYYEELCRHAVDLSQGGLVEINLCHFATDSLLSYIADSSSNLRSLKVAQCYEITSEGLIEAAAKLPLLEELEVSYCSLSEESLKVIGKSCPNLKTLKKNCVGYRRPRDESDDVALAIAETMPGLRHLQLFGDRLTDVGLNAILDGCPNLEHLDLRQCFNVELVGYLEKRCLERVKVVRRPNDSVHDYPFDATVNDVSSSDDGDPYGLSDVDIMSEDEFYYDDLSEDASDNSDFDPYEYYY

SEQ ID NO: 52167 - protein, 316 aa, Glycine max
  peptide (1)..(316): Ceres Seq. ID no. 12609216
MASSSSSPSPTAMKEGDYYPNWTELPPELTSSILHRLGAIEIVETARRVCRSWRRVCKDPSMWRKIDMRNLGDHGDMYYEELCRHAVDLSQGGLVEINLCHFATDSLLSYIADSSSNLRSLKVAQCYEITSEGLIEAAAKLPLLEELEVSYCSLSEESLKVIGKSCPNLKTLKKNCVGYRRPRDESDDVALAIAETMPGLRHLQLFGDRLTDVGLNAILDGCPNLEHLDLRQCFNVELVGYLEKRCLERVKVVRRPNDSVHDYPFDATVNDVSSSDDGDPYGLSDVDIMSEDEFYYDDLSEDASDNSDFDPYEYYY

SEQ ID NO: 52168 - protein, 304 aa, Glycine max
  peptide (1)..(304): Ceres Seq. ID no. 12609217
MKEGDYYPNWTELPPELTSSILHRLGAIEIVETARRVCRSWRRVCKDPSMWRKIDMRNLGDHGDMYYEELCRHAVDLSQGGLVEINLCHFATDSLLSYIADSSSNLRSLKVAQCYEITSEGLIEAAAKLPLLEELEVSYCSLSEESLKVIGKSCPNLKTLKKNCVGYRRPRDESDDVALAIAETMPGLRHLQLFGDRLTDVGLNAILDGCPNLEHLDLRQCFNVELVGYLEKRCLERVKVVRRPNDSVHDYPFDATVNDVSSSDDGDPYGLSDVDIMSEDEFYYDDLSEDASDNSDFDPYEYYY

SEQ ID NO: 52169 - DNA, 1229 bp, Glycine max
  misc_feature (1)..(1229): Ceres Seq. ID no. 13594727
attaggcagagaagagaaaaatgggtaaggatttatccaaacgtgtcctcacttttctgatattgatctcgttactggcggtggcaatgaaccttctgtccacggtagaggcacagaacaagaagaagccgaggagagatgttcctctagtgaaaggtctctcatggagcttttaccagaaagcatgtccaaaagtggaaagcatcatcaggaaagagctcaagaaagtcttcaagagagacattggtttagccgcagccatccttcgaatacatttccatgactgcttcgttcagggatgtgaagcatcagtgctgctagatggatcagcgagtggaccaggagagcaatcatcgatcccgaatctgacactccgtcaagccgcctttgtcgtcatcaataaccttcgtgcactcgtccacaagcagtgtggtcaagtcgtctcttgctccgacatcctcgctctcgccgcccgtgactccgtcgtcctttcaggagggccagactatgctgtaccacttggccgacgcgactcactagcattcgcgagccagaacacaacgttaaacaacttgccgccaccattcgccaacgcgagccaactcatcgccgacttcgccaatagaaacctcaacatcaccgacttagttgcactctccggtggtcacaccatcggaatcgcgcattgcccgtctttcacagaccggctctacccgaaccaagacccaacaatgaacaagtccttcgcgaacaacctcaaacgcacttgccccaccgctaactcgagcaacacgcaagtgaatgacataaggagccctgacgtgttcgacaataagtactacgttgatctcatgaaccgacaagggctgttcacatcagaccaggacctgttcacggacaagaggacacgtggtatcgtggagagctttgcgatcgaccagaagctattttttgatcattttgtggtggggatgatcaagatgggccagatgagtgtcttgacggggtcacaaggagagattcgtgcaaactgttccgccagaaacactgaaagtttcatgtctgttttggaagaaggcatactcgaggaggctctttccatgatgtagatgaaaccatataaaatatcgcctcttattttcctttgactttgttttttttagttgacgcacttgtggtttgtggaatgctttaagactatctgataaataagagtgttgttttatctt

SEQ ID NO: 52170 - protein, 362 aa, Glycine max
  peptide (1)..(362): Ceres Seq. ID no. 13594728
MGKDLSKRVLTFLILISLLAVAMNLLSTVEAQNKKKPRRDVPLVKGLSWSFYQKACPKVESIIRKELKKVFKRDIGLAAAILRIHFHDCFVQGCEASVLLDGSASGPGEQSSIPNLTLRQAAFVVINNLRALVHKQCGQVVSCSDILALAARDSVVLSGGPDYAVPLGRRDSLAFASQNTTLNNLPPPFANASQLIADFANRNLNITDLVALSGGHTIGIAHCPSFTDRLYPNQDPTMNKSFANNLKRTCPTANSSNTQVNDIRSPDVFDNKYYVDLMNRQGLFTSDQDLFTDKRTRGIVESFAIDQKLFFDHFVVGMIKMGQMSVLTGSQGEIRANCSARNTESFMSVLEEGILEEALSMM

SEQ ID NO: 52171 - protein, 340 aa, Glycine max
  peptide (1)..(340): Ceres Seq. ID no. 13594729
MNLLSTVEAQNKKKPRRDVPLVKGLSWSFYQKACPKVESIIRKELKKVFKRDIGLAAAILRIHFHDCFVQGCEASVLLDGSASGPGEQSSIPNLTLRQAAFVVINNLRALVHKQCGQVVSCSDILALAARDSVVLSGGPDYAVPLGRRDSLAFASQNTTLNNLPPPFANASQLIADFANRNLNITDLVALSGGHTIGIAHCPSFTDRLYPNQDPTMNKSFANNLKRTCPTANSSNTQVNDIRSPDVFDNKYYVDLMNRQGLFTSDQDLFTDKRTRGIVESFAIDQKLFFDHFVVGMIKMGQMSVLTGSQGEIRANCSARNTESFMSVLEEGILEEALSMM

SEQ ID NO: 52172 - DNA, 660 bp, Glycine max
  misc_feature (1)..(660): Ceres Seq. ID no. 13594789
actgaaactctccacagaagaagaagataacatggcgacaagcgcatctgctttgctcacacccacaactttctcctctacaatctcccagaaacacccgaactccatctcattccacggcctccgtcctctccgcctcggtggctcctcatctgccttacccaagctatccaccacctccggaagaagatcttcctcctccgccgtcgtgagagccgagctcagcccatccgtcgttattagcctcagcacaggtctctccctcttcctaggccggttcgtcttcttcaacttccagagagagaatgtggctaaacaggtgccggagcagaacgggaagacccacttcgaagcgggagatgatcgtgccaaggagtacgtaagcctcttgaaatcgaacgaccctgttggattcaacatcgtggatgttcttgcttggggttctattggtcacatcgttgcttactatgttttggccacttctagcaatggctacgatccaagcttctttggctgattcattcaaactatatctctctcgtttatgtatatgtttgacttgtatggcaagttacccaatctagtcaccaatctttgtttcttctgcttgtttctgcctctgtgggtcttcctttcgtttgaaacatattatatttcgtg

SEQ ID NO: 52173 - protein, 171 aa, Glycine max
  peptide (1)..(171): Ceres Seq. ID no. 13594790
LKLSTEEEDNMATSASALLTPTTFSSTISQKHPNSISFHGLRPLRLGGSSSALPKLSTTSGRRSSSSAVVRAELSPSVVISLSTGLSLFLGRFVFFNFQRENVAKQVPEQNGKTHFEAGDDRAKEYVSLLKSNDPVGFNIVDVLAWGSIGHIVAYYVLATSSNGYDPSFFG

SEQ ID NO: 52174 - protein, 161 aa, Glycine max
  peptide (1)..(161): Ceres Seq. ID no. 13594791
MATSASALLTPTTFSSTISQKHPNSISFHGLRPLRLGGSSSALPKLSTTSGRRSSSSAVVRAELSPSVVISLSTGLSLFLGRFVFFNFQRENVAKQVPEQNGKTHFEAGDDRAKEYVSLLKSNDPVGFNIVDVLAWGSIGHIVAYYVLATSSNGYDPSFFG

SEQ ID NO: 52175 - DNA, 828 bp, Glycine max
  misc_feature (1)..(828): Ceres Seq. ID no. 14302000
acttccattgtatcttttctagggtttttaaggtttccgcacgaatcttcaatacacgtatcaatatcatcatgactaccgaagagaaagagatcctcgccgccaaattggaagagcagaagatcgatcttgataagcctgaggttgaggacgctgacgacaacgatgaggatgactccgaagacgatgataaggatgatgatgcagagggacaagatggagagggaggcaagtcaaaacaaagcaggagtgagaagaagagtcgcaaagccatgttgaagcttgggatgaaacccatcactggtgttagccgtgtcaccatcaaaaagagcaagaacatcatgttcgtcatatcgaaacccgatgtgttcaagagccctgcgtcagacacttatgtgatcttcggagaggcaaagattgaggatttgagctctcagatccagtcccaggccgcagagcagttcaaggctccggatctcagcaacgttgtctcgcaaggtgaatcttcgtccagcgctgcagtggttcaagacgatgatgaggagattgacgaggatggtgttgacgcaaaggacgttgagttggtgatgacccaagcgggagtgactaggccaaaggctgtgaaagcgcttaaggctgctgatggagatattgtcactgccatcatggaacttaccacctaaatctaaatcgtttcaactttaaatgtggtgcctgtcaaaaatgagttggaattttgtttttcatgtttcctttgaagtggttttcagtgttgtatcagtataaacctcatagattattgaatttcagtttgatttgattttgaat

SEQ ID NO: 52176 - protein, 226 aa, Glycine max
  peptide (1)..(226): Ceres Seq. ID no. 14302001
FHCIFSRVFKVSARIFNTRINIIMTTEEKEILAAKLEEQKIDLDKPEVEDADDNDEDDSEDDDKDDDAEGQDGEGGKSKQSRSEKKSRKAMLKLGMKPITGVSRVTIKKSKNIMFVISKPDVFKSPASDTYVIFGEAKIEDLSSQIQSQAAEQFKAPDLSNVVSQGESSSSAAVVQDDDEEIDEDGVDAKDVELVMTQAGVTRPKAVKALKAADGDIVTAIMELTT

SEQ ID NO: 52177 - protein, 203 aa, Glycine max
  peptide (1)..(203): Ceres Seq. ID no. 14302002
MTTEEKEILAAKLEEQKIDLDKPEVEDADDNDEDDSEDDDKDDDAEGQDGEGGKSKQSRSEKKSRKAMLKLGMKPITGVSRVTIKKSKNIMFVISKPDVFKSPASDTYVIFGEAKIEDLSSQIQSQAAEQFKAPDLSNVVSQGESSSSAAVVQDDDEEIDEDGVDAKDVELVMTQAGVTRPKAVKALKAADGDIVTAIMELTT

SEQ ID NO: 52178 - protein, 136 aa, Glycine max
  peptide (1)..(136): Ceres Seq. ID no. 14302003
MLKLGMKPITGVSRVTIKKSKNIMFVISKPDVFKSPASDTYVIFGEAKIEDLSSQIQSQAAEQFKAPDLSNVVSQGESSSSAAVVQDDDEEIDEDGVDAKDVELVMTQAGVTRPKAVKALKAADGDIVTAIMELTT

SEQ ID NO: 52179 - DNA, 840 bp, Glycine max
  misc_feature (1)..(840): Ceres Seq. ID no. 13581866
ggattggatcccttccctccctctgattccattccatcggagcctggcgaggcgacggtggagtgaagatcttgacaggactgcctcgctccccacggcggcgaggcgagaccgaccggcgacgcgcggccagccctgaattgaatcagctaccatggcggccttgccattggctacagctgaagtctgcgacgccaactcgcacctcatcaccggcggcgagctgcgcgcgctgcagcccgtcttccagatctacgggaggcggcaggtcttcgcgggccccatcgtgacgctcaaggtgttcgaggacaacgtgctcgtccgcgagttcctggaggagaagggccagggcagggtgctggtggtggacggcggcggcagcctgcggtgcgccatcctgggcggcaaccccgtccagcaggcgcagaacaacgggtgggcggggatcgtggtgaacgggtgcatccgggacgtggacgagatcaacgggtgcgacatcggcgtgcgcgccctcgcctcgcaccccatgaaggccaacaagaaggggatgggcgagaagcacgtcccggtcaccatcgcgggcaccaggatctgcgacggcgagtggctctacgccgacaccgacggcatcctcgtctccaggaccgagctcatcgtgtaggagaggccgccgcctcgttgtccgtgttgttccactatgtggttgtagttgcttgaattgaatgatgttgtatctcaacttgagattcagaagctctgaacttgtaataactgtaagcttaaattgcctgatcaaatggaatgaggaatgggaataaaattatctgttgcatgcctgtc

SEQ ID NO: 52180 - protein, 168 aa, Glycine max
  peptide (1)..(168): Ceres Seq. ID no. 13581867
MAALPLATAEVCDANSHLITGGELRALQPVFQIYGRRQVFAGPIVTLKVFEDNVLVREFLEEKGQGRVLVVDGGGSLRCAILGGNPVQQAQNNGWAGIVVNGCIRDVDEINGCDIGVRALASHPMKANKKGMGEKHVPVTIAGTRICDGEWLYADTDGILVSRTELIV

SEQ ID NO: 52181 - DNA, 685 bp, Glycine max
  misc_feature (1)..(685): Ceres Seq. ID no. 12610177
aatcctccgtccgtagcaaacttttctccggttctcggcaaggaccagagtgatgatgatgaagaacaaagccggtggtgcgggtggcggtatgtccggatccggtgaaggagccggaccaacggccgcagcagccgcggcagcattacagaagcaaaaggcgttattacagagagtagagactgacatcacatctgtcgtcgataacttcacccaaatcgtcaatgtcgcgagggtgagcgatcttccggtgaagaactcgcaagaagcatacatgatggagatgcgagcttctaaaatggttcaagcagctgattctattttgaagctcgtatcggagctgaagcaaacagcgatcttctctggatttgcatcacttaacgaccatgtcgagcaaaggatcgcagagtttgatcaagaggctgagaagacaaatcgattgttggctagaataggggatgatgcatcagcgagtcttaaagagcttgaggcgcactattactcttctgctcagaggttgactccagacgtttaaagggatttagttaaatagcccaaatatttaggccactattcactagtctcggatcaaactctggttttaatgggcttttaacagaatctatttttttatttcaacttgtttcattcgtcaacatagaaggtagatatcaatactcttttt

SEQ ID NO: 52182 - protein, 160 aa, Glycine max
  peptide (1)..(160): Ceres Seq. ID no. 12610178
MMMKNKAGGAGGGMSGSGEGAGPTAAAAAAALQKQKALLQRVETDITSVVDNFTQIVNVARVSDLPVKNSQEAYMMEMRASKMVQAADSILKLVSELKQTAIFSGFASLNDHVEQRIAEFDQEAEKTNRLLARIGDDASASLKELEAHYYSSAQRLTPDV

SEQ ID NO: 52183 - protein, 159 aa, Glycine max
  peptide (1)..(159): Ceres Seq. ID no. 12610179
MMKNKAGGAGGGMSGSGEGAGPTAAAAAAALQKQKALLQRVETDITSVVDNFTQIVNVARVSDLPVKNSQEAYMMEMRASKMVQAADSILKLVSELKQTAIFSGFASLNDHVEQRIAEFDQEAEKTNRLLARIGDDASASLKELEAHYYSSAQRLTPDV

SEQ ID NO: 52184 - protein, 158 aa, Glycine max
  peptide (1)..(158): Ceres Seq. ID no. 12610180
MKNKAGGAGGGMSGSGEGAGPTAAAAAAALQKQKALLQRVETDITSVVDNFTQIVNVARVSDLPVKNSQEAYMMEMRASKMVQAADSILKLVSELKQTAIFSGFASLNDHVEQRIAEFDQEAEKTNRLLARIGDDASASLKELEAHYYSSAQRLTPDV

SEQ ID NO: 52185 - DNA, 1077 bp, Glycine max
  misc_feature (1)..(1077): Ceres Seq. ID no. 13638750
gcattatcgcgttctcgttttccatagcaactgttcaccaaccagcatagcctgcgggctggttgcgcaatggcggcgggtcccttcgcgctccgcctagggccgcgcctcgcggcgccggccgtggcgagtgcgactaggggaggaggacggggaagtgaccgccctacggccagccgagcgctggtgtcaaagaagtcaaacaaggaccaccgtttgtggattaggaaagattcggctgggtcagggaagaaggctctttgtcttgttaatactgtttcaaaactaccgaatgaaagagaaactgtttatggtgcattggataggtggactgcttttgagtctgaatttccaattatagcagcggctaaagctttggagatgttgaaaaagcaaagaaaatggctacagattatccaggtaaccaagtggctgatgagtaaaggtcaggtgctgacatggacaacgtacgatacactgctgttggctctttctatggatggaagagtagakgargstgagtcamtttggaatactatctttcacacttatacacgctcagtgtgcacgaggtggttctctcggatgatccagagtttcaccacgcgccatatttcagacaaagtgttggagatatatgctgacacggaggaattgggcgtgcgtccacacgaggatacaccacgaggagtcgggcgagcacttgcaccttcagagcaggaagataagcagaagcctgtcctcgaaaaacactcgaagaagtggaagtgcatacacttcaatggtgagcgtgttcgtgtgcggagggcagagcctttggcctagcaaacgtcttctggataggttcggatgaacaaagagagtctcctctcctggacatatgtgatagctatagttcttccgaggtcytatrcgagcaygtcaggtagarcaaggtgtggaaatwgtaatrctctctagacaaatggataatatcatagtgcagggkgagarctggcaytactaatgatgttggtatccancacaygtgtaagttgtgatgtttcagacaggttgctgtcgtcttcggcaccatgt

SEQ ID NO: 52186 - protein, 251 aa, Glycine max
  peptide (1)..(251): Ceres Seq. ID no. 15220439
  misc_feature (148)..(148): Xaa is any aa, unknown or other
  misc_feature (149)..(149): Xaa is any aa, unknown or other
  misc_feature (150)..(150): Xaa is any aa, unknown or other
  misc_feature (153)..(153): Xaa is any aa, unknown or other
MAAGPFALRLGPRLAAPAVASATRGGGRGSDRPTASRALVSKKSNKDHRLWIRKDSAGSGKKALCLVNTVSKLPNERETVYGALDRWTAFESEFPIIAAAKALEMLKKQRKWLQIIQVTKWLMSKGQVLTWTTYDTLLLALSMDGRVXXXESXWNTIFHTYTRSVCTRWFSRMIQSFTTRHISDKVLEIYADTEELGVRPHEDTPRGVGRALAPSEQEDKQKPVLEKHSKKWKCIHFNGERVRVRRAEPLA

SEQ ID NO: 52187 - protein, 147 aa, Glycine max
  peptide (1)..(147): Ceres Seq. ID no. 15220440
  misc_feature (44)..(44): Xaa is any aa, unknown or other
  misc_feature (45)..(45): Xaa is any aa, unknown or other
  misc_feature (46)..(46): Xaa is any aa, unknown or other
  misc_feature (49)..(49): Xaa is any aa, unknown or other
MLKKQRKWLQIIQVTKWLMSKGQVLTWTTYDTLLLALSMDGRVXXXESXWNTIFHTYTRSVCTRWFSRMIQSFTTRHISDKVLEIYADTEELGVRPHEDTPRGVGRALAPSEQEDKQKPVLEKHSKKWKCIHFNGERVRVRRAEPLA

SEQ ID NO: 52188 - protein, 129 aa, Glycine max
  peptide (1)..(129): Ceres Seq. ID no. 15220441
  misc_feature (26)..(26): Xaa is any aa, unknown or other
  misc_feature (27)..(27): Xaa is any aa, unknown or other
  misc_feature (28)..(28): Xaa is any aa, unknown or other
  misc_feature (31)..(31): Xaa is any aa, unknown or other
MSKGQVLTWTTYDTLLLALSMDGRVXXXESXWNTIFHTYTRSVCTRWFSRMIQSFTTRHISDKVLEIYADTEELGVRPHEDTPRGVGRALAPSEQEDKQKPVLEKHSKKWKCIHFNGERVRVRRAEPLA

SEQ ID NO: 52189 - DNA, 602 bp, Glycine max
  misc_feature (1)..(602): Ceres Seq. ID no. 13594642
acaaccaacatcccaaccagcagcgatccatccatcctccacaatcagagcaagcgagcgaccaagaaaccatcacagcgaccatcatcttctctgcctccatggcggcgcaccagcagcagcaaccgcagcaggcggtggggttcgaggactacctgccggtgatggcggagcggctgggggaggagggcctgatggaggagctggcggcggggttccgcctgctcatggacccggcgtcgggcctcatcaccttccacagcctccgccgcaacgcgccgctgctgggcctgggcgccatgtccgacgacgacctccgcgggatgctcgccgagggcgacttcgacggcgacggcgcgctgtcccagatggagttctgcgtcctcatggtcaggctcagccccgacctcatggaccagccccgccggtggctcgacgacgccgtcgcccaggcctcccacttcctcttcaccagctaggcggagcatctggtgtcgatcggataggaaattaatcttcttcttcgttgttgttttttcttctctcccccgctgttcatagagtcaggattcaagaaaagaaagggcactgtcgattggttg

SEQ ID NO: 52190 - protein, 170 aa, Glycine max
  peptide (1)..(170): Ceres Seq. ID no. 13594643
QPTSQPAAIHPSSTIRASERPRNHHSDHHLLCLHGGAPAAATAAGGGVRGLPAGDGGAAGGGGPDGGAGGGVPPAHGPGVGPHHLPQPPPQRAAAGPGRHVRRRPPRDARRGRLRRRRRAVPDGVLRPHGQAQPRPHGPAPPVARRRRRPGLPLPLHQLGGASGVDRIGN

SEQ ID NO: 52191 - protein, 158 aa, Glycine max
  peptide (1)..(158): Ceres Seq. ID no. 13594644
NQHPNQQRSIHPPQSEQASDQETITATIIFSASMAAHQQQQPQQAVGFEDYLPVMAERLGEEGLMEELAAGFRLLMDPASGLITFHSLRRNAPLLGLGAMSDDDLRGMLAEGDFDGDGALSQMEFCVLMVRLSPDLMDQPRRWLDDAVAQASHFLFTS

SEQ ID NO: 52192 - protein, 125 aa, Glycine max
  peptide (1)..(125): Ceres Seq. ID no. 13594645
MAAHQQQQPQQAVGFEDYLPVMAERLGEEGLMEELAAGFRLLMDPASGLITFHSLRRNAPLLGLGAMSDDDLRGMLAEGDFDGDGALSQMEFCVLMVRLSPDLMDQPRRWLDDAVAQASHFLFTS

SEQ ID NO: 52193 - DNA, 1256 bp, Glycine max
  misc_feature (1)..(1256): Ceres Seq. ID no. 15227026
aaaatcctctctctctctctctgtttctcaatttctctggagaatcatggtgaatgccaaagggtcaaccaaaaaatcgaatcttgatcggttcctccattgcacaacacccttagtccctccccaatctctcccaaaggcggagattagaaaactaaatcgattgtggcatccttgggacagagaaaaggtagagtttttcaggcttagtgatctatgggattgctacgacgaatggagcgcgtacggagctagcgtccccattcatctcgccaacggcgaatctctcgttcaatactacgttccttacctctccgccatccagattttcacctctcattcctccttgatcagggaagaatctgaagatggggaaagctatccctttagtgactcaggtagcgatgagagtgtctccggggaagatggggtcttgcatctgaatgatcgtttgggttacctttatctccagtactttgagagatcagctccttatactagagtccctctcatggataagatcaatgagttggctcagagatatccgggtttgatgtcgttgagaagcgtagatctttctccagccagctggatgtctgttgcttggtaccctatttatcatataccaatgggaagaaccattaaagacttgtccacttgtttcctcacttaccacactctttcttcttctttccaagatatggagccggaagagaacggaggggagaaagagaggatgagaaaggaaggggaagacataactctcctcccatttgggatggctacttacaagatgcaaggcgatgtctggctttcgcacgaccacgatgaccaggagagattggcttcgctttgtagcgttgcggattcgtggctaaaacagcttagggtccaacatcatgacttcaactacttctgcaccatgtcgatgactagtcctcgtggctaaaaacaaacccggtttccatgtttgtttgtttgtctgctcattgtcatcgtaaaagtcccaccgtttctttgtttatggaaccgctggcgttttctaaaaagagtgatctggcttttgtagcgttttggttaggatatagcgttttaagacacctaaccttttgagaaaagtgtatgtcggtatatagagtttgttgtcttgttgaaacagagtaatcgttgttacttgttgcgtgttgaaacagagtaaatgctttcttgtaagtttatattacatcatccttcacttgaaactttttttgtgcctc

SEQ ID NO: 52194 - protein, 315 aa, Glycine max
  peptide (1)..(315): Ceres Seq. ID no. 15227027
KSSLSLSVSQFLWRIMVNAKGSTKKSNLDRFLHCTTPLVPPQSLPKAEIRKLNRLWHPWDREKVEFFRLSDLWDCYDEWSAYGASVPIHLANGESLVQYYVPYLSAIQIFTSHSSLIREESEDGESYPFSDSGSDESVSGEDGVLHLNDRLGYLYLQYFERSAPYTRVPLMDKINELAQRYPGLMSLRSVDLSPASWMSVAWYPIYHIPMGRTIKDLSTCFLTYHTLSSSFQDMEPEENGGEKERMRKEGEDITLLPFGMATYKMQGDVWLSHDHDDQERLASLCSVADSWLKQLRVQHHDFNYFCTMSMTSPRG

SEQ ID NO: 52195 - protein, 300 aa, Glycine max
  peptide (1)..(300): Ceres Seq. ID no. 15227028
MVNAKGSTKKSNLDRFLHCTTPLVPPQSLPKAEIRKLNRLWHPWDREKVEFFRLSDLWDCYDEWSAYGASVPIHLANGESLVQYYVPYLSAIQIFTSHSSLIREESEDGESYPFSDSGSDESVSGEDGVLHLNDRLGYLYLQYFERSAPYTRVPLMDKINELAQRYPGLMSLRSVDLSPASWMSVAWYPIYHIPMGRTIKDLSTCFLTYHTLSSSFQDMEPEENGGEKERMRKEGEDITLLPFGMATYKMQGDVWLSHDHDDQERLASLCSVADSWLKQLRVQHHDFNYFCTMSMTSPRG

SEQ ID NO: 52196 - DNA, 1264 bp, Glycine max
  misc_feature (1)..(1264): Ceres Seq. ID no. 13594646
agcaaaaccgcccaaacgggcaaccaacgaactctgttcgaccactataatggcggccgccgccacagccacctctgccgccgcagccgcagccgccgccgccgcatgttcgtccaacgtctctgtttccgacgccaacaacgcatctccctccaacatacccgccatatcctctgcttccgactccgactccgaggatctcctcctcctcctcctcccaaacctcctccccgcgtccgccgccgccgccccctcatccgaggcgcagctccaccaattccacctccccgcgcttccgtcccccatcaccgtccgcaccatcccttccctcgggctcaccttccagctctggccctccgccaccacgctcctccgcttcctccccgcctccccgcatctcctcccgcgcccgcccaccgcacactgcccgctcagcatcctggagctcggctccgggaccggcgccgcgggcctcgccctggcggcggccctcccggcgcacgccgtcctctccgacctctccgccgcgctccccaatctccgccacaacgcctccctcaacgcgcccctcctcgactcccgcggcggctccgtctccgtcgtgccgctcccctggggcgatgccgccgcgatggaggccgtggtggccccagcgccggcgtttcggtttgacctcgtcgtggcgtcggacgtggtctactacgaggagttggtcgaccccttgatagagacgctgtgcttcttcgtgaagggggatgtggtgttcctgatggcgcacatgaggaggtggaaacgcacggataagaaattcttcgggaaggccaggaaggtcttcgacattgaggtgttgcacaaggatccaccccccgaaggctggcgccatggtccggtggtataccgcttcacagtgaagaagcagcgtggcaagaagtgaagaagcagcttccaaaaggtaatggatgtaatgtatgcttgcttatgcccatgctgattctactgctagagttaaacacaaaatgtttcctgcaaacgatgtgacattgtgcaactgaggacaaaattaagcaggaaatctttcttccgaactcggaacagtatcacattgtgcaactgaggacgagaatttagttgtatgctggtttggattgtgcgggtgcttctgctggcccaatttatagttgatttcgtggtacatgatcaaagtgttggattgtagttccgaatttcatgaacgctcacctaaaataatacattgcctgaaccc

SEQ ID NO: 52197 - protein, 310 aa, Glycine max
  peptide (1)..(310): Ceres Seq. ID no. 15221397
AKPPKRATNELCSTTIMAAAATATSAAAAAAAAAACSSNVSVSDANNASPSNIPAISSASDSDSEDLLLLLLPNLLPASAAAAPSSEAQLHQFHLPALPSPITVRTIPSLGLTFQLWPSATTLLRFLPASPHLLPRPPTAHCPLSILELGSGTGAAGLALAAALPAHAVLSDLSAALPNLRHNASLNAPLLDSRGGSVSVVPLPWGDAAAMEAVVAPAPAFRFDLVVASDVVYYEELVDPLIETLCFFVKGDVVFLMAHMRRWKRTDKKFFGKARKVFDIEVLHKDPPPEGWRHGPVVYRFTVKKQRGKK

SEQ ID NO: 52198 - protein, 294 aa, Glycine max
  peptide (1)..(294): Ceres Seq. ID no. 15221398
MAAAATATSAAAAAAAAAACSSNVSVSDANNASPSNIPAISSASDSDSEDLLLLLLPNLLPASAAAAPSSEAQLHQFHLPALPSPITVRTIPSLGLTFQLWPSATTLLRFLPASPHLLPRPPTAHCPLSILELGSGTGAAGLALAAALPAHAVLSDLSAALPNLRHNASLNAPLLDSRGGSVSVVPLPWGDAAAMEAVVAPAPAFRFDLVVASDVVYYEELVDPLIETLCFFVKGDVVFLMAHMRRWKRTDKKFFGKARKVFDIEVLHKDPPPEGWRHGPVVYRFTVKKQRGKK

SEQ ID NO: 52199 - protein, 223 aa, Glycine max
  peptide (1)..(223): Ceres Seq. ID no. 15221399
SKTAQTGNQRTLFDHYNGGRRHSHLCRRSRSRRRRMFVQRLCFRRQQRISLQHTRHILCFRLRLRGSPPPPPPKPPPRVRRRRPLIRGAAPPIPPPRASVPHHRPHHPFPRAHLPALALRHHAPPLPPRLPASPPAPAHRTLPAQHPGARLRDRRRGPRPGGGPPGARRPLRPLRRAPQSPPQRLPQRAPPRLPRRLRLRRAAPLGRCRRDGGRGGPSAGVSV

SEQ ID NO: 52200 - DNA, 1154 bp, Glycine max
  misc_feature (1)..(1154): Ceres Seq. ID no. 13638931
gcaagcatccattcgagcttcacaaaactagtactccaacgtgtgctcctttctcaagtgtgtgtgtccgtgagctagctttagtattagtgcagtttagctactagctagttggaacttacgttgacactgctcttcttctgcgtgttgtgcactagtgtgtccgtgtgctagtagcctacagcaccgtttctctcgggaggcatttcatatacacgcgattaacacgtacagtacagacatccttcaacgacaatcatggtcggcgctcaagagcaagggctgaagctgctggtgccgcggagcggcgtgagcatatacgccatccgcgtccagatggcgcttgccatgaagggtctggcttacgactacctccccgaggaccccaggtgcaagagcgacctcctcctcgcgtccaatcccgtgcacaagacactgcccgtcctcatccacagcggcaggcccgtctgcgagtcgctcatcatcgtggagtaccttgacgatgcattccccggcaacggcgcgtccatcctccccgccgacccctaccgccgcgccgtcgcccgcttttgggccgcctatgtcgacaacaagatgttcccttcgtgcatcggcattctcaatacggcgaatcagcaggagagagctgacaaggtggaggagaccttggcagctttcgggctcctagaggccgccttggcggagtgctccaaagaaggcgaggcggaggcgccgttcttcggtggtggctccatcgggttcctggacatcgcgctcgggtgctatattccctggttcgaagcgataggccgccttgctggcgtgccgccgttcctagacgcggcgaggacaccaaagctggctgcgtgggcggggcggttcagcgccgccaagccgttcattgccctgctgactgcggtggacaaggtggaggagtacatcactaaggtgctttatccaaagtggaacgtcgctgtcacagctagcaactaattaaagatcatgtatttccattgccggcaggggatcgtgtcgatccaataattactttgctttccgagttaactgttagatagattgcttagatagattgattggctctcaaggcaactatgtaattttttggctctcagagtaactttgagtttacttct

SEQ ID NO: 52201 - protein, 244 aa, Glycine max
  peptide (1)..(244): Ceres Seq. ID no. 13638932
MVGAQEQGLKLLVPRSGVSIYAIRVQMALAMKGLAYDYLPEDPRCKSDLLLASNPVHKTLPVLIHSGRPVCESLIIVEYLDDAFPGNGASILPADPYRRAVARFWAAYVDNKMFPSCIGILNTANQQERADKVEETLAAFGLLEAALAECSKEGEAEAPFFGGGSIGFLDIALGCYIPWFEAIGRLAGVPPFLDAARTPKLAAWAGRFSAAKPFIALLTAVDKVEEYITKVLYPKWNVAVTASN

SEQ ID NO: 52202 - protein, 218 aa, Glycine max
  peptide (1)..(218): Ceres Seq. ID no. 13638933
MALAMKGLAYDYLPEDPRCKSDLLLASNPVHKTLPVLIHSGRPVCESLIIVEYLDDAFPGNGASILPADPYRRAVARFWAAYVDNKMFPSCIGILNTANQQERADKVEETLAAFGLLEAALAECSKEGEAEAPFFGGGSIGFLDIALGCYIPWFEAIGRLAGVPPFLDAARTPKLAAWAGRFSAAKPFIALLTAVDKVEEYITKVLYPKWNVAVTASN

SEQ ID NO: 52203 - protein, 214 aa, Glycine max
  peptide (1)..(214): Ceres Seq. ID no. 13638934
MKGLAYDYLPEDPRCKSDLLLASNPVHKTLPVLIHSGRPVCESLIIVEYLDDAFPGNGASILPADPYRRAVARFWAAYVDNKMFPSCIGILNTANQQERADKVEETLAAFGLLEAALAECSKEGEAEAPFFGGGSIGFLDIALGCYIPWFEAIGRLAGVPPFLDAARTPKLAAWAGRFSAAKPFIALLTAVDKVEEYITKVLYPKWNVAVTASN

SEQ ID NO: 52204 - DNA, 1147 bp, Glycine max
  misc_feature (1)..(1147): Ceres Seq. ID no. 14301423
acacacgctccgcctccacctccgcttcccatttcccgccgcctcctttcctaaaaatctacacaaagattcgtaggaaaatcctgcccaaatcccccacctcccgtttctgctcccgttcccaccccaatcccctccaagaaaccctcgcccccctcgcctcgccgccatgggcagcgccgcctcgccgccgcgggccctcgacgcggcgacgcaggaggacctcaagcgcgtctccgcgcaccgcgccgtcgacatggtggagtccggcatgacgctggggctcggcaccggctccacggccgcgcacgcgctcgaccgcctcggggccctcctccgcaccggcgcgctgcgcgcggtcgccggggtgcccacctccctcaagacggaggcgcacgccgcgcgcgtcgggatccccatgctcgcgctcgccgacgccgccgagatccacctctccatcgacggcgccgacgaggtcgacccggacctcaacctcgtcaagggccgcggcggctcgctcctccgcgagaagatgatcgagggcgccggcgcccgcttcgtcgtcatcgtcgacgagtccaagctcgtcccccgcctcggctgcacgggctccgtgcccgtcgaggtcgtccccttcggcagcgcctacacgctcggcctcatccgcatggtgttcgacaaattgccgggcttccacgccaggctcaggaccgtcaagtccaaggccggcgacggccaggaggagctctttctcaccgacaacggcaaccacatcgtcgagatgttcttcgaggacggcatacacggcaacctgcgcgacataagcgacagcctgctgcgcatcacgggcgtcgtcgagcacggcatgttcctcggcatggccaccaaggtgatcgtcgccaagaaggacggcaccgtggcggtcctcagcaagaagtagcctggccgcctggggaagagtctgcagaggagatgacaataagcccagattcaagctgttcttgctcctgcggtgaacttgctctacgttactgttacagcgttttctcctattcatgggtaatgcgatggtgcccagcttaatgtggtgaagctaataaattttggacttcgctccataatgttatcaagtcagttttgtacttcc

SEQ ID NO: 52205 - protein, 256 aa, Glycine max
  peptide (1)..(256): Ceres Seq. ID no. 14301424
MGSAASPPRALDAATQEDLKRVSAHRAVDMVESGMTLGLGTGSTAAHALDRLGALLRTGALRAVAGVPTSLKTEAHAARVGIPMLALADAAEIHLSIDGADEVDPDLNLVKGRGGSLLREKMIEGAGARFVVIVDESKLVPRLGCTGSVPVEVVPFGSAYTLGLIRMVFDKLPGFHARLRTVKSKAGDGQEELFLTDNGNHIVEMFFEDGIHGNLRDISDSLLRITGVVEHGMFLGMATKVIVAKKDGTVAVLSKK

SEQ ID NO: 52206 - protein, 227 aa, Glycine max
  peptide (1)..(227): Ceres Seq. ID no. 14301425
MVESGMTLGLGTGSTAAHALDRLGALLRTGALRAVAGVPTSLKTEAHAARVGIPMLALADAAEIHLSIDGADEVDPDLNLVKGRGGSLLREKMIEGAGARFVVIVDESKLVPRLGCTGSVPVEVVPFGSAYTLGLIRMVFDKLPGFHARLRTVKSKAGDGQEELFLTDNGNHIVEMFFEDGIHGNLRDISDSLLRITGVVEHGMFLGMATKVIVAKKDGTVAVLSKK

SEQ ID NO: 52207 - protein, 222 aa, Glycine max
  peptide (1)..(222): Ceres Seq. ID no. 14301426
MTLGLGTGSTAAHALDRLGALLRTGALRAVAGVPTSLKTEAHAARVGIPMLALADAAEIHLSIDGADEVDPDLNLVKGRGGSLLREKMIEGAGARFVVIVDESKLVPRLGCTGSVPVEVVPFGSAYTLGLIRMVFDKLPGFHARLRTVKSKAGDGQEELFLTDNGNHIVEMFFEDGIHGNLRDISDSLLRITGVVEHGMFLGMATKVIVAKKDGTVAVLSKK

SEQ ID NO: 52208 - DNA, 800 bp, Glycine max
  misc_feature (1)..(800): Ceres Seq. ID no. 13594647
atcaagctactgagttctgactatccaacttaaaattatattatcttttcgacttcagattctcctctatttcactcaaacactaaagcttcagaaaatggcaatggcgtcgtttaacatgcagtcagtcttcgccggtggactgaccactcgcaagatcaacacgaacaagctttgctttgccggaaacttccataatctcaagaggaattgtcccgtgggagtgagatgtatggctgagggagaaccaatgaaagatgagtctgcaccttcgacctcggcgtctcagcctttgcccaagtcatcgtcgccaccaccacctcctcctactaaacctaaggtgagcacaaagtttagcgacttgctagcgttcagcggtccagcaccggaaagaataaacggtcgtttagctatggttggattcgtggctgcgttggcggttgaactttccaagggtgaaaacgttttagctcagatctccgacggtggtgtctcgtggttcctcggtacggcggcgatcttgacgcttgcgtcgcttgtgccccttttcaagggcataacagccgagtccaagtccaaaggttttatgacgtcagacgctgagctttggaatgggcgttttgcgatgcttggtttggtcgcgctggcgttcactgagtttgtcaagggtgggactctcgtttgagaaagaagagattgtgtattgcaaaatttgcccctgaatcctgtatagtattctggcttgttttaggcctactctgtgtcttttacatatggattagtgacatttgaaactttgg

SEQ ID NO: 52209 - protein, 195 aa, Glycine max
  peptide (1)..(195): Ceres Seq. ID no. 13594648
MAMASFNMQSVFAGGLTTRKINTNKLCFAGNFHNLKRNCPVGVRCMAEGEPMKDESAPSTSASQPLPKSSSPPPPPPTKPKVSTKFSDLLAFSGPAPERINGRLAMVGFVAALAVELSKGENVLAQISDGGVSWFLGTAAILTLASLVPLFKGITAESKSKGFMTSDAELWNGRFAMLGLVALAFTEFVKGGTLV

SEQ ID NO: 52210 - protein, 193 aa, Glycine max
  peptide (1)..(193): Ceres Seq. ID no. 13594649
MASFNMQSVFAGGLTTRKINTNKLCFAGNFHNLKRNCPVGVRCMAEGEPMKDESAPSTSASQPLPKSSSPPPPPPTKPKVSTKFSDLLAFSGPAPERINGRLAMVGFVAALAVELSKGENVLAQISDGGVSWFLGTAAILTLASLVPLFKGITAESKSKGFMTSDAELWNGRFAMLGLVALAFTEFVKGGTLV

SEQ ID NO: 52211 - protein, 188 aa, Glycine max
  peptide (1)..(188): Ceres Seq. ID no. 13594650
MQSVFAGGLTTRKINTNKLCFAGNFHNLKRNCPVGVRCMAEGEPMKDESAPSTSASQPLPKSSSPPPPPPTKPKVSTKFSDLLAFSGPAPERINGRLAMVGFVAALAVELSKGENVLAQISDGGVSWFLGTAAILTLASLVPLFKGITAESKSKGFMTSDAELWNGRFAMLGLVALAFTEFVKGGTLV

SEQ ID NO: 52212 - DNA, 1057 bp, Glycine max
  misc_feature (1)..(1057): Ceres Seq. ID no. 13594651
acttttgaactaatcgatcctacacgaccatcagccggagacgaccgccggcgttttttccgctttaatggaagcgttacttacttcaagggttgttccagttcaagttccttgtagaaagctctcatctttatctgctgatttgtcttgccttgagttaaggagatatcctgttagaagaggaagtgtctcgatcatgagctattccagattggtccgtccagtgactgcttctgtgcagccgcagagggtgtcggctttggggaatgaaggcaacactgttccttctaaagagattctcgatctttggagaggtgttgaagctgtatgcttcgatgtggatagcacggtatgtgtggatgaaggcattgatgaacttgcagagttctgtggagctggaaaggctgttgctgaatggactgccagagcaatgggtggatctgttccatttgaagaagctctagccgcaagactttctttgttcaagccttctctttccaaagttgatgaatatctccaaaagacacccccgaggctatcccctggcattgaagagttggtcaagaagctcagagccaataaaatcgatgtctatttgatatctggaggttttcgacagatgatcaatcctgtagcatcggttcttggcatccctcgagagaatatattcgccaacaatcttctatttggaaattctggtgagtttgtggggtttgatgagaaggaacctacttcaagaagtggaggcaaagccaaggcagtgcaacatatacgaaagggtcgtagctacaagacgatggccatgattggagacggagctactgatctagaagcacgtagacctggtggcgcggacttgttcatatgttatgctggagttcagcttcgtgaagctgttgcagcacaagcagactggcttatcttcaattttgaacctctcattaactccttggactaaaagcctcttctctatactgattagttccattgagagctcaactcattattcaactctcaaattttgtactctcctttttgaatgtgtgaaattccactg

SEQ ID NO: 52213 - protein, 296 aa, Glycine max
  peptide (1)..(296): Ceres Seq. ID no. 13594652
MEALLTSRVVPVQVPCRKLSSLSADLSCLELRRYPVRRGSVSIMSYSRLVRPVTASVQPQRVSALGNEGNTVPSKEILDLWRGVEAVCFDVDSTVCVDEGIDELAEFCGAGKAVAEWTARAMGGSVPFEEALAARLSLFKPSLSKVDEYLQKTPPRLSPGIEELVKKLRANKIDVYLISGGFRQMINPVASVLGIPRENIFANNLLFGNSGEFVGFDEKEPTSRSGGKAKAVQHIRKGRSYKTMAMIGDGATDLEARRPGGADLFICYAGVQLREAVAAQADWLIFNFEPLINSLD

SEQ ID NO: 52214 - protein, 253 aa, Glycine max
  peptide (1)..(253): Ceres Seq. ID no. 13594653
MSYSRLVRPVTASVQPQRVSALGNEGNTVPSKEILDLWRGVEAVCFDVDSTVCVDEGIDELAEFCGAGKAVAEWTARAMGGSVPFEEALAARLSLFKPSLSKVDEYLQKTPPRLSPGIEELVKKLRANKIDVYLISGGFRQMINPVASVLGIPRENIFANNLLFGNSGEFVGFDEKEPTSRSGGKAKAVQHIRKGRSYKTMAMIGDGATDLEARRPGGADLFICYAGVQLREAVAAQADWLIFNFEPLINSLD

SEQ ID NO: 52215 - protein, 175 aa, Glycine max
  peptide (1)..(175): Ceres Seq. ID no. 13594654
MGGSVPFEEALAARLSLFKPSLSKVDEYLQKTPPRLSPGIEELVKKLRANKIDVYLISGGFRQMINPVASVLGIPRENIFANNLLFGNSGEFVGFDEKEPTSRSGGKAKAVQHIRKGRSYKTMAMIGDGATDLEARRPGGADLFICYAGVQLREAVAAQADWLIFNFEPLINSLD

SEQ ID NO: 52216 - DNA, 1032 bp, Glycine max
  misc_feature (1)..(1032): Ceres Seq. ID no. 13638651
agaacatcctaatcgaaaatctttttgccatgataaaatcatctctgtcacaatttagcaaagtgagacagagagagtatggcgaccacacttcattgtctctccacactccatcttcttcctcgcaccacccatcgtcctaaaactctcaactctctcaaaccagcctccaaggcgcaacctcccaagatcccagaactaccctccattcccaacgccctccagctccttaaatcatcttccctccctctcgcactcaccgcattgccctttctcatcgatccacaggatgcagcagcagctggaggacagtttgggatcctggaaggacgatcgttcgcgttgatacacccaatagtgatgggaggtttgttcgtatacactctatacgctggttacttaggttggcaatggagacgtgtgcgtaccatccaaagcgagatcaacgagctcaagaaacaggttaagccaactcctgtttctcccgatggatccacggtcgttgactcttcgtcgcctccttctgccacggagcttgagatccgacggttgacggaagagaggaaagagttggtcaaagggtcttacagagacaaacactttgacgcaggctctgttttgttagggtttggtgttttggagtctgtgtttggtggtcttaacacttatcttcgtaccggtaaactcttccccggtcctcatctctacgctggagcagggataacggtgctatgggctgctgcagctgctttggtgccggccatgcagaaagggaatgagacggcgaggaatctacacattgcgttgaacggtctcaatgttcttcttttcatttggcaaatcccaacaggttttgatatcgtccttaaggtctttgagttcaccaaatggccttaaacccttcacttgttgtggtctcttccgcttttgtttttgtctttttcttgtctttacagttctagttgttggacttgtaatgagtcttgactatatatattgcaaagtcttatgcaactttttttgtgtgtttgt

SEQ ID NO: 52217 - protein, 272 aa, Glycine max
  peptide (1)..(272): Ceres Seq. ID no. 13638652
MATTLHCLSTLHLLPRTTHRPKTLNSLKPASKAQPPKIPELPSIPNALQLLKSSSLPLALTALPFLIDPQDAAAAGGQFGILEGRSFALIHPIVMGGLFVYTLYAGYLGWQWRRVRTIQSEINELKKQVKPTPVSPDGSTVVDSSSPPSATELEIRRLTEERKELVKGSYRDKHFDAGSVLLGFGVLESVFGGLNTYLRTGKLFPGPHLYAGAGITVLWAAAAALVPAMQKGNETARNLHIALNGLNVLLFIWQIPTGFDIVLKVFEFTKWP

SEQ ID NO: 52218 - protein, 178 aa, Glycine max
  peptide (1)..(178): Ceres Seq. ID no. 13638653
MGGLFVYTLYAGYLGWQWRRVRTIQSEINELKKQVKPTPVSPDGSTVVDSSSPPSATELEIRRLTEERKELVKGSYRDKHFDAGSVLLGFGVLESVFGGLNTYLRTGKLFPGPHLYAGAGITVLWAAAAALVPAMQKGNETARNLHIALNGLNVLLFIWQIPTGFDIVLKVFEFTKWP

SEQ ID NO: 52219 - DNA, 1012 bp, Glycine max
  misc_feature (1)..(1012): Ceres Seq. ID no. 13638811
tagccagtgcctcctcctcctcaatttcagcgccacccaaccaaatcacggccagccgagcgccttccccttcctctgccagctcgatcgtcgccggcgcacccagcagatgagcgccttccctgctccttttccttcctcctctgctcctctctctcacactgctcatctctcttccccccgtttctttctctacaggaggaaagcaccacgccatggcctccccaagctctgcttcatccccgtcttgggtccatgaggagacgaccacgccggccgcccttccccatctcgatcgggtccaggaccccgccgcctccagccacctctccgcggtcatggccccgatgggggttacctgccgcgagcctctgtcgtgaccagcacccgaccagcaggtcgccagcgtgcccgatgcctcctcctcgcgcatgcctggccgcgccacctggaccccgcagacaacaccacgccatggcccgcaggttcttctctgagttcatgtcgccctcgttccacgcgcctccggccagattgggcgctccaagcccggccatctccgccgcccttgcccgttctggccggatcccgccggttgggccccgtccccggccaccggtgccctcaccggagaccacctgcaccgtccgccaagtccctttcttcacccgctgcatcctctgcctcgctcgctcgtcccagccttcgttgaccgcgtcctgtctctcctgcgccaagaccaagcctgcgtccaacctccccaccgagccggcctcaaggcccgatgtacaggttatgcgatgatcatgacgcgagagcgatgttttgcttgtgttggcgttcttcttatgcttcttcttcgattaggggataggttccaggtcggcagcctgggctagcagggtggatgtcgtttgagtttctgtttgtgattcattcgtagtcggatggtgctcttttgtaatatgatgttgtattcgtgtggcattgtatgccttttgtatgcatcccc

SEQ ID NO: 52220 - protein, 182 aa, Glycine max
  peptide (1)..(182): Ceres Seq. ID no. 13638812
MRRRPRRPPFPISIGSRTPPPPATSPRSWPRWGLPAASLCRDQHPTSRSPACPMPPPRACLAAPPGPRRQHHAMARRFFSEFMSPSFHAPPARLGAPSPAISAALARSGRIPPVGPRPRPPVPSPETTCTVRQVPFFTRCILCLARSSQPSLTASCLSCAKTKPASNLPTEPASRPDVQVMR

SEQ ID NO: 52221 - protein, 129 aa, Glycine max
  peptide (1)..(129): Ceres Seq. ID no. 13638813
MPPPRACLAAPPGPRRQHHAMARRFFSEFMSPSFHAPPARLGAPSPAISAALARSGRIPPVGPRPRPPVPSPETTCTVRQVPFFTRCILCLARSSQPSLTASCLSCAKTKPASNLPTEPASRPDVQVMR

SEQ ID NO: 52222 - protein, 109 aa, Glycine max
  peptide (1)..(109): Ceres Seq. ID no. 13638814
MARRFFSEFMSPSFHAPPARLGAPSPAISAALARSGRIPPVGPRPRPPVPSPETTCTVRQVPFFTRCILCLARSSQPSLTASCLSCAKTKPASNLPTEPASRPDVQVMR

SEQ ID NO: 52223 - DNA, 624 bp, Glycine max
  misc_feature (1)..(624): Ceres Seq. ID no. 13581902
acaccgcaaagcaatcttctcttcacttcaaaacacccgagcaaacctctccgatctcccatcccggcgccccccgctcctcccgcgatggcccgcacgaagcagacggcgcgcaagtccaccggcggcaaggccccgcggaagcagctggcgaccaaggcggcgcgcaagtcggccccggcgaccggcggcgtgaagaagccgcaccgcttccgcccgggcaccgtcgcgctgcgcgagatccgcaagtaccagaagagcacggagctgctcatccgcaagctccccttccagcgcctggtccgggagatcgcgcaggacttcaagaccgacctccgcttccagagctccgccgtctccgccctgcaggaggccgccgaggcctacctcgtcggcctcttcgaggacaccaacctctgcgccatccacgccaagcgcgtcaccatcatgcccaaggacatccagcttgcccgccgcatccgcggggagcgcgcctaggcgcctcgcttgccattgctaggtgtttaggatctgttcccgtcgtgttccatatctgcgtcgttcctgtgtaactagcttgttgctgtgcttcgatgctttcaatgaaatatggttaccagtatg

SEQ ID NO: 52224 - protein, 189 aa, Glycine max
  peptide (1)..(189): Ceres Seq. ID no. 13581903
TAKQSSLHFKTPEQTSPISHPGAPRSSRDGPHEADGAQVHRRQGPAEAAGDQGGAQVGPGDRRREEAAPLPPGHRRAARDPQVPEEHGAAHPQAPLPAPGPGDRAGLQDRPPLPELRRLRPAGGRRGLPRRPLRGHQPLRHPRQARHHHAQGHPACPPHPRGARLGASLAIARCLGSVPVVFHICVVPV

SEQ ID NO: 52225 - protein, 165 aa, Glycine max
  peptide (1)..(165): Ceres Seq. ID no. 13581904
TPQSNLLFTSKHPSKPLRSPIPAPPAPPAMARTKQTARKSTGGKAPRKQLATKAARKSAPATGGVKKPHRFRPGTVALREIRKYQKSTELLIRKLPFQRLVREIAQDFKTDLRFQSSAVSALQEAAEAYLVGLFEDTNLCAIHAKRVTIMPKDIQLARRIRGERA

SEQ ID NO: 52226 - protein, 136 aa, Glycine max
  peptide (1)..(136): Ceres Seq. ID no. 13581905
MARTKQTARKSTGGKAPRKQLATKAARKSAPATGGVKKPHRFRPGTVALREIRKYQKSTELLIRKLPFQRLVREIAQDFKTDLRFQSSAVSALQEAAEAYLVGLFEDTNLCAIHAKRVTIMPKDIQLARRIRGERA

SEQ ID NO: 52227 - DNA, 889 bp, Glycine max
  misc_feature (1)..(889): Ceres Seq. ID no. 13581868
attttcaccacccccatccgccgcaggaccgccgaacgcccgcatcgccattggagatcgtgcgaggagacgaggaccctttccgcgggccttgagcgatgaagttcggcaagagcctgagcagccagatcgtggagacgctgccggagtggcgcgacaagttcctgtcctacaaggacctcaagaagcggcttaagctcatcggcctcggcgccgacggggaggagcggcaggccaagcgggcccgcgtctcggagccggccggggacggcgacgagacagcggcggcggcggccgcggcgatgacgcctgaggaggcggacttcatgcggctcctggaggccgagctcgacaagttcaattctttcttcgtcgagaaggaggaggagtacatcatccgccagaaggagttgcaggacagggtggccagggcggccgggatggagtccagggaggagttgctgcgtgtgcacaaggagatcgtcgacttccatggcgagatggtgctgcttgagaattacagcgccctcaactacaccgcgctgctacacggacgacaattttacagccgacacctgcacgatcctacttggcagcatcaaaagcaagcatgcaggcaggaatcactgttggggagggatgcatcgttcgcagatcgtgcgtgtagtgtcgtgtgtaaagcaatttcgtttgtttttcacatactcgcacaatgtcatgatgacgtgctattacgcactagatcagtttcctttccagactgtactgcaatcagcatatatagtgcttgtgcaaactaggtcttcatttgctcgctttacagttgagtaatcttgtttcctctttgtcaatattgttgcttcgagtgtgaaaaaatgctgctcttgtt

SEQ ID NO: 52228 - protein, 233 aa, Glycine max
  peptide (1)..(233): Ceres Seq. ID no. 13581869
MKFGKSLSSQIVETLPEWRDKFLSYKDLKKRLKLIGLGADGEERQAKRARVSEPAGDGDETAAAAAAAMTPEEADFMRLLEAELDKFNSFFVEKEEEYIIRQKELQDRVARAAGMESREELLRVHKEIVDFHGEMVLLENYSALNYTALLHGRQFYSRHLHDPTWQHQKQACRQESLLGRDASFADRACSVVCKAISFVFHILAQCHDDVLLRTRSVSFPDCTAISIYSACAN

SEQ ID NO: 52229 - protein, 165 aa, Glycine max
  peptide (1)..(165): Ceres Seq. ID no. 13581870
MTPEEADFMRLLEAELDKFNSFFVEKEEEYIIRQKELQDRVARAAGMESREELLRVHKEIVDFHGEMVLLENYSALNYTALLHGRQFYSRHLHDPTWQHQKQACRQESLLGRDASFADRACSVVCKAISFVFHILAQCHDDVLLRTRSVSFPDCTAISIYSACAN

SEQ ID NO: 52230 - protein, 157 aa, Glycine max
  peptide (1)..(157): Ceres Seq. ID no. 13581871
MRLLEAELDKFNSFFVEKEEEYIIRQKELQDRVARAAGMESREELLRVHKEIVDFHGEMVLLENYSALNYTALLHGRQFYSRHLHDPTWQHQKQACRQESLLGRDASFADRACSVVCKAISFVFHILAQCHDDVLLRTRSVSFPDCTAISIYSACAN

SEQ ID NO: 52231 - DNA, 919 bp, Glycine max
  misc_feature (1)..(919): Ceres Seq. ID no. 13638815
gtacagtggcaaattattttcagtcgataattggtggattgtctgaccctgtgaccgagtgcggaaacagcagtcagtagacgacactgaatcgccaacaactgcgttcatcatgtcgccggcgacttcttccgcggtgggtaccctatccggcggcctcctcccccacggtgcacatcgccggcgacccttgccaaccgcccgcctcctcccgccgcgttggtctaggctccaggtcaacgcggcccgtcatcgccgcctggccactcccccgcgcgcccagagcgctccctccccagggtacctgccggactcggagttctacaagatcgaggccatcctgaggccatggagggtgtcgcatgtctcgtcgggtttgctagaaatggggatcagaggtgtgacggtgtccgatgtgcggggctatggggcgcagggcgggtcgacggagcggtacgaagggtcagaattttcagaagatacatttattgctaaagttaaaatggaaatagtcgtgtgcaaggagcaggttgagccagtaattgacaaaataattgagaaggccagaactggagaaattggtgatgggaagatattcttgatacccgtcgcggatgttgtaagggtacgcaccggcgaacgcggagtgcatgcggagaagatgatcggcggtctgtcagacaaactgcctccggtgatcacaatctcatgagtagagcttgactgctcttgctgcctgtaactgtaagcgcatccctcaggctggttgcttgtggccgtgtgtgtcttgacctttggggaataatgtgtatgtaactttgcgtgttggcacgaataaattggcaccagcatccatacggcgggtggtgttgttgaatggggtggttactgtggttcgtgtgcggaatgcagtgattgc

SEQ ID NO: 52232 - protein, 199 aa, Glycine max
  peptide (1)..(199): Ceres Seq. ID no. 13638816
MSPATSSAVGTLSGGLLPHGAHRRRPLPTARLLPPRWSRLQVNAARHRRLATPPRAQSAPSPGYLPDSEFYKIEAILRPWRVSHVSSGLLEMGIRGVTVSDVRGYGAQGGSTERYEGSEFSEDTFIAKVKMEIVVCKEQVEPVIDKIIEKARTGEIGDGKIFLIPVADVVRVRTGERGVHAEKMIGGLSDKLPPVITIS

SEQ ID NO: 52233 - protein, 108 aa, Glycine max
  peptide (1)..(108): Ceres Seq. ID no. 13638817
MGIRGVTVSDVRGYGAQGGSTERYEGSEFSEDTFIAKVKMEIVVCKEQVEPVIDKIIEKARTGEIGDGKIFLIPVADVVRVRTGERGVHAEKMIGGLSDKLPPVITIS

SEQ ID NO: 52234 - DNA, 658 bp, Glycine max
  misc_feature (1)..(658): Ceres Seq. ID no. 15172768
atctccccactcggccactccccaccccatagccgcggatccactgcgccgcggcgaggacgacggcgaggcgatcccggccctgtgcaccaggggcgcgatggctgaccatgacccagagttggaggccattaggcagaggcgaatgcaagagctaatgggacagcgtggtggtgcggcaagcccacaaaatgcagggcaacaaaaggctcaggaagatgcaaagcaggaagctgaggaacgccggcagatgatgcttgctcagatactgtcttctgaagctagagaaagaatctcccgcatagctttggtcaagcctgataaagcaagaggagtggaggatgttctgctgagagctgcacaaactggtggaatatctgaaaaggtgtctgaagaaaggcttatctcacttctggagcaaatcaacacccacacaagcaaacaaaccaaagtgacgattcagaggcgtcgctttgacgacgatgactagttggtaagcttgatgtactagcgaatgggtgcagtagcgtctgttgcttgattcaacaaccgtcagaacctgacaaactatttgattggtcttgggttgtatatgatctggatattatttggtggggtttttcattgataactgttggatgcgtcacttctacccctg

SEQ ID NO: 52235 - protein, 162 aa, Glycine max
  peptide (1)..(162): Ceres Seq. ID no. 15172769
SPHSATPHPIAADPLRRGEDDGEAIPALCTRGAMADHDPELEAIRQRRMQELMGQRGGAASPQNAGQQKAQEDAKQEAEERRQMMLAQILSSEARERISRIALVKPDKARGVEDVLLRAAQTGGISEKVSEERLISLLEQINTHTSKQTKVTIQRRRFDDDD

SEQ ID NO: 52236 - protein, 129 aa, Glycine max
  peptide (1)..(129): Ceres Seq. ID no. 15172770
MADHDPELEAIRQRRMQELMGQRGGAASPQNAGQQKAQEDAKQEAEERRQMMLAQILSSEARERISRIALVKPDKARGVEDVLLRAAQTGGISEKVSEERLISLLEQINTHTSKQTKVTIQRRRFDDDD

SEQ ID NO: 52237 - protein, 114 aa, Glycine max
  peptide (1)..(114): Ceres Seq. ID no. 15172771
MQELMGQRGGAASPQNAGQQKAQEDAKQEAEERRQMMLAQILSSEARERISRIALVKPDKARGVEDVLLRAAQTGGISEKVSEERLISLLEQINTHTSKQTKVTIQRRRFDDDD

SEQ ID NO: 52238 - DNA, 1046 bp, Glycine max
  misc_feature (1)..(1046): Ceres Seq. ID no. 14314042
acaaacaattaaacaaattaatcttcaattctctcaattttctttttgtttttccctcttttttttttttcttttctggtcatcatcatgcccagaacaaaggtgaaaatcgccttcataaccaacgatgctgcgaggagggcagcatacaggaaaaggaagaagggaattctgaagaagatggaggaactcagcaccctttgtggaattgaagcatgtgctatagcatatagcccctatgatcccgagccagtgatttggccatccgaattgggtgtccatcatgtgctgggaaaattcaggaccatgtctgaatgggagaagaacaagaagatggcgaaccaggagagcttcctagggcatatgatcgcgaagcacaaggagcagctgaagaaactcgtgaaggaaaacaaggagaaggagatgaccgtgttcatgcatcaatgccttgatgaagggagggttctgccagataacaacttgacggcagacgatttgaacgatctttcgtcgatcatcgaacagaacctgaaggatgtttgtagaaggttggaaacgctgaatgttatggagaagacaccaccacaccaacaacccccccagatccaatcatcaccagtgttggatatgagtgctaaccatgatcaaaagcagaagaagtttatggatttgcttaatggtaatgaggatgagacaacaacagtgcctccatttgaatcagatgctaatctccaactccaaattgggttttaggctaacctgttaccttgaaaaaattaagcacgtgtgtgcttgttagtcttttgggaatcatgtttcagttcaatttgtctatgctttgatttttaattttaattactgtcctagcttgtgtgtcaatgtgaagacacaatagtaagtagtcatttaattactgtctagctagtcttcacattttattttcgtgcctggaaatacatgttgatttggtttgacatgtttatcctgctttcaggacttggttgttcatttaatcattatggtttaattaagaatgtttcgcttgc

SEQ ID NO: 52239 - protein, 221 aa, Glycine max
  peptide (1)..(221): Ceres Seq. ID no. 14314043
MPRTKVKIAFITNDAARRAAYRKRKKGILKKMEELSTLCGIEACAIAYSPYDPEPVIWPSELGVHHVLGKFRTMSEWEKNKKMANQESFLGHMIAKHKEQLKKLVKENKEKEMTVFMHQCLDEGRVLPDNNLTADDLNDLSSIIEQNLKDVCRRLETLNVMEKTPPHQQPPQIQSSPVLDMSANHDQKQKKFMDLLNGNEDETTTVPPFESDANLQLQIGF

SEQ ID NO: 52240 - protein, 190 aa, Glycine max
  peptide (1)..(190): Ceres Seq. ID no. 14314044
MEELSTLCGIEACAIAYSPYDPEPVIWPSELGVHHVLGKFRTMSEWEKNKKMANQESFLGHMIAKHKEQLKKLVKENKEKEMTVFMHQCLDEGRVLPDNNLTADDLNDLSSIIEQNLKDVCRRLETLNVMEKTPPHQQPPQIQSSPVLDMSANHDQKQKKFMDLLNGNEDETTTVPPFESDANLQLQIGF

SEQ ID NO: 52241 - protein, 148 aa, Glycine max
  peptide (1)..(148): Ceres Seq. ID no. 14314045
MSEWEKNKKMANQESFLGHMIAKHKEQLKKLVKENKEKEMTVFMHQCLDEGRVLPDNNLTADDLNDLSSIIEQNLKDVCRRLETLNVMEKTPPHQQPPQIQSSPVLDMSANHDQKQKKFMDLLNGNEDETTTVPPFESDANLQLQIGF

SEQ ID NO: 52242 - DNA, 1384 bp, Glycine max
  misc_feature (1)..(1384): Ceres Seq. ID no. 14314068
atacaatcaaactgcaaaaaaaaaaaaaaaaacaaagcattttttttttgccgcaatcaatcaataactgtcggcgacatatccgaatcaccgttgcagtctcacgtttcctctaactgtttttctcgggctccgagctcgccggagctaacattcacggcggcgcaccgcccatttcttcaccctcactcaaaatgcagtgccaccgcgtctccgccgtgctttttctaagcttatgctttagaattgcgctagtatacgcgcaaggagagcctcatctcactgctctggaccaacattggttcccgggaaccgccacgtggtacggcgaccccgaaggtgacggtagcaccggaggggcatgtgggtatggtacgttggtggacgtgaagccgttgaaggcaagggtgggagcagtggggtcagtgctgtttaagaagggggaagggtgtggtgcttgctacaaggtgaagtgtttggaccatagcatatgttcgaagcgggcagtgacggttataataacggatgagtgcccgggctgcccgtctgaccggacgcacttcgacctcagtggctctgcctttggccgcatggcagttgtgggtgaaaacggtcagctcaggaacctaggtgaaatcccagtcatttaccgcagaacaccgtgcaagtatgctggcaaaaacattgccttccatgtcaatgaaggctccactcctttttggctatcccttctggtggagtttgaagatggagatggggacattggctccatgcatatacaagaagcagggtcgagtgagtggcagcagatgaatcatgtatggggtgcaaattggtgcattgttaaggggccattaagaggacctttctctgttaaactaagcacatctacagggaaaagcctcactgccaaagatgttattccaagcaattggactccaaaagccacttatacctctcgcttaaatttcctttcttagtacaaggtttccaactgaacaatcaccaacaccaaggcccttcttcccaaagggagaaagtaatttaataaatcaccatttacccagttaaagttgctcaagttccacaaggcagagagtcttcttggcctttgagtctttgtgttttttaataagaaagaaaagtagccgttgagtgtacaaggccatatccaatgatctttccttttcttagttttatcttttcgcttttgaatacctataattttgtcatttttgtggtgtgcaactgtttgtaccaagaagtcatggtattattggtagccctctccaaaaaggagggagagcgtgtagtgtagtatcgtagaatgcgtgtactgggctcagtgggcttcaaatgaatgaatatataaattttagaaccg

SEQ ID NO: 52243 - protein, 261 aa, Glycine max
  peptide (1)..(261): Ceres Seq. ID no. 14314069
MQCHRVSAVLFLSLCFRIALVYAQGEPHLTALDQHWFPGTATWYGDPEGDGSTGGACGYGTLVDVKPLKARVGAVGSVLFKKGEGCGACYKVKCLDHSICSKRAVTVIITDECPGCPSDRTHFDLSGSAFGRMAVVGENGQLRNLGEIPVIYRRTPCKYAGKNIAFHVNEGSTPFWLSLLVEFEDGDGDIGSMHIQEAGSSEWQQMNHVWGANWCIVKGPLRGPFSVKLSTSTGKSLTAKDVIPSNWTPKATYTSRLNFLS

SEQ ID NO: 52244 - DNA, 1189 bp, Glycine max
  misc_feature (1)..(1189): Ceres Seq. ID no. 14314037
atataaacttacccttgccttgtcaaccaacacaaagaaggttaatctcaccaatctgacagggatcatcaatggcaaagcaattaattcccttcataatctctcttctcctcttcattttcacagaagtggaaggggctaaaaggtcttatggggtatacaacagcaaccctgtaaaactgtttgtttttggggactcctatgttgacactgggaatttcgtgcattcagaatcatacaagcctcccagtggaatcacttttcctggtaaccctgcagggagattctgcgacggtcgcatcatcactgattacgttgcttcctttctgaaaattgaatcccccacaccatatacttttagaaattcatctaatcttcactacggtataaactttgcctatggagggaccggtattttcagtacttcgattgatggaccaaacgcgactgcccaaatcgactcatttgagaagctaatccaacaaaatatctataccaaacatgatcttgaatcctcaattgctctcgtcaatgccggtggtaatgattatacaaatgcattaaaaactgggcgcattattgatttaccaggcttcatggaatcccttgtgaagcaaatgtctgtaaatcttaaacgcattcgcagcttagggataaaaaaggtagcagttgggttattacagccaattgggtgtttgcctgtgttaaatgtgatatctttccgtacgaactgcattggccttttgaacgtgatctccaaagatcacaacaaaatgttgctcaaagctgtgcaagaactcaacaaggaagcagcagacaaatcagttttcataacactggacctctacaactccttcctctctgcaattgaaactatgcagaaaaagcgtgcagaaaagtctacactgatgaatccgttgcaaccatgctgtgagggaaacaatttggaagattcatgtggaagtctggatgacgaaggatcaaagaaatacagtttatgtgagaacccgaaactttctttcttttgggacacacttcacccttctcaaaatggttggtttgcagtctacacaatattgcaatctactcttggccaacttattacatgaaaaaaacttctaatcaatattagtgtatttggattagttccatgatgaaaaataatctattaatccttcaaagttattgc

SEQ ID NO: 52245 - protein, 345 aa, Glycine max
  peptide (1)..(345): Ceres Seq. ID no. 14314038
MAKQLIPFIISLLLFIFTEVEGAKRSYGVYNSNPVKLFVFGDSYVDTGNFVHSESYKPPSGITFPGNPAGRFCDGRIITDYVASFLKIESPTPYTFRNSSNLHYGINFAYGGTGIFSTSIDGPNATAQIDSFEKLIQQNIYTKHDLESSIALVNAGGNDYTNALKTGRIIDLPGFMESLVKQMSVNLKRIRSLGIKKVAVGLLQPIGCLPVLNVISFRTNCIGLLNVISKDHNKMLLKAVQELNKEAADKSVFITLDLYNSFLSAIETMQKKRAEKSTLMNPLQPCCEGNNLEDSCGSLDDEGSKKYSLCENPKLSFFWDTLHPSQNGWFAVYTILQSTLGQLIT

SEQ ID NO: 52246 - DNA, 874 bp, Glycine max
  misc_feature (1)..(874): Ceres Seq. ID no. 14306131
aaattccatggcttacaatcacaatgcatcttatctttctctcccaccaccgcttttcatagtatatgatccaatctcatatatgctacgcttctagctccattctgcacaattctctcttatcatctttgttattacctctttccaaagtccaaattttctagttccaccaaaccaaaccaaaccaaaatggcagcagcctcagcctcatccatgatatcaacaccagccttatctccaaccatccaaaagcaccatcatttgaagccatccaacgtgtgcttccaaggtcttagacccctcgcaaggttcaccaaagcctcatcaaccaaagtgagcaccaccaccaaaagggttattccaaagggtggtgttagagctgaactcaactcagcccttgtgataagcctcagcactggcctctccctcttcttgggaaggtttgtgttcttcaacttccaaagggagaacgtggcaaagcaagtgcctgagcagaacggcctcacacactttgaggctggtgatacacgtgccaaggagtatgtcagcctcctcaaatccaatgaccctgttggattcaacattgttgatgtcttggcttggggctccattggccatgttgttgcttactacatcttggccaccactagcaatggctatgaccctgcattctttggctgatttaatttcatcatcatgttgttccaactgtgtttcttgcttactttttagtatgtaatgtaatcaatgtcatgatgtataggttctctctaaagatccaacaagttcagcatatgctaatttgatcactattttcggctgcaatttggtttgctattatgattaatggaaaatgggacttctctacgtattg

SEQ ID NO: 52247 - protein, 163 aa, Glycine max
  peptide (1)..(163): Ceres Seq. ID no. 14306132
MAAASASSMISTPALSPTIQKHHHLKPSNVCFQGLRPLARFTKASSTKVSTTTKRVIPKGGVRAELNSALVISLSTGLSLFLGRFVFFNFQRENVAKQVPEQNGLTHFEAGDTRAKEYVSLLKSNDPVGFNIVDVLAWGSIGHVVAYYILATTSNGYDPAFFG

SEQ ID NO: 52248 - protein, 155 aa, Glycine max
  peptide (1)..(155): Ceres Seq. ID no. 14306133
MISTPALSPTIQKHHHLKPSNVCFQGLRPLARFTKASSTKVSTTTKRVIPKGGVRAELNSALVISLSTGLSLFLGRFVFFNFQRENVAKQVPEQNGLTHFEAGDTRAKEYVSLLKSNDPVGFNIVDVLAWGSIGHVVAYYILATTSNGYDPAFFG

SEQ ID NO: 52249 - DNA, 1170 bp, Glycine max
  misc_feature (1)..(1170): Ceres Seq. ID no. 14306059
attactttccgcatctaccttcattccttggcgggtgttagcggttgcggtttcggtttcgttgcgccgaatcttaaccgtccttttggggcccacaaatcgccgatactgtgttcactttcattgccggtggcggcgaagccaccgtaccaaccaccgacgccgtccaatccttttcagcctttcaaattgcgatgacgtatttcgaagaggatgccattaacggcgacggtgatcgaacgagggacgtcaatcgcaatcacgacggcggaggagaattatacgtcaatttgaggtgggacccacaaccggaggccccgaacactaaccggagaggatcgtcgcgtctctggtattgggttaagttggttctctgtttcttatgtctgggcctcttggctctcgttgctttcaaatgggttgtcccactcttcacagaaaaggtgattattcctataataaattgggagacgaacacgttcagttctccagtgttagctgttctggtgtttgcttctatagcgctattccctaccctaattctgccatcctcgccttctatgtgggtggctgggttgacatttggttatggctttggattcttgctaatcatttctgcagcagcagtgggagtatcacttcctttcttgatcggttcaatcttctatagtaaaattgaagggtggttagaaaagtatccaaagagagcttctgttctaagatctgctggtgggggaaattggtttcatcaatttcaggcagttgctttaatcagggtttctccattcccatacataatctacaactattgtgccgtcgcaacaaatgttgagtattggccttacctgctcggttccatggtaggaatggtgccagaaatatttgtttcaatttacacgggaattttgatagaaacattggctaatgcttcacatcaaaatcacactctatccactccacaaattgccctcaatgtagttggtttctgcataagtggagctacaataatctttttcacagcctatgcaaagaggcagctcaaggagttacaacagaaagaggatggtttgctcttgcaataatccagtaggtttagtctgggtttatttgctggcagcatgaggcagttatcactatcttgaacgtcacatgttaaggcttaccacagaa

SEQ ID NO: 52250 - protein, 295 aa, Glycine max
  peptide (1)..(295): Ceres Seq. ID no. 14306060
MTYFEEDAINGDGDRTRDVNRNHDGGGELYVNLRWDPQPEAPNTNRRGSSRLWYWVKLVLCFLCLGLLALVAFKWVVPLFTEKVIIPIINWETNTFSSPVLAVLVFASIALFPTLILPSSPSMWVAGLTFGYGFGFLLIISAAAVGVSLPFLIGSIFYSKIEGWLEKYPKRASVLRSAGGGNWFHQFQAVALIRVSPFPYIIYNYCAVATNVEYWPYLLGSMVGMVPEIFVSIYTGILIETLANASHQNHTLSTPQIALNVVGFCISGATIIFFTAYAKRQLKELQQKEDGLLLQ

SEQ ID NO: 52251 - protein, 173 aa, Glycine max
  peptide (1)..(173): Ceres Seq. ID no. 14306061
MWVAGLTFGYGFGFLLIISAAAVGVSLPFLIGSIFYSKIEGWLEKYPKRASVLRSAGGGNWFHQFQAVALIRVSPFPYIIYNYCAVATNVEYWPYLLGSMVGMVPEIFVSIYTGILIETLANASHQNHTLSTPQIALNVVGFCISGATIIFFTAYAKRQLKELQQKEDGLLLQ

SEQ ID NO: 52252 - DNA, 831 bp, Glycine max
  misc_feature (1)..(831): Ceres Seq. ID no. 14306036
ccatttgatgtgaacaagcttcctatagaaactcaaaatcttctagctgtgtgcaagagggaaagcatggctgagtatccatcacctgaaaaggatgataataattgtaagcacatggatgactacccttcacctcaaacagataatccaaagcctttctctcaaatatacaaacgaaggcgtcataacttgaactccaacaactctaatgtttctggagattcagtccgaaccagccaggatccgtgctcctctacaataactaccgctgcaactgcactcccaaccgcaactgttgctggcacagccaccaacactgcaccgaaaaaacattttctgtctgcactggtggagttttccctgctagaatcccttgaatcaaaggacaaccttgcttcaattaaggcaccggattttgacactgaaaatctcgagtcatccatgcctccaagttgcgcaaagttcatcaagcaaatgcagagtgagatgcagaagctttcagttgaaaaggagacgataaggtttgagatgatgagcgcacaagcgatgattaacattctccagtctcgcatcgacgttctcagcaaagaaaatgaggatttgaagaggatggtggcccaaaatccataggaattggcaatgtcatgcccttgtatcagtgtaagttagttacaactgagtaatgaagctcagtcttccggatattttcttatttttctgagtaagaattgtagttcgtttctttggctaaacttattttaaacttgtcatcgtgtatcatatgactttcagtttcccattgttgtgaaaatatggccatgttagcatctc

SEQ ID NO: 52253 - protein, 209 aa, Glycine max
  peptide (1)..(209): Ceres Seq. ID no. 14306037
PFDVNKLPIETQNLLAVCKRESMAEYPSPEKDDNNCKHMDDYPSPQTDNPKPFSQIYKRRRHNLNSNNSNVSGDSVRTSQDPCSSTITTAATALPTATVAGTATNTAPKKHFLSALVEFSLLESLESKDNLASIKAPDFDTENLESSMPPSCAKFIKQMQSEMQKLSVEKETIRFEMMSAQAMINILQSRIDVLSKENEDLKRMVAQNP

SEQ ID NO: 52254 - protein, 187 aa, Glycine max
  peptide (1)..(187): Ceres Seq. ID no. 14306038
MAEYPSPEKDDNNCKHMDDYPSPQTDNPKPFSQIYKRRRHNLNSNNSNVSGDSVRTSQDPCSSTITTAATALPTATVAGTATNTAPKKHFLSALVEFSLLESLESKDNLASIKAPDFDTENLESSMPPSCAKFIKQMQSEMQKLSVEKETIRFEMMSAQAMINILQSRIDVLSKENEDLKRMVAQNP

SEQ ID NO: 52255 - protein, 171 aa, Glycine max
  peptide (1)..(171): Ceres Seq. ID no. 14306039
MDDYPSPQTDNPKPFSQIYKRRRHNLNSNNSNVSGDSVRTSQDPCSSTITTAATALPTATVAGTATNTAPKKHFLSALVEFSLLESLESKDNLASIKAPDFDTENLESSMPPSCAKFIKQMQSEMQKLSVEKETIRFEMMSAQAMINILQSRIDVLSKENEDLKRMVAQNP

SEQ ID NO: 52256 - DNA, 1616 bp, Glycine max
  misc_feature (1)..(1616): Ceres Seq. ID no. 14315063
atgcatataaactacaaacattatttcatccaagccctcttgtctcaacaaattaataataattaatcacacccttcgatcttcgagtcatctaataataaatcttttgtttcccatcaacactagttcatgcaaattaatgggtatccctcactttctttgtataccatttccagttcaaggacatgtgaaccctcttatgcaattttctctgcttttggttaaacatggttgcaaggtcacttttgtacacactgagttcagcctcaaacgaacaaagacttctggtgctgacaacctcgagcattcacaagtaaagttggtgactcttcctgatggtttggaggctgaagatgacagaagtgatgtgacaaaacttcttttgtctatcaaaagcaacatgcctgctttgcttccaaagctcatagaagatatcaatgccttggatgctgacaataagatcacctgtattattgttacatttaatatgggttggcctttggaagttggccacaaactgggaatcaaaggagctcttctctgtccagcatctgcaacttccttggcttctgctgcttgcatcccaaagctgattcatgatggcattattgattctcaaggacttcccaccaaaacacaagaaattcaactctctccaaacatgcctctgatagacacagaaaactttccatggcgtggctttaataagatcttctttgaccatcttgtgcaagagatgaaaactttggagttaggagagtggtggctttgcaacactacttatgatcttgagcctggagcattttccgtatcaccaaagttcctacccattggcccattgatggaaagtgacaacagcaaaagtgcattttgggaagaagatacaacttgcttagagtggttagatcaacaaccacctcaatctgtcatatatgtttcctttggcagtttggcagtaatggatccaaaccaatttaaagaattagctcttgcacttgatctccttgacaagcctttcatttgggttgtacgtccatgtaatgacaacaaggaaaatgttaatgcatacgcacatgatttccatggaagcaaaggtaaaatagttggttgggcaccccagaagaagatattgaaccaccctgcattggctagcttcattagtcactgtggttggaattctaccctagaaggtatatgtgccggtgtacctttcttgtgttggccatgcgccactgatcaatatcttgacaagtcatatatatgtgatgtgtggaagattgggcttggactagacaaggatgaaaatggaataatttctagggaagagataaggaagaaggtggatcaactgcttgttgatgaagacatcaaagctaggtcattgaaattgaaagacatgaccataaataacatactagaaggtggtcagtcatcaaagaatctcaacttctttatggattgggcgaagtaattatgcttaatttggttctatattgaaaagtcatgtgtaatttctacatgtaagaatttaatttctatgtagatcttaatgtaatctatttaaaaattaataagctttattatatgcaatgatttttagttttatgaaattaatt

SEQ ID NO: 52257 - protein, 443 aa, Glycine max
  peptide (1)..(443): Ceres Seq. ID no. 14315064
MGIPHFLCIPFPVQGHVNPLMQFSLLLVKHGCKVTFVHTEFSLKRTKTSGADNLEHSQVKLVTLPDGLEAEDDRSDVTKLLLSIKSNMPALLPKLIEDINALDADNKITCIIVTFNMGWPLEVGHKLGIKGALLCPASATSLASAACIPKLIHDGIIDSQGLPTKTQEIQLSPNMPLIDTENFPWRGFNKIFFDHLVQEMKTLELGEWWLCNTTYDLEPGAFSVSPKFLPIGPLMESDNSKSAFWEEDTTCLEWLDQQPPQSVIYVSFGSLAVMDPNQFKELALALDLLDKPFIWVVRPCNDNKENVNAYAHDFHGSKGKIVGWAPQKKILNHPALASFISHCGWNSTLEGICAGVPFLCWPCATDQYLDKSYICDVWKIGLGLDKDENGIISREEIRKKVDQLLVDEDIKARSLKLKDMTINNILEGGQSSKNLNFFMDWAK

SEQ ID NO: 52258 - protein, 423 aa, Glycine max
  peptide (1)..(423): Ceres Seq. ID no. 14315065
MQFSLLLVKHGCKVTFVHTEFSLKRTKTSGADNLEHSQVKLVTLPDGLEAEDDRSDVTKLLLSIKSNMPALLPKLIEDINALDADNKITCIIVTFNMGWPLEVGHKLGIKGALLCPASATSLASAACIPKLIHDGIIDSQGLPTKTQEIQLSPNMPLIDTENFPWRGFNKIFFDHLVQEMKTLELGEWWLCNTTYDLEPGAFSVSPKFLPIGPLMESDNSKSAFWEEDTTCLEWLDQQPPQSVIYVSFGSLAVMDPNQFKELALALDLLDKPFIWVVRPCNDNKENVNAYAHDFHGSKGKIVGWAPQKKILNHPALASFISHCGWNSTLEGICAGVPFLCWPCATDQYLDKSYICDVWKIGLGLDKDENGIISREEIRKKVDQLLVDEDIKARSLKLKDMTINNILEGGQSSKNLNFFMDWAK

SEQ ID NO: 52259 - protein, 356 aa, Glycine max
  peptide (1)..(356): Ceres Seq. ID no. 14315066
MPALLPKLIEDINALDADNKITCIIVTFNMGWPLEVGHKLGIKGALLCPASATSLASAACIPKLIHDGIIDSQGLPTKTQEIQLSPNMPLIDTENFPWRGFNKIFFDHLVQEMKTLELGEWWLCNTTYDLEPGAFSVSPKFLPIGPLMESDNSKSAFWEEDTTCLEWLDQQPPQSVIYVSFGSLAVMDPNQFKELALALDLLDKPFIWVVRPCNDNKENVNAYAHDFHGSKGKIVGWAPQKKILNHPALASFISHCGWNSTLEGICAGVPFLCWPCATDQYLDKSYICDVWKIGLGLDKDENGIISREEIRKKVDQLLVDEDIKARSLKLKDMTINNILEGGQSSKNLNFFMDWAK

SEQ ID NO: 52260 - DNA, 1150 bp, Glycine max
  misc_feature (1)..(1150): Ceres Seq. ID no. 14314371
attgctaatagcaatactgtgacgtaactctccaacttatgaagcttgcaataataatgttttgaggacatttctctctccgaaccctcccatgcatggcctcttccgcattcctttccgtttatctcattatctccgtcatcgtccttttgtcgaacaggtgctgcgcgtttcaatgcggggtttcctacgacacgatcaccgtcctcaacgcgttccctcacgacccacaagccttcactgagggtcttctttatcatggaaatgacaccttatttgagtcaactggcctttatggggagtcatccgtccgtaaagttgctcttcgtactgggaaggttgagaatattcagaagatggatgattctttatttggtgaaggcttagctctcctcaataataggctgttccagctaaattggttgcagaaagatggtttcatatatgagccaaaaaatttaagccaaatagggacatttaaatatgatatgaaagagggttggggtctggcaactgatggaaaagtcttgtttggaagtgatggcagttcaacattgtatcaatttgagcctcaaccatttaaagttgtatcaaaacaagttgtttactacaagggtcatcaagtgcacaatctcaatgaattggaatacataaatggtgaagtttgggccaatgttttgccgactgactgcattgtaagaatctctccccatgatggaagggttcttggatggattctcctccaaaatttgaggaaagaacttgtggaagctggggagattagtgatcgtgatattttgaatgggatagcatgggatggtgagcagaattgtatttttgtgactggaaaacaatggccaaagctgtatgaaatcaaggtttcccctataaagaaaccaattgaagaagggatcatcgagcaactttgcttgtatgagcctttgaatgggggatttgtgttggctgacccagcccaaagagaatgaggtgaagctgaacataaaatgatggccttaagaggacccaaaaggatgtttgggacaactcccaggttgaaaaaactttattttatattgggtttaggataaatatcattagattatgtattttggcaaatgatattaataaagtatactccattttccctttt

SEQ ID NO: 52261 - protein, 296 aa, Glycine max
  peptide (1)..(296): Ceres Seq. ID no. 14314372
MASSAFLSVYLIISVIVLLSNRCCAFQCGVSYDTITVLNAFPHDPQAFTEGLLYHGNDTLFESTGLYGESSVRKVALRTGKVENIQKMDDSLFGEGLALLNNRLFQLNWLQKDGFIYEPKNLSQIGTFKYDMKEGWGLATDGKVLFGSDGSSTLYQFEPQPFKVVSKQVVYYKGHQVHNLNELEYINGEVWANVLPTDCIVRISPHDGRVLGWILLQNLRKELVEAGEISDRDILNGIAWDGEQNCIFVTGKQWPKLYEIKVSPIKKPIEEGIIEQLCLYEPLNGGFVLADPAQRE

SEQ ID NO: 52262 - protein, 209 aa, Glycine max
  peptide (1)..(209): Ceres Seq. ID no. 14314373
MDDSLFGEGLALLNNRLFQLNWLQKDGFIYEPKNLSQIGTFKYDMKEGWGLATDGKVLFGSDGSSTLYQFEPQPFKVVSKQVVYYKGHQVHNLNELEYINGEVWANVLPTDCIVRISPHDGRVLGWILLQNLRKELVEAGEISDRDILNGIAWDGEQNCIFVTGKQWPKLYEIKVSPIKKPIEEGIIEQLCLYEPLNGGFVLADPAQRE

SEQ ID NO: 52263 - protein, 165 aa, Glycine max
  peptide (1)..(165): Ceres Seq. ID no. 14314374
MKEGWGLATDGKVLFGSDGSSTLYQFEPQPFKVVSKQVVYYKGHQVHNLNELEYINGEVWANVLPTDCIVRISPHDGRVLGWILLQNLRKELVEAGEISDRDILNGIAWDGEQNCIFVTGKQWPKLYEIKVSPIKKPIEEGIIEQLCLYEPLNGGFVLADPAQRE

SEQ ID NO: 52264 - DNA, 1587 bp, Glycine max
  misc_feature (1)..(1587): Ceres Seq. ID no. 15171245
aaaacttttgtcactgaaggtgtcttggagccaattgtagcagttggtaacatcaaacacatattcagacaatgaggcttgtcgtctcagctctttgtgttcttgtgttattctcttgtgcagttgcttatgatcctttggatccaaacggaaacgtaacaatcaaatgggatgtaatgtcttggacaccagatggctatgtggctgtggtaacaatgcacaacttccaaatgtttcggcacatcatgaatcctggatggaccttgggatggacatgggcaaagaaagaagtcatttggtccatgataggagctcaaaccacagaacaaggagattgctctaagttcaaaggcaacatacctcattgctgcaagaaaattcccacagttgtggaccttctccctggtgtaccttacaaccagcaattctcaaactgctgcaagggtggagtagtggcagcatggggccaagatccttcacaagctatctcttccttccaagtgagtgtaggccaagctggtacctcaaacaagacagttaaacttcccaagaacttcactctctttgctccaggaccaggctacacttgtggccctgcaaagattgttccttccaccaattttcttacgcctgacaagcgccgcaagactcaagcactaatgacatggaatgttacctgcacatactcacagtttctggcaagaaagaacccaagttgttgtgtatctttgtcatccttttacaatgaaaccattaccccttgtccctcttgtgcatgtggctgccagaacaagaagcattgtgtcaagggaaactccaaaattctcagcatggtgggggttcacactccaaagaaagacaatgaaccattgctgcagtgcactcatcacatgtgtccaatcagggtccactggcatgtgaagactaactataaggactattggcgagtcaaggttgccataacaaacttcaattacagaatgaatcactccctttggtctcttgctgttcagcatccaaatctcaacaatctcacacaagttttcagtttcaattacaagccacttcttccctatggatccataaatgatactggcatgttctatggcatgaagtacttcaatgatcttctaatggaagctggaccaactgggaatgttcaatcagagttgcttcttcagaaggacaaggatgcattcacattcaagcagggttgggcatttcctcgcaaggtttactttaatggtgatgaatgcatgctgccaccacctgacacctacccttttctccctaactctgctcctgcaagcctacttaacttccctgcgttcatgttgttattgttcttcttgcttgcagtttggtgaattggtgcatattgtgtcagaattttgtgaaatttttgaaaccatgtataccttcttaatggtaacgtgacaataggcatgaatactcaaattctttggaaacactaagccaaatctcatggctgtgttttatctgacatgtgagcaccaaaggggatgctaatatgtaaatctcaacagtgattttgtctgaatcatagattgatgatgctattactcc

SEQ ID NO: 52265 - protein, 431 aa, Glycine max
  peptide (1)..(431): Ceres Seq. ID no. 15171246
MRLVVSALCVLVLFSCAVAYDPLDPNGNVTIKWDVMSWTPDGYVAVVTMHNFQMFRHIMNPGWTLGWTWAKKEVIWSMIGAQTTEQGDCSKFKGNIPHCCKKIPTVVDLLPGVPYNQQFSNCCKGGVVAAWGQDPSQAISSFQVSVGQAGTSNKTVKLPKNFTLFAPGPGYTCGPAKIVPSTNFLTPDKRRKTQALMTWNVTCTYSQFLARKNPSCCVSLSSFYNETITPCPSCACGCQNKKHCVKGNSKILSMVGVHTPKKDNEPLLQCTHHMCPIRVHWHVKTNYKDYWRVKVAITNFNYRMNHSLWSLAVQHPNLNNLTQVFSFNYKPLLPYGSINDTGMFYGMKYFNDLLMEAGPTGNVQSELLLQKDKDAFTFKQGWAFPRKVYFNGDECMLPPPDTYPFLPNSAPASLLNFPAFMLLLFFLLAVW

SEQ ID NO: 52266 - protein, 396 aa, Glycine max
  peptide (1)..(396): Ceres Seq. ID no. 15171247
MSWTPDGYVAVVTMHNFQMFRHIMNPGWTLGWTWAKKEVIWSMIGAQTTEQGDCSKFKGNIPHCCKKIPTVVDLLPGVPYNQQFSNCCKGGVVAAWGQDPSQAISSFQVSVGQAGTSNKTVKLPKNFTLFAPGPGYTCGPAKIVPSTNFLTPDKRRKTQALMTWNVTCTYSQFLARKNPSCCVSLSSFYNETITPCPSCACGCQNKKHCVKGNSKILSMVGVHTPKKDNEPLLQCTHHMCPIRVHWHVKTNYKDYWRVKVAITNFNYRMNHSLWSLAVQHPNLNNLTQVFSFNYKPLLPYGSINDTGMFYGMKYFNDLLMEAGPTGNVQSELLLQKDKDAFTFKQGWAFPRKVYFNGDECMLPPPDTYPFLPNSAPASLLNFPAFMLLLFFLLAVW

SEQ ID NO: 52267 - protein, 383 aa, Glycine max
  peptide (1)..(383): Ceres Seq. ID no. 15171248
MHNFQMFRHIMNPGWTLGWTWAKKEVIWSMIGAQTTEQGDCSKFKGNIPHCCKKIPTVVDLLPGVPYNQQFSNCCKGGVVAAWGQDPSQAISSFQVSVGQAGTSNKTVKLPKNFTLFAPGPGYTCGPAKIVPSTNFLTPDKRRKTQALMTWNVTCTYSQFLARKNPSCCVSLSSFYNETITPCPSCACGCQNKKHCVKGNSKILSMVGVHTPKKDNEPLLQCTHHMCPIRVHWHVKTNYKDYWRVKVAITNFNYRMNHSLWSLAVQHPNLNNLTQVFSFNYKPLLPYGSINDTGMFYGMKYFNDLLMEAGPTGNVQSELLLQKDKDAFTFKQGWAFPRKVYFNGDECMLPPPDTYPFLPNSAPASLLNFPAFMLLLFFLLAVW

SEQ ID NO: 52268 - DNA, 1439 bp, Glycine max
  misc_feature (1)..(1439): Ceres Seq. ID no. 15171257
ggtaactctttcaactcggccgtgcaagttttattggcagcgctggaaccatcttctcctctcttcacctacgtttttctttttctctttctctttctcttactctcttcaacactttctcaaatcccttccttcttcgctcttgtcttctctttcaggtgcaccttccagttaagcaggagttggataattgttggacatagatgaaatagtgattgttatgtctggactgattgaaggacttcctgacgctgttgcaatcaggtgccttgcatgggttcccttctacctccacccaaagttagagcttgtctctcgtgcttggcgagcagttgttcgtggccctgaactatttaaagctcgacaggagcttggttcatcggaggatctgttgtgtgtctgtgcttttgagccagagaacttatggcagctgtatgaccctcagcgagacctctggataactcttcctgttctaccctcaagaatcaggcacctttcacattttggtgccgtctccactgctggaaagttgtttgtgattggtggtggaagtgatgctgttgatcctttgacgggtgaccaagatggttgttttgcaacaaatgaagtctggtcgtatgacccagtagtacggcagtggtccccccgtgcggcaatgctcgtcccccgttctatgtttgcatgctgtgttatgaatggaaaaatagttgtggctgggggcttcactagctgcagaaagtcaatatctcaagcagaaatatatgatcccgagaaagatgtttggattccaatgcctgatcttcatcgcacccataactcagcctgttcgggagtagtgattggaggaaaggtgcatgtcctgcacaaggatatgtcaacagtgcaagttttagacaatgcaggtcagtggacggtagaggaatatgggtggctccatggtcaaatggcagttatcagggatgccctttatgtgataagccatggattaatcatcaagcaagacaaaaaaatgaggaaggtagttggttcagcttctgaatttcgaaggagaattggatttgcaatgattggtttaggtgatgaattatatgtgattggaggtgtcattggccctgacaggtggaattgggacatcaagccactgtctgatgttgatgttcttacacttgcgagcgagagaccgacgtggcgccaggcagctccaatgacaaggtgtggtggtactattcttggttgtacacagctgagaatttaggctttcactttctaggcttatgtgatatgtgtgctccaactaaggaatgtgaattccttcaacaggagacgaagaattaggttgttcaatggcttctttgagttgttgtatgtaagccataatatttgtccttgttgttttgttgactattatgtggtaataagataaggtaatgttttcaagc

SEQ ID NO: 52269 - protein, 344 aa, Glycine max
  peptide (1)..(344): Ceres Seq. ID no. 15171258
MSGLIEGLPDAVAIRCLAWVPFYLHPKLELVSRAWRAVVRGPELFKARQELGSSEDLLCVCAFEPENLWQLYDPQRDLWITLPVLPSRIRHLSHFGAVSTAGKLFVIGGGSDAVDPLTGDQDGCFATNEVWSYDPVVRQWSPRAAMLVPRSMFACCVMNGKIVVAGGFTSCRKSISQAEIYDPEKDVWIPMPDLHRTHNSACSGVVIGGKVHVLHKDMSTVQVLDNAGQWTVEEYGWLHGQMAVIRDALYVISHGLIIKQDKKMRKVVGSASEFRRRIGFAMIGLGDELYVIGGVIGPDRWNWDIKPLSDVDVLTLASERPTWRQAAPMTRCGGTILGCTQLRI

SEQ ID NO: 52270 - protein, 199 aa, Glycine max
  peptide (1)..(199): Ceres Seq. ID no. 15171259
MLVPRSMFACCVMNGKIVVAGGFTSCRKSISQAEIYDPEKDVWIPMPDLHRTHNSACSGVVIGGKVHVLHKDMSTVQVLDNAGQWTVEEYGWLHGQMAVIRDALYVISHGLIIKQDKKMRKVVGSASEFRRRIGFAMIGLGDELYVIGGVIGPDRWNWDIKPLSDVDVLTLASERPTWRQAAPMTRCGGTILGCTQLRI

SEQ ID NO: 52271 - protein, 193 aa, Glycine max
  peptide (1)..(193): Ceres Seq. ID no. 15171260
MFACCVMNGKIVVAGGFTSCRKSISQAEIYDPEKDVWIPMPDLHRTHNSACSGVVIGGKVHVLHKDMSTVQVLDNAGQWTVEEYGWLHGQMAVIRDALYVISHGLIIKQDKKMRKVVGSASEFRRRIGFAMIGLGDELYVIGGVIGPDRWNWDIKPLSDVDVLTLASERPTWRQAAPMTRCGGTILGCTQLRI

SEQ ID NO: 52272 - DNA, 1507 bp, Glycine max
  misc_feature (1)..(1507): Ceres Seq. ID no. 14314363
ttttcggaagcggaaattggactgatcctttctctctctctctctctttctcctcaacgcctcttcctttcaatttaatccaacaataataattattcgcaaaaaaacgttgaacagataccatcatcatcacccacatcatcagaatttcaagctatacagagggaagcgcaattgattctttttgtgtgtttgactttgatcaatcagttggatatcgcatagaggattgtgttgccttgaggggaaactcagtttttgactcactaaaagtaagtagccaaacaatttctcggggtcttgttgaagttgattcctttgataagttaccaacttcactcaataaaaacccattaacaagccaaacagagcgacaaagattgcaattacaaaaggttcaattatcaaatctggtcagtggggatacggaacaccaggaagagtctgccatggctgacgccagtcctagaactgatatttctacagatgttgacactgatgataagaatccacggtttgatagaagtcagtcccttgttgctgtggtttctgactccagtgacagatcaaaggataaatcagatcagaagactctccgaaggcttgctcagaatcgtgaggcagcaagaaaaagtcggttgagaaagaaagcttatgttcaacagcttgaaagtagtcgcttaaagttaacccaactggagcaagagcttcagcgagctaggcagcagggaatcattatatcaaactcaggtgatcaagcacattcaatgagtggaaatggggctatggcatttgatgtagagtatgcaagatggctggaagagcagaatcgacaagttaatgagctaagagcagctgtaaattcccatgcaggtgatacagaacttcgcatgattatcgatggtataatggcacattatgatgagatatttaggctgaaggccgatgcagctaaggctgatgtcttccatttgttgtctggaatgtggaagacaccagcagagaggtgttttctatggcttggtggttttcggtcatctgaactcctcaagctcctggtaaatcagttggaacctctgacagagcaacagttagtgggtattaccaacttgcagcaatcttcccaacaggccgaagatgcattgtctcagggcatggaagcattgcaacagtccctttctgagacattatccactggatcacttggctcctctggttcatcaggcaatgtggcaaattacatgggtcaaatggctatggccatgggtaaactagggacacttgaggggttcattaagcaggctgacaatttgcgccagcagactttgcaacaaattcaccgcatattgacaactcggcaatcggctcgtgcactacttgcaatacatgactacttttctaggttgcgtgcccttagctctctttggcttgcccgcccaagagactgatgggtggtaaatagtgtcattaattttcatggatctggcaccagaatcatttgtcgtag

SEQ ID NO: 52273 - protein, 332 aa, Glycine max
  peptide (1)..(332): Ceres Seq. ID no. 14314364
MADASPRTDISTDVDTDDKNPRFDRSQSLVAVVSDSSDRSKDKSDQKTLRRLAQNREAARKSRLRKKAYVQQLESSRLKLTQLEQELQRARQQGIIISNSGDQAHSMSGNGAMAFDVEYARWLEEQNRQVNELRAAVNSHAGDTELRMIIDGIMAHYDEIFRLKADAAKADVFHLLSGMWKTPAERCFLWLGGFRSSELLKLLVNQLEPLTEQQLVGITNLQQSSQQAEDALSQGMEALQQSLSETLSTGSLGSSGSSGNVANYMGQMAMAMGKLGTLEGFIKQADNLRQQTLQQIHRILTTRQSARALLAIHDYFSRLRALSSLWLARPRD

SEQ ID NO: 52274 - protein, 226 aa, Glycine max
  peptide (1)..(226): Ceres Seq. ID no. 14314365
MSGNGAMAFDVEYARWLEEQNRQVNELRAAVNSHAGDTELRMIIDGIMAHYDEIFRLKADAAKADVFHLLSGMWKTPAERCFLWLGGFRSSELLKLLVNQLEPLTEQQLVGITNLQQSSQQAEDALSQGMEALQQSLSETLSTGSLGSSGSSGNVANYMGQMAMAMGKLGTLEGFIKQADNLRQQTLQQIHRILTTRQSARALLAIHDYFSRLRALSSLWLARPRD

SEQ ID NO: 52275 - protein, 220 aa, Glycine max
  peptide (1)..(220): Ceres Seq. ID no. 14314366
MAFDVEYARWLEEQNRQVNELRAAVNSHAGDTELRMIIDGIMAHYDEIFRLKADAAKADVFHLLSGMWKTPAERCFLWLGGFRSSELLKLLVNQLEPLTEQQLVGITNLQQSSQQAEDALSQGMEALQQSLSETLSTGSLGSSGSSGNVANYMGQMAMAMGKLGTLEGFIKQADNLRQQTLQQIHRILTTRQSARALLAIHDYFSRLRALSSLWLARPRD

SEQ ID NO: 52276 - DNA, 1638 bp, Glycine max
  misc_feature (1)..(1638): Ceres Seq. ID no. 15171249
agaaaaaacgagtaatgttcactgcgaagaaaatatcaaaataatactactagccatttacaaaggcagcagctgcaggaggtgcgtgcatcgagcggagccatgatctcgcaattcttcgttctgtcacagcgtggcgataacatcgcttttcgagattatcgtggtgaagtgcagaagggaagtgcggagatatttttccgcaaagtaaagttttgggaagatgggggactgctggaggcaccacctgtctttaatgtggatggagtaaattactttcatgtgaaagttgttggcttattgtttgttgcaactacaagggttaatacatcaccttcttttgtcttggagcttttacaaagaattgctcgagttattaaggattaccttgggattctcaatgaagactcattacggaaaaactttgtgcttgtgtacgagttacttgatgaagttattgattttggttatgttcaaacaacatctactgaattgttgaagtcctatgttttcaatgagccgcttgtaattgatgctgcacgtctgccacctcttggacctgctgcaatttttacgcaaggaacaaaaagaatgccagggatagctgtcacaaaatctgttgttgctacagagcctgggggtagaaagagggaagagatttttgtagacataattgagaaaatcagcatcactttcagctccagtggatatatactgacttctgagattgatggcaccatacaaatgaagagctatctttctggcaatcctgaaattcgattagcacttaatgatgacctctccattggaagaagccagggatcagctttcggttataggagctcatctggctcaggaacagttatattagatgactgtaatttccatgaatctgttcgtcttgatagttttgatatagacagaactctatccctggtaccaccggatggtgaatttccagtcatgaactaccgtttgacacaggaatttagtcctccttttcgtattaatgctttgattgaagaagcagggtcacttaaggcagaagtaattcttaaagtaagtgccgagtttccctcaagtgtaacagctaacactatcaaagtgcagatgccactaccaaaatgtacctccagagttagttttgagctggaacctggagctgtaggacaaacaactgattttaaggaagcaaataagaggctagaatggagtttaagaaagatcgtcgggggatcggagcacactctacatgcaaaactaaccttttctcaggaatctcacgttaatataacaaaagaatcaggacctgtgagcatgacatttactataccaatgcataacgtttcacggcttcaggtaaagtatttgcagatagcaaagaaatctgcaacgcatgaaccataccggtgggttagatatgttacacaggcgaattcctacgtcgctcgtatatgatgccgttaagaacactgtcccctcccccgctctttgtttttctattttgttttcctgctcttattgctctttacacacatgctttgtttatttacttattctttatttgtaaattacactctaagtttacattctaagtcgaatatagatgacgttttcagtttgcctgatttatcattc

SEQ ID NO: 52277 - protein, 451 aa, Glycine max
  peptide (1)..(451): Ceres Seq. ID no. 15171250
MISQFFVLSQRGDNIAFRDYRGEVQKGSAEIFFRKVKFWEDGGLLEAPPVFNVDGVNYFHVKVVGLLFVATTRVNTSPSFVLELLQRIARVIKDYLGILNEDSLRKNFVLVYELLDEVIDFGYVQTTSTELLKSYVFNEPLVIDAARLPPLGPAAIFTQGTKRMPGIAVTKSVVATEPGGRKREEIFVDIIEKISITFSSSGYILTSEIDGTIQMKSYLSGNPEIRLALNDDLSIGRSQGSAFGYRSSSGSGTVILDDCNFHESVRLDSFDIDRTLSLVPPDGEFPVMNYRLTQEFSPPFRINALIEEAGSLKAEVILKVSAEFPSSVTANTIKVQMPLPKCTSRVSFELEPGAVGQTTDFKEANKRLEWSLRKIVGGSEHTLHAKLTFSQESHVNITKESGPVSMTFTIPMHNVSRLQVKYLQIAKKSATHEPYRWVRYVTQANSYVARI

SEQ ID NO: 52278 - protein, 288 aa, Glycine max; identical to SEQ ID NO: 51626
  peptide (1)..(288): Ceres Seq. ID no. 15171251

SEQ ID NO: 52279 - protein, 237 aa, Glycine max; identical to SEQ ID NO: 51627
  peptide (1)..(237): Ceres Seq. ID no. 15171252

SEQ ID NO: 52280 - DNA, 830 bp, Glycine max
  misc_feature (1)..(830): Ceres Seq. ID no. 14305994
atatatctcttataccccttttgtttccatttgaactttgcttttagtagttttaaatcatatcaatagctatgacgactgtggacaggcgtgtgaatgtcgaccgtactgacaaaggacttcaacttaagccgcagtacgaagatcgtgtcggttatggcgctggttatgattatggttatggtgctgattacaagagtcgcggcccatccactaatcaagtcgtggcacttatagcaggagttccaattggtggctcattactagccctagctggactcactctagccggttcggtgataggtttgattctctccattccgctcttcctcctcttcagtcccgtgattgtcccagccgctctcaccatagggctcgctgtgaccggaattttggcgtctgggttatttggtctgacgggtctgagctcggtctcatgggtcctaaactacatccgtgggacgagtgatacggtgccggagcaactggactatgctaagcggcgtatggctgatgcagtaggctacgctggtcagaagggaaaagagatgggacagtatgtgcaggataaggcccatgaagcccacgatactagtctgaccactgagaccagagagccggttcaggcaaagaggactttagcgtaaggcaaggaggaaccttctataaagttgtgggtttatgttggaaaaggcaattatgtaattttacttttgtgtcccagtttcttcgttttttttttgaatatttgtgaattatgtgtaagttcgttttgttatgtccaaataaaatattttgtgagtgaaataaagtgggataaaaggaaatac

SEQ ID NO: 52281 - protein, 191 aa, Glycine max
  peptide (1)..(191): Ceres Seq. ID no. 14305995
MTTVDRRVNVDRTDKGLQLKPQYEDRVGYGAGYDYGYGADYKSRGPSTNQVVALIAGVPIGGSLLALAGLTLAGSVIGLILSIPLFLLFSPVIVPAALTIGLAVTGILASGLFGLTGLSSVSWVLNYIRGTSDTVPEQLDYAKRRMADAVGYAGQKGKEMGQYVQDKAHEAHDTSLTTETREPVQAKRTLA

SEQ ID NO: 52282 - DNA, 1293 bp, Glycine max
  misc_feature (1)..(1293): Ceres Seq. ID no. 14314542
atccataacacatcgacccgtgcatggtctcagtaatcaaacccttaccgcgttccccactctgccatcgcaaacccttcccctcacagagttgaagtttattagttgaataatagaacagtccatggctgaagaaatgacaatggtagaacctggaagaggtaagaggaaattttttaaaaagcaaggccataaaatgtcaagtaataaagcaaaagtgatgccaccacaacatggacagaagaaagttaaaatagacaaaaaaatgaagaaacttttccgcaagcgtgcacgagagtataattctgatgatgaagaagatgaggaggccactgtacctgctacctcagagcctaaaggtctggcatctatcaccaataaaagaaatgacgaggatgacacagaaagtgaggatgggtctgaggatgaaggagctgcaggaccacaaaaaacatggaataagaatgctactgatatgaataaccacagctctgatgatgaaggagaagatgataatgaaattcagccaggaattacaaaattcactgaaggatgtagagcattcaagatggcctttaagaatattatgcagaagagtgttcctgatgacatgttgggtccaatactgtcagggcaaaggaaacttgttgtagacaaacttgcagaagaggaagcagaaagcaaggtcaagggagaggccaaaaaggaaaagaagatgttggcagaaaaggggcatgtcaaacctgcttcatacttggattcacatgaaaagtttttaataagtgttgctacaaaaggagtggtcaagctgttcaatgctgtaaataaggcacaaactgctcagaaaggactgaacccctcaaggactaaggatgcaaaagagatacgaaaacgaaccaaacaggccttcttttcagagttagggaaaccatcattgcctgcaattggcaccactacaaaggccaaggaaagcactgacagggtagaagatgaacaacctgcttgggctccattacgagataattatatgctgacaagttcaaggctaaaggattgggacaaaatgcctgataaaaatgtatcagatgacatgggaaaaacttctgaagatagtagttcagatgaagattagtattttagaactcgagcaagcagaattgagatattcatggtgggacaatctgtcagtttttgaatattggtactgttctagttgttactggcataggaatatcttatccatacattttgttgccattggtgtaccaatacgagcaatgaatcacctccagt

SEQ ID NO: 52283 - protein, 335 aa, Glycine max
  peptide (1)..(335): Ceres Seq. ID no. 14314543
MAEEMTMVEPGRGKRKFFKKQGHKMSSNKAKVMPPQHGQKKVKIDKKMKKLFRKRAREYNSDDEEDEEATVPATSEPKGLASITNKRNDEDDTESEDGSEDEGAAGPQKTWNKNATDMNNHSSDDEGEDDNEIQPGITKFTEGCRAFKMAFKNIMQKSVPDDMLGPILSGQRKLVVDKLAEEEAESKVKGEAKKEKKMLAEKGHVKPASYLDSHEKFLISVATKGVVKLFNAVNKAQTAQKGLNPSRTKDAKEIRKRTKQAFFSELGKPSLPAIGTTTKAKESTDRVEDEQPAWAPLRDNYMLTSSRLKDWDKMPDKNVSDDMGKTSEDSSSDED

SEQ ID NO: 52284 - protein, 331 aa, Glycine max
  peptide (1)..(331): Ceres Seq. ID no. 14314544
MTMVEPGRGKRKFFKKQGHKMSSNKAKVMPPQHGQKKVKIDKKMKKLFRKRAREYNSDDEEDEEATVPATSEPKGLASITNKRNDEDDTESEDGSEDEGAAGPQKTWNKNATDMNNHSSDDEGEDDNEIQPGITKFTEGCRAFKMAFKNIMQKSVPDDMLGPILSGQRKLVVDKLAEEEAESKVKGEAKKEKKMLAEKGHVKPASYLDSHEKFLISVATKGVVKLFNAVNKAQTAQKGLNPSRTKDAKEIRKRTKQAFFSELGKPSLPAIGTTTKAKESTDRVEDEQPAWAPLRDNYMLTSSRLKDWDKMPDKNVSDDMGKTSEDSSSDED

SEQ ID NO: 52285 - protein, 329 aa, Glycine max
  peptide (1)..(329): Ceres Seq. ID no. 14314545
MVEPGRGKRKFFKKQGHKMSSNKAKVMPPQHGQKKVKIDKKMKKLFRKRAREYNSDDEEDEEATVPATSEPKGLASITNKRNDEDDTESEDGSEDEGAAGPQKTWNKNATDMNNHSSDDEGEDDNEIQPGITKFTEGCRAFKMAFKNIMQKSVPDDMLGPILSGQRKLVVDKLAEEEAESKVKGEAKKEKKMLAEKGHVKPASYLDSHEKFLISVATKGVVKLFNAVNKAQTAQKGLNPSRTKDAKEIRKRTKQAFFSELGKPSLPAIGTTTKAKESTDRVEDEQPAWAPLRDNYMLTSSRLKDWDKMPDKNVSDDMGKTSEDSSSDED

SEQ ID NO: 52286 - DNA, 1411 bp, Glycine max
  misc_feature (1)..(1411): Ceres Seq. ID no. 15177291
tatatatgtatatatacattgcatagccttggggtattcaaaatcatcaattttcaattcatggcttccctcatgagcaccatcctcaagcaaaggtcttgttcttcttcttcacatgctgggaggctgttgttctccacaacaacagcagccattgttgattccccttcacttgctcagagaatcagagatttgcctaaggaccttcctggaaccaacatcaagaagcatgtttctcagctcattgggaggactccactggtttatcttaacaaagtcaccgaaggatgtggagcttatgttgctgtcaagcaagagatgatgcaacctactgccagcatcaaagacagaccagcatatgcaatgatcacagatgctgaggaaaagaatctgataactcctggaaagacaactttgatagagcctacatcaggcaatatgggtatcagcatggcatttatggccgccatgaagggatataagatggttttgaccatgccctcttacacaagcttggaaagaagggtgaccatgagagcgtttggagctgaattaatcctcactgatccagccaaaggaatgggaggaacagtaaagaaggcttatgaacttttggaaaacacaccaaatgctcacatgctgcaacaattttcaaaccctgccaatactcaggtgcattttgaaacaacaggtcctgagatatgggaggatacaaatggacaagttgacatatttgttatgggaataggtagtggaggcacagtctctggggttggacaatatcttaaatccaaaaatcctaatgttaagatatatggagtggagccaagtgaaagcaatgtgctgaatggtggtaaacctggtcctcatcatataactggcaatggggttggattcaaaccagacatattggacctggatgttatggaaaaagttcttgaagttagcagcgaagatgcagttaacatggctagggtgttggcattgaaggaaggactcatggtagggatatcatctggagctaacacagttgcagcactcagattggctcagctgcctgagaacaaaggcaaacttattgtgactgttcatccaagcttcggtgaacgatacctatcatctgttctgttccaagagcttcgtcaagaagctgaaaacatgcagccagtagcagttgattaattccatgcataagctttgttgtggagttacattacatggagcaacctagttattacaatcctgttgtagcaaaaattgttaacatcatcttacagttcggccatagcaaaaattgtcaaacaaagctgtgttaattgggaaaaggttttgatacagcttacaataagagctgtgttaatgttttgtattgttctttatttttcatttttaatcgaaaaaggtataaagc

SEQ ID NO: 52287 - protein, 393 aa, Glycine max
  peptide (1)..(393): Ceres Seq. ID no. 15177292
YICIYTLHSLGVFKIINFQFMASLMSTILKQRSCSSSSHAGRLLFSTTTAAIVDSPSLAQRIRDLPKDLPGTNIKKHVSQLIGRTPLVYLNKVTEGCGAYVAVKQEMMQPTASIKDRPAYAMITDAEEKNLITPGKTTLIEPTSGNMGISMAFMAAMKGYKMVLTMPSYTSLERRVTMRAFGAELILTDPAKGMGGTVKKAYELLENTPNAHMLQQFSNPANTQVHFETTGPEIWEDTNGQVDIFVMGIGSGGTVSGVGQYLKSKNPNVKIYGVEPSESNVLNGGKPGPHHITGNGVGFKPDILDLDVMEKVLEVSSEDAVNMARVLALKEGLMVGISSGANTVAALRLAQLPENKGKLIVTVHPSFGERYLSSVLFQELRQEAENMQPVAVD

SEQ ID NO: 52288 - protein, 373 aa, Glycine max
  peptide (1)..(373): Ceres Seq. ID no. 15177293
MASLMSTILKQRSCSSSSHAGRLLFSTTTAAIVDSPSLAQRIRDLPKDLPGTNIKKHVSQLIGRTPLVYLNKVTEGCGAYVAVKQEMMQPTASIKDRPAYAMITDAEEKNLITPGKTTLIEPTSGNMGISMAFMAAMKGYKMVLTMPSYTSLERRVTMRAFGAELILTDPAKGMGGTVKKAYELLENTPNAHMLQQFSNPANTQVHFETTGPEIWEDTNGQVDIFVMGIGSGGTVSGVGQYLKSKNPNVKIYGVEPSESNVLNGGKPGPHHITGNGVGFKPDILDLDVMEKVLEVSSEDAVNMARVLALKEGLMVGISSGANTVAALRLAQLPENKGKLIVTVHPSFGERYLSSVLFQELRQEAENMQPVAVD

SEQ ID NO: 52289 - protein, 369 aa, Glycine max
  peptide (1)..(369): Ceres Seq. ID no. 15177294
MSTILKQRSCSSSSHAGRLLFSTTTAAIVDSPSLAQRIRDLPKDLPGTNIKKHVSQLIGRTPLVYLNKVTEGCGAYVAVKQEMMQPTASIKDRPAYAMITDAEEKNLITPGKTTLIEPTSGNMGISMAFMAAMKGYKMVLTMPSYTSLERRVTMRAFGAELILTDPAKGMGGTVKKAYELLENTPNAHMLQQFSNPANTQVHFETTGPEIWEDTNGQVDIFVMGIGSGGTVSGVGQYLKSKNPNVKIYGVEPSESNVLNGGKPGPHHITGNGVGFKPDILDLDVMEKVLEVSSEDAVNMARVLALKEGLMVGISSGANTVAALRLAQLPENKGKLIVTVHPSFGERYLSSVLFQELRQEAENMQPVAVD

SEQ ID NO: 52290 - DNA, 937 bp, Glycine max
  misc_feature (1)..(937): Ceres Seq. ID no. 14305963
ctctttgctccttctgtcctcccctcagcggcatcgttgtattgttcttacacatctttctctctctcactttcggtttctaaaccaaaaccctaatcgagatcacaatcggatcgtaaacaaacagagaccagccatggacggtgattcctcttggagtgctcgactctcttccgcttccaggcgctaccaatccgctcttcaatctcgatcagacatgttcatgggttttgatgaaaatgatggggacgatgatataagagaggagtttctctgcccattttgttctgagtattttgatatcgttggattatgctgccacattgatgaagagcatccaatggaggcaaaaaatggggtatgtccagtttgtgcattgagggtgggggttgatatggtagcacatataaccctacaacatgggagtatatttaagatgcagcgcaaaaggaaatcacggaaaggtggatcgtattcaacactatctttattgaggaaggaactacgagaaggaaatttgcaatccctttttggcggatcttcatgtatagtgtcctcatctaatgcagatccactgttgtcatcatttatattgcctttagctaatgaacatgccagttctcagcctcacttacacactgagacaagatcatctaaaaaatgcttagatgagactgtgtcaacaagaaatgtggagacatcaaccttgtcagttaaggataaggaggagaaggaaaaaagatgcgagtttgttcaagggctgttgctgtccaccatacttgatgacaatttataaaggaaattcatggaggtggctgcttcagtagtgggcgaattcatatgcggtacctgctatgtatggtttgcctgatgaaattgtctatgtatttgatcagagtggaataataagtagtagaaaatgaatgtaatttatgtt

SEQ ID NO: 52291 - protein, 264 aa, Glycine max
  peptide (1)..(264): Ceres Seq. ID no. 14305964
SLLLLSSPQRHRCIVLTHLSLSHFRFLNQNPNRDHNRIVNKQRPAMDGDSSWSARLSSASRRYQSALQSRSDMFMGFDENDGDDDIREEFLCPFCSEYFDIVGLCCHIDEEHPMEAKNGVCPVCALRVGVDMVAHITLQHGSIFKMQRKRKSRKGGSYSTLSLLRKELREGNLQSLFGGSSCIVSSSNADPLLSSFILPLANEHASSQPHLHTETRSSKKCLDETVSTRNVETSTLSVKDKEEKEKRCEFVQGLLLSTILDDNL

SEQ ID NO: 52292 - protein, 219 aa, Glycine max
  peptide (1)..(219): Ceres Seq. ID no. 14305965
MDGDSSWSARLSSASRRYQSALQSRSDMFMGFDENDGDDDIREEFLCPFCSEYFDIVGLCCHIDEEHPMEAKNGVCPVCALRVGVDMVAHITLQHGSIFKMQRKRKSRKGGSYSTLSLLRKELREGNLQSLFGGSSCIVSSSNADPLLSSFILPLANEHASSQPHLHTETRSSKKCLDETVSTRNVETSTLSVKDKEEKEKRCEFVQGLLLSTILDDNL

SEQ ID NO: 52293 - protein, 192 aa, Glycine max
  peptide (1)..(192): Ceres Seq. ID no. 14305966
MFMGFDENDGDDDIREEFLCPFCSEYFDIVGLCCHIDEEHPMEAKNGVCPVCALRVGVDMVAHITLQHGSIFKMQRKRKSRKGGSYSTLSLLRKELREGNLQSLFGGSSCIVSSSNADPLLSSFILPLANEHASSQPHLHTETRSSKKCLDETVSTRNVETSTLSVKDKEEKEKRCEFVQGLLLSTILDDNL

SEQ ID NO: 52294 - DNA, 694 bp, Glycine max
  misc_feature (1)..(694): Ceres Seq. ID no. 14305944
attcacaattcacaacaacacacaacatattattaagacacaccccaaaccaaaccacttcacacagaacacatatccattggtgaaggagtatcatgggtgaacaattagggctactaaaagtcatggttgtgcaagggaaaaggttggtgatccgggatttcaagaccagtgatccttatgtagtactcaaactagggaatcagactgcaaagaccaaggtaattaatagctgcttgaatcctgtttggaatgaagagctgaatttcactctgacagaaccattgggagttctgaatttggaagtgtttgataaagatcttttgaaggctgatgacaagatgggaaatgctttcttgaaccttcaaccaatagtctctgcagccagattaagagacatcttaagagtgtcctctggtgagacaacattaaggaaggtcatacctgatggtgaaaactgtcttgtccgtgaaagcagtatcaactgtgtcaatggtgaggtggtgcagaatgtttggttaaggcttcgtggagttgagtctggggaactagaattgactatcaagttggccacacctgttgctcctgcaatatagtgcaacaattgcatgtgtcataagtgtagatgtctaactattgcatgagtcacttttgccttttattttcaaatttaaatttctttctttttagttcc

SEQ ID NO: 52295 - protein, 166 aa, Glycine max
  peptide (1)..(166): Ceres Seq. ID no. 14305945
MGEQLGLLKVMVVQGKRLVIRDFKTSDPYVVLKLGNQTAKTKVINSCLNPVWNEELNFTLTEPLGVLNLEVFDKDLLKADDKMGNAFLNLQPIVSAARLRDILRVSSGETTLRKVIPDGENCLVRESSINCVNGEVVQNVWLRLRGVESGELELTIKLATPVAPAI

SEQ ID NO: 52296 - protein, 156 aa, Glycine max
  peptide (1)..(156): Ceres Seq. ID no. 14305946
MVVQGKRLVIRDFKTSDPYVVLKLGNQTAKTKVINSCLNPVWNEELNFTLTEPLGVLNLEVFDKDLLKADDKMGNAFLNLQPIVSAARLRDILRVSSGETTLRKVIPDGENCLVRESSINCVNGEVVQNVWLRLRGVESGELELTIKLATPVAPAI

SEQ ID NO: 52297 - protein, 84 aa, Glycine max
  peptide (1)..(84): Ceres Seq. ID no. 14305947
MGNAFLNLQPIVSAARLRDILRVSSGETTLRKVIPDGENCLVRESSINCVNGEVVQNVWLRLRGVESGELELTIKLATPVAPAI

SEQ ID NO: 52298 - DNA, 861 bp, Glycine max
  misc_feature (1)..(861): Ceres Seq. ID no. 15171239
gccaagatttgttcattgttgggtcaattgaagtctaagaaagaaaacagagagcgaagaaggagaagagatcagaaaaatggcgtccaaagctccaaagaaggccaatctcctcgatcaccactccatcaagcacatcctcgacgagtcagtctccgaggtggtaacgagtcgtgggtttgtggaagacgtgagattgagcaatgtgaggcttctcattggggcaatcatcatcgtcattgctctcttcgcccaattctacaagaagaagttccctgaaaatagggattttctcatcgcctgcatcgccttgtatgtgatcttcaatgggttgttgcagctgatcatatacactaaggagaaaaatgccattctgttcacttatcctcctgttggatcctttactagtaccggtttggtggtttcctccaaattgcctaggttttctgacatgtacacactcactatagcaagcgcagatccaaaatcaatttctgcaaatgatcaagtacatttcaccaaaagtgtcactcagtggttcactaaggacggagtcttagttgagggcctgttctggaaggatgttgaagctttgatagttcaatatactaaagaaccaaagaagagcaagtaatatggagacatgaactttggttttgtggaaaactttttggatgagaaaacatatatttggatatggtttataattctatacttaagacatttaaaatagaactgagggaatcaagcttttaccagctttagagcacaatttattcccatatttcatcagcttatttcgtagaaaaggcttgaacctttattttcatttaattttctaaaaactattaatggttctcg

SEQ ID NO: 52299 - protein, 184 aa, Glycine max
  peptide (1)..(184): Ceres Seq. ID no. 15171240
MASKAPKKANLLDHHSIKHILDESVSEVVTSRGFVEDVRLSNVRLLIGAIIIVIALFAQFYKKKFPENRDFLIACIALYVIFNGLLQLIIYTKEKNAILFTYPPVGSFTSTGLVVSSKLPRFSDMYTLTIASADPKSISANDQVHFTKSVTQWFTKDGVLVEGLFWKDVEALIVQYTKEPKKSK

SEQ ID NO: 52300 - protein, 92 aa, Glycine max
  peptide (1)..(92): Ceres Seq. ID no. 15171241
AKICSLLGQLKSKKENRERRRRRDQKNGVQSSKEGQSPRSPLHQAHPRRVSLRGGNESWVCGRREIEQCEASHWGNHHRHCSLRPILQEEVP

SEQ ID NO: 52301 - DNA, 1439 bp, Glycine max
  misc_feature (1)..(1439): Ceres Seq. ID no. 14314589
aaaagaagaagatttcctctattgattttctttattaaattcaggttacgtactaatgacggcccagttccagaagattgttgttgctgaccacatggatcgaattagtgatttaccaagtcatttgattgattttattctacaacgcttgcccctgcaagatgttgttagaacgagtttattatcaagtaaatggagatataagtggacttctatccccaaacttgatttttcaaatgatttttttcaaaagtgtagggatttagaacttcatgaagtttcaagtactattacagaaattcttttgattcacgatgggcaattagatgagtttgttctttgcattcccgaaaatgtgccaatcaaaattgaatcccttaataagtggattctttgtttatcaagaaaagggattaaagaacttgagctttggaaccttcaaacagatccttgtgaaacaccatctcatatcttctcttgtcaaggattgacgtatcttcaacttcacaattttaaattatcaactgtgcctaatttttctagctttaaaagtttggtttaccttatgttagttgatattatatttgagtccagtgcaattgatcttatgtttggttgtccatcacttgtgatgctctccatttgttactgttctggttttgagtgtatcaatgtgtcctctcctgctctcgaagtcttacatgtacaaggtgaacaagttatcaagtcaatttgtttggagaaagctaaaagaatgactgatgtttcactcatggctgataatcctggggataactttgacatggatacaatatcaaatttgatcaaaggcttgtcagaagttgaaagcatgtgtttaacagaaggttatattcagatcttttccacagcttatacccttccaaagagtttgcaaaaaccactcaactgcttagaatctctagaattggaaggtgtgaatttcgacgatacaacagagcttctgtttgttatttccctacttaaaagttctccaaacctagagaaactttttatacagggtaattatagcactggcgtggatctgccacaaatattggagaagtcaaagtacaatggttgttgccttagtcaccttctgactgtgcacataaaagcttacaaaccctgtgagaatacaatgaacttcatacgttttttgctggctaattccacatcattggagctccttactttctgcattattcctgctcatgatcaacaacatcattccatatctagtgttggacgagaattggaacaaatggcacgagcttcaaaaagtgcagtagttgagttcattgatttatcatttgattgattggtgattgtatttgttatcattcaatccccaactcctcctcatctcttgctttgttctattgtaatttttgctagttacagacaactctttcacaccc

SEQ ID NO: 52302 - protein, 427 aa, Glycine max
  peptide (1)..(427): Ceres Seq. ID no. 14314590
MTAQFQKIVVADHMDRISDLPSHLIDFILQRLPLQDVVRTSLLSSKWRYKWTSIPKLDFSNDFFQKCRDLELHEVSSTITEILLIHDGQLDEFVLCIPENVPIKIESLNKWILCLSRKGIKELELWNLQTDPCETPSHIFSCQGLTYLQLHNFKLSTVPNFSSFKSLVYLMLVDIIFESSAIDLMFGCPSLVMLSICYCSGFECINVSSPALEVLHVQGEQVIKSICLEKAKRMTDVSLMADNPGDNFDMDTISNLIKGLSEVESMCLTEGYIQIFSTAYTLPKSLQKPLNCLESLELEGVNFDDTTELLFVISLLKSSPNLEKLFIQGNYSTGVDLPQILEKSKYNGCCLSHLLTVHIKAYKPCENTMNFIRFLLANSTSLELLTFCIIPAHDQQHHSISSVGRELEQMARASKSAVVEFIDLSFD

SEQ ID NO: 52303 - protein, 414 aa, Glycine max
  peptide (1)..(414): Ceres Seq. ID no. 14314591
MDRISDLPSHLIDFILQRLPLQDVVRTSLLSSKWRYKWTSIPKLDFSNDFFQKCRDLELHEVSSTITEILLIHDGQLDEFVLCIPENVPIKIESLNKWILCLSRKGIKELELWNLQTDPCETPSHIFSCQGLTYLQLHNFKLSTVPNFSSFKSLVYLMLVDIIFESSAIDLMFGCPSLVMLSICYCSGFECINVSSPALEVLHVQGEQVIKSICLEKAKRMTDVSLMADNPGDNFDMDTISNLIKGLSEVESMCLTEGYIQIFSTAYTLPKSLQKPLNCLESLELEGVNFDDTTELLFVISLLKSSPNLEKLFIQGNYSTGVDLPQILEKSKYNGCCLSHLLTVHIKAYKPCENTMNFIRFLLANSTSLELLTFCIIPAHDQQHHSISSVGRELEQMARASKSAVVEFIDLSFD

SEQ ID NO: 52304 - protein, 257 aa, Glycine max
  peptide (1)..(257): Ceres Seq. ID no. 14314592
MLVDIIFESSAIDLMFGCPSLVMLSICYCSGFECINVSSPALEVLHVQGEQVIKSICLEKAKRMTDVSLMADNPGDNFDMDTISNLIKGLSEVESMCLTEGYIQIFSTAYTLPKSLQKPLNCLESLELEGVNFDDTTELLFVISLLKSSPNLEKLFIQGNYSTGVDLPQILEKSKYNGCCLSHLLTVHIKAYKPCENTMNFIRFLLANSTSLELLTFCIIPAHDQQHHSISSVGRELEQMARASKSAVVEFIDLSFD

SEQ ID NO: 52305 - DNA, 856 bp, Glycine max
  misc_feature (1)..(856): Ceres Seq. ID no. 14305885
caacccaattaatctttgttttcaattccttatttcaataattctctttctccttcttctataactctcctctgtttactctgtttttttcacaaaacaacatggctgcatacagagaacccatgaacatgaacatgagcgacagagccccggtttctccgcagcaaccacactcgccgtggcattctccggttccgtaccttttcggtggtttagcagcgatgttgggtctcatagccttcgctctgttgatccttgcatgttcctattggaagctctccgggtacctcgaagggaacggggaaacagaacgggacctggaagctggcgaaacggaacaggaccagaaacctgcgaaaccgtacgaggagaagatcttggtgatcatggccgggcaagagaagccaacattcttggcaactccgagcgtgtcttcgagttgcagcactagcaggacctcttcgttcggcgacaacactagcacatgcacctgcgaggagaaccgaaaatcgcttgaaatggccgtcaaagagggaagcgctgccgggactgggaccaccgaaaccgcacacacctcatcagatcagaacctttgaaacatagtcacatgttgggggttttgttttgtagttaggttgctttcgtgaaaaagcaaagctcgtgacacctgggtgtctctctaggttgcatgttcaacaattggtgctgatatggggattctcttctcttctcttctctttttattttttcttttttctttttccttcttcttctctttcgattctcgtctatacattatttcgggaatgtaaattctttgaggtggaattgagacatttgctgtttcacaaatcac

SEQ ID NO: 52306 - protein, 164 aa, Glycine max
  peptide (1)..(164): Ceres Seq. ID no. 14305886
MAAYREPMNMNMSDRAPVSPQQPHSPWHSPVPYLFGGLAAMLGLIAFALLILACSYWKLSGYLEGNGETERDLEAGETEQDQKPAKPYEEKILVIMAGQEKPTFLATPSVSSSCSTSRTSSFGDNTSTCTCEENRKSLEMAVKEGSAAGTGTTETAHTSSDQNL

SEQ ID NO: 52307 - protein, 157 aa, Glycine max
  peptide (1)..(157): Ceres Seq. ID no. 14305887
MNMNMSDRAPVSPQQPHSPWHSPVPYLFGGLAAMLGLIAFALLILACSYWKLSGYLEGNGETERDLEAGETEQDQKPAKPYEEKILVIMAGQEKPTFLATPSVSSSCSTSRTSSFGDNTSTCTCEENRKSLEMAVKEGSAAGTGTTETAHTSSDQNL

SEQ ID NO: 52308 - protein, 155 aa, Glycine max
  peptide (1)..(155): Ceres Seq. ID no. 14305888
MNMSDRAPVSPQQPHSPWHSPVPYLFGGLAAMLGLIAFALLILACSYWKLSGYLEGNGETERDLEAGETEQDQKPAKPYEEKILVIMAGQEKPTFLATPSVSSSCSTSRTSSFGDNTSTCTCEENRKSLEMAVKEGSAAGTGTTETAHTSSDQNL

SEQ ID NO: 52309 - DNA, 1072 bp, Glycine max
  misc_feature (1)..(1072): Ceres Seq. ID no. 14305878
gaaacggaataattcgatacccctctcgtctcgtaactaaccatggcagcgttccgatggaagagcttcgaggagaatgaggatcgcccagccaagcctcgtcattttggcgtcaccgagattcaaagcccccactgcactctcttctcccacaaccttcttcaggatatttttgaatctatgggagactatgtagatgggttaaagttttctggaggttctcacagcatgatgccaaaggctactatcaagcaaatcattgacatggcccatcagcatgacgtgtatgttagcacgggtgattgggctgagcacatgattagcaaaagtccatcaggtttcaaggaatatgtagaggaatgcaagcagttggggtttgacacaattgagctcaatgtgggatcgcttgagattcctgaagaaacctttttgagatttgtccgcttggtcaaaagtggtggtctcaaagctaagcctcattttcaagtgaagtttaatgagtctgatattcccaaaggtggtgacagggcttatggggcttatattccccctgtacctagatcatttgaattggtagaagatgtgaatctcttgatcagaagggctgagagatgtctggaagcaggtgcagacatgataatgattgatgctgatgatgtcagcaaacatgctgataacatgcgtgcagacatcattgccaaaatcatagggcgccttggtattgagaagactatgtttgaagcatcaaatcagagaatatcggagtggttcatcaaacaatatggtccaaaggtgaacctctttattgatcattcgaacgtggtggatgtggagtgcctcagggggcgcaacttgggtagaaatcttgcttctttccttggtgcttcagatttcctgttctgaagtgagggaattttcgtatagcaccaagtggggttgatttgtttgtgcataatgcaaagacttgaggtttgccatgtgtgttacagttagtgtgttacatatttcctttagtgattgaagattggaaaattttaaatggagagactgaaataaatgaaacatatttcat

SEQ ID NO: 52310 - protein, 286 aa, Glycine max
  peptide (1)..(286): Ceres Seq. ID no. 14305879
MAAFRWKSFEENEDRPAKPRHFGVTEIQSPHCTLFSHNLLQDIFESMGDYVDGLKFSGGSHSMMPKATIKQIIDMAHQHDVYVSTGDWAEHMISKSPSGFKEYVEECKQLGFDTIELNVGSLEIPEETFLRFVRLVKSGGLKAKPHFQVKFNESDIPKGGDRAYGAYIPPVPRSFELVEDVNLLIRRAERCLEAGADMIMIDADDVSKHADNMRADIIAKIIGRLGIEKTMFEASNQRISEWFIKQYGPKVNLFIDHSNVVDVECLRGRNLGRNLASFLGASDFLF

SEQ ID NO: 52311 - protein, 240 aa, Glycine max
  peptide (1)..(240): Ceres Seq. ID no. 14305880
MGDYVDGLKFSGGSHSMMPKATIKQIIDMAHQHDVYVSTGDWAEHMISKSPSGFKEYVEECKQLGFDTIELNVGSLEIPEETFLRFVRLVKSGGLKAKPHFQVKFNESDIPKGGDRAYGAYIPPVPRSFELVEDVNLLIRRAERCLEAGADMIMIDADDVSKHADNMRADIIAKIIGRLGIEKTMFEASNQRISEWFIKQYGPKVNLFIDHSNVVDVECLRGRNLGRNLASFLGASDFLF

SEQ ID NO: 52312 - protein, 224 aa, Glycine max
  peptide (1)..(224): Ceres Seq. ID no. 14305881
MMPKATIKQIIDMAHQHDVYVSTGDWAEHMISKSPSGFKEYVEECKQLGFDTIELNVGSLEIPEETFLRFVRLVKSGGLKAKPHFQVKFNESDIPKGGDRAYGAYIPPVPRSFELVEDVNLLIRRAERCLEAGADMIMIDADDVSKHADNMRADIIAKIIGRLGIEKTMFEASNQRISEWFIKQYGPKVNLFIDHSNVVDVECLRGRNLGRNLASFLGASDFLF

SEQ ID NO: 52313 - DNA, 1339 bp, Glycine max
  misc_feature (1)..(1339): Ceres Seq. ID no. 14314593
agggaaagtaaaccttgaaacaatcatgagcatcggaacaacactactttcaacaccaccacattactgtttccactccaacactcaaaccacattcctcagcaccgttactccaattcaaaacctctctatccgcaataacaatttcagagtcctctgtttctcttcggacccgtcgcagttgccgccggtggtggtggtggggtccgccaacgccgacatctacgtcgaggtagaccggctcccgggcgagggcgagaccctggcggcgaggtccgggcagacgattgccggcggcaagggcgccaaccaggccacgtgctccgccaagctcgcgtacccgacctacttcgtcgggcaggtcggggacgacgcttacgggagactcgtcacggcgggcctccgcggtggcggggttcgcctcgataatctcgccgtggtggcttcggcggcaacgggtcatgcagttgtgatgctccagtccaacggccagaactccatcgtctacattgggggtgccaacttgagctgctggcctagttccctgccacgtcagcatttggacctcgttgcccaagctggcatcgttttgctgcagagggagattcctgatgctgtcaatgctcaagtcgcacaggctgccaaaaatgctggggtgccagtagtgttggatgctggaggcatggatgggccacttccgccacaattaataaattttgttgatattttgagtcctaatgaaactgaacttgcacgccttacgggaatgccaacagaaagttttgaagagattcaacaggctgctttgaaatgccatgaaatgggagctaagcaagttcttgtgaaacttggacacaaaggatctgccctttttgtagaaggagaaaaaacaattcagcagcctgccatacttgctaaaacagttgttgatacaactggtgctggtgatacttttactgctgcttttgccgtggccttggttgagggcaagtccaaaaaggaatgcctcagatttgccgctgctgcagcttgtctctgtgttcaagtgaagggagcctctcccagcatgcctgataggaaatctgttttggatcttcttaattgtcaatgataatactcgcaaaaggtcacaattcgaactatcaggaatagaataactgtgtatggcagagggaaagacccttgaaaatggcagcaaggaaagcaaaaatccttttacagagtatatctgcaagatggattcttcaacataatagtttgttgtcattgtaataagattaggacaaacactttaccgtttggtaatggaaggaaaatgaaaagaaaaatgttttatatg

SEQ ID NO: 52314 - protein, 369 aa, Glycine max
  peptide (1)..(369): Ceres Seq. ID no. 14314594
GKVNLETIMSIGTTLLSTPPHYCFHSNTQTTFLSTVTPIQNLSIRNNNFRVLCFSSDPSQLPPVVVVGSANADIYVEVDRLPGEGETLAARSGQTIAGGKGANQATCSAKLAYPTYFVGQVGDDAYGRLVTAGLRGGGVRLDNLAVVASAATGHAVVMLQSNGQNSIVYIGGANLSCWPSSLPRQHLDLVAQAGIVLLQREIPDAVNAQVAQAAKNAGVPVVLDAGGMDGPLPPQLINFVDILSPNETELARLTGMPTESFEEIQQAALKCHEMGAKQVLVKLGHKGSALFVEGEKTIQQPAILAKTVVDTTGAGDTFTAAFAVALVEGKSKKECLRFAAAAACLCVQVKGASPSMPDRKSVLDLLNCQ

SEQ ID NO: 52315 - protein, 361 aa, Glycine max
  peptide (1)..(361): Ceres Seq. ID no. 14314595
MSIGTTLLSTPPHYCFHSNTQTTFLSTVTPIQNLSIRNNNFRVLCFSSDPSQLPPVVVVGSANADIYVEVDRLPGEGETLAARSGQTIAGGKGANQATCSAKLAYPTYFVGQVGDDAYGRLVTAGLRGGGVRLDNLAVVASAATGHAVVMLQSNGQNSIVYIGGANLSCWPSSLPRQHLDLVAQAGIVLLQREIPDAVNAQVAQAAKNAGVPVVLDAGGMDGPLPPQLINFVDILSPNETELARLTGMPTESFEEIQQAALKCHEMGAKQVLVKLGHKGSALFVEGEKTIQQPAILAKTVVDTTGAGDTFTAAFAVALVEGKSKKECLRFAAAAACLCVQVKGASPSMPDRKSVLDLLNCQ

SEQ ID NO: 52316 - protein, 212 aa, Glycine max
  peptide (1)..(212): Ceres Seq. ID no. 14314596
MLQSNGQNSIVYIGGANLSCWPSSLPRQHLDLVAQAGIVLLQREIPDAVNAQVAQAAKNAGVPVVLDAGGMDGPLPPQLINFVDILSPNETELARLTGMPTESFEEIQQAALKCHEMGAKQVLVKLGHKGSALFVEGEKTIQQPAILAKTVVDTTGAGDTFTAAFAVALVEGKSKKECLRFAAAAACLCVQVKGASPSMPDRKSVLDLLNCQ

SEQ ID NO: 52317 - DNA, 1512 bp, Glycine max
  misc_feature (1)..(1512): Ceres Seq. ID no. 14314559
gcaccgcttgagcagacttaacaacagcacaaagcgggttactgtctgttcaagctaccatctctctctctctttcttagtgcctccttgccagaagttaaaatggcccaagaaactttcctattcacatctgaatcagtgaacgaggggcaccctgacaagctctgtgaccagatctccgatgctgtgctcgatgcatgcttggagcaggaccctgacagcaaggttgcctgtgaaacctgcaccaagaccaacatggtgatggttttcggagagatcacaaccaaggccaacgtggactatgagaagattgtgcgtgacacatgcaggaacattggttttgtctctgatgatgttggtcttgatgctgacaactgcaaggtcctcgtcaacattgagcaacagagtcctgatattgctcaaggtgtgcacggccacctcacaaagaggcctgaggagattggtgctggtgaccaaggtcatatgttcggctatgccactgacgagactcccgagctcatgcccttgagccatgtccttgccacgaagctcggtgccaagctcaccgaggttcggaagaacgggacatgcccttggctgagacctgatggcaagacccaagtcactgttgagtactacaatgacaagggtgccatggttccaatccgcgtccacactgtgctcatctccacacagcatgatgagactgtcacaaatgatgagattgcagctgatcttaaagaacacgtgattaagcctgtgattcctgagaagtaccttgatgagaagaccattttccatttgaacccttctggcaggtttgtcattggagggccgcatggcgatgctggtctcaccggccgcaagatcatcatcgacacctatggaggatggggtgcacatggtggtggtgccttctctgggaaggatcctaccaaggttgataggagtggtgcctacattgtgaggcaagctgcaaagagcattgttgcaaatggacttgttaggagggcaattgtgcaagtttcctatgccattggtgtgcctgagcccttgtctgtgtttgttgacacttatggcactgggaagatccctgacaaggaaatcctcagcattgtgaaggagagttttgacttcaggcctggcatgatctccatcaaccttgatctcaagaggggtggaaatggcaggttcttgaagactgctgcatatggacactttggcagagatgaccctgacttcacatgggaagtggtgaagccactcaagggggagaaggtacctgcttaactaaaaggggttccaacactcttggcaagggacttttgcactactactggcttcttattatctgattgctaaaattttctctatgtttccttccctcttactcaattctgtttttttttttctgtatttttttatgaatttcccccttttttttgtgtacttgtatgtgttctttcagaacatatatattttatatgatgaaacaaaaaaaaatgttctccc

SEQ ID NO: 52318 - protein, 395 aa, Glycine max
  peptide (1)..(395): Ceres Seq. ID no. 14314560
MAQETFLFTSESVNEGHPDKLCDQISDAVLDACLEQDPDSKVACETCTKTNMVMVFGEITTKANVDYEKIVRDTCRNIGFVSDDVGLDADNCKVLVNIEQQSPDIAQGVHGHLTKRPEEIGAGDQGHMFGYATDETPELMPLSHVLATKLGAKLTEVRKNGTCPWLRPDGKTQVTVEYYNDKGAMVPIRVHTVLISTQHDETVTNDEIAADLKEHVIKPVIPEKYLDEKTIFHLNPSGRFVIGGPHGDAGLTGRKIIIDTYGGWGAHGGGAFSGKDPTKVDRSGAYIVRQAAKSIVANGLVRRAIVQVSYAIGVPEPLSVFVDTYGTGKIPDKEILSIVKESFDFRPGMISINLDLKRGGNGRFLKTAAYGHFGRDDPDFTWEVVKPLKGEKVPA

SEQ ID NO: 52319 - protein, 344 aa, Glycine max
  peptide (1)..(344): Ceres Seq. ID no. 14314561
MVMVFGEITTKANVDYEKIVRDTCRNIGFVSDDVGLDADNCKVLVNIEQQSPDIAQGVHGHLTKRPEEIGAGDQGHMFGYATDETPELMPLSHVLATKLGAKLTEVRKNGTCPWLRPDGKTQVTVEYYNDKGAMVPIRVHTVLISTQHDETVTNDEIAADLKEHVIKPVIPEKYLDEKTIFHLNPSGRFVIGGPHGDAGLTGRKIIIDTYGGWGAHGGGAFSGKDPTKVDRSGAYIVRQAAKSIVANGLVRRAIVQVSYAIGVPEPLSVFVDTYGTGKIPDKEILSIVKESFDFRPGMISINLDLKRGGNGRFLKTAAYGHFGRDDPDFTWEVVKPLKGEKVPA

SEQ ID NO: 52320 - protein, 342 aa, Glycine max
  peptide (1)..(342): Ceres Seq. ID no. 14314562
MVFGEITTKANVDYEKIVRDTCRNIGFVSDDVGLDADNCKVLVNIEQQSPDIAQGVHGHLTKRPEEIGAGDQGHMFGYATDETPELMPLSHVLATKLGAKLTEVRKNGTCPWLRPDGKTQVTVEYYNDKGAMVPIRVHTVLISTQHDETVTNDEIAADLKEHVIKPVIPEKYLDEKTIFHLNPSGRFVIGGPHGDAGLTGRKIIIDTYGGWGAHGGGAFSGKDPTKVDRSGAYIVRQAAKSIVANGLVRRAIVQVSYAIGVPEPLSVFVDTYGTGKIPDKEILSIVKESFDFRPGMISINLDLKRGGNGRFLKTAAYGHFGRDDPDFTWEVVKPLKGEKVPA

SEQ ID NO: 52321 - DNA, 1136 bp, Glycine max
  misc_feature (1)..(1136): Ceres Seq. ID no. 14314550
atgggaccaaactaagtaaaggcacgcgcagcacaactcaaagcaatggagtgagttgcttatgagcatattgagaaaaaaaggcagaggcagaagcagaagcaaaaccccactttttcatggccaaaatcattggcaagagcagaagaagaagaacaacgacgactcaacaactatgccacagaatggttcaccatgtcaacgtccactgcaacctgttccatagggtgtcctttcttggccggttcatttgggacaggatgcttctctgctctcttggaaggccttcttacctcaggctgcccctccgtgacccgccaccgcaggccaccgtccacggtggcgcctccatgcatggataccccttcaccaccaccaccccctccccctgtgactctgactctgatttggtcaacctcaagatcagcttgcttggtgattgccatattggaaaaactagttttgtgatcaagtatgtaggggatgagcaagaaaaaaggagcttgcagatgaagggacttaatttgatggacaaaactttatttgttcaaggagctaggatttcgtttagtatatgggatgttgcaggtgacacagggtccctttatcaaattccaatggcttgtaaagattcagttgcaattttgattatgtttgatctcaccagtcggtgtacactgaatagtgttgttggatggtacagtaaagcaagaaagtggaatcagattgcaattcccattctaataggaaccaaatttgatgattttgttaaactccccccagatgtgcaatggacaattgtaacacaggcaagggcatatgcaagggcaatgaatgctactcttttcttctcaagtgcaacccacaatataaatgtcaacaaaatcttcaagtttatcatggccaagctcttcaacttgccatggaaagtggaacgaaatctgacactaggagaacccacaattgacttctgaaatgtactttacattattgatttatatgtaaatagcaggacaaagaaaagaaaaaggaaaaaagaaaaaagaagaggtccactcatattaactactcttgctttgtagagttcatcgcctaagaacctaattcatttatcttcattgggccattttaactac

SEQ ID NO: 52322 - protein, 284 aa, Glycine max
  peptide (1)..(284): Ceres Seq. ID no. 14314551
MAKIIGKSRRRRTTTTQQLCHRMVHHVNVHCNLFHRVSFLGRFIWDRMLLCSLGRPSYLRLPLRDPPPQATVHGGASMHGYPFTTTTPSPCDSDSDLVNLKISLLGDCHIGKTSFVIKYVGDEQEKRSLQMKGLNLMDKTLFVQGARISFSIWDVAGDTGSLYQIPMACKDSVAILIMFDLTSRCTLNSVVGWYSKARKWNQIAIPILIGTKFDDFVKLPPDVQWTIVTQARAYARAMNATLFFSSATHNINVNKIFKFIMAKLFNLPWKVERNLTLGEPTIDF

SEQ ID NO: 52323 - protein, 262 aa, Glycine max
  peptide (1)..(262): Ceres Seq. ID no. 14314552
MVHHVNVHCNLFHRVSFLGRFIWDRMLLCSLGRPSYLRLPLRDPPPQATVHGGASMHGYPFTTTTPSPCDSDSDLVNLKISLLGDCHIGKTSFVIKYVGDEQEKRSLQMKGLNLMDKTLFVQGARISFSIWDVAGDTGSLYQIPMACKDSVAILIMFDLTSRCTLNSVVGWYSKARKWNQIAIPILIGTKFDDFVKLPPDVQWTIVTQARAYARAMNATLFFSSATHNINVNKIFKFIMAKLFNLPWKVERNLTLGEPTIDF

SEQ ID NO: 52324 - protein, 237 aa, Glycine max
  peptide (1)..(237): Ceres Seq. ID no. 14314553
MLLCSLGRPSYLRLPLRDPPPQATVHGGASMHGYPFTTTTPSPCDSDSDLVNLKISLLGDCHIGKTSFVIKYVGDEQEKRSLQMKGLNLMDKTLFVQGARISFSIWDVAGDTGSLYQIPMACKDSVAILIMFDLTSRCTLNSVVGWYSKARKWNQIAIPILIGTKFDDFVKLPPDVQWTIVTQARAYARAMNATLFFSSATHNINVNKIFKFIMAKLFNLPWKVERNLTLGEPTIDF

SEQ ID NO: 52325 - protein, 207 aa, Glycine max
  peptide (1)..(207): Ceres Seq. ID no. 14314554
MHGYPFTTTTPSPCDSDSDLVNLKISLLGDCHIGKTSFVIKYVGDEQEKRSLQMKGLNLMDKTLFVQGARISFSIWDVAGDTGSLYQIPMACKDSVAILIMFDLTSRCTLNSVVGWYSKARKWNQIAIPILIGTKFDDFVKLPPDVQWTIVTQARAYARAMNATLFFSSATHNINVNKIFKFIMAKLFNLPWKVERNLTLGEPTIDF

SEQ ID NO: 52326 - DNA, 1183 bp, Glycine max
  misc_feature (1)..(1183): Ceres Seq. ID no. 15171265
atctccccctcctcactcgaccacaccactctctctctcttatctaatcttcgccatgtctagactccctcctcctcctctactctcagtcaacctccctctcatagagaaaacaaccgactccgagttaaccccgactcgactcagtttccccaacgagttcccctacgagttcgactctccagcgttctcccctggcttcacctccccagggaactccaccgagacggaagacgagagcagcgacgacgaagaagacttcctcgccgggctgactcgccgactcgctccctccactcaccgcctccctcctccctccttcaagtccgaggagaaacgtcaggtggcagcaacttcgccacttctcccaccgtcgcatgcgcatacgacgtcgtttcggagagacaatgcgtgggaggtgatatccgctgctgctggagaagtcgctaggctcaaactcggaagctacgagcctcaccttcctcgtgaaagcccaagtctcactcttcgccaccaaaacgctgcgtttcaaaccgaacgttatcttcagcagcagcgtcttcttgaccagatgtggctctgttctcagacaagaaccaagtcctccgagaatcttttcccgaagagggcattgaacgaggacatcgcgtttcagaacatgagacgcaatgctacgtccaacgccgccacgtggatacctcaacacgctgtagctcccgtgaagcgtccttctgccggcaccggagtattccttccccggcgatacccaacagcctcctcagagccaatcaagaagtcagtaccagttaacagaagtgttatctcgcagtcgagagtctgtcctccgcagactctgagctttgatgagttcacaaacgttgggtcaagactcagccagttcgattacgagtgtatgttagcaagaagtacactacttgcgcgtcagggaaattacagagcagttggttgtctgaaccaagaaagacgtcttcctcaagactggatgtattgaagctgttctgtctgagaagtttgaagaatcagaaggagcgtagttagaagttgtgtgtgtttaggttataaactgagattgttatgttatgattagtaataaggatgataattagaataaaggttgggatattacaagtttgttacattttattattatatttttagtaac

SEQ ID NO: 52327 - protein, 336 aa, Glycine max
  peptide (1)..(336): Ceres Seq. ID no. 15171266
SPPPHSTTPLSLSYLIFAMSRLPPPPLLSVNLPLIEKTTDSELTPTRLSFPNEFPYEFDSPAFSPGFTSPGNSTETEDESSDDEEDFLAGLTRRLAPSTHRLPPPSFKSEEKRQVAATSPLLPPSHAHTTSFRRDNAWEVISAAAGEVARLKLGSYEPHLPRESPSLTLRHQNAAFQTERYLQQQRLLDQMWLCSQTRTKSSENLFPKRALNEDIAFQNMRRNATSNAATWIPQHAVAPVKRPSAGTGVFLPRRYPTASSEPIKKSVPVNRSVISQSRVCPPQTLSFDEFTNVGSRLSQFDYECMLARSTLLARQGNYRAVGCLNQERRLPQDWMY

SEQ ID NO: 52328 - protein, 318 aa, Glycine max
  peptide (1)..(318): Ceres Seq. ID no. 15171267
MSRLPPPPLLSVNLPLIEKTTDSELTPTRLSFPNEFPYEFDSPAFSPGFTSPGNSTETEDESSDDEEDFLAGLTRRLAPSTHRLPPPSFKSEEKRQVAATSPLLPPSHAHTTSFRRDNAWEVISAAAGEVARLKLGSYEPHLPRESPSLTLRHQNAAFQTERYLQQQRLLDQMWLCSQTRTKSSENLFPKRALNEDIAFQNMRRNATSNAATWIPQHAVAPVKRPSAGTGVFLPRRYPTASSEPIKKSVPVNRSVISQSRVCPPQTLSFDEFTNVGSRLSQFDYECMLARSTLLARQGNYRAVGCLNQERRLPQDWMY

SEQ ID NO: 52329 - DNA, 919 bp, Glycine max
  misc_feature (1)..(919): Ceres Seq. ID no. 14305858
acctccattgagttgagttcaaaactctgttctttcctccatgaattcaatttctttaggttccttcatcctcacaccatgcaagttccgcccttttcttcaaaccaaacaccaacccatattccgcactctctccccaattcccctgacacaaaaacccacttttcttcgagccacagactcgaacatcgacgcccccatttccctccccgagggcgcgtccttcgtttccatcccagaaatcatcgagaaggactggtccgtgcttgattgcgccgaacaccgaaccactgaccgcattatagcttccggaaacatcgaacagagttcgagggttttggtctcaactgggtcagaagactttgttgattccttagcgggtttaactccctctgtgtttgttgttcatgactcgcttctgacactggcttgcattaaagaaaaatatgacagggttaagtgttggcaaggggagattatttatgttccggaaaagtgggctccttttgatgctgtgtttctttatttccttcccgcgttgcccttcaagctccaccaaattttggagtctttggctgggaaatgtgcaccgggtggaagggtgattatcagtcatcctaaagggaaagaagtattagaacagcaacgaaaacagtacccagatgtagtagtttctgacctacctaataaaacatatttacaaagtgttgcagctgcccattcttttgacgtggctgaatttgtggatgaacctggcctttatttagccgttttgatctgctcgagagcttaaaaactagagtgtgtacatttgaatacacaatttgattgaactttttatatggtgttttccttcttgattattagcttgaatttttggttgaaaaattataaaataatataatttgattgatatgat

SEQ ID NO: 52330 - protein, 250 aa, Glycine max
  peptide (1)..(250): Ceres Seq. ID no. 14305859
MNSISLGSFILTPCKFRPFLQTKHQPIFRTLSPIPLTQKPTFLRATDSNIDAPISLPEGASFVSIPEIIEKDWSVLDCAEHRTTDRIIASGNIEQSSRVLVSTGSEDFVDSLAGLTPSVFVVHDSLLTLACIKEKYDRVKCWQGEIIYVPEKWAPFDAVFLYFLPALPFKLHQILESLAGKCAPGGRVIISHPKGKEVLEQQRKQYPDVVVSDLPNKTYLQSVAAAHSFDVAEFVDEPGLYLAVLICSRA

SEQ ID NO: 52331 - DNA, 977 bp, Glycine max
  misc_feature (1)..(977): Ceres Seq. ID no. 14305854
actcaaaattaaccacaagcataagcacaagcacaagcacaagcacttctctaattccctttcacactctattacagatttcacaagtgcttacacttcaaatggctttggaagctcttcaatcacccaccacagccactccatcgtttagtccctttgaagaaaccagtctcagttacttagagacaccgtggacgaaaggaaagcgttctaagcgtagccgcacggagcaacaactgcaacacccttcatgcaccgaggaagagtacctcgctctttgtctcatcatgctcgctcgcggcggcgccggcagtgtctccaccgccaaacccgctgtctccgacaacaattctgcgccgctatccgccgccaaactgagctacaaatgttcggtttgcaacaaagccttctcctcttaccaagcactcggaggacacaaggccagccaccggaagctcgccggagaaaaccacccgacctcctccgccgtgacgacgagttcggcgtcgaacggtggtggtaggacccacgagtgctccatctgccacaagacgttttcgacaggacaggccttgggaggacacaaacgttgtcactacgaaggcggtaacagcgccgtaaccgcctctgagggagtggggtccactcacacaggaagccaccgcgatttcgatctcaacctcccggcttttccggacttctcagcaaggttcttcgtcgatgacgaggttaccagtcctcatccatccaagaagtcccgtttcaatttgaccatacccaagattgaaatccctcaatactgatccatagatccaaaaaaattattcagtgtttttttatatatttttttaagttatttgggattaatttgttcttgtacatatatagtacttgggccttattcgctagttttagcttttagattgtagtatacttttgacagtggtgattcaattcaattcatttatttttatttt

SEQ ID NO: 52332 - protein, 266 aa, Glycine max
  peptide (1)..(266): Ceres Seq. ID no. 14305855
SKLTTSISTSTSTSTSLIPFHTLLQISQVLTLQMALEALQSPTTATPSFSPFEETSLSYLETPWTKGKRSKRSRTEQQLQHPSCTEEEYLALCLIMLARGGAGSVSTAKPAVSDNNSAPLSAAKLSYKCSVCNKAFSSYQALGGHKASHRKLAGENHPTSSAVTTSSASNGGGRTHECSICHKTFSTGQALGGHKRCHYEGGNSAVTASEGVGSTHTGSHRDFDLNLPAFPDFSARFFVDDEVTSPHPSKKSRFNLTIPKIEIPQY

SEQ ID NO: 52333 - protein, 233 aa, Glycine max
  peptide (1)..(233): Ceres Seq. ID no. 14305856
MALEALQSPTTATPSFSPFEETSLSYLETPWTKGKRSKRSRTEQQLQHPSCTEEEYLALCLIMLARGGAGSVSTAKPAVSDNNSAPLSAAKLSYKCSVCNKAFSSYQALGGHKASHRKLAGENHPTSSAVTTSSASNGGGRTHECSICHKTFSTGQALGGHKRCHYEGGNSAVTASEGVGSTHTGSHRDFDLNLPAFPDFSARFFVDDEVTSPHPSKKSRFNLTIPKIEIPQY

SEQ ID NO: 52334 - protein, 171 aa, Glycine max
  peptide (1)..(171): Ceres Seq. ID no. 14305857
MLARGGAGSVSTAKPAVSDNNSAPLSAAKLSYKCSVCNKAFSSYQALGGHKASHRKLAGENHPTSSAVTTSSASNGGGRTHECSICHKTFSTGQALGGHKRCHYEGGNSAVTASEGVGSTHTGSHRDFDLNLPAFPDFSARFFVDDEVTSPHPSKKSRFNLTIPKIEIPQY

SEQ ID NO: 52335 - DNA, 1540 bp, Glycine max
  misc_feature (1)..(1540): Ceres Seq. ID no. 14314567
atttttgagctttccatttttctctctttttcaactttcaattcaagcagctttggaaaaaccaaccagccaacgggttttttttttttttcacctcctgaaatttctttggaagaagcttgcacaaggtggagtcgcagagacaggtgttggtttggtaatataggccttggagtgaaaattcaatattttgcatggaagccagagaaggtattagttctggggttacagtgataggggcagaagctccatcagcttaccatgtggctccgaggagtgaagctccaaaccaggttcatgtccctgatggtggtggtggtggtgctgctacagctgcacctgttggtgtctcacctgtgagtgtggggttggatggaacagttaagaagaaacggggtagaccgaggaaatatgggcctgatgggtctgtaactatggcattgtcgccaatgccaatctcgtcttctgctccgccttcgaatgacttttcatccgggaagcgggggaaaatgcgggggatggaccataagccgtcgaaaaaagttggcttggattatataggtgacttgaatgtatgctctgatggtacaaattttatgccacatatcatcactgtcaatgctggcgaggacatcacaatgaaggtgatatccttttctcaacaaggaccacgagctatatgtatcttatctgctaatggtgtaatttcaaatgttacacttcgtcagcctgattcttctgggggtactttaacttatgagggccgttttgagatactttccttgtctggatcattcatgcctactgataaccaaggaacaagaagcaggaccggtggaatgtctgtgtcgttggctagtcctgatggccgtgttgtaggtggtggagttgctggtcttcttgtagctgccagccctgtgcaggtggtggtgggaagctttttaccaagcagccagcaagaacagaaaataaagaagccaaagtctagtgattatgcaccggtaactgttactccagcgattgcagtgtcttctgcaccgccacctccaaccaatgctgaaaaagaggatgtgaatgttatgggtggagcacatgtactgcaaaattctggaacccttaactctaacctcactcctcccaatgcctttagaagagacaactgggtcaacatgcactctatgccagactctagaaaatcagctacagatattaacatatctttgcctgatagttaggttggcgatcgaggggcgcactctctatcctcaagaactcttgctgacaacattcatgactcagctgttttattaatgtttagtgttctctctctttctctcactctcatttaaagattgtttcaatcgtgtctaatgtctatcaccataggatgtagtttcagtgttgtaagttgcagctagttagagtatctgatatatttatcggctgattaggtagatgctgcattctgcagatttatgagtaggctaatttggatgtaatgaaaacttgtttgcctatttatttatgactgaatttgtgg

SEQ ID NO: 52336 - protein, 346 aa, Glycine max
  peptide (1)..(346): Ceres Seq. ID no. 14314568
MEAREGISSGVTVIGAEAPSAYHVAPRSEAPNQVHVPDGGGGGAATAAPVGVSPVSVGLDGTVKKKRGRPRKYGPDGSVTMALSPMPISSSAPPSNDFSSGKRGKMRGMDHKPSKKVGLDYIGDLNVCSDGTNFMPHIITVNAGEDITMKVISFSQQGPRAICILSANGVISNVTLRQPDSSGGTLTYEGRFEILSLSGSFMPTDNQGTRSRTGGMSVSLASPDGRVVGGGVAGLLVAASPVQVVVGSFLPSSQQEQKIKKPKSSDYAPVTVTPAIAVSSAPPPPTNAEKEDVNVMGGAHVLQNSGTLNSNLTPPNAFRRDNWVNMHSMPDSRKSATDINISLPDS

SEQ ID NO: 52337 - protein, 266 aa, Glycine max
  peptide (1)..(266): Ceres Seq. ID no. 14314569
MALSPMPISSSAPPSNDFSSGKRGKMRGMDHKPSKKVGLDYIGDLNVCSDGTNFMPHIITVNAGEDITMKVISFSQQGPRAICILSANGVISNVTLRQPDSSGGTLTYEGRFEILSLSGSFMPTDNQGTRSRTGGMSVSLASPDGRVVGGGVAGLLVAASPVQVVVGSFLPSSQQEQKIKKPKSSDYAPVTVTPAIAVSSAPPPPTNAEKEDVNVMGGAHVLQNSGTLNSNLTPPNAFRRDNWVNMHSMPDSRKSATDINISLPDS

SEQ ID NO: 52338 - protein, 261 aa, Glycine max
  peptide (1)..(261): Ceres Seq. ID no. 14314570
MPISSSAPPSNDFSSGKRGKMRGMDHKPSKKVGLDYIGDLNVCSDGTNFMPHIITVNAGEDITMKVISFSQQGPRAICILSANGVISNVTLRQPDSSGGTLTYEGRFEILSLSGSFMPTDNQGTRSRTGGMSVSLASPDGRVVGGGVAGLLVAASPVQVVVGSFLPSSQQEQKIKKPKSSDYAPVTVTPAIAVSSAPPPPTNAEKEDVNVMGGAHVLQNSGTLNSNLTPPNAFRRDNWVNMHSMPDSRKSATDINISLPDS

SEQ ID NO: 52339 - DNA, 557 bp, Glycine max
  misc_feature (1)..(557): Ceres Seq. ID no. 14305840
aagaaataaaaagcgcttcattttcttgtcttctggtgcttatataatgacgtactagctagcctcatttttcttcatccttattatttctctctctttctttccctatattcattttctgtgctttgaaagatgactggggttcctcaagaagcacccgtttctcttgatcagctcaagcagatactggatgagtttgcaaaggagagggattgggagcagtatcatagcccaaggaacctccttttggctttggtgggtgaagtgggagaattgtctgagatatttcagtggaaaggggaggttccaaagggtcttccagattggaaagaagaggaaaaggttcatcttggtgaagagctttcagatgtgttgctttaccttgtgaggctctcagacatttgtggtgttgatcttggcaaagctgctctaagaaaggtccaactcaatgccataaaatacccaaaaaaggttaatgatgatgcaattactcaagatgctaattgatgataatccattggtgcctatggttgttgtagttgctattttagggggga

SEQ ID NO: 52340 - protein, 124 aa, Glycine max
  peptide (1)..(124): Ceres Seq. ID no. 14305841
MTGVPQEAPVSLDQLKQILDEFAKERDWEQYHSPRNLLLALVGEVGELSEIFQWKGEVPKGLPDWKEEEKVHLGEELSDVLLYLVRLSDICGVDLGKAALRKVQLNAIKYPKKVNDDAITQDAN

SEQ ID NO: 52341 - protein, 65 aa, Glycine max
  peptide (1)..(65): Ceres Seq. ID no. 14305842
MSLQRRGIGSSIIAQGTSFWLWWVKWENCLRYFSGKGRFQRVFQIGKKRKRFILVKSFQMCCFTL

SEQ ID NO: 52342 - DNA, 1165 bp, Glycine max
  misc_feature (1)..(1165): Ceres Seq. ID no. 14314999
agtgtatatctttacaagatggtgaatacgtaaaggaaatgtacatcttgtatcacaaattcaaattacatcgcctttgtcttgttcttggaaatcaaacatattactctaaattgccatgtgaaataattttgctcttgtttggcatttgacttaccttgtttgcttctctataaataccatactatccatatatagcatctatttcttacatatcacaattaactatcaacatccaattagggatttcgtgataatatggcttctacacttcatcgtgcattgtctcatttactcactcttgtagcttcactttcaatactccttgtgctcccttcctcttgtttcaatcccagaaagattgtcaatgcttcatacaactcaaacggtttatattggtcaccagctgtggccacttggtatggacctccccatggggatggaagtgaaggtggtgcttgtggttttggcagtgttgttggggtacctccattctcatcaatgatatctgcgggaagccctcttttgtttgaatcaggcaaaggatgtggtttttgttatgaggtgaagtgcacagggaattctggatgttcaggcaaccctgtgagggtagtgatcactgatgagtgtgctggatgctcggatgctcaattccattttgatttgagtggcactgcttttggtgccatggcagtttctggccaagatgaaaagctacgcaacgctggcaaaattgccattcaatatagaagagttgaatgcaactatcccggtgtatacatagcttttcacgtggacttaggatccaaccccgaatattttgcagtttgtgctgaatacgaggatgggaatggtgatcttgacaaagttgaactcaaggaagcattttcagcctcatggtattccatgcagcgatcatggggtgcaatttggaaactcagcaaaggttcaccacttaaagcaccattctccatcaggctaacagactctggcaaatctgttgtggctaacaatgtgatcccttcgggctggaaacctggccagacttatagatcaattgtgaattttagaatctaagttgtccattggtttggatcatcagcttgtagctctctccaacttaatgtaatatataaataagaagataaccctaatcttaatttct

SEQ ID NO: 52343 - protein, 272 aa, Glycine max
  peptide (1)..(272): Ceres Seq. ID no. 14315000
MASTLHRALSHLLTLVASLSILLVLPSSCFNPRKIVNASYNSNGLYWSPAVATWYGPPHGDGSEGGACGFGSVVGVPPFSSMISAGSPLLFESGKGCGFCYEVKCTGNSGCSGNPVRVVITDECAGCSDAQFHFDLSGTAFGAMAVSGQDEKLRNAGKIAIQYRRVECNYPGVYIAFHVDLGSNPEYFAVCAEYEDGNGDLDKVELKEAFSASWYSMQRSWGAIWKLSKGSPLKAPFSIRLTDSGKSVVANNVIPSGWKPGQTYRSIVNFRI

SEQ ID NO: 52344 - protein, 191 aa, Glycine max
  peptide (1)..(191): Ceres Seq. ID no. 14315001
MISAGSPLLFESGKGCGFCYEVKCTGNSGCSGNPVRVVITDECAGCSDAQFHFDLSGTAFGAMAVSGQDEKLRNAGKIAIQYRRVECNYPGVYIAFHVDLGSNPEYFAVCAEYEDGNGDLDKVELKEAFSASWYSMQRSWGAIWKLSKGSPLKAPFSIRLTDSGKSVVANNVIPSGWKPGQTYRSIVNFRI

SEQ ID NO: 52345 - DNA, 1232 bp, Glycine max
  misc_feature (1)..(1232): Ceres Seq. ID no. 14315045
tgcttgtaacagtattgttattactttgttgattgaaaaccattaaatataatgatttttacctaaactaattgtcatccatttaatataacacctttcaacaaggtatttttaggtgctggttttatttatttataatgattcgtccttctggactccctattctgcattttactactatcaaagatataaaattatttactcatcattttaaaaatggttgcttatcttgcgtgtttgcgtgctgtttactctgggtaagaattggtactgggaggcattttactgttcttctgcctaccattagtattataatagtttttaattaacaggaatctttgcttacttttttctttgacaggctgtgagagtagaacactgcgaacgagttcatgtaatcgtagcagcaaagcgtatttgtattgctaattgtcgtgaatgtgttttctttttgggagtgaaccagcaacctcttattcttggtgataatcataaactgcaggtggctccctataatacattttactcccaattggaaaagcatatgaatgaagttggaattgtgcccacagttaaccgatgggatgagcctctagcattgggcatggttgatccccatgattcattatctcatccagcaggtgtctctgatgttcaagctgagtctgctacacgggtggaccctgatcagttcactgattttgtgattccaaactggtttggaggagagtccactggggctacaaaaggcaacccattcacgttaccagatgcctatatggtatctcagcataaaaatcaaaaaaatttaggggagataaggcacctcttgcgagaagcacctttagaagatagtcgcaaacgagaattgtcatctgcacttcatgtctacttcaaggactggttatatgcttcaggaaacattcgtcagctttattgtttacaaggcgattgatctttgtcagacaatggaatggcacagttaatggtataggaacgaggtttctggtttcctttttgtacttcctcttcaattcctcttgccaattctattggcggcataggtagctgagatcaaatgaggtgaattagagtaaaacctatttatgccgtgacatcagcggtgcacagaatcaaatgaaaaatacagttgctaatctgattgtaatatttttttgtttgtgaaaataattactgtaatattttgttagcctaaattaatggcttttggg

SEQ ID NO: 52346 - protein, 136 aa, Glycine max
  peptide (1)..(136): Ceres Seq. ID no. 14315046
MNEVGIVPTVNRWDEPLALGMVDPHDSLSHPAGVSDVQAESATRVDPDQFTDFVIPNWFGGESTGATKGNPFTLPDAYMVSQHKNQKNLGEIRHLLREAPLEDSRKRELSSALHVYFKDWLYASGNIRQLYCLQGD

SEQ ID NO: 52347 - protein, 116 aa, Glycine max
  peptide (1)..(116): Ceres Seq. ID no. 14315047
MVDPHDSLSHPAGVSDVQAESATRVDPDQFTDFVIPNWFGGESTGATKGNPFTLPDAYMVSQHKNQKNLGEIRHLLREAPLEDSRKRELSSALHVYFKDWLYASGNIRQLYCLQGD

SEQ ID NO: 52348 - DNA, 1695 bp, Glycine max
  misc_feature (1)..(1695): Ceres Seq. ID no. 15171224
accatattcttgaacctcacacacatgtacagtagcatggctgcaaccaacgaagcagaagaagcagcaggaggcaaaagggtccaatacccactggactcttcctcctacaagctcctgaacgagatcggcgaaggcgtgagcgccgtcgtctacaaagccctctgcatccccatgaactccgccgccgtcgcaatcaaatccatcgacctcgaccgctcccggcccgacttagacgacgtccgtcgcgaggccaaaaccctatccctcctttcccaccccaacatcctcaaagcacactgttccttcaccgtggaccgccgcctctgggtggtgatgccgttcatggccgcaggatcacttcaatccatcatttctcattcccaccccaacggcttaacggagccctgcatcgccgtggttctcagagacacgctcaacgcactctcctacctccacggccagggccatctccacagagacattaaagccggtaacatcctcgtagacaccaatgggcaagtgaagctcgctgatttcggtgtctccgcttccatatacgagtccaccaccaccacgtcttcttcttcgtctctcaagttcaccgatgttgccggcacgccctattggatggctcctgaggtgattcactcacacacgggttacagtttcaaggctgatatatggtcctttgggataaccgcgttggagcttgcgcatggaaggcctcccctctcgcaccttccaccttccaagtccatgatgctcaagatcaccaagaggtttcgtttctccgatgatttcgatgacaagtataggaaggggaatgggaagaagttctctaaggcgttcaaggacatggtggcttcttgtctcgaccaagatccttccaagagacctactgctgataagttgctcaaacaccctttctttaagaactgtaagggaaccgattttctggtgaagaatgtgctgcaagggttgcccagtgtggagaaaaggtacagggagagcaagggtaatttgcatgaagatgatgatgatggtgatgatgatgatgatgatccctccatgcaggtgaagcagagaaggataagtgggtggaacttcaatcaagacggcttggaacttgaccctgtgtttccaaacgatgttaaagaggttcggtttggaggagaaacggttatccaacaagctgcaggaatggaaaaagtgaacaacaacagtagcagtagggaagggatgttggcgactctgaatgtattgaaagggagcctggagcaagagctgtggcaagtgaagtttctggtgaatacgatacaaggagatcatcacgacactcaagttcctgaggagcaggagatttctaggctgagggctcaattggaaaatgagaggatgaagaacttgcagttggagttgcagcttcagacctccaagctccaccagaaatctgattccaactaaaatctgattccaacgatcatacatctaccatatgtagaggaattctgtgtactttctgctcctgtaccacttatattatgtgtgtcaacgtcaatgtttgtatttttaattgaaagattaaatttctgttgtacggattaatgttacacttaccataattttttataatttgtcttttatctttttcttatcatactcatcttattcaaaacttttggcttatttcct

SEQ ID NO: 52349 - protein, 488 aa, Glycine max
  peptide (1)..(488): Ceres Seq. ID no. 15171225
TIFLNLTHMYSSMAATNEAEEAAGGKRVQYPLDSSSYKLLNEIGEGVSAVVYKALCIPMNSAAVAIKSIDLDRSRPDLDDVRREAKTLSLLSHPNILKAHCSFTVDRRLWVVMPFMAAGSLQSIISHSHPNGLTEPCIAVVLRDTLNALSYLHGQGHLHRDIKAGNILVDTNGQVKLADFGVSASIYESTTTTSSSSSLKFTDVAGTPYWMAPEVIHSHTGYSFKADIWSFGITALELAHGRPPLSHLPPSKSMMLKITKRFRFSDDFDDKYRKGNGKKFSKAFKDMVASCLDQDPSKRPTADKLLKHPFFKNCKGTDFLVKNVLQGLPSVEKRYRESKGNLHEDDDDGDDDDDDPSMQVKQRRISGWNFNQDGLELDPVFPNDVKEVRFGGETVIQQAAGMEKVNNNSSSREGMLATLNVLKGSLEQELWQVKFLVNTIQGDHHDTQVPEEQEISRLRAQLENERMKNLQLELQLQTSKLHQKSDSN

SEQ ID NO: 52350 - protein, 480 aa, Glycine max
  peptide (1)..(480): Ceres Seq. ID no. 15171226
MYSSMAATNEAEEAAGGKRVQYPLDSSSYKLLNEIGEGVSAVVYKALCIPMNSAAVAIKSIDLDRSRPDLDDVRREAKTLSLLSHPNILKAHCSFTVDRRLWVVMPFMAAGSLQSIISHSHPNGLTEPCIAVVLRDTLNALSYLHGQGHLHRDIKAGNILVDTNGQVKLADFGVSASIYESTTTTSSSSSLKFTDVAGTPYWMAPEVIHSHTGYSFKADIWSFGITALELAHGRPPLSHLPPSKSMMLKITKRFRFSDDFDDKYRKGNGKKFSKAFKDMVASCLDQDPSKRPTADKLLKHPFFKNCKGTDFLVKNVLQGLPSVEKRYRESKGNLHEDDDDGDDDDDDPSMQVKQRRISGWNFNQDGLELDPVFPNDVKEVRFGGETVIQQAAGMEKVNNNSSSREGMLATLNVLKGSLEQELWQVKFLVNTIQGDHHDTQVPEEQEISRLRAQLENERMKNLQLELQLQTSKLHQKSDSN

SEQ ID NO: 52351 - protein, 476 aa, Glycine max
  peptide (1)..(476): Ceres Seq. ID no. 15171227
MAATNEAEEAAGGKRVQYPLDSSSYKLLNEIGEGVSAVVYKALCIPMNSAAVAIKSIDLDRSRPDLDDVRREAKTLSLLSHPNILKAHCSFTVDRRLWVVMPFMAAGSLQSIISHSHPNGLTEPCIAVVLRDTLNALSYLHGQGHLHRDIKAGNILVDTNGQVKLADFGVSASIYESTTTTSSSSSLKFTDVAGTPYWMAPEVIHSHTGYSFKADIWSFGITALELAHGRPPLSHLPPSKSMMLKITKRFRFSDDFDDKYRKGNGKKFSKAFKDMVASCLDQDPSKRPTADKLLKHPFFKNCKGTDFLVKNVLQGLPSVEKRYRESKGNLHEDDDDGDDDDDDPSMQVKQRRISGWNFNQDGLELDPVFPNDVKEVRFGGETVIQQAAGMEKVNNNSSSREGMLATLNVLKGSLEQELWQVKFLVNTIQGDHHDTQVPEEQEISRLRAQLENERMKNLQLELQLQTSKLHQKSDSN

SEQ ID NO: 52352 - DNA, 1313 bp, Glycine max
  misc_feature (1)..(1313): Ceres Seq. ID no. 14314423
aaaaacaaccatttttattttagttttcctaccatttaaacttgtacttgtaattgcagttgtcacaatagtaattatctatacaatgaaaatgtagcttgtctcatcacttccatcctaagaagctgtaagtttttaatctcaagtttttgggtctcctggtgaaaacccatgttgaactagacccttttctggccagaatctcaccagtattaggcaactgtatctagattaatggtgtagtgtgctgatgccactgcttaacctgtaagaattgagcatgtcatggtgcggtctctcatgacccttggatccttccttgaaaagagttgataatctatcaatcattgttcttgattggaacaaattatcatcccagtgcccgaaacattttcccattacaaaaatctcaccatccttagtcttaataattgcgggttgactggaacatttccacataagatcttcaacattggaacattgtcggttattgacatatcttggaacaacaatctccatggtttcttgactgaatttccatccaggggatctccatgggaatccgaaaagaaaagaatggttatttatgccgcataacatttgtctgaagctccattcttcttagacaataatatcctttcatctcttccatgtcttcttcctctagttatgactacgatctccatgatgatgacgagatggactttctgcgtgatcggtacaaggaggacaacataaactatgatgtgtttttgagtttcagaggggaagacacgcgtgcttctttcacttcacatctctatacagctcttcacaacttgggaatctttgttttcaaggatgatgagacacttccaaggggaaataaaatttcaccctcgctgcggttagcaattgaagagtctcgactttctgttgttattttctctagaaactatgcagagtcgcggtggtgtttgaaagagttgcagaaaataatggagtgtcacagaacaacagggcaagtggtagtgccagtgttctatgatgtagatccctctgaagtacgtcatcaaacaggccactttggaaaagcatttcgaaaccttgagaacaaacttttaaaaggggaagaggaagaggaagagctacaacgatggtggaagacgcttgctgaggccgctggcatctcagggctttctgtagtccgaaattgcaagtaataaaaacacttccagctttctcgtatttttactgaacattgtctctggaattttagtttatgaaattcataacatgtacatgtatgaagtggtcaaagtgagattttggat

SEQ ID NO: 52353 - protein, 183 aa, Glycine max
  peptide (1)..(183): Ceres Seq. ID no. 14314424
MSSSSSYDYDLHDDDEMDFLRDRYKEDNINYDVFLSFRGEDTRASFTSHLYTALHNLGIFVFKDDETLPRGNKISPSLRLAIEESRLSVVIFSRNYAESRWCLKELQKIMECHRTTGQVVVPVFYDVDPSEVRHQTGHFGKAFRNLENKLLKGEEEEEELQRWWKTLAEAAGISGLSVVRNCK

SEQ ID NO: 52354 - protein, 167 aa, Glycine max
  peptide (1)..(167): Ceres Seq. ID no. 14314425
MDFLRDRYKEDNINYDVFLSFRGEDTRASFTSHLYTALHNLGIFVFKDDETLPRGNKISPSLRLAIEESRLSVVIFSRNYAESRWCLKELQKIMECHRTTGQVVVPVFYDVDPSEVRHQTGHFGKAFRNLENKLLKGEEEEEELQRWWKTLAEAAGISGLSVVRNCK

SEQ ID NO: 52355 - DNA, 1121 bp, Glycine max
  misc_feature (1)..(1121): Ceres Seq. ID no. 14314461
atcaacagcatattctagccatgtcaagtcctcagtgttttgagaatccaccaaaccttaactcggacatccatggagcaggaactgtccaagaacttggaggacttaattcctacgtcactggatcttccgattccaaattggcactcatcctggtttctgatgtttttgggtatgaagcaccaaaactaaggaaacttgcggacaaagtagcagcagctggattcttggttgttgttcctgatcttctgtatggtgattacattgttgaccttaataatcctcaatttgatcgagagtcatggcgaaaggctcatggaaaggataaggcatgtgaagacaccaaacctctaatttctgctctaaagagtaaaggtgttaaatccataggggctgcaggtttttgctggggaggggttgtggttgtgaaacttgcaatgtccactgatattcaggctgcagttattctgcatcctggtctaatcgcagataatgaatttaatgaggtcaggattcctattgctatactgggagctgaaatcgaccatcttttcccaccagaaaggttgaagcaaattgaagaaatgttgtctgtaaaagctgagtttgagagctttgtgaaactataccctggtgttagtcatggatggactttgcggtacaatgatgatgatgaagcaactgttaagagtgcaaaagaggcgcatcaagacatgttgaattggtttatcaagcacgtcaagtgaaaattgttttcaccaccagaagatgcctgtcattgatttgcagttaatttttttagtagcaaataaatattacttattattgaaaagggccaatttcatgtacaagatgtgtccaaagcggcccaaccaccatgatacaaaaattataatatcccaccagaatatcactagcatttctcttataataacaatactacaactgcctaagaaaaagatacagcatagacaaaagctgcactatgcggcttaactcctagccttcatgttattggtgtgacgtatccattgccaccgaatttactaatgattaattctcgttgaaaaatctgatgatgatcacttttaatgatatatatatgctattttttcttaaat

SEQ ID NO: 52356 - protein, 247 aa, Glycine max
  peptide (1)..(247): Ceres Seq. ID no. 14314462
QQHILAMSSPQCFENPPNLNSDIHGAGTVQELGGLNSYVTGSSDSKLALILVSDVFGYEAPKLRKLADKVAAAGFLVVVPDLLYGDYIVDLNNPQFDRESWRKAHGKDKACEDTKPLISALKSKGVKSIGAAGFCWGGVVVVKLAMSTDIQAAVILHPGLIADNEFNEVRIPIAILGAEIDHLFPPERLKQIEEMLSVKAEFESFVKLYPGVSHGWTLRYNDDDEATVKSAKEAHQDMLNWFIKHVK

SEQ ID NO: 52357 - protein, 241 aa, Glycine max
  peptide (1)..(241): Ceres Seq. ID no. 14314463
MSSPQCFENPPNLNSDIHGAGTVQELGGLNSYVTGSSDSKLALILVSDVFGYEAPKLRKLADKVAAAGFLVVVPDLLYGDYIVDLNNPQFDRESWRKAHGKDKACEDTKPLISALKSKGVKSIGAAGFCWGGVVVVKLAMSTDIQAAVILHPGLIADNEFNEVRIPIAILGAEIDHLFPPERLKQIEEMLSVKAEFESFVKLYPGVSHGWTLRYNDDDEATVKSAKEAHQDMLNWFIKHVK

SEQ ID NO: 52358 - DNA, 1263 bp, Glycine max
  misc_feature (1)..(1263): Ceres Seq. ID no. 14314442
atatatatactaggtagcacataagactatagataaataatgaagatgatcccttcttcagaatccctgctttccttttttgacttagatacttcttatgcaactatagtgaggctaagagttggtgcataattaatcaaaatgttggccatattccacaaagcttttgctcatccacctgaagagctgaacagtcctgcatcttacaaaggttccaagaagcctaaggttcctgaggaaactctcaaagatttcctttcccaccatcctcacaacacttgctccatgagctttggtgaagctgctgtgctagcttatgttcgtcctgatcaatccttctctcgtcatcaaaggttgttttgtgggattgataacatatactgtctcttcttggggagcttgaacaatttgtccctactcaacaagcaatatggattgtcaaagagtactgacgaggccatgtttgtgattgaagcttataagactctccgtgaccggggtccataccctgcagatcaagtggtcaaggaacttgatggcagttttgcttttgttgtctatgacagcaaggttggcagtgtctttgcagcactgggttctgatggaggagtgaagttgtattggggtattgcagctgatggatctgtggtgatctctgatgatctagaagtcataaaagagggttgtgccaaatcctttgctccctttccaacagggtgtatgtttcacagtgaaggaggtctgatgagttttgagcatccaatgaacaagttgaaggcaatgccaagggtggacagtgaaggggccatgtgtggggccaacttcaaagttgataagttcgccagagtcaacagcattcctcgagtgggaagtcaatctaattggatggaatgggaccaacattagcttagaaataaaaccttaggataatgtaaaataaaaaagtgccatctatgtatgttcctttcctaacttaccattctgaatttgttttgttttctgcttgcttgtgctgttttcccgtttccctttccggcattgtacatattgaattactttttcatacatgttaattgttcatcatggtacttgtgagtgagagagattaacacggttcaagtcaggaacttctgtatcacagtgttaagatcgatgcactgagtgggtcataggaattttaatgtaacatggatgacataatctacaaaaatggaaataaatggatgaacaagggcaaacttgagttactgcattcaatgtgtc

SEQ ID NO: 52359 - protein, 254 aa, Glycine max
  peptide (1)..(254): Ceres Seq. ID no. 14314443
MLAIFHKAFAHPPEELNSPASYKGSKKPKVPEETLKDFLSHHPHNTCSMSFGEAAVLAYVRPDQSFSRHQRLFCGIDNIYCLFLGSLNNLSLLNKQYGLSKSTDEAMFVIEAYKTLRDRGPYPADQVVKELDGSFAFVVYDSKVGSVFAALGSDGGVKLYWGIAADGSVVISDDLEVIKEGCAKSFAPFPTGCMFHSEGGLMSFEHPMNKLKAMPRVDSEGAMCGANFKVDKFARVNSIPRVGSQSNWMEWDQH

SEQ ID NO: 52360 - protein, 206 aa, Glycine max
  peptide (1)..(206): Ceres Seq. ID no. 14314444
MSFGEAAVLAYVRPDQSFSRHQRLFCGIDNIYCLFLGSLNNLSLLNKQYGLSKSTDEAMFVIEAYKTLRDRGPYPADQVVKELDGSFAFVVYDSKVGSVFAALGSDGGVKLYWGIAADGSVVISDDLEVIKEGCAKSFAPFPTGCMFHSEGGLMSFEHPMNKLKAMPRVDSEGAMCGANFKVDKFARVNSIPRVGSQSNWMEWDQH

SEQ ID NO: 52361 - protein, 148 aa, Glycine max
  peptide (1)..(148): Ceres Seq. ID no. 14314445
MFVIEAYKTLRDRGPYPADQVVKELDGSFAFVVYDSKVGSVFAALGSDGGVKLYWGIAADGSVVISDDLEVIKEGCAKSFAPFPTGCMFHSEGGLMSFEHPMNKLKAMPRVDSEGAMCGANFKVDKFARVNSIPRVGSQSNWMEWDQH

SEQ ID NO: 52362 - DNA, 1567 bp, Glycine max
  misc_feature (1)..(1567): Ceres Seq. ID no. 14314480
aacaagcatacatatcatatctttgattcagcttccaaacgcgccattcccatttctctctctctgcttcttcttcagatacctaacctaatctcccaaacaaacaaaccaactcaaccttatcaatatcgtttaaataaattttgatcgcgcacgcgctttgagatagatcatgctgcgtttgtgctacggccctctggattgctgcttcggacgccgtggtggccgcgccgccgacggacttctctggcacaccgacttgaagccccacgcctccggcgacttctccatcgccgtcgcccaggcgaattacagtcttgaggatcagagccaagtcttcacctccccctccgccacctacgtcggcgtctacgacggccacggcggccccgaagcttccagattcgtcaacaagcgtctcttcccttatttgcacaaattcgccactgagcaagggggtttgtcagtggatgtgattaaaaaggcgttcagtgccacagaggaggaattcttgcatttggtgaagctatccatgcccattagtccccagattgcttccgtcggatcctgttgcctttttggtgcaatttctaataatgtgttgtatgttgcaaaccttggagactcgagagctgttcttggcaggagggatacagagagaaagaacagtccggtggtggcacagcgtttgtcaactgatcataatgtagctgatgaggaggtgagaaaagaagttgaagctctccatcccgatgactcacacattgtggtttatagccgtggagtttggaggattaagggcattatacaggtgtcaagatctattggtgatgtgtatttgaagaaaccagatttctaccgtgacctgggttttcagcagtttggaaatcctattcctttgaagcgttctgtaatgacagctgaaccatcaatcattattagggagcttgagtcagaggatttattcttgatatttgcatcagatggcctctgggaacaattaagtgatgaggctgcggttcagatcgttttcaaacatccaagagctggaattgccaagagactggtgagagctgctcttcatgaagctgcaaagaagagagagatgagatacgatgacataaagaaaattgacaaaggaataagacgacacttccatgatgatatcactgtggttgtaatctatcttgatcaccatgcaggctcctctaagcaaactgctgttggctatacaactgccccagttgatattttttccctaaatgcggatgggatgcttggtacagttgcctaagagtgaaattgcttcaaaggatcatacactgacattatttggggcaaaaattatttataggtgaagattaatattgttggtaaatgaagggaattcttgagaaaaatatacaaaaaattactgcatagatatagtagctgggagttgctgacagattctttctggtgcagatatgcatttgtatagttgtgaagtttattttttgggtttgatggtatcaattttgtttttctttggaaagaaagaaaataaaattatattgattggttagcc

SEQ ID NO: 52363 - protein, 373 aa, Glycine max
  peptide (1)..(373): Ceres Seq. ID no. 14314481
MLRLCYGPLDCCFGRRGGRAADGLLWHTDLKPHASGDFSIAVAQANYSLEDQSQVFTSPSATYVGVYDGHGGPEASRFVNKRLFPYLHKFATEQGGLSVDVIKKAFSATEEEFLHLVKLSMPISPQIASVGSCCLFGAISNNVLYVANLGDSRAVLGRRDTERKNSPVVAQRLSTDHNVADEEVRKEVEALHPDDSHIVVYSRGVWRIKGIIQVSRSIGDVYLKKPDFYRDLGFQQFGNPIPLKRSVMTAEPSIIIRELESEDLFLIFASDGLWEQLSDEAAVQIVFKHPRAGIAKRLVRAALHEAAKKREMRYDDIKKIDKGIRRHFHDDITVVVIYLDHHAGSSKQTAVGYTTAPVDIFSLNADGMLGTVA

SEQ ID NO: 52364 - protein, 253 aa, Glycine max
  peptide (1)..(253): Ceres Seq. ID no. 14314482
MPISPQIASVGSCCLFGAISNNVLYVANLGDSRAVLGRRDTERKNSPVVAQRLSTDHNVADEEVRKEVEALHPDDSHIVVYSRGVWRIKGIIQVSRSIGDVYLKKPDFYRDLGFQQFGNPIPLKRSVMTAEPSIIIRELESEDLFLIFASDGLWEQLSDEAAVQIVFKHPRAGIAKRLVRAALHEAAKKREMRYDDIKKIDKGIRRHFHDDITVVVIYLDHHAGSSKQTAVGYTTAPVDIFSLNADGMLGTVA

SEQ ID NO: 52365 - DNA, 527 bp, Glycine max
  misc_feature (1)..(527): Ceres Seq. ID no. 14305801
atttgcaggtcctcctcatatacagtacaaacttcagctggtagatagtgcttccaaatggagaagaaaaggaagactttactattgctgctgctcatggctgcaactctcttctgcatgccaattgtgtcgtatgctgtttctagtgtcaacattcaaggtcatctcacccattctgagctggtaaaaggtcccaatagaaggcttttgccatttgtggattgtggagcgaggtgcagggtgaggtgcagtttgcactcaaggccaaaaatttgctcaagagcttgcgggacatgctgtttcaggtgcaggtgtgttcctccaggcacttacgggaacagagagatgtgtggcaagtgttacactgacatgatcactcatggcaacaaacctaagtgcccctaaacctgtgcatgcatgcccatgtgtgtctacaccttatgatgtttatcactagttaacacaaatttgaattcccatttttttgttttttctaccttaatttcttaatgcattgtgtttctcat

SEQ ID NO: 52366 - protein, 115 aa, Glycine max
  peptide (1)..(115): Ceres Seq. ID no. 14305802
MEKKRKTLLLLLLMAATLFCMPIVSYAVSSVNIQGHLTHSELVKGPNRRLLPFVDCGARCRVRCSLHSRPKICSRACGTCCFRCRCVPPGTYGNREMCGKCYTDMITHGNKPKCP

SEQ ID NO: 52367 - protein, 102 aa, Glycine max
  peptide (1)..(102): Ceres Seq. ID no. 14305803
MAATLFCMPIVSYAVSSVNIQGHLTHSELVKGPNRRLLPFVDCGARCRVRCSLHSRPKICSRACGTCCFRCRCVPPGTYGNREMCGKCYTDMITHGNKPKCP

SEQ ID NO: 52368 - protein, 95 aa, Glycine max
  peptide (1)..(95): Ceres Seq. ID no. 14305804
MPIVSYAVSSVNIQGHLTHSELVKGPNRRLLPFVDCGARCRVRCSLHSRPKICSRACGTCCFRCRCVPPGTYGNREMCGKCYTDMITHGNKPKCP

SEQ ID NO: 52369 - DNA, 1316 bp, Glycine max
  misc_feature (1)..(1316): Ceres Seq. ID no. 14314471
atggttttgcaataatcgaaagcaattgaaattgtcctaaggtaaggtgtttgaatgcttacatacatagattaaggattttaggaccaaagagggagtcatgaatgtgacaaacaaaccaaacccatatggttccaccaatgggtttcagtctcagcttcaacaaaatgggtgggaacagggatcatctagactcagacccactaagctttaccctgcaccaacggctggctaccaggacattgttcgtgatgcaaacctcttctggggaacgcttcaagcttttcacaaaacacttggcaccaaatataagatttctactgtgggaggaacgccacttgatctacatcgtctttttgtcgaagttacatctcgcggtgggattgaaaaggtgattgttgatcgtaagtggaaggaagtgattctgaccttcaatttcaaagataccataaccaatgcatcatttatggtgcgcaaatcctacctctcgatgctttatcactttgagcaagtgtattattttgggaggcaaggcattcctcccacaacacctgatcttatgattagaggccaatcatgccaaccctatagctccacaaccattccagaagttgctgctgtgaatgattcacctgttcagagtactccagtacaggcacatgatgatatggtttctggaacaattgatgcgaaatttgatgttggatatgtagttacagtgactctaggttctgagcagctgcaaggtgtcctgtttcatgttcctgataacgtgtcccagagttctcatgccgaaggcacatctagttcacagaatcttggtgatgacacgtctaatttacagagtcgaaagagagcaaaatatgcaccacgtgatccatttcggccaaagtcaaacaggagcggttacaactttttctttgctgaaaattatgccaggctgaagccctcgtatcatgggcaggagagagcaattagtaagaggattgggtttctgtggaacaatctgtcagaagcagaaagacaggtttatcaagagaaagggataagagataaggaaagatacaggactgaactgatggagtacaaatccaataattcaactccaaatgctcaataggctgttttatgtaatccttagactgtcatttcatatgcttcatctgttgttcttttcatgcctttgctatagttaattttcttatccattctacagagaaacttagaagagtagctttgtgacaattctggtgtaaattatgctgaatggttttaataaacatcttgtagcggttaattcattgtagttactcttg

SEQ ID NO: 52370 - protein, 339 aa, Glycine max
  peptide (1)..(339): Ceres Seq. ID no. 14314472
MNVTNKPNPYGSTNGFQSQLQQNGWEQGSSRLRPTKLYPAPTAGYQDIVRDANLFWGTLQAFHKTLGTKYKISTVGGTPLDLHRLFVEVTSRGGIEKVIVDRKWKEVILTFNFKDTITNASFMVRKSYLSMLYHFEQVYYFGRQGIPPTTPDLMIRGQSCQPYSSTTIPEVAAVNDSPVQSTPVQAHDDMVSGTIDAKFDVGYVVTVTLGSEQLQGVLFHVPDNVSQSSHAEGTSSSQNLGDDTSNLQSRKRAKYAPRDPFRPKSNRSGYNFFFAENYARLKPSYHGQERAISKRIGFLWNNLSEAERQVYQEKGIRDKERYRTELMEYKSNNSTPNAQ

SEQ ID NO: 52371 - protein, 217 aa, Glycine max
  peptide (1)..(217): Ceres Seq. ID no. 14314473
MVRKSYLSMLYHFEQVYYFGRQGIPPTTPDLMIRGQSCQPYSSTTIPEVAAVNDSPVQSTPVQAHDDMVSGTIDAKFDVGYVVTVTLGSEQLQGVLFHVPDNVSQSSHAEGTSSSQNLGDDTSNLQSRKRAKYAPRDPFRPKSNRSGYNFFFAENYARLKPSYHGQERAISKRIGFLWNNLSEAERQVYQEKGIRDKERYRTELMEYKSNNSTPNAQ

SEQ ID NO: 52372 - protein, 209 aa, Glycine max
  peptide (1)..(209): Ceres Seq. ID no. 14314474
MLYHFEQVYYFGRQGIPPTTPDLMIRGQSCQPYSSTTIPEVAAVNDSPVQSTPVQAHDDMVSGTIDAKFDVGYVVTVTLGSEQLQGVLFHVPDNVSQSSHAEGTSSSQNLGDDTSNLQSRKRAKYAPRDPFRPKSNRSGYNFFFAENYARLKPSYHGQERAISKRIGFLWNNLSEAERQVYQEKGIRDKERYRTELMEYKSNNSTPNAQ

SEQ ID NO: 52373 - DNA, 1625 bp, Glycine max
  misc_feature (1)..(1625): Ceres Seq. ID no. 15177870
agtttgggttaagtagtgaggtttcttcttataagctattgcctttccgcaattggcttctccactgactcaattctatagtctagcttctctctctttcttatcacatatgccaaatccaattttgacccgcaatagactttcaatattctaatgctactttacttcatcacttgcatctccttcttcttgtttttaaagtccctccttctcaagcctctcccatcatgggcatctgagatgtggctgtttccccttttgttttctcaagagttttctatgagcacaatctccaagctgttcaggaaccggttttggattggttttctgtgtcaaattcccataggaatgtctctggtgaggaagagtctgacttcaagagtggagaatgttgaggaaagccttgacatgtcagtgttggacttgcctgagttggccttggattgcattcttgagaggcttcccccctcttcgctgtgtcgaatcgccgccgtgtgccgcaccttgagggagaggtgtgtgagtgatcacctttgggagaagcacatgaggaagaagtggggtagagttattggccctgctgcttatagggagtggaaatggcatgttgcttccaaaaggaatgttgggggtcttaaacatggcaggcaaaagggtttgatgagatttatgtctcttcattggcctttccaatggattagaccaaaggttgatgcaaattataataacccaaagctgaggagctctctgcctgttgactcagtcatgaactggtatcttgctcttgagtctggcaatttttggttccctgctcaagtctataaccgtgagaatggtcatgttggattcatgctatcttgctatgatgctgaacttagctatgatccgcgaactgatacctttcaagccagatatcctccacatggaagaagggcagatgctagagagtgtggcatcccatgggaaaggctaagagcacctcctattgatacttctccgcatgatcttcatgtctccgactgtttaaatgatttgtatccgggtgatcacatagagattcaatggaggagaaacaaagaatttccttatggttggtggtatggtgttgtaggccacttggagtcatgcaatgggagtgaaaattattgccgatgtcatagtagtgacactgtggtgctagagttcaatcattacactcctggctcacgatggaggctgaccactgtcagtaggaaagatcatagggaggaggggaacgaggctgatggattttatggcggaataagaaagattaccagcgaggctgagattgccacttggaaatgcctttggccatctgaagtcttggattagtaggcactagcactggatctgatcaaattctctacaacttagcatgatttcaatatagaagctttgtttcagaaactgaagcattgactggttctggattatacatggcaatatacaacctgaagtggacttcagttcagatatttaggccaacccgattttcttctcttttttgtcacattttttcatgaaaaaatttatgcatattcatgtggtttccctcattgtaaattgttcatttaagcacaaatgtagaatattcattccactat

SEQ ID NO: 52374 - protein, 399 aa, Glycine max
  peptide (1)..(399): Ceres Seq. ID no. 15177871
MLLYFITCISFFLFLKSLLLKPLPSWASEMWLFPLLFSQEFSMSTISKLFRNRFWIGFLCQIPIGMSLVRKSLTSRVENVEESLDMSVLDLPELALDCILERLPPSSLCRIAAVCRTLRERCVSDHLWEKHMRKKWGRVIGPAAYREWKWHVASKRNVGGLKHGRQKGLMRFMSLHWPFQWIRPKVDANYNNPKLRSSLPVDSVMNWYLALESGNFWFPAQVYNRENGHVGFMLSCYDAELSYDPRTDTFQARYPPHGRRADARECGIPWERLRAPPIDTSPHDLHVSDCLNDLYPGDHIEIQWRRNKEFPYGWWYGVVGHLESCNGSENYCRCHSSDTVVLEFNHYTPGSRWRLTTVSRKDHREEGNEADGFYGGIRKITSEAEIATWKCLWPSEVLD

SEQ ID NO: 52375 - protein, 370 aa, Glycine max
  peptide (1)..(370): Ceres Seq. ID no. 15177872
MWLFPLLFSQEFSMSTISKLFRNRFWIGFLCQIPIGMSLVRKSLTSRVENVEESLDMSVLDLPELALDCILERLPPSSLCRIAAVCRTLRERCVSDHLWEKHMRKKWGRVIGPAAYREWKWHVASKRNVGGLKHGRQKGLMRFMSLHWPFQWIRPKVDANYNNPKLRSSLPVDSVMNWYLALESGNFWFPAQVYNRENGHVGFMLSCYDAELSYDPRTDTFQARYPPHGRRADARECGIPWERLRAPPIDTSPHDLHVSDCLNDLYPGDHIEIQWRRNKEFPYGWWYGVVGHLESCNGSENYCRCHSSDTVVLEFNHYTPGSRWRLTTVSRKDHREEGNEADGFYGGIRKITSEAEIATWKCLWPSEVLD

SEQ ID NO: 52376 - protein, 357 aa, Glycine max
  peptide (1)..(357): Ceres Seq. ID no. 15177873
MSTISKLFRNRFWIGFLCQIPIGMSLVRKSLTSRVENVEESLDMSVLDLPELALDCILERLPPSSLCRIAAVCRTLRERCVSDHLWEKHMRKKWGRVIGPAAYREWKWHVASKRNVGGLKHGRQKGLMRFMSLHWPFQWIRPKVDANYNNPKLRSSLPVDSVMNWYLALESGNFWFPAQVYNRENGHVGFMLSCYDAELSYDPRTDTFQARYPPHGRRADARECGIPWERLRAPPIDTSPHDLHVSDCLNDLYPGDHIEIQWRRNKEFPYGWWYGVVGHLESCNGSENYCRCHSSDTVVLEFNHYTPGSRWRLTTVSRKDHREEGNEADGFYGGIRKITSEAEIATWKCLWPSEVLD

SEQ ID NO: 52377 - DNA, 879 bp, Glycine max
  misc_feature (1)..(879): Ceres Seq. ID no. 14316155
aaaaaccccaggggctccacttagttgttcctctctggcctcttttctttctacttctcatcagggttttacttttagcttaaacccgcggccatggcgacgagagcagcagtggcggcgccgcgcgttttgcggcggtttttctgcacaaactcagcctcttcttctttccccttcgtttctacgctgcctcccggtgccacccccgccccaacccgacccacggcggagcccaacaccaacctcttcgtctctggtcttagtaaacgtactaatacagaaaggcttcgagaggagtttgcaaagttcggtgaagttgttcatgcgagggtggtaactgatcgagtctcaggttactctaaggggtttggttttgttcaatatgctacaatagaagatgctgcaaagggcattgaaggcatggatggcaagtttttggacggttgggttatatttgcagagtatgcgagaccaagaccaccaccaggccaacctctaaatagcaacagttctcagtatggccggcagtgattcctgttatttatctaaaacattcttatgcccattgaactggttgtctcaattagcaattgcaattcaaaaagtattatttattagggcatggatgctcgggtgatctttaattatctatagaagttctagattattgtaatggaaggataacttatgacattgttgtaatgcaagatttctcgttgatagtcttgcatattttgtggttatggttactccaaagtagcttcctgtttgtacttaagtatagattgatgccaatgtctggacacgatggggttatctggtctgataatcccttacccttatacttgaaacgagataaaaatgattattgtctacgat

SEQ ID NO: 52378 - protein, 145 aa, Glycine max
  peptide (1)..(145): Ceres Seq. ID no. 14316156
MATRAAVAAPRVLRRFFCTNSASSSFPFVSTLPPGATPAPTRPTAEPNTNLFVSGLSKRTNTERLREEFAKFGEVVHARVVTDRVSGYSKGFGFVQYATIEDAAKGIEGMDGKFLDGWVIFAEYARPRPPPGQPLNSNSSQYGRQ

SEQ ID NO: 52379 - protein, 111 aa, Glycine max
  peptide (1)..(111): Ceres Seq. ID no. 14316157
KTPGAPLSCSSLASFLSTSHQGFTFSLNPRPWRREQQWRRRAFCGGFSAQTQPLLLSPSFLRCLPVPPPPQPDPRRSPTPTSSSLVLVNVLIQKGFERSLQSSVKLFMRGW

SEQ ID NO: 52380 - DNA, 1445 bp, Glycine max
  misc_feature (1)..(1445): Ceres Seq. ID no. 14316128
cattttttcagaaaggtttaggaaaaacgcgtaagcgtcaacgatcatattcacttttacaaaccccacaactttgttctcttctctgcaattcgttcaatctttttctgagcaaagcattcaacttttggcatttttaggttatcttgaatccgattatcaatggagaccccatcgtccaccagaagagtaataacaagatcacagactttatctgcttccaatgatgctctcatcacagttttcagtgagtgattttttctcttacaatttcaatttttctttctccaaactcacccaaaacaacattactcgtttgtcttttgcaggaaatattgaagattccgaaaagaacacatcaaagtcaaaaacaagggtgcaacaacaacaagatcaatcagcactaatagacataacaaatgattctccaatcgcggggcttgcgaatggggtaattcttggtaccccattggcgaagcagagaagaagcaaaatgaagaacactccagggtctggggaagccttgctgaggggacaagtgaagacccttttgcttaaggtggaagaagaggtcgagctttccaagttctcgcttgaaagcatggaacttgttgcaccaatgcccgtgaatacgcctcaatttcagaatctttctggtttggcttcagttaccaacccttctgttgttctcaaaaacccactaattcctcaggtggtgaatcatgtatttgatggttctgaatctgaaaagagtgtaataagcaggtcccttttatttgacttctcagagaaatctcaactttcgaatgcatcagaagaatttttctctgcgctgagttatgaggaactagtacaagctggaaaggaaattagtagctgctgcatagaaggtgatgatgcttctatctggtcaatgcaggtcaatgcaagcacccatgatgaagaagaagatgatgaggttacaactgcatacgaagaagattgttgtgaggatgttgaaggagaagaagaaaaggaagagtatgatgaaggaggtttgctgcttgatgaactgtgtgaagggttgaacaacattagcatgaatgaaaggatagctccaaaatttgaaggaaagcacacaagatttgtttacaacagtgatgatgagattgtgaaagaagaggtggaagagaactttggtgagagtgcttcttcaactaagatattgcgtttgaaaggattgccgactccaaaagggaaacacttacgcttttatgaggaagaggatggaaaatctgctttgtgattcctagatagactttttggcatatttgtgaatgctctaaaataatggtcatttaaagtttttgtttctttgggtcccgacagagttcactagtagattctttggattttttgttcgagaaatgaaaaacgagtgaccacacaatttagtggtccaattt

SEQ ID NO: 52381 - protein, 353 aa, Glycine max
  peptide (1)..(353): Ceres Seq. ID no. 14316129
MMLSSQFSVSDFFSYNFNFSFSKLTQNNITRLSFAGNIEDSEKNTSKSKTRVQQQQDQSALIDITNDSPIAGLANGVILGTPLAKQRRSKMKNTPGSGEALLRGQVKTLLLKVEEEVELSKFSLESMELVAPMPVNTPQFQNLSGLASVTNPSVVLKNPLIPQVVNHVFDGSESEKSVISRSLLFDFSEKSQLSNASEEFFSALSYEELVQAGKEISSCCIEGDDASIWSMQVNASTHDEEEDDEVTTAYEEDCCEDVEGEEEKEEYDEGGLLLDELCEGLNNISMNERIAPKFEGKHTRFVYNSDDEIVKEEVEENFGESASSTKILRLKGLPTPKGKHLRFYEEEDGKSAL

SEQ ID NO: 52382 - protein, 352 aa, Glycine max
  peptide (1)..(352): Ceres Seq. ID no. 14316130
MLSSQFSVSDFFSYNFNFSFSKLTQNNITRLSFAGNIEDSEKNTSKSKTRVQQQQDQSALIDITNDSPIAGLANGVILGTPLAKQRRSKMKNTPGSGEALLRGQVKTLLLKVEEEVELSKFSLESMELVAPMPVNTPQFQNLSGLASVTNPSVVLKNPLIPQVVNHVFDGSESEKSVISRSLLFDFSEKSQLSNASEEFFSALSYEELVQAGKEISSCCIEGDDASIWSMQVNASTHDEEEDDEVTTAYEEDCCEDVEGEEEKEEYDEGGLLLDELCEGLNNISMNERIAPKFEGKHTRFVYNSDDEIVKEEVEENFGESASSTKILRLKGLPTPKGKHLRFYEEEDGKSAL

SEQ ID NO: 52383 - protein, 263 aa, Glycine max
  peptide (1)..(263): Ceres Seq. ID no. 14316131
MKNTPGSGEALLRGQVKTLLLKVEEEVELSKFSLESMELVAPMPVNTPQFQNLSGLASVTNPSVVLKNPLIPQVVNHVFDGSESEKSVISRSLLFDFSEKSQLSNASEEFFSALSYEELVQAGKEISSCCIEGDDASIWSMQVNASTHDEEEDDEVTTAYEEDCCEDVEGEEEKEEYDEGGLLLDELCEGLNNISMNERIAPKFEGKHTRFVYNSDDEIVKEEVEENFGESASSTKILRLKGLPTPKGKHLRFYEEEDGKSAL

SEQ ID NO: 52384 - DNA, 1227 bp, Glycine max
  misc_feature (1)..(1227): Ceres Seq. ID no. 14316161
cccccttctcccttttgcttccttcaataacttataacttagcattgtattgtgttcaaactttgtttcttccataccctcttcttctttggccttaaccgtcatatttggctttgaaatggagttcgaggaccgcttcagacaccaggttcagagaccaaaatatgattgccttctttttgatttagatgacactttgtatcctctcaaatctggtctggcaaaatcatgtctccaaaatattaaacactacatggttgagaagcttggcatagaccctagcaaaattgatgacctgtccaacctcctttacaagaattatggaactactatggctggtctaagggcaattggatatgactttgactatgatgaatatcatagctttgttcatgggagattaccttatgagaacctaaaaccagacccagttctgaggaacctgttgctgagcctaccctataggaaacttatcttcacaaacgcagacaaagtccacgcggctaaggcgcttagcaggcttggattagaagactgctttgaaggaatcatatgctttgagacccttaatcctatccacaagagcactgtttctgatgatgaagatgatattgagtttgtgggttcaaggaccaccaatcctaccacttgtaatggttcaggcacctctcaaatctttgacattatagggcattttgctcagcccaatcccggtgcagtcctgccaaagacaccaattgtttgcaagccatcagaaaatgccattgaattggccatcaagatagccaaccttaacccacaaagaactttgttctttgaggacagtacccgcaacatacaagctggaaaacgtgtggggcttcacactgtgctggttggtacatcacaaagatgtaaaggagcagattatgccttggaaagcattcacaaccttagggaggctgtgcctgaactatgggaggctgatataaaatcagaagttgcataccctggaaagctagctgtggagacatctgtcactgcttgagattattattaagtgcatgaaattaattaagtcccttcaaaattgttcatttaatcaaaattgaaaatccaaccaccaacaacaaaaaaaaaaacgaacaaaagagagaagaagcccacgggaattcccccaacttcagatgtagtagttgtagttgatgtagatgctttgtaagattgcaataaaatagtcattcaaat

SEQ ID NO: 52385 - protein, 302 aa, Glycine max
  peptide (1)..(302): Ceres Seq. ID no. 14316162
MEFEDRFRHQVQRPKYDCLLFDLDDTLYPLKSGLAKSCLQNIKHYMVEKLGIDPSKIDDLSNLLYKNYGTTMAGLRAIGYDFDYDEYHSFVHGRLPYENLKPDPVLRNLLLSLPYRKLIFTNADKVHAAKALSRLGLEDCFEGIICFETLNPIHKSTVSDDEDDIEFVGSRTTNPTTCNGSGTSQIFDIIGHFAQPNPGAVLPKTPIVCKPSENAIELAIKIANLNPQRTLFFEDSTRNIQAGKRVGLHTVLVGTSQRCKGADYALESIHNLREAVPELWEADIKSEVAYPGKLAVETSVTA

SEQ ID NO: 52386 - protein, 257 aa, Glycine max
  peptide (1)..(257): Ceres Seq. ID no. 14316163
MVEKLGIDPSKIDDLSNLLYKNYGTTMAGLRAIGYDFDYDEYHSFVHGRLPYENLKPDPVLRNLLLSLPYRKLIFTNADKVHAAKALSRLGLEDCFEGIICFETLNPIHKSTVSDDEDDIEFVGSRTTNPTTCNGSGTSQIFDIIGHFAQPNPGAVLPKTPIVCKPSENAIELAIKIANLNPQRTLFFEDSTRNIQAGKRVGLHTVLVGTSQRCKGADYALESIHNLREAVPELWEADIKSEVAYPGKLAVETSVTA

SEQ ID NO: 52387 - protein, 231 aa, Glycine max
  peptide (1)..(231): Ceres Seq. ID no. 14316164
MAGLRAIGYDFDYDEYHSFVHGRLPYENLKPDPVLRNLLLSLPYRKLIFTNADKVHAAKALSRLGLEDCFEGIICFETLNPIHKSTVSDDEDDIEFVGSRTTNPTTCNGSGTSQIFDIIGHFAQPNPGAVLPKTPIVCKPSENAIELAIKIANLNPQRTLFFEDSTRNIQAGKRVGLHTVLVGTSQRCKGADYALESIHNLREAVPELWEADIKSEVAYPGKLAVETSVTA

SEQ ID NO: 52388 - DNA, 1189 bp, Glycine max
  misc_feature (1)..(1189): Ceres Seq. ID no. 14314468
aatttgattggatttcgatatcaggatttgccagaacctctggtcatggctttctctttagtaccgagctgtttccatggctatctcaccagctcctcgttctcctccaccactcattttctcccgacttctctctcttgcggcggcgtctctgtttctcccgtttcgaagctaagaacatgtgccaaattcgataagtttcagggtgattctcctcttgaacagaccacatcagcttctgcttcgcaggaagtagtaccgttagaagctgaagacccaccagaagaagaagaagacgatagctgcttgcctaatgatttggtgggagctgttaggcaatcaggtgaagcaagtgcttcgtttgtgaactcgggaggaacaagagctatcgtggagctcttgattcctcagctgcagttcttagacgatgaaggtgcgcaagctgaactctgggagctttctcgcgttttcttggagacactcatcaaagaaactggctgtgagagagttaaagctgtgtttccagatgctggagctgctgcgttgctaaaatataagtggaaggatgcagcttttggattcgctagcttaagtgaccgtaaaccagtggagaaagaagatgagatcattgtcatggttgttcctgattaccaaatgcttgaatacgttgagaaaattgcaaaagggcttgctgatgacccgccaaggcctctggttatgtggaaccctcgtctgataagcgaggaagttggggttgggtttaacgtaagaaagctaaggcgttacttcttaagttcttttactacggtttactccatgagacctctagctgctggtgctgttttcagatgttatcctggtaaatggaaagtgttctatgacaataaagacagacctggccggtacctactcgccaaagaactcattggtcgacctgatgctgaggatcttgagattatatatgggaacgtggaagagaaaccagatgaagagccatctttattgacccaagctgctggaatcttctcgtccattaacaggttcatgaaagctatgtgaagatgatttcttttctcacagagtagtcctgttcactagtctggtattatgaatgtagaccaaagggaatgtttgtatatctttgtatgctattacaccataacgaatagaatacatacttcttctgtgc

SEQ ID NO: 52389 - protein, 352 aa, Glycine max
  peptide (1)..(352): Ceres Seq. ID no. 14314469
NLIGFRYQDLPEPLVMAFSLVPSCFHGYLTSSSFSSTTHFLPTSLSCGGVSVSPVSKLRTCAKFDKFQGDSPLEQTTSASASQEVVPLEAEDPPEEEEDDSCLPNDLVGAVRQSGEASASFVNSGGTRAIVELLIPQLQFLDDEGAQAELWELSRVFLETLIKETGCERVKAVFPDAGAAALLKYKWKDAAFGFASLSDRKPVEKEDEIIVMVVPDYQMLEYVEKIAKGLADDPPRPLVMWNPRLISEEVGVGFNVRKLRRYFLSSFTTVYSMRPLAAGAVFRCYPGKWKVFYDNKDRPGRYLLAKELIGRPDAEDLEIIYGNVEEKPDEEPSLLTQAAGIFSSINRFMKAM

SEQ ID NO: 52390 - protein, 337 aa, Glycine max
  peptide (1)..(337): Ceres Seq. ID no. 14314470
MAFSLVPSCFHGYLTSSSFSSTTHFLPTSLSCGGVSVSPVSKLRTCAKFDKFQGDSPLEQTTSASASQEVVPLEAEDPPEEEEDDSCLPNDLVGAVRQSGEASASFVNSGGTRAIVELLIPQLQFLDDEGAQAELWELSRVFLETLIKETGCERVKAVFPDAGAAALLKYKWKDAAFGFASLSDRKPVEKEDEIIVMVVPDYQMLEYVEKIAKGLADDPPRPLVMWNPRLISEEVGVGFNVRKLRRYFLSSFTTVYSMRPLAAGAVFRCYPGKWKVFYDNKDRPGRYLLAKELIGRPDAEDLEIIYGNVEEKPDEEPSLLTQAAGIFSSINRFMKAM

SEQ ID NO: 52391 - DNA, 996 bp, Glycine max
  misc_feature (1)..(996): Ceres Seq. ID no. 14316118
aatcaccctttgctttcttccaatattccacatcaaagcacctttccacttttccattctatatcccccatcttttcctcccttattaaaagccgcatgcagcacctaagctaagcataacttgtacacacttacacttgcacacatagggagagagggtgaaggtgagaatctcaattgtttagcttattccgtgagtgactctattctattccattaacatgacagggaagagaaaccaaattacaacaagtcctgtgggaagtccaacatctggtaacatctcagacagctcctcctcaaaagaacaagacaggttcctccctatagccaatgttagccgaatcatgaaaagggcactcccagccaatgccaaaatctcaaaggaagccaaggaaacagttcaagagtgtgtgtctgagttcataagcttcatcactggtgaggcctcagacaagtgccagagggaaaagaggaagacaatcaatggtgatgatcttctttgggccatgacaacactaggatttgagaactatgttggacccttgaagctctacctgaacaactacagggaaactgagggagaaaagagttctatggcaaaacaagaagaacactctccaactcatcaaaccaatattgatggggtggtggttgaaatcaacaagttgcatcattctgtggcagcaaccaacaaagctgcagacttcaacactttcagtggtggtggcttctattctgtggggcctcaagtggctgctccaaagagcttcactgagattggagggatcaatggctatagagaaagttccattgctcaaagtgcggtcagtggtgatcatgatgcaagtggcaatagaatgatgccacccaacctacgttatagggttgaatggtagatgtgatatgcataccaacaagttcatgtcccttccccattatatattatatcatatcatatagtataatatatataaataatatttttattatgat

SEQ ID NO: 52392 - protein, 225 aa, Glycine max
  peptide (1)..(225): Ceres Seq. ID no. 14316119
MTGKRNQITTSPVGSPTSGNISDSSSSKEQDRFLPIANVSRIMKRALPANAKISKEAKETVQECVSEFISFITGEASDKCQREKRKTINGDDLLWAMTTLGFENYVGPLKLYLNNYRETEGEKSSMAKQEEHSPTHQTNIDGVVVEINKLHHSVAATNKAADFNTFSGGGFYSVGPQVAAPKSFTEIGGINGYRESSIAQSAVSGDHDASGNRMMPPNLRYRVEW

SEQ ID NO: 52393 - protein, 183 aa, Glycine max
  peptide (1)..(183): Ceres Seq. ID no. 14316120
MKRALPANAKISKEAKETVQECVSEFISFITGEASDKCQREKRKTINGDDLLWAMTTLGFENYVGPLKLYLNNYRETEGEKSSMAKQEEHSPTHQTNIDGVVVEINKLHHSVAATNKAADFNTFSGGGFYSVGPQVAAPKSFTEIGGINGYRESSIAQSAVSGDHDASGNRMMPPNLRYRVEW

SEQ ID NO: 52394 - protein, 129 aa, Glycine max
  peptide (1)..(129): Ceres Seq. ID no. 14316121
MTTLGFENYVGPLKLYLNNYRETEGEKSSMAKQEEHSPTHQTNIDGVVVEINKLHHSVAATNKAADFNTFSGGGFYSVGPQVAAPKSFTEIGGINGYRESSIAQSAVSGDHDASGNRMMPPNLRYRVEW

SEQ ID NO: 52395 - DNA, 1752 bp, Glycine max
  misc_feature (1)..(1752): Ceres Seq. ID no. 15178264
cttaaactcagactgtgagcgagactcggtagtaatagtatagtctacaaggtttcgtattctactacttgaaacctaactcttccttcttcttctacactactcctatggctcccgatgcttccgacgcacttgcagtaaggcagaaagttcaattatttctgaacgcggctcgtactggttcaattgatctcttaaagaaattggcgttgcagctggacgagggcaaggatttggcgaaatcggtggaagcaataaaggacgccaacaagagaggagcactgcattttgccgcgcgagaaggccaaacctctgtttgcgagtacctcttaaccgatttgaagctctctgtcgattctcaagatgatgatggcgagactgcactcattcatgctgctcgtcagggacataccgccaccgctaaatatctgattgaccacggtgctgatcctactgtggctagcaatttaggggccacggcattacaccattctgcggggataggagatgctgagctgctcaagtacttgctgtccaggggagttaatcctgatctagaaagtgatgcgggaacacctttggtttgggctgctggtcatgcccaaccagctgctgtcagtgtactgttggaacatggtgcaaatccgcatgccgaaactgatgatggtattaccccactcctttcagctgtggcagccggttctctagcatgcttagagctgttaattcaggcaggtgctaaatcaaatataagtgctggtggagcaactcctttgcacatcgcagctgataatggaagtcttgaactattaaattgtttattgaaagtgggagctgatcctgatgtctctgacgaggatggtgtcaagccaatacaagttgctgctgcaaggggctatccaaaagctgttgagatattgttcccattgacgtccaaagtagatactattcctacttggactgttgatgggatacttgagtatatgcaatctgaaactagaaagcaacaggatgaatcgataaatgcaaaagaaactaatcagcccaaggaagctgattttccggagcaaaatgtccctgaggtggcacctgaagccaaaaagagagcagcagaagcaaagtcaagaggggatggggcttttaaaaggaatgaccatcatatggctatagatttttatacccaagcaattgatctgaaccccattgatgctactttgctatccaatagaagtctctgttggattaagttgggccaagctgagcatgctttagctgatgcaaaggcctgtagagctttaagaccagattggccaaaagcttgttatagggaaggagcggctctgcgtttgttgcagaaatttgatgaagctgcaaatgctttttatgagggagtaacgcttgatcctgaaaataaggagcttgtaaatgcgttcagggaagctgtcgaggcggggaggaaattttatggaacggctgaaaataaatcatagtttagccttttgttaataccatgtttcagagagaagagatcaaaatattgcgggtggtgcagccttattcacttgatccttttttccccaatgtgtgtatgcgtgttttctttaactagttactgtcgtataggaagagtcagctagtaatctgtttcattaaattgttttagtaattataaaggttatgcttatttgacatgttccaaaattgttgcagaattagtacacattatgaaaatggcaatgcaggttcatgggc

SEQ ID NO: 52396 - protein, 460 aa, Glycine max
  peptide (1)..(460): Ceres Seq. ID no. 15178265
MAPDASDALAVRQKVQLFLNAARTGSIDLLKKLALQLDEGKDLAKSVEAIKDANKRGALHFAAREGQTSVCEYLLTDLKLSVDSQDDDGETALIHAARQGHTATAKYLIDHGADPTVASNLGATALHHSAGIGDAELLKYLLSRGVNPDLESDAGTPLVWAAGHAQPAAVSVLLEHGANPHAETDDGITPLLSAVAAGSLACLELLIQAGAKSNISAGGATPLHIAADNGSLELLNCLLKVGADPDVSDEDGVKPIQVAAARGYPKAVEILFPLTSKVDTIPTWTVDGILEYMQSETRKQQDESINAKETNQPKEADFPEQNVPEVAPEAKKRAAEAKSRGDGAFKRNDHHMAIDFYTQAIDLNPIDATLLSNRSLCWIKLGQAEHALADAKACRALRPDWPKACYREGAALRLLQKFDEAANAFYEGVTLDPENKELVNAFREAVEAGRKFYGTAENKS

SEQ ID NO: 52397 - DNA, 1402 bp, Glycine max
  misc_feature (1)..(1402): Ceres Seq. ID no. 14316144
attctgaattgtgattgctctcacttataaaaccctcttttctgcttcttcgtccattggcattggctttcaatggcgaagtgcatgaccagttcttcttcttcttcctatgcactgcttctctttttcttctgctttctccaactggaggctattttggaccctgctgatttcctcgctctgcaaaacattcgtaaagctctgcaagacatgcctgcttccgatttcttctcttcctgggatttcaccgcagacccatgcaacttcgccggcgtttactgcgactccgacaaggtcatcgcgctcaacctcggcgaccccagggctggctctcccggcctcaccggccgcctccacccctccgtcggcaagctctccgcgctcgccgagttcaccgtcgtccctggccgtatttacggtcccctccccgaaacactctccgatttgaagaacctcaggtttctcggcgtcaaccgcaacttcatctccggcgaaattccgaccaagctgggagaactccgcaacctccgaaccgtcgatctcagctacaaccagctcactggacgcattcctccaacggtaggaaccctaccggagctaacaaacctaatcctctgccacaaccgcctctccggttcggttccccggttcgagtcgcacacactaacccggctcgatctgaagcacaactctctctccggttcgctccctcccaactctctccctccctctctccagtacctctctctttcctggaaccagctcacgggcccaatggaccgcctcctagcccgcctcgaccaggtcaagtatttggacctaagcctaaacaagttcacgggcccaatcccgggccatatcttttcctttccgctgacaaatctgcagctagaaaggaaccagttctcgggcccggtccagcccgtggatcaggtttccatcccgaccgttgatctcagttacaaccggttgtatggtcagatatcaccgatgctggcgacagtgcagaatctttacctgaacaacaaccggttcacgggtcgggttccggctagcttcgtggagcggttgctggacgcgagcattcagatactttacttgcagcataactatctgacggggattgatataagcccaacggcggtgattccagaaagaagctcgctgtgtctgcagtataactgcatggtccctcccgtagagacgccctgccccttgagggctggcaaggagaaaaccaggcctactacgcagtgcaaccagctgaaggatttgaaggactgatcctgatcccgatcaaaatcatatatatacctttccttctctttcttgccctttttgattcattattatttaattttgtgataactatgggggaatgaataagatgatgattgtgaat

SEQ ID NO: 52398 - protein, 403 aa, Glycine max
  peptide (1)..(403): Ceres Seq. ID no. 14316145
MAKCMTSSSSSSYALLLFFFCFLQLEAILDPADFLALQNIRKALQDMPASDFFSSWDFTADPCNFAGVYCDSDKVIALNLGDPRAGSPGLTGRLHPSVGKLSALAEFTVVPGRIYGPLPETLSDLKNLRFLGVNRNFISGEIPTKLGELRNLRTVDLSYNQLTGRIPPTVGTLPELTNLILCHNRLSGSVPRFESHTLTRLDLKHNSLSGSLPPNSLPPSLQYLSLSWNQLTGPMDRLLARLDQVKYLDLSLNKFTGPIPGHIFSFPLTNLQLERNQFSGPVQPVDQVSIPTVDLSYNRLYGQISPMLATVQNLYLNNNRFTGRVPASFVERLLDASIQILYLQHNYLTGIDISPTAVIPERSSLCLQYNCMVPPVETPCPLRAGKEKTRPTTQCNQLKDLKD

SEQ ID NO: 52399 - protein, 399 aa, Glycine max
  peptide (1)..(399): Ceres Seq. ID no. 14316146
MTSSSSSSYALLLFFFCFLQLEAILDPADFLALQNIRKALQDMPASDFFSSWDFTADPCNFAGVYCDSDKVIALNLGDPRAGSPGLTGRLHPSVGKLSALAEFTVVPGRIYGPLPETLSDLKNLRFLGVNRNFISGEIPTKLGELRNLRTVDLSYNQLTGRIPPTVGTLPELTNLILCHNRLSGSVPRFESHTLTRLDLKHNSLSGSLPPNSLPPSLQYLSLSWNQLTGPMDRLLARLDQVKYLDLSLNKFTGPIPGHIFSFPLTNLQLERNQFSGPVQPVDQVSIPTVDLSYNRLYGQISPMLATVQNLYLNNNRFTGRVPASFVERLLDASIQILYLQHNYLTGIDISPTAVIPERSSLCLQYNCMVPPVETPCPLRAGKEKTRPTTQCNQLKDLKD

SEQ ID NO: 52400 - protein, 357 aa, Glycine max
  peptide (1)..(357): Ceres Seq. ID no. 14316147
MPASDFFSSWDFTADPCNFAGVYCDSDKVIALNLGDPRAGSPGLTGRLHPSVGKLSALAEFTVVPGRIYGPLPETLSDLKNLRFLGVNRNFISGEIPTKLGELRNLRTVDLSYNQLTGRIPPTVGTLPELTNLILCHNRLSGSVPRFESHTLTRLDLKHNSLSGSLPPNSLPPSLQYLSLSWNQLTGPMDRLLARLDQVKYLDLSLNKFTGPIPGHIFSFPLTNLQLERNQFSGPVQPVDQVSIPTVDLSYNRLYGQISPMLATVQNLYLNNNRFTGRVPASFVERLLDASIQILYLQHNYLTGIDISPTAVIPERSSLCLQYNCMVPPVETPCPLRAGKEKTRPTTQCNQLKDLKD

SEQ ID NO: 52401 - DNA, 1172 bp, Glycine max
  misc_feature (1)..(1172): Ceres Seq. ID no. 14314434
actaaataaatagttctgttttgtttctctctcaactctcacaacccatctttcatatccaaattccaatgcttcttcttccttcttatttcaatttcaatcactactattattactctttcacgcttttgcttctcgatttttaaaccctaaatctatctatctgtctaatagataagatagggcaaaaacaaaacaaaacaaaataaaaccctagccaaagaaagaccttgttgagcagcagcagcagagagagagaggcttatggaaggagtaccgcacccaatacccagaactgtcgaagaggttttcaccgattttaagggcagacgcgctggtttgattaaggccctcactactgacgttgaaaagttttaccagcagtgcgatcccgagaaggagaatttgtgtctatatgggtttccaaatgaaacatgggaagtgaatttgcctgttgaggaagtgcctcctgaacttcctgagccagcattaggtataaactttgccagggacggcatgcaagagaaggactggctatcactggttgcagttcacagtgactcatggctgcttgctgttgctttctattttggtgcccgctttggatttggtaagaatgaaaggaaaaggctttttcagatgataaatgatctgccaacaatcttcgaacttgtgacaggaagtgctaagcaatcaaaggatcaaccagctgctcacaacaatggtagcaaatgcaaatcaagtggaaagtcccatcagtctgagtctcaggccaaggggatgaagatgtctgcaccacccaaagaagaggatgagagtggagaagaagaagaagaagatgatgaacagggtgcaacatgtggtgcttgcggtgataattatggcactgatgaattctggatctgttgtgatatgtgtgaaagatggttccatggtaaatgtgttaaaattactcctgctaaggctgagcacatcaagcaatacaagtgccctagctgcagtaacaagagggttagagtttgaaagctctaaacctttggatcaatcaccaattaaacagacaagatttagaatgtttgataacatttttacaagtgaaaattgcttcctgttctagtgaatggttcactttaatgactatgcagatggaatttcaagttttgctactgttc

SEQ ID NO: 52402 - protein, 252 aa, Glycine max
  peptide (1)..(252): Ceres Seq. ID no. 14314435
MEGVPHPIPRTVEEVFTDFKGRRAGLIKALTTDVEKFYQQCDPEKENLCLYGFPNETWEVNLPVEEVPPELPEPALGINFARDGMQEKDWLSLVAVHSDSWLLAVAFYFGARFGFGKNERKRLFQMINDLPTIFELVTGSAKQSKDQPAAHNNGSKCKSSGKSHQSESQAKGMKMSAPPKEEDESGEEEEEDDEQGATCGACGDNYGTDEFWICCDMCERWFHGKCVKITPAKAEHIKQYKCPSCSNKRVRV

SEQ ID NO: 52403 - protein, 168 aa, Glycine max
  peptide (1)..(168): Ceres Seq. ID no. 14314436
MQEKDWLSLVAVHSDSWLLAVAFYFGARFGFGKNERKRLFQMINDLPTIFELVTGSAKQSKDQPAAHNNGSKCKSSGKSHQSESQAKGMKMSAPPKEEDESGEEEEEDDEQGATCGACGDNYGTDEFWICCDMCERWFHGKCVKITPAKAEHIKQYKCPSCSNKRVRV

SEQ ID NO: 52404 - protein, 127 aa, Glycine max
  peptide (1)..(127): Ceres Seq. ID no. 14314437
MINDLPTIFELVTGSAKQSKDQPAAHNNGSKCKSSGKSHQSESQAKGMKMSAPPKEEDESGEEEEEDDEQGATCGACGDNYGTDEFWICCDMCERWFHGKCVKITPAKAEHIKQYKCPSCSNKRVRV

SEQ ID NO: 52405 - DNA, 1282 bp, Glycine max
  misc_feature (1)..(1282): Ceres Seq. ID no. 14314464
accacataaaactaaaagagcatctcctcttagctcttgcttccttctcgagcgtaaaccctagatcccatctccaaaatgttcagatccgtgctcgtccgttcctcttcatcggcgaagcaatcgcttctccaccgcagcttctcctcctccgtccccgagcgcaaagtcgccatcctcggggccgccggtggaatcgggcagcctctcgctctcctcatgaagctcaaccccctcgtctcaagcctctccctcttcgatatcgcaaacacccctggagtcgccgctgatgtcggtcacatcaacaccagatctgaggtggttggatacatgggagatgatgaattggcgaaagctcttgcaggagctgacctcgttatcatccctgctggtgtccccaggaagcctggcatgactcgtgatgatcttttcaacatcaacgctggtattgtcaagaacctttgctctgccatcgccaagtactgccctcatgcacttgttaacatgatcagcaacccagtgaactccactgttccaattgcagctgagatattcaagaaggctggtatgtacgatgagaagaagttgtttggtgtcaccactcttgacgttgttagggccaagactttctacgctggaaaggctaatgtccctgttgctgaagttaatgttccggtgattggtggtcatgctggggttacaattctcccactcttctctcaggccactcctcaggccaacttgtctaatgatgtactcaccgctctcaccaagcgtacccaagatggaggtaccgaagtcgtggaggctaaagcaggaaaaggttcagctacattgtcaatggcctatgctggagcactatttgctgatgcatgcttgaaaggactcaacggagttccagacgttgtggaatgttcatacgtgcagtccaccatcactgagcttcctttctttgcctcaaaggtgaggttggggaagaacggtgtggaggaggttcttgatttggggccactctcagactttgagaaacaagggttggaagcactgaagccagaactcaagtcttccatcgagaagggtgttaagtttgcaaaccaatgagttaaatcgatttgagtcgggttatttttccaattttccggttatattatcgcccttcattgggttgcatcaataaaattcatgtgttgaggctttttgggttctttcccaaagcacagagataaaaaaaactgtaacatgtaaggtttctttcttatataacaatgtttttttctgtcat

SEQ ID NO: 52406 - protein, 340 aa, Glycine max
  peptide (1)..(340): Ceres Seq. ID no. 14314465
MFRSVLVRSSSSAKQSLLHRSFSSSVPERKVAILGAAGGIGQPLALLMKLNPLVSSLSLFDIANTPGVAADVGHINTRSEVVGYMGDDELAKALAGADLVIIPAGVPRKPGMTRDDLFNINAGIVKNLCSAIAKYCPHALVNMISNPVNSTVPIAAEIFKKAGMYDEKKLFGVTTLDVVRAKTFYAGKANVPVAEVNVPVIGGHAGVTILPLFSQATPQANLSNDVLTALTKRTQDGGTEVVEAKAGKGSATLSMAYAGALFADACLKGLNGVPDVVECSYVQSTITELPFFASKVRLGKNGVEEVLDLGPLSDFEKQGLEALKPELKSSIEKGVKFANQ

SEQ ID NO: 52407 - protein, 293 aa, Glycine max
  peptide (1)..(293): Ceres Seq. ID no. 14314466
MKLNPLVSSLSLFDIANTPGVAADVGHINTRSEVVGYMGDDELAKALAGADLVIIPAGVPRKPGMTRDDLFNINAGIVKNLCSAIAKYCPHALVNMISNPVNSTVPIAAEIFKKAGMYDEKKLFGVTTLDVVRAKTFYAGKANVPVAEVNVPVIGGHAGVTILPLFSQATPQANLSNDVLTALTKRTQDGGTEVVEAKAGKGSATLSMAYAGALFADACLKGLNGVPDVVECSYVQSTITELPFFASKVRLGKNGVEEVLDLGPLSDFEKQGLEALKPELKSSIEKGVKFANQ

SEQ ID NO: 52408 - protein, 256 aa, Glycine max
  peptide (1)..(256): Ceres Seq. ID no. 14314467
MGDDELAKALAGADLVIIPAGVPRKPGMTRDDLFNINAGIVKNLCSAIAKYCPHALVNMISNPVNSTVPIAAEIFKKAGMYDEKKLFGVTTLDVVRAKTFYAGKANVPVAEVNVPVIGGHAGVTILPLFSQATPQANLSNDVLTALTKRTQDGGTEVVEAKAGKGSATLSMAYAGALFADACLKGLNGVPDVVECSYVQSTITELPFFASKVRLGKNGVEEVLDLGPLSDFEKQGLEALKPELKSSIEKGVKFANQ

SEQ ID NO: 52409 - DNA, 1525 bp, Glycine max
  misc_feature (1)..(1525): Ceres Seq. ID no. 14314449
attccaatccaccctcgccactccttcgatccgaatcatcttttccgcccacacacaagttgggtttttttgatataattgataatgggtgatagcagtgttccatctgggtctccaaatgcaaaatcagatcttgttgacagagacttggcggtttccaacaacgcgtcgtcgttggaaaccattgtgcaaagtttccaagattcaatgtctcttggtaagagacacaagttctgggaaactcagcctgtggggcaatacaaggatgttggggactcaagtttgcctgagggcccgattgagcccccgacacctttgtccgaggttaagcaggagccttacaaccttcccagtgcttatgagtggacaacatgtgacatggactctgaggaaatctgtgatgaggtttatgcccttctcaagaataactatgttgaggatgatgagaacatgttcaggttcaactattccaaggagtttctcagttgggcgttgcgtgttccgggctattaccagagttggcacattggcgtgagagccaagacgtcaaagaagttggttgctttcatcagtggcatccccgccaggatcagggttaatgaggaggttgtgaagatggccgagatcaatttcttgtgtgttcataagaagctcaggtcaaagagacttgcacctgttatgatcaaggaggtcaccaggagggttcatttggagaatatttggcaggcggcctatacggctggagttgttcttccaacgccaatcacgacttgtcaatattggcaccgatcgttgaatccgaagaagctaattgatgttgggttttcaaggcttggtgctaggatgacgatgagccgcactataaagctttacaaattgcctgattcaacggttactcctggattcaggaaaatggagcttcgggatgtccctgctgttactcggctgcttaggaactacttgagccagtttgttgttgcacctgattttgatgaaaatgatgttgaacattggcttcttcccaatgagaatgtggtggatagtttcttggttgagagtccagagaatcatgagatcacagacttctgcagcttctatactcttccttcttccatccttggaaatcaaaattactcaattttgaaagctgcttattcttattataatgtctccaccaaaactccgctgacccagttgatgaatgatgtgctgattgtagcaaagcaaaaggattttgatgttttcaatgccttggatgtaatgcacaatgagagtttcctcaaagaactcaagtttggaccaggagatggacagcttcactactacttgtacaattataggattcgtagtgccttgaaaccatctggacttggacttgtgctcttgtagtttgatactattcagttttggtttcactatgtaattggtaaaaccattcatttgttttgttttattagcttgttgtttcaacattatttcttgttcctttcaaatattggcaattaacatattaggttttcagggc

SEQ ID NO: 52410 - protein, 434 aa, Glycine max
  peptide (1)..(434): Ceres Seq. ID no. 14314450
MGDSSVPSGSPNAKSDLVDRDLAVSNNASSLETIVQSFQDSMSLGKRHKFWETQPVGQYKDVGDSSLPEGPIEPPTPLSEVKQEPYNLPSAYEWTTCDMDSEEICDEVYALLKNNYVEDDENMFRFNYSKEFLSWALRVPGYYQSWHIGVRAKTSKKLVAFISGIPARIRVNEEVVKMAEINFLCVHKKLRSKRLAPVMIKEVTRRVHLENIWQAAYTAGVVLPTPITTCQYWHRSLNPKKLIDVGFSRLGARMTMSRTIKLYKLPDSTVTPGFRKMELRDVPAVTRLLRNYLSQFVVAPDFDENDVEHWLLPNENVVDSFLVESPENHEITDFCSFYTLPSSILGNQNYSILKAAYSYYNVSTKTPLTQLMNDVLIVAKQKDFDVFNALDVMHNESFLKELKFGPGDGQLHYYLYNYRIRSALKPSGLGLVLL

SEQ ID NO: 52411 - protein, 393 aa, Glycine max
  peptide (1)..(393): Ceres Seq. ID no. 14314451
MSLGKRHKFWETQPVGQYKDVGDSSLPEGPIEPPTPLSEVKQEPYNLPSAYEWTTCDMDSEEICDEVYALLKNNYVEDDENMFRFNYSKEFLSWALRVPGYYQSWHIGVRAKTSKKLVAFISGIPARIRVNEEVVKMAEINFLCVHKKLRSKRLAPVMIKEVTRRVHLENIWQAAYTAGVVLPTPITTCQYWHRSLNPKKLIDVGFSRLGARMTMSRTIKLYKLPDSTVTPGFRKMELRDVPAVTRLLRNYLSQFVVAPDFDENDVEHWLLPNENVVDSFLVESPENHEITDFCSFYTLPSSILGNQNYSILKAAYSYYNVSTKTPLTQLMNDVLIVAKQKDFDVFNALDVMHNESFLKELKFGPGDGQLHYYLYNYRIRSALKPSGLGLVLL

SEQ ID NO: 52412 - protein, 336 aa, Glycine max
  peptide (1)..(336): Ceres Seq. ID no. 14314452
MDSEEICDEVYALLKNNYVEDDENMFRFNYSKEFLSWALRVPGYYQSWHIGVRAKTSKKLVAFISGIPARIRVNEEVVKMAEINFLCVHKKLRSKRLAPVMIKEVTRRVHLENIWQAAYTAGVVLPTPITTCQYWHRSLNPKKLIDVGFSRLGARMTMSRTIKLYKLPDSTVTPGFRKMELRDVPAVTRLLRNYLSQFVVAPDFDENDVEHWLLPNENVVDSFLVESPENHEITDFCSFYTLPSSILGNQNYSILKAAYSYYNVSTKTPLTQLMNDVLIVAKQKDFDVFNALDVMHNESFLKELKFGPGDGQLHYYLYNYRIRSALKPSGLGLVLL

SEQ ID NO: 52413 - DNA, 1503 bp, Glycine max
  misc_feature (1)..(1503): Ceres Seq. ID no. 14316158
aaacccaaacacaacaacacaaagaaaaaaagagcacaaacagaccaattccaacggttgaattttttggctgaagacaccccaccgacgttagtcaaataaaacatgtcttgctccgtcgcggtttccaattcgccggtgttctctccttcttcttccctcttctgctcgaagccctccatcatctcttcttcgccggaatccctctcgctctctctctcgcatctcaaaccttccaactcttctacgacgtcgtcttgttcttcaccctctgctgctgcttcttcatcttcttctccttcttctccgtttcggcttcgccttcccaagcctcccaccgtgttctctgcttcttcttctgcttcgtctacctctccgaacggcaccgttttgaagaggaagcgacccgctaggttggacatacccgtttcctctctcacctttgcggttccgcccacgccctccgcggcggcgcgtgacttggtcgaggctgaggaagatgggtttggggtgtactgcaagagaggcaggagggagtacatggaggatcgttacaccgctgggaataatcttcgcggagaacacaaactggctttttttggcatatttgatgggcacggtggtgcaaaagctgctgaatttgctgcaaataacttgcaaaagaatgtgttagatgaagttattgtgagagatgaagatgatgttgaggaggcagtgaagcgtgggtacctgaacaccgattcggatttcctaaaggaggatctccatggtggctcttgctgtgtgacagcattgattaggaatggtaacctcgttgtgtccaacgcgggtgattgccgtgctgtcattagcagagggggtgttgctgaggccctaacatctgatcacaggccttcaagggaagatgaaagggacagaattgagagcctgggtggctatgtcgatttatgccgcggtgtttggaggatccagggatctctggctgtgtcaaggggaattggagatagacacctgaaacaatgggtgacagcagaacctgagaccaaagttctccgaattgaacctgaacatgacttgttaattttagcttcagatggattatgggataaggttggtaatcaggaagcagtagatattgctcgttcttttctcgtaggcaacaacaaatcacaaccattgctgcaggcttgtaaaaagcttgtagatttgtctgtttcacgaggctctttggatgatacaagtgtcatgctaatcaaattggagcactatatttaaagttaccttagtacaactaaggtttcaagattattgcagttgagatcgcattgaggtcaagattgcgttgcagtttgtgatttttgaacaaccttggtggtgcctgatgatggatagagagtagctgattcttttctgtatatataaatctgactaccttattggaattttttgtacccgcgtaggggagggatattaacaataacatttagtaattatttttttcat

SEQ ID NO: 52414 - protein, 389 aa, Glycine max
  peptide (1)..(389): Ceres Seq. ID no. 14316159
MSCSVAVSNSPVFSPSSSLFCSKPSIISSSPESLSLSLSHLKPSNSSTTSSCSSPSAAASSSSSPSSPFRLRLPKPPTVFSASSSASSTSPNGTVLKRKRPARLDIPVSSLTFAVPPTPSAAARDLVEAEEDGFGVYCKRGRREYMEDRYTAGNNLRGEHKLAFFGIFDGHGGAKAAEFAANNLQKNVLDEVIVRDEDDVEEAVKRGYLNTDSDFLKEDLHGGSCCVTALIRNGNLVVSNAGDCRAVISRGGVAEALTSDHRPSREDERDRIESLGGYVDLCRGVWRIQGSLAVSRGIGDRHLKQWVTAEPETKVLRIEPEHDLLILASDGLWDKVGNQEAVDIARSFLVGNNKSQPLLQACKKLVDLSVSRGSLDDTSVMLIKLEHYI

SEQ ID NO: 52415 - protein, 244 aa, Glycine max
  peptide (1)..(244): Ceres Seq. ID no. 14316160
MEDRYTAGNNLRGEHKLAFFGIFDGHGGAKAAEFAANNLQKNVLDEVIVRDEDDVEEAVKRGYLNTDSDFLKEDLHGGSCCVTALIRNGNLVVSNAGDCRAVISRGGVAEALTSDHRPSREDERDRIESLGGYVDLCRGVWRIQGSLAVSRGIGDRHLKQWVTAEPETKVLRIEPEHDLLILASDGLWDKVGNQEAVDIARSFLVGNNKSQPLLQACKKLVDLSVSRGSLDDTSVMLIKLEHYI

SEQ ID NO: 52416 - DNA, 402 bp, Glycine max
  misc_feature (1)..(402): Ceres Seq. ID no. 14306345
aaaaagtgtatatagatatcgattgtagtgagctgtatcttccatctttcaatacattgaattaggtttataatttaaaaattttactcaaggaaaatgagtggctttagagcagcaggaatgaactacattcaagtgtccaacatttgtgctaagctgctaaggcgagctctaaagccaaatttgaagacagaggctctaaaacgagacgaatctgttgtgaggttcactccatggaaagatggaaaggcaatcactgaaaaataaagagattccggaaagattaagaggacgacataaggaaacccagcagcagttcaacataaagtcacctaaaaccatcttagattgaattgttaattatttaagctgtttttactcgctattaaagagtgttaattt

SEQ ID NO: 52417 - protein, 56 aa, Glycine max
  peptide (1)..(56): Ceres Seq. ID no. 14306346
MSGFRAAGMNYIQVSNICAKLLRRALKPNLKTEALKRDESVVRFTPWKDGKAITEK

SEQ ID NO: 52418 - protein, 48 aa, Glycine max
  peptide (1)..(48): Ceres Seq. ID no. 14306347
MNYIQVSNICAKLLRRALKPNLKTEALKRDESVVRFTPWKDGKAITEK

SEQ ID NO: 52419 - protein, 36 aa, Glycine max
  peptide (1)..(36): Ceres Seq. ID no. 14306348
MERQSLKNKEIPERLRGRHKETQQQFNIKSPKTILD

SEQ ID NO: 52420 - DNA, 1320 bp, Glycine max
  misc_feature (1)..(1320): Ceres Seq. ID no. 14314526
aacccacaccacgctgttgaattgcgcaaccctgcacctgcacccgtaccgcagtgacaacatcggcgtgcataaactctaaaccctactatgtccgaagacaagtacgacgtgctcctctattacaagtacgttgaaattcccaacctcaacgacctcctcaccttctaccactccaactgctcctccctcagcctcctcggtcgtgttcgcctttcttctcacgacgtcaatgtcaccgttggcggcaacttatcctctctcaagaatcacatcgaagccctcaaagcctacagaaccttgtttcaccacactgatttcaagctcgacacttgtcatcatccattaaacaacaaagtagcctaggaatgtggattcacttccctctctattcgaatcatcgacgaacttgttactctcagttcccatccactgttaaagtcaccggatatctcaaatgtcggaaagcatctctctgccctcgacttccattcttccctccacaataccaatgacaatggaagtaggagctgttgcagccatgagatatgtaaaggatggaattaaagttgccaggttagtgatgcaacatactaaacacactttgctggtaggagagaaagcatcagaatttgctatttcaatgcgtcttccaggtcccatgaacttgagttcaccagaatctatggagaagtgggccaaatggaaagatagtcgttgtcaaccaaatttcaagaaaaatgtatcacctgcaaatagttgtggtccttatcgtccaacaaattatctggggcatcctgatgaaacatgctccagtactgtttagatgctaactagtaattccaatttacttcttgttagtcttcatagccatgatactatatcaatggctgttattggtagagtaagatataacaaaaaattgatttgtattggaacctggttagtattgaaacctgattattctattcatcggtcgaaggctgcaaggaatagacaacaatgattttttatgcttgatcaatgattcattttggagcaagttatgacattgatcaatgattttttaactcttattttttatgcttgatctatcttcccgttatagattaatcagactaatctgaaatgaagttattgttgatcatgttaataattcaaatattttttgttttgggtattgggggagagattaaggaactggttaaggattattgtagcagaaaagttttcttattatagcatttcttgagggatttgttttgttaatctataagcagacatttcttgaggaatcaattttttttttctttttgagct

SEQ ID NO: 52421 - protein, 122 aa, Glycine max
  peptide (1)..(122): Ceres Seq. ID no. 14314527
MSESISLPSTSILPSTIPMTMEVGAVAAMRYVKDGIKVARLVMQHTKHTLLVGEKASEFAISMRLPGPMNLSSPESMEKWAKWKDSRCQPNFKKNVSPANSCGPYRPTNYLGHPDETCSSTV

SEQ ID NO: 52422 - protein, 104 aa, Glycine max
  peptide (1)..(104): Ceres Seq. ID no. 14314528
MTMEVGAVAAMRYVKDGIKVARLVMQHTKHTLLVGEKASEFAISMRLPGPMNLSSPESMEKWAKWKDSRCQPNFKKNVSPANSCGPYRPTNYLGHPDETCSSTV

SEQ ID NO: 52423 - protein, 102 aa, Glycine max
  peptide (1)..(102): Ceres Seq. ID no. 14314529
MEVGAVAAMRYVKDGIKVARLVMQHTKHTLLVGEKASEFAISMRLPGPMNLSSPESMEKWAKWKDSRCQPNFKKNVSPANSCGPYRPTNYLGHPDETCSSTV

SEQ ID NO: 52424 - DNA, 1257 bp, Glycine max
  misc_feature (1)..(1257): Ceres Seq. ID no. 14314511
cttctgcgtcgaccacctcgtcatttcttcctttccattttcatttctcggtgttgttgttcttcatccatggcttttcctcagcaccacttccaacagcactaccaaacccaacagcaacaacagccacaaaacaaatccttcagaaatctgcaaacaatcgatggtcagatgtcacagcaggtggcgttttacaaccctactgatttgcaagatcaatcccaacatccaccctacattcctccatttcatgttgttgggtttgctccgggtcctgttcctcctgctgatggcagtgatggtggagttgatttgcaattgcaatggaattatggtttggagccagagaggaagagactaaaagaacaggattttttggagaacaattctcagatatcttctgttgatttccttcaaccacgatcagtgtcgactgggttgggcttgtcactagacaatactcgcctgacatccactggagactcagctttgttgtcactcatcggtgatgacatcgagcgtgagttgcagcagcaggacgcagagatagatagatttctcaaagtgcagggtggacgtttgcggcaagcagtcttggagaaggttcaggcaacacagcttcagagtgtctcactaattgaagacaaaatccttcagaaactttgcgagaaagaagctatggtagaaagcatcaacaagaggaacattgaactcgaagatcaaatggagcagttgactgtggaagctggttcgtggcaacagcgagcaagatataatgaaaatatgattgctgctctcaagttcaaccttcagcaagcgtatgtccaaagcagagatagtaaagaaggatgtggtgacagtgaggtcgacgatacagcttcttgctgcaatggccgttccctcgattttcatctgctttcaagggagaacaccgacatgaaagagatgatgacatgcaaggcttgcagagtcaatgaagtgaccatggttttgttaccttgtaagcatctttgcctctgtaaagattgtgaaagtaagcttagtttctgtcctctatgtcaatcctccaaatttatcggcatggaggtctacatgtaactgcaaagtatacttctacttgtgaaatctctaatttcatgtttttattatgtgtcctttcatgtagcttgtgtctcaaggaccatgacaccttgtaactagtttttaagatgtatttgaccataatgaatttcacttgcttgagaacagtgaattttg

SEQ ID NO: 52425 - protein, 365 aa, Glycine max
  peptide (1)..(365): Ceres Seq. ID no. 14314512
LLRRPPRHFFLSIFISRCCCSSSMAFPQHHFQQHYQTQQQQQPQNKSFRNLQTIDGQMSQQVAFYNPTDLQDQSQHPPYIPPFHVVGFAPGPVPPADGSDGGVDLQLQWNYGLEPERKRLKEQDFLENNSQISSVDFLQPRSVSTGLGLSLDNTRLTSTGDSALLSLIGDDIERELQQQDAEIDRFLKVQGGRLRQAVLEKVQATQLQSVSLIEDKILQKLCEKEAMVESINKRNIELEDQMEQLTVEAGSWQQRARYNENMIAALKFNLQQAYVQSRDSKEGCGDSEVDDTASCCNGRSLDFHLLSRENTDMKEMMTCKACRVNEVTMVLLPCKHLCLCKDCESKLSFCPLCQSSKFIGMEVYM

SEQ ID NO: 52426 - protein, 342 aa, Glycine max
  peptide (1)..(342): Ceres Seq. ID no. 14314513
MAFPQHHFQQHYQTQQQQQPQNKSFRNLQTIDGQMSQQVAFYNPTDLQDQSQHPPYIPPFHVVGFAPGPVPPADGSDGGVDLQLQWNYGLEPERKRLKEQDFLENNSQISSVDFLQPRSVSTGLGLSLDNTRLTSTGDSALLSLIGDDIERELQQQDAEIDRFLKVQGGRLRQAVLEKVQATQLQSVSLIEDKILQKLCEKEAMVESINKRNIELEDQMEQLTVEAGSWQQRARYNENMIAALKFNLQQAYVQSRDSKEGCGDSEVDDTASCCNGRSLDFHLLSRENTDMKEMMTCKACRVNEVTMVLLPCKHLCLCKDCESKLSFCPLCQSSKFIGMEVYM

SEQ ID NO: 52427 - protein, 308 aa, Glycine max
  peptide (1)..(308): Ceres Seq. ID no. 14314514
MSQQVAFYNPTDLQDQSQHPPYIPPFHVVGFAPGPVPPADGSDGGVDLQLQWNYGLEPERKRLKEQDFLENNSQISSVDFLQPRSVSTGLGLSLDNTRLTSTGDSALLSLIGDDIERELQQQDAEIDRFLKVQGGRLRQAVLEKVQATQLQSVSLIEDKILQKLCEKEAMVESINKRNIELEDQMEQLTVEAGSWQQRARYNENMIAALKFNLQQAYVQSRDSKEGCGDSEVDDTASCCNGRSLDFHLLSRENTDMKEMMTCKACRVNEVTMVLLPCKHLCLCKDCESKLSFCPLCQSSKFIGMEVYM

SEQ ID NO: 52428 - DNA, 1405 bp, Glycine max
  misc_feature (1)..(1405): Ceres Seq. ID no. 14314493
ctcttgatttctttcgtgacgcgtcatattggtttattgcaaggtcggtggcaacccaaccctacccttgtctcctttctcatatgctatatatcagcctcctccacctagcacttgctccaattcactaccaccaaacacaacacaacacagcataccgtgtttcattttctctcacacacaaacctccttcgttttcatttacttctcaggaggtataactactatttttcgctttttttttaaaaaaaaaattgattaaatcttttgccatgggaacccagattttgcgacctcaggactgcttggtagaacgaatcagggctcctccggctgacttttcccggcggaggagttccggtaattactgtaattattattactacaacaacaacaacaaccatgtcgccacttccaggtcgtgccggaagcctgttagccgacccgaccaaaggaaacgggctgctcccggttctgcccagccggtggtggcggaggccgcggcggcggtgttgaagagaccgagccgtgatgattcaagggtggccaggagccaaagtttggagatgactacgattctacgtaggggccagtcgcttgattcggctgtgaagagcgaggtgtacgccggatctgcgttcgcggtgtctccgtcgccggaagcgcttcctctgccgtctttttcgacgaagaagcaggactcagtggcggttgatgactccgccacgcgagatctgaggcgtctgctccgcctcgaatgaaaacgagccgggttgcagtcccgggtttctgggtcgggttggacccgacaaattatccatattcccctctctctctcaccttattattactatctagaatcttctctttctcttatcctctccgtaaccgttaccgttacgcccgtcccggtttgaagttctgacccgactgtgatttttttaaacggaagggtggatgatctgatctaaactagggggtgaaatgtttaaaggtttggagtagcgtatgggccgtgaggctatgattatgtatcatgtaacttgtaacatatttcttgggttgtttattaaaacattaaaataaaatttagggtttatatacttgtaacactaataccaatcagttcaaaggggtgggaagaaatgaggaagaagcataagaaggaggaaatgtaagttagttttgtaaaatccagcaagtgtttgaatttggtgtaggttgggctttcagctatgaacagtttgatgtgatcaagtatagttcgtgctgtgttgtgaaacacggtgatcaacaagtgaatggttctggttcgtgctctgttgtgaatttgccagcttctctttgtacgctattttttgtaaagtggagcaaattattaacttgaggagatttgatcagattt

SEQ ID NO: 52429 - protein, 162 aa, Glycine max
  peptide (1)..(162): Ceres Seq. ID no. 14314494
MGTQILRPQDCLVERIRAPPADFSRRRSSGNYCNYYYYNNNNNHVATSRSCRKPVSRPDQRKRAAPGSAQPVVAEAAAAVLKRPSRDDSRVARSQSLEMTTILRRGQSLDSAVKSEVYAGSAFAVSPSPEALPLPSFSTKKQDSVAVDDSATRDLRRLLRLE

SEQ ID NO: 52430 - DNA, 918 bp, Glycine max
  misc_feature (1)..(918): Ceres Seq. ID no. 14305780
caaaattaattcaataggattacttttagaaaaacatctggaagtgggacagcttatacttgattaaattaagagctattagaaaatcattttgaatcaaaacaggagaaccactttcatcgaagctggtagctaagaagcatgcttgctattctgttagtgtttgaattatctgtttagatggatgagactatctatataatgcttaggaattctttttgtgtttgattcttatgcctttttctattatgtgtatgttttttctgaaattttaagcctcattataggtagggaccccaaagacacaccggcgatacctggctcgtgacgagggaacttatggtccgatgccgcgcagaatcccaaaagggttattgggaatgccattcaataccacaggcatagatggtctttactgtgttggtgatagctgcttccctggacaaggtgttattgctgtagctttctcaggagttatgtgtgctcatcgagtagctgcagatattgggctggagaagaagtcacctgtgttggattccatgctgcttcggttgcttggttggttaaggacaatggcatgagatatataggagcatttgttggatgcagtatcatcatcccttttgcataagaagctcaactttcattacagcattggttcactgcagatttcttccacaattttcaagagtcaccaaattgtcacagtatatagatgctgttagttgcaatttgatccatgcagtggcagagcttggaaaaaataattgaaggggccaaagtttgaagtgtataaatttaatgcaataattttgataatatcatgtcttataggtgttttctttccccttgctgaaggatatcatgtcttacaggtgatttaagtaattgatggtaatatttaaatattaaatattc

SEQ ID NO: 52431 - protein, 77 aa, Glycine max
  peptide (1)..(77): Ceres Seq. ID no. 14305781
MPRRIPKGLLGMPFNTTGIDGLYCVGDSCFPGQGVIAVAFSGVMCAHRVAADIGLEKKSPVLDSMLLRLLGWLRTMA

SEQ ID NO: 52432 - protein, 66 aa, Glycine max
  peptide (1)..(66): Ceres Seq. ID no. 14305782
MPFNTTGIDGLYCVGDSCFPGQGVIAVAFSGVMCAHRVAADIGLEKKSPVLDSMLLRLLGWLRTMA

SEQ ID NO: 52433 - protein, 55 aa, Glycine max
  peptide (1)..(55): Ceres Seq. ID no. 14305783
MQYHHPFCIRSSTFITALVHCRFLPQFSRVTKLSQYIDAVSCNLIHAVAELGKNN

SEQ ID NO: 52434 - DNA, 1336 bp, Glycine max
  misc_feature (1)..(1336): Ceres Seq. ID no. 14314534
actgaggtctagataataaaataaataaataagtaagccttattatttttttttttttgggttcaaaataaaagaaaaaaaaaacttatttatttggcgttcgaattggtttctcactcatcgacatttccgttttgcccccattggccaattcggccactcttctctgaaaaagcctccagcctccttcttcatccatcttccctctccaccaaaatcctccgcggttcgttccgttattcatcgaaccgttctctcaagtctcgtacttggcttagttcacaactcgaaacttcaccgaacgcattccattcaccaattcgtccaagtctcgtatcaatcagtcaatccgtctcgtggaggttggagagatcggaggggaaaggatccatggcgcatcgagtggaccacgagtatgactatctgttcaagatcgttttgatcggagactcaggtgtaggaaaatctaacatcctctccaggttcactcgaaacgagttctgtttagagtccaaatccactatcggagttgagttcgccaccagaactcttcaggtagagggaaagactgtgaaagcacagatctgggacacagcaggtcaagagcggtaccgtgccattaccagtgcttattacagaggagctgttggagctctactcgtatatgacataaccaagaggcaaacctttgacaatgtccaaaggtggttgcgtgaactgagggaccatgcagactctaatatagttatcatgatggctggaaataaatctgatttgagccatcttagagcggtttcagaggatgatggtcaagcattggcagagagggaaggtctctcgtttcttgagacatctgcactggaagcaaccaacattgagaaggcattccaaaccattttgacagagatttatcatattgttagcaaaaaggcacttgcggctcaggaagcagctgttggtaccacacttcctggtcaaggtaccaccatcaatgttggggatgcatctgggaatacaaagagaggctgctgctccacttaatgcgacatttgaggaaaaagcgatggtagcagatagccagatagtattttttttcccccaattctgttttgcccctttctcttttcatcttttttttcctcctttctttatatgggtgagagagacacatgtagagtacatttacttcattgagttgcaaaaacgaagtctgtgaaatttataaaacaatagtcttgctagttcctttgaatttatctcttccttgatgttatagtttcgcatgaattaatgtaatattggaacgaacagatattgatgatatattgtcgttgct

SEQ ID NO: 52435 - protein, 216 aa, Glycine max
  peptide (1)..(216): Ceres Seq. ID no. 14314535
MAHRVDHEYDYLFKIVLIGDSGVGKSNILSRFTRNEFCLESKSTIGVEFATRTLQVEGKTVKAQIWDTAGQERYRAITSAYYRGAVGALLVYDITKRQTFDNVQRWLRELRDHADSNIVIMMAGNKSDLSHLRAVSEDDGQALAEREGLSFLETSALEATNIEKAFQTILTEIYHIVSKKALAAQEAAVGTTLPGQGTTINVGDASGNTKRGCCST

SEQ ID NO: 52436 - DNA, 1973 bp, Glycine max
  misc_feature (1)..(1973): Ceres Seq. ID no. 14314536
actaaactttttacttttgtgccaaccacaccttaaaaaaccagaaaagctgaaacgtgtctgcttgaagctttttatgccacttgtcttctctcctttttccaaattccctttatgcttctttcctgctccaatgatcgcagcaagatttcgaccttcttttctgcaaaatactgtcagctcaaactctttgtgggttttcggctgaaccccttcatatatggccactgaagcacatcgttttcccaagattaataatgaccaaggctcttctagtatacctcataacccaattcaaaaggatgtagagtcatccgaaataactgaggaactccctagtagacatgcacatggtagaaggaaaaaccttatcttggagataccaacaagaacactagatgaaacaagagaggaatttttcagaacaaaccaacctccaactccatctcctagaagccaaatcaatgagttccaaggtcctttgtcaaccaaaaatattaaatttcacaagataagttcagatgttgaagaggcttccatcccagcacttgacggttcccccccggagccactgcaagagcctatgatttcaagaacattatcacctaatgagatgaaaatatcatccttacctgtcaccccaattgctcagtcaaatctggagtctggacatggagggaacattgcctatccagcaacacatgttaagaaaggactgcaactaccaatgcatcgttcccgttcagttcccgtgcttactgaagatgacagcacatatgtaggtgccatgtttcgtattgttcctaccacaccacggttgacaaagagcattgccacaacatctatgaaatctccgcctgacgataccgttgaaaatgaggatggggaagatattcctgaagaagaagccgtctgcagaatttgtttgattgaattgggagaaggttctgatacacttaaaatggagtgcagctgcaaaggtgaacttgcactggcacaccaagagtgtgcagttaaatggtttagcattaaaggcaacagaacatgtgatgtgtgcaagcaggaagttcagaaccttcctgtcactcttctacgagttttaaatggccaaacactttacttgacaaggagtagaagccaacaatacagggtttggcaaaatattcccattcttgtgattatcaacatgctggcatacttttgtttccttgagcagctacttgtttcaagtatgggatctggtgctgttgccatttctctccctttttcatgtatactaggtctacttgcaagcatgacatccacaataatggtgacgtgtgaacatgtttgggtttatgcaattgcccagtttgttatggtggttctcgctggacgtcttttctattcactgcttaataagcaagccgttctatctatcctacttgctacatttactgggtttggagctgtgatgtgtggagcttatattcttattgagtttttgaaatggagaagacgatggcttggttcccaagaggtggtactgcctcattaatcacattcatcagcgaccactcaccaagctttgactgattctcaacaccatggaaataatgtgagagacactgcagtgcatgtgagtgtgagttgacatagaatatacttttatattgatggtgtttaattggctgtatataaaagtataatgtatggactatactttaagcacattacacccttttttgtctccgtggtactcgcgagaatacacaagtatcgcattccttgtattgagaccgctgactcgaagccagttgtattgtaactgtgaggccatattataatattggacttgcaagaaacttctgagcaaatcctgtaggtgaaaagataaagaaaggttgtttttgtacaattataggggaacaaaaagggattctgtactgtaaagatggttgaagagatgaatacacatgtcttattttggttcc

SEQ ID NO: 52437 - protein, 438 aa, Glycine max
  peptide (1)..(438): Ceres Seq. ID no. 14314537
MATEAHRFPKINNDQGSSSIPHNPIQKDVESSEITEELPSRHAHGRRKNLILEIPTRTLDETREEFFRTNQPPTPSPRSQINEFQGPLSTKNIKFHKISSDVEEASIPALDGSPPEPLQEPMISRTLSPNEMKISSLPVTPIAQSNLESGHGGNIAYPATHVKKGLQLPMHRSRSVPVLTEDDSTYVGAMFRIVPTTPRLTKSIATTSMKSPPDDTVENEDGEDIPEEEAVCRICLIELGEGSDTLKMECSCKGELALAHQECAVKWFSIKGNRTCDVCKQEVQNLPVTLLRVLNGQTLYLTRSRSQQYRVWQNIPILVIINMLAYFCFLEQLLVSSMGSGAVAISLPFSCILGLLASMTSTIMVTCEHVWVYAIAQFVMVVLAGRLFYSLLNKQAVLSILLATFTGFGAVMCGAYILIEFLKWRRRWLGSQEVVLPH

SEQ ID NO: 52438 - protein, 317 aa, Glycine max
  peptide (1)..(317): Ceres Seq. ID no. 14314538
MISRTLSPNEMKISSLPVTPIAQSNLESGHGGNIAYPATHVKKGLQLPMHRSRSVPVLTEDDSTYVGAMFRIVPTTPRLTKSIATTSMKSPPDDTVENEDGEDIPEEEAVCRICLIELGEGSDTLKMECSCKGELALAHQECAVKWFSIKGNRTCDVCKQEVQNLPVTLLRVLNGQTLYLTRSRSQQYRVWQNIPILVIINMLAYFCFLEQLLVSSMGSGAVAISLPFSCILGLLASMTSTIMVTCEHVWVYAIAQFVMVVLAGRLFYSLLNKQAVLSILLATFTGFGAVMCGAYILIEFLKWRRRWLGSQEVVLPH

SEQ ID NO: 52439 - protein, 307 aa, Glycine max
  peptide (1)..(307): Ceres Seq. ID no. 14314539
MKISSLPVTPIAQSNLESGHGGNIAYPATHVKKGLQLPMHRSRSVPVLTEDDSTYVGAMFRIVPTTPRLTKSIATTSMKSPPDDTVENEDGEDIPEEEAVCRICLIELGEGSDTLKMECSCKGELALAHQECAVKWFSIKGNRTCDVCKQEVQNLPVTLLRVLNGQTLYLTRSRSQQYRVWQNIPILVIINMLAYFCFLEQLLVSSMGSGAVAISLPFSCILGLLASMTSTIMVTCEHVWVYAIAQFVMVVLAGRLFYSLLNKQAVLSILLATFTGFGAVMCGAYILIEFLKWRRRWLGSQEVVLPH

SEQ ID NO: 52440 - DNA, 1397 bp, Glycine max
  misc_feature (1)..(1397): Ceres Seq. ID no. 14314540
atgttttaaatttctggaattttcttttccttggtgaggcttggcagtgaaaatagattgggatgcttgaagcccctagggaaaagtaatatccttctctgcgataagaggaagcccaccacctcagaaaacagaaaacagagtgagtgagtgtgttgtgtaatatggataaaagctgtcatccctctagcaatactagtataagcacatcctctgctgccaaccccaacaacaatagcagggatcaatatcttcgccatctcaacaagctctctcaaaagatctccaaacccatcattaagaaacccgtctttgatcctcctcaggcccaagtcccaaacaatcaggtgcagcatcagccgccggtgtacaacatcaacaagaacgacttccgtgatgtggttcagaaactgacgggctcacctgcgcacgaccgcatctcaacgccgcctcccattcagccacccaagcccccgagctctcgccttcagaggattcgccctcctcccctgcctcaaattactaaccgcccacccccgctccttaaccccaccaccctcccccgccctcaacaactccctaacgccgttaccttcaacaacaacttctccgttttttcgagaccccccgcgccgttatctcctctgccgccgttccccaccgtccacgcccccgctgagtcacctatctccgcctacatgcgcgatctgcagaccctcgtcgatgcaaacgccaagcacttttcaggcttttctcccttgcctccaccgcctctggttcaacctcaacctcaacctcaacctcagcctcagcctcagcaagaacaacagccacagcagcagcagcaagggatggttccgtcgcaagcgccgtcgtcgtttcagatgccgtcttcgcctgtgccgtttgggtgtttgaattcgcagctggcgtcctaccctctgctgtcgccggggcttctgttttccccaacttctggtcagttagggtttccgcagcttccgctttcgcccactgtgccggtccctagccctcgctggaagggaatttgagaggggtgaggtgagtttggtcacagacatgtcaatttagctcagctttttttagggttttttaaattttgttgttgttgttgttgttgtgttacctgtacatggtgctggtgctagggggaattcaatttgcggtggttggactcgaagtggtccgctgctgcttagtttaattctgtaaatgggatatcaaagacatcaaaaagggtacaattttgcattggttcttgccatgctgtttggggatatgcaaaaacaaaattagatgttatacaattatagtgggattattatcatcattatcattatgctgttttcaatataatcaaaatctttattgtcttc

SEQ ID NO: 52441 - protein, 295 aa, Glycine max
  peptide (1)..(295): Ceres Seq. ID no. 14314541
MDKSCHPSSNTSISTSSAANPNNNSRDQYLRHLNKLSQKISKPIIKKPVFDPPQAQVPNNQVQHQPPVYNINKNDFRDVVQKLTGSPAHDRISTPPPIQPPKPPSSRLQRIRPPPLPQITNRPPPLLNPTTLPRPQQLPNAVTFNNNFSVFSRPPAPLSPLPPFPTVHAPAESPISAYMRDLQTLVDANAKHFSGFSPLPPPPLVQPQPQPQPQPQPQQEQQPQQQQQGMVPSQAPSSFQMPSSPVPFGCLNSQLASYPLLSPGLLFSPTSGQLGFPQLPLSPTVPVPSPRWKGI

SEQ ID NO: 52442 - DNA, 1150 bp, Glycine max
  misc_feature (1)..(1150): Ceres Seq. ID no. 15179676
ctacttagagcagccaaaccttacgcattccatttctctctattcgctctctttcaatcacaacaacatggccgaacgtggaggcggagaccgtgccggtttcggtcgcggctttggcggtcgtggacgcggcggcgacaggggacgagggcggcgcagggcaggagggcgccgcgacgaggaggagaagtgggtcccagtgacgaagctggggcgcctggtgaaggaggggaaaattcggagcctggagcagatctacctacactcgctcccaatcaaggagcaccaaatcattgacaccctcgtggggcccaccctgaaggacgaggtgatgaagatcatgcccgtccagaagcagacccgcgccggtcagcgaacccgcttcaaggccttcgtggtggtcggcgacaacaacggccacgtcggtctcggagtgaagtgcagcaaggaagtcgccaccgccatacgcggcgccatcattctcgcaaagctctctgttattcctgtgaggagaggctattggggtaacaagatcggaaagccccacaccgttccctgcaaggttaccggaaagtgtggctccgtcaccgtccgcatggtccccgcccctcgtgggtccggaatcgtcgccgctagggtccccaagaaggtcttgcagttcgctggaatcgatgacgtcttcacttcctccaggggttccaccaaaaccctcggaaatttcgtcaaggctacttttgactgtttgctgaaaacctacggttttctaacacctgaattctggaaggagactcggttctccaaatcaccattccaagagtacactgatctattggcaaagccaacagggaaggcccttatcctcgaggaggaaagggtggaggcttgagttagcagaagcagcagcagttttgatgttatcggatgattgtgcctcgtcttaagcatgctaggacccagtaattatatgttttgctaccttttgttatttcattttctattgaaggacatattatatatctccatgctttttgttttttctcaaatttagttgaatggatattatttactgaactttcaaacaggggtttattaaatttttcatgctgtcccaactaaatcataattcaaagaaaagaaaatgtgtttctgc

SEQ ID NO: 52443 - protein, 294 aa, Glycine max
  peptide (1)..(294): Ceres Seq. ID no. 15179677
YLEQPNLTHSISLYSLSFNHNNMAERGGGDRAGFGRGFGGRGRGGDRGRGRRRAGGRRDEEEKWVPVTKLGRLVKEGKIRSLEQIYLHSLPIKEHQIIDTLVGPTLKDEVMKIMPVQKQTRAGQRTRFKAFVVVGDNNGHVGLGVKCSKEVATAIRGAIILAKLSVIPVRRGYWGNKIGKPHTVPCKVTGKCGSVTVRMVPAPRGSGIVAARVPKKVLQFAGIDDVFTSSRGSTKTLGNFVKATFDCLLKTYGFLTPEFWKETRFSKSPFQEYTDLLAKPTGKALILEEERVEA

SEQ ID NO: 52444 - protein, 272 aa, Glycine max
  peptide (1)..(272): Ceres Seq. ID no. 15179678
MAERGGGDRAGFGRGFGGRGRGGDRGRGRRRAGGRRDEEEKWVPVTKLGRLVKEGKIRSLEQIYLHSLPIKEHQIIDTLVGPTLKDEVMKIMPVQKQTRAGQRTRFKAFVVVGDNNGHVGLGVKCSKEVATAIRGAIILAKLSVIPVRRGYWGNKIGKPHTVPCKVTGKCGSVTVRMVPAPRGSGIVAARVPKKVLQFAGIDDVFTSSRGSTKTLGNFVKATFDCLLKTYGFLTPEFWKETRFSKSPFQEYTDLLAKPTGKALILEEERVEA

SEQ ID NO: 52445 - protein, 184 aa, Glycine max
  peptide (1)..(184): Ceres Seq. ID no. 15179679
MKIMPVQKQTRAGQRTRFKAFVVVGDNNGHVGLGVKCSKEVATAIRGAIILAKLSVIPVRRGYWGNKIGKPHTVPCKVTGKCGSVTVRMVPAPRGSGIVAARVPKKVLQFAGIDDVFTSSRGSTKTLGNFVKATFDCLLKTYGFLTPEFWKETRFSKSPFQEYTDLLAKPTGKALILEEERVEA

SEQ ID NO: 52446 - DNA, 1336 bp, Glycine max
  misc_feature (1)..(1336): Ceres Seq. ID no. 14316064
attttcaatttcattcattcatcactctaaaaatttcgcttccaattattttctcccaccctcccaatttcccctccccctttttcgctgaacccgctccaattctcaaatctcaattcaaaagaatcaaaacccaaacttcaaattcgtttcccttacaacactttcccttctcagtcaattcctccttccaccactttccctcccttcttccttcctttcaatgttccaacctaacaaccccaaaatggattcctccaccacattcctcaacgaccttcctcccctcaagagactaagactcttgcaacaacaacagcaacaaaaagaagaacatcagtattatgactcttcttcacctttacccgctaaaaaacgcaaggagtctcgaaccctatctccaccctctcccaccaccaccaaaaccgtttataactattccctccccgccaagaaaagagtgtgggccctacaaccccagagcccaccctcaaatgacgtcgtccccgccttcgacctcaatgtggaatacacacccagccccaacaaccacggagacttcgaagaagaccactccgaggacgaggacggggttctatgctgtgtgtgccagagcacggacggcgaccctgcggatccaatagtcttctgcgacgggtgcgacctcatggtgcacgcctcctgctacggcactcccctgtccaagtccatcccggatggagactggttctgcgaacgctgctgtttccgtttcgagaagaatgatgttggcaacatcaattgcaatgcttgcgtgctgtgcccttccaccgagggggcgatgaagcggaccaccgtcgaggaggaaggtggcgcgacgtgggcacacgtggtgtgcgccctgttcgtgccggaagtgttctttcttgaccccgaagggagggaggggatcgacttctccaaggttccaaagaagaggtgggaggagaggtgctatctttgcggatcctgcgaagggtgtgctttggtgtgttctgagcccaagtgcgggttggggtttcatgtcacttgtgcgctgaaggaggaactttggattgagtacagggaagggaagaagggtggtaccatagttgccggcttctgcaaaaaccacacccaagtttgggaaaagcaatccgggaagtacaaaattgttgctgttgaagataaaaagtagcaaaagtcttggttttttttttttttgaaactgttagttaattaaccatcctagggaaattcaaagttagttacttttgaagatcatttgaatcagttgtaattttactcttcatagctgatagcttttatgctttgtttt

SEQ ID NO: 52447 - protein, 323 aa, Glycine max
  peptide (1)..(323): Ceres Seq. ID no. 14316065
MFQPNNPKMDSSTTFLNDLPPLKRLRLLQQQQQQKEEHQYYDSSSPLPAKKRKESRTLSPPSPTTTKTVYNYSLPAKKRVWALQPQSPPSNDVVPAFDLNVEYTPSPNNHGDFEEDHSEDEDGVLCCVCQSTDGDPADPIVFCDGCDLMVHASCYGTPLSKSIPDGDWFCERCCFRFEKNDVGNINCNACVLCPSTEGAMKRTTVEEEGGATWAHVVCALFVPEVFFLDPEGREGIDFSKVPKKRWEERCYLCGSCEGCALVCSEPKCGLGFHVTCALKEELWIEYREGKKGGTIVAGFCKNHTQVWEKQSGKYKIVAVEDKK

SEQ ID NO: 52448 - protein, 315 aa, Glycine max
  peptide (1)..(315): Ceres Seq. ID no. 14316066
MDSSTTFLNDLPPLKRLRLLQQQQQQKEEHQYYDSSSPLPAKKRKESRTLSPPSPTTTKTVYNYSLPAKKRVWALQPQSPPSNDVVPAFDLNVEYTPSPNNHGDFEEDHSEDEDGVLCCVCQSTDGDPADPIVFCDGCDLMVHASCYGTPLSKSIPDGDWFCERCCFRFEKNDVGNINCNACVLCPSTEGAMKRTTVEEEGGATWAHVVCALFVPEVFFLDPEGREGIDFSKVPKKRWEERCYLCGSCEGCALVCSEPKCGLGFHVTCALKEELWIEYREGKKGGTIVAGFCKNHTQVWEKQSGKYKIVAVEDKK

SEQ ID NO: 52449 - protein, 175 aa, Glycine max
  peptide (1)..(175): Ceres Seq. ID no. 14316067
MVHASCYGTPLSKSIPDGDWFCERCCFRFEKNDVGNINCNACVLCPSTEGAMKRTTVEEEGGATWAHVVCALFVPEVFFLDPEGREGIDFSKVPKKRWEERCYLCGSCEGCALVCSEPKCGLGFHVTCALKEELWIEYREGKKGGTIVAGFCKNHTQVWEKQSGKYKIVAVEDKK

SEQ ID NO: 52450 - DNA, 1419 bp, Glycine max
  misc_feature (1)..(1419): Ceres Seq. ID no. 14316056
atgaaaatgtctctagccgaatatctctcatatgtccctgatgatcttattgttgaaattctatcacggcttccagtgaaagatcttatgcgttttaggtgcgtttgcaaaacctggaaatccatcatctttgatccaagttttgtgaaaaaacatcttgaaagatcttcaaaaaaaatccatctcataataacccgagaagaagtcctctatgatggttttgactatgactatggtgatgcttatgccataccctactccataaatcaattattcgagaatccatcatcagatgttgatgaagatgactactatcaattaaatggttattggatcattggctcatgcaatggattggtttgtttgggtggttatcatggtgaagaagacacaatttacgaatattgggtccaattttggaacccagctacaaggatgaaatcaaggaaatctccgcgcttacatgtcaatccatgttgtcaaggattcgacccatcaaattctataggctttggatttctttatgatgatttgagtgccatttacaaggtggtgtcagtcctttcaaattgtagatccaagaaaacagaggtatgggtttacaacttaggtggcaattgttggacaaatatctttagttgcccaaatttccccattcttcgtcaaaatggaagacttgtgaatggaactattaattggctagctatcgacatgtcaagttctcattatgaagagcgaaatgatattatcgatccgttagtaattttttcagttgatttacaaaaggacacatataaatatttattgttgcctaaaggtcttgatcaaatcccagataatgatcaattgagaattgtggaattaagggatcgtttgtgcctttatcatgatcgcaatgcaacccattttgttgtttggcaaatgaaggagtttggagtagagaagtcttggactttgttgatgaaggtcacttataatcatctccagataccataccctccagatcgtccattacttccattctgtatatcagaaaatggtgaagtcttgatgttggtaaacaatgatgtgttgaatatgactttttataatcggagaaataaccgagtagaagttattccaattccaaacaacaatgcttggtggcaagctaccaattatattccaagcttggtttcgccttttcagaattaatctcctatgcaacaatttgcttgtttgaatatatctcaagtaatgacccaattgatcatccaacgactctaccaacccattgaagaagttaattgatattgatgttgttatgggtttatatttatgagacatagttagtatcagaaaaatattttatttattccaatatgttgattgactttgccttgctatattttatggacctcataataaaaagactttatt

SEQ ID NO: 52451 - protein, 397 aa, Glycine max
  peptide (1)..(397): Ceres Seq. ID no. 14316057
MKMSLAEYLSYVPDDLIVEILSRLPVKDLMRFRCVCKTWKSIIFDPSFVKKHLERSSKKIHLIITREEVLYDGFDYDYGDAYAIPYSINQLFENPSSDVDEDDYYQLNGYWIIGSCNGLVCLGGYHGEEDTIYEYWVQFWNPATRMKSRKSPRLHVNPCCQGFDPSNSIGFGFLYDDLSAIYKVVSVLSNCRSKKTEVWVYNLGGNCWTNIFSCPNFPILRQNGRLVNGTINWLAIDMSSSHYEERNDIIDPLVIFSVDLQKDTYKYLLLPKGLDQIPDNDQLRIVELRDRLCLYHDRNATHFVVWQMKEFGVEKSWTLLMKVTYNHLQIPYPPDRPLLPFCISENGEVLMLVNNDVLNMTFYNRRNNRVEVIPIPNNNAWWQATNYIPSLVSPFQN

SEQ ID NO: 52452 - protein, 395 aa, Glycine max
  peptide (1)..(395): Ceres Seq. ID no. 14316058
MSLAEYLSYVPDDLIVEILSRLPVKDLMRFRCVCKTWKSIIFDPSFVKKHLERSSKKIHLIITREEVLYDGFDYDYGDAYAIPYSINQLFENPSSDVDEDDYYQLNGYWIIGSCNGLVCLGGYHGEEDTIYEYWVQFWNPATRMKSRKSPRLHVNPCCQGFDPSNSIGFGFLYDDLSAIYKVVSVLSNCRSKKTEVWVYNLGGNCWTNIFSCPNFPILRQNGRLVNGTINWLAIDMSSSHYEERNDIIDPLVIFSVDLQKDTYKYLLLPKGLDQIPDNDQLRIVELRDRLCLYHDRNATHFVVWQMKEFGVEKSWTLLMKVTYNHLQIPYPPDRPLLPFCISENGEVLMLVNNDVLNMTFYNRRNNRVEVIPIPNNNAWWQATNYIPSLVSPFQN

SEQ ID NO: 52453 - protein, 368 aa, Glycine max
  peptide (1)..(368): Ceres Seq. ID no. 14316059
MRFRCVCKTWKSIIFDPSFVKKHLERSSKKIHLIITREEVLYDGFDYDYGDAYAIPYSINQLFENPSSDVDEDDYYQLNGYWIIGSCNGLVCLGGYHGEEDTIYEYWVQFWNPATRMKSRKSPRLHVNPCCQGFDPSNSIGFGFLYDDLSAIYKVVSVLSNCRSKKTEVWVYNLGGNCWTNIFSCPNFPILRQNGRLVNGTINWLAIDMSSSHYEERNDIIDPLVIFSVDLQKDTYKYLLLPKGLDQIPDNDQLRIVELRDRLCLYHDRNATHFVVWQMKEFGVEKSWTLLMKVTYNHLQIPYPPDRPLLPFCISENGEVLMLVNNDVLNMTFYNRRNNRVEVIPIPNNNAWWQATNYIPSLVSPFQN

SEQ ID NO: 52454 - DNA, 1603 bp, Glycine max
  misc_feature (1)..(1603): Ceres Seq. ID no. 14316107
taaacattggcattgccatggaagccaagctctggaactggaaccctctccttcttcctcctcgtttttcttcactcaaacatgcttttccatcaacaactactcgcctcgtagctcacaattcagtctcagaaaccgttcccattcataaggaaaaggaacaaaccctaccttctgtcaaacctacttactcccccactcctcccaatcgaggccttcgaacccctcacagcgggtaccattttgatgggactactcgcaaattcttcgagggttggtacttcaaagtctccattcccgaacggaagcagagcttttgctttatgtataccgtcgagagtcccctgtttcgtaaaccattgacgcagctcgaactggcccaatacgggcccaggtttactggtgtcggggcccaaattctcggtgctgatgacaaatatgtttgccaacactctccccaatcacattttttctggggaagcaggcatgaactaatgttggggaacacgttcgagcccaaccaaaattctaaacctccaaacaaggaggttcctcctcaggaatttaatgatagggtgctggaaggttttcaagtcacccccctttggcatcaaggttttattcgcgatgatggaaggtcaaattatgtagagacggtaaagacagctcgttgggagtatagtacacgtcctgtatatggttggggtgatgttggttctacgcagaagtctactgctgggtggcttgcagcttttcctgtttttgaaccacattggcaaatatgcatggctggtggactgtcaacaggttggatagagtgggatggcgagaggattgagtttgataatgctccatcttattcagaaaagaactggggtggaggattcccaagaaaatggttttgggttcaatgtaatgtttttgaaggtgctagtggagaaattgctcttacagcagctggtggattgaggcaaattcctggaataaccgagacctttgaaaatgctgcattgattggaattcattatggtggaaatttttatgaatttgtgccatggaatggtgttgttaactgggaagttactacttggggttattggtttatgtcagcagacaatggcaaatatgtggttgaattagaagcaacaacagaggatccaggtacaacattgcgtgctccaacagcagaagctggctttgcccctgcatgtaaagatacatgctttggaaatctaaaattacaaatgtgggaacgaagatatgatggcagcaaggggaagatcatattggacgtttcaagtaacatggcagcactagaagttggaggaggtccatggtttaacacttggaagggcaagacatcaactccagcagcccttagccgtgtccttgaattacccatagacgtagagggcattttcaatcctgttcctctatttaaaccgcctggcctgtagtcatttggtttggtattatcttcctttttttttagtttttaatctaatcatgcggcataatgcatggtttaatgttataaactttgtcatagtgcatgaaaggattcagagtttcaccataaggatagaaagggattcttgattac

SEQ ID NO: 52455 - protein, 484 aa, Glycine max
  peptide (1)..(484): Ceres Seq. ID no. 14316108
NIGIAMEAKLWNWNPLLLPPRFSSLKHAFPSTTTRLVAHNSVSETVPIHKEKEQTLPSVKPTYSPTPPNRGLRTPHSGYHFDGTTRKFFEGWYFKVSIPERKQSFCFMYTVESPLFRKPLTQLELAQYGPRFTGVGAQILGADDKYVCQHSPQSHFFWGSRHELMLGNTFEPNQNSKPPNKEVPPQEFNDRVLEGFQVTPLWHQGFIRDDGRSNYVETVKTARWEYSTRPVYGWGDVGSTQKSTAGWLAAFPVFEPHWQICMAGGLSTGWIEWDGERIEFDNAPSYSEKNWGGGFPRKWFWVQCNVFEGASGEIALTAAGGLRQIPGITETFENAALIGIHYGGNFYEFVPWNGVVNWEVTTWGYWFMSADNGKYVVELEATTEDPGTTLRAPTAEAGFAPACKDTCFGNLKLQMWERRYDGSKGKIILDVSSNMAALEVGGGPWFNTWKGKTSTPAALSRVLELPIDVEGIFNPVPLFKPPGL

SEQ ID NO: 52456 - protein, 479 aa, Glycine max
  peptide (1)..(479): Ceres Seq. ID no. 14316109
MEAKLWNWNPLLLPPRFSSLKHAFPSTTTRLVAHNSVSETVPIHKEKEQTLPSVKPTYSPTPPNRGLRTPHSGYHFDGTTRKFFEGWYFKVSIPERKQSFCFMYTVESPLFRKPLTQLELAQYGPRFTGVGAQILGADDKYVCQHSPQSHFFWGSRHELMLGNTFEPNQNSKPPNKEVPPQEFNDRVLEGFQVTPLWHQGFIRDDGRSNYVETVKTARWEYSTRPVYGWGDVGSTQKSTAGWLAAFPVFEPHWQICMAGGLSTGWIEWDGERIEFDNAPSYSEKNWGGGFPRKWFWVQCNVFEGASGEIALTAAGGLRQIPGITETFENAALIGIHYGGNFYEFVPWNGVVNWEVTTWGYWFMSADNGKYVVELEATTEDPGTTLRAPTAEAGFAPACKDTCFGNLKLQMWERRYDGSKGKIILDVSSNMAALEVGGGPWFNTWKGKTSTPAALSRVLELPIDVEGIFNPVPLFKPPGL

SEQ ID NO: 52457 - protein, 377 aa, Glycine max
  peptide (1)..(377): Ceres Seq. ID no. 14316110
MYTVESPLFRKPLTQLELAQYGPRFTGVGAQILGADDKYVCQHSPQSHFFWGSRHELMLGNTFEPNQNSKPPNKEVPPQEFNDRVLEGFQVTPLWHQGFIRDDGRSNYVETVKTARWEYSTRPVYGWGDVGSTQKSTAGWLAAFPVFEPHWQICMAGGLSTGWIEWDGERIEFDNAPSYSEKNWGGGFPRKWFWVQCNVFEGASGEIALTAAGGLRQIPGITETFENAALIGIHYGGNFYEFVPWNGVVNWEVTTWGYWFMSADNGKYVVELEATTEDPGTTLRAPTAEAGFAPACKDTCFGNLKLQMWERRYDGSKGKIILDVSSNMAALEVGGGPWFNTWKGKTSTPAALSRVLELPIDVEGIFNPVPLFKPPGL

SEQ ID NO: 52458 - DNA, 1160 bp, Glycine max
  misc_feature (1)..(1160): Ceres Seq. ID no. 14305750
atcaaagtctctcaatcttatcaaccagccaaccaaccaaccaaccaaccaacgatggattccgagatcgccttcgactactctccattgctcaaaatctacaagagtggccgcatcgagcgcctcatgggagaaacggccgtcccaccgtctttaaccccacaaaacggcgtcatttcaaaggacgtcgtttattcacccgacgacaacctctccgtccgcgtttacctcccagagaaagctgccgacaccgatgagaaactccctctcctcgtctacttccacggaggaggcttcatcatcgaaacagctttctcaccgacttaccacaatttcctcacggcggccgtctctgcgtccgactgcatagcggtgtcggtggattaccggcgtgcaccggagcatccgcttccgatctctttcgatgactcgtggacgtctctcaaatgggtattcacccatatcgccggatctggaccggagagctggttaaacaaacacgccgacttcagcaaagtgttcctcgccggagacagcgccggcgcgaacatcgctcatcacatggcgatgagagctgcgaaagagaagctcagtcccgagttaagcgactcaggaatcttcgggatcatcttggttcatccttacttctggtcgaaagcacctgtcgacgacaaggagacaacggatgctgcggtgcggtccaagatcgaagcgatatggatgatggctagtcctgacaacaaagacggagtggatgatccgtggctcaacgtggttcagtcagactcggtggatatctccgggttgggctgcgggaaggttttggtgttggtggctgagaaagatgcgcttgtgagacaaggttggggttacaaggcgaagcttgagaagaacggttggaaagggaaagtggagttggttgagagtgaaggtgaagatcatgtgtttcatttgacgagacctgattgtgagaatgctcttgaagccatgaagaagttcgcagggtttattaagggagagatgtaataggcgctctttcgtctggatgaaagattacgatatgtaatggaataattatctgtctatcagtctctgtaatgtttttaagtgatttatcatattagcacgaaaggcatcaataatattctatgggttcagtt

SEQ ID NO: 52459 - protein, 341 aa, Glycine max
  peptide (1)..(341): Ceres Seq. ID no. 14305751
IKVSQSYQPANQPTNQPTMDSEIAFDYSPLLKIYKSGRIERLMGETAVPPSLTPQNGVISKDVVYSPDDNLSVRVYLPEKAADTDEKLPLLVYFHGGGFIIETAFSPTYHNFLTAAVSASDCIAVSVDYRRAPEHPLPISFDDSWTSLKWVFTHIAGSGPESWLNKHADFSKVFLAGDSAGANIAHHMAMRAAKEKLSPELSDSGIFGIILVHPYFWSKAPVDDKETTDAAVRSKIEAIWMMASPDNKDGVDDPWLNVVQSDSVDISGLGCGKVLVLVAEKDALVRQGWGYKAKLEKNGWKGKVELVESEGEDHVFHLTRPDCENALEAMKKFAGFIKGEM

SEQ ID NO: 52460 - protein, 323 aa, Glycine max
  peptide (1)..(323): Ceres Seq. ID no. 14305752
MDSEIAFDYSPLLKIYKSGRIERLMGETAVPPSLTPQNGVISKDVVYSPDDNLSVRVYLPEKAADTDEKLPLLVYFHGGGFIIETAFSPTYHNFLTAAVSASDCIAVSVDYRRAPEHPLPISFDDSWTSLKWVFTHIAGSGPESWLNKHADFSKVFLAGDSAGANIAHHMAMRAAKEKLSPELSDSGIFGIILVHPYFWSKAPVDDKETTDAAVRSKIEAIWMMASPDNKDGVDDPWLNVVQSDSVDISGLGCGKVLVLVAEKDALVRQGWGYKAKLEKNGWKGKVELVESEGEDHVFHLTRPDCENALEAMKKFAGFIKGEM

SEQ ID NO: 52461 - protein, 299 aa, Glycine max
  peptide (1)..(299): Ceres Seq. ID no. 14305753
MGETAVPPSLTPQNGVISKDVVYSPDDNLSVRVYLPEKAADTDEKLPLLVYFHGGGFIIETAFSPTYHNFLTAAVSASDCIAVSVDYRRAPEHPLPISFDDSWTSLKWVFTHIAGSGPESWLNKHADFSKVFLAGDSAGANIAHHMAMRAAKEKLSPELSDSGIFGIILVHPYFWSKAPVDDKETTDAAVRSKIEAIWMMASPDNKDGVDDPWLNVVQSDSVDISGLGCGKVLVLVAEKDALVRQGWGYKAKLEKNGWKGKVELVESEGEDHVFHLTRPDCENALEAMKKFAGFIKGEM

SEQ ID NO: 52462 - DNA, 949 bp, Glycine max
  misc_feature (1)..(949): Ceres Seq. ID no. 14305743
cttcaatttcccttccgatcatcccgaatcctcgagatttctttcgattgaactcatttctctcttcttcgccacgcactcttgtctctgtaagcggtgattttggttctggacaatgtctcgtgtttatgttgggaatttagaccctcgagtcagtgagagggacctcgaagatgaatttcgtatatatggtgttcttaggagtgtctgggttgctcgaagaccaccgggatatgcatttattgagtttgatgataggagggatgcacttgatgcaattcaggccttggatggaaaaaatggttggcgtgtagagctttctcataattccaagggtggtggccgaggagggcgtgggcgtggaggtgaagacacaaaatgctatgaatgtggtgaacctggacactttgctcgggagtgccgattgcgcattggatcacgtggccttggaagtggaaggaggcgaagtccaagtccttatcggcgtcgtagaagtccgagttatggttatgatcgcagtagttatagccctcgtgggagaagatctccaagacgacgtagcatttcacctccctggggtcgcaactacagcaggtcccctccatatcgtcctcgccgtgattcaccttatgccaatgcagattaaaatcagaatgtgaacggagcaagtgctgaatagttgttaggatgttctctctgctatagtgtagttcctctaggattggttgagcataccacagacatgttagttatgttaatgtcatgacaatgggtattgttaagaacttggcttttgatggaactacatagggttgtagctggcaaaagggtgcgttggacactgttttgcattggctgtctctcttcagcttactgaaacctgaaggttgcttcagtcttccctactttatatagcatgttatgttaattgtttgtttttagtcttact

SEQ ID NO: 52463 - protein, 176 aa, Glycine max
  peptide (1)..(176): Ceres Seq. ID no. 14305744
MSRVYVGNLDPRVSERDLEDEFRIYGVLRSVWVARRPPGYAFIEFDDRRDALDAIQALDGKNGWRVELSHNSKGGGRGGRGRGGEDTKCYECGEPGHFARECRLRIGSRGLGSGRRRSPSPYRRRRSPSYGYDRSSYSPRGRRSPRRRSISPPWGRNYSRSPPYRPRRDSPYANAD

SEQ ID NO: 52464 - protein, 91 aa, Glycine max
  peptide (1)..(91): Ceres Seq. ID no. 14305745
MNVVNLDTLLGSADCALDHVALEVEGGEVQVLIGVVEVRVMVMIAVVIALVGEDLQDDVAFHLPGVATTAGPLHIVLAVIHLMPMQIKIRM

SEQ ID NO: 52465 - DNA, 895 bp, Glycine max
  misc_feature (1)..(895): Ceres Seq. ID no. 14316060
aacccaccacatagccgattcactactcgcacggcacatgcaccctcctctatctctctctgcagcataagcacagcatcatagaccctttctcaaaaaatagggttcctccgttagggttagaggtcacaccatcttacactatactaacccctagccagccagcgagtttgagtgcttgggggtgcaatggcgggagtgagggaacaggaccagtacatgccgatagcgaacgtgataaggatcatgcgtcggattctgccagcgcacgcgaagatctcagacgacgcgaaggagacgatccaggagtgcgtgtctgagtacatcagtttcatcacggcggaggcgaacgagcggtgccagcgggagcagcggaagacggtgaccgcagaggatgtgttgtgggcgatggagaagcttggctttgacaactacgctcaccctctctctctttaccttcaccgctaccgcgagagtgaaggagaacctgcttctgtcagacgcgcttcttctgcaatggggatcaataataatatggtgcacccaccttatattaattctcatggctttggaatgtttgattttgacccatcatcgcaagggttttacagggacgatcataacgctgcttctggatctggtggttttgttgcgccttttgatccttatgctaacatcaaacgtgatgccctgtgatcatgtaagaacaacaactagtgcatgctgctttttcacttggttagttatattcaagcacaagcacatgcaggtgcagctgcaactatttagcttcatctacaaatcttttttcctctcttcttctcatgctttaattatttagagacaatacttgttattcattgttatgctcaattgctagcttctattcatcgcc

SEQ ID NO: 52466 - protein, 168 aa, Glycine max
  peptide (1)..(168): Ceres Seq. ID no. 14316061
MAGVREQDQYMPIANVIRIMRRILPAHAKISDDAKETIQECVSEYISFITAEANERCQREQRKTVTAEDVLWAMEKLGFDNYAHPLSLYLHRYRESEGEPASVRRASSAMGINNNMVHPPYINSHGFGMFDFDPSSQGFYRDDHNAASGSGGFVAPFDPYANIKRDAL

SEQ ID NO: 52467 - protein, 158 aa, Glycine max
  peptide (1)..(158): Ceres Seq. ID no. 14316062
MPIANVIRIMRRILPAHAKISDDAKETIQECVSEYISFITAEANERCQREQRKTVTAEDVLWAMEKLGFDNYAHPLSLYLHRYRESEGEPASVRRASSAMGINNNMVHPPYINSHGFGMFDFDPSSQGFYRDDHNAASGSGGFVAPFDPYANIKRDAL

SEQ ID NO: 52468 - protein, 149 aa, Glycine max
  peptide (1)..(149): Ceres Seq. ID no. 14316063
MRRILPAHAKISDDAKETIQECVSEYISFITAEANERCQREQRKTVTAEDVLWAMEKLGFDNYAHPLSLYLHRYRESEGEPASVRRASSAMGINNNMVHPPYINSHGFGMFDFDPSSQGFYRDDHNAASGSGGFVAPFDPYANIKRDAL

SEQ ID NO: 52469 - DNA, 894 bp, Glycine max
  misc_feature (1)..(894): Ceres Seq. ID no. 15171235
taaaaaattgttcgtaggcaacttcaacctcaccaaaggaactaagaatttcattgaggctagagaaagtggtgatcaatatgtcaaagaatccaaaagttttctttgatattctaattggaaagatgaaagctggacgagtagtgatggagttgtttgccgatgcaaccccaaaaacagctgaaaacttcagggctctctgcactggggaaaaggggattggacgatctgggaaacctttacactacaaaggttctgtatttcatcgtattattccagaatttatgtgtcagggaggagatttcacaagagggaatgggaccgggggtgagtcaatctacggttccaaatttgaagatgagaatttcaatttgaggcataccggtcctggtattctctccatggcaaatgctggagctcatactaatggttctcagttcttcatatgtactacaaagacaccatggcttgatgggaaacatgttgtgtttggaaaagttgttgatggatacagcgttgtgcaggagatggagaaagtgggttcaggaagtggcaggacatctgaaccggtagtaatagaagattgtggccagattgtagagaagtgagtcttgatacaacgatgtttcgagacatgtttgttgctattcaatgcaaatcactagtattataataagtgatttgtgtaactaggagtcaattgtccagtattaatgtaactctcaaatttgtactcctaaatctgcttttacatttgttccaactaaaaatgcgtagctgtctgtagttggtcagagattacgttgatagaattgtggaagcaataggctcgaatatctgtagttgattggtaaattagaatgaataaggatgaagcactacatatttgcaatt

SEQ ID NO: 52470 - protein, 175 aa, Glycine max
  peptide (1)..(175): Ceres Seq. ID no. 15171236
MSKNPKVFFDILIGKMKAGRVVMELFADATPKTAENFRALCTGEKGIGRSGKPLHYKGSVFHRIIPEFMCQGGDFTRGNGTGGESIYGSKFEDENFNLRHTGPGILSMANAGAHTNGSQFFICTTKTPWLDGKHVVFGKVVDGYSVVQEMEKVGSGSGRTSEPVVIEDCGQIVEK

SEQ ID NO: 52471 - protein, 160 aa, Glycine max
  peptide (1)..(160): Ceres Seq. ID no. 15171237
MKAGRVVMELFADATPKTAENFRALCTGEKGIGRSGKPLHYKGSVFHRIIPEFMCQGGDFTRGNGTGGESIYGSKFEDENFNLRHTGPGILSMANAGAHTNGSQFFICTTKTPWLDGKHVVFGKVVDGYSVVQEMEKVGSGSGRTSEPVVIEDCGQIVEK

SEQ ID NO: 52472 - protein, 153 aa, Glycine max
  peptide (1)..(153): Ceres Seq. ID no. 15171238
MELFADATPKTAENFRALCTGEKGIGRSGKPLHYKGSVFHRIIPEFMCQGGDFTRGNGTGGESIYGSKFEDENFNLRHTGPGILSMANAGAHTNGSQFFICTTKTPWLDGKHVVFGKVVDGYSVVQEMEKVGSGSGRTSEPVVIEDCGQIVEK

SEQ ID NO: 52473 - DNA, 1145 bp, Glycine max
  misc_feature (1)..(1145): Ceres Seq. ID no. 14316099
acaaggatggggcagatgtcaaagagctcaaagaacagatagcctgcctcaaggcagcattggcaagaaaggaaggtgaatcagaacattctttatcaggcagctctgaaaaatataggacaatggctagtgagctatcaccttatcatgcaaaccaacagggtgctgatattgtgagcccagggtgccggcaaccaatgcttgatgtaggcaatatagagcttcacagtagtaccacattgagacaaaaaactcagagctatgattttgatgagatgtcaacgaattcaccgccctggcccccggtgaataatcctagacaactctatggggatgatgacagagaaactggctcaggagagtgggtagataaagtcatggtaaacaagcaagatgctaataaaactgagaacatcttagggtgttgggaagcagacagtgggaacttatccgatgtcttttatcaaaaatatctccaaggttcttccaaaatgttctcagaacgatcctacaacatgttcatgggaggcaacaaccagtttaacgttgctggttcagatgacatggatgatcttgatgatacaaccactgattcctcggaacctgacttgctttggcaatttaatcattccaaacttaccagcatagccaatggcaacggatcaaaggctaggagacctgtctcaaagcccacaaatagcccagtattgagcaagaataatgttcattcttctcttggtccttcaccttcaaggaaacaatcaaacagtgtctcacatcgaacagcaagacatccagctccagttgacatgaaacgtaaaactgggagtagaaagtaaacttgttttgaaacgttaaaagggtgatttctatttttattttttatttctttccccctttttctttttttcaattttttagatggagggcttttgcaataatatttctttttattttttattttttattttttgggtttatgcttgtaagttttgtaacttgtatttacgcagataatggagcaataatgcccgttgcttgtaccatgggtccatgacattcttttcattttacactgtagcttttaggtgatgtaaaaatttcaaaaccactgaaacgatcaaaattgcaacaatggtttgatt

SEQ ID NO: 52474 - protein, 278 aa, Glycine max
  peptide (1)..(278): Ceres Seq. ID no. 14316100
KDGADVKELKEQIACLKAALARKEGESEHSLSGSSEKYRTMASELSPYHANQQGADIVSPGCRQPMLDVGNIELHSSTTLRQKTQSYDFDEMSTNSPPWPPVNNPRQLYGDDDRETGSGEWVDKVMVNKQDANKTENILGCWEADSGNLSDVFYQKYLQGSSKMFSERSYNMFMGGNNQFNVAGSDDMDDLDDTTTDSSEPDLLWQFNHSKLTSIANGNGSKARRPVSKPTNSPVLSKNNVHSSLGPSPSRKQSNSVSHRTARHPAPVDMKRKTGSRK

SEQ ID NO: 52475 - protein, 238 aa, Glycine max
  peptide (1)..(238): Ceres Seq. ID no. 14316101
MASELSPYHANQQGADIVSPGCRQPMLDVGNIELHSSTTLRQKTQSYDFDEMSTNSPPWPPVNNPRQLYGDDDRETGSGEWVDKVMVNKQDANKTENILGCWEADSGNLSDVFYQKYLQGSSKMFSERSYNMFMGGNNQFNVAGSDDMDDLDDTTTDSSEPDLLWQFNHSKLTSIANGNGSKARRPVSKPTNSPVLSKNNVHSSLGPSPSRKQSNSVSHRTARHPAPVDMKRKTGSRK

SEQ ID NO: 52476 - protein, 213 aa, Glycine max
  peptide (1)..(213): Ceres Seq. ID no. 14316102
MLDVGNIELHSSTTLRQKTQSYDFDEMSTNSPPWPPVNNPRQLYGDDDRETGSGEWVDKVMVNKQDANKTENILGCWEADSGNLSDVFYQKYLQGSSKMFSERSYNMFMGGNNQFNVAGSDDMDDLDDTTTDSSEPDLLWQFNHSKLTSIANGNGSKARRPVSKPTNSPVLSKNNVHSSLGPSPSRKQSNSVSHRTARHPAPVDMKRKTGSRK

SEQ ID NO: 52477 - DNA, 1218 bp, Glycine max
  misc_feature (1)..(1218): Ceres Seq. ID no. 14316095
aagaagtggcaaccaaaatctgccacttcaaggcttcaagctaagcacactatggcttgcatcgataacacggccaccacctctactgacgaagcaggcggagccaccaccatcaccgccgtgcatcccgacataattcaaacccacatcctcacgtgcctggacggcccgtcgctcgcctccgtcgccagcacgtgctcccaactccacgctctctcagcgcgcgagcctctctgggagaacatttgccactccacgtggccctccacgagctcgccacgcgtccgccacgtcatgtccacgttcccacgcgcgtctctgtcctttttctccgactcgttcccttcgttcgccgcggcgcgcgaaggttcttcttcgcgcgcaccggagctgatttccgctgtggacatcttccaccggcggcgggcggtgctgtcgagagtggtggagacggagacggagtccgactggttccggtgctcgccgtttcgaatcgatgttcttgatcagaaggaggcagtggcgacggcgatggagtatccacggagcgaggaagcgtgtgagattctgggcgaggatttgaggttgagttggatagtggtggatccgaatggaaagcgtgcggtgaatgtgtcgagtgggagagtggtgtcggtggagcggcactggctgagcggggaggtgaaggcgcggttcgcgacggtggtgggcggaggggagagggggacggcggtggaggtggcgctgtgcagcgtgactgtgactttcgggggtgagatgcaggtgagggaagcgtgtctgcagatggaggacatggatggaatgttcctgaatggtagggacagtttggggattttgcagcgggcattggagggtataaggggaacattactgaaggacggaaaggaggaagaagggaggaatagatacttggaattcataaagagaaagatggagagaaaagataaaaaagaaagagatgagaggaggttggatatgctctgcgtgcctctcgcgcttttgtcctttgcggctttttctacactctttctcttctgaatcaatatacactatcacttcaaattcaataaacacaacacggaaaaattgtacaaaattaatttaacaaactaagtgtcagtcgatgctgtaatgtcgcatactagtttatttatttaaaacagtaatgaatagtgaatgggttcttctagcagctgc

SEQ ID NO: 52478 - protein, 352 aa, Glycine max
  peptide (1)..(352): Ceres Seq. ID no. 14316096
KKWQPKSATSRLQAKHTMACIDNTATTSTDEAGGATTITAVHPDIIQTHILTCLDGPSLASVASTCSQLHALSAREPLWENICHSTWPSTSSPRVRHVMSTFPRASLSFFSDSFPSFAAAREGSSSRAPELISAVDIFHRRRAVLSRVVETETESDWFRCSPFRIDVLDQKEAVATAMEYPRSEEACEILGEDLRLSWIVVDPNGKRAVNVSSGRVVSVERHWLSGEVKARFATVVGGGERGTAVEVALCSVTVTFGGEMQVREACLQMEDMDGMFLNGRDSLGILQRALEGIRGTLLKDGKEEEGRNRYLEFIKRKMERKDKKERDERRLDMLCVPLALLSFAAFSTLFLF

SEQ ID NO: 52479 - protein, 335 aa, Glycine max
  peptide (1)..(335): Ceres Seq. ID no. 14316097
MACIDNTATTSTDEAGGATTITAVHPDIIQTHILTCLDGPSLASVASTCSQLHALSAREPLWENICHSTWPSTSSPRVRHVMSTFPRASLSFFSDSFPSFAAAREGSSSRAPELISAVDIFHRRRAVLSRVVETETESDWFRCSPFRIDVLDQKEAVATAMEYPRSEEACEILGEDLRLSWIVVDPNGKRAVNVSSGRVVSVERHWLSGEVKARFATVVGGGERGTAVEVALCSVTVTFGGEMQVREACLQMEDMDGMFLNGRDSLGILQRALEGIRGTLLKDGKEEEGRNRYLEFIKRKMERKDKKERDERRLDMLCVPLALLSFAAFSTLFLF

SEQ ID NO: 52480 - protein, 254 aa, Glycine max
  peptide (1)..(254): Ceres Seq. ID no. 14316098
MSTFPRASLSFFSDSFPSFAAAREGSSSRAPELISAVDIFHRRRAVLSRVVETETESDWFRCSPFRIDVLDQKEAVATAMEYPRSEEACEILGEDLRLSWIVVDPNGKRAVNVSSGRVVSVERHWLSGEVKARFATVVGGGERGTAVEVALCSVTVTFGGEMQVREACLQMEDMDGMFLNGRDSLGILQRALEGIRGTLLKDGKEEEGRNRYLEFIKRKMERKDKKERDERRLDMLCVPLALLSFAAFSTLFLF

SEQ ID NO: 52481 - DNA, 1552 bp, Glycine max
  misc_feature (1)..(1552): Ceres Seq. ID no. 15177285
aacataagaaaattattggtctctgttctctacctcaccccccaccgcactcgtcttgtctcaaacaaatgcaacaaccacttattcttatagttactatggactaggaacaagatttgattctcattctgatatcagattcagatttttttaaaagagactcacgctggcggtgaagaacgtttctgcggcggcggcggaggaggaggaacaggttaacatgactctgatttccaattccgacgtcgaaagccacgccgacgtccaaatccccgacaccgcgcatcaaattagcaccgattcatggtttcaagtggggttcgtgctgacgacgggcatcaacagcgcctatgtgcttggatattcagggaccatcatggttcccctgggttgggcagggggtgtggttggtttgattctcgccaccgcaatatcactctacgcgaatgctcttattgctaggctccatgaatatggaggaacaaggcatattcgatatagagatcttgctggatttatttatggtagaaaggcttattccctcacatgggctctacagtatgtcaaccttttcatgataaatgccggctacatcattttggctggttcggctttaaaggccacctatgttctattcagggaagacgatgggatgaagcttccgtattttataggcattgctggatttgtgtgtgcaatgtttgccatttgcattccccatctttcagctctcggaatttggctgggattttcgacagtcttcagcctagtatacattgttatagcatttgtactgtcaattaaagatggtataaaatcaccacctcgtgattatagcattccggggacatcaaccagtaaaatatccacaacaattggggcgtctgctaatcttgtgttcgcatataatacaggaatgcttcctgagatacaggcgacaatcaggcagccagtagtcaagaacatgatgaaagccctgtattttcagtttactgttggagttctgccattatatctggtaacctttgcaggatactgggcttatggatcttcaacagctacctatttgatgagtgatgtcaatggtccagtttgggctaaggctatggccaatattgcagcctttcttcaatcagtcattgcattgcatatatttgcaagtccaatgtatgagtatttggataccaaatatgggatcaaagggagtgccctggcttttaagaacttgtcatttcgagtcttggtaagaggtggctacctgactttgaacacatttgtatcagctctattgccctttcttggagatttcatgagcctcactggagctatcagcacatttccccttacctttattcttgcaaaccatatgtaccttgtggcaaatgcgaacaaactaacatccatccaaaagctctggcattggatcaatatttgtttctttgccttcatgtctgttgcggcaactattgcagccctgcggcttattgatttagactccaaaacgtaccatgtttttgcggatatatgattaaatgcattatattctatcagc

SEQ ID NO: 52482 - protein, 435 aa, Glycine max
  peptide (1)..(435): Ceres Seq. ID no. 15177286
MTLISNSDVESHADVQIPDTAHQISTDSWFQVGFVLTTGINSAYVLGYSGTIMVPLGWAGGVVGLILATAISLYANALIARLHEYGGTRHIRYRDLAGFIYGRKAYSLTWALQYVNLFMINAGYIILAGSALKATYVLFREDDGMKLPYFIGIAGFVCAMFAICIPHLSALGIWLGFSTVFSLVYIVIAFVLSIKDGIKSPPRDYSIPGTSTSKISTTIGASANLVFAYNTGMLPEIQATIRQPVVKNMMKALYFQFTVGVLPLYLVTFAGYWAYGSSTATYLMSDVNGPVWAKAMANIAAFLQSVIALHIFASPMYEYLDTKYGIKGSALAFKNLSFRVLVRGGYLTLNTFVSALLPFLGDFMSLTGAISTFPLTFILANHMYLVANANKLTSIQKLWHWINICFFAFMSVAATIAALRLIDLDSKTYHVFADI

SEQ ID NO: 52483 - protein, 383 aa, Glycine max
  peptide (1)..(383): Ceres Seq. ID no. 15177287
MVPLGWAGGVVGLILATAISLYANALIARLHEYGGTRHIRYRDLAGFIYGRKAYSLTWALQYVNLFMINAGYIILAGSALKATYVLFREDDGMKLPYFIGIAGFVCAMFAICIPHLSALGIWLGFSTVFSLVYIVIAFVLSIKDGIKSPPRDYSIPGTSTSKISTTIGASANLVFAYNTGMLPEIQATIRQPVVKNMMKALYFQFTVGVLPLYLVTFAGYWAYGSSTATYLMSDVNGPVWAKAMANIAAFLQSVIALHIFASPMYEYLDTKYGIKGSALAFKNLSFRVLVRGGYLTLNTFVSALLPFLGDFMSLTGAISTFPLTFILANHMYLVANANKLTSIQKLWHWINICFFAFMSVAATIAALRLIDLDSKTYHVFADI

SEQ ID NO: 52484 - protein, 317 aa, Glycine max
  peptide (1)..(317): Ceres Seq. ID no. 15177288
MINAGYIILAGSALKATYVLFREDDGMKLPYFIGIAGFVCAMFAICIPHLSALGIWLGFSTVFSLVYIVIAFVLSIKDGIKSPPRDYSIPGTSTSKISTTIGASANLVFAYNTGMLPEIQATIRQPVVKNMMKALYFQFTVGVLPLYLVTFAGYWAYGSSTATYLMSDVNGPVWAKAMANIAAFLQSVIALHIFASPMYEYLDTKYGIKGSALAFKNLSFRVLVRGGYLTLNTFVSALLPFLGDFMSLTGAISTFPLTFILANHMYLVANANKLTSIQKLWHWINICFFAFMSVAATIAALRLIDLDSKTYHVFADI

SEQ ID NO: 52485 - DNA, 740 bp, Glycine max
  misc_feature (1)..(740): Ceres Seq. ID no. 14305727
cttcacatcacaacttgctaaagttaatttcttcagaggccactggcattcggatctcagttaacttacattaaattttggccacctagttttctcttttagatgggcagtgacttcaaggggtggtgacttgatcacatgcatttatggcttcacttaattcatatcattactacacaaacacctccttgctcatcatacttcttctccataatttgttctctctatctctagcttctgcctccaatcaccctcagcctgcaatttctacaagggaactgttatttgaggagaaaaacaggctaggttcaattcctcctagctgtcataacaagtgcaatgattgccatccatgcatggcagttcaagtgccaactttgccaagccatgactctaaccctccagatcttaccaaaactgcagccatggcaacttttcttaacccttcttctccgcaaggcaacaggtactccaattacaagccattgggatggaaatgccattgtggtgaccacttcttcaacccgtaattataaatttgtaaaatggccctcttattttttttgttggttaaattttaatatttgtggcttagggatcagctagggtaacagatttgcgtcagcatggatcctatacattggagcttgatacacttgtacatagtttgttagacctcatgatttccaactttattatattgttacatctaaattttgagaaagttattacctttttcc

SEQ ID NO: 52486 - protein, 127 aa, Glycine max
  peptide (1)..(127): Ceres Seq. ID no. 14305728
MASLNSYHYYTNTSLLIILLLHNLFSLSLASASNHPQPAISTRELLFEEKNRLGSIPPSCHNKCNDCHPCMAVQVPTLPSHDSNPPDLTKTAAMATFLNPSSPQGNRYSNYKPLGWKCHCGDHFFNP

SEQ ID NO: 52487 - protein, 88 aa, Glycine max
  peptide (1)..(88): Ceres Seq. ID no. 14305729
MIAIHAWQFKCQLCQAMTLTLQILPKLQPWQLFLTLLLRKATGTPITSHWDGNAIVVTTSSTRNYKFVKWPSYFFCWLNFNICGLGIS

SEQ ID NO: 52488 - protein, 72 aa, Glycine max
  peptide (1)..(72): Ceres Seq. ID no. 14305730
MTLTLQILPKLQPWQLFLTLLLRKATGTPITSHWDGNAIVVTTSSTRNYKFVKWPSYFFCWLNFNICGLGIS

SEQ ID NO: 52489 - DNA, 1900 bp, Glycine max
  misc_feature (1)..(1900): Ceres Seq. ID no. 15178317
acacatctcaatcacatttcaaggttcaaaattaattctccaaaactctaaactgaacaggcacgttgtaggcaattggcagtgatttaggacgaaaatgatttatataaatatggcgcatcttctgagtttggatttgcagaatcacaattatatatttaatatgttttataaatattttatatgtatctatatatacagttcatggctttgtatcttgtatattctaggaataaccatattgctgtatcagatacatattgaatccaatatgcgtattgtatctgtgcattatagttgttaatgcttatagaaactgtatgaagtgcatgcacaagatttacatgagtgcacatgtttatgatcttaagtatgtgtatatcattttattttaagaaattatttcatttctgttaatacaacatttctagtattgtgaatgtgctacagggtgtgttctgacacttgtttcgatttaggtttaaacttgttacacctctgtcacgattgatgtggtccagacttgatgctttgatcccatcattaatgaccacagtgaagttcaaatgatgcttgtttcctggccatttctatagttttgtgacgtgattgagaatgtggaactttgcatctagtttaattgctggaagtgtgggtctgaaaaatgattctccaaaaccaactcactctgcttcagaattttctgatgacgagacttccatggttagcagagaggaaaggctagaatgcccaatatgctgggaatcctttaacattgttgaaaatgtgccttatgtcttatggtgtggtcacaccctttgtaaaaattgcatccttggattacaatgggctgtggtgaatttcccaacactgccaattcggcttccactttttatctcctgcccgtggtgcaaccttttgtctctccgtttagtttaccagggaaatctgaaattccctcacaagaactactttcttctatggatggttgagagcatgaacggtgatagagtgaagtcacattctactgtttgcggggatcatcaaccagtgtggccaattatagacagtttaaccaacggaagccaagtaagccatgacagccttcaaggagggcaagtttgccatccagagtcttcaagttccaatcattatcatggtgataccagtaattacctaagtatagaaacactgcatacatctctgcggaagtcattggttttatttgttcacttgacagcaaagttcccattgatcattatatttcttttgattgtcttatatgccataccagtcattgcagccattttggctctgtatatacttgttaccattctgtttgctctcccatcatttctcatcttgtactttgcatatcctagtttggattggcttgtcagggaaattatcacttgagatcaaagctgtatttcttctgctttgcaagcattatgaatgtaactttgcctcaccttgtggccccttcatccagtgtcttctacttcgtaattggtcaacatctccatttgcagctgtatcttttatcttatcatatatagccccagtcaatctcagtacacttcttgaatcttgagctctggttgagcttggctgggtgggaggagggatatcagtttttggcataatctattttgaagaccatcaaggccgtggagtgaacaaggtaatgaataatgattttgccctttcctggtggcaaatggttgttttatcaatatatgaacttcagaagaacaccctgatgtagttatcaagtgggtcaatatcagaaaagcttttttttttcatgggcacatttggatgctcctgttaatactgcctacagtatttttgctaattgtaatttgtaattataattagtagagctattttcctggcc

SEQ ID NO: 52490 - protein, 266 aa, Glycine max
  peptide (1)..(266): Ceres Seq. ID no. 15178318
MWNFASSLIAGSVGLKNDSPKPTHSASEFSDDETSMVSREERLECPICWESFNIVENVPYVLWCGHTLCKNCILGLQWAVVNFPTLPIRLPLFISCPWCNLLSLRLVYQGNLKFPHKNYFLLWMVESMNGDRVKSHSTVCGDHQPVWPIIDSLTNGSQVSHDSLQGGQVCHPESSSSNHYHGDTSNYLSIETLHTSLRKSLVLFVHLTAKFPLIIIFLLIVLYAIPVIAAILALYILVTILFALPSFLILYFAYPSLDWLVREIIT

SEQ ID NO: 52491 - protein, 231 aa, Glycine max
  peptide (1)..(231): Ceres Seq. ID no. 15178319
MVSREERLECPICWESFNIVENVPYVLWCGHTLCKNCILGLQWAVVNFPTLPIRLPLFISCPWCNLLSLRLVYQGNLKFPHKNYFLLWMVESMNGDRVKSHSTVCGDHQPVWPIIDSLTNGSQVSHDSLQGGQVCHPESSSSNHYHGDTSNYLSIETLHTSLRKSLVLFVHLTAKFPLIIIFLLIVLYAIPVIAAILALYILVTILFALPSFLILYFAYPSLDWLVREIIT

SEQ ID NO: 52492 - protein, 143 aa, Glycine max
  peptide (1)..(143): Ceres Seq. ID no. 15178320
MVESMNGDRVKSHSTVCGDHQPVWPIIDSLTNGSQVSHDSLQGGQVCHPESSSSNHYHGDTSNYLSIETLHTSLRKSLVLFVHLTAKFPLIIIFLLIVLYAIPVIAAILALYILVTILFALPSFLILYFAYPSLDWLVREIIT

SEQ ID NO: 52493 - DNA, 1237 bp, Glycine max
  misc_feature (1)..(1237): Ceres Seq. ID no. 14315219
ctcttagtatttattctcttttatttgtttcttcacagcccctcaatgaagaacaagaagggtgaagctctgagtgagacttctctcccaccttcaaccatgtcttcttcctcctcttctcttgtcaccactcttgttgataataataaccctactcaaccttctcagttaagagcggcacgccgtcgtttcacctctgatcatcaccttcctgagataagcctcaaaacccctatggttaggccttatgttcgatcaaaaatgcctaggcttcgttggacaccagatctccatcgttgcttcgtgcatgcagttcaaagacttggaggagaagacagggccacaccaaagttggttttacagctcatgaatgtaaaggggcttactatatctcacgtcaaaagccaccttcagatgtacaggagcatgagacacgagcagatgagtcaaggtgcaaagaagaataatatggctccggatttcccagcttccacactcgcaactcttggcccaaggcaacagaaacctcacaaaagaagctgcacggaagagcttgttcccacccaagctcaatggaatcatgatgagcaagagtgttacaatggaaaccaagggggtgaatcgattataatttgtaacggcaatgaacagaaggtgcactcctacatcatcttcgagggtcttctgagaggccaatctgtccaagagaataaaactactactactgaaaaggtgtcactaggtgatgccggttacgaaagcgaccatcaaagattccaagacacaactctgtccctttcaatgagctcaaggccttcttcacattcgttcttgaatcggagccacagtactggtccagatgcgaatgatgtctctcttgagctcacgctctcttagaatcatgcacataataataacagcaagccttttctttgtcatcatttatgcatgtttcttccatcctacaactacactacaaactaatggtgcatgacctttcaagaaagaacaatccatactatcaagtgtttttccgacatcgattaagaaattaaaatttttaaaaaattattaaatttttgtcgatgcatttttatttattaatttcttaataaatgtctctaaaagcacttgttagcaggagaccgaggaaattgtaataccaacgctactttagttcgcatcatttagtgcccatgatcagaagtactagaaatcaagtgaactaattaagaac

SEQ ID NO: 52494 - protein, 298 aa, Glycine max
  peptide (1)..(298): Ceres Seq. ID no. 14315220
LLVFILFYLFLHSPSMKNKKGEALSETSLPPSTMSSSSSSLVTTLVDNNNPTQPSQLRAARRRFTSDHHLPEISLKTPMVRPYVRSKMPRLRWTPDLHRCFVHAVQRLGGEDRATPKLVLQLMNVKGLTISHVKSHLQMYRSMRHEQMSQGAKKNNMAPDFPASTLATLGPRQQKPHKRSCTEELVPTQAQWNHDEQECYNGNQGGESIIICNGNEQKVHSYIIFEGLLRGQSVQENKTTTTEKVSLGDAGYESDHQRFQDTTLSLSMSSRPSSHSFLNRSHSTGPDANDVSLELTLS

SEQ ID NO: 52495 - protein, 283 aa, Glycine max
  peptide (1)..(283): Ceres Seq. ID no. 14315221
MKNKKGEALSETSLPPSTMSSSSSSLVTTLVDNNNPTQPSQLRAARRRFTSDHHLPEISLKTPMVRPYVRSKMPRLRWTPDLHRCFVHAVQRLGGEDRATPKLVLQLMNVKGLTISHVKSHLQMYRSMRHEQMSQGAKKNNMAPDFPASTLATLGPRQQKPHKRSCTEELVPTQAQWNHDEQECYNGNQGGESIIICNGNEQKVHSYIIFEGLLRGQSVQENKTTTTEKVSLGDAGYESDHQRFQDTTLSLSMSSRPSSHSFLNRSHSTGPDANDVSLELTLS

SEQ ID NO: 52496 - protein, 265 aa, Glycine max
  peptide (1)..(265): Ceres Seq. ID no. 14315222
MSSSSSSLVTTLVDNNNPTQPSQLRAARRRFTSDHHLPEISLKTPMVRPYVRSKMPRLRWTPDLHRCFVHAVQRLGGEDRATPKLVLQLMNVKGLTISHVKSHLQMYRSMRHEQMSQGAKKNNMAPDFPASTLATLGPRQQKPHKRSCTEELVPTQAQWNHDEQECYNGNQGGESIIICNGNEQKVHSYIIFEGLLRGQSVQENKTTTTEKVSLGDAGYESDHQRFQDTTLSLSMSSRPSSHSFLNRSHSTGPDANDVSLELTLS

SEQ ID NO: 52497 - DNA, 1274 bp, Glycine max
  misc_feature (1)..(1274): Ceres Seq. ID no. 15178096
atttctttttctggccatcatcgtatcttttccaaaacaccaaaaatgcctgcgacaacagagaacaacaaccaaggctcattcctgggtcgaataagcatccgcagaaaccaagtgatgtccatggacggaagccacgaccaagagatggaagacctggagcttttccagaagcacatcggagaccgcttctcggagctcttatcctccacctccgaagactcctcctcctcctcctcctcctcctccggcgacgcgcttctctccattgcgtggctccgcaggctcctcgacgagttcctctgctgcgaggccgagttcaaagccgtcgtcttaatgggccgcgacccttcccagatcacgaagccaccgctcgacaagctcctcccggatctcctcgaccgcggcgtcaagtccctcgacgtctgcaatgccgtcaccctcggcctcgacgccgtcaagaacctccagcgcctcgccgagatcgccgtcgcggccctcgaacaaacccccctcggtgacggccaggtccgccgcgccaagaaggcgctctccgccctcgtagccgccatgctgaacgacgacagcaacgccgccgccaagggaaccgaacgcacccgctccttcgggcgccgcgccggaaacaccaacgccactaaatacaagtcgctgtcgtggagcatggccaagaactggtccgcggcgaagcaaatccacgcgatgatgtcgaatctgacggcgccacgtggcgcggagtcctcgggattggcgcaacccatgtacatgatgagcaccgtgttggtgttcgtgatgtggactctggttgcggcggttccttgccaggaaaggaatgggctagggacccattttcctctgccgaggcaattgggctgggcccagcccatgatcggcctgcaggagaagattgcggaggagtggaagaagaaagagaagaaagggaacgttgggttgttagaggagatgcagaggatggacaagctgggtcagtccctgattgaattcgcagactcgtttcagttcccaaccgaaacggagcgtatggatgaggtgaagaagcacgtcgaggaattgggggacatttgtaaaaaaatggaggaaggcttggaacctttacagcagcagattagagaggtctttcacagggtcgtaaggagcaggactgagtttctccttgccttggaccaagctgccaagtccactacacccgctctgtaaataaccacaatctacatcatcatccttttaggtttcac

SEQ ID NO: 52498 - protein, 411 aa, Glycine max
  peptide (1)..(411): Ceres Seq. ID no. 15178097
ISFSGHHRIFSKTPKMPATTENNNQGSFLGRISIRRNQVMSMDGSHDQEMEDLELFQKHIGDRFSELLSSTSEDSSSSSSSSSGDALLSIAWLRRLLDEFLCCEAEFKAVVLMGRDPSQITKPPLDKLLPDLLDRGVKSLDVCNAVTLGLDAVKNLQRLAEIAVAALEQTPLGDGQVRRAKKALSALVAAMLNDDSNAAAKGTERTRSFGRRAGNTNATKYKSLSWSMAKNWSAAKQIHAMMSNLTAPRGAESSGLAQPMYMMSTVLVFVMWTLVAAVPCQERNGLGTHFPLPRQLGWAQPMIGLQEKIAEEWKKKEKKGNVGLLEEMQRMDKLGQSLIEFADSFQFPTETERMDEVKKHVEELGDICKKMEEGLEPLQQQIREVFHRVVRSRTEFLLALDQAAKSTTPAL

SEQ ID NO: 52499 - protein, 396 aa, Glycine max
  peptide (1)..(396): Ceres Seq. ID no. 15178098
MPATTENNNQGSFLGRISIRRNQVMSMDGSHDQEMEDLELFQKHIGDRFSELLSSTSEDSSSSSSSSSGDALLSIAWLRRLLDEFLCCEAEFKAVVLMGRDPSQITKPPLDKLLPDLLDRGVKSLDVCNAVTLGLDAVKNLQRLAEIAVAALEQTPLGDGQVRRAKKALSALVAAMLNDDSNAAAKGTERTRSFGRRAGNTNATKYKSLSWSMAKNWSAAKQIHAMMSNLTAPRGAESSGLAQPMYMMSTVLVFVMWTLVAAVPCQERNGLGTHFPLPRQLGWAQPMIGLQEKIAEEWKKKEKKGNVGLLEEMQRMDKLGQSLIEFADSFQFPTETERMDEVKKHVEELGDICKKMEEGLEPLQQQIREVFHRVVRSRTEFLLALDQAAKSTTPAL

SEQ ID NO: 52500 - protein, 372 aa, Glycine max
  peptide (1)..(372): Ceres Seq. ID no. 15178099
MSMDGSHDQEMEDLELFQKHIGDRFSELLSSTSEDSSSSSSSSSGDALLSIAWLRRLLDEFLCCEAEFKAVVLMGRDPSQITKPPLDKLLPDLLDRGVKSLDVCNAVTLGLDAVKNLQRLAEIAVAALEQTPLGDGQVRRAKKALSALVAAMLNDDSNAAAKGTERTRSFGRRAGNTNATKYKSLSWSMAKNWSAAKQIHAMMSNLTAPRGAESSGLAQPMYMMSTVLVFVMWTLVAAVPCQERNGLGTHFPLPRQLGWAQPMIGLQEKIAEEWKKKEKKGNVGLLEEMQRMDKLGQSLIEFADSFQFPTETERMDEVKKHVEELGDICKKMEEGLEPLQQQIREVFHRVVRSRTEFLLALDQAAKSTTPAL

SEQ ID NO: 52501 - DNA, 1425 bp, Glycine max
  misc_feature (1)..(1425): Ceres Seq. ID no. 14315234
ctcccactgcagtgtgtgtctctcttgacacatttcgttagccgctgttggcaaaaaccctctccctttggctccttccactctcactctgttttcatcgtcttcaaccaccgccatgtgctcttagacctcccaggttcttcgtggacaacccagaagaacaatttgttctgttgttttagctcttgaaatgaaaccacaaaccagtgggatgtctagagctcataaggcaaataatactcaaattgaagggcctaactggcttatttttgctgctggtgctttgttgagtactctatccattcgccttggttacaagttgaagcaggcacttgactcgaagccgaagcaaaatgcaactactggtcagaaaggaaatggaaaatccaccaacacaaaaaactccgcagactgctttatgcagtctaatggatattccctagcgcaagataatcatggatgcttcggttgcatttcaggaactgggggtaccatggagctaaagtgcccaccaaatggtcagatgcagatgcataatgagtttgatggggctctccctttggtgacagttcctgctgctgctgaatttagcaaggaaaatggtgtctgggcatgctctcctgatcgtcttgaactgccttcaaagccattccaccattcaaactgctcagattcaccatgtgtatcagaatctggttctgatatttttagtaagcgggaagtcatacagaaactgcggcaacagttgaagagaagagatgatatgatactagaaatgcaagatcaaatggctgaattgcaaaattccctcaatgctcagatgggactttcttctcatttgcaattgcagcttgatgctacaaaccgggacttatttgagtccaagagagagatccaacggctacgaaaagcaattgcagatcactgtgttggatttgttccccatgacaaatcttccaaggtgacagttttgcctactgagattagaaatggcctttcaaatgggcatcttgatggggagaataattgtgagtcctctgaaaaactaagggatgaggaggagagaattgaattgctgaaaaggcaagtaggagagttgaaagaggtaatagaaggaaaagaatacttgctcctgagctacaaggagcaaaaggcagaactgtctctgaagatcagggaattgcagcagagattggattctcagctgcctaatattttgtagaagctattaagtttgtgaatactttggttctttacatttgacaaatcttcactgtcttcctcattctttatttcctctgtaattagctcaatatatttcgagtttgtgcaatgtatgctactaaggaatgaaagagggctgggtatttgaaatgagatgaatgcatatggtcttagaaatagaaaatttatatttgtcactgt

SEQ ID NO: 52502 - protein, 343 aa, Glycine max
  peptide (1)..(343): Ceres Seq. ID no. 14315235
MKPQTSGMSRAHKANNTQIEGPNWLIFAAGALLSTLSIRLGYKLKQALDSKPKQNATTGQKGNGKSTNTKNSADCFMQSNGYSLAQDNHGCFGCISGTGGTMELKCPPNGQMQMHNEFDGALPLVTVPAAAEFSKENGVWACSPDRLELPSKPFHHSNCSDSPCVSESGSDIFSKREVIQKLRQQLKRRDDMILEMQDQMAELQNSLNAQMGLSSHLQLQLDATNRDLFESKREIQRLRKAIADHCVGFVPHDKSSKVTVLPTEIRNGLSNGHLDGENNCESSEKLRDEEERIELLKRQVGELKEVIEGKEYLLLSYKEQKAELSLKIRELQQRLDSQLPNIL

SEQ ID NO: 52503 - protein, 336 aa, Glycine max
  peptide (1)..(336): Ceres Seq. ID no. 14315236
MSRAHKANNTQIEGPNWLIFAAGALLSTLSIRLGYKLKQALDSKPKQNATTGQKGNGKSTNTKNSADCFMQSNGYSLAQDNHGCFGCISGTGGTMELKCPPNGQMQMHNEFDGALPLVTVPAAAEFSKENGVWACSPDRLELPSKPFHHSNCSDSPCVSESGSDIFSKREVIQKLRQQLKRRDDMILEMQDQMAELQNSLNAQMGLSSHLQLQLDATNRDLFESKREIQRLRKAIADHCVGFVPHDKSSKVTVLPTEIRNGLSNGHLDGENNCESSEKLRDEEERIELLKRQVGELKEVIEGKEYLLLSYKEQKAELSLKIRELQQRLDSQLPNIL

SEQ ID NO: 52504 - protein, 267 aa, Glycine max
  peptide (1)..(267): Ceres Seq. ID no. 14315237
MQSNGYSLAQDNHGCFGCISGTGGTMELKCPPNGQMQMHNEFDGALPLVTVPAAAEFSKENGVWACSPDRLELPSKPFHHSNCSDSPCVSESGSDIFSKREVIQKLRQQLKRRDDMILEMQDQMAELQNSLNAQMGLSSHLQLQLDATNRDLFESKREIQRLRKAIADHCVGFVPHDKSSKVTVLPTEIRNGLSNGHLDGENNCESSEKLRDEEERIELLKRQVGELKEVIEGKEYLLLSYKEQKAELSLKIRELQQRLDSQLPNIL

SEQ ID NO: 52505 - DNA, 947 bp, Glycine max
  misc_feature (1)..(947): Ceres Seq. ID no. 14305697
ttacctaatccagttccagttgttaagccaattccaaagccaacaccaatggtgaaaaagcctctacctattcccgtaacaaagcctataccaaaaccaattcccattgttaagcccattcctattccagtgttcaagcccatccccaaaccaattccaatagtgaaaaagcctctacctattccagtaactaagcctatacccaagccagtcccaattattaagccaattcccattccagtattcaagcctgtcccaattattaagccaattcccattccagtattcaagcctatcccaaagccatttccaatagtgaaaaagcctctacctattccagcaattaagcctataccaaagccaattccttcactaaaaaaacctctacctactccaacaattaagcctgtacccgagccagttccaaccgttaaaccaattccgatcccaacattcaagccttttccaaagccatttccatttgtgaaaaggcctttacctattcctccaatgatgaaacctataccaaagccatttacatctgttaaaaagcctccacctattccaatttccaaacctattccatagccattttccatttttatgatcaggcctataccaaaacaaatttcatttgttaaagcctatataagcctttcttcaaaaacttattgttccctgaataccacttctttattgcatatattttcttatgcttatgaagttatccactccaatttgaaaggagatatccagtacaatatttacagggcgacgcctgtgtctcgagatcaatgctgtacgggtttgcatgtatcctattgtatttatcttggaagttgaattggaatgtaaaagtttttttgcctctatgaaactgccaaatgttgccgctattgtaactcgattgatgatctactaatcaaggaatgatgtgntagtatctg

SEQ ID NO: 52506 - protein, 195 aa, Glycine max
  peptide (1)..(195): Ceres Seq. ID no. 14305698
LPNPVPVVKPIPKPTPMVKKPLPIPVTKPIPKPIPIVKPIPIPVFKPIPKPIPIVKKPLPIPVTKPIPKPVPIIKPIPIPVFKPVPIIKPIPIPVFKPIPKPFPIVKKPLPIPAIKPIPKPIPSLKKPLPTPTIKPVPEPVPTVKPIPIPTFKPFPKPFPFVKRPLPIPPMMKPIPKPFTSVKKPPPIPISKPIP

SEQ ID NO: 52507 - protein, 179 aa, Glycine max
  peptide (1)..(179): Ceres Seq. ID no. 14305699
MVKKPLPIPVTKPIPKPIPIVKPIPIPVFKPIPKPIPIVKKPLPIPVTKPIPKPVPIIKPIPIPVFKPVPIIKPIPIPVFKPIPKPFPIVKKPLPIPAIKPIPKPIPSLKKPLPTPTIKPVPEPVPTVKPIPIPTFKPFPKPFPFVKRPLPIPPMMKPIPKPFTSVKKPPPIPISKPIP

SEQ ID NO: 52508 - DNA, 1504 bp, Glycine max
  misc_feature (1)..(1504): Ceres Seq. ID no. 14315253
cctgaagtgaaaaaatagttgaaataaaattcgcttactgagttggttactactattgttcttaaacattgattagatacagtaatttcaaaattagattttgtgatattatgagttgtgagactatgctaacttacattgatttaaactttcccaaacactgttgcttgcggattagaatcataatcatatatcacacaaaacctgatgaactgcttagtttgctgcaaggcattcctgtataaactagttacggttatgaactttaggcagcatcatgctaatgaaatatatgaaaccaagatattctaagcaaagactagtttcaattgagcatgaatggagaagctgtgtcatgcaattgtgacacatgaaacataattttggtggcaacatagtggtgagacaggtatagatgggaaaacaccagttggaatcattttagtgagtgaagatgaaacaagtttttgggacttgaaagataataagctgctttggagttgcacctttttttcaaaatgtcatttatttggctgcagagtagttccagtattttagccaaaatcttcctttctgcttgggtgggcatgtaccctttgacatgctatgatgttttttctttttcctttcttgtagtatcgcttgtagcaccaagaggatttctggtcctcctgttttgtatttcaacattgcaagatgattttgttgctcaaacatatgtagcactggccaaatgttatgcttgctataatccttttgttcaacaactgtgtttagagctaagctgaatatattaagctcaatattgttctcatgtttctgataccccctcctatctttttcttttacaattgaacaatgaagtgaatattttttatgttgataaaatgatattatcacctctaacttattacttcttttggtttcttgtgttgaaaaaccaaaatagtgggccgttctctgttcggtggattaagcaacagttcccctggtttatttaccacattacatgagatgacatgcaaaaatatgttttctcagcaacaacgtaccttcatacagatgaggactgttctcaaggttgtggataactcgggggctaaaaaggtgatgtgcatacaggcattgaaagggaagaaaggggcaagattaggtgacacaataatagcatctgtgaaggaagcacatcctaatggaaaagtgaagaaaggaaaggttgtatatggggtagtggtgcgtgcggcaatgcaaaaggggcgttgtgatggcagtgaagtcaagtttgatgataatgctgtggtgcttgttgacaagcaaggccaacctattggaaccagagtttttggaccagtgcctcatgagctaaggcaaaagaagcatgtcaagattcttaccttggcagggcacattgcataaatgagaaaaagggctgtccttgagttttgttatgaattcaaatgtcacatctaccatttttatatttggatattttgatgtgatgtgc

SEQ ID NO: 52509 - protein, 133 aa, Glycine max
  peptide (1)..(133): Ceres Seq. ID no. 14315254
MTCKNMFSQQQRTFIQMRTVLKVVDNSGAKKVMCIQALKGKKGARLGDTIIASVKEAHPNGKVKKGKVVYGVVVRAAMQKGRCDGSEVKFDDNAVVLVDKQGQPIGTRVFGPVPHELRQKKHVKILTLAGHIA

SEQ ID NO: 52510 - protein, 128 aa, Glycine max
  peptide (1)..(128): Ceres Seq. ID no. 14315255
MFSQQQRTFIQMRTVLKVVDNSGAKKVMCIQALKGKKGARLGDTIIASVKEAHPNGKVKKGKVVYGVVVRAAMQKGRCDGSEVKFDDNAVVLVDKQGQPIGTRVFGPVPHELRQKKHVKILTLAGHIA

SEQ ID NO: 52511 - protein, 117 aa, Glycine max
  peptide (1)..(117): Ceres Seq. ID no. 14315256
MRTVLKVVDNSGAKKVMCIQALKGKKGARLGDTIIASVKEAHPNGKVKKGKVVYGVVVRAAMQKGRCDGSEVKFDDNAVVLVDKQGQPIGTRVFGPVPHELRQKKHVKILTLAGHIA

SEQ ID NO: 52512 - DNA, 1415 bp, Glycine max
  misc_feature (1)..(1415): Ceres Seq. ID no. 14315249
atgctttggttagagtttgatttcggtataggaaaaagtgaagctagcaagaacgaaaggttggctcagattgcaatattttaaggctcaagagaatcaaagactccttggcatatttaacttttaagacggcaaaaaatgtttccattttctgctcaagctatctcagatagatagccataaagtttgtcaagttaatgtgatgttttctgcataaaaattacttggatgttgtgttttctcttcatttaagaatggaaaagattccaaatgcaggatttacacgtgttttcggttttccaatggaaatgaagaatgaggatcagatcacacaacaggctcagagaccaaaatatgattgccttctatttgatttagatgatactttgtatcctctcaattctggtcttgcaaatgcaattgacaaaaatattaaagactacatggtcgagaagcttggcgcagaaccaagtaaaactggtgaattggtcaacctcctttacagtaactatggaactactattgctggtctaagggctattggatatgacattgactatgaagaatattacagttttgttcatgggaaattaccttatgagaacttaaagccagacccagttctgaggaatctgctgctgagtctcccctatagaaagcttattttcacaaactcagacaaagtccatacgattaaggcacttgaaagacttgggttggaagactgctttgaaggaatgatatgctttgagacccttaatcctatccaaaagagcactgttttttattatgaagctgacataaagtttgagggttcaaagagcataaatccaacacccaaaaatggtgtagaatgctctgaaatctttgacatcatagagcattttgctcaacctgaacccagtgcagtcctgccagagacaccaattatctgcaaaccatccgaacatgccattaaattggccctcaagatggccaaccttaacccacaaagaaccttgttctttgaggatagtgtccgcaacatacaatctggaaaacgattgggccttcacactgtgttggttggtagatcctacagggttaaaggtgctgattatgccatggaaagcattcacaaccttaaggaggcagtgcctgaactgtgggaagctgacataaaagcacaagttgcatgcccgggaactgagaagcttgcagtggagacatcagatatagcttgagacttcgcaagaatgccccttttagtatcgttaataaattgaaaatctatgtagaaataaagaagcagtcagccacagggttttccatcttcaaatgtttttttttaaatctataggatcattgcattcaatatcagagatttgataacattcacagatcctattcaatcaatgatttagatttcttcgttc

SEQ ID NO: 52513 - protein, 322 aa, Glycine max
  peptide (1)..(322): Ceres Seq. ID no. 14315250
MEKIPNAGFTRVFGFPMEMKNEDQITQQAQRPKYDCLLFDLDDTLYPLNSGLANAIDKNIKDYMVEKLGAEPSKTGELVNLLYSNYGTTIAGLRAIGYDIDYEEYYSFVHGKLPYENLKPDPVLRNLLLSLPYRKLIFTNSDKVHTIKALERLGLEDCFEGMICFETLNPIQKSTVFYYEADIKFEGSKSINPTPKNGVECSEIFDIIEHFAQPEPSAVLPETPIICKPSEHAIKLALKMANLNPQRTLFFEDSVRNIQSGKRLGLHTVLVGRSYRVKGADYAMESIHNLKEAVPELWEADIKAQVACPGTEKLAVETSDIA

SEQ ID NO: 52514 - protein, 306 aa, Glycine max
  peptide (1)..(306): Ceres Seq. ID no. 14315251
MEMKNEDQITQQAQRPKYDCLLFDLDDTLYPLNSGLANAIDKNIKDYMVEKLGAEPSKTGELVNLLYSNYGTTIAGLRAIGYDIDYEEYYSFVHGKLPYENLKPDPVLRNLLLSLPYRKLIFTNSDKVHTIKALERLGLEDCFEGMICFETLNPIQKSTVFYYEADIKFEGSKSINPTPKNGVECSEIFDIIEHFAQPEPSAVLPETPIICKPSEHAIKLALKMANLNPQRTLFFEDSVRNIQSGKRLGLHTVLVGRSYRVKGADYAMESIHNLKEAVPELWEADIKAQVACPGTEKLAVETSDIA

SEQ ID NO: 52515 - protein, 304 aa, Glycine max
  peptide (1)..(304): Ceres Seq. ID no. 14315252
MKNEDQITQQAQRPKYDCLLFDLDDTLYPLNSGLANAIDKNIKDYMVEKLGAEPSKTGELVNLLYSNYGTTIAGLRAIGYDIDYEEYYSFVHGKLPYENLKPDPVLRNLLLSLPYRKLIFTNSDKVHTIKALERLGLEDCFEGMICFETLNPIQKSTVFYYEADIKFEGSKSINPTPKNGVECSEIFDIIEHFAQPEPSAVLPETPIICKPSEHAIKLALKMANLNPQRTLFFEDSVRNIQSGKRLGLHTVLVGRSYRVKGADYAMESIHNLKEAVPELWEADIKAQVACPGTEKLAVETSDIA

SEQ ID NO: 52516 - DNA, 1599 bp, Glycine max
  misc_feature (1)..(1599): Ceres Seq. ID no. 14315241
aacagaaagacacaatgggcaaagaaagtagtacttgtgttcttctatcccttctcattctttcactctttgtggctgaaatatatggaaatagacaagttcaagctcttaacaaactgcacaagtccaccaagttcagaggaaattcacaaattgataggagtgagtttgaggtagaggagcttgcttatgatggcattgttcactctcaagagggtctcaaagagaaagatagaattgagagtcttccaggacaaccccctgtgagtttttctcactatggagggtatgtcactgtggataaagaagcaggtcgtgccttctattattacttcgttgaagctcaacgttctaaacaaacactcccacttcttctttggctcaatggaggtcctggatgttcatctcttggctatggagcaatgcaagaacttggaccttttcgagtaaacagtgatggtaaaacactccacagaaatatattttcttggaacaaagttgcaaatgttttattcctggagtcacctgctggagtaggattttcctattcaaacaaatcaaaagattatgatacgaatggagataagaaaacagctgcagacaattatttattcttggtgaattggttggagagatatccagaatataaggaaagagatttctatattgctggggaaagctatgctgggcattatgtgcctcaatttgcacataccattctctatcataacaaaaaggcaaataagaaaatcatcaatctaaaaggaatcttgattgggaatgcagtgatcaacgaggaaactgactcggacggactgtatgattatcttgccagccatgcaatcatctcagacaaagcagcttatctcaacaaagcttgtgattcatcatcatcaaagattcaggaaagtgtgtgcgatgcagccggagatgaacttggggaggatattgaatacattgatttatacaatatttatgctccactatgcaagaatgcaaatctcacagccctgcccaaaaggaacacaattgtgactgatccatgtagtgagaattatgtgtacgcatatcttaatagaaaagatgttcaagaggctctccatgccaatgtaaccaacctcaaacatgactgggaaccctgcagcgatgtcataacaaagtgggttgatcaagcttcaacagttcttccacttttacatgaattcctcaacaatagcctcagggtttggattttcagtggtgacacagatggaagggtgcctattacatcaaccaagtattcagttaagaagatgaaccttcccattaaatctgtttggcacccttggttttcctatggagaggttggtggctatgtagaagtatacaagggaggcctaacattagctacggtgagggaagcagggcatcaagtgccaagttaccaaccagccagagccctaactttgatcaaatatttcttagacggcactcctcttcccggtcctcccaaaagaaaggactaggactagtttcttcaaatccacttttcaataattgttgtggtaattattaatttaaggaaaataaatacaattatattatagtggggtttcttgg

SEQ ID NO: 52517 - protein, 500 aa, Glycine max
  peptide (1)..(500): Ceres Seq. ID no. 14315242
QKDTMGKESSTCVLLSLLILSLFVAEIYGNRQVQALNKLHKSTKFRGNSQIDRSEFEVEELAYDGIVHSQEGLKEKDRIESLPGQPPVSFSHYGGYVTVDKEAGRAFYYYFVEAQRSKQTLPLLLWLNGGPGCSSLGYGAMQELGPFRVNSDGKTLHRNIFSWNKVANVLFLESPAGVGFSYSNKSKDYDTNGDKKTAADNYLFLVNWLERYPEYKERDFYIAGESYAGHYVPQFAHTILYHNKKANKKIINLKGILIGNAVINEETDSDGLYDYLASHAIISDKAAYLNKACDSSSSKIQESVCDAAGDELGEDIEYIDLYNIYAPLCKNANLTALPKRNTIVTDPCSENYVYAYLNRKDVQEALHANVTNLKHDWEPCSDVITKWVDQASTVLPLLHEFLNNSLRVWIFSGDTDGRVPITSTKYSVKKMNLPIKSVWHPWFSYGEVGGYVEVYKGGLTLATVREAGHQVPSYQPARALTLIKYFLDGTPLPGPPKRKD

SEQ ID NO: 52518 - protein, 496 aa, Glycine max
  peptide (1)..(496): Ceres Seq. ID no. 14315243
MGKESSTCVLLSLLILSLFVAEIYGNRQVQALNKLHKSTKFRGNSQIDRSEFEVEELAYDGIVHSQEGLKEKDRIESLPGQPPVSFSHYGGYVTVDKEAGRAFYYYFVEAQRSKQTLPLLLWLNGGPGCSSLGYGAMQELGPFRVNSDGKTLHRNIFSWNKVANVLFLESPAGVGFSYSNKSKDYDTNGDKKTAADNYLFLVNWLERYPEYKERDFYIAGESYAGHYVPQFAHTILYHNKKANKKIINLKGILIGNAVINEETDSDGLYDYLASHAIISDKAAYLNKACDSSSSKIQESVCDAAGDELGEDIEYIDLYNIYAPLCKNANLTALPKRNTIVTDPCSENYVYAYLNRKDVQEALHANVTNLKHDWEPCSDVITKWVDQASTVLPLLHEFLNNSLRVWIFSGDTDGRVPITSTKYSVKKMNLPIKSVWHPWFSYGEVGGYVEVYKGGLTLATVREAGHQVPSYQPARALTLIKYFLDGTPLPGPPKRKD

SEQ ID NO: 52519 - protein, 360 aa, Glycine max
  peptide (1)..(360): Ceres Seq. ID no. 14315244
MQELGPFRVNSDGKTLHRNIFSWNKVANVLFLESPAGVGFSYSNKSKDYDTNGDKKTAADNYLFLVNWLERYPEYKERDFYIAGESYAGHYVPQFAHTILYHNKKANKKIINLKGILIGNAVINEETDSDGLYDYLASHAIISDKAAYLNKACDSSSSKIQESVCDAAGDELGEDIEYIDLYNIYAPLCKNANLTALPKRNTIVTDPCSENYVYAYLNRKDVQEALHANVTNLKHDWEPCSDVITKWVDQASTVLPLLHEFLNNSLRVWIFSGDTDGRVPITSTKYSVKKMNLPIKSVWHPWFSYGEVGGYVEVYKGGLTLATVREAGHQVPSYQPARALTLIKYFLDGTPLPGPPKRKD

SEQ ID NO: 52520 - DNA, 478 bp, Glycine max
  misc_feature (1)..(478): Ceres Seq. ID no. 14305686
caagtttcagctctaagcttcatctatctccgtctttcaggcaaactaaaaagtttataatctagttttctgtcctcctctatctagaatggcgcttgtcaaaagtattgtttcaacagtaagacccaacttaatgacatttctgaagtttgcaaaagttgaattaactccacctactcctggtgacattccagcaatttcccgtgggtttggagacatcgttagtgcagccaagactggtcggtggaagcaactgactgttaaagaagcatggctgaatgttttggtgttcactgaagtaacatgctggttttggattggagaagtaattggcaagaggaacatgattggatatgacgttcaagtataagtcatgccatcaaaaaaagtttagaaatgtatctttcaatttagcaggcattgtttaacactcatattgagatttggtaatgtaaatgttaaaataaaacttgtttct

SEQ ID NO: 52521 - protein, 93 aa, Glycine max
  peptide (1)..(93): Ceres Seq. ID no. 14305687
MALVKSIVSTVRPNLMTFLKFAKVELTPPTPGDIPAISRGFGDIVSAAKTGRWKQLTVKEAWLNVLVFTEVTCWFWIGEVIGKRNMIGYDVQV

SEQ ID NO: 52522 - protein, 78 aa, Glycine max
  peptide (1)..(78): Ceres Seq. ID no. 14305688
MTFLKFAKVELTPPTPGDIPAISRGFGDIVSAAKTGRWKQLTVKEAWLNVLVFTEVTCWFWIGEVIGKRNMIGYDVQV

SEQ ID NO: 52523 - DNA, 1779 bp, Glycine max
  misc_feature (1)..(1779): Ceres Seq. ID no. 15177328
gagggaaagacgttcttcaatttcatcgctcgagcttcatttctgactcagagtaacactacagagtacaaacatcaaacaccttctctgcacgcaaaaaccgcgaaaagaactagaaccaaagatgcagagattcaaagctctgctacctcaacaaactaggtcctcacttcgcactctctgttctcaccgtcgagctttctccgctcaaccgaattacgcaaagcaccacgacgacgattctcaggaacagattttagtcgaaggaagagcgaaatcacgagcagctattctcaacaggccgtcttcgctgaactcgctcaatgcttcaatggttgctcggttgaagaggctgtatgattcctgggaagaaaactctgatattggctttgttttgatgaagggtagtggcagagctttctgttctggtgcagatgttgttaggctgtatcactcactcaatgaaggaaatactgacgaagctgaacagtttttcaaaacattatattcatttgtatatcttcaagggacatatcttaaaccacatgttgccattttggatggaataacaatggtatgtggatctggaatttctctaccaggaatgttccgtgtggtaactgataaaactgttttttctcacccagaagctcaaataggtttccacccagatgcaggagcttcttatgttttgtctcgtctacctggctacttaggggaatacttggcccttacaggagataagcttaatggtgttgaaatgattgcctgccgccttgctactcattattcactaaatgcaaggctctctttgcttgaagaacgtcttggtaaactaatcacagacgaaccttctgttgtggagtcatccctcgcacagtatggtgatcttgtttatccagataggagcagtgtccttcacaggattgatactattgatagatgtttcagtcacgaaactgtggaggaaattattgaagctttggagaaagaggctgctgagtctaatgacgaatggtactcgactactctaaggagaataagagaagcctccccgttgagtttgaaagttactttacaatctatacgtgaaggtagatttgaaacacttgataaatgtcttgtacgtgagtatcgtatgtccctacgtggtatttcaaagcatgtctcctctgatttctttgagggtgttcgggcacgaatggttgatagagattttgcaccaaagtgggacccacctagattaaaagatatatcagaggacatggttgaatactatttctctcctttaagtgaagttcaatctgaattagtgctgccaacagctttgcgagaaccttacatgtgaaaccagcatacctcttagaaaggattttgattaaaaaaataaattccgtgtaaagaggcgttgatgcagttggaagatggcacaatccatgaactatcgcattcacctgcctttgacaaaacttccaccaccaacggttcctgtctgactatctgtcggattaccgaatgaactttccaatgttcggaattatctttgttcttgaatgtgtgtagtctaatgttggccccataaatataagtgaaaggaccatatctgcttctttcattgtttatgctttgattgctcacattggcatgagatgcttttctaatagacgtgctgcagtgatgcctatttttatatcttatttttcgtgcttttatgttgtctgattatgttatttgtagaatacaacacatgttaacattaaaaatctgtttgtagaatac

SEQ ID NO: 52524 - protein, 407 aa, Glycine max
  peptide (1)..(407): Ceres Seq. ID no. 15177329
MQRFKALLPQQTRSSLRTLCSHRRAFSAQPNYAKHHDDDSQEQILVEGRAKSRAAILNRPSSLNSLNASMVARLKRLYDSWEENSDIGFVLMKGSGRAFCSGADVVRLYHSLNEGNTDEAEQFFKTLYSFVYLQGTYLKPHVAILDGITMVCGSGISLPGMFRVVTDKTVFSHPEAQIGFHPDAGASYVLSRLPGYLGEYLALTGDKLNGVEMIACRLATHYSLNARLSLLEERLGKLITDEPSVVESSLAQYGDLVYPDRSSVLHRIDTIDRCFSHETVEEIIEALEKEAAESNDEWYSTTLRRIREASPLSLKVTLQSIREGRFETLDKCLVREYRMSLRGISKHVSSDFFEGVRARMVDRDFAPKWDPPRLKDISEDMVEYYFSPLSEVQSELVLPTALREPYM

SEQ ID NO: 52525 - protein, 338 aa, Glycine max
  peptide (1)..(338): Ceres Seq. ID no. 15177330
MVARLKRLYDSWEENSDIGFVLMKGSGRAFCSGADVVRLYHSLNEGNTDEAEQFFKTLYSFVYLQGTYLKPHVAILDGITMVCGSGISLPGMFRVVTDKTVFSHPEAQIGFHPDAGASYVLSRLPGYLGEYLALTGDKLNGVEMIACRLATHYSLNARLSLLEERLGKLITDEPSVVESSLAQYGDLVYPDRSSVLHRIDTIDRCFSHETVEEIIEALEKEAAESNDEWYSTTLRRIREASPLSLKVTLQSIREGRFETLDKCLVREYRMSLRGISKHVSSDFFEGVRARMVDRDFAPKWDPPRLKDISEDMVEYYFSPLSEVQSELVLPTALREPYM

SEQ ID NO: 52526 - protein, 316 aa, Glycine max
  peptide (1)..(316): Ceres Seq. ID no. 15177331
MKGSGRAFCSGADVVRLYHSLNEGNTDEAEQFFKTLYSFVYLQGTYLKPHVAILDGITMVCGSGISLPGMFRVVTDKTVFSHPEAQIGFHPDAGASYVLSRLPGYLGEYLALTGDKLNGVEMIACRLATHYSLNARLSLLEERLGKLITDEPSVVESSLAQYGDLVYPDRSSVLHRIDTIDRCFSHETVEEIIEALEKEAAESNDEWYSTTLRRIREASPLSLKVTLQSIREGRFETLDKCLVREYRMSLRGISKHVSSDFFEGVRARMVDRDFAPKWDPPRLKDISEDMVEYYFSPLSEVQSELVLPTALREPYM

SEQ ID NO: 52527 - DNA, 1426 bp, Glycine max
  misc_feature (1)..(1426): Ceres Seq. ID no. 14315223
attcagattagaaagtgagagtttggattctcaaagacagatattgagattttgcacacacagagagagagagagagagagagatgggaagagctccatgttgtgacaaggcaagtgttaagagagggccatggtccccagaagaagacacaaagctgaaggagtacatagagaagcatggaactggagggaattggattgctcttcctcagaaagctggacttaagagatgtggaaaaagttgtagattgagatggctcaactatctcaggcccaacattaagcatggagatttctcagatgaggaagacagaataatttgcagcctttatgttaatattggaagcaggtggtcaattatagctgctcagttaccaggaaggacagacaatgatattaagaactactggaacaccaagttgaagaaaaagctcatgggtttgcttcctctttctcatcacagaaaacaaccttcatttccatcctctacccttcaaaactctccaccctctccttcatctgaccaactttacggagagtactgcacctacacccccttaacaaccacatctttcacaagtaatattgaacccttttccctcccttcaagtaactacgcaagcacaagtacaacctcagtttctcactccttttaccagaaccaagactccatgcaacaatgctatcaccctacgagagacaacaacatgctcatgtttggaagcgaaggaagttgcagtacttcctctgacggaagctgcactcaaggcagagaaattatcaagcaagaagaaattggttaccacagctacaataatgattataactttatgcttaatcacagcaacaatattaatgatggagaaaagtcatgttttggtgagtggtttagccaaacactactaacaccgttggattatgatcttgaggatattaagcaattgattagtagcagcagtagcactgctagcttcaataatgttgatgaaaacaagacagaagagaaggccatgtactactactactactagtgcctgcaaactgatgatgatgactgaatctgactactggtaaaagatatgatgatggagaaagggtatgttaagttggtgtggcaaagattcagaaaaaaaaaaattgatgagatcttctggggttctgcgttctctgatgaaacatttcttgttttgacagtacatggtaaaagcttctcttatattttgtgcatatcttctcggaatgggtgatgatgatgaccacaacgacaaagaagaaaaagaagatgttgttagatttgttttttgttaagtattctctcctaatcagatattaatgttgtgaaaaaacactcaatgatcaattcaaattattttatatcagagattataattatatatataacatagtttagtgtgttataagtact

SEQ ID NO: 52528 - protein, 315 aa, Glycine max
  peptide (1)..(315): Ceres Seq. ID no. 14315224
MGRAPCCDKASVKRGPWSPEEDTKLKEYIEKHGTGGNWIALPQKAGLKRCGKSCRLRWLNYLRPNIKHGDFSDEEDRIICSLYVNIGSRWSIIAAQLPGRTDNDIKNYWNTKLKKKLMGLLPLSHHRKQPSFPSSTLQNSPPSPSSDQLYGEYCTYTPLTTTSFTSNIEPFSLPSSNYASTSTTSVSHSFYQNQDSMQQCYHPTRDNNMLMFGSEGSCSTSSDGSCTQGREIIKQEEIGYHSYNNDYNFMLNHSNNINDGEKSCFGEWFSQTLLTPLDYDLEDIKQLISSSSSTASFNNVDENKTEEKAMYYYYY

SEQ ID NO: 52529 - protein, 198 aa, Glycine max
  peptide (1)..(198): Ceres Seq. ID no. 14315225
MGLLPLSHHRKQPSFPSSTLQNSPPSPSSDQLYGEYCTYTPLTTTSFTSNIEPFSLPSSNYASTSTTSVSHSFYQNQDSMQQCYHPTRDNNMLMFGSEGSCSTSSDGSCTQGREIIKQEEIGYHSYNNDYNFMLNHSNNINDGEKSCFGEWFSQTLLTPLDYDLEDIKQLISSSSSTASFNNVDENKTEEKAMYYYYY

SEQ ID NO: 52530 - DNA, 874 bp, Glycine max
  misc_feature (1)..(874): Ceres Seq. ID no. 14315297
atctgttaaatgtaactgctccaatcagatgctatcatatctgtgagattatatacagataagcttccacaatgaattgaagggctagctattccgttttcataaagtagggaaagagatcgatcttcttcttcatctttcttctccttttctattcttggtttcttcttttagaaatgaacgtgaagggtatcatggatggtaaaattgaagctgggaacaccaattgtattgttaaggaggatgtgaatgatgattcgatatccattggatcagtatcagaagattcaatgaactctgtgtgttcatcttcttcatcagaattggctgaggatgcatcatcctcttcagcatcttatttgtcaacctcatcatcgcattcaaacggccctttgtttgaactatcagagctaatgagtcaactccctatcaagagaggcttgtctatgttttatcaagggaaggctcagtctttcagttctctagcaagcgtggagagcataggggatcttcctaagaagaaagagagattttacaggaagaaaatgaaatcatgcaaaagcttcgcgggaggcttggatagcagccacagaatatcgttcgctccaaaggctacaatatcaaagaaatcttcgagagcaacttttgtatccgtgctaactaaaagagggagtttccttggaggctccagaacttccttttctgtacagaagaacttttgatatccaaccttgttaattagagcttagttaatatttcatgcacaaaatagggaaaattttgagtccctcaccttcagcttttctcacacgaagaagtcatgtcatattgtttattggtaaataattaatatacatatgattcattaattagt

SEQ ID NO: 52531 - protein, 181 aa, Glycine max
  peptide (1)..(181): Ceres Seq. ID no. 14315298
MNVKGIMDGKIEAGNTNCIVKEDVNDDSISIGSVSEDSMNSVCSSSSSELAEDASSSSASYLSTSSSHSNGPLFELSELMSQLPIKRGLSMFYQGKAQSFSSLASVESIGDLPKKKERFYRKKMKSCKSFAGGLDSSHRISFAPKATISKKSSRATFVSVLTKRGSFLGGSRTSFSVQKNF

SEQ ID NO: 52532 - protein, 175 aa, Glycine max
  peptide (1)..(175): Ceres Seq. ID no. 14315299
MDGKIEAGNTNCIVKEDVNDDSISIGSVSEDSMNSVCSSSSSELAEDASSSSASYLSTSSSHSNGPLFELSELMSQLPIKRGLSMFYQGKAQSFSSLASVESIGDLPKKKERFYRKKMKSCKSFAGGLDSSHRISFAPKATISKKSSRATFVSVLTKRGSFLGGSRTSFSVQKNF

SEQ ID NO: 52533 - protein, 143 aa, Glycine max
  peptide (1)..(143): Ceres Seq. ID no. 14315300
MNSVCSSSSSELAEDASSSSASYLSTSSSHSNGPLFELSELMSQLPIKRGLSMFYQGKAQSFSSLASVESIGDLPKKKERFYRKKMKSCKSFAGGLDSSHRISFAPKATISKKSSRATFVSVLTKRGSFLGGSRTSFSVQKNF

SEQ ID NO: 52534 - DNA, 1665 bp, Glycine max
  misc_feature (1)..(1665): Ceres Seq. ID no. 14315279
atagaatttctgaaacaaagaatcttccctctatttctccccaattttccatcaccatttttcctcaaatttctcttcttcttcatccagaaaatgaatcccaatcccaacaccaacgatttccctctcctctcccaccttcttaaccaccttgatccccaaacacacccacccctccccgcagagctagaccaatctctattaacccaattccctcacttgaaccaccccagcgtgttatcctcactcgcccgtcacgcctccaccctcaacgtcacccccacactctccctcctccgcaccctcggcccccgcccagacccctccgctgtcgccgccgcccgcgccaggatcgccgacccccacgcgcgcgaggacggcggcgaggcccacgtggtccacgcgctggtgcgcgtggacgacacgcacgaggagtgcgtgaagcagctgagagcctccgagaaaaagctcctcgaggcctatgctgaatcggtgaaaggggtcgttgaagaagtgagcgaaggagtggttagggtattgaagaaagcggagagtgaggaagtggaaagggttgatctctctgggtcccacttgaggattctccccgaagcgttcgggaagattcgtggcctcgttgtgcttaatttgtctcagaatcagttagaggtgattcctgattcaatagcaggactacagaggcttgtggagctggatgtttcatctaatgttttagagtccctacctgactctattggattgttggttaatctgaagatctttaatgtgtcagcaaacaagctaactgctcttcctgaatccattgctctttgcaggtcactagtcgaattggatgcaagctttaacaacttaatgtgtctgccaacgaacatgggttttggacttgttaaccttgagaagctcttgatccatttgaacaagatacgatttcttcccgcctccattggagaaatgaaatctctcaggcatcttgatgttcatttcaatgagcttcatggcctacctcaatccattgggaaactcacaaatctggaatatctgaatgttagcagtaactttagtgacatgacagagctacctgaaacacttggtgatctggtcaacttaagggagcttgacctcagcaacaaccaaatccgagctcttccttactcgttcggtaggcttgaaaaattgacaaagctcaacctggaccagaatccaatcatagttcccccaattgaggttgtaaatcaaggggctgaggctgtgaaggagttcatggccaagtggtggctcgatctcattgaagaagctcaacagaaaagcatgtccgaaacacaaaatcagcaagcacagacaggatggctcgcatggggagcctcattgttgaataatgttgctgaagtttctgaaagtgttgcagaatattttggcgctaaaaaagctcctagagacccatggttggatcaacagctgtgatacaagaatatctggactctgcctacatacactgggtttataatttcgtgggatgtatagtttgtgatatagcttttggactcttgttaccactgtaatcaatacttttgtttttcatcttttttttttttttttacttgcagttatacttacacggtataatttgtttggcattactgtctgatc

SEQ ID NO: 52535 - protein, 492 aa, Glycine max
  peptide (1)..(492): Ceres Seq. ID no. 14315280
IEFLKQRIFPLFLPNFPSPFFLKFLFFFIQKMNPNPNTNDFPLLSHLLNHLDPQTHPPLPAELDQSLLTQFPHLNHPSVLSSLARHASTLNVTPTLSLLRTLGPRPDPSAVAAARARIADPHAREDGGEAHVVHALVRVDDTHEECVKQLRASEKKLLEAYAESVKGVVEEVSEGVVRVLKKAESEEVERVDLSGSHLRILPEAFGKIRGLVVLNLSQNQLEVIPDSIAGLQRLVELDVSSNVLESLPDSIGLLVNLKIFNVSANKLTALPESIALCRSLVELDASFNNLMCLPTNMGFGLVNLEKLLIHLNKIRFLPASIGEMKSLRHLDVHFNELHGLPQSIGKLTNLEYLNVSSNFSDMTELPETLGDLVNLRELDLSNNQIRALPYSFGRLEKLTKLNLDQNPIIVPPIEVVNQGAEAVKEFMAKWWLDLIEEAQQKSMSETQNQQAQTGWLAWGASLLNNVAEVSESVAEYFGAKKAPRDPWLDQQL

SEQ ID NO: 52536 - protein, 461 aa, Glycine max
  peptide (1)..(461): Ceres Seq. ID no. 14315281
MNPNPNTNDFPLLSHLLNHLDPQTHPPLPAELDQSLLTQFPHLNHPSVLSSLARHASTLNVTPTLSLLRTLGPRPDPSAVAAARARIADPHAREDGGEAHVVHALVRVDDTHEECVKQLRASEKKLLEAYAESVKGVVEEVSEGVVRVLKKAESEEVERVDLSGSHLRILPEAFGKIRGLVVLNLSQNQLEVIPDSIAGLQRLVELDVSSNVLESLPDSIGLLVNLKIFNVSANKLTALPESIALCRSLVELDASFNNLMCLPTNMGFGLVNLEKLLIHLNKIRFLPASIGEMKSLRHLDVHFNELHGLPQSIGKLTNLEYLNVSSNFSDMTELPETLGDLVNLRELDLSNNQIRALPYSFGRLEKLTKLNLDQNPIIVPPIEVVNQGAEAVKEFMAKWWLDLIEEAQQKSMSETQNQQAQTGWLAWGASLLNNVAEVSESVAEYFGAKKAPRDPWLDQQL

SEQ ID NO: 52537 - DNA, 1585 bp, Glycine max
  misc_feature (1)..(1585): Ceres Seq. ID no. 14315301
ttttgagtgctatgttcaatttttatgaaacttatcaatattggaatctattttatttggtcatgattcttttggttattgttctgatccggaacttagtgtatgaggaatgaggatagctgcaattttttgctgttttttgtaacttttgattctgatgcaaatgctgcattctgtttccaaaagtaaacctgcgacttggctgtaaactttcaataagatgtagagaattgggtatttgtatcaatgaatgtgtatactgccccttaatattgattgtcatttgtcttggttagatactaagatgtacagaaatgttctaattgtactgtagtggagacttttccattgttaataacaacaatgaagccttatcccacaagatgagttcaactacatagatcgcacaatgacatttggcttggttaaagaccaaatcttcacagatagcaacattatattcgggtgctgatgcagtggctctaactcatttgacacagtactgtagccatatacaacactttacttctggataacaacctagcattagcaaaaatctgttgtgtgtgatccatgtcccgtatatcgacaagttttatgttaactgcctagagcctgatacaatcctcctcctttacttgggcttgggactggctatgaaactataggcggtgttactttttcattgttaatgtttcatataatttcaagctcatgaatttgaatgtttcttgaccctccaaatataatagttgatcacaagagaatactttgtctaatttgtaatttagtttatgtcattctgcactgttaaggttggttgctttagattttaatttttcattgtttactgatagccagaacatcatgttaatgaccctgaatccgatcctgttcttcttgatgcaatccctactttgaagttcaaccaagaggctttcagttcccttgaacacacacagtgtgtaatatgtttggcagattacagagaaagagaagtattgcgcatcatgcccaaatgtggccacacttttcatctttcttgcattgatatatggctgaggaaacaatccacctgtccagtatgccgtctgccattgaaaaactcttccgaaacgaaacatgtgagacctgtgacatttaccatgagccaatcccttgacgagtctcacacatcagacagaaacgatgatattgagagatatgttgaacctacacctactgcagccagtaactctttacaaccaacttcaggagaacaagaagcaaggcaatgatcttagagaactaaaggggttgttctgctcaaaaagagaagaatgtagaatttctgcttctatagaggaatgcttctaattatagattggattcaaattctttgtctgtaatatggccttcatattcacttggtggtgtaaatatgtttccttttgtagcatatgcgggccaaggttttggtggaatttcttgcataccgatttgaagttcttttgtctatggtatcgcttactctagcaagcacactgctcttgttaatgcttaacagattaaacaaatggttgattacatattttttttcttgtac

SEQ ID NO: 52538 - protein, 88 aa, Glycine max
  peptide (1)..(88): Ceres Seq. ID no. 14315302
MPKCGHTFHLSCIDIWLRKQSTCPVCRLPLKNSSETKHVRPVTFTMSQSLDESHTSDRNDDIERYVEPTPTAASNSLQPTSGEQEARQ

SEQ ID NO: 52539 - protein, 55 aa, Glycine max
  peptide (1)..(55): Ceres Seq. ID no. 14315303
MILRDMLNLHLLQPVTLYNQLQENKKQGNDLRELKGLFCSKREECRISASIEECF

SEQ ID NO: 52540 - protein, 50 aa, Glycine max
  peptide (1)..(50): Ceres Seq. ID no. 14315304
MLNLHLLQPVTLYNQLQENKKQGNDLRELKGLFCSKREECRISASIEECF

SEQ ID NO: 52541 - DNA, 679 bp, Glycine max
  misc_feature (1)..(679): Ceres Seq. ID no. 14315294
aaaaaaattcatccccatcaaaacacaagcaaatcctaaaaagttgattgagatatatagaaactagcttcaatttcacaaaatgaagaaagtgtttgtcacatttttagctgtgctagttgtatttgttcttacagcgaaagcttcagaggcacgactaccagttaaaacaaattcagcatcaaatgactacaattgttcacaagtctataacctgttagtttcgtgcgtagattacatgattggtggagatgatggtgccccttcaggtgtttgttgccaaagtgttaatgcagtgaaagcatcagcaccaacacaaattcaacgaatggctgcatgtaagtgctttttcgacgtagcaactcgccttccttccttgctcgaaaacaaggccaattcacttcctaaattatgtggtgttgatttgggttttatcatgagcaagcagaacaccaattgtaacaatgttcctgtaagctcaaggcaagggagagattagtacaataaaattgatgcatgtttggaagtttctttcttcttgaaaaaagaaaataaaatggtttgttgaatatacaagcgtttcatgttggaaataataatgagtggatattttctaaatgtgttcttattcatatgcatcttcatcatatagattaatatataatgtttaattaagtcg

SEQ ID NO: 52542 - protein, 138 aa, Glycine max
  peptide (1)..(138): Ceres Seq. ID no. 14315295
MKKVFVTFLAVLVVFVLTAKASEARLPVKTNSASNDYNCSQVYNLLVSCVDYMIGGDDGAPSGVCCQSVNAVKASAPTQIQRMAACKCFFDVATRLPSLLENKANSLPKLCGVDLGFIMSKQNTNCNNVPVSSRQGRD

SEQ ID NO: 52543 - protein, 86 aa, Glycine max
  peptide (1)..(86): Ceres Seq. ID no. 14315296
MIGGDDGAPSGVCCQSVNAVKASAPTQIQRMAACKCFFDVATRLPSLLENKANSLPKLCGVDLGFIMSKQNTNCNNVPVSSRQGRD

SEQ ID NO: 52544 - DNA, 648 bp, Glycine max
  misc_feature (1)..(648): Ceres Seq. ID no. 14305657
tccacagaaaaaaaaccctaaagagaccttctccatttccaaaccggcggcgaaaatgaagtacaacccaagagtcacctcctcccgcaggaagaaccgcaaggctcacttcacagcctcctcaagcgagaggcgcgtcatcatgagctcccctctctccaccgaccttcgcgccaagtacaacgtcagatccatgcccatccgcaaggacgacgaggtccagatcgtccgcgggacctacaagggacgcgaaggaaaggtcgtgcaggtgtaccgtcgcaagtgggtgattcacatcgagaggatcacgagggagaaggtgaacggcaccaccgtgaacgtcggcgtgcagccgtcgaaggttgtgataacgaagctgaggttggataaggacaggaagtcgcttttggagaggaaggccaagggccgtgccgcggcggataaggacaaggggaccaagttcactgctgaggatgttatgcagaacgttgattaaacacaaggtttattatctttttagttttttattatcagcgagtactctcttggctttgagttttgttttgtcggatgttatatttatgtttcggacatgagaaggatcgtttcaatttcgattatgagtttgaagatttagccattttcttc

SEQ ID NO: 52545 - protein, 164 aa, Glycine max
  peptide (1)..(164): Ceres Seq. ID no. 14305658
PQKKNPKETFSISKPAAKMKYNPRVTSSRRKNRKAHFTASSSERRVIMSSPLSTDLRAKYNVRSMPIRKDDEVQIVRGTYKGREGKVVQVYRRKWVIHIERITREKVNGTTVNVGVQPSKVVITKLRLDKDRKSLLERKAKGRAAADKDKGTKFTAEDVMQNVD

SEQ ID NO: 52546 - protein, 146 aa, Glycine max
  peptide (1)..(146): Ceres Seq. ID no. 14305659
MKYNPRVTSSRRKNRKAHFTASSSERRVIMSSPLSTDLRAKYNVRSMPIRKDDEVQIVRGTYKGREGKVVQVYRRKWVIHIERITREKVNGTTVNVGVQPSKVVITKLRLDKDRKSLLERKAKGRAAADKDKGTKFTAEDVMQNVD

SEQ ID NO: 52547 - protein, 117 aa, Glycine max
  peptide (1)..(117): Ceres Seq. ID no. 14305660
MSSPLSTDLRAKYNVRSMPIRKDDEVQIVRGTYKGREGKVVQVYRRKWVIHIERITREKVNGTTVNVGVQPSKVVITKLRLDKDRKSLLERKAKGRAAADKDKGTKFTAEDVMQNVD

SEQ ID NO: 52548 - DNA, 925 bp, Glycine max
  misc_feature (1)..(925): Ceres Seq. ID no. 14305649
tccctttgcccgaaaatttcagcctaatcagcaaaatagatagagcattgcagcgaccctctcctatgcttcatccttctgtctctcatcccatgtgaaggttcaatggtcactaagctagttcagccaccaatgacagattcccatgtgagtcctctcatttatagaaccatgaatgtcatgaagctccaaaattttgtcccagctagaaatcatccaagaataaacacctcaagatttggtgagagaccattatggtttagacccattacaatcattaaagttgcagaacacaattctggctcaggcttagttgagcttgaagcacttgctcagaagaaaagagagctttaccaggcggtggaaggaatcaataggggaattttcggaatcccatctaccaagaaatctgaaattgaaagtttggtgaagcagctagaatctctgaatcctactccattcccaactctagaactggagaaggtggctgggtgctggaggcttgtttacagtacaatctccattttgggatcaaagaggaccaagttaggcctcagagattttatctcattggatgatttttttcagtcgattgatatatccaagagcaaagcagttaatgtgataaagttcagtgcaaggggattgagtttgttgtctggacaacttagtattgaggcctctttcaggatttcttcctcaacaagggttgacattaatttcgaaaactcaacgatcactcctgaccggttgatgaatgtatttcggaaaaattatgatcttttgttgggcgtcttcaatccagagggatggctggaaatcacatatgttgatgaaactatgagaataggaagggacgacaaaagcaatatctttgtactggaaagatttgatgataataataacatgtagccactttccttcc

SEQ ID NO: 52549 - protein, 268 aa, Glycine max
  peptide (1)..(268): Ceres Seq. ID no. 14305650
MVTKLVQPPMTDSHVSPLIYRTMNVMKLQNFVPARNHPRINTSRFGERPLWFRPITIIKVAEHNSGSGLVELEALAQKKRELYQAVEGINRGIFGIPSTKKSEIESLVKQLESLNPTPFPTLELEKVAGCWRLVYSTISILGSKRTKLGLRDFISLDDFFQSIDISKSKAVNVIKFSARGLSLLSGQLSIEASFRISSSTRVDINFENSTITPDRLMNVFRKNYDLLLGVFNPEGWLEITYVDETMRIGRDDKSNIFVLERFDDNNNM

SEQ ID NO: 52550 - protein, 259 aa, Glycine max
  peptide (1)..(259): Ceres Seq. ID no. 14305651
MTDSHVSPLIYRTMNVMKLQNFVPARNHPRINTSRFGERPLWFRPITIIKVAEHNSGSGLVELEALAQKKRELYQAVEGINRGIFGIPSTKKSEIESLVKQLESLNPTPFPTLELEKVAGCWRLVYSTISILGSKRTKLGLRDFISLDDFFQSIDISKSKAVNVIKFSARGLSLLSGQLSIEASFRISSSTRVDINFENSTITPDRLMNVFRKNYDLLLGVFNPEGWLEITYVDETMRIGRDDKSNIFVLERFDDNNNM

SEQ ID NO: 52551 - protein, 246 aa, Glycine max
  peptide (1)..(246): Ceres Seq. ID no. 14305652
MNVMKLQNFVPARNHPRINTSRFGERPLWFRPITIIKVAEHNSGSGLVELEALAQKKRELYQAVEGINRGIFGIPSTKKSEIESLVKQLESLNPTPFPTLELEKVAGCWRLVYSTISILGSKRTKLGLRDFISLDDFFQSIDISKSKAVNVIKFSARGLSLLSGQLSIEASFRISSSTRVDINFENSTITPDRLMNVFRKNYDLLLGVFNPEGWLEITYVDETMRIGRDDKSNIFVLERFDDNNNM

SEQ ID NO: 52552 - DNA, 1499 bp, Glycine max
  misc_feature (1)..(1499): Ceres Seq. ID no. 14315257
aataattcaaagctccttggtcatcttatcatgactagatttgaagtggttttcatcgctaccccagccctcggcaaccttgttccaattgtggaattcgcggatctcctaaccaaacacaaccctcaattatctgcaaccgttctcactgtcaccacgccgcaacgacccctcataagcacctacgtccaatcccgcgcctcctcagccactaatctcaaactcctccacctccctacagtggacccacccacacccgaccagtaccaatccttcatcgccttcgtctccctccacatccaaaatcacaaacaccaggtcaagaacgagctcctcaacctcaaaaaaaacgagtcaaactcgtttgactcggttcgactcgtcgctctcttcgtcgacatgttctccaccacgctcatcgacgtcgccgccgagctcgccgtcccgtgctacctcttcttcgcgtcaccggcgagcttcctcggcttcacgctccacctcgaccgagtcgacccggtcgagtcggaatccgagttggcggttccgagttttgaaaaccccttgccacggtccgttttgcccaacctcgtgttggacgcgaacgacgcgttttcttgggtggcataccacgcgagaaggtacagggaaacaaagggcatcttcgtgaatacggttcaagagcttgaacctcacgcgcttcagtcactctacaacgattcggaattgccacgcgtttatccaattgggccggttcttgaccttgttggatcgaaccaatgggatccgaacccggcccaatacaagcgaattatggagtggcttgatcagcagcctgtgtcttcagtggtttttgtctgcttcgggagcatgggaagcttaaaggcaaaccaggtggaggagattgcaactgggcttgaaatggctaatgttagattcttatgggctttgcgggagcctccgaaggcccaattggaagacccgagagattacacaaaccccaaggacgtgctaccagatggatttcttgaacgaacggctgagatgggtttggtgtgtgggtgggtcccacaagcggtggtgttggcccacaaggccgtagggggtttcgtgtcgcattgtggttggaactcgatattagagagcttgtggcatggtgtaccgattgccacgtggccggtgtacgctgagcaacaaatgaacgcgtttcaaatggttagggaattgggattagcggtggagattagggtagattatagggtgggtggggatctggtgcgggcagaagaagtgctgaatggcgtgaggtcgctgatgaagggtgctgatgagatccaaaaaaaggtgaaagagatgagtgacatctgtagaagcgcattgatggagaacaggtcatcttacaataatctagtgttcctaattcaacacttgacaagttgaacaacccatgcaatcaactgcttttttagggattaaataataaagtttcataagtatggatt

SEQ ID NO: 52553 - protein, 478 aa, Glycine max
  peptide (1)..(478): Ceres Seq. ID no. 14315258
NNSKLLGHLIMTRFEVVFIATPALGNLVPIVEFADLLTKHNPQLSATVLTVTTPQRPLISTYVQSRASSATNLKLLHLPTVDPPTPDQYQSFIAFVSLHIQNHKHQVKNELLNLKKNESNSFDSVRLVALFVDMFSTTLIDVAAELAVPCYLFFASPASFLGFTLHLDRVDPVESESELAVPSFENPLPRSVLPNLVLDANDAFSWVAYHARRYRETKGIFVNTVQELEPHALQSLYNDSELPRVYPIGPVLDLVGSNQWDPNPAQYKRIMEWLDQQPVSSVVFVCFGSMGSLKANQVEEIATGLEMANVRFLWALREPPKAQLEDPRDYTNPKDVLPDGFLERTAEMGLVCGWVPQAVVLAHKAVGGFVSHCGWNSILESLWHGVPIATWPVYAEQQMNAFQMVRELGLAVEIRVDYRVGGDLVRAEEVLNGVRSLMKGADEIQKKVKEMSDICRSALMENRSSYNNLVFLIQHLTS

SEQ ID NO: 52554 - protein, 468 aa, Glycine max
  peptide (1)..(468): Ceres Seq. ID no. 14315259
MTRFEVVFIATPALGNLVPIVEFADLLTKHNPQLSATVLTVTTPQRPLISTYVQSRASSATNLKLLHLPTVDPPTPDQYQSFIAFVSLHIQNHKHQVKNELLNLKKNESNSFDSVRLVALFVDMFSTTLIDVAAELAVPCYLFFASPASFLGFTLHLDRVDPVESESELAVPSFENPLPRSVLPNLVLDANDAFSWVAYHARRYRETKGIFVNTVQELEPHALQSLYNDSELPRVYPIGPVLDLVGSNQWDPNPAQYKRIMEWLDQQPVSSVVFVCFGSMGSLKANQVEEIATGLEMANVRFLWALREPPKAQLEDPRDYTNPKDVLPDGFLERTAEMGLVCGWVPQAVVLAHKAVGGFVSHCGWNSILESLWHGVPIATWPVYAEQQMNAFQMVRELGLAVEIRVDYRVGGDLVRAEEVLNGVRSLMKGADEIQKKVKEMSDICRSALMENRSSYNNLVFLIQHLTS

SEQ ID NO: 52555 - protein, 345 aa, Glycine max
  peptide (1)..(345): Ceres Seq. ID no. 14315260
MFSTTLIDVAAELAVPCYLFFASPASFLGFTLHLDRVDPVESESELAVPSFENPLPRSVLPNLVLDANDAFSWVAYHARRYRETKGIFVNTVQELEPHALQSLYNDSELPRVYPIGPVLDLVGSNQWDPNPAQYKRIMEWLDQQPVSSVVFVCFGSMGSLKANQVEEIATGLEMANVRFLWALREPPKAQLEDPRDYTNPKDVLPDGFLERTAEMGLVCGWVPQAVVLAHKAVGGFVSHCGWNSILESLWHGVPIATWPVYAEQQMNAFQMVRELGLAVEIRVDYRVGGDLVRAEEVLNGVRSLMKGADEIQKKVKEMSDICRSALMENRSSYNNLVFLIQHLTS

SEQ ID NO: 52556 - DNA, 1810 bp, Glycine max
  misc_feature (1)..(1810): Ceres Seq. ID no. 14315275
attacagattcaattgcttaattaaatactattttcccctccttctataataccctccaaaatctttttccttcttcattctccctttctctatgttttggcaaaccactttaggtaaccagattactactactattgcttcatatacaaagatgctatcgtaaaaaagagagaaacttgggaagtgggaacacattcaaaatccttgtttttctttttggtctaatttttcatctcaaaacacacccattgagtatttttcatttttttgttcttttgggacaaaaaaggtgggtgttgttggcattattgaagatagaggcccccaaaatgaagaggtctccagcatcttcttgttcatcatctacttcctctgttgggtttgaagctcccattgaaaaaagaaggcctaagcatccaaggaggaataatttgaagtcacaaaaatgcaagcagaaccaaaccaccactggtggcagaagaagctctatctatagaggagttacaaggcataggtggacagggaggtttgaagctcacctatgggataagagctcttggaacaacattcagagcaagaagggtcgacaaggggcatatgatactgaagaatctgcagcccgtacctatgaccttgcagcccttaaatactggggaaaagatgcaaccctgaatttcccgatagaaacttataccaaggagctcgaggaaatggacaaggtttcaagagaagaatatttggcttctttgcggcgccaaagcagtggcttttctagaggcctgtctaagtaccgtggggttgctaggcatcatcataatggtcgctgggaagcacgaattggaagagtatgcggaaacaagtacctctacttggggacatataaaactcaagaggaggcagcagtggcatatgacatggcagcaatagagtaccgtggagtcaatgcagtgaccaattttgacataagcaactacatggacaaaataaagaagaaaaatgaccaaacccaacaacaacaaacagaagcacaaacggaaacagttcctaactcctctgactctgaagaagtagaagtagaacaacagacaacaacaataaccacaccacccccatctgaaaatctgcacatgccaccacagcagcaccaagttcaatacaccccccatgtctctccaagggaagaagaatcatcatcactgatcacaattatgaaccatgtgcttgagcaggatctgccatggagcttcatgtacactggcttgtctcagtttcaagatccaaacttggctttctgcaaaggtgatgatgacttggtgggcatgtttgatagtgcagggtttgaggaagacattgattttctgttcagcactcaacctggtgatgagactgagagtgatgtcaacaatatgagcgcagttttggatagtgttgagtgtggagacacaaatggggctggtggaagcatgatgcatgtggataacaagcagaagatagtatcatttgcttcttcaccatcatctacaactacagtttcttgtgactatgctctagatctatgatctcttcagaagggtgatggatgacctacatggaatggaaccttgtgtagattattattgggtttgttatgcatgttgttggggtttgttgtgataggttggtggatgggtgtgacttgtgaaaatgttcattggttttaggattttcctttcatccatactccgttatcgaaagaagaaaatgttcattttagacttggattttagtataaaaaaaaaggagaaaaaaccaaaaatgtgatttgggtgc

SEQ ID NO: 52557 - protein, 409 aa, Glycine max
  peptide (1)..(409): Ceres Seq. ID no. 14315276
MKRSPASSCSSSTSSVGFEAPIEKRRPKHPRRNNLKSQKCKQNQTTTGGRRSSIYRGVTRHRWTGRFEAHLWDKSSWNNIQSKKGRQGAYDTEESAARTYDLAALKYWGKDATLNFPIETYTKELEEMDKVSREEYLASLRRQSSGFSRGLSKYRGVARHHHNGRWEARIGRVCGNKYLYLGTYKTQEEAAVAYDMAAIEYRGVNAVTNFDISNYMDKIKKKNDQTQQQQTEAQTETVPNSSDSEEVEVEQQTTTITTPPPSENLHMPPQQHQVQYTPHVSPREEESSSLITIMNHVLEQDLPWSFMYTGLSQFQDPNLAFCKGDDDLVGMFDSAGFEEDIDFLFSTQPGDETESDVNNMSAVLDSVECGDTNGAGGSMMHVDNKQKIVSFASSPSSTTTVSCDYALDL

SEQ ID NO: 52558 - protein, 282 aa, Glycine max
  peptide (1)..(282): Ceres Seq. ID no. 14315277
MDKVSREEYLASLRRQSSGFSRGLSKYRGVARHHHNGRWEARIGRVCGNKYLYLGTYKTQEEAAVAYDMAAIEYRGVNAVTNFDISNYMDKIKKKNDQTQQQQTEAQTETVPNSSDSEEVEVEQQTTTITTPPPSENLHMPPQQHQVQYTPHVSPREEESSSLITIMNHVLEQDLPWSFMYTGLSQFQDPNLAFCKGDDDLVGMFDSAGFEEDIDFLFSTQPGDETESDVNNMSAVLDSVECGDTNGAGGSMMHVDNKQKIVSFASSPSSTTTVSCDYALDL

SEQ ID NO: 52559 - protein, 214 aa, Glycine max
  peptide (1)..(214): Ceres Seq. ID no. 14315278
MAAIEYRGVNAVTNFDISNYMDKIKKKNDQTQQQQTEAQTETVPNSSDSEEVEVEQQTTTITTPPPSENLHMPPQQHQVQYTPHVSPREEESSSLITIMNHVLEQDLPWSFMYTGLSQFQDPNLAFCKGDDDLVGMFDSAGFEEDIDFLFSTQPGDETESDVNNMSAVLDSVECGDTNGAGGSMMHVDNKQKIVSFASSPSSTTTVSCDYALDL

SEQ ID NO: 52560 - DNA, 1336 bp, Glycine max
  misc_feature (1)..(1336): Ceres Seq. ID no. 14316165
aaaacaagttttctagtgttttacactttgcacatgtgatgagagactagactagtcccttgagagaagctcctaacaaataaaacgaaaccatacttcactgtcgcagtcaaaatctccgtatttgaatccaatgacgcatatatcaattcaactctgaatctgaagcttcccgtatgtcaacggaagcgcccaagcgcgaccaatggcagtgggagaacgccaccgccggcgccgccgctggattcgccaccgtcgccgtcatgcatcccctcgatgttgtccgaactaggttccaagttaacgatggtcgagtctctaattttcccagttacaagaacaccgctcacgccgttttcactatcgctcgttccgagggattaagagggttatatgcaggcttccttcctggggttcttgggtcaactatttcatggagtttatatttcttcttctatgacagagccaaacagagatatgcaaggaacagggaggggaagttgagcccaggtctgcatcttgcctcagcagctgaagcaggagctatagtttccttcttcacaaatccagtatggctggtaaagacaagattgcagcttcaaactcctcttcatcagacacgaccatactctggggtttatgatgcatttaggaccataatgagggaagaaggatttagtgcactttacagaggaattgttcctggtctatttctgttctctcatggtgctattcagtttacagcatatgaggagctacgcaaagttattgttgattttaagagtaagggaagtacagtagataatcaaaaccctgataaattgctggtacaactgtttgtcccctctctttggaaggaggattctagcttctacagtccttaagtatgatatatcaatcattgaagaagttgctttctcatgagacatactttatcccccctttttcaggttatacgggctcgattgcagcaaagacccagtggtgatggggttccaagatatatggacactttgcatgttgtgaaagaaactgcacgatttgaaagtgtccgaggtttttacaaaggaattaccgcaaacctcttgaagaatgctcccgcttcttcgataacatttattgtttatgaaaatgtcctaaaattgcttaaaccggctagaaggaatgactgagtatttcatgattctttcctttctccttattgctgtttaatctcctttcttatctgatatttgttgcattgaaaaattgctcatttttcctatcactttttaatgatgggattctacacaatacacaattgctcattgaagttagacaaccccaaaaacaaagt

SEQ ID NO: 52561 - protein, 235 aa, Glycine max
  peptide (1)..(235): Ceres Seq. ID no. 14316166
MSTEAPKRDQWQWENATAGAAAGFATVAVMHPLDVVRTRFQVNDGRVSNFPSYKNTAHAVFTIARSEGLRGLYAGFLPGVLGSTISWSLYFFFYDRAKQRYARNREGKLSPGLHLASAAEAGAIVSFFTNPVWLVKTRLQLQTPLHQTRPYSGVYDAFRTIMREEGFSALYRGIVPGLFLFSHGAIQFTAYEELRKVIVDFKSKGSTVDNQNPDKLLVQLFVPSLWKEDSSFYSP

SEQ ID NO: 52562 - protein, 206 aa, Glycine max
  peptide (1)..(206): Ceres Seq. ID no. 14316167
MHPLDVVRTRFQVNDGRVSNFPSYKNTAHAVFTIARSEGLRGLYAGFLPGVLGSTISWSLYFFFYDRAKQRYARNREGKLSPGLHLASAAEAGAIVSFFTNPVWLVKTRLQLQTPLHQTRPYSGVYDAFRTIMREEGFSALYRGIVPGLFLFSHGAIQFTAYEELRKVIVDFKSKGSTVDNQNPDKLLVQLFVPSLWKEDSSFYSP

SEQ ID NO: 52563 - DNA, 754 bp, Glycine max
  misc_feature (1)..(754): Ceres Seq. ID no. 14314807
atcacactaatcactcactcttcactcaaaactcttctctttcattttcataattcccacacattatggctgagcttcactaccaaccacaacaccaataccccctccgctaccctaacgatccacaccaacaaacccgttcctccacccaccaggtcgtcaaggccgccaccgccgtcacagcgggcggctccctcttgatcctcgcctcgttgatcctcgccgccaccgtcattgccctcaccatcgtcaccccgctgttcgtcattttcagtccggttctcgtccccgccgtaatcaccgttgcgctcctgagcctggggttcctcgcctcgagtgggttcggtgtggcggcgatcacggtgctggcgtggatctacaggtacgtcaccggcaagcaaccacctggcgcggatcagttagacagcgcgcgtcacaagatcatggacaaggcgcgtgagatcaaggactacggacagcaacaaatcagcggggtccaggcttcttaattctgcactcgcacgcacatgatcgtatccatctcgtggaatatttctctctttgtctagttagtttatatttaccatttatgaatgaatgaatgcatgattgagcgttaaagttgaatttgaatctctcttttctttgtattttcgtttattgtgggtgttcgctcatcatcacttgttgtaatgtcttaattttgtgtgcatgctgcgactattcaaggacgatccatttgtgtttttattct

SEQ ID NO: 52564 - protein, 147 aa, Glycine max
  peptide (1)..(147): Ceres Seq. ID no. 14314808
MAELHYQPQHQYPLRYPNDPHQQTRSSTHQVVKAATAVTAGGSLLILASLILAATVIALTIVTPLFVIFSPVLVPAVITVALLSLGFLASSGFGVAAITVLAWIYRYVTGKQPPGADQLDSARHKIMDKAREIKDYGQQQISGVQAS

SEQ ID NO: 52565 - DNA, 1083 bp, Glycine max
  misc_feature (1)..(1083): Ceres Seq. ID no. 14314823
ttttttctacctctagggtttttcaatgctacctactccaccctcttctctaaattctttcactttctttctctctcaatgttttcttcttgttttatttaattaattattactcgcccaattttttatgaataaatattaattgtttatttcttagtttttgttactcgccaaattatgtatgtaaaattttgtccattgatcttttcccccttaattttcaggtaagtgttccttgcacaagcttgttcaagaccgtcactgtccgatgcggccattgcactaacctcctcccagtgaacatgcgagggttgcttatgccatctcccactcaatttcatttgggtcactctttcttctccccatctcataaccttctggaggagataccaaaccccactccaaattttcttatgaaccaaacaaatttcagtgcgtcacatgagttctctatgcctgctaggactgcagctgatgagcttccacggccaccgatcacaaacagacctcctgagaagagacagagagtcccctcagcgtacaatcgctttatcaaggacgagatccaacgcatcaagtctgtcaatcccgatataactcacagggaagccttcagtgcagctgcaaagaattgggcccacttcccacacatccactttggtctcatgcctgatcagactgtgaagaagacaaatgtgtgccagcaggatggagaagaggttctcatgaaagatgggttttatgcttcggctaatgttggtgtctcaccctactaattcaccccagtctgttttctctttcgaagaaattatgcaaagaggaaaaattttccaagttccaccaacctatgaagctcaggaactctgattccttaacttataaatgcatctatttgtggctcaagagcgattatgttgatataactaaggactactactacactaggactagctcttggggttgtgcatgcatgcatgtagttctcttcttatgagtagactttaattattaactttcatgttcttcaattcccccagtactactgcagctgattgcttatctaatcaataattaattagccat

SEQ ID NO: 52566 - protein, 157 aa, Glycine max
  peptide (1)..(157): Ceres Seq. ID no. 14314824
MRGLLMPSPTQFHLGHSFFSPSHNLLEEIPNPTPNFLMNQTNFSASHEFSMPARTAADELPRPPITNRPPEKRQRVPSAYNRFIKDEIQRIKSVNPDITHREAFSAAAKNWAHFPHIHFGLMPDQTVKKTNVCQQDGEEVLMKDGFYASANVGVSPY

SEQ ID NO: 52567 - protein, 152 aa, Glycine max
  peptide (1)..(152): Ceres Seq. ID no. 14314825
MPSPTQFHLGHSFFSPSHNLLEEIPNPTPNFLMNQTNFSASHEFSMPARTAADELPRPPITNRPPEKRQRVPSAYNRFIKDEIQRIKSVNPDITHREAFSAAAKNWAHFPHIHFGLMPDQTVKKTNVCQQDGEEVLMKDGFYASANVGVSPY

SEQ ID NO: 52568 - protein, 120 aa, Glycine max
  peptide (1)..(120): Ceres Seq. ID no. 14314826
MNQTNFSASHEFSMPARTAADELPRPPITNRPPEKRQRVPSAYNRFIKDEIQRIKSVNPDITHREAFSAAAKNWAHFPHIHFGLMPDQTVKKTNVCQQDGEEVLMKDGFYASANVGVSPY

SEQ ID NO: 52569 - DNA, 779 bp, Glycine max
  misc_feature (1)..(779): Ceres Seq. ID no. 14314812
atccaggatttaaaccaagatatccatcatttctttctctccccttcttccaattatcgatttggtgaggatttctccctcccgcttgaatgaactatcgcagagccaaaacgataaatccaaacccattgatccattatgccaataatcgatcaataccccacacccacaaacctcgaccccatgaaagaccaactccaaagttccgcaagcgcattcccttcgtcaccgaagtcaaaacagtggaagacccggaagaagcattgtccctctttcaccgttacaaagaacagggtttccggcactattacccttcctatgccgcattactctacaaactagctcgttctagaatgttcgatgccgttgaaacgattctcgctcacatgaaagacaccgaaatgcaatgcagagagagcgttttcattgccctctttcaacattacggtcccgaaaaagccgttgaactcttcaacagaatgcctcagttcaattgcacccgcacgatacagtccttcaacgcgcttctcaatgttctaattgacaatgacaggtttgacgaggccaatgatatttggggtcattagtttttgttggtcggatttgtgtttgcttttatttattggtattgctcattagtattttctacttgtttgctctgtcccttgttttagtagcttggattagctgtgtctcaccatgcatttgtacttcacttttcatgttttttgggttactactatgaaactggaacaattggttgcaattagtgcttttac

SEQ ID NO: 52570 - protein, 165 aa, Glycine max
  peptide (1)..(165): Ceres Seq. ID no. 14314813
MNYRRAKTINPNPLIHYANNRSIPHTHKPRPHERPTPKFRKRIPFVTEVKTVEDPEEALSLFHRYKEQGFRHYYPSYAALLYKLARSRMFDAVETILAHMKDTEMQCRESVFIALFQHYGPEKAVELFNRMPQFNCTRTIQSFNALLNVLIDNDRFDEANDIWGH

SEQ ID NO: 52571 - DNA, 1285 bp, Glycine max
  misc_feature (1)..(1285): Ceres Seq. ID no. 14314817
agtcttccatcgaagtgtattgcattggattattgacttttgacttgggtgttgtcacacggccacaccggagtatcgcgtgtccttcgtcagcctgtcctgtcagtcctttgtgcatctttgcctgacccagtcgctgttgtgagcggccgcgttttcgtctgtcaaacagagcatcgccgacaagggcagcgccaagatggccgactggaagagcgcttcgtctgtgtacgacttcagcgtcaaggacatcactggcgccgacgtcagcctagacaagtacaagggccacgttctgctgatcgtcaacatcgcctcgctgtgcgggctgacggccaccaactacaaggagctcgtcgagctggacgagaagtaccgcgagcgcgggctgcgcatcctcgccttcccctgcaaccagttcaacggccaggagcccggcacggccgacgacatcgtgtgcttcgccaagaagcagaacgccaactttgacctgttcgagaaggtgaacgtcaacggcgacgacgccagccccctctggaagtacctgaagaacaagcagggcggcaccttcggagacttcatcaagtggaacttcaccaagttcatcgtcgacaaggagggccagcccgtggagcgacacagccccactacggagccacacaaactgatctctcacattgagaagtacctgtaaagtgccctggctccggggaaactccactattgttactattgaagtttaggatgcttaatagttgttagaaatcacaagggaaagtcaccgaacacctgcaacacacaattgtgataagacaaactagaggtactttgttttaatttacccttgtcatgattttgtagctcttttaacaatgttagtctaaattaatgaatgaaatgtgtagattatttaattttaaatgttttagcttggtgaaggagataaatttacttctcatttataaatagcggaactttgaacttcaccagttccgtagcacaaggaatcaaacaaacacatattgtcacattcaatactctgcccttgtggttttttcactcacatttttcattgtgtcataatcgctgccatgaatagtgtttttacttttttaatagatgatttttgcagccgtgtattgtttctgaagtgtaattctcatgtggctcatggacaaaaatgagcccaccccgatcgctgagcacatttttgtgtgaagactgtgttgcacaaagtgcacgtcaaggctgtgtaatgttcgaataaaggtataacgagaaccct

SEQ ID NO: 52572 - protein, 164 aa, Glycine max
  peptide (1)..(164): Ceres Seq. ID no. 14314818
MADWKSASSVYDFSVKDITGADVSLDKYKGHVLLIVNIASLCGLTATNYKELVELDEKYRERGLRILAFPCNQFNGQEPGTADDIVCFAKKQNANFDLFEKVNVNGDDASPLWKYLKNKQGGTFGDFIKWNFTKFIVDKEGQPVERHSPTTEPHKLISHIEKYL

SEQ ID NO: 52573 - DNA, 1235 bp, Glycine max
  misc_feature (1)..(1235): Ceres Seq. ID no. 14314838
cattctatacggaaatctcaattttcattttctcttgtaaattcagaaaccccaacacgctctgtcggtgtaggttcggtgaaaatgagttcaagaggaaagcagggtgccatcgtttcttaccaaaacgtcgtcgtaatgaggcacggcgagcgcttcgacaacttcgagccgtcatgggcggcgacggcggcgcggccttgggacccgccgctggccgaggccggccggaaacgggcgttcaaaacgggcctgaggctccgagagagtgtcgagtttccgatcgggcgcgtcttcgtttcgccgttcctccgctgcctccagaccgccgtggaactcgtggcatctctctccgatggtgttgccgttaagccttccgaagtcaaggtctctgtcgagtatggattgtgcgaaatgatgaacagcaaggctatccgtcccaatgttgcccccaaagatggaaacatggggtttgatgtagcagtttgtgaagccatgctcccagctgagatagtggataaaaatgttgaaaggatgtgtaaagagttgccccagtgggaagaatcagttctgcaagcaggggcaagatatcagcagttaattaaggaccttgcagataaataccctactgagaacttgctgcttgttacacatggggaaggagtcaaggtagctgtttcttcattcaaaaaggatgctgaggtaaatgaagtcgattactgtggatatgtggaacttagacgtcccatgttcataaaagatcacacatttgccgctggagagttcgatttacttacaactagtggtcaaactggcgtaagctatttcctaccacgtcctttgggaagtgacaccaaccaaactttaccatgatcaagcatatactcgtgattctcacttcaagtttgtgagctttatacttgagtggtgtctgtttcaaggtttataattaggtgaattaaaaaaaaaacatgttaattaggatttaacatgtataggaacttttcaaatgctaggagaaaatgaaagtgaaaatctacatgttcctgattcggatgtcataatttcagaatatttccatagaaaattaatatatcctctccttaacatggagaatggagattaaagtcaagtaaaatatcacaaaactttcttaaagaacaaatatatagcccgtttggttgtaagttacacaagtacttcgctttcgtcaaagtaatatataaataagtagg

SEQ ID NO: 52574 - protein, 290 aa, Glycine max
  peptide (1)..(290): Ceres Seq. ID no. 14314839
HSIRKSQFSFSLVNSETPTRSVGVGSVKMSSRGKQGAIVSYQNVVVMRHGERFDNFEPSWAATAARPWDPPLAEAGRKRAFKTGLRLRESVEFPIGRVFVSPFLRCLQTAVELVASLSDGVAVKPSEVKVSVEYGLCEMMNSKAIRPNVAPKDGNMGFDVAVCEAMLPAEIVDKNVERMCKELPQWEESVLQAGARYQQLIKDLADKYPTENLLLVTHGEGVKVAVSSFKKDAEVNEVDYCGYVELRRPMFIKDHTFAAGEFDLLTTSGQTGVSYFLPRPLGSDTNQTLP

SEQ ID NO: 52575 - protein, 262 aa, Glycine max
  peptide (1)..(262): Ceres Seq. ID no. 14314840
MSSRGKQGAIVSYQNVVVMRHGERFDNFEPSWAATAARPWDPPLAEAGRKRAFKTGLRLRESVEFPIGRVFVSPFLRCLQTAVELVASLSDGVAVKPSEVKVSVEYGLCEMMNSKAIRPNVAPKDGNMGFDVAVCEAMLPAEIVDKNVERMCKELPQWEESVLQAGARYQQLIKDLADKYPTENLLLVTHGEGVKVAVSSFKKDAEVNEVDYCGYVELRRPMFIKDHTFAAGEFDLLTTSGQTGVSYFLPRPLGSDTNQTLP

SEQ ID NO: 52576 - protein, 244 aa, Glycine max
  peptide (1)..(244): Ceres Seq. ID no. 14314841
MRHGERFDNFEPSWAATAARPWDPPLAEAGRKRAFKTGLRLRESVEFPIGRVFVSPFLRCLQTAVELVASLSDGVAVKPSEVKVSVEYGLCEMMNSKAIRPNVAPKDGNMGFDVAVCEAMLPAEIVDKNVERMCKELPQWEESVLQAGARYQQLIKDLADKYPTENLLLVTHGEGVKVAVSSFKKDAEVNEVDYCGYVELRRPMFIKDHTFAAGEFDLLTTSGQTGVSYFLPRPLGSDTNQTLP

SEQ ID NO: 52577 - DNA, 1170 bp, Glycine max
  misc_feature (1)..(1170): Ceres Seq. ID no. 14304378
tcctctacactgttccttttcaccaatccattttctgacttttctcactctgctcatggctttgcttttcttatcatcacctattctcttggaatcatagttagttatcttttgcaacgtaaataacaacaataattatagccaatggaggaggagagcgagtttcttttagaaatgaagctaattatcatctcgttatgcactgaaacactttctcttctctctgttcactcttcccaacctctgttttcatgcattgtcactttctgtttcttgattctcctttatttgcctcatctattttggaagatagttttctcacccgtgctgattctgtccggggttctcttgctcctcctcctccgtctcggtgcaattcagaggtctcaaaatgaagagaagaaaaactcggttgaaccagaacccattgcaaacgaagaaaacaggggaaacagagaagagaaacaggggaaccccattgaaccggtggaaaccgattctctcgatcatgtttacaggtgggtcacgagccaatctcaaaaagagatcaaatctcaaatgggttttcaatcaagttcgcgttttgacgagtctttcgtggagtggaatgtgaaagcgccgttggaggtcatatacgaaggtgaagaaacagagcaggatcagaatgagaaacgtgacgagggtattttgaggtacccgtcgttgtcacggtactaccctgaaactgactccgatagctcgtcggagagtgagtttccggcgacggagaactgggactcgccggagaacatgtgcttcaggtgggatgaagaagacagagaagggttaattgagattgctcttgacggttgcaagaagagggacgtggggtttcacttcgatgaggagaatttgattgaaattgatatttctccgacgaggcacagggaattttccggcaaggacgaccccttttccggtgagatttgttgcaattagtgtgatgtttactaaagattaacatggtggattattatgtgatttgtttggggataagggaaagggaaaattagagatttggagttactttgggttatggcagagtatgcctgttttggatgtggtcaccgttgtactctcttatcaaagctttaagtgcaattaatccctaatccctaatattcaaatgtc

SEQ ID NO: 52578 - protein, 277 aa, Glycine max
  peptide (1)..(277): Ceres Seq. ID no. 14304379
MEEESEFLLEMKLIIISLCTETLSLLSVHSSQPLFSCIVTFCFLILLYLPHLFWKIVFSPVLILSGVLLLLLLRLGAIQRSQNEEKKNSVEPEPIANEENRGNREEKQGNPIEPVETDSLDHVYRWVTSQSQKEIKSQMGFQSSSRFDESFVEWNVKAPLEVIYEGEETEQDQNEKRDEGILRYPSLSRYYPETDSDSSSESEFPATENWDSPENMCFRWDEEDREGLIEIALDGCKKRDVGFHFDEENLIEIDISPTRHREFSGKDDPFSGEICCN

SEQ ID NO: 52579 - protein, 267 aa, Glycine max
  peptide (1)..(267): Ceres Seq. ID no. 14304380
MKLIIISLCTETLSLLSVHSSQPLFSCIVTFCFLILLYLPHLFWKIVFSPVLILSGVLLLLLLRLGAIQRSQNEEKKNSVEPEPIANEENRGNREEKQGNPIEPVETDSLDHVYRWVTSQSQKEIKSQMGFQSSSRFDESFVEWNVKAPLEVIYEGEETEQDQNEKRDEGILRYPSLSRYYPETDSDSSSESEFPATENWDSPENMCFRWDEEDREGLIEIALDGCKKRDVGFHFDEENLIEIDISPTRHREFSGKDDPFSGEICCN

SEQ ID NO: 52580 - protein, 139 aa, Glycine max
  peptide (1)..(139): Ceres Seq. ID no. 14304381
MGFQSSSRFDESFVEWNVKAPLEVIYEGEETEQDQNEKRDEGILRYPSLSRYYPETDSDSSSESEFPATENWDSPENMCFRWDEEDREGLIEIALDGCKKRDVGFHFDEENLIEIDISPTRHREFSGKDDPFSGEICCN

SEQ ID NO: 52581 - DNA, 1600 bp, Glycine max
  misc_feature (1)..(1600): Ceres Seq. ID no. 14304359
gatcattgaccaatcaacaccaactccaaacagttggaatcgacgaaacgcaaaggcatattgacattggcatggctacctcgctgtgtacacccagctacagagtcacactgaaactgtacggaacagattcccataagttaaacgcaaagccctcagttcgttataggcgtcgttttggcaccaccaccagaatatgctgcacctctaataattacaacgacaacaacatccaacgacgaccccaatccgaagctattcaagtttactcgcaaatcgagagattacttacagattctgttagacaatcacaggatggttggtggggttccccagactggagtgaagttgagggagcttggattctcaaaccgaaaagctctgaacccaattatgtagtgcattttatcggaggtatatttgttggagctgctcctcagcttacctaccggaggtttcttgagcgtctctcagaaaagggtatattgatcattgcaacgccatatgctagtgggtttgatcacttcctcattgctgatgaagtacagttcaaatttgataggtgctatcgcacactgcaagaaacaatccaagaccttcctatttttggtgttggccattctttggggtcggtggtccaccttctgattggatcaagatatgcagtgcaaagatctggaaatgttctcatggcattcaataacaaggaagcaagttcagctgttcctttgttctctcctgtgatcgtcccaatggctcaaaccattggtccacttctatcagatattttttcttcaccaactctaagagctggggcagagatgactttgaagcaactagaaaacgttagccctccaattatgaagcaggttcttcctttagttgagcagctccctcccttgtacatggatttggtcaagggaagagaagatttttctccaaagcctgaggagacacgtcgacttataaaatcatactatggcatatccagaaatcttctgataaaattccaggatgatttaatagatgagacttcaactctagcgcaggtgcttagttcagaatcagccattagctcagtgctagacatgtcaatacgaaagttgcctggagatcacggtcttccattgcaacaggccctaccaaatgttccgccagcaatggccgatgcagttaatcgtggaagtgagcttttgtcaaatcttactgttggaacaccgtgggagatagttgcgaaagaagtaggaaactcgctaggcatggattctggagtcctgcgcgctgaagtttcaaaggacatggatatgcttgtcgatgtcatcgcagcctggatagcctccaatgcagggcctaaacttcttcggccctaaggtcacggtttcatctggtccttgtcagttaaagaacacatgctgtagaaatgtataataaatcaatattggcaccgacacttctttcatcctatctcggagaatgccaatcatgtgaatccatacaagtaaagaaaatagaactctgacaatcacctgatgctgtaaaaatatgaattacattgttacaaaaaaaaaaaaaatagttgttatatagaaattattcgttc

SEQ ID NO: 52582 - protein, 455 aa, Glycine max
  peptide (1)..(455): Ceres Seq. ID no. 14304360
SLTNQHQLQTVGIDETQRHIDIGMATSLCTPSYRVTLKLYGTDSHKLNAKPSVRYRRRFGTTTRICCTSNNYNDNNIQRRPQSEAIQVYSQIERLLTDSVRQSQDGWWGSPDWSEVEGAWILKPKSSEPNYVVHFIGGIFVGAAPQLTYRRFLERLSEKGILIIATPYASGFDHFLIADEVQFKFDRCYRTLQETIQDLPIFGVGHSLGSVVHLLIGSRYAVQRSGNVLMAFNNKEASSAVPLFSPVIVPMAQTIGPLLSDIFSSPTLRAGAEMTLKQLENVSPPIMKQVLPLVEQLPPLYMDLVKGREDFSPKPEETRRLIKSYYGISRNLLIKFQDDLIDETSTLAQVLSSESAISSVLDMSIRKLPGDHGLPLQQALPNVPPAMADAVNRGSELLSNLTVGTPWEIVAKEVGNSLGMDSGVLRAEVSKDMDMLVDVIAAWIASNAGPKLLRP

SEQ ID NO: 52583 - protein, 432 aa, Glycine max
  peptide (1)..(432): Ceres Seq. ID no. 14304361
MATSLCTPSYRVTLKLYGTDSHKLNAKPSVRYRRRFGTTTRICCTSNNYNDNNIQRRPQSEAIQVYSQIERLLTDSVRQSQDGWWGSPDWSEVEGAWILKPKSSEPNYVVHFIGGIFVGAAPQLTYRRFLERLSEKGILIIATPYASGFDHFLIADEVQFKFDRCYRTLQETIQDLPIFGVGHSLGSVVHLLIGSRYAVQRSGNVLMAFNNKEASSAVPLFSPVIVPMAQTIGPLLSDIFSSPTLRAGAEMTLKQLENVSPPIMKQVLPLVEQLPPLYMDLVKGREDFSPKPEETRRLIKSYYGISRNLLIKFQDDLIDETSTLAQVLSSESAISSVLDMSIRKLPGDHGLPLQQALPNVPPAMADAVNRGSELLSNLTVGTPWEIVAKEVGNSLGMDSGVLRAEVSKDMDMLVDVIAAWIASNAGPKLLRP

SEQ ID NO: 52584 - DNA, 848 bp, Glycine max
  misc_feature (1)..(848): Ceres Seq. ID no. 14304339
attttttttcaatgtcatgttcaggaaatatctctaatgaggcatgtgtaacacctcctgatagaaccagttcacaggataaagataaagaaaagagtgcagtggaaaatggtcttatcaaggagcaagctcagccgatgatgactaagcaaacatccaatgggagcaatgaagatcattctccacaaaaggcagacagtggtcacagctggtgaggatgccattgtacctgaacataaatctggtgttgaggcactaatgccaaaactgcggcagtctgtgggacaagggctgaataagcctgctgaggtaacactactaaaccttagacgtttcagcaaaagaattggacatcagtatatggaagggccaaagatcgagaaatacaagtagatgctcaagagaatggctgaggaccaaggtgctgaatttgtatcatatgataccattaaaggagagtggaagatcaaggtcaaacacttcagcatctacaagctggtagataaaaacagttagataaacgatcacaagtaaggtttggtccatttggttcgatatggtggaggacaaaagtacagttgatagttttagaaccaaagttctgctcaaaaatgtatgtttttttcctgtcaatagtgtggatagagcttgggccaacgttattgatgatgtgcttcttatcttacggatgatgatgcattgggggatattttatagaattcaaatgtgggttttttcaagtttgattcacacagaggttatggttatttttaacttatttttcagaatcatgagggtggtgtttgatatgattttcctatttcaataataagttgatcaagagtgtc

SEQ ID NO: 52585 - protein, 90 aa, Glycine max
  peptide (1)..(90): Ceres Seq. ID no. 14304340
MVEDKSTVDSFRTKVLLKNVCFFPVNSVDRAWANVIDDVLLILRMMMHWGIFYRIQMWVFSSLIHTEVMVIFNLFFRIMRVVFDMIFLFQ

SEQ ID NO: 52586 - protein, 77 aa, Glycine max
  peptide (1)..(77): Ceres Seq. ID no. 14304341
MGAMKIILHKRQTVVTAGEDAIVPEHKSGVEALMPKLRQSVGQGLNKPAEVTLLNLRRFSKRIGHQYMEGPKIEKYK

SEQ ID NO: 52587 - protein, 74 aa, Glycine max
  peptide (1)..(74): Ceres Seq. ID no. 14304342
MKIILHKRQTVVTAGEDAIVPEHKSGVEALMPKLRQSVGQGLNKPAEVTLLNLRRFSKRIGHQYMEGPKIEKYK

SEQ ID NO: 52588 - DNA, 801 bp, Glycine max
  misc_feature (1)..(801): Ceres Seq. ID no. 12612527
atccaatccagcacagcagaccacacgtgtgtctgagaagaaaatcgaaacgcagacagtgtctctgatggcagcgtcgttcaggtggatattacaactacacaaggatgttccaaaagccgcacgcttctactccgaaggcttggacttcagcatcaatgtctgcagccttcgttgggccgaactccaatccggttctctcaagcttgccctcatgcattctcccaatgagcaagccacacagaaagggtactcatcgcttctgtcatttactgttcctgatatgaacagtacagtaactaaattaatggcgttaggagctgaactagatggacccatcaaatatgaggtccatggaaaggttgcagctatgcggtgtattgatggacatatcttaggcctctatgaacccgtgtaaagatacacataacataggagattcagtatcaacagtaccctcttttgtcatggtggattccttgcaataattgatgctgttctcttgtcaagacctgtagcagcaggattgtagcgtgtgaagcaatagggctgagaataaggcaaaatgattaggagatagaaaaaaagctatccagatatctccaaattatctgtcttgtagatgggtttgtttggtgccatccatatctgctagaggtgacagcaaatcatctgttggttttatttaatttttcgtctccctgttgaaacgttgaaacttgacgctttcaattgtagactttgcccatgcaattactcaacgattgaaatatttatggattaatgtatgtctcgtgtgcc

SEQ ID NO: 52589 - protein, 138 aa, Glycine max
  peptide (1)..(138): Ceres Seq. ID no. 12612528
SNPAQQTTRVSEKKIETQTVSLMAASFRWILQLHKDVPKAARFYSEGLDFSINVCSLRWAELQSGSLKLALMHSPNEQATQKGYSSLLSFTVPDMNSTVTKLMALGAELDGPIKYEVHGKVAAMRCIDGHILGLYEPV

SEQ ID NO: 52590 - protein, 116 aa, Glycine max
  peptide (1)..(116): Ceres Seq. ID no. 12612529
MAASFRWILQLHKDVPKAARFYSEGLDFSINVCSLRWAELQSGSLKLALMHSPNEQATQKGYSSLLSFTVPDMNSTVTKLMALGAELDGPIKYEVHGKVAAMRCIDGHILGLYEPV

SEQ ID NO: 52591 - DNA, 1732 bp, Glycine max
  misc_feature (1)..(1732): Ceres Seq. ID no. 14311191
gtccttattaatggcttgatttttctgtttccaaaacattggttcctttctcacatgcttggtgtggtcttgtctgggtttcgatttgagtacaactttttgataagcaaaggggatatttgtcctccttgtttgacattggcctgtttgcattgagtacttgtagggagtagtaaataagaaggaaaatggatcagaagatttgtcatgggacacacttcattatgtgtacgagcttgtgaagaatgggaatgcggcatttcgagagaacagaatgcaagaggcaatcaacttatactcgagagccaataacatcaaatcaggattagcgaatatttcatgcgcagaacatcatcatcttcagaacgtaggccattgagtgggcttgaacccacaacaattgctgaactgggtttgaaggatgctgagaagcttgttgaactccaaagtaattcagcaaaatcatatcttttaaaggccagtgctcttttactgttagagaaatatgaaaaagcccgggatgttattctttcaggtcttcaagttgatccttttagtaattctcttcgggcttctcttcaaaatttggaaagagtttcatctagttcaacagggatgagtacacatggacatccagaacgtaatgatgattttgattgcactctctgcctgaagttactgtatgaacctgtcacaaccccttgtggacattctttttgccgatcgtgtctatttcagtcaatggatcgtggaaacagatgcccattgtgtaggacagttctgtttattagtcccagaacatgttccatcagtgtgacattgaagaacattatacaaaagaacttcccagaggaatatgcagaaaggaagcaagagcatgacggtttaatcaatgctggtgtagatttactccctctttttgtcatggatgttgtcataccatgtcagaggtttgcactcaatatatttgaacctcggtatagactcatggtaagaagaataatggaaggcaatcatcggatgggaatggctatacttgattcaacaggttccttagctgagtttgcctgtgaagtggaaataacagagtgtgaaccacttccagatggtcgtttttatatagagattgaaagtcgtaggagatttcgtatcatccgttctagggatcaagatgggtatcgtgttgcagaggttgaatggatacaagatattatgccaccagaaggaacaagtgaaagagagactttacaacaacaaacatataatgcagctgaagatgctcgatcgtggatagcaagagctaaaaaagcagcaaaacatgatccaagaaaacttgagagactcgccagtgttgaagtaatgatgccctcaccaaaagaccctgagcgctttagtttttggctggctactctctccaatcggaggcctgcggaaagattggatctcctacgcataagagacactgctgagaggattagacggggcctgatatttctccgacaagaagaacaaggctgcagaattcagtaagacaagctgaggactagcattattattgcaattgaatatttgtttaatgtaaatgaatatttgtttactgcaaattcatttacaagtcacataatatttttcggcctcgtaaataactgttgatgaggtcatttttgttgtaacattgggttgatcccacttttcatatatatatatatatatataacaacatatttagtgg

SEQ ID NO: 52592 - protein, 396 aa, Glycine max
  peptide (1)..(396): Ceres Seq. ID no. 14311192
MRRTSSSSERRPLSGLEPTTIAELGLKDAEKLVELQSNSAKSYLLKASALLLLEKYEKARDVILSGLQVDPFSNSLRASLQNLERVSSSSTGMSTHGHPERNDDFDCTLCLKLLYEPVTTPCGHSFCRSCLFQSMDRGNRCPLCRTVLFISPRTCSISVTLKNIIQKNFPEEYAERKQEHDGLINAGVDLLPLFVMDVVIPCQRFALNIFEPRYRLMVRRIMEGNHRMGMAILDSTGSLAEFACEVEITECEPLPDGRFYIEIESRRRFRIIRSRDQDGYRVAEVEWIQDIMPPEGTSERETLQQQTYNAAEDARSWIARAKKAAKHDPRKLERLASVEVMMPSPKDPERFSFWLATLSNRRPAERLDLLRIRDTAERIRRGLIFLRQEEQGCRIQ

SEQ ID NO: 52593 - protein, 304 aa, Glycine max
  peptide (1)..(304): Ceres Seq. ID no. 14311193
MSTHGHPERNDDFDCTLCLKLLYEPVTTPCGHSFCRSCLFQSMDRGNRCPLCRTVLFISPRTCSISVTLKNIIQKNFPEEYAERKQEHDGLINAGVDLLPLFVMDVVIPCQRFALNIFEPRYRLMVRRIMEGNHRMGMAILDSTGSLAEFACEVEITECEPLPDGRFYIEIESRRRFRIIRSRDQDGYRVAEVEWIQDIMPPEGTSERETLQQQTYNAAEDARSWIARAKKAAKHDPRKLERLASVEVMMPSPKDPERFSFWLATLSNRRPAERLDLLRIRDTAERIRRGLIFLRQEEQGCRIQ

SEQ ID NO: 52594 - protein, 262 aa, Glycine max
  peptide (1)..(262): Ceres Seq. ID no. 14311194
MDRGNRCPLCRTVLFISPRTCSISVTLKNIIQKNFPEEYAERKQEHDGLINAGVDLLPLFVMDVVIPCQRFALNIFEPRYRLMVRRIMEGNHRMGMAILDSTGSLAEFACEVEITECEPLPDGRFYIEIESRRRFRIIRSRDQDGYRVAEVEWIQDIMPPEGTSERETLQQQTYNAAEDARSWIARAKKAAKHDPRKLERLASVEVMMPSPKDPERFSFWLATLSNRRPAERLDLLRIRDTAERIRRGLIFLRQEEQGCRIQ

SEQ ID NO: 52595 - DNA, 1328 bp, Glycine max
  misc_feature (1)..(1328): Ceres Seq. ID no. 15170745
gtcgtggtgcggtggtttgtggtgaaaatttgcataataatcttttgcagaaagcaagcaagaaagaaaaagggccatggaggccctgcacttgcaccgcgtgcttctcatgcctgtttcccaaaaaacctcaatctttttgcgcgccagtggcaccccattatccacacttgcaaggccaccattgcgttggagctctcaaacttgcagtgccagagcagggtggtttttgggtcttggagcagacagcaagaagaccaatttacctgataccgtcaaagccggtgaccccgttctgcacgagccagcccaggatgttgatcctaacgaaataaagtcggagagagtgcagaagattattgatgacatgatccaggtcatgagaaaggctcctggtgttggtcttgctgctccccagattggaattcctttgaggataattgttttggaagatacaaaagagtacattagttatgtctcaaaggaagaggctaaaactcaagatagaagaccttttgatcttttggtgatcctgaatcccaagctagagaagaagggcaagaggactgctctgttttttgaagggtgcttgagtgttgatgggttcagagcagtggtggagcgacaccttgacgttgaagttacaggtttggatcgttatggtgcaccaatcaaaataatcgcttctggctggcaggctcggattttacaacacgagtgtgatcacttggatggaactctgtatgttgataagatgctacctagaactttcagaactgtggacaacatggacctgcctcttgcccaggggtgccccaaacttggtcctcgctaaaattacactccagctgtttctgataaggcattcaatgcaggtatctaatgcattttagtgaacaattgacatttgtagatcctaaaatggaggccagattctttacattctagaaatagtctcaacttaagaaaaattaaatctccctcaattttcaatgccatcattttgccaagaattgccattgcactactcctgattaattcacttcatttaagtttcaatgttgtagcttatactcgaaaaaaaaaatcagagttgtggactatggagtctggatattgacagtgcctagtttttctgcccattgacaaaaaattgggtttgctgtcttcttgttatttggagcattgaggtggctacttaggcattagaaattcatgtaacttttgtcagctctaatgcaaacttataccaattgtgtgcagatcttggctatttcatccttcaatgatgagggagaattgtcgttctaataaatcagaatgatatg

SEQ ID NO: 52596 - protein, 252 aa, Glycine max
  peptide (1)..(252): Ceres Seq. ID no. 15170746
MEALHLHRVLLMPVSQKTSIFLRASGTPLSTLARPPLRWSSQTCSARAGWFLGLGADSKKTNLPDTVKAGDPVLHEPAQDVDPNEIKSERVQKIIDDMIQVMRKAPGVGLAAPQIGIPLRIIVLEDTKEYISYVSKEEAKTQDRRPFDLLVILNPKLEKKGKRTALFFEGCLSVDGFRAVVERHLDVEVTGLDRYGAPIKIIASGWQARILQHECDHLDGTLYVDKMLPRTFRTVDNMDLPLAQGCPKLGPR

SEQ ID NO: 52597 - protein, 241 aa, Glycine max
  peptide (1)..(241): Ceres Seq. ID no. 15170747
MPVSQKTSIFLRASGTPLSTLARPPLRWSSQTCSARAGWFLGLGADSKKTNLPDTVKAGDPVLHEPAQDVDPNEIKSERVQKIIDDMIQVMRKAPGVGLAAPQIGIPLRIIVLEDTKEYISYVSKEEAKTQDRRPFDLLVILNPKLEKKGKRTALFFEGCLSVDGFRAVVERHLDVEVTGLDRYGAPIKIIASGWQARILQHECDHLDGTLYVDKMLPRTFRTVDNMDLPLAQGCPKLGPR

SEQ ID NO: 52598 - protein, 155 aa, Glycine max
  peptide (1)..(155): Ceres Seq. ID no. 15170748
MIQVMRKAPGVGLAAPQIGIPLRIIVLEDTKEYISYVSKEEAKTQDRRPFDLLVILNPKLEKKGKRTALFFEGCLSVDGFRAVVERHLDVEVTGLDRYGAPIKIIASGWQARILQHECDHLDGTLYVDKMLPRTFRTVDNMDLPLAQGCPKLGPR

SEQ ID NO: 52599 - DNA, 1072 bp, Glycine max
  misc_feature (1)..(1072): Ceres Seq. ID no. 14309527
gcggtgaccggtgaaggactgaattttaattttgattcagtgactctcccagcctgatccaaaccaaaacaaaatccctttaaaaccctagtctcgcaatttcgaaatttatcactcactcaatcactctcatcatccactcgtcttattctcagaaaagagaagaagaaatggtgttaggcgtgagagagataagctgtagcggagagccagtccttgacagtgataacggggaggagttgatgcaggtgcaaccgggcatagacatagtcctcggcgatcttcctcgccagtcccccggcacactctatatcactaacaagtgtgctctcctctcctctcattcgcaatttctcttgtattgttgtgtgttctattcacactttggtctcgcttacacacagattgatacaggagaagcggatgatgaccactctgattctgaatccaatcatatccaacaagatttgtcccacatcacagagatgaggctcattccctctgatcctactcaattggattctctctttgcaatattctgccagtgtgcagagcttaatccagaaccaaacgatgaggaaggagaaggacatggttgggtttttagtgctgatgagatgggagatgaagaagcagaggacgaaggttatatctttcacaatccagccaactctattggtcactcaaatggaaatcatgacctaactcgtacgacacttgagcttcaaatcaatgatcaaagatttgaggatgcagaagagatggaggacaatggagatggcaaccattattgagtgtctttgttttctccaaaatagcattttctagtctttaccaaaagtcatcaactgtatgttgtgtagtttggttctatatatgtaatcctattatgaaacatctgaccagaggcttagagtggtttatcttagacctttttttttctttcctgcagtagaaagcagctggatactgagcttaaagctgtattatgtagaacagtagaagaaatttgaacattgtttggataatttattgagaatgttcatgcaaataattagtgtgtttggttctc

SEQ ID NO: 52600 - protein, 207 aa, Glycine max
  peptide (1)..(207): Ceres Seq. ID no. 14309528
MVLGVREISCSGEPVLDSDNGEELMQVQPGIDIVLGDLPRQSPGTLYITNKCALLSSHSQFLLYCCVFYSHFGLAYTQIDTGEADDDHSDSESNHIQQDLSHITEMRLIPSDPTQLDSLFAIFCQCAELNPEPNDEEGEGHGWVFSADEMGDEEAEDEGYIFHNPANSIGHSNGNHDLTRTTLELQINDQRFEDAEEMEDNGDGNHY

SEQ ID NO: 52601 - protein, 183 aa, Glycine max
  peptide (1)..(183): Ceres Seq. ID no. 14309529
MQVQPGIDIVLGDLPRQSPGTLYITNKCALLSSHSQFLLYCCVFYSHFGLAYTQIDTGEADDDHSDSESNHIQQDLSHITEMRLIPSDPTQLDSLFAIFCQCAELNPEPNDEEGEGHGWVFSADEMGDEEAEDEGYIFHNPANSIGHSNGNHDLTRTTLELQINDQRFEDAEEMEDNGDGNHY

SEQ ID NO: 52602 - DNA, 2185 bp, Glycine max
  misc_feature (1)..(2185): Ceres Seq. ID no. 15170764
atacaactacaagggaaagaagcagttatacaccctcgagaatggtgaaattccaggcaaaattataaaaccatttttttctctccgtccaaacggcagatccgatccgccctacaatcccctctcagtttttctctcgaggatccggtgaaacgacatggcgatggtggaccagcctctgtatccgattgccgttttgatcgacgagttgaagaacgaggacattcagctgcgcctgaactcgatccggaggctctccacgatcgcgcgcgcgctcggcgaggaccgcacgcggaaggagctgattccgttcctcagcgagaacaacgacgatgacgacgaagtgcttctcgcaatggccgaggaattaggcgtcttcattccctacgtcggaggcgtcgaccacgccaacgtgcttcttcctcccttggagactctctgcaccgttgaggaaacctgcgtcagagacaaatcggtggagtcgctgtgcagaattggagcacagatgagggagcaagacttggttgagcacttcattcctttagttaagaggctggctgctggtgagtggttcacggcacgggtttcgtcgtgcggtttgttccatattgcttaccccagtgcaccagagtcggtgaagactgaactgagagccatatatggtcagctgtgtcaagatgatatgcccatggttaggagatccgctgccacaaacctgggaaagtttgccgcaactgttgaagctcctcacttgaaatctgacatcatgtctgtgtttgaggatctcacacaggatgatcaagattctgttcggctacttgctgttgagggttgtgcagctctgggaaaattgttggaacctcaagattgtgtggcacatattcttcctgtcatagtcaatttttctcaggataattcatggcgtgttcgttacatggttgctaatcaactatatgagctatgtgaagctgttggtcctgaccccaccaggtcagaattggtccctgcatatgttcgtctgctgcgtgataatgaggctgaagtacgtattgctgctgctgggaaagtaactaagttttcccgcattttaaatcctgaccttgccattcagcatattctaccatgtgtgaaggagttatcaacagattcatctcaacatgttcgctctgcactggcttctgttataatgggtatggcaccggtgttagggaaggatgctacaattgagcaacttctgcctattttcctttctcttttgaaagacgagtttcctgatgtcaggctaaatattatcagcaagcttgatcaagtgaaccaggttattggtattgatttgttatctcagtctctgttgccagccatagtagaattagctgaggatcggcactggagagttcgacttgcaatcatagaatacatacccttattggcaagccagttgggtgttggtttttttgatgataagcttggagctctttgcatgcaatggctaaaggacaaggtatactcaatccgtgatgcagccgctaataacatcaaacgcttggcagaagaatttggaccggattgggcaatgcagcacattattccccaggttttggacatggttactgatccacattatctgtatcggatgacaatcttacaagcaatttctctactagctcctgttctgggctcggagattacttcttcaaaactgctccctctggtcattaatgcatcaaaggatagggtacccaatatcaaattcaatgtagctaaagtgttgcagtctctcatcccaattgttgatcagtctgttgttgagagtaccatccgtccctgtctggttgagctcagtgaggatccagatgttgatgttaggtttttcgcctcacaagcactacaatctagtgatcaagtcaagatgtctagctagatcagtttgcatgtggtctttagttattttttttttcttataagatttccattttcttgtgtaattggcatgacgccaacttgccccatcctttgtatcacatataattgttgtgatcctgctttgctttcattttatccgtacctatgctaccgggttctttgtagtgatgaaacattgttcagaagtgagatgggttttgacgaccactaattatatggtttaccaatgtgaagattttgtatgaaattttgatttaccaat

SEQ ID NO: 52603 - protein, 587 aa, Glycine max
  peptide (1)..(587): Ceres Seq. ID no. 15170765
MAMVDQPLYPIAVLIDELKNEDIQLRLNSIRRLSTIARALGEDRTRKELIPFLSENNDDDDEVLLAMAEELGVFIPYVGGVDHANVLLPPLETLCTVEETCVRDKSVESLCRIGAQMREQDLVEHFIPLVKRLAAGEWFTARVSSCGLFHIAYPSAPESVKTELRAIYGQLCQDDMPMVRRSAATNLGKFAATVEAPHLKSDIMSVFEDLTQDDQDSVRLLAVEGCAALGKLLEPQDCVAHILPVIVNFSQDNSWRVRYMVANQLYELCEAVGPDPTRSELVPAYVRLLRDNEAEVRIAAAGKVTKFSRILNPDLAIQHILPCVKELSTDSSQHVRSALASVIMGMAPVLGKDATIEQLLPIFLSLLKDEFPDVRLNIISKLDQVNQVIGIDLLSQSLLPAIVELAEDRHWRVRLAIIEYIPLLASQLGVGFFDDKLGALCMQWLKDKVYSIRDAAANNIKRLAEEFGPDWAMQHIIPQVLDMVTDPHYLYRMTILQAISLLAPVLGSEITSSKLLPLVINASKDRVPNIKFNVAKVLQSLIPIVDQSVVESTIRPCLVELSEDPDVDVRFFASQALQSSDQVKMSS

SEQ ID NO: 52604 - protein, 585 aa, Glycine max
  peptide (1)..(585): Ceres Seq. ID no. 15170766
MVDQPLYPIAVLIDELKNEDIQLRLNSIRRLSTIARALGEDRTRKELIPFLSENNDDDDEVLLAMAEELGVFIPYVGGVDHANVLLPPLETLCTVEETCVRDKSVESLCRIGAQMREQDLVEHFIPLVKRLAAGEWFTARVSSCGLFHIAYPSAPESVKTELRAIYGQLCQDDMPMVRRSAATNLGKFAATVEAPHLKSDIMSVFEDLTQDDQDSVRLLAVEGCAALGKLLEPQDCVAHILPVIVNFSQDNSWRVRYMVANQLYELCEAVGPDPTRSELVPAYVRLLRDNEAEVRIAAAGKVTKFSRILNPDLAIQHILPCVKELSTDSSQHVRSALASVIMGMAPVLGKDATIEQLLPIFLSLLKDEFPDVRLNIISKLDQVNQVIGIDLLSQSLLPAIVELAEDRHWRVRLAIIEYIPLLASQLGVGFFDDKLGALCMQWLKDKVYSIRDAAANNIKRLAEEFGPDWAMQHIIPQVLDMVTDPHYLYRMTILQAISLLAPVLGSEITSSKLLPLVINASKDRVPNIKFNVAKVLQSLIPIVDQSVVESTIRPCLVELSEDPDVDVRFFASQALQSSDQVKMSS

SEQ ID NO: 52605 - protein, 521 aa, Glycine max
  peptide (1)..(521): Ceres Seq. ID no. 15170767
MAEELGVFIPYVGGVDHANVLLPPLETLCTVEETCVRDKSVESLCRIGAQMREQDLVEHFIPLVKRLAAGEWFTARVSSCGLFHIAYPSAPESVKTELRAIYGQLCQDDMPMVRRSAATNLGKFAATVEAPHLKSDIMSVFEDLTQDDQDSVRLLAVEGCAALGKLLEPQDCVAHILPVIVNFSQDNSWRVRYMVANQLYELCEAVGPDPTRSELVPAYVRLLRDNEAEVRIAAAGKVTKFSRILNPDLAIQHILPCVKELSTDSSQHVRSALASVIMGMAPVLGKDATIEQLLPIFLSLLKDEFPDVRLNIISKLDQVNQVIGIDLLSQSLLPAIVELAEDRHWRVRLAIIEYIPLLASQLGVGFFDDKLGALCMQWLKDKVYSIRDAAANNIKRLAEEFGPDWAMQHIIPQVLDMVTDPHYLYRMTILQAISLLAPVLGSEITSSKLLPLVINASKDRVPNIKFNVAKVLQSLIPIVDQSVVESTIRPCLVELSEDPDVDVRFFASQALQSSDQVKMSS

SEQ ID NO: 52606 - DNA, 1056 bp, Glycine max
  misc_feature (1)..(1056): Ceres Seq. ID no. 14309538
atcaatcaatttgcagcatcctaatctcgctcagattttctccagaaaagggaaaataaataaaaaaagagaataataataatatcttttgtaattcgcaaaacgtgatcgacgctggcgcaaattgaaattaggaattagggttagggttttcattatcttcgcccggaaaagaaaggggggaagaagaaagaaccgttcctttatgatcgaaaaggtgcctttggtcatcatcgcggtgttaatcttggtggtgcaatcctctgcagcgttccacggtataaacagaatcatgaaggtccaccctgttcctcgaaaacgcaacatctcaatccaatttggcggcgacgggggcaacccgatgtcggaggctcaggcgctgttggggatcgccgggaagaagctccggcgactaccgcacgtgttcagctgcgtgctggagctgcccttccgctccgacgccgacgttgcggtggaggaagcccccgactgcttccgctttgtggcggagaccgatggaatcggcgacgtgagggcgcacacggtggaaatccaccctggcgtgacgaagatcgtggtgagggacggcggctcggtggagctctcgctcgaccagctggagctcgatatgtggaggttccggttgccggaatcgactcggccggagctcgccagcgcggtgttcgtcgacggcgagctcatcgtcacggtgccgaaggggcacgaagaggagaatgatggggatggtgatagaggtatgggtggaggtagacttgtgcttgtacagtagtgatgaatgaatgaatgagtgggtgaggtaatgaatgattcttttgttaacgccttgtggcctttccaaacgtggccttgttagtatgtcggttagatttcaggttgttgttggaactagtttctctgtgaattttattgttgctattgttcagtcaggaacaaaaatgttttatctggattctggagaatggtttattcatcatggcaatggcaattatccaaaataggtgtaactgaggcgtgtttcgattttcatttcttctc

SEQ ID NO: 52607 - protein, 194 aa, Glycine max
  peptide (1)..(194): Ceres Seq. ID no. 14309539
MIEKVPLVIIAVLILVVQSSAAFHGINRIMKVHPVPRKRNISIQFGGDGGNPMSEAQALLGIAGKKLRRLPHVFSCVLELPFRSDADVAVEEAPDCFRFVAETDGIGDVRAHTVEIHPGVTKIVVRDGGSVELSLDQLELDMWRFRLPESTRPELASAVFVDGELIVTVPKGHEEENDGDGDRGMGGGRLVLVQ

SEQ ID NO: 52608 - protein, 165 aa, Glycine max
  peptide (1)..(165): Ceres Seq. ID no. 14309540
MKVHPVPRKRNISIQFGGDGGNPMSEAQALLGIAGKKLRRLPHVFSCVLELPFRSDADVAVEEAPDCFRFVAETDGIGDVRAHTVEIHPGVTKIVVRDGGSVELSLDQLELDMWRFRLPESTRPELASAVFVDGELIVTVPKGHEEENDGDGDRGMGGGRLVLVQ

SEQ ID NO: 52609 - protein, 142 aa, Glycine max
  peptide (1)..(142): Ceres Seq. ID no. 14309541
MSEAQALLGIAGKKLRRLPHVFSCVLELPFRSDADVAVEEAPDCFRFVAETDGIGDVRAHTVEIHPGVTKIVVRDGGSVELSLDQLELDMWRFRLPESTRPELASAVFVDGELIVTVPKGHEEENDGDGDRGMGGGRLVLVQ

SEQ ID NO: 52610 - DNA, 1518 bp, Glycine max
  misc_feature (1)..(1518): Ceres Seq. ID no. 15176959
attcatttctctgcaatggatatggatctctagcattcgcattcatcccctccttttctccatgcctccgtcttcacccgttattttcttgtcctgaatgcattcccagaatgttgtagagatggaaggcaagacagaaattcgtatgacatcagctgctgcctttgttgaaggggggattcaagaatcctgtgatgatgcttgcagcatatgccttgaggagttttgtgcaagtgatccttcgacggtcactacctgcaagcatgagtttcacctgcagtgcattctcgaatggtgtcagagaagctcccagtgtcctatttgctggcaacctattagcttgaaggatcctactagtcaagaattgtttgaggcagtagagcaggagagaagctggagggctaccccttcaagaaatgctgctatttttcatcacccagcctttggtgattttgaattgcagcatttgcgcatgaatgcaaatgatgctgactttgaagagagaattattcaacatttagctgctgctgcaacgatgaggagagtgaaccagcttggtcggagggaagggcagcaaactcgttcatcacctcatgttcatccacacttcttagtgttctctaatcagcctattgcgccttcatcaggtcttgatccagtttccagaggggaaaatgacccaacagcaattcctaatagaagtccatctgccccaataacatctgatggaaatgaagcatcgcagcagatcctgcaccttcaaactcaaagctcttcttcagcttctggatctcctgtcatggctacaaatcgccaaggaatttactctaatgatagaggctctactgctcgttcttctccagtggtccaagatagagcagaatcatctgaattgcagtcattttctgattctctgcggtccagacttaatgcggtgtccatgagatacaaagagtcaatctcaaagggcactaggggatggaaggagaggctgttctcgcatagttcttccatgtcagaacttggttcagaaacaaggaggagagagatgaaagctggaattgctagtgtatcccgattgatggaatcccttgaaactagtgaaaataatagagctgtgggtacttctttgtcaaatcaaaatcatatagaggatagttccatgggaggggtgagcaaccagaacaatgttgaagctagtggagagaaatcttcacatgatgacaatactccagctgcatgttctgctagttcacatttaaattgagctcttttttgtttctgttaattcatctttcctcagcatctcatatttgaaggtaagctttgatctttgtctaaacattcagaacagaattaacagatctgccttccatttattaactaaatagctgctttggttcctattatagatgtcaccaatagctgttttgctttagtttgagagccctgtctctcctcaacacctccccaactgtcaaaattgatcccctctctacattacaacatggtttctct

SEQ ID NO: 52611 - protein, 389 aa, Glycine max
  peptide (1)..(389): Ceres Seq. ID no. 15176960
MHSQNVVEMEGKTEIRMTSAAAFVEGGIQESCDDACSICLEEFCASDPSTVTTCKHEFHLQCILEWCQRSSQCPICWQPISLKDPTSQELFEAVEQERSWRATPSRNAAIFHHPAFGDFELQHLRMNANDADFEERIIQHLAAAATMRRVNQLGRREGQQTRSSPHVHPHFLVFSNQPIAPSSGLDPVSRGENDPTAIPNRSPSAPITSDGNEASQQILHLQTQSSSSASGSPVMATNRQGIYSNDRGSTARSSPVVQDRAESSELQSFSDSLRSRLNAVSMRYKESISKGTRGWKERLFSHSSSMSELGSETRRREMKAGIASVSRLMESLETSENNRAVGTSLSNQNHIEDSSMGGVSNQNNVEASGEKSSHDDNTPAACSASSHLN

SEQ ID NO: 52612 - protein, 381 aa, Glycine max
  peptide (1)..(381): Ceres Seq. ID no. 15176961
MEGKTEIRMTSAAAFVEGGIQESCDDACSICLEEFCASDPSTVTTCKHEFHLQCILEWCQRSSQCPICWQPISLKDPTSQELFEAVEQERSWRATPSRNAAIFHHPAFGDFELQHLRMNANDADFEERIIQHLAAAATMRRVNQLGRREGQQTRSSPHVHPHFLVFSNQPIAPSSGLDPVSRGENDPTAIPNRSPSAPITSDGNEASQQILHLQTQSSSSASGSPVMATNRQGIYSNDRGSTARSSPVVQDRAESSELQSFSDSLRSRLNAVSMRYKESISKGTRGWKERLFSHSSSMSELGSETRRREMKAGIASVSRLMESLETSENNRAVGTSLSNQNHIEDSSMGGVSNQNNVEASGEKSSHDDNTPAACSASSHLN

SEQ ID NO: 52613 - protein, 373 aa, Glycine max
  peptide (1)..(373): Ceres Seq. ID no. 15176962
MTSAAAFVEGGIQESCDDACSICLEEFCASDPSTVTTCKHEFHLQCILEWCQRSSQCPICWQPISLKDPTSQELFEAVEQERSWRATPSRNAAIFHHPAFGDFELQHLRMNANDADFEERIIQHLAAAATMRRVNQLGRREGQQTRSSPHVHPHFLVFSNQPIAPSSGLDPVSRGENDPTAIPNRSPSAPITSDGNEASQQILHLQTQSSSSASGSPVMATNRQGIYSNDRGSTARSSPVVQDRAESSELQSFSDSLRSRLNAVSMRYKESISKGTRGWKERLFSHSSSMSELGSETRRREMKAGIASVSRLMESLETSENNRAVGTSLSNQNHIEDSSMGGVSNQNNVEASGEKSSHDDNTPAACSASSHLN

SEQ ID NO: 52614 - DNA, 1248 bp, Glycine max
  misc_feature (1)..(1248): Ceres Seq. ID no. 15170617
cattctcaaatcatgcatcgtgttcaatttaaattgtaatatattaaagtttccatttctattttctataatttattaaaaaaaaaaacgtgtggaagaaatgaagtgatgtagattttcgagtgtggggtctgaatcacagtccacacaaacgaaccgaaccaagaacacctattttcccacaccactttactttctctgaggcttgagaagaagacaatggtggcttgcgaaacatgaagaggggcactgtgttatgcatgttcaatggcatgtcattgtgcttcttacaatgccttttcattttcaccaaccagagagttcttcgccaccaaccacatcatgtcaaaaccatcatccactactactagatgcagaccctttctcttgtccatcaccaatgccacaccatcctacaacacccttgtttctgaggctgttaggctcttggttccttcagcaagatttgaaccttcaaaactgaaggttgttctattggaagatcagataaacaaacatgcaagttttactcctagaacctacattctatcccattgtgactttacagctaatctgactttagctgtgtccaatgtgatcaacctagagcagttgagagggtggtacgagaaggatgatgttgtagctgaatggaagaaagtgcaaaatgatatgtgcctacatgttcattgctttgtcagtggtcccaattccttcctggatctggctgctgaattgagatatcacatattctccaaggaaatgcctttggtactcaaagcaattcattgtggagactctgcacttttccgtgagcatcctgaattgctggattctatagttagagtatattttcattctagctcagaaaaatataacagaatggaatgttggggacctctcaaggatgcaatggagggaaaacaagcagatcaattccaagggtcaataagaagagatagtcccgaaaagttgcggagcccaaagtccatcttccaagctctttttgcttttcttctttgaactatatcaataacttgaattatttgtttgtatcccaattccccccacagctcagaaattcaagtgggttagacaaagcaaaattcagcttgcaagaatgaaccaatcccacaaggaaactatgtatctttgggaagacccaaaaccaaaagcaaaaatgtgaagttgcacaaaagcagatttcctgtgccaccaaggcaatttgctttaatgatttctgtgact

SEQ ID NO: 52615 - protein, 251 aa, Glycine max
  peptide (1)..(251): Ceres Seq. ID no. 15170618
MACHCASYNAFSFSPTREFFATNHIMSKPSSTTTRCRPFLLSITNATPSYNTLVSEAVRLLVPSARFEPSKLKVVLLEDQINKHASFTPRTYILSHCDFTANLTLAVSNVINLEQLRGWYEKDDVVAEWKKVQNDMCLHVHCFVSGPNSFLDLAAELRYHIFSKEMPLVLKAIHCGDSALFREHPELLDSIVRVYFHSSSEKYNRMECWGPLKDAMEGKQADQFQGSIRRDSPEKLRSPKSIFQALFAFLL

SEQ ID NO: 52616 - protein, 226 aa, Glycine max
  peptide (1)..(226): Ceres Seq. ID no. 15170619
MSKPSSTTTRCRPFLLSITNATPSYNTLVSEAVRLLVPSARFEPSKLKVVLLEDQINKHASFTPRTYILSHCDFTANLTLAVSNVINLEQLRGWYEKDDVVAEWKKVQNDMCLHVHCFVSGPNSFLDLAAELRYHIFSKEMPLVLKAIHCGDSALFREHPELLDSIVRVYFHSSSEKYNRMECWGPLKDAMEGKQADQFQGSIRRDSPEKLRSPKSIFQALFAFLL

SEQ ID NO: 52617 - DNA, 1122 bp, Glycine max
  misc_feature (1)..(1122): Ceres Seq. ID no. 14309591
aaaaaggcaattattgcctctctttcttgctcgccacagcttcgtcaaagacacgcggaaaagaagaggaagggggaggcgactcgaccgaggcccggtttcgatctctggtcctccgattgcgtccagatctaccagcaatggcatcatcttcggacccatggatgaaggaatacaatgaagcatccagacttgctgatgacatcagttccatgattgccgacagagggtctcttccacaatcaggcccagaaattatgcggcatacttcagccattcggagaaaaataactattcttggtactagactggatagcttggagtcattgtttggcagaattcctccaaagtcaatcactgacaaggagatgcataaacgccaagacatgctttccagtttgaagtctaaagccaagcagatggcgacaagtttcaacatgtcaaacttcgctaacagggaggatctgcttggtcaaagtaaaatgccagatgacatgagcagagttgctgggttagataaccaaggaattgttggccttcagaggcaaattatgaaagagcaagatgagggtctcgagaagctggaagagacagtgctgagcacgaagcatattgcattagcagtcaatgaagaacttaccctgcacacaagattgatagatgaccttgaagatcatgttgatgttacaaattcacgtcttcagcgtgtgcaaaagaggcttgcaattctgaacaagcgcaccaaaggtggttgctcatgcacgtgtctgctcctatctgtcgttgccattgtgattcttgcagtcattgtttggcttctcgtcaagtatctgtaaagaaaagaaagaagcagccggctaccctgcggacctctctcgaaatgctcacctgcagccttcgcttgaaaagttccttctgtgttactccataaaatgtgcagccctttaaaattaatatgtatacacggtggtttcatcttcccttccatgagtggaatggttatggctatgtacattacatagaatttggtacgtacatgatcatcatctgcatgactgcattttgtgtatggcgtttgtcagtttgcaatgacagggtgttgatttattctgtggggtaagc

SEQ ID NO: 52618 - protein, 277 aa, Glycine max
  peptide (1)..(277): Ceres Seq. ID no. 14309592
KGNYCLSFLLATASSKTRGKEEEGGGDSTEARFRSLVLRLRPDLPAMASSSDPWMKEYNEASRLADDISSMIADRGSLPQSGPEIMRHTSAIRRKITILGTRLDSLESLFGRIPPKSITDKEMHKRQDMLSSLKSKAKQMATSFNMSNFANREDLLGQSKMPDDMSRVAGLDNQGIVGLQRQIMKEQDEGLEKLEETVLSTKHIALAVNEELTLHTRLIDDLEDHVDVTNSRLQRVQKRLAILNKRTKGGCSCTCLLLSVVAIVILAVIVWLLVKYL

SEQ ID NO: 52619 - protein, 231 aa, Glycine max
  peptide (1)..(231): Ceres Seq. ID no. 14309593
MASSSDPWMKEYNEASRLADDISSMIADRGSLPQSGPEIMRHTSAIRRKITILGTRLDSLESLFGRIPPKSITDKEMHKRQDMLSSLKSKAKQMATSFNMSNFANREDLLGQSKMPDDMSRVAGLDNQGIVGLQRQIMKEQDEGLEKLEETVLSTKHIALAVNEELTLHTRLIDDLEDHVDVTNSRLQRVQKRLAILNKRTKGGCSCTCLLLSVVAIVILAVIVWLLVKYL

SEQ ID NO: 52620 - protein, 223 aa, Glycine max
  peptide (1)..(223): Ceres Seq. ID no. 14309594
MKEYNEASRLADDISSMIADRGSLPQSGPEIMRHTSAIRRKITILGTRLDSLESLFGRIPPKSITDKEMHKRQDMLSSLKSKAKQMATSFNMSNFANREDLLGQSKMPDDMSRVAGLDNQGIVGLQRQIMKEQDEGLEKLEETVLSTKHIALAVNEELTLHTRLIDDLEDHVDVTNSRLQRVQKRLAILNKRTKGGCSCTCLLLSVVAIVILAVIVWLLVKYL

SEQ ID NO: 52621 - DNA, 1582 bp, Glycine max
  misc_feature (1)..(1582): Ceres Seq. ID no. 15177324
gaatagtaaaactcccacttttaactccctttctccgccgtcgcatcgttgctgtcatacaccgctgcccccgcccatgttgcacctccttcctccatttttcagtttttctccactgtgcatcagaatccacttttcatgtattctagagcgttcaatttgaagagttgcatttgagaaatggcatcggctttgatctcgcgttcttcgcgtaggtttctcaaaccttgttcttcttcggtatctctttaccctgccatcttcaatcctgtgatttcttctcaacaatcggcaagccaaaacccctctcaaaatcccccattcaagctaccccagctccaaagtttcaattttgagttccgtaaaactactgggtctctctcaagtttccaccttgttgcgcacgtgtccacgtggccttccaaggagaacaagaaccaccaaagtggtggtaatgtgagtagtagttgggttgaattgtacttgcctaggaaggttcagccctatgctcgccttgctcgccttgataagccaattgggacatggttgcttctatggccttgtatgtggtcaattaccctggctactaccccaggtcaccttcctgattttaaaatgttggctctgtttggatgtggggctttgcttttaagaggtgccggatgtactattaatgatctccttgatcgtgatattgatacaatggtagaacggacaaagttgagacctgtggcaagtggtcttttgacaccatttcaaggactttgttttcttggttttcaattacttttgggtcttgggattcttctacaactgaataattatagccgtgttttgggtgcctcatccttgttgcttgtcttctcctatcccctcatgaagaggtttacattttggcctcaagcctttcttgggttgacctttaactggggggctttgttaggatgggcagcaattaaaggaagtctggatccatctattgtgctgccactctatgcctctggagtattttggactcttgtgtatgatactatctacgcacatcaggacaaagaagatgacctgaaagtgggagttaaatcaacagctttgcgctttggtgattcaacaaaggagtggattacggggtttgggattgcatgccttggtggtcttgctgttagtggatttaatgctgaaataggctggccatattatgcatctctagcagttgcgtctggacacttgggctggcaaatatggacagtcgacctttcttcacgcgctgactgcaataggaaatttgtttcaaataagtggtttggagctatcatatttggtggaattctggctggaagactttcatcctagcggtacattttcccttacagtatacacacacacacatgaacaatcaaacattgttcgcatatcaaaactctggaccttagaatgttgtatctgattacgttttctttttttccttctatagaacatgtttgcagagccaattaatttatggctgagctttattcattgcatgatgaagcttattctttttagttattttttgggaactaattgttgaaacatggttgctggc

SEQ ID NO: 52622 - protein, 389 aa, Glycine max
  peptide (1)..(389): Ceres Seq. ID no. 15177325
MASALISRSSRRFLKPCSSSVSLYPAIFNPVISSQQSASQNPSQNPPFKLPQLQSFNFEFRKTTGSLSSFHLVAHVSTWPSKENKNHQSGGNVSSSWVELYLPRKVQPYARLARLDKPIGTWLLLWPCMWSITLATTPGHLPDFKMLALFGCGALLLRGAGCTINDLLDRDIDTMVERTKLRPVASGLLTPFQGLCFLGFQLLLGLGILLQLNNYSRVLGASSLLLVFSYPLMKRFTFWPQAFLGLTFNWGALLGWAAIKGSLDPSIVLPLYASGVFWTLVYDTIYAHQDKEDDLKVGVKSTALRFGDSTKEWITGFGIACLGGLAVSGFNAEIGWPYYASLAVASGHLGWQIWTVDLSSRADCNRKFVSNKWFGAIIFGGILAGRLSS

SEQ ID NO: 52623 - protein, 261 aa, Glycine max
  peptide (1)..(261): Ceres Seq. ID no. 15177326
MWSITLATTPGHLPDFKMLALFGCGALLLRGAGCTINDLLDRDIDTMVERTKLRPVASGLLTPFQGLCFLGFQLLLGLGILLQLNNYSRVLGASSLLLVFSYPLMKRFTFWPQAFLGLTFNWGALLGWAAIKGSLDPSIVLPLYASGVFWTLVYDTIYAHQDKEDDLKVGVKSTALRFGDSTKEWITGFGIACLGGLAVSGFNAEIGWPYYASLAVASGHLGWQIWTVDLSSRADCNRKFVSNKWFGAIIFGGILAGRLSS

SEQ ID NO: 52624 - protein, 244 aa, Glycine max
  peptide (1)..(244): Ceres Seq. ID no. 15177327
MLALFGCGALLLRGAGCTINDLLDRDIDTMVERTKLRPVASGLLTPFQGLCFLGFQLLLGLGILLQLNNYSRVLGASSLLLVFSYPLMKRFTFWPQAFLGLTFNWGALLGWAAIKGSLDPSIVLPLYASGVFWTLVYDTIYAHQDKEDDLKVGVKSTALRFGDSTKEWITGFGIACLGGLAVSGFNAEIGWPYYASLAVASGHLGWQIWTVDLSSRADCNRKFVSNKWFGAIIFGGILAGRLSS

SEQ ID NO: 52625 - DNA, 1113 bp, Glycine max
  misc_feature (1)..(1113): Ceres Seq. ID no. 14309599
ccaattaccaagcacttaactcgcccgacctacccaccaaccaccccgcggcgagactgaccagactgaccagactgaattgatcggcaataaatcagcacgctgcacgcgctgggggtctgagtcggaggaggaagaagatcgaggagcagctgattcgctcgcacaaagcgccgggatcagatccatctctccgcgcgcgatgtctgaggtggcggcgatggcggggcaggcgtacatgagacagctctccaagcaccctctccgcaccaaggccatcacctccggggtgctggccggctgcagcgacgccgtcgcccagaagatctccggcgtcaagaagctccagctcaggaggctcctcctcataatgctctatggatttgcatacgcaggaccattcggtcattttttccacaagcttatggacaagattttcaagggacagaagaaaggaaaagaaactacagccaagaaggtcatagtggagcagctaactgtatcaccatggaacaatatgatgttcatgatgtactacggtctggtagttgaagggaggccattcgggcaagtaaagagcaaggtcaagaaggactttgcaaacatccaattgacagcttggaagttctggccaatagttagctggatcaactatgagtacatgccactccagctccgagttcttttcgccagctccattgcatcatgctgggcagtgtttctgaacctgaaagcagcaagatccattgccggcgctagtaagaatgcataaaagaaggatggaaggaaggggctagtgctacattgtatttctagctaattaagtatccactagtgattttctcagttcatttttatcactcagtttgtatttatgtttctatgtgaacccctcgagcatcgagaacctagagtgaatgtttcaactaagtatgtgagtatgtcaatgtgaagagtccctttcttgccactgggaaaaaaaccctacaaagcaaaaattatcctctagaaggtaccatgtttgttattcctttgggaggaaaatagggactgtactgggatctgacgcgtggaaataaatgaacatgctctgaggtttgtagaatctcaatg

SEQ ID NO: 52626 - protein, 189 aa, Glycine max
  peptide (1)..(189): Ceres Seq. ID no. 14309600
MSEVAAMAGQAYMRQLSKHPLRTKAITSGVLAGCSDAVAQKISGVKKLQLRRLLLIMLYGFAYAGPFGHFFHKLMDKIFKGQKKGKETTAKKVIVEQLTVSPWNNMMFMMYYGLVVEGRPFGQVKSKVKKDFANIQLTAWKFWPIVSWINYEYMPLQLRVLFASSIASCWAVFLNLKAARSIAGASKNA

SEQ ID NO: 52627 - protein, 183 aa, Glycine max
  peptide (1)..(183): Ceres Seq. ID no. 14309601
MAGQAYMRQLSKHPLRTKAITSGVLAGCSDAVAQKISGVKKLQLRRLLLIMLYGFAYAGPFGHFFHKLMDKIFKGQKKGKETTAKKVIVEQLTVSPWNNMMFMMYYGLVVEGRPFGQVKSKVKKDFANIQLTAWKFWPIVSWINYEYMPLQLRVLFASSIASCWAVFLNLKAARSIAGASKNA

SEQ ID NO: 52628 - protein, 177 aa, Glycine max
  peptide (1)..(177): Ceres Seq. ID no. 14309602
MRQLSKHPLRTKAITSGVLAGCSDAVAQKISGVKKLQLRRLLLIMLYGFAYAGPFGHFFHKLMDKIFKGQKKGKETTAKKVIVEQLTVSPWNNMMFMMYYGLVVEGRPFGQVKSKVKKDFANIQLTAWKFWPIVSWINYEYMPLQLRVLFASSIASCWAVFLNLKAARSIAGASKNA

SEQ ID NO: 52629 - DNA, 1457 bp, Glycine max
  misc_feature (1)..(1457): Ceres Seq. ID no. 15177674
aattaagaccggaatgaactaaaaaaaaagtcactcaatactcaatagccagcttcggtgtaagtgacacctcagatgactatgtctatgagagagagcagagatataaaacccaacccaacccacctggttacaacgctacgcctagttgggtgggacgacaaaaagcgaagaaaaacgcggtttttgttcccctgctctatctgactctgtctctctttctctctgcaaaaaccttcgttcatcgtcaacccacgaactcaaacaacaaatcattcattctttcaattgtaacatataaaaaaaaatgggttgtttcgccagcaaaaacgctgacaccaaggccagtagggccgcgcgctggcgatccacggggcatcgttgctttgcgcgattccaaattaaagacgtttccggatgaaattctcgagttagacagatctgttcgcactcttgacttgacgcataatcgaatagttgacattcctgtggaaattagcaagttaattaatgtacagcgcctgatattagcggagaacctcattgagagactgccagtaaatttggggaaactccaatctctgaaactgatgaacctggatggaaatcgaattacttccttgcctgatgaattgggccagttagtaaggcttgaacgcatatccatctcagggaatttgttaacatccttgccagcaactattggaagtttgagaaatctggtgcttttaaatgtgtcaaataacaagttacagtctcttccagagtctgttgggagttgcttctctttggaagaattacaagctaatgataatcttattgaagatcttccctcttctgtgtgcaatctctctcacttgaagtcactttgcttggataacaataatgtgaagcagatacccctgaatttattgaaagactgcaaagctcttcagaacatatcactgcatgctaatcctatatcaatggatcaatttcagctgatggaggggtttcaagagtttgaagcaaggaggaaaaagaagtttgacaaacaaattgattcaaatgtgatgatcggttccaaaggtcttgatgagggtgttgatctatgaggtggtcttaggcttgttgatggggttctttcagttgtacatttggatgagcttctggatgtagcgtggaatactgggtgttttgtccatgccttttatttcacaaatgaaataagtgtatggagatccttttgtcacgttgtatattattcttatttttattttttgttaccctatccagatttgcctataaatgtgctggcttgtagatgcaggcaatatccagcactagactaaatttcagaatatggtatttggggccattttgttgataatgaaatatgtatctcagcagctgtaaattacgaactttaaatatgatttgaaaggcagtgcattctatcccattaattatgtcaagtg

SEQ ID NO: 52630 - protein, 167 aa, Glycine max
  peptide (1)..(167): Ceres Seq. ID no. 15177675
MNLDGNRITSLPDELGQLVRLERISISGNLLTSLPATIGSLRNLVLLNVSNNKLQSLPESVGSCFSLEELQANDNLIEDLPSSVCNLSHLKSLCLDNNNVKQIPLNLLKDCKALQNISLHANPISMDQFQLMEGFQEFEARRKKKFDKQIDSNVMIGSKGLDEGVDL

SEQ ID NO: 52631 - DNA, 1566 bp, Glycine max
  misc_feature (1)..(1566): Ceres Seq. ID no. 15177676
aatagcatatgaagagagagaagaagtgaagataagcacagagagtgtcatctactcacctctactaccataaaaaaagaaaaacaaaaagccttcagagtcgactattcatcctttcttattcttaattaccgtgccttatccacccccaactatatttcagccagccgcggcgacacaacaacgccgacaccctcatttccactaccaactattctctctcgttctctgatttctgaaatccctcacccatggcttcctcttccctctctctctcactctctctcaccctttgccttgtttccactctctgctacgctcacacatcttccctaaccctacctgtgacaaaagaccattcaacacaccaatacctaacaatcctctcttatggcacccctgttgagtctgcaaaatttgtgcttgatctcggaggctcactcctctgggctgattgtgcatccagaaccaccccatcttccaccctcgcccccattttccaccgttcaattcgctgcctcacagcaaagggtcctgaaattgagacccacaggtggctctcgagtcttgcaaatcctatagatcaagatcagccatgtcaaattacagcagagaacagcatcacggggaaaagggtcaccgaaggagagcttgtggaagacctagtgattcatcgttctcacgagcttctcttcacgtgctcgcccacttttcttttgaatggtttagccactgatgctaaaggcattataggtcttgataaatctcgtatttctttctcatcacaagtttttcactcacttaaaatccagagaaaaatcactctgtgcctttctcccacttctggtgttattcaatttggaaaaatgacgcataaatcccaaactgaatctgaaattttcagatctcttactttcacaccccttgtcgcaaaccaagacccgacacagacccagtcttcaatcaacgttaattccgtcaaaatcaacggcaaaaaggttgcttttgacacccccttaggtgggggcgcgcagctgagcacggtcgtgccttacaccactctccaaacctcgatctatgataacttcgaaagcgcttatttgaaagccgcttcgtctatggacatgaaaagggtcgatccagtttccccctttgggctttgcttcgaatccaatggcgttggaagctcccaagtggggcccaacgtgccgatcattgatctggtgctgcagagcgagatggtgaagtggagcatatacggaagaaactctatggtgcaggtgagcgacgatgttatgtgcttagggtttgttgatggaggtgagaatcccagaaattcaattgtgattggagggtttcaattggaggatgtgttggtgcagattgattttgatacttccatggtgggatttagtccttcccttctcacgaagcaagctagttgctctgatttccaaccatagtttcaaaccatagttttctggtgaatggtgataatagctttttgttatctataccacataatttttcttagattaagatgagtttcgaagagttttaaagggt

SEQ ID NO: 52632 - protein, 403 aa, Glycine max
  peptide (1)..(403): Ceres Seq. ID no. 15177677
MASSSLSLSLSLTLCLVSTLCYAHTSSLTLPVTKDHSTHQYLTILSYGTPVESAKFVLDLGGSLLWADCASRTTPSSTLAPIFHRSIRCLTAKGPEIETHRWLSSLANPIDQDQPCQITAENSITGKRVTEGELVEDLVIHRSHELLFTCSPTFLLNGLATDAKGIIGLDKSRISFSSQVFHSLKIQRKITLCLSPTSGVIQFGKMTHKSQTESEIFRSLTFTPLVANQDPTQTQSSINVNSVKINGKKVAFDTPLGGGAQLSTVVPYTTLQTSIYDNFESAYLKAASSMDMKRVDPVSPFGLCFESNGVGSSQVGPNVPIIDLVLQSEMVKWSIYGRNSMVQVSDDVMCLGFVDGGENPRNSIVIGGFQLEDVLVQIDFDTSMVGFSPSLLTKQASCSDFQP

SEQ ID NO: 52633 - DNA, 854 bp, Glycine max
  misc_feature (1)..(854): Ceres Seq. ID no. 14309614
aaaaaattgtgtcgtgtatatagtagtattttatttataagagctaccccttggaacattcaaaacagatcctacatttgggcaaaaaggaagctcaaccacatccaatacctcagaccacacaacagtgtagaagggagatttgaaagtgcatgtgaagaaacgcattagaagagaaaaaagatgagcaaaaaacagacggtgaaattagacgaggagcaaatcgcagaattgcgcgaaatctttcggtccttcgatcggaacaatgacgggagcctgacgcagttggagctgagttcgcttctgcgctcgcttggtctgaagcccagtgcagaccaactcgagggatttattcagagggcggacaccaacagcaatggcctggtggagttctcggagttcgttgctctggtcgcgccggagcttctgccggccaagtcgccctacacggaagagcagctgaagcagctgttccgaatgttcgatcgtgacgggaacggcctcatcactgcggcggagttggctcactccatggctaggcttggccatgccctcaccgccgaggagctgaccgggatgatcaaagaggccgacaccgacggcgatggcatgatcaactatcaggagttcgctcatgctattacttccgctgcttttgataattgctggccttaaccactctctttctaggtaataatgtaaattcaattttttcgggagaaattacgagattagcgatccatttaataagggagaaactttttattcttatttcaagaatttgagtttatattttgctatattttgatgtacaacgatgataataaagagcaaatctaagtgcttatacatct

SEQ ID NO: 52634 - protein, 163 aa, Glycine max
  peptide (1)..(163): Ceres Seq. ID no. 14309615
MSKKQTVKLDEEQIAELREIFRSFDRNNDGSLTQLELSSLLRSLGLKPSADQLEGFIQRADTNSNGLVEFSEFVALVAPELLPAKSPYTEEQLKQLFRMFDRDGNGLITAAELAHSMARLGHALTAEELTGMIKEADTDGDGMINYQEFAHAITSAAFDNCWP

SEQ ID NO: 52635 - DNA, 2138 bp, Glycine max
  misc_feature (1)..(2138): Ceres Seq. ID no. 15170788
attcaaaaccccaaataccattcaactcttgtcatttttttcactttctctttttcaaaatactcttagtctctctctaaccttcttccagttgtctctaaacctcttgaaatccgtgatggataccaggataggttcactcgacgcggccaagcccgcctgcaacgacgtcgtatcgtgcaaccacaccaccagcgccgccatccagccctgcgtgccggcgacggtgatcaacggcgccggcggagactccactttaggcggccacctggcacgccggctggtcgaaatcggcgtcaccgacgtgttctccgttcccggggacttcaacctgacgctgctggaccacctgatcgcagagccggcgctgaacctggtcgggtgctgcaatgagctcaacgccgggtacgccgccgatggctacgcgcgcgccaggggagtcggcgcgtgcgtggtgactttcaccgtcggcgggcttagcgtgctcaacgccatcgctggagcgtacagcgagaatttgccgctgatttgcatcgtcggtgggcccaactccaacgactacggcaccagtcggatcctccaccacaccatcgggttacccgatttcagccaggagttgaggtgcttccagaccattacttgcttccaggctgtggtgaataacttggaagatgctcatgagttgattgatacagcaatctcaactgcactgaaagaaagcaagccggtgtatataagcattagctgtaacttgcctgggattcctcaccccactttcagtcgtgatcctgttcctttttcgttatctccaagattgagtaacaagatggggttggaggctgcagtggaggcagcggcagaattccttaacaaggcagtgaaaccagtgctggtgggtggtcctaaactgagggtggcaacggcatctgatgcctttgttgaactggctgatgcgtgtggttatgcgcttgctgtgatgccatcggctaaagggcaggttccagagcaccatccccatttcatcggaacttattggggtgctgtgagcactgccttctgtgctgagattgtggagtctgcggatgcatacttgtttgctggtcccatttttaatgactacagctctgtggggtattcgctccttctcaagaaggagaaggcgatcattgtgcagcctgatcgggtggtgatcgcaaatggacctgcatttggttgtgtgctgatgaaggatttccttaaggcacttgcaaagcgcctcaagcacaacaatactgcatatgaaaattaccacaggatatttgtccctgaaggacatcctttgaaggctacacccagagagcctttgagggttaatgttcttttccaacatatacagaagatgctgtctggtgaaactgctgtaattgctgagacaggggattcctggtttaactgccaaaagctgaaattgccaaagggatgtgggtatgagttccaaatgcaatatggttcaattggatggtctgttggtgctactcttggttatgctcaggctgttcctgagaagcgagtgattgcctgcattggtgatggaagttttcaggtgactgcccaagatgtatcaacaatgttgcggtgtgggcaaaagaccattatctttctggtcaacaatggcggatacaccattgaggttgaaattcatgatgggccatacaatgtgattaagaactggaactacactgggttgattgatgcaatccacaatggtgaagggaaatgctggactgccaaggtgttctgtgaagaggagctagttgaagcaattgccacagccacaggacacaagagagactccttatgcttcattgaggtgattgttcacaaggatgacaccagcaaagaattgcttgaatggggctcacgagtctctgctgccaatagccgtccccccaatcctcagtaaacttcagatgtcggcctatgattaaattgctgcaattgccctttagctctatgaaattgagaatcatttgagatgttgtccttgtaggaaatttacctttgttaatggcttgaaatatttatgcaaaactgagtccccacttgtttgtgtaaattctttcacttgagataaaaatatatccatcacctttgttcct

SEQ ID NO: 52636 - protein, 646 aa, Glycine max
  peptide (1)..(646): Ceres Seq. ID no. 15170789
FKTPNTIQLLSFFSLSLFQNTLSLSLTFFQLSLNLLKSVMDTRIGSLDAAKPACNDVVSCNHTTSAAIQPCVPATVINGAGGDSTLGGHLARRLVEIGVTDVFSVPGDFNLTLLDHLIAEPALNLVGCCNELNAGYAADGYARARGVGACVVTFTVGGLSVLNAIAGAYSENLPLICIVGGPNSNDYGTSRILHHTIGLPDFSQELRCFQTITCFQAVVNNLEDAHELIDTAISTALKESKPVYISISCNLPGIPHPTFSRDPVPFSLSPRLSNKMGLEAAVEAAAEFLNKAVKPVLVGGPKLRVATASDAFVELADACGYALAVMPSAKGQVPEHHPHFIGTYWGAVSTAFCAEIVESADAYLFAGPIFNDYSSVGYSLLLKKEKAIIVQPDRVVIANGPAFGCVLMKDFLKALAKRLKHNNTAYENYHRIFVPEGHPLKATPREPLRVNVLFQHIQKMLSGETAVIAETGDSWFNCQKLKLPKGCGYEFQMQYGSIGWSVGATLGYAQAVPEKRVIACIGDGSFQVTAQDVSTMLRCGQKTIIFLVNNGGYTIEVEIHDGPYNVIKNWNYTGLIDAIHNGEGKCWTAKVFCEEELVEAIATATGHKRDSLCFIEVIVHKDDTSKELLEWGSRVSAANSRPPNPQ

SEQ ID NO: 52637 - protein, 607 aa, Glycine max
  peptide (1)..(607): Ceres Seq. ID no. 15170790
MDTRIGSLDAAKPACNDVVSCNHTTSAAIQPCVPATVINGAGGDSTLGGHLARRLVEIGVTDVFSVPGDFNLTLLDHLIAEPALNLVGCCNELNAGYAADGYARARGVGACVVTFTVGGLSVLNAIAGAYSENLPLICIVGGPNSNDYGTSRILHHTIGLPDFSQELRCFQTITCFQAVVNNLEDAHELIDTAISTALKESKPVYISISCNLPGIPHPTFSRDPVPFSLSPRLSNKMGLEAAVEAAAEFLNKAVKPVLVGGPKLRVATASDAFVELADACGYALAVMPSAKGQVPEHHPHFIGTYWGAVSTAFCAEIVESADAYLFAGPIFNDYSSVGYSLLLKKEKAIIVQPDRVVIANGPAFGCVLMKDFLKALAKRLKHNNTAYENYHRIFVPEGHPLKATPREPLRVNVLFQHIQKMLSGETAVIAETGDSWFNCQKLKLPKGCGYEFQMQYGSIGWSVGATLGYAQAVPEKRVIACIGDGSFQVTAQDVSTMLRCGQKTIIFLVNNGGYTIEVEIHDGPYNVIKNWNYTGLIDAIHNGEGKCWTAKVFCEEELVEAIATATGHKRDSLCFIEVIVHKDDTSKELLEWGSRVSAANSRPPNPQ

SEQ ID NO: 52638 - protein, 371 aa, Glycine max
  peptide (1)..(371): Ceres Seq. ID no. 15170791
MGLEAAVEAAAEFLNKAVKPVLVGGPKLRVATASDAFVELADACGYALAVMPSAKGQVPEHHPHFIGTYWGAVSTAFCAEIVESADAYLFAGPIFNDYSSVGYSLLLKKEKAIIVQPDRVVIANGPAFGCVLMKDFLKALAKRLKHNNTAYENYHRIFVPEGHPLKATPREPLRVNVLFQHIQKMLSGETAVIAETGDSWFNCQKLKLPKGCGYEFQMQYGSIGWSVGATLGYAQAVPEKRVIACIGDGSFQVTAQDVSTMLRCGQKTIIFLVNNGGYTIEVEIHDGPYNVIKNWNYTGLIDAIHNGEGKCWTAKVFCEEELVEAIATATGHKRDSLCFIEVIVHKDDTSKELLEWGSRVSAANSRPPNPQ

SEQ ID NO: 52639 - DNA, 1656 bp, Glycine max
  misc_feature (1)..(1656): Ceres Seq. ID no. 15178131
acctctcttcactctcagtctcagtctccactttctgagaagagcgccaaattagggttagattatcagggtttaaccgttcctcctcttcctctaccataatcaacaacctcttcccaatcccaatggatccaaccaagaagcgcaagctcgacgagaacggcttcaacaacaacgactcttccgaccccctcaagctctccccctccgaagtccgcaagctcatcgagcgcttcacctccgaccagctcctcgacatcctccaggacgcggtggcgcgccacctcgacgtccttgccgccgtgcgcgccgtcgcggaccctgacgtctcccagcgcaagctcttcatccgcggcctcggctgggacaccaccaccgacggcctccgctcgctcttctccaccttcggcgacctcgaggaggccgttgtcatcctcgacaaggccactggcaagtccaagggatacggcttcgtcaccttccgccacgtcgacggcgcgcttctcgccctccgcgagcccagcaagcgcatcgacggccgcgtgacggtcacgcagctcgccgccgccgggaactccgcgtcgaacgtcaaccccgctgacgtagctctccgtaagatctacgtcgccaacgtgccgccggacctgcccgcggacaagcttctcgcgcacttctccgtgtacggcgaaatcgaagaaggtccgttagggtttgataaacaaacaggaaagtcgaaagggtttgctttatttgtttataagtctcccgagggtgctcaggccgcattgatagatcctgtgaagactgtggaagggaggcagttgagttgtaagttggcgattactgatgggaagcagggaaagcgggtagggccggactcggcccaggcccatcacgggaatgttcagcacgggcatggagatggagtgggggcgggaatggggatgcctcctaatgcggggtccgggcctgggcagtatggtggacctggacagtatgggcccccggttgggatgggttcttatggtgggtttggcggacagcctccgatgggcaatcataaccatcctcttaattcgacgaatcctgtgccgggttctttggcaggtgctggtgggtatggtggtgggatgggtgggccatatggtgggtacggtggtggacctggaccggggtcgactggctttggcggtgctggtgggatgggaggaggtggtggaggtgttggtggtggcgctggtggcgggcttggtggtgctggtggtggtagttctatgtatagattgccgggttcgggcggaatgcctgctggtggtactggagggtatccggatagtggacactatggtttatcagcttcctctgggtaccagaatcagcatcaccctccttctggaacttcacctatgcctagggttccgcctggttcgatgtatcccaatatgcccccttactactgaagaggtgtatcatcgcttattgggcgcagatgctttgtgtgcctctggtgattgcgtgaattgcagactatgtgctctggtgtaatgaatttgttagactgtacttttacagcctcttgacttcatctgccccctttttaagcattgattcatatggatgttgctagttaaagccgttgagatagactagttttgt

SEQ ID NO: 52640 - protein, 444 aa, Glycine max
  peptide (1)..(444): Ceres Seq. ID no. 15178132
MDPTKKRKLDENGFNNNDSSDPLKLSPSEVRKLIERFTSDQLLDILQDAVARHLDVLAAVRAVADPDVSQRKLFIRGLGWDTTTDGLRSLFSTFGDLEEAVVILDKATGKSKGYGFVTFRHVDGALLALREPSKRIDGRVTVTQLAAAGNSASNVNPADVALRKIYVANVPPDLPADKLLAHFSVYGEIEEGPLGFDKQTGKSKGFALFVYKSPEGAQAALIDPVKTVEGRQLSCKLAITDGKQGKRVGPDSAQAHHGNVQHGHGDGVGAGMGMPPNAGSGPGQYGGPGQYGPPVGMGSYGGFGGQPPMGNHNHPLNSTNPVPGSLAGAGGYGGGMGGPYGGYGGGPGPGSTGFGGAGGMGGGGGGVGGGAGGGLGGAGGGSSMYRLPGSGGMPAGGTGGYPDSGHYGLSASSGYQNQHHPPSGTSPMPRVPPGSMYPNMPPYY

SEQ ID NO: 52641 - DNA, 1710 bp, Glycine max
  misc_feature (1)..(1710): Ceres Seq. ID no. 15170768
gtttggattttgggtgaaaatgagataataatcgtgttggatcgagtcctccgtcttaccggtgtcaacgaggtggcggagaatggaaaacgccgacgttttcttgggcttacacgacttcctcgagcgcatgcggcaaccctccgccgctgaattcgtcaaagcaatcaaaagttttattgtttcgttttcaaacaatgctcctgatcccgatagggacagtgctgcggttcaagcgttcctcgcgaaaatggaagcggatttcagggctcatccactttgggctggttgctccgaagaggaacttgaaagtgccggtgaaggacttgagaagtatgttatgacaaagttatttgctcgtgtatttgcttcacttccagatgatgtaaaatttgatgaccaactttctgagaagatggctttgattcaacaatttattcgacctgaaaatttggatatcaagccagtatttcagaatgaatcatcatggttgcttgcacagaaagaattacagaagatcaacatgtacaaggcacccagggataaacttgtctgtattctgaattgttgcagggttattagcaacttgctacttaatgcttcggttgcttcgagagagaatcctccaggagctgatgaatttcttcctgtgcttatttatgtaaccataaaggcaaaccctccacaactgcactcaaatctactgtacatacagaggtttagacatcaatctcgattggttgcagaagcagcatattattttacaaacatgctctctgctgagtcattcatctcaaacatcgatgcaaaagccatttcaatggaggaagctgagtttgatggaaacatggaatttgctcgtgctatgctttcgggtatttcagctgatacacaagatcctggttcaccttatcaaaatgatggacagcatccaagagcagaacccactaagcacaaagctttgaatgataataatgaccctgcactacgaactccatcatctgttgcaaaatcagaaagcaagaaagtgacttttgcaaatgaatcattgatcacaaaagttccatcgctctcggatttggagaataaaggggcaagtatgattttaaaggaggataagttgaatgaagttttcggggagtttccatatttgtttgctagtgtaggtgacctaatggttggtgatgttgaagacctgctaaataattacaaacaacttgttttcaagtatgtctctctttccaaagggttaggaatctctcctacatctcttccaccatcgaattcccaaaataattctgaagaccatgctgaaaccacaatagattcttcagacaatggacctctagatgacaacagtaaatcagaagaatctattgatacaacagatgatagttcagataaagttacacttgaggagcaaaaaattgaatccgatctgccgaaggatgaccttgttgctcctgagggtgatcccccctcttaactaatcggagctatcttcaaccattttctccccgttttgtaccccattttttccacccgtttttcctgtaaaattatttttatgttgtccgttgtctggtagctacactcgttccttatgtttatagggatggctgtaccatgaccactatgcctcggtaacattgttcttgaatagattttagacctgcaaaaaatagaattttacatttgcttttgcgatgg

SEQ ID NO: 52642 - protein, 467 aa, Glycine max
  peptide (1)..(467): Ceres Seq. ID no. 15170769
MENADVFLGLHDFLERMRQPSAAEFVKAIKSFIVSFSNNAPDPDRDSAAVQAFLAKMEADFRAHPLWAGCSEEELESAGEGLEKYVMTKLFARVFASLPDDVKFDDQLSEKMALIQQFIRPENLDIKPVFQNESSWLLAQKELQKINMYKAPRDKLVCILNCCRVISNLLLNASVASRENPPGADEFLPVLIYVTIKANPPQLHSNLLYIQRFRHQSRLVAEAAYYFTNMLSAESFISNIDAKAISMEEAEFDGNMEFARAMLSGISADTQDPGSPYQNDGQHPRAEPTKHKALNDNNDPALRTPSSVAKSESKKVTFANESLITKVPSLSDLENKGASMILKEDKLNEVFGEFPYLFASVGDLMVGDVEDLLNNYKQLVFKYVSLSKGLGISPTSLPPSNSQNNSEDHAETTIDSSDNGPLDDNSKSEESIDTTDDSSDKVTLEEQKIESDLPKDDLVAPEGDPPS

SEQ ID NO: 52643 - protein, 451 aa, Glycine max
  peptide (1)..(451): Ceres Seq. ID no. 15170770
MRQPSAAEFVKAIKSFIVSFSNNAPDPDRDSAAVQAFLAKMEADFRAHPLWAGCSEEELESAGEGLEKYVMTKLFARVFASLPDDVKFDDQLSEKMALIQQFIRPENLDIKPVFQNESSWLLAQKELQKINMYKAPRDKLVCILNCCRVISNLLLNASVASRENPPGADEFLPVLIYVTIKANPPQLHSNLLYIQRFRHQSRLVAEAAYYFTNMLSAESFISNIDAKAISMEEAEFDGNMEFARAMLSGISADTQDPGSPYQNDGQHPRAEPTKHKALNDNNDPALRTPSSVAKSESKKVTFANESLITKVPSLSDLENKGASMILKEDKLNEVFGEFPYLFASVGDLMVGDVEDLLNNYKQLVFKYVSLSKGLGISPTSLPPSNSQNNSEDHAETTIDSSDNGPLDDNSKSEESIDTTDDSSDKVTLEEQKIESDLPKDDLVAPEGDPPS

SEQ ID NO: 52644 - protein, 411 aa, Glycine max
  peptide (1)..(411): Ceres Seq. ID no. 15170771
MEADFRAHPLWAGCSEEELESAGEGLEKYVMTKLFARVFASLPDDVKFDDQLSEKMALIQQFIRPENLDIKPVFQNESSWLLAQKELQKINMYKAPRDKLVCILNCCRVISNLLLNASVASRENPPGADEFLPVLIYVTIKANPPQLHSNLLYIQRFRHQSRLVAEAAYYFTNMLSAESFISNIDAKAISMEEAEFDGNMEFARAMLSGISADTQDPGSPYQNDGQHPRAEPTKHKALNDNNDPALRTPSSVAKSESKKVTFANESLITKVPSLSDLENKGASMILKEDKLNEVFGEFPYLFASVGDLMVGDVEDLLNNYKQLVFKYVSLSKGLGISPTSLPPSNSQNNSEDHAETTIDSSDNGPLDDNSKSEESIDTTDDSSDKVTLEEQKIESDLPKDDLVAPEGDPPS

SEQ ID NO: 52645 - DNA, 1687 bp, Glycine max
  misc_feature (1)..(1687): Ceres Seq. ID no. 15177320
atcatctatatacttgtacccgatcaatgaattagcctataaagaccaagtattccttggagttgttgtataaccaggcttatatattagctattaatcttcagttgacatgcacatccaaatgtcttctttcctcttagcttcgcttgcacttttgttttgcatctcctccttggagaagagctttgcctttcaagcaacaaaggaaagcaacaatcttcgtcaatatcattttgttcacctcaactctctttttccatcatcttcttgcagctcttctgccaaaggtcctaaaaggaaagcatcattagaagtggtgcacaaacatggcccatgctcccaactaaatcatagtggcaaagcagaggctacaatatcacacaatgatattatgaacctagacaatgaaagggtaaagtatattcagtccaggctctctaagaatttgggtggagaaaatagagtgaaggaattggattcaactaccctacccgccaagtctggtagacttattgggtctgcagactattatgttgttgttggtcttggtacacccaagagggacttgtcactcatttttgacacaggtagttatcttacatggactcagtgtgaaccctgtgctggttcttgctacaagcagcaagatccaatctttgatccatcaaagtcttcatcgtataccaatatcaaatgcacatcttcgctctgcactcaattccgttctgcgggatgctcctcatccacagatgcatcatgcatatatgacgtcaaatacggtgacaattccatctcccgcggcttcttgagtcaggagcgccttaccatcaccgccaccgacatcgtccacgacttcctctttggctgtggccaagacaacgagggcctcttcaggggcaccgccggcctcatgggcctcagccgccaccccatttcctttgtccaacaaacctcctcaatttacaacaaaattttctcctactgtctcccctccacccccagctcccttggccacctcaccttcggcgcttccgccgccaccaatgctaacctcaaatacactcccttttccacaatctccggcgaaaactccttctacggtctcgacatcgtcggcatctccgttggcggcaccaaactccctgctgtctcctcctccaccttctccgccggtggctccatcatcgactccggcaccgtgatcacgcggttgcctccgaccgcgtacgccgcgctccggtcggcatttcggcagtttatgatgaagtaccccgttgcctatgggacccgcctacttgacacgtgttatgatttcagtgggtataaggagatttcagttccgaggatagattttgaatttgccggtggcgtcaaggtggagttgccattggtggggatactctatggggaaagtgcgcaacaactgtgtttggcttttgctgcaaatgggaatggcaatgatattacgatatttgggaatgtgcaacaaaagacactagaggtcgtgtatgatgttgagggtgggaggatagggtttggtgctgctgggtgcaactgaagttagtttgattaatagtggtgttaattaaacatgctttgggcttgttagggaggaagaaatcttaattggctctggcatttttaattactattgttgttgttactggaaagtactctaaaacatatg

SEQ ID NO: 52646 - protein, 482 aa, Glycine max
  peptide (1)..(482): Ceres Seq. ID no. 15177321
MHIQMSSFLLASLALLFCISSLEKSFAFQATKESNNLRQYHFVHLNSLFPSSSCSSSAKGPKRKASLEVVHKHGPCSQLNHSGKAEATISHNDIMNLDNERVKYIQSRLSKNLGGENRVKELDSTTLPAKSGRLIGSADYYVVVGLGTPKRDLSLIFDTGSYLTWTQCEPCAGSCYKQQDPIFDPSKSSSYTNIKCTSSLCTQFRSAGCSSSTDASCIYDVKYGDNSISRGFLSQERLTITATDIVHDFLFGCGQDNEGLFRGTAGLMGLSRHPISFVQQTSSIYNKIFSYCLPSTPSSLGHLTFGASAATNANLKYTPFSTISGENSFYGLDIVGISVGGTKLPAVSSSTFSAGGSIIDSGTVITRLPPTAYAALRSAFRQFMMKYPVAYGTRLLDTCYDFSGYKEISVPRIDFEFAGGVKVELPLVGILYGESAQQLCLAFAANGNGNDITIFGNVQQKTLEVVYDVEGGRIGFGAAGCN

SEQ ID NO: 52647 - protein, 478 aa, Glycine max
  peptide (1)..(478): Ceres Seq. ID no. 15177322
MSSFLLASLALLFCISSLEKSFAFQATKESNNLRQYHFVHLNSLFPSSSCSSSAKGPKRKASLEVVHKHGPCSQLNHSGKAEATISHNDIMNLDNERVKYIQSRLSKNLGGENRVKELDSTTLPAKSGRLIGSADYYVVVGLGTPKRDLSLIFDTGSYLTWTQCEPCAGSCYKQQDPIFDPSKSSSYTNIKCTSSLCTQFRSAGCSSSTDASCIYDVKYGDNSISRGFLSQERLTITATDIVHDFLFGCGQDNEGLFRGTAGLMGLSRHPISFVQQTSSIYNKIFSYCLPSTPSSLGHLTFGASAATNANLKYTPFSTISGENSFYGLDIVGISVGGTKLPAVSSSTFSAGGSIIDSGTVITRLPPTAYAALRSAFRQFMMKYPVAYGTRLLDTCYDFSGYKEISVPRIDFEFAGGVKVELPLVGILYGESAQQLCLAFAANGNGNDITIFGNVQQKTLEVVYDVEGGRIGFGAAGCN

SEQ ID NO: 52648 - protein, 388 aa, Glycine max
  peptide (1)..(388): Ceres Seq. ID no. 15177323
MNLDNERVKYIQSRLSKNLGGENRVKELDSTTLPAKSGRLIGSADYYVVVGLGTPKRDLSLIFDTGSYLTWTQCEPCAGSCYKQQDPIFDPSKSSSYTNIKCTSSLCTQFRSAGCSSSTDASCIYDVKYGDNSISRGFLSQERLTITATDIVHDFLFGCGQDNEGLFRGTAGLMGLSRHPISFVQQTSSIYNKIFSYCLPSTPSSLGHLTFGASAATNANLKYTPFSTISGENSFYGLDIVGISVGGTKLPAVSSSTFSAGGSIIDSGTVITRLPPTAYAALRSAFRQFMMKYPVAYGTRLLDTCYDFSGYKEISVPRIDFEFAGGVKVELPLVGILYGESAQQLCLAFAANGNGNDITIFGNVQQKTLEVVYDVEGGRIGFGAAGCN

SEQ ID NO: 52649 - DNA, 1720 bp, Glycine max
  misc_feature (1)..(1720): Ceres Seq. ID no. 15170811
ataaaatggaactgagttagggaagagagagaagaggaacactgacatggcttcttcactcagaatttcaagactcatctctcgctccttttcttctacctccttcttttcacgaggtgggaatggtttccttggttcaagacactgcaaatacagcacttcttctgccattgaagaagaacccgttaaaccatcagtgcaagtagaacacacccaactcttaattgatggaaaatttgtagatgctgcttctggtaaaacttttccaactttagatcctaggacaggtgaagtaattgctcatgttgctgagggtcactctgaggatgttgatcgagcagttgcagctgcacgaaaagcatttgatcatggaccatggcctaagatgacggcttatgaacggcaaaggatcttgttgcgcgcagctgatctgcttgagaagcataatgatgagcttgcagcacttgagacttgggataatggaaagccttatgaacaagctgctaagattgaagttccaatgcttgttcgcctgattcgatactatgctggttgggcagataagatccatggtctaacagttccagctgatggaccatatcatgtgcaaacattgcatgaaccaattggtgttgccggtcagatcattccttggaacttccctcttctcatgtttgcctggaaggttggaccggcattggcctgtggcaacaccattgttctcaaaacagctgagcagacaccgttatctgctttatatgcagcaaaactatttcatgaggctggacttcctgctggtgttttaaatgtagtatctggctttggtccaactgctggtgctgctcttgctagccacatggaagttgacaagcttgcttttactggttccactgatactgggaaagttgtccttgaactggcggctaaaagcaatcttaagcctgttactttggagcttggtgggaaatccccctttattgtgtgtgaagatgctgatgtagatcaggctgttgagctagcccattttgctttattctttaatcagggacaatgttgctgtgctgggtctcgaacatttgtacatgaaagtgtatacgatgagtttgttgagaaagcaaaggctcgtgctttgaagcgtgttgttggtgatccattcaaggggggaatagagcaaggtcctcagattgattcagatcaatttgagaaaatactgaggtacatcagatctggtgttgaaagtggggcaacccttgaaaccggaggagacaagcttggcaacaagggcttctacattcaacctacagtcttctcaaatgttaaggatggcatgctgattgcaagggatgagatctttggtccagtccaatccatattaaaattcaaggatcttggtgaggtagttcaaagagcaaataacacacgttacgggcttgcggccggagtgttcacaacgaacatggacactgcctacactttgacgcgggcactgagagttggaacagtgtggataaactgctttgacacatttgatgctgcaattccctttggagggtacaagatgagtggtcaaggcagagaaaaaggagagtatagtctcaaaaactacttgcaagtgaaggctgttgttaatcccctgaaaaacccagcatggctttgagcaaacactagccttctttggataatcaataactatcagtgcctcaatgataatgatgataag

SEQ ID NO: 52650 - protein, 536 aa, Glycine max
  peptide (1)..(536): Ceres Seq. ID no. 15170812
MASSLRISRLISRSFSSTSFFSRGGNGFLGSRHCKYSTSSAIEEEPVKPSVQVEHTQLLIDGKFVDAASGKTFPTLDPRTGEVIAHVAEGHSEDVDRAVAAARKAFDHGPWPKMTAYERQRILLRAADLLEKHNDELAALETWDNGKPYEQAAKIEVPMLVRLIRYYAGWADKIHGLTVPADGPYHVQTLHEPIGVAGQIIPWNFPLLMFAWKVGPALACGNTIVLKTAEQTPLSALYAAKLFHEAGLPAGVLNVVSGFGPTAGAALASHMEVDKLAFTGSTDTGKVVLELAAKSNLKPVTLELGGKSPFIVCEDADVDQAVELAHFALFFNQGQCCCAGSRTFVHESVYDEFVEKAKARALKRVVGDPFKGGIEQGPQIDSDQFEKILRYIRSGVESGATLETGGDKLGNKGFYIQPTVFSNVKDGMLIARDEIFGPVQSILKFKDLGEVVQRANNTRYGLAAGVFTTNMDTAYTLTRALRVGTVWINCFDTFDAAIPFGGYKMSGQGREKGEYSLKNYLQVKAVVNPLKNPAWL

SEQ ID NO: 52651 - protein, 423 aa, Glycine max
  peptide (1)..(423): Ceres Seq. ID no. 15170813
MTAYERQRILLRAADLLEKHNDELAALETWDNGKPYEQAAKIEVPMLVRLIRYYAGWADKIHGLTVPADGPYHVQTLHEPIGVAGQIIPWNFPLLMFAWKVGPALACGNTIVLKTAEQTPLSALYAAKLFHEAGLPAGVLNVVSGFGPTAGAALASHMEVDKLAFTGSTDTGKVVLELAAKSNLKPVTLELGGKSPFIVCEDADVDQAVELAHFALFFNQGQCCCAGSRTFVHESVYDEFVEKAKARALKRVVGDPFKGGIEQGPQIDSDQFEKILRYIRSGVESGATLETGGDKLGNKGFYIQPTVFSNVKDGMLIARDEIFGPVQSILKFKDLGEVVQRANNTRYGLAAGVFTTNMDTAYTLTRALRVGTVWINCFDTFDAAIPFGGYKMSGQGREKGEYSLKNYLQVKAVVNPLKNPAWL

SEQ ID NO: 52652 - protein, 378 aa, Glycine max
  peptide (1)..(378): Ceres Seq. ID no. 15170814
MLVRLIRYYAGWADKIHGLTVPADGPYHVQTLHEPIGVAGQIIPWNFPLLMFAWKVGPALACGNTIVLKTAEQTPLSALYAAKLFHEAGLPAGVLNVVSGFGPTAGAALASHMEVDKLAFTGSTDTGKVVLELAAKSNLKPVTLELGGKSPFIVCEDADVDQAVELAHFALFFNQGQCCCAGSRTFVHESVYDEFVEKAKARALKRVVGDPFKGGIEQGPQIDSDQFEKILRYIRSGVESGATLETGGDKLGNKGFYIQPTVFSNVKDGMLIARDEIFGPVQSILKFKDLGEVVQRANNTRYGLAAGVFTTNMDTAYTLTRALRVGTVWINCFDTFDAAIPFGGYKMSGQGREKGEYSLKNYLQVKAVVNPLKNPAWL

SEQ ID NO: 52653 - DNA, 1526 bp, Glycine max
  misc_feature (1)..(1526): Ceres Seq. ID no. 15170804
acaaacaagagccaaaagccaacacacaacaaaactcaaacaaaaatgggacttcttcaacgtcccttgtgttgccacacacaacaaccacaatcccatcatcaccttcattccgagtcatcaacttcatcctccctctcttcacaaccaagcctcccttctgtcccctccctcaccccacaaaaaccgcatttcctcgaagaacaaccccaaaccacccaccacagactcatcaccgccgtcaagggccacacctcaccaatcttctccctcgccctccacggcaagtccctctatagcgcctcctccggcggcgaaataagagcatgcaatagaaatcccacatcggctaatgatataatcacattaaaatatataagtaatgtcaacaccaacactgttgtcgcgaccagcaacgcgccaatcaagtccctcatcgtatcccacgacaagttattcactgctcaccaagaccacaaaatccgtgtctggaaaacaacaaccgaccaacccggtaacaacaacaacaacaacccgaactactacaaatgcgtcgccacgcttcccaccctccacgaccgtatctccaaactcttctcctccaagaactacgtcgagattcgccgccacaagaagcgcacgtgggtgcatcacgtggacaccgtctccgccctcgcgctttcccgagacgggtccctcctctactccgcttcatgggaccgaacattcaagatctggcgaacctcggatttcaagtgtctggagtcagttaaaaacgcgcacgaggacgcaattaattccttagttttgtcgaataacggttttgtctacacaggttccgcggacactagaataaagatgtggaagaagttagagggagagaaaaagcattctctaataggaaccttggagaagcataaatccgctgttaacgctcttgctcttaactccgatggatcagtgttatattcaggtgcgtgtgataggtcaattttagtgtgggagagtgatcaaaatgaaaataataacaccatggtgttggtgggtgctttgagggggcacacaaaagcgatactgtgtttggtggtggtggcggatttggtgtgtagtggatctgctgataacagtgttagggtatggaggagaggtgctgagaagagttattcgtgtttggcggtgtttgaaggtcatcgacgacccgtgaagtgtttggctatggctgttgactccaacagtggtggtcctcgtgaggatgatcataatagtagctcttatctggtttacagtgcaggtttagattgtgagattaaagtgtggcaaatacgcgttccttcgctgtcgttgtgattctttttttgttactacaattttttgctcccttcattggatttgtaaataggatcagaattttttttgttattttgatgtgtaacttggcttctttttttcggtgtagtggtatttttactactaatttgactgaaaaaataaagaagatttggagatggattcataccaccaagttt

SEQ ID NO: 52654 - protein, 448 aa, Glycine max
  peptide (1)..(448): Ceres Seq. ID no. 15170805
TNKSQKPTHNKTQTKMGLLQRPLCCHTQQPQSHHHLHSESSTSSSLSSQPSLPSVPSLTPQKPHFLEEQPQTTHHRLITAVKGHTSPIFSLALHGKSLYSASSGGEIRACNRNPTSANDIITLKYISNVNTNTVVATSNAPIKSLIVSHDKLFTAHQDHKIRVWKTTTDQPGNNNNNNPNYYKCVATLPTLHDRISKLFSSKNYVEIRRHKKRTWVHHVDTVSALALSRDGSLLYSASWDRTFKIWRTSDFKCLESVKNAHEDAINSLVLSNNGFVYTGSADTRIKMWKKLEGEKKHSLIGTLEKHKSAVNALALNSDGSVLYSGACDRSILVWESDQNENNNTMVLVGALRGHTKAILCLVVVADLVCSGSADNSVRVWRRGAEKSYSCLAVFEGHRRPVKCLAMAVDSNSGGPREDDHNSSSYLVYSAGLDCEIKVWQIRVPSLSL

SEQ ID NO: 52655 - protein, 433 aa, Glycine max
  peptide (1)..(433): Ceres Seq. ID no. 15170806
MGLLQRPLCCHTQQPQSHHHLHSESSTSSSLSSQPSLPSVPSLTPQKPHFLEEQPQTTHHRLITAVKGHTSPIFSLALHGKSLYSASSGGEIRACNRNPTSANDIITLKYISNVNTNTVVATSNAPIKSLIVSHDKLFTAHQDHKIRVWKTTTDQPGNNNNNNPNYYKCVATLPTLHDRISKLFSSKNYVEIRRHKKRTWVHHVDTVSALALSRDGSLLYSASWDRTFKIWRTSDFKCLESVKNAHEDAINSLVLSNNGFVYTGSADTRIKMWKKLEGEKKHSLIGTLEKHKSAVNALALNSDGSVLYSGACDRSILVWESDQNENNNTMVLVGALRGHTKAILCLVVVADLVCSGSADNSVRVWRRGAEKSYSCLAVFEGHRRPVKCLAMAVDSNSGGPREDDHNSSSYLVYSAGLDCEIKVWQIRVPSLSL

SEQ ID NO: 52656 - DNA, 1560 bp, Glycine max
  misc_feature (1)..(1560): Ceres Seq. ID no. 15178279
taaattttgattctgctttgtttacttgcttttaattttaccgaatgatttcttgcatttttcaggtgcatgctaaacctttttctcccgtcaacaaatttctgatgcagtcctattatgacagatacatcaatttacacgatttggattttgaaaaatttatgtctcaagaagtcccttatggttcgtgtgataaccttaattttgtgttgagattgtcagatctaaagcgcactcttattggtgaaggttcacatcgtactgtgtctacattaatccaattgaaaacccaaccgtcaaagtctttttctgaactgttaagcaactcatgtaaattcatgattattgagagattgccttctggagtttttgctgatccatttgagttacaacatctcgttcagcgaggcaagttcagtgatatagctgtctttggtgacacaaatctggagctgccttcattcttgtccaatcgttctgctgttgaaattcacttgcttgttgatccaaatatattgcaagagccaactgatattaacatggagcttccattgcatgctcgatatcaacctctgaatggaagtgggtactcggcaattgaatttggtgcaccggatatggtagtgcgctgcagcacaaaagaaaagatggaaaatcacaattgcttctttaaattggaaaaagatgatgctaatctgtatggtgctcatattgtttggagaataccttctggaataaaggcacatgctggtcttgtttctgccgttacatttattgcagctttgttatcaactattgcaattgttgttgcatcattatatcaaccctggtgtttttgaatatacctaaggaggtagacggaattgttgaggtgattaaattctattattggcattggaataatggtcaaggtgtgttctctgtgaatccaagagggtgtctttgtagttgaaagaaggttgtgattttatatgtggggatggagttatatggaggtcggatgaagacccagtttgggatgaggctatattacaagcaggtggcgggcaatggatatgctgtggataaatcggaattttgggaagtggttaccgacagcaataacgacgtgcagaaacagattgtgcatttaggatccggatccgtgcagttatcagacttttcagagtctaaataattctattaagcttttctttttggtgaataaataattctattaagctggttgtagagaactaatgcgttcttatgtgttggattgggtgaaggaatgcttacgcagtgatgaagtactagtgtttgattatttcagatcataatgcagcaaaagcattagtaatacgcaaggtgtgggcgtcgttaaaacagctgttgctagaggattttagatggctttttgacagtaggcttttttcttagattttggaatgttttgagtaccgatcttatttgtataagaaacatatccttgtactcttctaaatcattttattgcacaccttgtgttttaaactgggttattaataatatgcaaatgctaaccatgacttttattatagg

SEQ ID NO: 52657 - protein, 264 aa, Glycine max
  peptide (1)..(264): Ceres Seq. ID no. 15178280
MISCIFQVHAKPFSPVNKFLMQSYYDRYINLHDLDFEKFMSQEVPYGSCDNLNFVLRLSDLKRTLIGEGSHRTVSTLIQLKTQPSKSFSELLSNSCKFMIIERLPSGVFADPFELQHLVQRGKFSDIAVFGDTNLELPSFLSNRSAVEIHLLVDPNILQEPTDINMELPLHARYQPLNGSGYSAIEFGAPDMVVRCSTKEKMENHNCFFKLEKDDANLYGAHIVWRIPSGIKAHAGLVSAVTFIAALLSTIAIVVASLYQPWCF

SEQ ID NO: 52658 - protein, 244 aa, Glycine max
  peptide (1)..(244): Ceres Seq. ID no. 15178281
MQSYYDRYINLHDLDFEKFMSQEVPYGSCDNLNFVLRLSDLKRTLIGEGSHRTVSTLIQLKTQPSKSFSELLSNSCKFMIIERLPSGVFADPFELQHLVQRGKFSDIAVFGDTNLELPSFLSNRSAVEIHLLVDPNILQEPTDINMELPLHARYQPLNGSGYSAIEFGAPDMVVRCSTKEKMENHNCFFKLEKDDANLYGAHIVWRIPSGIKAHAGLVSAVTFIAALLSTIAIVVASLYQPWCF

SEQ ID NO: 52659 - protein, 225 aa, Glycine max
  peptide (1)..(225): Ceres Seq. ID no. 15178282
MSQEVPYGSCDNLNFVLRLSDLKRTLIGEGSHRTVSTLIQLKTQPSKSFSELLSNSCKFMIIERLPSGVFADPFELQHLVQRGKFSDIAVFGDTNLELPSFLSNRSAVEIHLLVDPNILQEPTDINMELPLHARYQPLNGSGYSAIEFGAPDMVVRCSTKEKMENHNCFFKLEKDDANLYGAHIVWRIPSGIKAHAGLVSAVTFIAALLSTIAIVVASLYQPWCF

SEQ ID NO: 52660 - DNA, 733 bp, Glycine max
  misc_feature (1)..(733): Ceres Seq. ID no. 14309585
ccttttcatagtatatgatctcatctcaaagtccattctacacaattctctctcatcatctttgctattacctctttttccaaactctaaaaatttttagttccacaaaaccaaaccaaaatggcagcagcctcggcctcatccaccatgatatcaacaccagccttatctccaagcacaagcatccaaaagcaccatcatttgaagccatccaacgtgtgctttcaaggccttagacccctcacaaggttcacaaccaaagtgagcagcaccaccaaaagggttattccaaagggtggtgtcggtgttagagctgaactcaactcagcacttgtcataagcctcagcactgggctctccctcttcttggggaggtttgtgttcttcaacttccaaagggagaacgtggcaaagcaagtgcctgagcagaacggactcacacactttgaggctggtgacacacgtgccaaggagtatgtcagcctcctcaaatccaatgaccctgttggattcaacattgttgatgtcttggcttggggctccattggccatgttgttgcttactatatcttggccaccactagcaatggctatgaccctgcattctttggctgattttcatcatgttccattgtctttctttgcttgctttttactatgttataatgtaatcaatgtcatcatgtataggttctctctaagatccaacaagttcagcatatgctaatttgtc

SEQ ID NO: 52661 - protein, 164 aa, Glycine max
  peptide (1)..(164): Ceres Seq. ID no. 14309586
MAAASASSTMISTPALSPSTSIQKHHHLKPSNVCFQGLRPLTRFTTKVSSTTKRVIPKGGVGVRAELNSALVISLSTGLSLFLGRFVFFNFQRENVAKQVPEQNGLTHFEAGDTRAKEYVSLLKSNDPVGFNIVDVLAWGSIGHVVAYYILATTSNGYDPAFFG

SEQ ID NO: 52662 - protein, 155 aa, Glycine max
  peptide (1)..(155): Ceres Seq. ID no. 14309587
MISTPALSPSTSIQKHHHLKPSNVCFQGLRPLTRFTTKVSSTTKRVIPKGGVGVRAELNSALVISLSTGLSLFLGRFVFFNFQRENVAKQVPEQNGLTHFEAGDTRAKEYVSLLKSNDPVGFNIVDVLAWGSIGHVVAYYILATTSNGYDPAFFG

SEQ ID NO: 52663 - protein, 83 aa, Glycine max
  peptide (1)..(83): Ceres Seq. ID no. 14309588
MSASSNPMTLLDSTLLMSWLGAPLAMLLLTISWPPLAMAMTLHSLADFHHVPLSFFACFLLCYNVINVIMYRFSLRSNKFSIC

SEQ ID NO: 52664 - DNA, 1657 bp, Glycine max
  misc_feature (1)..(1657): Ceres Seq. ID no. 15177692
gcttcctttcttttaacactcctctatctattactgctccatctcttttattgctctgaaacgcctcctaccatccaacttttattgttctttcaatattgctgcctaaaccctatgcacttacagactctttcccactttctttctctctttttcgtcttgtactaccatgttagacactgctgaacgtgattctgaggtgagtttggagaccgtctattcttccacacttggaagctcaatgagcagcgagagcatttgtagcaccagtttcagccgtctttccttcgatctcctccctccctctccggagactctctccatcaagcctcaccgctcctccgacttcgcctactccgccgccttccgccgcaaagccgcacttaccttccgcgacttccacctcctccgccgcatcggcgccggcgacatcggcaccgtctacctatgccgcctccacaacagcaaccaattgaagaatcaggatgaagacgaagaagatgtttcttgtttatacgccatgaaagtggtggacaaagacgcagtggcattgaagaagaagtcgcagagagcggaaatggagaaaaaaatcctcaagatgctcgaccacccgttcctccctacgctctacgccgagttcgaagcttctcatttctcttgcatcgtcatggagttttgttccggtggagacttgcactccctgcgcttcaagcaccctcacaaccgtttccctctctcctccgcaagattttatgcggcggaggtgctggtggcgttggaatacctccacatgctgggaatcatctacagagatttaaagcctgagaacgtgttggttagatcagacggtcacatcatgctttctgatttcgatctttctctttactcagaggcaatcccagccgttgaatcctccccagattccttaccatcttcaaatgcattaccattaccttacgcttacactcgctcgcattcttttatgagtccattctcctgcttctcaaaccggtcgcgcgaggttcgaactattgaaccgaatcggctttttgttgccgaaccggtttcggctcggtcctgttcctttgttgggacccacgagtacgtctcgccgaaggtcgcttctggccggtcgcacgggaacgccgtggactggtggtcgtttggagtatttatctacgagctcatctacggtcgcacgccgtatgcgggtccatcgaaagaggctacgctgcggaacatcgtaaagaaaccactggcgttccccacggccacaccaacgagcaatcttgaactgcacgcgcgggatttgatatccggcttgctgaacaaggatccggcgcgccggctcggctcgaagcgcggcgccgctgacgtcaaaaagcaccccttctttaaagggctcaacttggcgctgattcgcatgcagacgccgcccgaagtgcctggctccagaagaaggaccaaaacgacgtcgctgtaccccgtgaagggtaacggcaacaacaaccataaacaacaacagacggcgtcgtttgatttttacttctaaaaaaatactacgatgaaagttttgtgccacgtctccagtgacctattgtatattggagctgtcctttttttttatatatatatatggaataaaaatatttatagt

SEQ ID NO: 52665 - protein, 460 aa, Glycine max
  peptide (1)..(460): Ceres Seq. ID no. 15177693
MLDTAERDSEVSLETVYSSTLGSSMSSESICSTSFSRLSFDLLPPSPETLSIKPHRSSDFAYSAAFRRKAALTFRDFHLLRRIGAGDIGTVYLCRLHNSNQLKNQDEDEEDVSCLYAMKVVDKDAVALKKKSQRAEMEKKILKMLDHPFLPTLYAEFEASHFSCIVMEFCSGGDLHSLRFKHPHNRFPLSSARFYAAEVLVALEYLHMLGIIYRDLKPENVLVRSDGHIMLSDFDLSLYSEAIPAVESSPDSLPSSNALPLPYAYTRSHSFMSPFSCFSNRSREVRTIEPNRLFVAEPVSARSCSFVGTHEYVSPKVASGRSHGNAVDWWSFGVFIYELIYGRTPYAGPSKEATLRNIVKKPLAFPTATPTSNLELHARDLISGLLNKDPARRLGSKRGAADVKKHPFFKGLNLALIRMQTPPEVPGSRRRTKTTSLYPVKGNGNNNHKQQQTASFDFYF

SEQ ID NO: 52666 - protein, 436 aa, Glycine max
  peptide (1)..(436): Ceres Seq. ID no. 15177694
MSSESICSTSFSRLSFDLLPPSPETLSIKPHRSSDFAYSAAFRRKAALTFRDFHLLRRIGAGDIGTVYLCRLHNSNQLKNQDEDEEDVSCLYAMKVVDKDAVALKKKSQRAEMEKKILKMLDHPFLPTLYAEFEASHFSCIVMEFCSGGDLHSLRFKHPHNRFPLSSARFYAAEVLVALEYLHMLGIIYRDLKPENVLVRSDGHIMLSDFDLSLYSEAIPAVESSPDSLPSSNALPLPYAYTRSHSFMSPFSCFSNRSREVRTIEPNRLFVAEPVSARSCSFVGTHEYVSPKVASGRSHGNAVDWWSFGVFIYELIYGRTPYAGPSKEATLRNIVKKPLAFPTATPTSNLELHARDLISGLLNKDPARRLGSKRGAADVKKHPFFKGLNLALIRMQTPPEVPGSRRRTKTTSLYPVKGNGNNNHKQQQTASFDFYF

SEQ ID NO: 52667 - protein, 343 aa, Glycine max
  peptide (1)..(343): Ceres Seq. ID no. 15177695
MKVVDKDAVALKKKSQRAEMEKKILKMLDHPFLPTLYAEFEASHFSCIVMEFCSGGDLHSLRFKHPHNRFPLSSARFYAAEVLVALEYLHMLGIIYRDLKPENVLVRSDGHIMLSDFDLSLYSEAIPAVESSPDSLPSSNALPLPYAYTRSHSFMSPFSCFSNRSREVRTIEPNRLFVAEPVSARSCSFVGTHEYVSPKVASGRSHGNAVDWWSFGVFIYELIYGRTPYAGPSKEATLRNIVKKPLAFPTATPTSNLELHARDLISGLLNKDPARRLGSKRGAADVKKHPFFKGLNLALIRMQTPPEVPGSRRRTKTTSLYPVKGNGNNNHKQQQTASFDFYF

SEQ ID NO: 52668 - DNA, 1877 bp, Glycine max
  misc_feature (1)..(1877): Ceres Seq. ID no. 15177304
gcacacaaccactctttcttcttcttctcttaaaagagcctttgctttttctttaggcctttccgaattaagtacttgtttcattttctctcgaagcaagaaaaatgttcatcgagagtttcaaggttgagagtcctaacgtgaagtacacagagactgagattcagtccgtgtacaactatgaaaccactgaacttgttcacgagaacaagaatggcacttatcagtgggttgtcaagcccaaaactgtcaaatatgaatttaaaaccaacacccatgtccctaaactaggggtaatgcttgtggggtggggtggaaacaatggctcaaccctcaccggtggtgttattgctaaccgagagggtatttcatgggcaacaaaggacaagattcaacaagccaattactttgggtcgctgacccaggcatcagctattagagttgggtctttccaaggggaggaaatatatgccccattcaagagcctgcttccaatggtaaaccctgatgatgttgtgtttgggggatgggatatcagtaacttgaacctggcagatgccatggccagggccaaggtgtttgatatcgacctgcagaaacagttgaggccttacatggaatctatggttccactccccggaatctatgaccccgatttcattgctgccaaccaaggagaccgtgccaacaacgtgatcaagggcacaaagaaagaacaagttcaacaaatcatcaaagacattaaggagtttaaggaaagcactaaggttgacaaggtggttgtcctgtggacagccaacacagagaggtacagcaacctagttgtgggactaaacgacaccatggaaaacctctttgcttccttggacaggaacgaggctgagatttccccttccaccttgtatgccattgcttgtgttatggaaaatgttcctttcatcaatggaagccctcagaacacctttgtcccagggctgattgatctggccatcaagaggaacagtttgattggaggagatgactttaagagtggtcagaccaaaatgaaatctgtgttggtggatttccttgtgggggccggcatcaagccaacatctatagtgagttacaaccatctgggcaacaatgatggcatgaatctctcagcccctcaaaccttccgctctaaggaaatctccaagagcaatgttgttgacgatatggtcaacagcaacgccatcctctatgagcccggtgaacatccagaccatgtggttgtcattaagtacgtgccttatgtaggggacagcaagagggccatggatgagtacacttctgagatattcatgggtggaaagaacacaattgtgttgcacaacacatgtgaggattcactgttagctgctcctattatcttggacttggtccttcttgctgagctcagcactcgaatcgagtttaaagctgaaaatgagggaaaattccactcattccacccagttgcgaccatccttagttacctgaccaaggcccctctggttccaccgggtacaccagtggtgaatgcgttgtcaaagcagcgagctatgctggaaaacatcctgagggcttgtgttggattagctcctgagaacaacatgatcctagagtacaagtgaagttcaaagtcttaagagtaacggtttgggatagtgtagttgaatgtgatcaaaacttaactcatatcccatacccctcttttctgttatatagttctggcaaatgtgaaatttgaagatcgttgaatctctctatctttgttcctgccgacttatttgagagcaggctatctatgcatgtatgtaataaaataatatcaagttatccacgtcttttgtgcttaattcatgtttctcttc

SEQ ID NO: 52669 - protein, 510 aa, Glycine max
  peptide (1)..(510): Ceres Seq. ID no. 15177305
MFIESFKVESPNVKYTETEIQSVYNYETTELVHENKNGTYQWVVKPKTVKYEFKTNTHVPKLGVMLVGWGGNNGSTLTGGVIANREGISWATKDKIQQANYFGSLTQASAIRVGSFQGEEIYAPFKSLLPMVNPDDVVFGGWDISNLNLADAMARAKVFDIDLQKQLRPYMESMVPLPGIYDPDFIAANQGDRANNVIKGTKKEQVQQIIKDIKEFKESTKVDKVVVLWTANTERYSNLVVGLNDTMENLFASLDRNEAEISPSTLYAIACVMENVPFINGSPQNTFVPGLIDLAIKRNSLIGGDDFKSGQTKMKSVLVDFLVGAGIKPTSIVSYNHLGNNDGMNLSAPQTFRSKEISKSNVVDDMVNSNAILYEPGEHPDHVVVIKYVPYVGDSKRAMDEYTSEIFMGGKNTIVLHNTCEDSLLAAPIILDLVLLAELSTRIEFKAENEGKFHSFHPVATILSYLTKAPLVPPGTPVVNALSKQRAMLENILRACVGLAPENNMILEYK

SEQ ID NO: 52670 - protein, 446 aa, Glycine max
  peptide (1)..(446): Ceres Seq. ID no. 15177306
MLVGWGGNNGSTLTGGVIANREGISWATKDKIQQANYFGSLTQASAIRVGSFQGEEIYAPFKSLLPMVNPDDVVFGGWDISNLNLADAMARAKVFDIDLQKQLRPYMESMVPLPGIYDPDFIAANQGDRANNVIKGTKKEQVQQIIKDIKEFKESTKVDKVVVLWTANTERYSNLVVGLNDTMENLFASLDRNEAEISPSTLYAIACVMENVPFINGSPQNTFVPGLIDLAIKRNSLIGGDDFKSGQTKMKSVLVDFLVGAGIKPTSIVSYNHLGNNDGMNLSAPQTFRSKEISKSNVVDDMVNSNAILYEPGEHPDHVVVIKYVPYVGDSKRAMDEYTSEIFMGGKNTIVLHNTCEDSLLAAPIILDLVLLAELSTRIEFKAENEGKFHSFHPVATILSYLTKAPLVPPGTPVVNALSKQRAMLENILRACVGLAPENNMILEYK

SEQ ID NO: 52671 - protein, 380 aa, Glycine max
  peptide (1)..(380): Ceres Seq. ID no. 15177307
MVNPDDVVFGGWDISNLNLADAMARAKVFDIDLQKQLRPYMESMVPLPGIYDPDFIAANQGDRANNVIKGTKKEQVQQIIKDIKEFKESTKVDKVVVLWTANTERYSNLVVGLNDTMENLFASLDRNEAEISPSTLYAIACVMENVPFINGSPQNTFVPGLIDLAIKRNSLIGGDDFKSGQTKMKSVLVDFLVGAGIKPTSIVSYNHLGNNDGMNLSAPQTFRSKEISKSNVVDDMVNSNAILYEPGEHPDHVVVIKYVPYVGDSKRAMDEYTSEIFMGGKNTIVLHNTCEDSLLAAPIILDLVLLAELSTRIEFKAENEGKFHSFHPVATILSYLTKAPLVPPGTPVVNALSKQRAMLENILRACVGLAPENNMILEYK

SEQ ID NO: 52672 - DNA, 2180 bp, Glycine max
  misc_feature (1)..(2180): Ceres Seq. ID no. 15177300
attcacatctctatgcattctttatcagtctcattcatttcttctcaacacttcttctctccgtcgccgccgccggaatatcctttctccgatgagaaaatccaccagactctccgccatcggcctctcaaagcctccggaaggaccagaaccgccgaagccttttagcactcgattttcgctgcggtcgtacgcgaagcgcgtgcagctgctcacaccggagcagagatcggtggttttgagaacgggcttcgggaaccttctcctcgttccgaaccacacgctgaacaaggtgttcctcacggagctcatggacgcgtggagctgcgagcgccgcgcgttcgtgctacgctccggcgaagaaattccgatgactcttctcgacgccgctcttatactgggcctgccggttgccggtaaccccgtgaatctcaccgaagaggaaccgttctctgaattggaagaatcttacggagcaacggaaacaaaaaggaaggtggcgatgagttttctggaaaataggttagattcgataggggaagatgtgagtgaggattttgtgaggagcttcttgctctacacaattgggacgtttctcgcttcgaacgatgggaaggtggattcgcggttcttgcggtttcttgaggatttggatgaggtttcagggtttgcttggggaggtgttgttgttgatgatttgtgtcagtggctggataagaggaaagagaataatgtgcagtatgttggaggttgtcttatttttctccaaatatggtcctatgaacattttgatgtagcagcgcgaccacaagtgcaagatcatgatttgacctttcctcgtgtgtgtcgatgggataatactaaacctaagcggggtacttcatggtttaaagacctggatgatgaccaggtgatttggaaactccaacctacttctggagagttacaaatagaggtaatcaaagaagcactggagttgctaggtggcaacaaagagcttcaaagtccagaaagcagttcaacaagctcaacatctagtgttcctgatgtagattcagggttacagcttagtatcaacaaagaagtgcatggagtggacgaggatgatttggagaatcaggtagtggaggacactcccacaaagtcgagcacttgtgatgaagaatatagagagcaaatcaatcctgaaaatctgatagtgttggacactcccccagatttaaccatttgtgacaaagtaggtagggggcaaggaatgaatcttgaaaacctggtagtggtagttgaggatacccctacagctaccagtattgctgaggaagtaagtggagatgaagaggtcaacagtgaaaaactcatagtggaggatactcccccgaattccatttgtgacaaagtatgtagagagcaagaaatgaatcttgaaaacctggaagtgctagttgaggatgcttctcttgctgtcgaagtaggtggggatcaggagttcaatggtgaaaaactcatagtggaggatactccccctgtgctgagcttttatgatgatgatataagaaagaagaatgtcatgttagaagtgaaaaacactgaattgaagatgaaaatagacctagtaatggaggaaaatgaacttctccgtacacagattttatcaaatacccgatttgaagagcagaacgctgagttgaagaaagagctggacttgttgagagaagaaaacagaattttaagactgtcaataagtgattttgcagatcggattgatagacatgttttggatttcgaatctaatgcagctgagtaaacatgctatccttgaatttcaccataacttaactagctgcttatagagctagggctgtgacacccaaacaagccttcaaaccttgctgcagccgccacaacattgatcaatcccagttcttccgcaaagtataggattgtgggtaatcaagtgtgtgtatatatattgttaaggtaaacaaacatgattcattctaatttaggtgtgggtagtattaagaggtttctttttaagtgaaaccatgaaattcataccagggaaacagaactatttgtgttctttattgtatattatgtagcagataacacatctacttctccaaacacaagatgttggagttcaaatggtatatagttatccttttcttttcatgagc

SEQ ID NO: 52673 - protein, 600 aa, Glycine max
  peptide (1)..(600): Ceres Seq. ID no. 15177301
FTSLCILYQSHSFLLNTSSLRRRRRNILSPMRKSTRLSAIGLSKPPEGPEPPKPFSTRFSLRSYAKRVQLLTPEQRSVVLRTGFGNLLLVPNHTLNKVFLTELMDAWSCERRAFVLRSGEEIPMTLLDAALILGLPVAGNPVNLTEEEPFSELEESYGATETKRKVAMSFLENRLDSIGEDVSEDFVRSFLLYTIGTFLASNDGKVDSRFLRFLEDLDEVSGFAWGGVVVDDLCQWLDKRKENNVQYVGGCLIFLQIWSYEHFDVAARPQVQDHDLTFPRVCRWDNTKPKRGTSWFKDLDDDQVIWKLQPTSGELQIEVIKEALELLGGNKELQSPESSSTSSTSSVPDVDSGLQLSINKEVHGVDEDDLENQVVEDTPTKSSTCDEEYREQINPENLIVLDTPPDLTICDKVGRGQGMNLENLVVVVEDTPTATSIAEEVSGDEEVNSEKLIVEDTPPNSICDKVCREQEMNLENLEVLVEDASLAVEVGGDQEFNGEKLIVEDTPPVLSFYDDDIRKKNVMLEVKNTELKMKIDLVMEENELLRTQILSNTRFEEQNAELKKELDLLREENRILRLSISDFADRIDRHVLDFESNAAE

SEQ ID NO: 52674 - protein, 570 aa, Glycine max
  peptide (1)..(570): Ceres Seq. ID no. 15177302
MRKSTRLSAIGLSKPPEGPEPPKPFSTRFSLRSYAKRVQLLTPEQRSVVLRTGFGNLLLVPNHTLNKVFLTELMDAWSCERRAFVLRSGEEIPMTLLDAALILGLPVAGNPVNLTEEEPFSELEESYGATETKRKVAMSFLENRLDSIGEDVSEDFVRSFLLYTIGTFLASNDGKVDSRFLRFLEDLDEVSGFAWGGVVVDDLCQWLDKRKENNVQYVGGCLIFLQIWSYEHFDVAARPQVQDHDLTFPRVCRWDNTKPKRGTSWFKDLDDDQVIWKLQPTSGELQIEVIKEALELLGGNKELQSPESSSTSSTSSVPDVDSGLQLSINKEVHGVDEDDLENQVVEDTPTKSSTCDEEYREQINPENLIVLDTPPDLTICDKVGRGQGMNLENLVVVVEDTPTATSIAEEVSGDEEVNSEKLIVEDTPPNSICDKVCREQEMNLENLEVLVEDASLAVEVGGDQEFNGEKLIVEDTPPVLSFYDDDIRKKNVMLEVKNTELKMKIDLVMEENELLRTQILSNTRFEEQNAELKKELDLLREENRILRLSISDFADRIDRHVLDFESNAAE

SEQ ID NO: 52675 - protein, 497 aa, Glycine max
  peptide (1)..(497): Ceres Seq. ID no. 15177303
MDAWSCERRAFVLRSGEEIPMTLLDAALILGLPVAGNPVNLTEEEPFSELEESYGATETKRKVAMSFLENRLDSIGEDVSEDFVRSFLLYTIGTFLASNDGKVDSRFLRFLEDLDEVSGFAWGGVVVDDLCQWLDKRKENNVQYVGGCLIFLQIWSYEHFDVAARPQVQDHDLTFPRVCRWDNTKPKRGTSWFKDLDDDQVIWKLQPTSGELQIEVIKEALELLGGNKELQSPESSSTSSTSSVPDVDSGLQLSINKEVHGVDEDDLENQVVEDTPTKSSTCDEEYREQINPENLIVLDTPPDLTICDKVGRGQGMNLENLVVVVEDTPTATSIAEEVSGDEEVNSEKLIVEDTPPNSICDKVCREQEMNLENLEVLVEDASLAVEVGGDQEFNGEKLIVEDTPPVLSFYDDDIRKKNVMLEVKNTELKMKIDLVMEENELLRTQILSNTRFEEQNAELKKELDLLREENRILRLSISDFADRIDRHVLDFESNAAE

SEQ ID NO: 52676 - DNA, 1827 bp, Glycine max
  misc_feature (1)..(1827): Ceres Seq. ID no. 15178100
agagtgcactcacctcacctagggttttgcatcagttttcaaccactatagcagaatggaacaaaatgcgtgcgaggaattgtcgaaaattgcttcggatttcaagtgcgagaagaaggttctcgaaacagttgatgaatcaatcgtatgccccactccacagaagaacgaggaacccttaatcgttaaattcagagagggacaaaccaaccttcctgaaaaatactctgcacttgtagatttgtttggtcacacaagctgttcactcaggttgctgcgtctgtgtaaaaagtctccaacttttcaaaatgtttgccgacaggttgaagttctttcgaagagggaattctcccatgcccatcttgcgcagatgaagtatatactccctaaaagtgtgtgtatagataaggtgcttgttcatgataagaaaagcttgtgtatggtgcctgatatgaagatcacgttgagatttgaggttgtgaaagattgctctggcgaatctgatgatctggctcttcgacgatattttaaatctaagctgattgatttctttgatatgcatcctgaggttgctgacattccagaggccccactgccagaaccctttggcaaaaaaacttgtagattgaattttgaagaatttactggccaatccccacatgtaaattcttcaacggaacttttgtcaatttccaatcaaactgaaatgttgccagagcaattgcaactgtatccatctttccgtagacacttttctaggaagaataataccgaccaggcagaaaaggctcaatgctttttacccacaaaaacttctccatcatctcatgcatctgattgtctggataatgaagaaagtgaaaaaacactgcagaaagaatgtgtaccattatttgatggggtggctaatcctattactgaaagagggcaccagaaggaatcattttctatgtctttgcagcctagctttattaatacaccagtacagatgatccgccctccatattctgttacgtgcagtaattctgaaagcccggatatgaaaaatatctcctgtgttgctgatagttttattgcagagacacctgcccagtcagcacctgcaagattattgcccatttccgatgttaagcttcaggacatgcctacccaaaagtcaacatcatctcataagccagcaaaaagagtgcttgacttttcattcatgggggacaatgatggcttgggcattggagtagacaagttagaatctagcagagctctgcatgaatttgatagcttccctgaatctagcagaggatgttatgaggattgcaattcttttgggtctgtttctgcacctcaggaggcagaagagagcctcaagcaagctgatttagatacacagcataaaaaatcttcaccattgctggatctggttaatgtgatacactctatatttcaatctgtccaaagaattccaatcaccaaagaggagctcctgcataagatacttgtgaacactttggattttgttgagattagagcagttgaagaacaaattgagtctctagaaaagttggtgccagattggatctgcaagaaattggttgctactggagatactatgtactgcatcaataaagtgtcggatttagactctgtacgatcacggctttccaccaacgtcgtttgagagaagggcgtttagttaatatttgctgcctttaatacctgtaattagagattggattttcttcataattgtttttgaatcacatttgaccgatgtctaaaactggtgttctacatattaaaaatgataaaattgaaaaggatacgatttac

SEQ ID NO: 52677 - protein, 539 aa, Glycine max
  peptide (1)..(539): Ceres Seq. ID no. 15178101
MEQNACEELSKIASDFKCEKKVLETVDESIVCPTPQKNEEPLIVKFREGQTNLPEKYSALVDLFGHTSCSLRLLRLCKKSPTFQNVCRQVEVLSKREFSHAHLAQMKYILPKSVCIDKVLVHDKKSLCMVPDMKITLRFEVVKDCSGESDDLALRRYFKSKLIDFFDMHPEVADIPEAPLPEPFGKKTCRLNFEEFTGQSPHVNSSTELLSISNQTEMLPEQLQLYPSFRRHFSRKNNTDQAEKAQCFLPTKTSPSSHASDCLDNEESEKTLQKECVPLFDGVANPITERGHQKESFSMSLQPSFINTPVQMIRPPYSVTCSNSESPDMKNISCVADSFIAETPAQSAPARLLPISDVKLQDMPTQKSTSSHKPAKRVLDFSFMGDNDGLGIGVDKLESSRALHEFDSFPESSRGCYEDCNSFGSVSAPQEAEESLKQADLDTQHKKSSPLLDLVNVIHSIFQSVQRIPITKEELLHKILVNTLDFVEIRAVEEQIESLEKLVPDWICKKLVATGDTMYCINKVSDLDSVRSRLSTNVV

SEQ ID NO: 52678 - protein, 434 aa, Glycine max
  peptide (1)..(434): Ceres Seq. ID no. 15178102
MKYILPKSVCIDKVLVHDKKSLCMVPDMKITLRFEVVKDCSGESDDLALRRYFKSKLIDFFDMHPEVADIPEAPLPEPFGKKTCRLNFEEFTGQSPHVNSSTELLSISNQTEMLPEQLQLYPSFRRHFSRKNNTDQAEKAQCFLPTKTSPSSHASDCLDNEESEKTLQKECVPLFDGVANPITERGHQKESFSMSLQPSFINTPVQMIRPPYSVTCSNSESPDMKNISCVADSFIAETPAQSAPARLLPISDVKLQDMPTQKSTSSHKPAKRVLDFSFMGDNDGLGIGVDKLESSRALHEFDSFPESSRGCYEDCNSFGSVSAPQEAEESLKQADLDTQHKKSSPLLDLVNVIHSIFQSVQRIPITKEELLHKILVNTLDFVEIRAVEEQIESLEKLVPDWICKKLVATGDTMYCINKVSDLDSVRSRLSTNVV

SEQ ID NO: 52679 - protein, 411 aa, Glycine max
  peptide (1)..(411): Ceres Seq. ID no. 15178103
MVPDMKITLRFEVVKDCSGESDDLALRRYFKSKLIDFFDMHPEVADIPEAPLPEPFGKKTCRLNFEEFTGQSPHVNSSTELLSISNQTEMLPEQLQLYPSFRRHFSRKNNTDQAEKAQCFLPTKTSPSSHASDCLDNEESEKTLQKECVPLFDGVANPITERGHQKESFSMSLQPSFINTPVQMIRPPYSVTCSNSESPDMKNISCVADSFIAETPAQSAPARLLPISDVKLQDMPTQKSTSSHKPAKRVLDFSFMGDNDGLGIGVDKLESSRALHEFDSFPESSRGCYEDCNSFGSVSAPQEAEESLKQADLDTQHKKSSPLLDLVNVIHSIFQSVQRIPITKEELLHKILVNTLDFVEIRAVEEQIESLEKLVPDWICKKLVATGDTMYCINKVSDLDSVRSRLSTNVV

SEQ ID NO: 52680 - DNA, 1095 bp, Glycine max
  misc_feature (1)..(1095): Ceres Seq. ID no. 15170749
aaaattcccacacacaattgattgttgatttcattttcctctggcggaagccatttttcgatctgttggtgtgctttctggaaaggtggtggatggcaaaaaacaacaagtacgcctctattaacttcaaccacatctacgaaaaaaccaacaccaccaacccacacaacaagaatccttctctctcttcttcttccgcttcctattccgccgtctccgcccccaacaaaccccatggccgcatcctcgtcctaacccgacccactcccaaacccatcacgccctccaccccgcaaccgcaacagcaacaaccaccaccgccgaccccgatccagcacaaccacccccggtccgaaccaggatcggacgcgatctcgctccgacccctgggccgaaccggaaccggttcaccgctcttgtcgctccccgttgtttccagccccgacaaggacttgcccttgctctctcctcagccgcccaagacggacaagttcgtaccgccacaccttcggcccgggttcgttcccagggaggaggctcccccgcccgggcccgaacttcggcccaacggccggcccaagtcgggtggcggcccggacaggatgagaagggttgggccgggtggcgtctcggatgcgggggtcttgggccgcgggactcggcccagttccagtggatgaatggtggctatgaagttgaattcttttccgaggacgaagacaaacacattttgctacagagatgggttctctataccaattcagtgcatgtatcctttgtccctctggaactgacatcaattttcacatggcaaaagaaatcacagaagatgaaaactgaccaggtggcagattttcaccacctaacgtcccaatttatagcaaaatttgttgtgctcataggaggctttaacacccaagttcttctgttggtgtttggtcctcttcaaccacgtgccaatagagagtagaagaatctatatacatatttttaattcctagctaaactgttctgttgactgttctgaaagacataccctctgtactttgagcataagtttgagaggagatccaatcgtttttattgtcttattat

SEQ ID NO: 52681 - protein, 225 aa, Glycine max
  peptide (1)..(225): Ceres Seq. ID no. 15170750
NSHTQLIVDFIFLWRKPFFDLLVCFLERWWMAKNNKYASINFNHIYEKTNTTNPHNKNPSLSSSSASYSAVSAPNKPHGRILVLTRPTPKPITPSTPQPQQQQPPPPTPIQHNHPRSEPGSDAISLRPLGRTGTGSPLLSLPVVSSPDKDLPLLSPQPPKTDKFVPPHLRPGFVPREEAPPPGPELRPNGRPKSGGGPDRMRRVGPGGVSDAGVLGRGTRPSSSG

SEQ ID NO: 52682 - protein, 195 aa, Glycine max
  peptide (1)..(195): Ceres Seq. ID no. 15170751
MAKNNKYASINFNHIYEKTNTTNPHNKNPSLSSSSASYSAVSAPNKPHGRILVLTRPTPKPITPSTPQPQQQQPPPPTPIQHNHPRSEPGSDAISLRPLGRTGTGSPLLSLPVVSSPDKDLPLLSPQPPKTDKFVPPHLRPGFVPREEAPPPGPELRPNGRPKSGGGPDRMRRVGPGGVSDAGVLGRGTRPSSSG

SEQ ID NO: 52683 - DNA, 1308 bp, Glycine max
  misc_feature (1)..(1308): Ceres Seq. ID no. 15170609
aattccatccaacatttttcaagtacttagaagatttcaagtttaacacttcaaccgaagtgtagtgacgagccttatctcaaaagttcttcttttgcaaacactgtccaatttacaaactctccacctcacataatggtttcaaattcaatgttaatggcttcttctctgcattcaccttgcaccctcttcagttcccacaagctttgttcttcttcgatcaaaaccatctcaaaacaaagccacacatttctccatagaaatccctctctccatcgccctttgagtttgggttccaaaagggttcttccttcagtttgcttctttaatactggagacaaatctgactccaaggaatcgggatggcctattctcaggcgatgggaggtgccttggcaatggcaaacagtttcactgacctctcttgcctgtggattgggttttgtgttgacaggtttgactgaagcaattgccttaccatatctcgggatcaaacctgatgtgctaagtttagatgacaaggcagagatacttttattcgatcagagcatcacaactgctgttgtacttggaatcatatatagtgttgccaacactttccagccacttcctgaagacttcttcaaatacgatttgagggaacctttcaatcttcaaaagggttgtcttttgtgggctggaattggacttgctggtgccatacttgccatttcattgaccggagttgctgtgtctttcttcaatggagaaaccccacaaagagagactgatgctcttgttcgcttgcttccgttaattggatcttcaaatctcagcactgcctgcttggtgggcatcacaggtgttcttgctccactccttgaggagactgtttttcggggattttttatgacttccctcactaagtgggttcctacgccagttgctgttgtcattagtgctgctgtttttgcccttgcacatctcactcctggagaatttccccaattgtttgttctagggactgctttggggttttcatatgctcaaactcacaaccttctcactcccatcactatccattctttttggaactcaggagttatattatttcttacttttctgcagcttcaagggtacgatatcagagaattattgcaggcaacttgatggaaaaaatttctcctttgcatggatgtggagcatcatgtacagtatataatacaaatccatttctttgcttatctgcgctcctttccgtgctgtaaaacataatcagattgttctttggaacagtgaagtaggtaataataatttaccatgacagtt

SEQ ID NO: 52684 - protein, 337 aa, Glycine max
  peptide (1)..(337): Ceres Seq. ID no. 15170610
MVSNSMLMASSLHSPCTLFSSHKLCSSSIKTISKQSHTFLHRNPSLHRPLSLGSKRVLPSVCFFNTGDKSDSKESGWPILRRWEVPWQWQTVSLTSLACGLGFVLTGLTEAIALPYLGIKPDVLSLDDKAEILLFDQSITTAVVLGIIYSVANTFQPLPEDFFKYDLREPFNLQKGCLLWAGIGLAGAILAISLTGVAVSFFNGETPQRETDALVRLLPLIGSSNLSTACLVGITGVLAPLLEETVFRGFFMTSLTKWVPTPVAVVISAAVFALAHLTPGEFPQLFVLGTALGFSYAQTHNLLTPITIHSFWNSGVILFLTFLQLQGYDIRELLQAT

SEQ ID NO: 52685 - protein, 332 aa, Glycine max
  peptide (1)..(332): Ceres Seq. ID no. 15170611
MLMASSLHSPCTLFSSHKLCSSSIKTISKQSHTFLHRNPSLHRPLSLGSKRVLPSVCFFNTGDKSDSKESGWPILRRWEVPWQWQTVSLTSLACGLGFVLTGLTEAIALPYLGIKPDVLSLDDKAEILLFDQSITTAVVLGIIYSVANTFQPLPEDFFKYDLREPFNLQKGCLLWAGIGLAGAILAISLTGVAVSFFNGETPQRETDALVRLLPLIGSSNLSTACLVGITGVLAPLLEETVFRGFFMTSLTKWVPTPVAVVISAAVFALAHLTPGEFPQLFVLGTALGFSYAQTHNLLTPITIHSFWNSGVILFLTFLQLQGYDIRELLQAT

SEQ ID NO: 52686 - protein, 330 aa, Glycine max
  peptide (1)..(330): Ceres Seq. ID no. 15170612
MASSLHSPCTLFSSHKLCSSSIKTISKQSHTFLHRNPSLHRPLSLGSKRVLPSVCFFNTGDKSDSKESGWPILRRWEVPWQWQTVSLTSLACGLGFVLTGLTEAIALPYLGIKPDVLSLDDKAEILLFDQSITTAVVLGIIYSVANTFQPLPEDFFKYDLREPFNLQKGCLLWAGIGLAGAILAISLTGVAVSFFNGETPQRETDALVRLLPLIGSSNLSTACLVGITGVLAPLLEETVFRGFFMTSLTKWVPTPVAVVISAAVFALAHLTPGEFPQLFVLGTALGFSYAQTHNLLTPITIHSFWNSGVILFLTFLQLQGYDIRELLQAT

SEQ ID NO: 52687 - DNA, 1227 bp, Glycine max
  misc_feature (1)..(1227): Ceres Seq. ID no. 15176329
attttcatcattaaactccaacaaacgcacggcagttgcattctgagttacgccattcttctctcgtcaatagccccatgaacaaattcctgcttcgaatcaaagccctagttgatttgctctactctgttggagatccagttttgccaaaggagaatttgggtgctactctctaaggtttacctcaagagtttgactctgtaattcctttgattgaaagtcacagtgatgaaattactatcgaagaggttgaaggcctcattgttgctcaggaactgcgattgcagaaatatttcaagaaaacctcatcagactctaccttctctggatctctatcaatttgacacaatctgtttctcagatccctaccacttcttttgatcaaaacagaacatcaattttcctctgatcagaatcaatcttcgccatttacttaatattgtggttctggttggaggctgttttggccatggtaggggccgtggcggttggggttctgttcactgacatgtgcacttcaagtttgggcacactgcttttgttacgtgctggaaactgaaagctgaacttcgagggtcagcacctccagaagaagaagaagaaaactaagggagaaaggaaattttgctattttcattcatgcctgatttggttatttacatagctataggagacaattccaaatcaagctagatacgatattggtgctgctgatgctgaagatgaaatcccgagctgtcctcatgcctaatccttcagatccaacatacatgattcgggctattgcaagtaatgcctcggacaacatttactgcactcttcttgctcatggtgctgttcatggagctatggctggatatactggcttcacagtcgggcctgtgaacagtaaacaggcttatatcccaattgcctgtgtgatggagaaacaaaataaggtcaagctgactgataggatgtgggctagacttcttgcatcgacgaatcaaccaagtttcgttgcctatgatcaagaaagagtcgagaaagatataaataacatgaatattacctctcaaactagatttaataggtattttgattgattgatgcgaattgattagtcagagaatggattatcatttagcatatgggggctgatagtacccattcatttatttgtattttattaattgggcagttgacatgttgaatgaaaatcagaatttaataaatttatataccagc

SEQ ID NO: 52688 - protein, 123 aa, Glycine max
  peptide (1)..(123): Ceres Seq. ID no. 15176330
MLKMKSRAVLMPNPSDPTYMIRAIASNASDNIYCTLLAHGAVHGAMAGYTGFTVGPVNSKQAYIPIACVMEKQNKVKLTDRMWARLLASTNQPSFVAYDQERVEKDINNMNITSQTRFNRYFD

SEQ ID NO: 52689 - protein, 120 aa, Glycine max
  peptide (1)..(120): Ceres Seq. ID no. 15176331
MKSRAVLMPNPSDPTYMIRAIASNASDNIYCTLLAHGAVHGAMAGYTGFTVGPVNSKQAYIPIACVMEKQNKVKLTDRMWARLLASTNQPSFVAYDQERVEKDINNMNITSQTRFNRYFD

SEQ ID NO: 52690 - protein, 113 aa, Glycine max
  peptide (1)..(113): Ceres Seq. ID no. 15176332
MPNPSDPTYMIRAIASNASDNIYCTLLAHGAVHGAMAGYTGFTVGPVNSKQAYIPIACVMEKQNKVKLTDRMWARLLASTNQPSFVAYDQERVEKDINNMNITSQTRFNRYFD

SEQ ID NO: 52691 - DNA, 1396 bp, Glycine max
  misc_feature (1)..(1396): Ceres Seq. ID no. 15170830
aactgaaaaatccaccccaccttgaggagctaggtcactgctgggctaagcaaccacaggcgaatcccccaaagaaaaaggcttcgtttcagaaatcaagaggttcacttgttgagttctcgctgtcggagttcggcggcggagggagacggagtcggatcccctgaaaagtctaggtggtagctgcggaggtgaggcccggaggaagcggctggctcagtaagcgcgtctagcacaggaaccaagaggaggaaggaagaggaacccaatcatggactcggagcactggatctcgcgcctcgccgccgccaagcgcttctacgccgcgcagctcggccacatcgacgatatggcggggatggggatggaggaagtggacatggacatggaagacgacggggagatggacatggagatggagatgcagctggaggaggccagatggccggaggtcgcctgcccctactgctacgaggactacgacctcggctccctctgcgtccacctcgaggaggaccacccctacgagccacaccccgcgccttgccccatctgctctgaaaagattacaagagatatgctaaatcatatcaccatgcatcatggttacttgttcaagaatggcagccggttgcgcagattcgttattcccgagcgccgtgcactttctttactgagccgagatctacgtgatgctcatttgcaggcgcttctaggaggcggtcatagtcataggtcaaggaacaccaccaccgccactacaaatatttatgctgatccactgctttcatcgtttggcctgngttttgcaacatcagatgccgaagaaccattgaaatcatctgttccggttctcgatgatacttcaattcttaaggaggcacctcctcaaccttgggaatcaagtattgactcgtccctcacaagtgaggaaagggaacaaaagcggaaacaagccacaagcagggcgacctttgtgcaagacctggtcctctccactttatttggagacgactgagtgctcgaatggccctgcattttccttgttagatgggtgcttccttcacactgattcggatagaactgcagcaactccgccctgagttggttaatcttaacttgggcgaagtcaagtgcgtctggtgcacccgcagtcaagtgcggattttatttgggcttgacacattacaccttaatttatggtagctgtcccatattgccgtttttttcaccgaattatcggccagcagttccttgccttggttgtaacttgttgtgccatcctcttcattgttaaggaacattggtctgtaccaacatcacacagctgttacatactatagaatgcaatgcaatgggaaattacagaagctccacctgtgtggaagcaataagc

SEQ ID NO: 52692 - protein, 248 aa, Glycine max
  peptide (1)..(248): Ceres Seq. ID no. 15170831
  misc_feature (178)..(178): Xaa is any aa, unknown or other
MDSEHWISRLAAAKRFYAAQLGHIDDMAGMGMEEVDMDMEDDGEMDMEMEMQLEEARWPEVACPYCYEDYDLGSLCVHLEEDHPYEPHPAPCPICSEKITRDMLNHITMHHGYLFKNGSRLRRFVIPERRALSLLSRDLRDAHLQALLGGGHSHRSRNTTTATTNIYADPLLSSFGLXFATSDAEEPLKSSVPVLDDTSILKEAPPQPWESSIDSSLTSEEREQKRKQATSRATFVQDLVLSTLFGDD

SEQ ID NO: 52693 - protein, 222 aa, Glycine max
  peptide (1)..(222): Ceres Seq. ID no. 15170832
  misc_feature (152)..(152): Xaa is any aa, unknown or other
MAGMGMEEVDMDMEDDGEMDMEMEMQLEEARWPEVACPYCYEDYDLGSLCVHLEEDHPYEPHPAPCPICSEKITRDMLNHITMHHGYLFKNGSRLRRFVIPERRALSLLSRDLRDAHLQALLGGGHSHRSRNTTTATTNIYADPLLSSFGLXFATSDAEEPLKSSVPVLDDTSILKEAPPQPWESSIDSSLTSEEREQKRKQATSRATFVQDLVLSTLFGDD

SEQ ID NO: 52694 - protein, 219 aa, Glycine max
  peptide (1)..(219): Ceres Seq. ID no. 15170833
  misc_feature (149)..(149): Xaa is any aa, unknown or other
MGMEEVDMDMEDDGEMDMEMEMQLEEARWPEVACPYCYEDYDLGSLCVHLEEDHPYEPHPAPCPICSEKITRDMLNHITMHHGYLFKNGSRLRRFVIPERRALSLLSRDLRDAHLQALLGGGHSHRSRNTTTATTNIYADPLLSSFGLXFATSDAEEPLKSSVPVLDDTSILKEAPPQPWESSIDSSLTSEEREQKRKQATSRATFVQDLVLSTLFGDD

SEQ ID NO: 52695 - DNA, 743 bp, Glycine max
  misc_feature (1)..(743): Ceres Seq. ID no. 14309616
agtctctatcatcatccaatccagatcagcaaagcggcagtgcgtagagaggatcgtcgaacagaacagcatgaagatggtcatcgttctcgtcgtgtgcctggctctgtcagctgccagcgcctctgcaatgcagatgccctgcccctgcgcggggctgcagggcttgtacggcgctggcgccggcctgacgacgatgatgggcgccggcgggctgtacccctacgcggagtacctgaggcagccgcagtgcagcccgctggcggcggcgccctactacgccgggtgtgggcagacgagcgccatgtaccagccgctccggcaacagtgctgccagcagcagatgaggatgatggacgtgcagtccgtcgcgcagcagctgcagatgatgatgcagcttgagcgtgccgctgccgccagcagcagcctgtacgagccagctctgatgcagcagcagcagcagctgctggcagcccagggtctcaaccccatggccatgatgatggcgcagaacatgccggccatgggtggactctaccagtaccagtaccagctgcccagctaccgcaccaacccctgtggcgtctccgctgccattccgccctactactgattcatgatatttgggaaatctcctctatccatccctctctatctatatatgtaataatgcagtaagacgacacacattatcatgtgtggtatgaccaataatatatgcatcataataaagttttggtttt

SEQ ID NO: 52696 - protein, 203 aa, Glycine max
  peptide (1)..(203): Ceres Seq. ID no. 14309617
VSIIIQSRSAKRQCVERIVEQNSMKMVIVLVVCLALSAASASAMQMPCPCAGLQGLYGAGAGLTTMMGAGGLYPYAEYLRQPQCSPLAAAPYYAGCGQTSAMYQPLRQQCCQQQMRMMDVQSVAQQLQMMMQLERAAAASSSLYEPALMQQQQQLLAAQGLNPMAMMMAQNMPAMGGLYQYQYQLPSYRTNPCGVSAAIPPYY

SEQ ID NO: 52697 - protein, 180 aa, Glycine max
  peptide (1)..(180): Ceres Seq. ID no. 14309618
MKMVIVLVVCLALSAASASAMQMPCPCAGLQGLYGAGAGLTTMMGAGGLYPYAEYLRQPQCSPLAAAPYYAGCGQTSAMYQPLRQQCCQQQMRMMDVQSVAQQLQMMMQLERAAAASSSLYEPALMQQQQQLLAAQGLNPMAMMMAQNMPAMGGLYQYQYQLPSYRTNPCGVSAAIPPYY

SEQ ID NO: 52698 - protein, 178 aa, Glycine max
  peptide (1)..(178): Ceres Seq. ID no. 14309619
MVIVLVVCLALSAASASAMQMPCPCAGLQGLYGAGAGLTTMMGAGGLYPYAEYLRQPQCSPLAAAPYYAGCGQTSAMYQPLRQQCCQQQMRMMDVQSVAQQLQMMMQLERAAAASSSLYEPALMQQQQQLLAAQGLNPMAMMMAQNMPAMGGLYQYQYQLPSYRTNPCGVSAAIPPYY

SEQ ID NO: 52699 - DNA, 1199 bp, Glycine max
  misc_feature (1)..(1199): Ceres Seq. ID no. 15178295
gtgcttgtgcgtcaccgctgaatcctagctttatcttcccttcccttcaaaataatatctctgttccaaacaagtccaacaacacactgcttctatctcaaacgcacatcgagaaatgagtttgagtaatgggaaaaccgaggcaccattgccaattagtaatggggatgagaagaagccgttcaagatcttcgtagggtatgaccctcgtgaagatcttgcctacgaggtatgtcggcactccatcttgaaaaggtcttcaatccctgttgagatcataccaattaaacagtcagatctgaggaaaagtggcttgtattggcgtgagaggggccagtttgagagcactgagttctccttttcaagattcttgacaccttgccttgccaattaccaaggttgggcaatgtttgtggattgtgatttcctctacttggctgacatcaaggaattgaaagacttgattgaggacaagtatgcaatcatgtgtgttcagcatgactatgctccaaaggagaccactaagatggatggggcagtgcaaactgtgtacccaagaaagaattggtcttcaatggttctctataactgtgctcatccaaagaaccgtgttctcactcctgacactgtcaacacacagaatggtgctttccttcacaggtttcaatggcttgaggatgatcaaattggatccatcccttttgtttggaactttcttgaggggcataacagaattgttggtaatgatcccactacttcgcctaaggccatccattatactcgtggagggccatggtttgaagcttggaaaaactgtgaatttgctgatctgtggcttaacgaaatggaagattacatgaagcaagctaaaaaagaacaatcagcttaggcttttgtcatccgtggccatgtattattattctttatgtcaaattcgttgtgaaaaatccgcatctgctgatgcatgttatgagagtaggagtatgaggcactgctagtctataacttatcttttagagtatttgtagtattctttaccatattacattacactacacttacgttggcatttcagagaaaatgctcttcacggtgtatttcattttttatttgtttaatgacctccctatgacctttaaggaggtacaagcaccactctgtattgaatatttaaatgaaatcttcattttaatgattgt

SEQ ID NO: 52700 - protein, 257 aa, Glycine max
  peptide (1)..(257): Ceres Seq. ID no. 15178296
MSLSNGKTEAPLPISNGDEKKPFKIFVGYDPREDLAYEVCRHSILKRSSIPVEIIPIKQSDLRKSGLYWRERGQFESTEFSFSRFLTPCLANYQGWAMFVDCDFLYLADIKELKDLIEDKYAIMCVQHDYAPKETTKMDGAVQTVYPRKNWSSMVLYNCAHPKNRVLTPDTVNTQNGAFLHRFQWLEDDQIGSIPFVWNFLEGHNRIVGNDPTTSPKAIHYTRGGPWFEAWKNCEFADLWLNEMEDYMKQAKKEQSA

SEQ ID NO: 52701 - protein, 160 aa, Glycine max
  peptide (1)..(160): Ceres Seq. ID no. 15178297
MFVDCDFLYLADIKELKDLIEDKYAIMCVQHDYAPKETTKMDGAVQTVYPRKNWSSMVLYNCAHPKNRVLTPDTVNTQNGAFLHRFQWLEDDQIGSIPFVWNFLEGHNRIVGNDPTTSPKAIHYTRGGPWFEAWKNCEFADLWLNEMEDYMKQAKKEQSA

SEQ ID NO: 52702 - protein, 134 aa, Glycine max
  peptide (1)..(134): Ceres Seq. ID no. 15178298
MCVQHDYAPKETTKMDGAVQTVYPRKNWSSMVLYNCAHPKNRVLTPDTVNTQNGAFLHRFQWLEDDQIGSIPFVWNFLEGHNRIVGNDPTTSPKAIHYTRGGPWFEAWKNCEFADLWLNEMEDYMKQAKKEQSA

SEQ ID NO: 52703 - DNA, 1294 bp, Glycine max
  misc_feature (1)..(1294): Ceres Seq. ID no. 15170627
cataaccataaccgtctcagatagctttaggattttggtgtcaagattgtaggagcggccgtccgacctctgccaccacacgtgctgttggagctcgtggtgcaccctcacctcatggaaggagccatcctccccagcctgccaaacacgaggttagccgcccgcccatacatgcttagctgctcttggcgtcgccatgtagccttgcaacttgcagaaatctcatcgactgcggttgctagggtcgccgtcgtcaccggagggaacaaggggatcggcttcgaggtgtgccggcagcttgccagcggcggaattgccgtcgtcctgacggcccgggatgagatgaggggcggggaggccgtcgagaggctcaatgcgctggggctctctcatgtcgtcttccatcagctggagatcacggacgcttcgagcgccgctgcgctagctggttttctcaaggcccgcttcggcaagcttgatattctggtgaataatgccgcagttggtggggttgagtacggccaagagttcgataccaacgaggaaaagttcggtggcatggatttccaccagagagttgagtggatgctgaagaatgcccgggagcccatcgacagcgcgaagaacagcgtgaagacgaactactacggcacgaagcatgtaatcgaagccctgctgcctctgcttcaagcttcgtccgagggaagaatagtgaacgtctcctccaattatggactcctaagacatatcggcaacgaggaggtgaggcaggagctcaacgacgtcgacaacctgacagaggagaggttggacgagctgctggacaaattcatgaaagacttcgaggccggcgcgctggagccgcacgggtggcccacgaagttctccgcgtacaaggtggccaagaccgccatgaacgcctactcgaggatcctggcgaggaggcaccctgagctgcgcgtcaactgcgcgcacccaggcttcgtcaagaccgacatgagcatggggtccggggtcctgacgccggaggagggcgcacgcaacttggtgaaggtggcgctgctgcctgacggcgggccgaccggcgcgtatttcgccatgggcgaggaggcgctgttcgtgtgagatactgggaaccggatcctctaacattgtgaaggaaagtcagtgtgctacagtgtttgcctagtgtaaaataaagaaggaaagttaaggactgttagtagataattaataggttgtttactgtttactgtaagtataaataatttaaaattaattttatttcaccaac

SEQ ID NO: 52704 - protein, 336 aa, Glycine max
  peptide (1)..(336): Ceres Seq. ID no. 15170628
MEGAILPSLPNTRLAARPYMLSCSWRRHVALQLAEISSTAVARVAVVTGGNKGIGFEVCRQLASGGIAVVLTARDEMRGGEAVERLNALGLSHVVFHQLEITDASSAAALAGFLKARFGKLDILVNNAAVGGVEYGQEFDTNEEKFGGMDFHQRVEWMLKNAREPIDSAKNSVKTNYYGTKHVIEALLPLLQASSEGRIVNVSSNYGLLRHIGNEEVRQELNDVDNLTEERLDELLDKFMKDFEAGALEPHGWPTKFSAYKVAKTAMNAYSRILARRHPELRVNCAHPGFVKTDMSMGSGVLTPEEGARNLVKVALLPDGGPTGAYFAMGEEALFV

SEQ ID NO: 52705 - protein, 317 aa, Glycine max
  peptide (1)..(317): Ceres Seq. ID no. 15170629
MLSCSWRRHVALQLAEISSTAVARVAVVTGGNKGIGFEVCRQLASGGIAVVLTARDEMRGGEAVERLNALGLSHVVFHQLEITDASSAAALAGFLKARFGKLDILVNNAAVGGVEYGQEFDTNEEKFGGMDFHQRVEWMLKNAREPIDSAKNSVKTNYYGTKHVIEALLPLLQASSEGRIVNVSSNYGLLRHIGNEEVRQELNDVDNLTEERLDELLDKFMKDFEAGALEPHGWPTKFSAYKVAKTAMNAYSRILARRHPELRVNCAHPGFVKTDMSMGSGVLTPEEGARNLVKVALLPDGGPTGAYFAMGEEALFV

SEQ ID NO: 52706 - protein, 260 aa, Glycine max
  peptide (1)..(260): Ceres Seq. ID no. 15170630
MRGGEAVERLNALGLSHVVFHQLEITDASSAAALAGFLKARFGKLDILVNNAAVGGVEYGQEFDTNEEKFGGMDFHQRVEWMLKNAREPIDSAKNSVKTNYYGTKHVIEALLPLLQASSEGRIVNVSSNYGLLRHIGNEEVRQELNDVDNLTEERLDELLDKFMKDFEAGALEPHGWPTKFSAYKVAKTAMNAYSRILARRHPELRVNCAHPGFVKTDMSMGSGVLTPEEGARNLVKVALLPDGGPTGAYFAMGEEALFV

SEQ ID NO: 52707 - DNA, 1350 bp, Glycine max
  misc_feature (1)..(1350): Ceres Seq. ID no. 15170792
aatatctcaaaaaggaaaccgacaacacaaaggatttgcagaaagtgcagctacttagttccattttcatcctctctccattaactttcagtcaaaacaaaacaaaacctctttaggtgtgaaattccacgtgccaaaatcatctccgaggcaccaacatcggcagccacttatttctttatttattgaaggaatcagtatataaaacacctgctttctaacggtggcgcaccagaggggtttaggttcaggttcggggaagttcttcgcggcggagcaaggcggcgatgaggaagcggaagagagtactgaggtaggttctgttccgagccatgtggtgtcagcctctgcagcttcggcccaaaccaatcagtgggtgccgcggggaagtggttttcccatgatgtcacgttttatgcatgcgccttctcccgttctgtcttcttcgcatcctcatttgggagttggccacaagagagagcgtgaagatgacactggcgctggtgcgagtggaggtgttgctattgcagcagcttcttcacaaacgcaaacacaagagattgaaagtgctggcggcgacaggaggaggagatacaggggagtgaggcagaggccgtgggggaaatgggcggcagagattcgcgatcctcacaaagcggcgagagtgtggcttgggacattcgacactgccgaggctgcggccagagcctacgatgaagccgcattgaggttcagaggtaacagagcaaaacttaatttccccgaaaacgttgtaccggttccacctcctcctccggttcccgatttaccggcaagtgcggtagccggttccgattccatttccggttccggttcagtggtggcaggtttttcgccgacgctgatgcagggagcgccgtttcagggctcctctgcttttctgagagattattgggggtattctcagctgctgaggagtacaggggacttccatggactcgaccagtggttctttgattctcaaatggcagcgtttcaatcttcttcatcgtcgttgttgccatcgccgccgccgccgtcgttttcgccttcctctgcttcgtatcctctgttttcttccagccagcaaatggggattttccggccgccgggagagcagggtcatggcggagaagacggtggtagtgggtcagagttttcggagcttccaccttcgacgtggtcagataccagtggctatcctcctccaccacctggttgacatggaatacacatttttttctttattctattttttctctttctttggttaaagaaagaacaaggctttcttctgtttatttattttaatttatctgtttttgctttttt

SEQ ID NO: 52708 - protein, 279 aa, Glycine max
  peptide (1)..(279): Ceres Seq. ID no. 15170793
MMSRFMHAPSPVLSSSHPHLGVGHKREREDDTGAGASGGVAIAAASSQTQTQEIESAGGDRRRRYRGVRQRPWGKWAAEIRDPHKAARVWLGTFDTAEAAARAYDEAALRFRGNRAKLNFPENVVPVPPPPPVPDLPASAVAGSDSISGSGSVVAGFSPTLMQGAPFQGSSAFLRDYWGYSQLLRSTGDFHGLDQWFFDSQMAAFQSSSSSLLPSPPPPSFSPSSASYPLFSSSQQMGIFRPPGEQGHGGEDGGSGSEFSELPPSTWSDTSGYPPPPPG

SEQ ID NO: 52709 - protein, 278 aa, Glycine max
  peptide (1)..(278): Ceres Seq. ID no. 15170794
MSRFMHAPSPVLSSSHPHLGVGHKREREDDTGAGASGGVAIAAASSQTQTQEIESAGGDRRRRYRGVRQRPWGKWAAEIRDPHKAARVWLGTFDTAEAAARAYDEAALRFRGNRAKLNFPENVVPVPPPPPVPDLPASAVAGSDSISGSGSVVAGFSPTLMQGAPFQGSSAFLRDYWGYSQLLRSTGDFHGLDQWFFDSQMAAFQSSSSSLLPSPPPPSFSPSSASYPLFSSSQQMGIFRPPGEQGHGGEDGGSGSEFSELPPSTWSDTSGYPPPPPG

SEQ ID NO: 52710 - protein, 274 aa, Glycine max
  peptide (1)..(274): Ceres Seq. ID no. 15170795
MHAPSPVLSSSHPHLGVGHKREREDDTGAGASGGVAIAAASSQTQTQEIESAGGDRRRRYRGVRQRPWGKWAAEIRDPHKAARVWLGTFDTAEAAARAYDEAALRFRGNRAKLNFPENVVPVPPPPPVPDLPASAVAGSDSISGSGSVVAGFSPTLMQGAPFQGSSAFLRDYWGYSQLLRSTGDFHGLDQWFFDSQMAAFQSSSSSLLPSPPPPSFSPSSASYPLFSSSQQMGIFRPPGEQGHGGEDGGSGSEFSELPPSTWSDTSGYPPPPPG

SEQ ID NO: 52711 - DNA, 1517 bp, Glycine max
  misc_feature (1)..(1517): Ceres Seq. ID no. 15177298
ttttgcccccctctctctcaccctcctcttcacacattttctgtgcgctctaacaaacattctcgttcacactttcagattgtgtgaagatgggggcgggtggccgaactgatgttcctcctgccaacaggaagtcagaggttgaccctttgaagcgggtgccatttgaaaaacctccatttagtctcagccaaatcaagaaggtcattccacctcactgtttccagcgttctgttttccgctcattctcctatgttgtttacgacctcaccatagccttctgcctctattatgttgccacccattacttccacctccttcccagccctctctctttcttggcatggccaatctactgggctgtccaaggttgcatccttactggagtttgggtcattgcccatgagtgtggccaccatgcattcagtgactaccagttgcttgatgatattgttggccttgtcctccactccggtctcctagtcccatacttttcatggaaatacagccatcgccgtcaccactccaacactggttctcttgagcgggatgaagtatttgtgccaaagcagaagtcctgtatcaagtggtactctaaataccttaacaatcctccaggcagagtcctcactcttgctgtcaccctcacacttggttggcccttgtacttggctttaaatgtttctggaaggccttatgatagatttgcttgccactatgacccatatggtcccatttactctgatcgtgaacgacttcaaatatatatatcagatgcaggagtacttgcagtatgctatggccttttccgtcttgccatggcaaaaggacttgcctgggtggtgtgtgtttatggagttccattgctagtggtcaatggatttttggtgttgattacattcttgcagcatactcaccctgcattgccacattacacttcctctgagtgggactggttgagaggagctttagcaacagtggatagagattatggaatcctgaacaaggtcttccataatattacagacactcatgtagcacatcacttgttctccacaatgccacattatcatgcaatggaggctacaaaggcaataaaacccattttgggagagtattatcggtttgatgagactccatttgtcaaggcaatgtggagagaggcaagagagtgtatttatgtggagccagatcaaagtaccgagagcaaaggtgtattttggtacaacaataagttgtgatgattaatgtagccgaggcttctttgaactttcccttgtgactgtttagtatcatggttgcttattgggaataattttgttgaaccctgatgttggtagtaagtatctagacagttgcatagcggttttgtttacagaataagatatagcctctctgaacagtttgattattgcaccatggtttgcaatcggtgcatgtcgaccaagtttctcaagactgtggagaagcttattcttgttccagttcttgaatccaagttgttaccgtattctgtc

SEQ ID NO: 52712 - protein, 383 aa, Glycine max
  peptide (1)..(383): Ceres Seq. ID no. 15177299
MGAGGRTDVPPANRKSEVDPLKRVPFEKPPFSLSQIKKVIPPHCFQRSVFRSFSYVVYDLTIAFCLYYVATHYFHLLPSPLSFLAWPIYWAVQGCILTGVWVIAHECGHHAFSDYQLLDDIVGLVLHSGLLVPYFSWKYSHRRHHSNTGSLERDEVFVPKQKSCIKWYSKYLNNPPGRVLTLAVTLTLGWPLYLALNVSGRPYDRFACHYDPYGPIYSDRERLQIYISDAGVLAVCYGLFRLAMAKGLAWVVCVYGVPLLVVNGFLVLITFLQHTHPALPHYTSSEWDWLRGALATVDRDYGILNKVFHNITDTHVAHHLFSTMPHYHAMEATKAIKPILGEYYRFDETPFVKAMWREARECIYVEPDQSTESKGVFWYNNKL

SEQ ID NO: 52713 - DNA, 1616 bp, Glycine max
  misc_feature (1)..(1616): Ceres Seq. ID no. 15177308
gacagacttgaggtcaccgagtgttaggagcagcagccaccatgttccatgtttccaccgttgcgctgaatcctcaacctcacactttcctctttccactccccttttttacttcccgcaacctccaactttcacaaactctacaattccccagaaactggaacctccgctctatctcgccatcgctgcacccaacgccgcaatacgacgattccgaagaccacgtcatcggcgactgcgtcgtgttcgaggacggtgttttcgacgaaccgcttttccataaccaccaccacaatcccgacaatcttaccgtcgataagcccaagcccaagcccaggcccagttggaggaaaaaagtggaggagacattgggcgagaatttggtcccggacaagtggcgagaggttcaggcggagataaacattacgaagagggagatgcggaagattgcgcgggaagtggagttcaacagcaaggttgaaaagaagagaagaggcttgattccccttagggatatgaatttggatgactacaaggcttataaggaagccaaattggcgcagatgaagcttctcgattactcttctagttttccggtggacgaaaatgtccctgaacctcaattgaatcgcggagaaaagtttgaggctgaagctgaattggatggtggtgaacgtgttgcgcctaagaaccctaggtgggctgtttatgggaggggtttggaggatgtcactgagtttttcaatagtgacaactatgaccctactactaaaacccctggaggtcgccggaagttgtttaataaggaggagaaggttttgttgaataagaggataccagacttggcagctgctacttcggataaatggcttcccctgcacactctcgctgcttgtggagaattttaccttttagattctctgttgaagcataatgttgatatcaatgctgtggataaggatggtttgactgcccttcacagagcaacaattggaaaaaagcaggccataatcaattatctcctgagaaactcagctaatccctttgtacaggataatgagggagccacattgatgcactatgctgtactaacagcttctacccagacaattaaaatactcttattgtataatgtggatataaatctccaggacaatgtatgattaaattttctcttgtatggctggacaccattacatcttgctgttcaagctcagaggacagatttagtgaggcttttgctaatcaaaggtgctgataagacattaaaaaatgaggatggtttaactcctcttgacctttgcctttacaatggtcaaagtgccagaacatatgagctaatcaagttgtttaagcagcctcaaagacgtcttagtcatgtatcagtatgacagacggggctaagaaacaatacgacttctgaaagatttggaccaacaaatgaagattaaccgttgccaaattttgcatgacaattagcatcccttggtcacatggaaattttgggacaactacggtattgtactatattaaaattaaaatgtatattttaaatgtgataggaaggaaaataggaatattttcatgaaaagaaagaaaaatggtctgccattttt

SEQ ID NO: 52714 - protein, 373 aa, Glycine max
  peptide (1)..(373): Ceres Seq. ID no. 15177309
MFHVSTVALNPQPHTFLFPLPFFTSRNLQLSQTLQFPRNWNLRSISPSLHPTPQYDDSEDHVIGDCVVFEDGVFDEPLFHNHHHNPDNLTVDKPKPKPRPSWRKKVEETLGENLVPDKWREVQAEINITKREMRKIAREVEFNSKVEKKRRGLIPLRDMNLDDYKAYKEAKLAQMKLLDYSSSFPVDENVPEPQLNRGEKFEAEAELDGGERVAPKNPRWAVYGRGLEDVTEFFNSDNYDPTTKTPGGRRKLFNKEEKVLLNKRIPDLAAATSDKWLPLHTLAACGEFYLLDSLLKHNVDINAVDKDGLTALHRATIGKKQAIINYLLRNSANPFVQDNEGATLMHYAVLTASTQTIKILLLYNVDINLQDNV

SEQ ID NO: 52715 - protein, 241 aa, Glycine max
  peptide (1)..(241): Ceres Seq. ID no. 15177310
MRKIAREVEFNSKVEKKRRGLIPLRDMNLDDYKAYKEAKLAQMKLLDYSSSFPVDENVPEPQLNRGEKFEAEAELDGGERVAPKNPRWAVYGRGLEDVTEFFNSDNYDPTTKTPGGRRKLFNKEEKVLLNKRIPDLAAATSDKWLPLHTLAACGEFYLLDSLLKHNVDINAVDKDGLTALHRATIGKKQAIINYLLRNSANPFVQDNEGATLMHYAVLTASTQTIKILLLYNVDINLQDNV

SEQ ID NO: 52716 - protein, 215 aa, Glycine max
  peptide (1)..(215): Ceres Seq. ID no. 15177311
MNLDDYKAYKEAKLAQMKLLDYSSSFPVDENVPEPQLNRGEKFEAEAELDGGERVAPKNPRWAVYGRGLEDVTEFFNSDNYDPTTKTPGGRRKLFNKEEKVLLNKRIPDLAAATSDKWLPLHTLAACGEFYLLDSLLKHNVDINAVDKDGLTALHRATIGKKQAIINYLLRNSANPFVQDNEGATLMHYAVLTASTQTIKILLLYNVDINLQDNV

SEQ ID NO: 52717 - DNA, 831 bp, Glycine max
  misc_feature (1)..(831): Ceres Seq. ID no. 14309515
acgtttagctatctgagaatacaaaatggcggcggcgaaagcagcggtggtattgccacgtccggtgacgtttgtgacgggaaatgcgaagaagctcgaagaggtcaaagctatcatcgggagttccattcctttcaagtctctcaaactcgacctgcctgagcttcaaggagagcctgaggatatctccaaagagaaagctcgtttggctgctcttcaggtaaatgggccagtgctagtggaggatacatgcctctgtttcaatgctttgaagggtcttcctgggccttacattaagtggtttcttgagaagcttggccatgaaggtttgaacaacttactgatggcctatgaagataaatcagcttatgcattgtgtgcattctctttctcgcatggtccaggtgctgaacctcttacatttttggggaaaactccgggtaagatagttccagcaagaggaccaactgatttcgggtgggatccagtgtttcaacctgatggatatgaccaaacttatgcagaaatggcaaaggaagaaaagaacaagatatcccatcggtacaagtctttagcaatggtgaaatctcactttaaggaggctggctacgtgttccagacaacagatgatgataccaattaaagtgaaaacccattccccattttccttcagcttttaaagatttgagcactggttctcctttttttctgaattgcaattagaaacacttttgttcacaagtttctaaccaaaacataaaatggcaaaacatattcattggattttgctgtgttctcaagagacagtaatactaatcattgtcttgattc

SEQ ID NO: 52718 - protein, 205 aa, Glycine max
  peptide (1)..(205): Ceres Seq. ID no. 14309516
MAAAKAAVVLPRPVTFVTGNAKKLEEVKAIIGSSIPFKSLKLDLPELQGEPEDISKEKARLAALQVNGPVLVEDTCLCFNALKGLPGPYIKWFLEKLGHEGLNNLLMAYEDKSAYALCAFSFSHGPGAEPLTFLGKTPGKIVPARGPTDFGWDPVFQPDGYDQTYAEMAKEEKNKISHRYKSLAMVKSHFKEAGYVFQTTDDDTN

SEQ ID NO: 52719 - DNA, 1507 bp, Glycine max
  misc_feature (1)..(1507): Ceres Seq. ID no. 15170752
aagcctattacgatgtcgtttttaagaaaaccggcagtattgccgttagcgacgcagccaaaaccctaatcagtgccaaacgatggaatcaccgtcaccaccttccccgttccgagaccttcttctccgtttatcgaccggaatcgcggagtctctggccaccgttccctacactccacaccaatcctccaacgtctccgtcaaagcctttctcgaacccctcctcgttcccaccgccaccgtcagagacttcgctctcgcgtgcgctctcatttcctcttccaccgccgtcgactcctccggcattctctcatggatccccagcaacctctcctctctcgcaacctcgtccttctccgacctctcccgcgcttacctcggaaatcgcgacctcgctgttccgccggagaagaggctcgtgctggaattgatgccagaggttttgccttttctgaaagagaggattaaggagagctcgattgatgtgtcggatgagaccgacgagttctccgcggcgacggcgagagtccccgttgggttcgccattctcgctgcttttcagtttagatggtttgttacgcaagttgattattctcatttgggcaagttgtgtggattggtgattccttgtgcactgactgctgttgatcattggtctccggtagttaagggacagggcatgattagccttatgcatgttggaaaaaatgtggatgctgctcagcttggtgggtatgtggatgtgattctggatgcctgctgccagaacacggcttctgatgatgagatatggcaccatgttgttgaggcatctgtactgcttgtgactcttactcagagaagtaatccacgtagtccatggtttgaaagaatgctaaatgagatgttaagtcacttggagcgccagcctagaaacaaagagcgccgcatcgcatggcttaaatctgctgattcactatttaatggagttggtatcatgcttttagctcacttcaggcgcattttcccattattttttcagtggatgcatgctgacgacaatgagactattattttggttctaaaatgtacatatgtaattttgagactgacgtggataaggaactcaccatttgttgcaaaattggtagataaacttgctcttgtgtataaggaggctgcattaagaacagctcgggaagagattagagcaaatatatgtcagatactgatcctacttcaagaaagcaaaggactgtattttaatgcagcctgggacaagcatcgatccgatccagacttgaccactcttgatttttcattaagtggaagaagtaatactaatactgtgccttcagaggattgtcctcagcagggtttagtacccgttcaatgataagttaattgcatttctgattatttcaatgtaccacaattttgagttgatataggttaatgtaattaaaaagtagaattgttggaacgagaataacaatatgcaaagtttgaatttgttttgtattctttg

SEQ ID NO: 52720 - protein, 430 aa, Glycine max
  peptide (1)..(430): Ceres Seq. ID no. 15170753
MESPSPPSPFRDLLLRLSTGIAESLATVPYTPHQSSNVSVKAFLEPLLVPTATVRDFALACALISSSTAVDSSGILSWIPSNLSSLATSSFSDLSRAYLGNRDLAVPPEKRLVLELMPEVLPFLKERIKESSIDVSDETDEFSAATARVPVGFAILAAFQFRWFVTQVDYSHLGKLCGLVIPCALTAVDHWSPVVKGQGMISLMHVGKNVDAAQLGGYVDVILDACCQNTASDDEIWHHVVEASVLLVTLTQRSNPRSPWFERMLNEMLSHLERQPRNKERRIAWLKSADSLFNGVGIMLLAHFRRIFPLFFQWMHADDNETIILVLKCTYVILRLTWIRNSPFVAKLVDKLALVYKEAALRTAREEIRANICQILILLQESKGLYFNAAWDKHRSDPDLTTLDFSLSGRSNTNTVPSEDCPQQGLVPVQ

SEQ ID NO: 52721 - protein, 314 aa, Glycine max
  peptide (1)..(314): Ceres Seq. ID no. 15170754
MPEVLPFLKERIKESSIDVSDETDEFSAATARVPVGFAILAAFQFRWFVTQVDYSHLGKLCGLVIPCALTAVDHWSPVVKGQGMISLMHVGKNVDAAQLGGYVDVILDACCQNTASDDEIWHHVVEASVLLVTLTQRSNPRSPWFERMLNEMLSHLERQPRNKERRIAWLKSADSLFNGVGIMLLAHFRRIFPLFFQWMHADDNETIILVLKCTYVILRLTWIRNSPFVAKLVDKLALVYKEAALRTAREEIRANICQILILLQESKGLYFNAAWDKHRSDPDLTTLDFSLSGRSNTNTVPSEDCPQQGLVPVQ

SEQ ID NO: 52722 - protein, 231 aa, Glycine max
  peptide (1)..(231): Ceres Seq. ID no. 15170755
MISLMHVGKNVDAAQLGGYVDVILDACCQNTASDDEIWHHVVEASVLLVTLTQRSNPRSPWFERMLNEMLSHLERQPRNKERRIAWLKSADSLFNGVGIMLLAHFRRIFPLFFQWMHADDNETIILVLKCTYVILRLTWIRNSPFVAKLVDKLALVYKEAALRTAREEIRANICQILILLQESKGLYFNAAWDKHRSDPDLTTLDFSLSGRSNTNTVPSEDCPQQGLVPVQ

SEQ ID NO: 52723 - DNA, 972 bp, Glycine max
  misc_feature (1)..(972): Ceres Seq. ID no. 15170807
atccacacccacactgtcacctttccgttcatttcctctgttttttcttcaaatccattgtttcgtggaaatcccgaaatttaaccatgcttctccgaaccgccgcctccgccgcttctgcttcgtccctctccctcttcagccctacctccgaacctctccgttcggttcccgctcgtggattggtggttcgcgccgcgaaaggatccacgaaccaccgcgccctaaccggcgtgatctttgaaccgttcgaagaggtgaagaaggagctcgatctcgttcccaccgttccacaagcttctctcgcccgccaaaaatacgttgacgaatccgaagccgccgttaacgaacaaatcaatgtggagtataacgtttcctacgtttaccatgctatgtttgcgtactttgatagggacaacgttgcgctgagaggtcttgctaagttttttaaggaatcgagtgaagaagaaagagagcatgctgagaaattgatggagtatcagaacaaacgtggtggaagagtgaagttgcagtcaattgtgatgccgctttctgagtttgatcatgcagataagggagatgcgctgcacgcaatggaactcgctctctcattagagaagctaacgaacgaaaagctccttaacttgcacagtgttgccacaaaaaatggtgacgtgcagttggctgactttgtggaaactgagtatctgggtgaacaggtggaagcaatcaaaagaatatccgagtatgttgctcagctcagaagagttggcaaaggacatggtgtttggcactttgatcagatactcctccacgagggaggagatgcagcctgatgattactatattacctccccccccccccccaccccacaagtattttgtatcttgctcatttaggtggctgcttgaaggtggatctgaactaaatgaatgaatgaaataaatgtggcctggtttcggtcctttcgc

SEQ ID NO: 52724 - protein, 277 aa, Glycine max
  peptide (1)..(277): Ceres Seq. ID no. 15170808
PHPHCHLSVHFLCFFFKSIVSWKSRNLTMLLRTAASAASASSLSLFSPTSEPLRSVPARGLVVRAAKGSTNHRALTGVIFEPFEEVKKELDLVPTVPQASLARQKYVDESEAAVNEQINVEYNVSYVYHAMFAYFDRDNVALRGLAKFFKESSEEEREHAEKLMEYQNKRGGRVKLQSIVMPLSEFDHADKGDALHAMELALSLEKLTNEKLLNLHSVATKNGDVQLADFVETEYLGEQVEAIKRISEYVAQLRRVGKGHGVWHFDQILLHEGGDAA

SEQ ID NO: 52725 - protein, 249 aa, Glycine max
  peptide (1)..(249): Ceres Seq. ID no. 15170809
MLLRTAASAASASSLSLFSPTSEPLRSVPARGLVVRAAKGSTNHRALTGVIFEPFEEVKKELDLVPTVPQASLARQKYVDESEAAVNEQINVEYNVSYVYHAMFAYFDRDNVALRGLAKFFKESSEEEREHAEKLMEYQNKRGGRVKLQSIVMPLSEFDHADKGDALHAMELALSLEKLTNEKLLNLHSVATKNGDVQLADFVETEYLGEQVEAIKRISEYVAQLRRVGKGHGVWHFDQILLHEGGDAA

SEQ ID NO: 52726 - protein, 147 aa, Glycine max
  peptide (1)..(147): Ceres Seq. ID no. 15170810
MFAYFDRDNVALRGLAKFFKESSEEEREHAEKLMEYQNKRGGRVKLQSIVMPLSEFDHADKGDALHAMELALSLEKLTNEKLLNLHSVATKNGDVQLADFVETEYLGEQVEAIKRISEYVAQLRRVGKGHGVWHFDQILLHEGGDAA

SEQ ID NO: 52727 - DNA, 918 bp, Glycine max
  misc_feature (1)..(918): Ceres Seq. ID no. 14309569
cattagagtataaggcagtgtttggtagcagagaattaaaaacatggaattctggaaccgcagattgctactacagaacgaggacgttcccctctcgatgccacctctctctcacactcacaccaaacacgccactaacgcatcatcatcctcgccgccgcaatcttcggctttccaattccaaagcccactgcaggtttcgattcctccagttttttcatcgagtgtggcctacgtcttcctcatcctcttcaccaccttcttcttcgtcggcttcgtcttcctctacttccgccagttcgcctccgacgccgccgccgccggatcctaccgccgccgctgggaggagggcgcggcagcggcggcggaggcaaagaagtgcctgccggtggtggcgcactgcggggaggggtgcgcggagtgcgcgatatgcctggaggagctgcgagagggggacgcggtgaagatgattccgtactgcaagcacgtgttccacccgcactgcattgacacgtggctcgataagcatgtcacgtgccccgtgtgccggtgcagtgagctgctatgtggagaagaggtggtggggtcggtgtcagcgagaagacaagaagaagtggttctaaatttggattagaagaactttgaagaagaagatgaaactgtagcgttgcgtgtttcattggacattgcttattatccatatttgctaggtttcaaccaccacttgagagtcttaaccaacgaacgtgttacatattacaagtttcttttgtggttttgttcattcccattattattgccacttgccagtgtcattatttagcagcatttaataattcaataacattctctttcagtttcttttttataaaaataaattgtagtagactcatagtactgctattttgcgttttctcc

SEQ ID NO: 52728 - protein, 196 aa, Glycine max
  peptide (1)..(196): Ceres Seq. ID no. 14309570
MEFWNRRLLLQNEDVPLSMPPLSHTHTKHATNASSSSPPQSSAFQFQSPLQVSIPPVFSSSVAYVFLILFTTFFFVGFVFLYFRQFASDAAAAGSYRRRWEEGAAAAAEAKKCLPVVAHCGEGCAECAICLEELREGDAVKMIPYCKHVFHPHCIDTWLDKHVTCPVCRCSELLCGEEVVGSVSARRQEEVVLNLD

SEQ ID NO: 52729 - protein, 178 aa, Glycine max
  peptide (1)..(178): Ceres Seq. ID no. 14309571
MPPLSHTHTKHATNASSSSPPQSSAFQFQSPLQVSIPPVFSSSVAYVFLILFTTFFFVGFVFLYFRQFASDAAAAGSYRRRWEEGAAAAAEAKKCLPVVAHCGEGCAECAICLEELREGDAVKMIPYCKHVFHPHCIDTWLDKHVTCPVCRCSELLCGEEVVGSVSARRQEEVVLNLD

SEQ ID NO: 52730 - protein, 153 aa, Glycine max
  peptide (1)..(153): Ceres Seq. ID no. 14309572
LEYKAVFGSRELKTWNSGTADCYYRTRTFPSRCHLSLTLTPNTPLTHHHPRRRNLRLSNSKAHCRFRFLQFFHRVWPTSSSSSSPPSSSSASSSSTSASSPPTPPPPDPTAAAGRRARQRRRRQRSACRWWRTAGRGARSARYAWRSCERGTR

SEQ ID NO: 52731 - DNA, 1009 bp, Glycine max
  misc_feature (1)..(1009): Ceres Seq. ID no. 14309565
tggaatctctagcaaaattccagtaattcacacacatcttctaattcgcttttgtcaacctctttattaattggcacaacccgtgatggcaatataaatagcaaaaccaccagcaacaccaccctttgtccacgagagaaagaaatcaatcacatcctatccaaattcaaatcacgaagaacaagtaaaaaggaagagatgggaaatgctatggggagtaaaaaagcaaaggtgatgaaaatagacggtgaaacgttcaagctcaatactccagcaagagcaaacgacgtcgttaaggactaccctggacatgttctcttggactctcacgcggtgaaaaacttcgggcctcgggccaagccacttgagcctgactaccagctcaagcccaagaagatttattttttggtggagttacccaaggttaagcccgaaccattagtaacgaggagggtgcgatccagtggaatccgtggcatgaacgcccaggataggcttgatttcttgatgctgtcgaaacgctccgtttcggaccttaccatggtgaagcatgggcccaagccagaaaatggtgggcccacgagggtcaaaatgaggctgcccaaggcccacttggagaggcttatggaggagagccacgacgggagcgaggtggcggagaagatcataagtttgtatatggggaataatgccgccgtggacggcggcggcgcaacggtggaggcccaaaaggaggttcacaatcgcaagccacgaaggaaacgggtgagtttcagcccagtggaacaagcagaaattcatgaagaatcagcagcaccacaacagtcactagtttatagcagtccttccagatagtcatttatgcagaagcaagccattatttatatgttaggtgcttctaatgcaatttaattttgccctaaaatctgtagcctatatattgatagacatgtctatacatttatacagtagtagtgctaggaccagaagatgcaaatgttgncttcat

SEQ ID NO: 52732 - protein, 218 aa, Glycine max
  peptide (1)..(218): Ceres Seq. ID no. 14309566
MGNAMGSKKAKVMKIDGETFKLNTPARANDVVKDYPGHVLLDSHAVKNFGPRAKPLEPDYQLKPKKIYFLVELPKVKPEPLVTRRVRSSGIRGMNAQDRLDFLMLSKRSVSDLTMVKHGPKPENGGPTRVKMRLPKAHLERLMEESHDGSEVAEKIISLYMGNNAAVDGGGATVEAQKEVHNRKPRRKRVSFSPVEQAEIHEESAAPQQSLVYSSPSR

SEQ ID NO: 52733 - protein, 214 aa, Glycine max
  peptide (1)..(214): Ceres Seq. ID no. 14309567
MGSKKAKVMKIDGETFKLNTPARANDVVKDYPGHVLLDSHAVKNFGPRAKPLEPDYQLKPKKIYFLVELPKVKPEPLVTRRVRSSGIRGMNAQDRLDFLMLSKRSVSDLTMVKHGPKPENGGPTRVKMRLPKAHLERLMEESHDGSEVAEKIISLYMGNNAAVDGGGATVEAQKEVHNRKPRRKRVSFSPVEQAEIHEESAAPQQSLVYSSPSR

SEQ ID NO: 52734 - protein, 206 aa, Glycine max
  peptide (1)..(206): Ceres Seq. ID no. 14309568
MKIDGETFKLNTPARANDVVKDYPGHVLLDSHAVKNFGPRAKPLEPDYQLKPKKIYFLVELPKVKPEPLVTRRVRSSGIRGMNAQDRLDFLMLSKRSVSDLTMVKHGPKPENGGPTRVKMRLPKAHLERLMEESHDGSEVAEKIISLYMGNNAAVDGGGATVEAQKEVHNRKPRRKRVSFSPVEQAEIHEESAAPQQSLVYSSPSR

SEQ ID NO: 52735 - DNA, 702 bp, Glycine max
  misc_feature (1)..(702): Ceres Seq. ID no. 14309553
accaaaggtatcttgcaatcacaacgaacaaaagctctcgatctcaccgacaccgaggaagaagagatcaatggcgtccgagcagggagtcgtgatcgcgtgccacagcaaggctgagtttgacgcccacatgaccaaggcccaggaagccggcaagctggtggtcatcgacttcactgccgcctggtgcggtccatgccgcgccatcgccccactgttcgtcgaacacgccaagaagttcactcaggtcgtcttcctgaaggtggacgtggacgaagtgaaggaagtcaccgcggcctacgaggtcgaggcgatgccgaccttccacttcgtcaagaacggcaagacggtcgcgaccatcgtgggtgccaggaaggacgagctcctggccctgatcgagaagcatgccgcgcctgcgcctgcgactgcgtctgcctaaatgagatcagatcagtcgtcgccgtcaataagggccagcacgtatggctgtaaatgttgtcgttatcagttctggctttgtcgtttgtgggcgatttgtgaactagtagtatgtttgtttctatccgagccggaggcgatacttaaccatggatacttgttgtgagttcgtttctgttcgcgtgtgactcttgaattgaatcaaccagctcaccactgcaccaggccgtggtgagtggtgacagtgatttcctgttagcatgt

SEQ ID NO: 52736 - protein, 145 aa, Glycine max
  peptide (1)..(145): Ceres Seq. ID no. 14309554
PKVSCNHNEQKLSISPTPRKKRSMASEQGVVIACHSKAEFDAHMTKAQEAGKLVVIDFTAAWCGPCRAIAPLFVEHAKKFTQVVFLKVDVDEVKEVTAAYEVEAMPTFHFVKNGKTVATIVGARKDELLALIEKHAAPAPATASA

SEQ ID NO: 52737 - protein, 122 aa, Glycine max
  peptide (1)..(122): Ceres Seq. ID no. 14309555
MASEQGVVIACHSKAEFDAHMTKAQEAGKLVVIDFTAAWCGPCRAIAPLFVEHAKKFTQVVFLKVDVDEVKEVTAAYEVEAMPTFHFVKNGKTVATIVGARKDELLALIEKHAAPAPATASA

SEQ ID NO: 52738 - protein, 102 aa, Glycine max
  peptide (1)..(102): Ceres Seq. ID no. 14309556
MTKAQEAGKLVVIDFTAAWCGPCRAIAPLFVEHAKKFTQVVFLKVDVDEVKEVTAAYEVEAMPTFHFVKNGKTVATIVGARKDELLALIEKHAAPAPATASA

SEQ ID NO: 52739 - DNA, 1647 bp, Glycine max
  misc_feature (1)..(1647): Ceres Seq. ID no. 15177316
atctcctcttcctcctcaatcctacttaattgctttgtttctccttttaatttctatatatttctctctcttctggaaacaattactttaaggatgagtaaacaagacttgttgaaagttcagagctgtgttctcaaggttaatatccactgcgatggctgtgagcaaaaagtcaagaaactgctgcagaaaatcgatggggtttattctgtgagagtagatgcagatgaagggaaagtggtagtggcaggagatgtggatccagcgaaactggtaaaaaagctaaagaggggagggaagcatgctgagatatgccagaaccagaaaggaggaatgatgtgtaatcagattcagaactatcctatcaatccccaattccagaacatgcaacttggtattgggggaaaggacaacaataataatcacaagggtcagaaagagaaaggtactgctgcggctgctggtcaactagtacacttccctattcttaaaggggttcaggatctcaaggtacctgccaaggaacaaaagtctgtcaagttcaacttgccagaggaggatgaatttgatgccagtgatgatggttatgatgaggatggattaggccatggacatccaatgcagaacaagatcatgcccatgatgattaatcacaaccataaagacaattctggtgggagtaggaatattaatggaagtgttaagaaagctgacgtcattgatcaggcaatgctgttcaagggcaaaggtggaaatttcgatgaggcagaagctgacaatgatggaggaaagaaaggtagtagtagccaaaaagatgaaatcaagaagggggatttggataagcctaaggcagtcggtgaggtagattttcataagaaaaagaatgggaaaagtgagaatggattacttggtcggtttctaggctttgggaaaaagagcaagaaaggagaattagaagaaacaacttataccaataagagcaagaaccaaaacagtggtgctgaaaataagaaaggcaaggaagggaaattggaggatcatggtaacaatgactttgattttcatgattacgatgatacccctcctcatcccaaaaatggcaaaagtggtaagggtagtaacaatgtcaaagaaggccagatgggcccgggcccaataatgggtaataatcttccaatgcgtcatcagatggagaatattcaagcagtacaaggacttccggcgatgaatggtgatggtggctattatcaaggggtgcaaatgcaacatgctccatacaataaccttcagcagcactacatgggtatgatgatgaaccagcatcaacatcagcaagcaaatatgaacaacaacatgtacccaacacccatgatgtatggtaggccgcatccatctatgaactacatgccaccacctcctatgccatctcacccaattgccgatcctattactcataccttcagtgatgagaatgttgagagctgcagtatcatgtaattaattaattaattactagtgacaacttgcttttctgctctatgattcggtctttagggagttcattaaattttgtgtaggacggaaaatgtgggatgtttaggattatattattatattatatataaataaatagtatattgtttgcac

SEQ ID NO: 52740 - protein, 498 aa, Glycine max
  peptide (1)..(498): Ceres Seq. ID no. 15177317
ISSSSSILLNCFVSPFNFYIFLSLLETITLRMSKQDLLKVQSCVLKVNIHCDGCEQKVKKLLQKIDGVYSVRVDADEGKVVVAGDVDPAKLVKKLKRGGKHAEICQNQKGGMMCNQIQNYPINPQFQNMQLGIGGKDNNNNHKGQKEKGTAAAAGQLVHFPILKGVQDLKVPAKEQKSVKFNLPEEDEFDASDDGYDEDGLGHGHPMQNKIMPMMINHNHKDNSGGSRNINGSVKKADVIDQAMLFKGKGGNFDEAEADNDGGKKGSSSQKDEIKKGDLDKPKAVGEVDFHKKKNGKSENGLLGRFLGFGKKSKKGELEETTYTNKSKNQNSGAENKKGKEGKLEDHGNNDFDFHDYDDTPPHPKNGKSGKGSNNVKEGQMGPGPIMGNNLPMRHQMENIQAVQGLPAMNGDGGYYQGVQMQHAPYNNLQQHYMGMMMNQHQHQQANMNNNMYPTPMMYGRPHPSMNYMPPPPMPSHPIADPITHTFSDENVESCSIM

SEQ ID NO: 52741 - protein, 467 aa, Glycine max
  peptide (1)..(467): Ceres Seq. ID no. 15177318
MSKQDLLKVQSCVLKVNIHCDGCEQKVKKLLQKIDGVYSVRVDADEGKVVVAGDVDPAKLVKKLKRGGKHAEICQNQKGGMMCNQIQNYPINPQFQNMQLGIGGKDNNNNHKGQKEKGTAAAAGQLVHFPILKGVQDLKVPAKEQKSVKFNLPEEDEFDASDDGYDEDGLGHGHPMQNKIMPMMINHNHKDNSGGSRNINGSVKKADVIDQAMLFKGKGGNFDEAEADNDGGKKGSSSQKDEIKKGDLDKPKAVGEVDFHKKKNGKSENGLLGRFLGFGKKSKKGELEETTYTNKSKNQNSGAENKKGKEGKLEDHGNNDFDFHDYDDTPPHPKNGKSGKGSNNVKEGQMGPGPIMGNNLPMRHQMENIQAVQGLPAMNGDGGYYQGVQMQHAPYNNLQQHYMGMMMNQHQHQQANMNNNMYPTPMMYGRPHPSMNYMPPPPMPSHPIADPITHTFSDENVESCSIM

SEQ ID NO: 52742 - protein, 387 aa, Glycine max
  peptide (1)..(387): Ceres Seq. ID no. 15177319
MMCNQIQNYPINPQFQNMQLGIGGKDNNNNHKGQKEKGTAAAAGQLVHFPILKGVQDLKVPAKEQKSVKFNLPEEDEFDASDDGYDEDGLGHGHPMQNKIMPMMINHNHKDNSGGSRNINGSVKKADVIDQAMLFKGKGGNFDEAEADNDGGKKGSSSQKDEIKKGDLDKPKAVGEVDFHKKKNGKSENGLLGRFLGFGKKSKKGELEETTYTNKSKNQNSGAENKKGKEGKLEDHGNNDFDFHDYDDTPPHPKNGKSGKGSNNVKEGQMGPGPIMGNNLPMRHQMENIQAVQGLPAMNGDGGYYQGVQMQHAPYNNLQQHYMGMMMNQHQHQQANMNNNMYPTPMMYGRPHPSMNYMPPPPMPSHPIADPITHTFSDENVESCSIM

SEQ ID NO: 52743 - DNA, 1945 bp, Glycine max
  misc_feature (1)..(1945): Ceres Seq. ID no. 15177919
aaaaacttcgatacggaaaagaatgaagggtggcacggttcagattagctggcacgagagcaagcccgtcttaaccctcgatttccaccctctctccgccactctcgccaccgccggcgccgatttcgacatcaagttttggcaaataaaacccgcggggtcgccgaagaagcttcccgtagtttcctatcttagtaacctctattaccacagctctgcagtcaatgttattcgcttctcttcttccggggaattgctagcctctggtgctgatggaggggacttgataatatggaagctacattctactgatgctggacagacgtggaaggttctcaagatgttacgatctcatcacaaggacattctggacctgcagtggtctactgatgccacatatatcatttctggatcagttgataattgttgcattatatgggatgttaacaaaggaactaaccttcagacattggatgcccatgcacactatgttcagggggttgcatgggaccctctagggaaatatgttacttctcttagttctgataggacttgccgaatatacatgaataagcctcataaatcaaagggcattgagaaaatcaattatgtttgtcagcaagtcatttccaaggcagatcagccattattaaagaattccaaggagacaaaatttcatctcttccatgatgagacattgccatctttcttcagaagattagcatggtctcctgatggttcatttctacttgtgcccgcaggctcttacaaaattagtactgcatctgaatctgtgaatgcggcttacatattttctagaaaagatctttctaggcctgctatacagcttccctgtgcaagcaaagctgttgtagctgtccgattctgccccatattttttaaacttcgaggaacacactcagctgggttatttaagctcccatatcgcataatatttgctgtggccactttgaactcattgtacatttatgacactgagagcacctctccgatagccgtattagctggtcttcactatgccgcaataacagatattacctggtcatctgatgctcattatttggcattgtcatcacaagatggtttctgctctttggtggaatttgaaaatgacgagcttggatcaccttactcnttatcagaaggaaaagtctcaaacgaggatggtaagagcactgtacagacaaccaatgacactgtcactgtaccaactgaggatgttagtgcagttttagcagagagcaagaaaatggaatcagaagagaaggctgatgacatggtcattgaagcctctggcaatattgatgctgtcgtaacagaaagcggggaaactataacacaagagaaggatgagatgatcaagtcaactgggaatttagcagattttaggaaaaatgaagcagcagagaaagctattgacatggccattgaggcaaccgggaatgttgaaggggttatagcagatagtaggaaaaaggaggcggaagagaaaactgatggcatggtcattgaaacaactggaagtattggtgcagctgaattagatagaagaaaagctgaacaggaagataagacagagaaacagccagctaatctagattcagatggtaaacaaaaggaagcaaaggagaagacagagattctgcaatcaagtttagacggtataaaatcagggccacaattgttcagtccgaagagtacacccatttcaaataagccagccaagaagcgtattactcctatcgccattgatccatgatttttcaattcctgagaaattccttccacgcctgcctgtatacatctgttgtgcgccattttttggaagtcatatatttcctcctctctaatgtttttctcatatttttcgttgacagattctgtaatatagatttcaatataatatttagtgaaaacaatttcc

SEQ ID NO: 52744 - protein, 592 aa, Glycine max
  peptide (1)..(592): Ceres Seq. ID no. 15177920
  misc_feature (385)..(385): Xaa is any aa, unknown or other
KTSIRKRMKGGTVQISWHESKPVLTLDFHPLSATLATAGADFDIKFWQIKPAGSPKKLPVVSYLSNLYYHSSAVNVIRFSSSGELLASGADGGDLIIWKLHSTDAGQTWKVLKMLRSHHKDILDLQWSTDATYIISGSVDNCCIIWDVNKGTNLQTLDAHAHYVQGVAWDPLGKYVTSLSSDRTCRIYMNKPHKSKGIEKINYVCQQVISKADQPLLKNSKETKFHLFHDETLPSFFRRLAWSPDGSFLLVPAGSYKISTASESVNAAYIFSRKDLSRPAIQLPCASKAVVAVRFCPIFFKLRGTHSAGLFKLPYRIIFAVATLNSLYIYDTESTSPIAVLAGLHYAAITDITWSSDAHYLALSSQDGFCSLVEFENDELGSPYXLSEGKVSNEDGKSTVQTTNDTVTVPTEDVSAVLAESKKMESEEKADDMVIEASGNIDAVVTESGETITQEKDEMIKSTGNLADFRKNEAAEKAIDMAIEATGNVEGVIADSRKKEAEEKTDGMVIETTGSIGAAELDRRKAEQEDKTEKQPANLDSDGKQKEAKEKTEILQSSLDGIKSGPQLFSPKSTPISNKPAKKRITPIAIDP

SEQ ID NO: 52745 - protein, 585 aa, Glycine max
  peptide (1)..(585): Ceres Seq. ID no. 15177921
  misc_feature (378)..(378): Xaa is any aa, unknown or other
MKGGTVQISWHESKPVLTLDFHPLSATLATAGADFDIKFWQIKPAGSPKKLPVVSYLSNLYYHSSAVNVIRFSSSGELLASGADGGDLIIWKLHSTDAGQTWKVLKMLRSHHKDILDLQWSTDATYIISGSVDNCCIIWDVNKGTNLQTLDAHAHYVQGVAWDPLGKYVTSLSSDRTCRIYMNKPHKSKGIEKINYVCQQVISKADQPLLKNSKETKFHLFHDETLPSFFRRLAWSPDGSFLLVPAGSYKISTASESVNAAYIFSRKDLSRPAIQLPCASKAVVAVRFCPIFFKLRGTHSAGLFKLPYRIIFAVATLNSLYIYDTESTSPIAVLAGLHYAAITDITWSSDAHYLALSSQDGFCSLVEFENDELGSPYXLSEGKVSNEDGKSTVQTTNDTVTVPTEDVSAVLAESKKMESEEKADDMVIEASGNIDAVVTESGETITQEKDEMIKSTGNLADFRKNEAAEKAIDMAIEATGNVEGVIADSRKKEAEEKTDGMVIETTGSIGAAELDRRKAEQEDKTEKQPANLDSDGKQKEAKEKTEILQSSLDGIKSGPQLFSPKSTPISNKPAKKRITPIAIDP

SEQ ID NO: 52746 - protein, 479 aa, Glycine max
  peptide (1)..(479): Ceres Seq. ID no. 15177922
  misc_feature (272)..(272): Xaa is any aa, unknown or other
MLRSHHKDILDLQWSTDATYIISGSVDNCCIIWDVNKGTNLQTLDAHAHYVQGVAWDPLGKYVTSLSSDRTCRIYMNKPHKSKGIEKINYVCQQVISKADQPLLKNSKETKFHLFHDETLPSFFRRLAWSPDGSFLLVPAGSYKISTASESVNAAYIFSRKDLSRPAIQLPCASKAVVAVRFCPIFFKLRGTHSAGLFKLPYRIIFAVATLNSLYIYDTESTSPIAVLAGLHYAAITDITWSSDAHYLALSSQDGFCSLVEFENDELGSPYXLSEGKVSNEDGKSTVQTTNDTVTVPTEDVSAVLAESKKMESEEKADDMVIEASGNIDAVVTESGETITQEKDEMIKSTGNLADFRKNEAAEKAIDMAIEATGNVEGVIADSRKKEAEEKTDGMVIETTGSIGAAELDRRKAEQEDKTEKQPANLDSDGKQKEAKEKTEILQSSLDGIKSGPQLFSPKSTPISNKPAKKRITPIAIDP

SEQ ID NO: 52747 - DNA, 1296 bp, Glycine max
  misc_feature (1)..(1296): Ceres Seq. ID no. 15170760
ccccaccacacaccccaagcccccacctccattttttccagccaggtttgcagcgagaaggaacagcaaggctagctacacaagccgatggccaaggacgaggtgatggagaccggcggcggcggcgacttcgcggccaaggactacacggacccgccgccggccccgctgatcgacgcggccgagctggcctcctggtcgctctaccgcgccgtcatcgccgagttcatcgccacgctgctcttcctctacatcaccgtggccaccgtcatcgggtacaagcaccagacggacccggcggtgaacagcgccgccgacgcagcgtgcggcggcgtgggcgtgctcggcatcgcctgggccttcggcggcatgatcttcgtcctcgtctactgcaccgccggcatctccgggggccacatcaacccggccgtcaccttcggcctcttcctggcgcgcaaggtgtccctggtccgcgcgctgctctacatgattgcgcagtgcctcggcgccatgtgcggggtcggcctcgtcaagaccttccagagcgcctacttcgtcaggtacggcggcggcgccaacacgctcgccgccggctactccaagggcaccggcctcgctgcggagatcatcggcaccttcgtgctcgtctacaccgtcttctccgccaccgaccccaagcgcagcgcacgcgactctcacgtcccggtgctggcgcccctcccgatcggcttcgccgtgttcatggtccacctggccaccatccccatcaccgtcaccggcatcaacccggcccggagcctgggggccgccgtcatctacaacaaggacaaggcctgggatgatcagtggatcttctgggtcggccccatgatcggcgcggcgatcgcggccttctaccaccagtacatcctcagggccggcgccatcaaggccctcggctccttcaggagcaacgcgtaacaagttatcatccatgtcatctgtatgcaagactgaagcaatggcgacccgtgttgtgtccatccatccagagagaaatgcgcttttgcaacttctcgacagttcagttcggccgccgcaatggtcgtgttattatgtgtcggcagctgcatatgcgtagtacgtggtccggtcatgcgtgccgtgtcttgtaattcggtccatgggatcgcttgtcttaattagcccgcattgcttttcctacttgtatttaaatttagcgaccatatgtatgatcgatccaacgtcgccacctttctatctaagtcatcaatccaccaagcaagtgatcatccc

SEQ ID NO: 52748 - protein, 290 aa, Glycine max
  peptide (1)..(290): Ceres Seq. ID no. 15170761
MAKDEVMETGGGGDFAAKDYTDPPPAPLIDAAELASWSLYRAVIAEFIATLLFLYITVATVIGYKHQTDPAVNSAADAACGGVGVLGIAWAFGGMIFVLVYCTAGISGGHINPAVTFGLFLARKVSLVRALLYMIAQCLGAMCGVGLVKTFQSAYFVRYGGGANTLAAGYSKGTGLAAEIIGTFVLVYTVFSATDPKRSARDSHVPVLAPLPIGFAVFMVHLATIPITVTGINPARSLGAAVIYNKDKAWDDQWIFWVGPMIGAAIAAFYHQYILRAGAIKALGSFRSNA

SEQ ID NO: 52749 - protein, 284 aa, Glycine max
  peptide (1)..(284): Ceres Seq. ID no. 15170762
METGGGGDFAAKDYTDPPPAPLIDAAELASWSLYRAVIAEFIATLLFLYITVATVIGYKHQTDPAVNSAADAACGGVGVLGIAWAFGGMIFVLVYCTAGISGGHINPAVTFGLFLARKVSLVRALLYMIAQCLGAMCGVGLVKTFQSAYFVRYGGGANTLAAGYSKGTGLAAEIIGTFVLVYTVFSATDPKRSARDSHVPVLAPLPIGFAVFMVHLATIPITVTGINPARSLGAAVIYNKDKAWDDQWIFWVGPMIGAAIAAFYHQYILRAGAIKALGSFRSNA

SEQ ID NO: 52750 - protein, 279 aa, Glycine max
  peptide (1)..(279): Ceres Seq. ID no. 15170763
PPHTPSPHLHFFQPGLQREGTARLATQADGQGRGDGDRRRRRLRGQGLHGPAAGPADRRGRAGLLVALPRRHRRVHRHAALPLHHRGHRHRVQAPDGPGGEQRRRRSVRRRGRARHRLGLRRHDLRPRLLHRRHLRGPHQPGRHLRPLPGAQGVPGPRAALHDCAVPRRHVRGRPRQDLPERLLRQVRRRRQHARRRLLQGHRPRCGDHRHLRARLHRLLRHRPQAQRTRLSRPGAGAPPDRLRRVHGPPGHHPHHRHRHQPGPEPGGRRHLQQGQGLG

SEQ ID NO: 52751 - DNA, 943 bp, Glycine max
  misc_feature (1)..(943): Ceres Seq. ID no. 14309549
attcaagttatcactttcctgaattgagtgtaacaggatcattttttttgttatcttatataaaggtcctcaaggaaggtattgtactgagatgactgagacaagggttaatactctcatggtcacgagttccggcaattatggcatgttgcacaacaacaaaattcatttgaattgccaattccttggtctcgggcattccatcaaggaacatggtaggtttgggttagtgtgctcttcatcacttagtggtggtggtaataagatgaaacttagagtgaagaagaaggggaagcaaagttcttcaccaaccatgatggtagctctcaatgagggtcatgaggtcatctctgaggagtccactaccgtgaagctctcggctctggtggctgtgaggaatagtaaagataataacaaggtgtttgcaaatgagatagtgaataaccttctaaccattttctggcctcaaaaccagaccaaaggtgttgttcttcaacttgttagcacacagcttgatcccaggagaatggaagcaaagttgagcaagaaaaccgttttggagttatccgaagaccataaagttgatgagaagggaagaatcagcacctataaagttgaattcattgtggactctgattttgggatccctggtgctgttaccgtggttaacggctttgacaatgagttcttcttggaaagcataaccatggcacaaaatgttcattttgcttgcaaatcttgggttcaaccaaacaagcttgacccagagaagagaattttcttcgttaacaaggtaattaatatacatgcatggtttgttgactcaactgaattttagcaaaattaactagtgtgaggtttggatgtgatgatcatctcttgtaaataggtttggggtaccctatgtgccctatacattttaatagatatctttttcctgatt

SEQ ID NO: 52752 - protein, 248 aa, Glycine max
  peptide (1)..(248): Ceres Seq. ID no. 14309550
MTETRVNTLMVTSSGNYGMLHNNKIHLNCQFLGLGHSIKEHGRFGLVCSSSLSGGGNKMKLRVKKKGKQSSSPTMMVALNEGHEVISEESTTVKLSALVAVRNSKDNNKVFANEIVNNLLTIFWPQNQTKGVVLQLVSTQLDPRRMEAKLSKKTVLELSEDHKVDEKGRISTYKVEFIVDSDFGIPGAVTVVNGFDNEFFLESITMAQNVHFACKSWVQPNKLDPEKRIFFVNKVINIHAWFVDSTEF

SEQ ID NO: 52753 - protein, 239 aa, Glycine max
  peptide (1)..(239): Ceres Seq. ID no. 14309551
MVTSSGNYGMLHNNKIHLNCQFLGLGHSIKEHGRFGLVCSSSLSGGGNKMKLRVKKKGKQSSSPTMMVALNEGHEVISEESTTVKLSALVAVRNSKDNNKVFANEIVNNLLTIFWPQNQTKGVVLQLVSTQLDPRRMEAKLSKKTVLELSEDHKVDEKGRISTYKVEFIVDSDFGIPGAVTVVNGFDNEFFLESITMAQNVHFACKSWVQPNKLDPEKRIFFVNKVINIHAWFVDSTEF

SEQ ID NO: 52754 - protein, 230 aa, Glycine max
  peptide (1)..(230): Ceres Seq. ID no. 14309552
MLHNNKIHLNCQFLGLGHSIKEHGRFGLVCSSSLSGGGNKMKLRVKKKGKQSSSPTMMVALNEGHEVISEESTTVKLSALVAVRNSKDNNKVFANEIVNNLLTIFWPQNQTKGVVLQLVSTQLDPRRMEAKLSKKTVLELSEDHKVDEKGRISTYKVEFIVDSDFGIPGAVTVVNGFDNEFFLESITMAQNVHFACKSWVQPNKLDPEKRIFFVNKVINIHAWFVDSTEF

SEQ ID NO: 52755 - DNA, 908 bp, Glycine max
  misc_feature (1)..(908): Ceres Seq. ID no. 14309488
acacacttcttccacgcttcctcccccgagctacgacgacgactagccagccagctactcctccgcgcgcaagccagcggcgaagctcgtgaactctcccggtgcccagacatggcggcaagaaggctcctcgaggaggcggtcgccgccggcgcgcagcaggactcgctcaactcggacctggtcctcatcctcgccggcctgctctgcgcgctggtctgcgtcctcggcctcggcctcgtggcgcggtgcgcgtgctcgcgccactgggccagggccgcagacgccccgcccggcgccaacaggggcgtcaagaaggaggtgctgcgcgccctgcccaccgtcaggtacgtcgccgacggcggcgaggcgtcggaatcggacgagtgcgccatctgcctcgccgagttcgaggacggccaggacatgcgggtgctgccgcagtgcagccacgcgttccacacggcctgcgtcgacgcctggctgcgctcgcactcctcgtgcccgtcgtgccggcgggtgctcgtcgccgagctgccgcgcggcgagcggagcggacgctgcggcgcgcggcccggcggcctcgacgcgctcctcaaggccgtgccgctgtgccgctgacgtcgctgtagctcggcattagtggcgtgcgcactctggacaaaaggccaagggaaaagtgtgtcgagggaaattagccggtgcataagctcatcggttagcttcttatttacctttctcttggcttgggggcctgctgggtgttgattctttttaggtgtggctactctggaaatgggaaccattgagcatgaaggcgtgtgtatatacatagttgatggggggatttgtgattgtaacctatttgtacatatgtggaagttgctataaaaacatgcacttgctgg

SEQ ID NO: 52756 - protein, 206 aa, Glycine max
  peptide (1)..(206): Ceres Seq. ID no. 14309489
THFFHASSPELRRRLASQLLLRAQASGEARELSRCPDMAARRLLEEAVAAGAQQDSLNSDLVLILAGLLCALVCVLGLGLVARCACSRHWARAADAPPGANRGVKKEVLRALPTVRYVADGGEASESDECAICLAEFEDGQDMRVLPQCSHAFHTACVDAWLRSHSSCPSCRRVLVAELPRGERSGRCGARPGGLDALLKAVPLCR

SEQ ID NO: 52757 - protein, 169 aa, Glycine max
  peptide (1)..(169): Ceres Seq. ID no. 14309490
MAARRLLEEAVAAGAQQDSLNSDLVLILAGLLCALVCVLGLGLVARCACSRHWARAADAPPGANRGVKKEVLRALPTVRYVADGGEASESDECAICLAEFEDGQDMRVLPQCSHAFHTACVDAWLRSHSSCPSCRRVLVAELPRGERSGRCGARPGGLDALLKAVPLCR

SEQ ID NO: 52758 - DNA, 828 bp, Glycine max
  misc_feature (1)..(828): Ceres Seq. ID no. 15170822
gaagattagcaggccgcctgcgctccttgcccctaagcctcgtttccggtgtacgactccaacgacgacgagatggcgctccgtcggagcttcccctccctcggccgcgcgcttctcacgccggcgccggcgccggcgcggacgctctccgcggaggcctccgatgccctcgttgagatcaagcccggggagattgggatggtctccggcatccccgaggagcacctccgccgtaaggttgtaatttattcaccagctaggactgcatctcagcaaggttcaggcaaagttgggaggtggaaaattaactttttgtcaacccaaaagtgggagaacccgttgatgggatggacatctactggggatccatatgctaatgtcggtgaagcaggacttacattcaacagtgcggagtcagcaaaagcatttgctgaaaaacatggatggaattatgtggtacggaaacggcatacacctcttctgaagcctaaggcctacgctgagaacttcaagtggaaaggccccccgaaggcggagcaagcataagacctccagcagcatgtgaccctgacactggaatgatgttattttcctcctgagctctagagtctagacctcttgtccgtgagcctggcattgggacggtgttgttttcttcctggacagccttttctttcaacagtgtccgtggtgaaagtacgagctagaatatgcatctatcaaacttgtaataagcatggtctgcaatcaaacaaaattagtgtccttcgaaaacgtttgttccttgatgacattgtatctcaatactgtatgcttccttggccggtg

SEQ ID NO: 52759 - protein, 157 aa, Glycine max
  peptide (1)..(157): Ceres Seq. ID no. 15170823
MALRRSFPSLGRALLTPAPAPARTLSAEASDALVEIKPGEIGMVSGIPEEHLRRKVVIYSPARTASQQGSGKVGRWKINFLSTQKWENPLMGWTSTGDPYANVGEAGLTFNSAESAKAFAEKHGWNYVVRKRHTPLLKPKAYAENFKWKGPPKAEQA

SEQ ID NO: 52760 - protein, 115 aa, Glycine max
  peptide (1)..(115): Ceres Seq. ID no. 15170824
MVSGIPEEHLRRKVVIYSPARTASQQGSGKVGRWKINFLSTQKWENPLMGWTSTGDPYANVGEAGLTFNSAESAKAFAEKHGWNYVVRKRHTPLLKPKAYAENFKWKGPPKAEQA

SEQ ID NO: 52761 - protein, 80 aa, Glycine max
  peptide (1)..(80): Ceres Seq. ID no. 15170825
KISRPPALLAPKPRFRCTTPTTTRWRSVGASPPSAARFSRRRRRRRGRSPRRPPMPSLRSSPGRLGWSPASPRSTSAVRL

SEQ ID NO: 52762 - DNA, 1233 bp, Glycine max
  misc_feature (1)..(1233): Ceres Seq. ID no. 15177312
gatgaaaggcatgttctacacttgttctacttatacgttatctttacatatcagtgtaaagaaatcatgatttgttcctaattaaacctctcaatttaaatatctccctcctttcccatcccacactcccccaccgtttaccgtataggccatcaatctcttcttcttcttcttcttcttcttcttcttccataatggacccttgtccttcatccaacacgaacaccgtgaacgggttctacacgttcgtgagccggggaatggaggagctggagcgagccttcttagccaacaacagcttcatctccctccagttcctccagaaggtcctctccctcctccgttccctccacacccaactcaccctcctcgtccacaagctccacctccccctcggcgacaagtggctcgacgagtacatggacgagacctccaagctctgggagacctctcacctcctcaaatccgccatctccaacttcgaacctttctactcccagggcttcaaccttctctcctccctcgactcatcccacccccaggtagtgagggctatatcagggtgcagaagggaggctttgggtttggaggagcagaaccgcgctctgatggagactcgggtccacacgctgtgtctgcgtctggacgagagggtatccgtggagtccaagctcaacggcttcaacggcttcaggggcgttctctacgcaatgaggaacgtgagttcgatgcttttaatgatcctgctgcacggtttagtgtactgctggccggagacctcggagttggtctcgggagggtacgagggggggaggatgttcctgggatcggcggcgaggctaaggcagagggtggccgcggagatgcgcggcgccgccgggccggggattttgctttacgagtttaggagggctagggtggctgtggaggagctgagaggggaattggaggaggcggagggtggtgttagggagagagtggagagtgttagggtgtgttttggggtgctcagatctggggctgagaacattgtttgccagcttgatgatttctttgatgagattgtcgaggggaggaagaaactcttggatttttgcagtcataggtaaataaatggtagtaaatagtttttagaaagaagaaaaaaaatgttctcctttcttgtttgatcgattaaagaggggcatgtagttgaaaaaaaaaatgaaaagctaaaatgtttttcctttgtgc

SEQ ID NO: 52763 - protein, 304 aa, Glycine max
  peptide (1)..(304): Ceres Seq. ID no. 15177313
MDPCPSSNTNTVNGFYTFVSRGMEELERAFLANNSFISLQFLQKVLSLLRSLHTQLTLLVHKLHLPLGDKWLDEYMDETSKLWETSHLLKSAISNFEPFYSQGFNLLSSLDSSHPQVVRAISGCRREALGLEEQNRALMETRVHTLCLRLDERVSVESKLNGFNGFRGVLYAMRNVSSMLLMILLHGLVYCWPETSELVSGGYEGGRMFLGSAARLRQRVAAEMRGAAGPGILLYEFRRARVAVEELRGELEEAEGGVRERVESVRVCFGVLRSGAENIVCQLDDFFDEIVEGRKKLLDFCSHR

SEQ ID NO: 52764 - protein, 282 aa, Glycine max
  peptide (1)..(282): Ceres Seq. ID no. 15177314
MEELERAFLANNSFISLQFLQKVLSLLRSLHTQLTLLVHKLHLPLGDKWLDEYMDETSKLWETSHLLKSAISNFEPFYSQGFNLLSSLDSSHPQVVRAISGCRREALGLEEQNRALMETRVHTLCLRLDERVSVESKLNGFNGFRGVLYAMRNVSSMLLMILLHGLVYCWPETSELVSGGYEGGRMFLGSAARLRQRVAAEMRGAAGPGILLYEFRRARVAVEELRGELEEAEGGVRERVESVRVCFGVLRSGAENIVCQLDDFFDEIVEGRKKLLDFCSHR

SEQ ID NO: 52765 - protein, 229 aa, Glycine max
  peptide (1)..(229): Ceres Seq. ID no. 15177315
MDETSKLWETSHLLKSAISNFEPFYSQGFNLLSSLDSSHPQVVRAISGCRREALGLEEQNRALMETRVHTLCLRLDERVSVESKLNGFNGFRGVLYAMRNVSSMLLMILLHGLVYCWPETSELVSGGYEGGRMFLGSAARLRQRVAAEMRGAAGPGILLYEFRRARVAVEELRGELEEAEGGVRERVESVRVCFGVLRSGAENIVCQLDDFFDEIVEGRKKLLDFCSHR

SEQ ID NO: 52766 - DNA, 1598 bp, Glycine max
  misc_feature (1)..(1598): Ceres Seq. ID no. 15170497
taatttgtgactctctttcgtttctcatcagagacttacacagtccaatttccaaaccgaatcgagtttaaatttgaatttcattttcaacttccctgtgatgccttacacggtccgagagaacctctcgatcgggaacatcggcgacgcggcggagattctcgaaaacggcgccgctcagagcgtgacgcacatcctctccgtcctcagctccgcctctatctccttcttctccgaatggaaaaccactctctccatccccgccatggagatcaccaaagtccacgtggcggacgccgccgccaaatcggctctcccgccggagaagctcctctactcgctcgagtacgccggccgcgacctcaagctcgtgcgcatggccgtgcctctcagagacaccgagaaagatgacttgctcgattacttggaagtctgcatcgatttcattgatcgcggtcggaaggaaggttccgttctcgttcactgtttcgccggagtttccagaagcgcggcgattattacggcgtatttgatgagaaccgaacgtctatctgtagaagatgcccttgaatcgttgaggcagagctgtgaatttgtttgtcccaatgatggttttcttgagcagttgaaaatgtttgaggggatgggtttcaaggttgatcactccagccctatatacaagcgctttcgtctaaaaatactatatgaaaatcatttctcagggttgaggatagacagttccaaacttggtgcagatcctggcatgcctgttgaaatttcttcagaggcagaagaaactactaaagttgaaaataatcatagtcctacatatcgctgtaagaagtgccgacgacttgttgcattgcaagaacatgtcatagaccatgttcctggtgagggtgagagagcctttgagttccacaaacggagaggtggcaaccctttcaacaaatctgatgaatttgagtgttcatctgtatttattgagcctctacggtggatgaaagctgttgaggaaggtgcaatggagggaaagctgtcctgtgctcattgtgatgcccgtttgggatacttcaattggtcaggcatacaatgcagctgcggaagctggataactccagcttttcaactccacaaaagctggatagatgtgagtcccatgtaatcattgttgcgccattttatgcctaagggatgccactgccaaattctttgtcattgtttttggacttatattctgctcaaattctccaagctggtccactgccaacaatgaagttgtggaaggaaggaatggagtcttgctcttttgacatgctcaagttttccaggctgaactaatgcagttatatggaagggaggattattatagttttacactttttgtgcttcttccagaatgactttttggagctgtgattgtagattattactgctttctagtaaatggtgaagcatgagttaggattccaatattagggcttgttccctcgatgattctaccgtaagcaaccataatatttgtttcgtcaaaagaaaatgagtgttctccattgtaccttcttctattattctcaatatacaaatttttttcttac

SEQ ID NO: 52767 - protein, 354 aa, Glycine max
  peptide (1)..(354): Ceres Seq. ID no. 15170498
MPYTVRENLSIGNIGDAAEILENGAAQSVTHILSVLSSASISFFSEWKTTLSIPAMEITKVHVADAAAKSALPPEKLLYSLEYAGRDLKLVRMAVPLRDTEKDDLLDYLEVCIDFIDRGRKEGSVLVHCFAGVSRSAAIITAYLMRTERLSVEDALESLRQSCEFVCPNDGFLEQLKMFEGMGFKVDHSSPIYKRFRLKILYENHFSGLRIDSSKLGADPGMPVEISSEAEETTKVENNHSPTYRCKKCRRLVALQEHVIDHVPGEGERAFEFHKRRGGNPFNKSDEFECSSVFIEPLRWMKAVEEGAMEGKLSCAHCDARLGYFNWSGIQCSCGSWITPAFQLHKSWIDVSPM

SEQ ID NO: 52768 - protein, 299 aa, Glycine max
  peptide (1)..(299): Ceres Seq. ID no. 15170499
MEITKVHVADAAAKSALPPEKLLYSLEYAGRDLKLVRMAVPLRDTEKDDLLDYLEVCIDFIDRGRKEGSVLVHCFAGVSRSAAIITAYLMRTERLSVEDALESLRQSCEFVCPNDGFLEQLKMFEGMGFKVDHSSPIYKRFRLKILYENHFSGLRIDSSKLGADPGMPVEISSEAEETTKVENNHSPTYRCKKCRRLVALQEHVIDHVPGEGERAFEFHKRRGGNPFNKSDEFECSSVFIEPLRWMKAVEEGAMEGKLSCAHCDARLGYFNWSGIQCSCGSWITPAFQLHKSWIDVSPM

SEQ ID NO: 52769 - protein, 262 aa, Glycine max
  peptide (1)..(262): Ceres Seq. ID no. 15170500
MAVPLRDTEKDDLLDYLEVCIDFIDRGRKEGSVLVHCFAGVSRSAAIITAYLMRTERLSVEDALESLRQSCEFVCPNDGFLEQLKMFEGMGFKVDHSSPIYKRFRLKILYENHFSGLRIDSSKLGADPGMPVEISSEAEETTKVENNHSPTYRCKKCRRLVALQEHVIDHVPGEGERAFEFHKRRGGNPFNKSDEFECSSVFIEPLRWMKAVEEGAMEGKLSCAHCDARLGYFNWSGIQCSCGSWITPAFQLHKSWIDVSPM

SEQ ID NO: 52770 - DNA, 900 bp, Glycine max
  misc_feature (1)..(900): Ceres Seq. ID no. 15176955
aaagaaaaccctacattacgtagagcttcgtctctccatcgaatccagcaacgacgacgatgatgatctctcgtcgattagcttccagattccttaaaccctcgtcttcctcatccctaagcatctcccttcaccatctccactcttcttcttccataagaaaccatttgatccacagatcagaacagcttcaagagctgggtctctttagatccttctctgctttcatcaccaatcccaacaccgagaagcttcgatctcagacacgatcaacgaggtacttctcaacaccgagccaagaggtcaatccgaatccagaggaggagccaaagatgaagcaccaggagatcgaaggcccgacggtggagcgcgacgtgtcggctttaggtaacgagacgagaaaagtgttcgaagggatgatgaagaacatgtacagtctaagtggagccatgggtcttctcggtttgactcagttagtcgtggggggaacgattatgtacgcgacgcgtttgaatccgatgcatgtgatgacgatgcagagctgtatagcgttcggattcccgttcgcgatggcgttgatggtgagacgctcgttgaagccgatgtatttcttcaagaagatggaggaagcggggaggttgcagatcctgactttgactcttcaggttgcgaagaatctcaatgtcttgttcgttagagcacgtgttgtgtccatcttgtgcgttgccgggttgtcttgcggcaatctatacctcctgttgtctccatgaaaatggaacatttttttattgtctttttttttttaatatccatacaaatggaaccataatgtcatcaataaggaaggaaaacgaaatgagaaaatccgagaaggcagattcttgcttctgttttttgatc

SEQ ID NO: 52771 - protein, 236 aa, Glycine max
  peptide (1)..(236): Ceres Seq. ID no. 15176956
MMISRRLASRFLKPSSSSSLSISLHHLHSSSSIRNHLIHRSEQLQELGLFRSFSAFITNPNTEKLRSQTRSTRYFSTPSQEVNPNPEEEPKMKHQEIEGPTVERDVSALGNETRKVFEGMMKNMYSLSGAMGLLGLTQLVVGGTIMYATRLNPMHVMTMQSCIAFGFPFAMALMVRRSLKPMYFFKKMEEAGRLQILTLTLQVAKNLNVLFVRARVVSILCVAGLSCGNLYLLLSP

SEQ ID NO: 52772 - protein, 235 aa, Glycine max
  peptide (1)..(235): Ceres Seq. ID no. 15176957
MISRRLASRFLKPSSSSSLSISLHHLHSSSSIRNHLIHRSEQLQELGLFRSFSAFITNPNTEKLRSQTRSTRYFSTPSQEVNPNPEEEPKMKHQEIEGPTVERDVSALGNETRKVFEGMMKNMYSLSGAMGLLGLTQLVVGGTIMYATRLNPMHVMTMQSCIAFGFPFAMALMVRRSLKPMYFFKKMEEAGRLQILTLTLQVAKNLNVLFVRARVVSILCVAGLSCGNLYLLLSP

SEQ ID NO: 52773 - protein, 145 aa, Glycine max
  peptide (1)..(145): Ceres Seq. ID no. 15176958
MKHQEIEGPTVERDVSALGNETRKVFEGMMKNMYSLSGAMGLLGLTQLVVGGTIMYATRLNPMHVMTMQSCIAFGFPFAMALMVRRSLKPMYFFKKMEEAGRLQILTLTLQVAKNLNVLFVRARVVSILCVAGLSCGNLYLLLSP

SEQ ID NO: 52774 - DNA, 1633 bp, Glycine max
  misc_feature (1)..(1633): Ceres Seq. ID no. 15170501
aaggcgccgttgtagttgtagctgtagaagggtgagagaagatgtttcctcaggagaatcatagtaacggctatcagcatcagcagggttacagtcacagagagcgagtccgtcggggcacttgcaggtcacgtgcctccacttcctcacactctcactccgttagggtttacgaccaacctcgtcctccttgcactgatttcgacgtcgcctatttccattcctacgctcaccttggcatccaccaagagatgatcaaggatcgtgtgcgtactgatacttatagggatgcaatcatgcagcatcagagtttcattgcaggcaaagttgtcgttgatgttggatgcggtacaggaatcctttctatattttgtgctcaggctggtgcaaaacgggtgtatgcaattgatgccagtgacattgccctgcaggatgttgaaattaatgaagaagtggatgttataatttccgaatggatgggctatatgcttctgtatgagagcatgcttggaagtgttattaatgctagagatcgttggctcaaacctggtggtcttattcttccttcaagttcaacgttgtacatggctcctgtcactcatacggacagatacagtgacagtgttgacttctggcgcaatgtttatggaattgatatgtctgccatggtatcactggctaaacaatgcgcatttgaagaaccttccgtggagactataactggtgaaaatgtcttgacatggccacatgtggtaaaatatattgatagttattctgttaccatccaagagttagaatctgtaacagccaagtttaagttcaattccatgatgcgagcaccactgcatggttttgcattttggtttgacgttgaatttaatgggcatgcaataccatcaaccaattatcattcgacaacttcatttgttgacaatcatcagatgaatggtagtcagagaaaaaggcgaacaaacccaaatgaagcactggtcttgtccactgcacctgaggaccctcctacacattggcagcagacattgatatacttttacgatcctatagagctggaacaagatcaactaattgaaggtttggtaacattgtcacagagcaaagaaaatgctcgatttatgaatattcaccttgaatatacttcaggtggtcgatcttatgtgaaagagtctgttatgagatgatcttttcttgtattttggcattgtcttttgcattagcacttgcacaacattctctgattgcagcttatatcttttctgacttcgtttctcctggagaactgaggtagcagtttggttcttgaaaatcattaatctctgcttgctagattagaatggagcaactgacgaacatgttagcatagagttaggtaaatcccatgaaattttgttgtaatttacttgatataacacatcattgaggcggattatttaagttataatttgtcctttctaaagcctttattgtggggccgaatcgtttcaattttttcttggagtcttactgtaacatagagctgttttcgaagcatattcttgtcgaatttattttatgttcgttaaaaagtggtgtactgactatccctcatattttcatatatacatcggccattttcctg

SEQ ID NO: 52775 - protein, 384 aa, Glycine max
  peptide (1)..(384): Ceres Seq. ID no. 15170502
MFPQENHSNGYQHQQGYSHRERVRRGTCRSRASTSSHSHSVRVYDQPRPPCTDFDVAYFHSYAHLGIHQEMIKDRVRTDTYRDAIMQHQSFIAGKVVVDVGCGTGILSIFCAQAGAKRVYAIDASDIALQDVEINEEVDVIISEWMGYMLLYESMLGSVINARDRWLKPGGLILPSSSTLYMAPVTHTDRYSDSVDFWRNVYGIDMSAMVSLAKQCAFEEPSVETITGENVLTWPHVVKYIDSYSVTIQELESVTAKFKFNSMMRAPLHGFAFWFDVEFNGHAIPSTNYHSTTSFVDNHQMNGSQRKRRTNPNEALVLSTAPEDPPTHWQQTLIYFYDPIELEQDQLIEGLVTLSQSKENARFMNIHLEYTSGGRSYVKESVMR

SEQ ID NO: 52776 - protein, 314 aa, Glycine max
  peptide (1)..(314): Ceres Seq. ID no. 15170503
MIKDRVRTDTYRDAIMQHQSFIAGKVVVDVGCGTGILSIFCAQAGAKRVYAIDASDIALQDVEINEEVDVIISEWMGYMLLYESMLGSVINARDRWLKPGGLILPSSSTLYMAPVTHTDRYSDSVDFWRNVYGIDMSAMVSLAKQCAFEEPSVETITGENVLTWPHVVKYIDSYSVTIQELESVTAKFKFNSMMRAPLHGFAFWFDVEFNGHAIPSTNYHSTTSFVDNHQMNGSQRKRRTNPNEALVLSTAPEDPPTHWQQTLIYFYDPIELEQDQLIEGLVTLSQSKENARFMNIHLEYTSGGRSYVKESVMR

SEQ ID NO: 52777 - protein, 299 aa, Glycine max
  peptide (1)..(299): Ceres Seq. ID no. 15170504
MQHQSFIAGKVVVDVGCGTGILSIFCAQAGAKRVYAIDASDIALQDVEINEEVDVIISEWMGYMLLYESMLGSVINARDRWLKPGGLILPSSSTLYMAPVTHTDRYSDSVDFWRNVYGIDMSAMVSLAKQCAFEEPSVETITGENVLTWPHVVKYIDSYSVTIQELESVTAKFKFNSMMRAPLHGFAFWFDVEFNGHAIPSTNYHSTTSFVDNHQMNGSQRKRRTNPNEALVLSTAPEDPPTHWQQTLIYFYDPIELEQDQLIEGLVTLSQSKENARFMNIHLEYTSGGRSYVKESVMR

SEQ ID NO: 52778 - DNA, 1382 bp, Glycine max
  misc_feature (1)..(1382): Ceres Seq. ID no. 15176803
ctctacaaaacacacgccaccaccctattcctgcctctccactcctcccctctcccctcctcttctcttctctccactgcccaacttttgctatagacaagaaagaacctaagctaggtagctttcctccagagcagagcaatggccatgcatcctcttgcccaggggcacccgcaagcctggccatggggggtagccatgtacacgaacatacactaccaccaccagtacgagagagagcacctgttcgagaaatccttgacgcccagtgacgtgggcaagctcaacaggctggtgatccccaagcagcacgcggagaggtacttccccctcaacggcggagactcccccggtgacaaggacctgctcctgtctttcgaggacgaggccggcaagccgtggcggttccggtactcgtactggacgagcagccagagctacgttctcaccaagggctggagcaggtacgtcaaggagaagcagcttgacgccggagacatcgtgcacttcgagagggtgcgcggccttggcacaggcgaccggctcttcatccactgcaggcgccgtggcgagagcgcgccgccaccacctgtccgcgtacctccgcccgctctgaacgccggggagcagcagccttggagcccgatgtgctatagcacatcaggatcataccctaccagccctgccaactcccatgcctatcgccgctccgtggagcaagatcacagcgagatgctgcatgcaggtgactcgccgagagaggcagacgccaagagcagcacggcatcggggccgccgtcgagacgtctacggctgtttggcgtcaacctcgactgcggtccggagccagaggcagaggcagcaacgccaatgtacggctacacccaccagagcccctacgctgcagcagtggccacggtgccaacttactggggcagttcataagatggtgaggtctgaagccatgctcgagtatcctaacaaccagcagtgaaactagtcactactcccaccagccagcctactagctatgctactctggactgagtgacaggcttgaattgaaccctggaagaggaagtggaagtggaagatcccttgtttcccgggcaatcttccttccatccacagagtgccctttttttttcctgttttctttcttctggtcttccagagaccctattcgatcacagtacggggcccttagcaggtggcaggtttcaggaaacgtcaggttgaaaaggtgagggaagtgggagagatagagggatggtgacacacatgaaaaacaaaagggcatgcttagcaagcatgcatgtatgtatgtgtcatctgtatgtactgggtccaagaacaaaccatgaagttgatgtatcctctcc

SEQ ID NO: 52779 - protein, 267 aa, Glycine max
  peptide (1)..(267): Ceres Seq. ID no. 15176804
MAMHPLAQGHPQAWPWGVAMYTNIHYHHQYEREHLFEKSLTPSDVGKLNRLVIPKQHAERYFPLNGGDSPGDKDLLLSFEDEAGKPWRFRYSYWTSSQSYVLTKGWSRYVKEKQLDAGDIVHFERVRGLGTGDRLFIHCRRRGESAPPPPVRVPPPALNAGEQQPWSPMCYSTSGSYPTSPANSHAYRRSVEQDHSEMLHAGDSPREADAKSSTASGPPSRRLRLFGVNLDCGPEPEAEAATPMYGYTHQSPYAAAVATVPTYWGSS

SEQ ID NO: 52780 - protein, 265 aa, Glycine max
  peptide (1)..(265): Ceres Seq. ID no. 15176805
MHPLAQGHPQAWPWGVAMYTNIHYHHQYEREHLFEKSLTPSDVGKLNRLVIPKQHAERYFPLNGGDSPGDKDLLLSFEDEAGKPWRFRYSYWTSSQSYVLTKGWSRYVKEKQLDAGDIVHFERVRGLGTGDRLFIHCRRRGESAPPPPVRVPPPALNAGEQQPWSPMCYSTSGSYPTSPANSHAYRRSVEQDHSEMLHAGDSPREADAKSSTASGPPSRRLRLFGVNLDCGPEPEAEAATPMYGYTHQSPYAAAVATVPTYWGSS

SEQ ID NO: 52781 - protein, 248 aa, Glycine max
  peptide (1)..(248): Ceres Seq. ID no. 15176806
MYTNIHYHHQYEREHLFEKSLTPSDVGKLNRLVIPKQHAERYFPLNGGDSPGDKDLLLSFEDEAGKPWRFRYSYWTSSQSYVLTKGWSRYVKEKQLDAGDIVHFERVRGLGTGDRLFIHCRRRGESAPPPPVRVPPPALNAGEQQPWSPMCYSTSGSYPTSPANSHAYRRSVEQDHSEMLHAGDSPREADAKSSTASGPPSRRLRLFGVNLDCGPEPEAEAATPMYGYTHQSPYAAAVATVPTYWGSS

SEQ ID NO: 52782 - DNA, 1696 bp, Glycine max
  misc_feature (1)..(1696): Ceres Seq. ID no. 15170442
aaattcggcttcagcatctctcatcctctctctacttctcaaagaaagacgcacgcagcgttctaaaaccctaattgggtatatgcaaagagggctttgtagcatgtgcttaaggtatgttttaaacattgcttgtttaattgtcatggtggcattgtgatgcaaaatgtgtgtgagctcatactgagaaggagctcatctgctaagtccatttgaagaggatgtatggaagggcatcatcaggtcttgataggtttaagaaggctcagaccttggaaccattctctgttgctgtcaacgcttcttccagaaatggtgcccaaccctctagtaaagtagttggccattcatctgctttgcctccacaggctcaggcttcttccaaccaatcccaacaacatgcatttcagaagactgtaggagtggaggcagccccgttgttggggcagaatcagcaggtgactcaggttgggggagggcagtcgacgtggcagccgccggattgggcgatcgagccaaggtcaggtgttttttacctggaggttttgaaggatggccaggtgctagaccggattaatctggacagacgaaggaatatctttgggaggcaaatccagacttgtgattttgtgcttgatcatcagtctgtctctcgccaacatgctgctgttattcctcacaagaatgggagcatatatgtaattgatttgggatctgcacatggtacatttgttgcaaatgagcggttgaccaaggatttgccagttgagcttgaagtgggacaatcattgcgatttgctgcatcaacaagagcatacatattaagaaagaatgatgcagctcttttccctcggcctccaccacctacagagattaatttcccaccgcctcctgacccatctgatgaagaagctgttgtagcttataatacgctactgaatcgttatggcatcaacaaggctgatttagtgtccaaatctggtgagtctggtagttcggtaagtggcaaaaataaagattaccaaactgaaagaccatctaagagaattaggaaaacaagagtttccttcagggatcaagttgggggagagttagttgaggttgttggaatttcagatggtgcagatgtagaaacagaacctggtccagttggtgttaaagaaggaagtctagtcggtaaatatgaatctcttgtacagattactgtaataccaaaggggaaagagcagtcctctgtcaaggaggcagattcatccccaaaaggtgtgactgataaactacaagaagtattgaaaaagatcaaaaccccagtcaaaactgggatttatgatgacctatatggagaatcgttatctgtcaaagttggatcttcctgggcatattcacctgcactcagtactggtgaacgatctccagataaggaggatggtgcggggagcggaaagtcacctgttgatggagatgatgatgatttatttgggtgactattcaacttatgcagactgggttgtgagataaatttgtagtagttctgtatgagtttaacatcatagggagttgaaaacatgcaaatggagttaattgttccaacgaatccataattgttgatgttttcctctgcatgcccccaccccccttacactaaaagacagcaggttcatggttaaacgatgtgttatccttgtatggacccatt

SEQ ID NO: 52783 - protein, 420 aa, Glycine max
  peptide (1)..(420): Ceres Seq. ID no. 15170443
MYGRASSGLDRFKKAQTLEPFSVAVNASSRNGAQPSSKVVGHSSALPPQAQASSNQSQQHAFQKTVGVEAAPLLGQNQQVTQVGGGQSTWQPPDWAIEPRSGVFYLEVLKDGQVLDRINLDRRRNIFGRQIQTCDFVLDHQSVSRQHAAVIPHKNGSIYVIDLGSAHGTFVANERLTKDLPVELEVGQSLRFAASTRAYILRKNDAALFPRPPPPTEINFPPPPDPSDEEAVVAYNTLLNRYGINKADLVSKSGESGSSVSGKNKDYQTERPSKRIRKTRVSFRDQVGGELVEVVGISDGADVETEPGPVGVKEGSLVGKYESLVQITVIPKGKEQSSVKEADSSPKGVTDKLQEVLKKIKTPVKTGIYDDLYGESLSVKVGSSWAYSPALSTGERSPDKEDGAGSGKSPVDGDDDDLFG

SEQ ID NO: 52784 - DNA, 1005 bp, Glycine max
  misc_feature (1)..(1005): Ceres Seq. ID no. 15176306
atgcacagtcacctcgtaagcaagcagctgctacagcctcaacaatcaaaccttgattcgacatggcgaagtcgcccatggcgatcttggctctcgggctagcagcactagtcctatccggcgccgggctggtggccgcgcagaactgcggctgccagccgaacgagtgctgcagcaagtacggttattgcgggaccgatgccagctactgcggacaagattgtcggtcgggcccgtgcacggcgagcggcggcgggagcggcgatcccgtggagagcgtcgtcaccgacgcgttctttgacgggatcaagtcccaggccgccgacgggtgccccgggaagagcttttacacgcgccagtttttcctggacggcgcccaggcgaaccccgacttcggcaaaggcagcaccagcgacgacggcaagagggagatagccgccttcttcgcccacttcacccacgagaccggacacatgtgctccatcgaggagaacgaaggggcgagcaaggattactgcgacgagacgaacacgcaatggccgtgtaccccggggaaggcgtactacgggcgcgggccgctgcagctgtcgtggaactacaactacggggcggccggtgagagcaccgggttcgacgggctcaacagcccggagacggtggcgcaggaccaggcgctaacgttcaaggcggcgttctggttctggatgaccaacgtgcaccaggccgtgcccagtgggttcggcgcgacgaccagggcaatcaacggtgacgtggagtgcgacggcaagaagccagacttggtgagcgcgcgggcgggctactacacggactactgccagcagttcggcgtcgacccagggaacaacctcacttgctaggtgcttggttctgaattgatcgacgcgcaaaaacctttctggcgatgctcctactgctctacctccctgtgtattctgggatatctatatatcctgtatacgtaataaatttacatctctgtattcg

SEQ ID NO: 52785 - protein, 271 aa, Glycine max
  peptide (1)..(271): Ceres Seq. ID no. 15176307
MAKSPMAILALGLAALVLSGAGLVAAQNCGCQPNECCSKYGYCGTDASYCGQDCRSGPCTASGGGSGDPVESVVTDAFFDGIKSQAADGCPGKSFYTRQFFLDGAQANPDFGKGSTSDDGKREIAAFFAHFTHETGHMCSIEENEGASKDYCDETNTQWPCTPGKAYYGRGPLQLSWNYNYGAAGESTGFDGLNSPETVAQDQALTFKAAFWFWMTNVHQAVPSGFGATTRAINGDVECDGKKPDLVSARAGYYTDYCQQFGVDPGNNLTC

SEQ ID NO: 52786 - protein, 266 aa, Glycine max
  peptide (1)..(266): Ceres Seq. ID no. 15176308
MAILALGLAALVLSGAGLVAAQNCGCQPNECCSKYGYCGTDASYCGQDCRSGPCTASGGGSGDPVESVVTDAFFDGIKSQAADGCPGKSFYTRQFFLDGAQANPDFGKGSTSDDGKREIAAFFAHFTHETGHMCSIEENEGASKDYCDETNTQWPCTPGKAYYGRGPLQLSWNYNYGAAGESTGFDGLNSPETVAQDQALTFKAAFWFWMTNVHQAVPSGFGATTRAINGDVECDGKKPDLVSARAGYYTDYCQQFGVDPGNNLTC

SEQ ID NO: 52787 - DNA, 1304 bp, Glycine max
  misc_feature (1)..(1304): Ceres Seq. ID no. 15176333
atgctctccccgccccttccaggacaagaagaagcccttcgatcgtccggtctagctgtttctgcttatcgatatctggtttatcgcagcagtttggagctgtcggattcgagtagctagcttagctctacaatcgagcgagaagaaggatcgaggagatgagcggcggcggcggcggaggatcggcggcgacgcaggggcagcaggatctgcagctgccgccggggttcagattccatccgacggacgaggagctggtgatgcactacctgtgccggcggtgcgccggcctgcccatctccgtgcccatcatcgccgaggtcgacctctacaagttcgacccatggcagctcccgagaatggcgctctacggcgagaaggagtggtacttcttctccccgcgcgaccgcaagtacccgaacgggtcgcggccgaaccggtcggccggcacgggctactggaaggccaccggcgccgacaagccggtgggcacgcccaagcccctggccatcaagaaggcgctcgtcttctatgccgggaaggcgcccaagggcgacaagaccaactggatcatgcacgagtaccgcctcgccgacgtcgaccgctccgcccgcaagaagaacagcctcaggttggatgactgggtgctttgccggatctacaacaagaaaggcgcctcggagaggccgagcgccggtgaccggaccgcgagcgcgagccccgggcacgcggccgtcggctcgccgccggagcagaaaccggccctgctgccgccatacgcgccgcagccgttctcggacctggcggcgtactacgaggtgaggccgtcggactcgatgccgcgggcgcacgcggactcgagctgctcggaacacgtgctgacggcgtcgtgcgagcggccggaggtgcagagccagcccaagatctccgagtgggagcgcacgttcgccacagccaccccgggcgtcaacccggccggcttgatgctcgacccggcggccgggctccccgccggcgacccgctcctccaggacatcctcatgtactggggcaagccgttctgagaatccggctccgtggctgtacgtgtggtttggcgctgggatgaaatcgatcggggtagcggccggaatctatcggcaggagatactcatagccgttggatggaagatatcagtagtgcacaaggagtcacggacggcggcgatgagacgcgggagccccggtgtgttcgaggagggacgcagagagtactcttggtgtatacggatttgaactaagctgtgtatatgcgattgatttgg

SEQ ID NO: 52788 - protein, 301 aa, Glycine max
  peptide (1)..(301): Ceres Seq. ID no. 15176334
MSGGGGGGSAATQGQQDLQLPPGFRFHPTDEELVMHYLCRRCAGLPISVPIIAEVDLYKFDPWQLPRMALYGEKEWYFFSPRDRKYPNGSRPNRSAGTGYWKATGADKPVGTPKPLAIKKALVFYAGKAPKGDKTNWIMHEYRLADVDRSARKKNSLRLDDWVLCRIYNKKGASERPSAGDRTASASPGHAAVGSPPEQKPALLPPYAPQPFSDLAAYYEVRPSDSMPRAHADSSCSEHVLTASCERPEVQSQPKISEWERTFATATPGVNPAGLMLDPAAGLPAGDPLLQDILMYWGKPF

SEQ ID NO: 52789 - protein, 267 aa, Glycine max
  peptide (1)..(267): Ceres Seq. ID no. 15176335
MHYLCRRCAGLPISVPIIAEVDLYKFDPWQLPRMALYGEKEWYFFSPRDRKYPNGSRPNRSAGTGYWKATGADKPVGTPKPLAIKKALVFYAGKAPKGDKTNWIMHEYRLADVDRSARKKNSLRLDDWVLCRIYNKKGASERPSAGDRTASASPGHAAVGSPPEQKPALLPPYAPQPFSDLAAYYEVRPSDSMPRAHADSSCSEHVLTASCERPEVQSQPKISEWERTFATATPGVNPAGLMLDPAAGLPAGDPLLQDILMYWGKPF

SEQ ID NO: 52790 - protein, 234 aa, Glycine max
  peptide (1)..(234): Ceres Seq. ID no. 15176336
MALYGEKEWYFFSPRDRKYPNGSRPNRSAGTGYWKATGADKPVGTPKPLAIKKALVFYAGKAPKGDKTNWIMHEYRLADVDRSARKKNSLRLDDWVLCRIYNKKGASERPSAGDRTASASPGHAAVGSPPEQKPALLPPYAPQPFSDLAAYYEVRPSDSMPRAHADSSCSEHVLTASCERPEVQSQPKISEWERTFATATPGVNPAGLMLDPAAGLPAGDPLLQDILMYWGKPF

SEQ ID NO: 52791 - DNA, 1327 bp, Glycine max
  misc_feature (1)..(1327): Ceres Seq. ID no. 15170536
ataaaaaaaaggacaacttcaaaggaggacttttgacaatttagtcaacttcttcaatcttaggcccagcaccaccagtggatgattttccatagccagcaccattaggaatgtcatctgcaccacttccttggtacatgtttgagataattgggttgcaaagtccctccaactccttcaatttgtcctgaaattcctcaacctcagtcagtaggttcctatctagccactcaatggtctcatcaaccgccttctctatcttctccttatcagaagggttcattttgcctgcaaacttgtcatccttcacagtattcctcatgttgtacgccaagttctccaaggagttcttggcgtccaccttcttcttcacctcctcgtcctctgccttgtacctctccgcctcctggaccatcttctcaatctcctccttgctcagccttcccttatcattagtgatcgtgatcttgtggtcttatcctcaaaataccattggcgtcaatgtcaaagcacacattgatctgtggaactcctcttggtgctgaagggatgcctgtgagttcaaacttccctaaaagattgttgtctttggtgcttgccctctcgccttcatacacctgaattagcactcctggctgattatcagcataagttgagaaaatctgttccttcttggtgggaatggttgtgttccttggaatcaacactgtcatcacacctcctgcagtctcaatgccgaggctaagaggagtgacatcaagcagaagcaagtcctgaaccttctcgttcccttcaccgctcaaaatcgcagcctgcacagcagccccataggctacagcctcatccgggttaatgctcttgcaaagctctttgccattgaagaaatcctgcaacagttgttgcacttttggaatcctggtggatccaccaacaaggacaacatcgtgaacgtgtccatgttgagctcctcaaacctggctctggtgatggtggaatagaagtcaataccttcgtagagagagtcaatctcgatggtagtttgagtggtggaagagagagtcctcttagccctctctcgcatgcagtcctcaatctcctaagtgctctggcattagtgctgacatccttcttgtgtttcctcttgaactcagacacgaagtggttcacaagcctgttattaagaaaatggttagtccatagttcagttaaaaaacagttcactgcattgaattaaattaaattgtttactaaactgaactgtttctatgtactggtatgcaaaagaaacattagaagaagaaagaatcttatatcatttggtttagtc

SEQ ID NO: 52792 - protein, 103 aa, Glycine max
  peptide (1)..(103): Ceres Seq. ID no. 15170537
MVSSTAFSIFSLSEGFILPANLSSFTVFLMLYAKFSKEFLASTFFFTSSSSALYLSASWTIFSISSLLSLPLSLVIVILWSYPQNTIGVNVKAHIDLWNSSWC

SEQ ID NO: 52793 - protein, 74 aa, Glycine max
  peptide (1)..(74): Ceres Seq. ID no. 15170538
MLYAKFSKEFLASTFFFTSSSSALYLSASWTIFSISSLLSLPLSLVIVILWSYPQNTIGVNVKAHIDLWNSSWC

SEQ ID NO: 52794 - DNA, 1087 bp, Glycine max
  misc_feature (1)..(1087): Ceres Seq. ID no. 15170454
aactactccgtcactttgtttgcaaagctcctcctcgatccatcgatcactgcaccggccggcggcaccgcgctcgcaggggctagccaacgagacggcagcaatggcggaccgtgaccgcagcggcatctacggcggcgcccacgccacctacgggcagcagcagcagcagggaggaggcgggcgcccgatgggtgagcaggtgaagggcatgctccacgacaaggggccgacggcgtcgcaggcgctgacggtggtgacgctgttcccgctgggcgggctgctgctggtgctgtcggggctggcgctgacggcctccgtggtggggctggccgtggccacgccggtgttcctgatcttcagccccgtgctcgtccccgccgcgctgctcatcgggacggccgtcatggggttcctcacgtcgggcgcgctggggctcgggggcctgtcctcgctcacgtgcctcgccaacacggcgcggcaggcgttccagcgcaccccggactacgtggaggaggcgcaccgcaggatggcggaggccgcggcgcacgcgggccacaagaccgcgcaggcaggccaggccatccagggcagggcgcaggaggccggcgccgggggaggtgcaggtgccggcgctggcggcggcggcagggcttcctcgtaagcaagtcatccatgcatggattatggatagatgcgcgcgtgcgtgtctatcagtatcagcagccagcagggtcgtcgcggaatgctgtgttcctgtacgtgtgggtgaccgtccttccgtccttcgtctttctccccccgagtgtgtgttacgtatgtcctggtattcgtcgtgtgtgttcatcgccgctccagttgaattccggtgtctgttcatcgccgctccaggtcgtagatgtgaatatactttgctaggggaataagtgataagtctgtctggaaggtaatgtttgagctttgctagtgtggctgggcactctggtcactggttgtgttgtgcatgcatcagctgtatgatcgtcgtctgttgtggaaaattggtcaatgtattctcttgctgaataatttgtgacatctaattgtt

SEQ ID NO: 52795 - protein, 220 aa, Glycine max
  peptide (1)..(220): Ceres Seq. ID no. 15170455
TTPSLCLQSSSSIHRSLHRPAAPRSQGLANETAAMADRDRSGIYGGAHATYGQQQQQGGGGRPMGEQVKGMLHDKGPTASQALTVVTLFPLGGLLLVLSGLALTASVVGLAVATPVFLIFSPVLVPAALLIGTAVMGFLTSGALGLGGLSSLTCLANTARQAFQRTPDYVEEAHRRMAEAAAHAGHKTAQAGQAIQGRAQEAGAGGGAGAGAGGGGRASS

SEQ ID NO: 52796 - protein, 186 aa, Glycine max
  peptide (1)..(186): Ceres Seq. ID no. 15170456
MADRDRSGIYGGAHATYGQQQQQGGGGRPMGEQVKGMLHDKGPTASQALTVVTLFPLGGLLLVLSGLALTASVVGLAVATPVFLIFSPVLVPAALLIGTAVMGFLTSGALGLGGLSSLTCLANTARQAFQRTPDYVEEAHRRMAEAAAHAGHKTAQAGQAIQGRAQEAGAGGGAGAGAGGGGRASS

SEQ ID NO: 52797 - protein, 157 aa, Glycine max
  peptide (1)..(157): Ceres Seq. ID no. 15170457
MGEQVKGMLHDKGPTASQALTVVTLFPLGGLLLVLSGLALTASVVGLAVATPVFLIFSPVLVPAALLIGTAVMGFLTSGALGLGGLSSLTCLANTARQAFQRTPDYVEEAHRRMAEAAAHAGHKTAQAGQAIQGRAQEAGAGGGAGAGAGGGGRASS

SEQ ID NO: 52798 - DNA, 1191 bp, Glycine max
  misc_feature (1)..(1191): Ceres Seq. ID no. 15170465
atatatttctaactaattgtgcttatccttattgagagaaaaaatggccaaatcaatcaaattctttgagttgaacacaggggccaagattccttctcttgggttagggacttggcaagctgaacctggtgttgtagctgaagctctcaccacagccattcaggttggatacaggcatattgactgtgctagtgcgtataagaatcaagcagagattggttctgctcttaagaagctttttgatgatggtgtggtgaagcgtgaggacttatggatcacttccaaactctggtgttcagatcatgcaccagaagatgtgccaaaagcattggataaaacattacaggaattgcaacttgactatcttgacctctatctgatccactggccagtccgcatgaaaagtggaacatttggattcaataaagaatatcttgagcaaccagacattcccaatacatggagagcaatggaggcactctatgactcagacaaggctagagccataggagtgagcaatttctcttcaaagaagcttcaagatttgttagatatagcaagagtggttcctgctgttaaccaagtggaattgcacccaggatggcagcagccaaagttgcgcgcattttgtgaatctaaagaaattcatctatctggatattctccactaggttcaccagcagctctcaaaagtgatattcttaagaatcctgttgtcacagagattgcagagagattggggaagacaccagcacaagttgcccttcgatggggcttgcaagcaggtcatagtgtgcttcctaagagcactaatgagtccagaatcaagggaaattttgatatctttgactggtctattcctcaagatttgatgaccaagatctctgaaattaagcaggaaaggctagttaaggccagtttttttgttcacgagacctatggtgcctataggagcattgaagacttctgggatggtgaactctgagcaatatgcatctttgagacgttgaaaaatacattgctcctagagcaaatttattctgccttatacccactagttgtagtgattcaagtgagattttgagaagtgttactattgatggtaacaccgaataagtagccaagagttatttttcatttaatgattgtatcttttattcaatataataaagtgagttgagtgaatttgac

SEQ ID NO: 52799 - protein, 313 aa, Glycine max
  peptide (1)..(313): Ceres Seq. ID no. 15170466
MAKSIKFFELNTGAKIPSLGLGTWQAEPGVVAEALTTAIQVGYRHIDCASAYKNQAEIGSALKKLFDDGVVKREDLWITSKLWCSDHAPEDVPKALDKTLQELQLDYLDLYLIHWPVRMKSGTFGFNKEYLEQPDIPNTWRAMEALYDSDKARAIGVSNFSSKKLQDLLDIARVVPAVNQVELHPGWQQPKLRAFCESKEIHLSGYSPLGSPAALKSDILKNPVVTEIAERLGKTPAQVALRWGLQAGHSVLPKSTNESRIKGNFDIFDWSIPQDLMTKISEIKQERLVKASFFVHETYGAYRSIEDFWDGEL

SEQ ID NO: 52800 - protein, 195 aa, Glycine max
  peptide (1)..(195): Ceres Seq. ID no. 15170467
MKSGTFGFNKEYLEQPDIPNTWRAMEALYDSDKARAIGVSNFSSKKLQDLLDIARVVPAVNQVELHPGWQQPKLRAFCESKEIHLSGYSPLGSPAALKSDILKNPVVTEIAERLGKTPAQVALRWGLQAGHSVLPKSTNESRIKGNFDIFDWSIPQDLMTKISEIKQERLVKASFFVHETYGAYRSIEDFWDGEL

SEQ ID NO: 52801 - protein, 171 aa, Glycine max
  peptide (1)..(171): Ceres Seq. ID no. 15170468
MEALYDSDKARAIGVSNFSSKKLQDLLDIARVVPAVNQVELHPGWQQPKLRAFCESKEIHLSGYSPLGSPAALKSDILKNPVVTEIAERLGKTPAQVALRWGLQAGHSVLPKSTNESRIKGNFDIFDWSIPQDLMTKISEIKQERLVKASFFVHETYGAYRSIEDFWDGEL

SEQ ID NO: 52802 - DNA, 1462 bp, Glycine max
  misc_feature (1)..(1462): Ceres Seq. ID no. 15176325
actagagcagtggaaaccaactcaaattcactcgcgagcatacacgaacacacgacaaaccgtatagatcagtcgtcgaagccagtgtaagcaaacatgcaaccgcagcaggacgccgccgaggacgtggtcattgtcggcgccggcctcgccggtgtcggcgtcgccctgggactccacaggaagggcgtgcggagcgtggtgctggagtcgtcgccggcgcttcggacgtccggcttcgcgttcatgacatggaccaacgccttccgcgcgcttgacgccctcggcgtcggcgacaagatgaggagccaccacctgcaggttcagggggtgcgcgtcatgtctccgactaccggggaagtggtgcgagagctggatctccgggtgcaaggcaaactgggaccccacgaagcccggtgcgtgcagcgtaacgtgctcctccaggcgctggaggaagagcttccggcagacaccatccgctacaactccaggatcgtctccatcgacgacgacaaagaaggcggtggcgatgccaagatcctccatctcgccgacggttcgatgctccgagcaaaggtgctgatcggttgcgacgggatcaactcagtggtggccaaatggctggggctcgccaagccgctggactcggggcgtagagccacgcgggggcacgtcaagtaccccaatggccacggcttccagcccaagttcatgcagttcagcggcaacggcttccgtgccggcctggtgccctgcggcgacacggacgtgtactggttcctgacgtggtcaccttcctgtccggacgggaaggaggacgttgaccatagcccggcggagatgaagcagttcgtcctggccaagctgcggagcatcaaggcacctgacgaggtgctggaagcggtcgagaggagcgagatgaacgacgtcctcgtggcgcccctgaggtaccgcccgccgctgtcgctcctcttcgggagcatcagcaaggggaacgtgtgcgtcgccggcgacgcgctccaccccacgacgccggacctggcacagggcgcgtgcatcgcgctggaggatgccgtcgtcctcgcgcggtgcctcggcgacgccatggcccgcgatggcgacggcactgagacgatcgaggcggctctgcgccggtacgccgggatccggcggtggaggagcgcgcaggtgatcgcggcgtcctacatggtggggcgtgtgcagcagagcgagcacgccgtggtgagatttgcgcgggacaggctgctgtcaggggtgctcgccaaggggctcctcatgacgccggactacgactgtggcacactttgactgcgaggggtctggttctggcagaagccatttgtaaaggggtctggttcgcgacttatggggctggacgaaagcctgtttttccaccagtgacggtcctatgtatccagttgtacgaatacggctttcaagc

SEQ ID NO: 52803 - protein, 410 aa, Glycine max
  peptide (1)..(410): Ceres Seq. ID no. 15176326
MQPQQDAAEDVVIVGAGLAGVGVALGLHRKGVRSVVLESSPALRTSGFAFMTWTNAFRALDALGVGDKMRSHHLQVQGVRVMSPTTGEVVRELDLRVQGKLGPHEARCVQRNVLLQALEEELPADTIRYNSRIVSIDDDKEGGGDAKILHLADGSMLRAKVLIGCDGINSVVAKWLGLAKPLDSGRRATRGHVKYPNGHGFQPKFMQFSGNGFRAGLVPCGDTDVYWFLTWSPSCPDGKEDVDHSPAEMKQFVLAKLRSIKAPDEVLEAVERSEMNDVLVAPLRYRPPLSLLFGSISKGNVCVAGDALHPTTPDLAQGACIALEDAVVLARCLGDAMARDGDGTETIEAALRRYAGIRRWRSAQVIAASYMVGRVQQSEHAVVRFARDRLLSGVLAKGLLMTPDYDCGTL

SEQ ID NO: 52804 - protein, 360 aa, Glycine max
  peptide (1)..(360): Ceres Seq. ID no. 15176327
MTWTNAFRALDALGVGDKMRSHHLQVQGVRVMSPTTGEVVRELDLRVQGKLGPHEARCVQRNVLLQALEEELPADTIRYNSRIVSIDDDKEGGGDAKILHLADGSMLRAKVLIGCDGINSVVAKWLGLAKPLDSGRRATRGHVKYPNGHGFQPKFMQFSGNGFRAGLVPCGDTDVYWFLTWSPSCPDGKEDVDHSPAEMKQFVLAKLRSIKAPDEVLEAVERSEMNDVLVAPLRYRPPLSLLFGSISKGNVCVAGDALHPTTPDLAQGACIALEDAVVLARCLGDAMARDGDGTETIEAALRRYAGIRRWRSAQVIAASYMVGRVQQSEHAVVRFARDRLLSGVLAKGLLMTPDYDCGTL

SEQ ID NO: 52805 - protein, 342 aa, Glycine max
  peptide (1)..(342): Ceres Seq. ID no. 15176328
MRSHHLQVQGVRVMSPTTGEVVRELDLRVQGKLGPHEARCVQRNVLLQALEEELPADTIRYNSRIVSIDDDKEGGGDAKILHLADGSMLRAKVLIGCDGINSVVAKWLGLAKPLDSGRRATRGHVKYPNGHGFQPKFMQFSGNGFRAGLVPCGDTDVYWFLTWSPSCPDGKEDVDHSPAEMKQFVLAKLRSIKAPDEVLEAVERSEMNDVLVAPLRYRPPLSLLFGSISKGNVCVAGDALHPTTPDLAQGACIALEDAVVLARCLGDAMARDGDGTETIEAALRRYAGIRRWRSAQVIAASYMVGRVQQSEHAVVRFARDRLLSGVLAKGLLMTPDYDCGTL

SEQ ID NO: 52806 - DNA, 997 bp, Glycine max
  misc_feature (1)..(997): Ceres Seq. ID no. 14309384
attcactctccttcatctctctcgctttctctctctttctctggcctctctctctctctcagaatttacacacgatccaatgacaacgaccaacaacgtgaacggatgttttggagacacgaagctgaccaaagtgtttgtaggaggattggcttgggacactaacaaagaagcaatgcatgatcatttcatcaagtacggtgatatcttggaggcagtcatcatctccgacaaactcactcgccgttccaaaggctacggctttgtgactttcaaagatgcggaagccgcgaagagggcttgtgaagactcgactccgatcatcaatggccgccgtgccaactgcaatcttgcnttccctcggtgggccgccttcgtagatctcccaccgtggcctcccctcaacaaggatctaagcacgtgggtaggcccatgtcaggacatgtagggaacaatcaagctcaatggtactacccctgcgggattcgcacaccagcaacatcaacaacaccatcatcagaccattcctttctatgggtaccctccctcctatgtcgccctgaacatgaccttcaatcaaaaagttggatacgttggaggcacctatatgagcggatactatgcacaaccgcaaccacaatcgctaccactgccacaaccacaatattaccaccaccatcacatgtatggtggaggaagagtaatggttggggcaaacccgatgatgcctctctacactgtctatccttatcatcaatctcacgccatcggttttcctcaaccctcttatacgaaacccatatcaggtacagttggaggaggaggagatagcataatgaagaaggccataagttgatgggctacacaacaagttgttgaccaaacgattcagcccaagaatattcattttctccggctcacaatgtttatttttaatatagagacaaatcattgttaaattaattcctttacatttcataatttattcattaaaact

SEQ ID NO: 52807 - protein, 148 aa, Glycine max
  peptide (1)..(148): Ceres Seq. ID no. 14309385
  misc_feature (118)..(118): Xaa is any aa, unknown or other
FTLLHLSRFLSLSLASLSLSEFTHDPMTTTNNVNGCFGDTKLTKVFVGGLAWDTNKEAMHDHFIKYGDILEAVIISDKLTRRSKGYGFVTFKDAEAAKRACEDSTPIINGRRANCNLXFPRWAAFVDLPPWPPLNKDLSTWVGPCQDM

SEQ ID NO: 52808 - protein, 132 aa, Glycine max
  peptide (1)..(132): Ceres Seq. ID no. 14309386
MSGHVGNNQAQWYYPCGIRTPATSTTPSSDHSFLWVPSLLCRPEHDLQSKSWIRWRHLYERILCTTATTIATTATTTILPPPSHVWWRKSNGWGKPDDASLHCLSLSSISRHRFSSTLLYETHIRYSWRRRR

SEQ ID NO: 52809 - protein, 122 aa, Glycine max
  peptide (1)..(122): Ceres Seq. ID no. 14309387
  misc_feature (92)..(92): Xaa is any aa, unknown or other
MTTTNNVNGCFGDTKLTKVFVGGLAWDTNKEAMHDHFIKYGDILEAVIISDKLTRRSKGYGFVTFKDAEAAKRACEDSTPIINGRRANCNLXFPRWAAFVDLPPWPPLNKDLSTWVGPCQDM

SEQ ID NO: 52810 - DNA, 1782 bp, Glycine max
  misc_feature (1)..(1782): Ceres Seq. ID no. 15170434
attctgtttctgtgcctctccacactgaaaaaactgtacgcataacacagcagagagagctccctcgtcgattctaaattcgcattgtggcgcgtggttcacactcgacgcgttttgcggaatttcgactggcccagggcaccgttactcttttttcgaatttcactcctcaaagagaggaatgtgtgatggattctgtggagagtcagggtttcagaggtgtggatgagagttttggagagtgcttctcctgttgaatctgtcactcatttgaatatggctttgcagaagtatgctccttctggcaatgcaccttctgttaatatgaaacatttgagcttctccagtaaggtgcctaagaaagctgagctcgatgaagcaaatctgaatcacaacatggatgtggatattgaccttagggaaatttattttctcattatgcactttctttctgctgggccatgtcataaaactcatttacagttttggaatgagcttcttgagcatcaacttttgcctagaaggtatcatgcttggtattcaaggactggggcatgtagtggagacaaagatgatgatggtctatcattccctttaaattacaatatgttagtagagaggtattctcatattgaaaaggatcacttggtaaagcttttgaagcaattgttgttaaatacagcctccccatcactgggtatgaatcttggaaatgctccaaatgcagctgatgtacctactcttctaggaagcggttcattttcacttctgagctatgatagggacaaaatgaaagaagtcaaatggccgcctcctcatatgcgctggcctcatatgaaagccaatcaggttcatgggcttaatttgagggaaattgggggtggtttcccaagacaccaccgtgcaccatctatacgtgctgcatgctatgccattgcaaaaccttctaccatggtgcaaaagatgcaaaatatcaagaggttaagaggacatcgcaatgctgtctattgtgctatatttgatcgggcaggaagatatgtgattactggttccgatgaccgacttgtaaaaatttggtcaatggaaactgcatattgtttggccagttgccgtggacatgatggtgacatcactgacttggctgtgagttcaaacaatgctttagttgcatcctcatcaaatgactgtgtcattcgagtttggcgcttgccagatggcttgccaatatcagttttgcggggacatactggagctgttacagccatagcatttagtcccagaccgaatgctgtataccagcttttatctagtcaatgcacgtgattgtgctacgatcgtggggtggcgaagcagagtggccccttgccactcctaaggcactcgctgcggcatgcttggttgttgcagtgccattcatggaacaaattgcagaaaatcagggtgatttgtggacttcacagctgctccttcatttgccctgttgccaaacaagcccttgcgacctttagcgttgctgggcaaggctgtgacatttgctgtccctggaaaagcgtctgcaacctcccatcttccatccccttctcttccacaggggtggtgctagctaacctagcaactgatgggtagagggtcctagttagggtttcagttttaattctcttgtcttttttgatttgttgggcctcgatttgagtccaatagttgttgttgttattgttgttattgttgttttttaatgtaaaacatagcataataaaagaatataatagtattaaaaaatat

SEQ ID NO: 52811 - protein, 365 aa, Glycine max
  peptide (1)..(365): Ceres Seq. ID no. 15170435
MRVLESASPVESVTHLNMALQKYAPSGNAPSVNMKHLSFSSKVPKKAELDEANLNHNMDVDIDLREIYFLIMHFLSAGPCHKTHLQFWNELLEHQLLPRRYHAWYSRTGACSGDKDDDGLSFPLNYNMLVERYSHIEKDHLVKLLKQLLLNTASPSLGMNLGNAPNAADVPTLLGSGSFSLLSYDRDKMKEVKWPPPHMRWPHMKANQVHGLNLREIGGGFPRHHRAPSIRAACYAIAKPSTMVQKMQNIKRLRGHRNAVYCAIFDRAGRYVITGSDDRLVKIWSMETAYCLASCRGHDGDITDLAVSSNNALVASSSNDCVIRVWRLPDGLPISVLRGHTGAVTAIAFSPRPNAVYQLLSSQCT

SEQ ID NO: 52812 - protein, 348 aa, Glycine max
  peptide (1)..(348): Ceres Seq. ID no. 15170436
MALQKYAPSGNAPSVNMKHLSFSSKVPKKAELDEANLNHNMDVDIDLREIYFLIMHFLSAGPCHKTHLQFWNELLEHQLLPRRYHAWYSRTGACSGDKDDDGLSFPLNYNMLVERYSHIEKDHLVKLLKQLLLNTASPSLGMNLGNAPNAADVPTLLGSGSFSLLSYDRDKMKEVKWPPPHMRWPHMKANQVHGLNLREIGGGFPRHHRAPSIRAACYAIAKPSTMVQKMQNIKRLRGHRNAVYCAIFDRAGRYVITGSDDRLVKIWSMETAYCLASCRGHDGDITDLAVSSNNALVASSSNDCVIRVWRLPDGLPISVLRGHTGAVTAIAFSPRPNAVYQLLSSQCT

SEQ ID NO: 52813 - protein, 332 aa, Glycine max
  peptide (1)..(332): Ceres Seq. ID no. 15170437
MKHLSFSSKVPKKAELDEANLNHNMDVDIDLREIYFLIMHFLSAGPCHKTHLQFWNELLEHQLLPRRYHAWYSRTGACSGDKDDDGLSFPLNYNMLVERYSHIEKDHLVKLLKQLLLNTASPSLGMNLGNAPNAADVPTLLGSGSFSLLSYDRDKMKEVKWPPPHMRWPHMKANQVHGLNLREIGGGFPRHHRAPSIRAACYAIAKPSTMVQKMQNIKRLRGHRNAVYCAIFDRAGRYVITGSDDRLVKIWSMETAYCLASCRGHDGDITDLAVSSNNALVASSSNDCVIRVWRLPDGLPISVLRGHTGAVTAIAFSPRPNAVYQLLSSQCT

SEQ ID NO: 52814 - DNA, 813 bp, Glycine max
  misc_feature (1)..(813): Ceres Seq. ID no. 15176321
gtgctttctcaggggttggcttctcctccccactcagtcctcggttcccggtccggtcccgttccgttcgttagggtttagtagtagcggggaagaggaaggaatggcggacgtcgagtaccgctgcttcgtcggcggcctcgcctgggccaccgacgaccagtccctccagaacgccttctccaagtacggcgacgtcatcgactccaagatcatcactgacagggagacgggccgatcccgcgggttcgggttcgtcaccttcgcgtcggacgaggcgatgcgccaggcgatcgaggccatgaacggccaggacctggacggccgcaacatcaccgtcaacgaggcgcagtcccgtcgctccggcggaggaggcggcggcggcttcggcggcggcggtggcggctacgggggccagcgccgtgagggcggaggcggcggcggctacggcggcggcggcggcggctacggaggtggccgcagcggcggcggcggcggctacggcagccgtgacggcggcggctacggaggcggcggcggcggcggctacggcggcagccgcggcggctccggcggcggcaactggagggagtgaatggtggggcccctagctggccagttatcctagttaccgatccctttttttacctgtctaccaaagtgttatcgctcgctcccgagtaccctagatctcgctccatcgcgtaggttccgagatgttctggctaccgttagatgtgacgccgctaccgttccgtgttacttgttaccgtccctgttccgttcgctatgaatgaaatgaaaaatcagagc

SEQ ID NO: 52815 - protein, 197 aa, Glycine max
  peptide (1)..(197): Ceres Seq. ID no. 15176322
CFLRGWLLLPTQSSVPGPVPFRSLGFSSSGEEEGMADVEYRCFVGGLAWATDDQSLQNAFSKYGDVIDSKIITDRETGRSRGFGFVTFASDEAMRQAIEAMNGQDLDGRNITVNEAQSRRSGGGGGGGFGGGGGGYGGQRREGGGGGGYGGGGGGYGGGRSGGGGGYGSRDGGGYGGGGGGGYGGSRGGSGGGNWRE

SEQ ID NO: 52816 - protein, 163 aa, Glycine max
  peptide (1)..(163): Ceres Seq. ID no. 15176323
MADVEYRCFVGGLAWATDDQSLQNAFSKYGDVIDSKIITDRETGRSRGFGFVTFASDEAMRQAIEAMNGQDLDGRNITVNEAQSRRSGGGGGGGFGGGGGGYGGQRREGGGGGGYGGGGGGYGGGRSGGGGGYGSRDGGGYGGGGGGGYGGSRGGSGGGNWRE

SEQ ID NO: 52817 - protein, 104 aa, Glycine max
  peptide (1)..(104): Ceres Seq. ID no. 15176324
MRQAIEAMNGQDLDGRNITVNEAQSRRSGGGGGGGFGGGGGGYGGQRREGGGGGGYGGGGGGYGGGRSGGGGGYGSRDGGGYGGGGGGGYGGSRGGSGGGNWRE

SEQ ID NO: 52818 - DNA, 601 bp, Glycine max
  misc_feature (1)..(601): Ceres Seq. ID no. 15169814
gttagagacaaaataaaaacccaaataatttcaaaatagttttttagataatattttgatcggatggggttcttacacaagctgtgggatgacacggtggccggaccagctccggaaaatggtctgggagaattgagaaagcatgtttcattagccactgtccaatctcctcctctctccaccgatcaagtcacaagaagcatagtcgttaccaaggggaataacaatgttcgtgggctccggaatttgaagatgggtccgggtcgtgctccggattctccgaccgggtcaagtagcaccccgggaacgcctctaacccctggaacaccgtgtgatcactttggaccattcagcgcagataaaatcccatccgccggtgaagttgatgcctcaagtctcactacttatgaatggattgtgataaacgcattggaccgttgaaaacgacgagaaagagagaaagctctacgggtttttgtttataaatattaatcacctaagcatgtaattatgttaatatttacagatatggtaactgttaaataatgtctccttttaacaatgatttagtattatataacaaaacataaaattattacat

SEQ ID NO: 52819 - protein, 125 aa, Glycine max
  peptide (1)..(125): Ceres Seq. ID no. 15169815
MGFLHKLWDDTVAGPAPENGLGELRKHVSLATVQSPPLSTDQVTRSIVVTKGNNNVRGLRNLKMGPGRAPDSPTGSSSTPGTPLTPGTPCDHFGPFSADKIPSAGEVDASSLTTYEWIVINALDR

SEQ ID NO: 52820 - protein, 62 aa, Glycine max
  peptide (1)..(62): Ceres Seq. ID no. 15169816
MGPGRAPDSPTGSSSTPGTPLTPGTPCDHFGPFSADKIPSAGEVDASSLTTYEWIVINALDR

SEQ ID NO: 52821 - DNA, 1437 bp, Glycine max
  misc_feature (1)..(1437): Ceres Seq. ID no. 15176337
ctaatccattaacgtagcttcatctccatcttcctcaattctccaccacttccaccagcaacgactcgccgagagcgacagcgagatgggcagggtggcggccaagcagccagggttcgatggcggcctgagccggttatatcgtcgagccaggcgcgctggaactcggcgacgatgacgcggtggtgcttagcggcagtgagggcgcctctgtagcatgatggtcgccaggctgctccatcagcccgccgctcggcttcacgtgtagcagccgtcgccgacggtgccgctacccgaggcggcctcctccccgtcgaccttctttgcggcgccggtcgggctggtgaggatcggccgcagcttcagcccgtcgagccgctcggccgcagccctaggcttcgacgacgggtggatgcgggccacggtggtggctggcttcgtggtcgtgcaagctacgacctccactttgagccggcgagagaagacggacgcacatgtgccccagcgcgcgaggcagcctaccaaggcccgtagccggtagctcacaggaccgtatcaacaacttgccgtgtacggcgtcctccttcgttctagcctccttggtcggtccatcgactgagcgcaccaccgacgcatgcgaggccgcatccactgtcaccgccatgaggagctgtaggccctctcaggcgcgaacgtcgttgccggaggaaaccagcttgcttgctggcctgcatcccgcgataatggacgacgcgcgcagcctcgcaggacggcggtggtttgtgggacgaagccgacggagaatgggagatgcctgaggctggttcatttgcggcctcctcacggtggccacggccagcagcgacaacgggattgatggtgaaattgtccgtgcccaacgcccacaatctcgccttccacccgcgtttcagcgccgcaagaacgtcgaccgctggtggaacaaggtcttccagcgggaggcctgggcgtacgtcaagaacctgcagcgcctgccgacgtccgacgcagtgcagaaccagcagcagccgcggtccggcgagccgtgcgacggcagtagcaacagcaacaactacgagcgcgaccagtacaccgacgcgagcgacggcagccacagcaactaccagcgcaaccagtccggcgagaaacatacgacgggccgacggcagcaagcacagcagctacaagtgctgagccggtcgggcgacgagtgagagcttggaactgagaacgcgttgatgggcgcatgttgtttgcttattttgtggatgcaggggtttagaagtgcaagtccacagcctgcaaatgtgttttgtttgaactggtactgttttttccctgccgttattgatcgcgatggtctcctggtgtaaagatgtttgctactttcttgatgaaattgaagtctttcttgtgtgc

SEQ ID NO: 52822 - protein, 133 aa, Glycine max
  peptide (1)..(133): Ceres Seq. ID no. 15176338
MPEAGSFAASSRWPRPAATTGLMVKLSVPNAHNLAFHPRFSAARTSTAGGTRSSSGRPGRTSRTCSACRRPTQCRTSSSRGPASRATAVATATTTSATSTPTRATAATATTSATSPARNIRRADGSKHSSYKC

SEQ ID NO: 52823 - protein, 111 aa, Glycine max
  peptide (1)..(111): Ceres Seq. ID no. 15176339
MVKLSVPNAHNLAFHPRFSAARTSTAGGTRSSSGRPGRTSRTCSACRRPTQCRTSSSRGPASRATAVATATTTSATSTPTRATAATATTSATSPARNIRRADGSKHSSYKC

SEQ ID NO: 52824 - protein, 107 aa, Glycine max
  peptide (1)..(107): Ceres Seq. ID no. 15176340
MCPSARGSLPRPVAGSSQDRINNLPCTASSFVLASLVGPSTERTTDACEAASTVTAMRSCRPSQARTSLPEETSLLAGLHPAIMDDARSLAGRRWFVGRSRRRMGDA

SEQ ID NO: 52825 - DNA, 783 bp, Glycine max
  misc_feature (1)..(783): Ceres Seq. ID no. 15170477
atatcaaacagccaaccaaaaccaaacatctctctctctctctctctctagctgctttcaatggcttccttgctcgattccgtcaccgttacccgcgtgttttctcttccgatcacttcctcgatttcacctgcttcaaaggttccgtcaatctctgcccggaggatttctcccgttccggaattcagaggtttgaaagcttcctggaggagttcggtgactcagtcagcgagtcttggtacgaatctcggatcccgattcgctcgtggtggtagaatcgtctgcgaggctcaggacaccactgccgccgccgtcgaagtaccaaacatctctgactcagaatggcaaacacaggttctcgagtcagatgtaccagtattggtcgagttttgggcaccgtggtgtggaccttgccgtatgattcaccccattgttgaccaactggccagggatttcgcaggcaagttcaaattctacaaaatcaacaccgacgagagcccaaacacagccaaccgttacgggatacgcagcgttcctaccgtgatcatattcaaagacggtgagaagaaagacagtatcatcggagctgtccctaaagagacgttggagaaaactatagaaagattcgtggtcgagtaactaaacaaaaacaaaatttcactctttattatcactcatgtcttctgcgttgtataattcttcttaaggtctcttttgactatttatgtttccatgcgtccactatgtattgtttagtattataaaaaaaaatgaataacgaac

SEQ ID NO: 52826 - protein, 192 aa, Glycine max
  peptide (1)..(192): Ceres Seq. ID no. 15170478
MASLLDSVTVTRVFSLPITSSISPASKVPSISARRISPVPEFRGLKASWRSSVTQSASLGTNLGSRFARGGRIVCEAQDTTAAAVEVPNISDSEWQTQVLESDVPVLVEFWAPWCGPCRMIHPIVDQLARDFAGKFKFYKINTDESPNTANRYGIRSVPTVIIFKDGEKKDSIIGAVPKETLEKTIERFVVE

SEQ ID NO: 52827 - DNA, 1564 bp, Glycine max
  misc_feature (1)..(1564): Ceres Seq. ID no. 15170483
cccaatcccctcctctccctctcccactccggcggcggcagcagcagcatcagcgcggaagagccaaggagccgaccatggcgacgatcgtcaacaccacggaggaggagccgatgctggcggtggtgcgctccacggcggagctcgcctgggccgacggaggcgccgaggtcgccgacccggaggtggcccgcctctgcgccgaggcgcagcagcacgtcctcgccggccgctggctcgacatggccaccctcatgctcgcctccgccgacctcctcctcctcgccccacgcctctccgacaaagatctcgagtgcaccctgaccgtcatctgcaacctcgtcaccaaggccggatccgaggacgaggcgctggagatcgccaagctcatctgcgccaagctcacccaccagccgggcgagaagcccacgctgcgcatcaaagtcctgttcagcctgtacaacctgcttccgagcctctccggcaaggcattggtctacaggaaggcgctcgagctcgccgccgccgggaaggccgccgccgactgcgtcgtgcccaccttcaagaacatcgatgcctttgtcgcctactggggcatcggcaagccggagcagagggacctgttccttgccgtcaccaggattctcaaggaccagaagggcatgaccaaggagtacttcaagtttctgaacaagtacctgcccacgttcgatggatcggctgatgacgccgacgcaatcggtgcggcaaaggaagaagctgctgcagcaatcattgagtttgtcaagtcatctgatctctatcagtgtgacctgctcgacatgccagctgttgcacagctcgagaaagatgagaagtatcagccagtttacgagctactgaagatattccttactcagaggcttgaatcctatttagcgtttcagactgctaactctacattgctgcaaggatatggactggttcatgaggagtgcataacaaaaatgcgcctgatgtccctgcttgatctgagcggccattgttctggggaaattccttactctgcaattacaaaagcccttgagatcaatgatgatgaggtggaatattggattgtgaaagcaatttcatccaagattttggattgcaaagttgaccagcttaatcaattggtcattgtcagccggcatactgcaagggtctttgggatgccacaatggcagagtctacgttcaaagcttggagtgtggaggggaaatatcgcaaatgctatcaacacaatccaagccaacaaggtgactgaagatggcgggcaggggatgcaaggattgatgatccgctgatcggaggaagtccctaaattgagattatagcctgagagattagacgagcaatccttttgtattagatatcttgtaatccgaaatacttctaccctgtgaccatgcttggctagatcctggttgcaatggcatgctaagcaatctcatgttgcatgaattttgtagacaaaagccatgcctgaagtcagcagttacttgttacagaatcgctattgttcatactgcatgcctgttttatc

SEQ ID NO: 52828 - protein, 440 aa, Glycine max
  peptide (1)..(440): Ceres Seq. ID no. 15170484
QSPPLPLPLRRRQQQHQRGRAKEPTMATIVNTTEEEPMLAVVRSTAELAWADGGAEVADPEVARLCAEAQQHVLAGRWLDMATLMLASADLLLLAPRLSDKDLECTLTVICNLVTKAGSEDEALEIAKLICAKLTHQPGEKPTLRIKVLFSLYNLLPSLSGKALVYRKALELAAAGKAAADCVVPTFKNIDAFVAYWGIGKPEQRDLFLAVTRILKDQKGMTKEYFKFLNKYLPTFDGSADDADAIGAAKEEAAAAIIEFVKSSDLYQCDLLDMPAVAQLEKDEKYQPVYELLKIFLTQRLESYLAFQTANSTLLQGYGLVHEECITKMRLMSLLDLSGHCSGEIPYSAITKALEINDDEVEYWIVKAISSKILDCKVDQLNQLVIVSRHTARVFGMPQWQSLRSKLGVWRGNIANAINTIQANKVTEDGGQGMQGLMIR

SEQ ID NO: 52829 - protein, 415 aa, Glycine max
  peptide (1)..(415): Ceres Seq. ID no. 15170485
MATIVNTTEEEPMLAVVRSTAELAWADGGAEVADPEVARLCAEAQQHVLAGRWLDMATLMLASADLLLLAPRLSDKDLECTLTVICNLVTKAGSEDEALEIAKLICAKLTHQPGEKPTLRIKVLFSLYNLLPSLSGKALVYRKALELAAAGKAAADCVVPTFKNIDAFVAYWGIGKPEQRDLFLAVTRILKDQKGMTKEYFKFLNKYLPTFDGSADDADAIGAAKEEAAAAIIEFVKSSDLYQCDLLDMPAVAQLEKDEKYQPVYELLKIFLTQRLESYLAFQTANSTLLQGYGLVHEECITKMRLMSLLDLSGHCSGEIPYSAITKALEINDDEVEYWIVKAISSKILDCKVDQLNQLVIVSRHTARVFGMPQWQSLRSKLGVWRGNIANAINTIQANKVTEDGGQGMQGLMIR

SEQ ID NO: 52830 - protein, 403 aa, Glycine max
  peptide (1)..(403): Ceres Seq. ID no. 15170486
MLAVVRSTAELAWADGGAEVADPEVARLCAEAQQHVLAGRWLDMATLMLASADLLLLAPRLSDKDLECTLTVICNLVTKAGSEDEALEIAKLICAKLTHQPGEKPTLRIKVLFSLYNLLPSLSGKALVYRKALELAAAGKAAADCVVPTFKNIDAFVAYWGIGKPEQRDLFLAVTRILKDQKGMTKEYFKFLNKYLPTFDGSADDADAIGAAKEEAAAAIIEFVKSSDLYQCDLLDMPAVAQLEKDEKYQPVYELLKIFLTQRLESYLAFQTANSTLLQGYGLVHEECITKMRLMSLLDLSGHCSGEIPYSAITKALEINDDEVEYWIVKAISSKILDCKVDQLNQLVIVSRHTARVFGMPQWQSLRSKLGVWRGNIANAINTIQANKVTEDGGQGMQGLMIR

SEQ ID NO: 52831 - DNA, 1507 bp, Glycine max
  misc_feature (1)..(1507): Ceres Seq. ID no. 15176313
ccatcagaaccggatccctctcttcttcttgctctagcactcttcactaagtctccacggtagatggagggcgtcgaggagatcgtcatcgccggcgccgggctcgccggcctcgccacggccctggggctgcacaggaaaggggtgaggtgcgtggtgctggagtcgtcggcgacgctgcgggcgtcggggtacgccttcaccacatggaccaacgccttccgcgcgctggatgcgctcggtgtcggggacaagatcagggagcaccatctcctctacgagaggctggtggccttctctgcgtccacgggcgaggctgccgcaaaagtgagcctaaagatgcagggtaaaagcgtgcctcacgagatccggtgcgtgaagcgcaacttcctgctggagacgctggagaacgagctgccggagggcaccatcaggtactcctccaagatggtcgccattgagatcgaggaagagggcaacgtgaagctcctgcacatggccgacggctccaccatcagagccaacgttcttgtggggtgtgacggagtgaactcggtggtggcgaggtggctgggcctgcccaagcccatcctctcggggcggtccgccaccaggggcctcgccgagtacccggacggccacggcttcgggccggagatgctgcagttcatcggccagggcttccgctccggcgtgctcccctgctccgacacctccgtgtactggaacttcacctggtacccgtccccggcggacggggacgcggacgagagtgtggccaagatgcggcggcacgtgctggccaggctgacggccgccaagatcccggcggaggcgctggacgtggtggagcggagcgagatgagcgaggtggtgtcgtcgccgctgcggttccggtcgccgctggcgctggtccggggcagcatctgcaggggcggcgtgtgcgtggccggcgacgcgttcctcccgatgaccccggagctcggccagggcggctgcgcggcgctggaggacggcgtcgtcctcgcccggtgcctcggggaggccttcgccgtcggcgggcacgggagcgccgaggcggccctggagaagtacgcccaggagcggaggtggcgcgccgtccggctggtcactgccgcgtacgttgtcggcttcgtgcagcagagcagcaacccggcgatcaagttcctcagggagaagttcctgtcggggttgctggccagagtgatggtcgacatggccgactacgactgcgggaagctctagtagttctgccattccttccttcacgacggcagaacaagaacgacgagagaaaacgaatcagttaaaacggcatcaatcaaatcgattggatgcctgtatttcgacttttcgagttaaataaagaaaataatttgatacctgataggattattagtctacaatatgtagatgataccctctatttcatggaaaacagtcagaaaatggcaataaaatggaggaagcacgtatagcttaaggc

SEQ ID NO: 52832 - protein, 400 aa, Glycine max
  peptide (1)..(400): Ceres Seq. ID no. 15176314
MEGVEEIVIAGAGLAGLATALGLHRKGVRCVVLESSATLRASGYAFTTWTNAFRALDALGVGDKIREHHLLYERLVAFSASTGEAAAKVSLKMQGKSVPHEIRCVKRNFLLETLENELPEGTIRYSSKMVAIEIEEEGNVKLLHMADGSTIRANVLVGCDGVNSVVARWLGLPKPILSGRSATRGLAEYPDGHGFGPEMLQFIGQGFRSGVLPCSDTSVYWNFTWYPSPADGDADESVAKMRRHVLARLTAAKIPAEALDVVERSEMSEVVSSPLRFRSPLALVRGSICRGGVCVAGDAFLPMTPELGQGGCAALEDGVVLARCLGEAFAVGGHGSAEAALEKYAQERRWRAVRLVTAAYVVGFVQQSSNPAIKFLREKFLSGLLARVMVDMADYDCGKL

SEQ ID NO: 52833 - protein, 308 aa, Glycine max
  peptide (1)..(308): Ceres Seq. ID no. 15176315
MQGKSVPHEIRCVKRNFLLETLENELPEGTIRYSSKMVAIEIEEEGNVKLLHMADGSTIRANVLVGCDGVNSVVARWLGLPKPILSGRSATRGLAEYPDGHGFGPEMLQFIGQGFRSGVLPCSDTSVYWNFTWYPSPADGDADESVAKMRRHVLARLTAAKIPAEALDVVERSEMSEVVSSPLRFRSPLALVRGSICRGGVCVAGDAFLPMTPELGQGGCAALEDGVVLARCLGEAFAVGGHGSAEAALEKYAQERRWRAVRLVTAAYVVGFVQQSSNPAIKFLREKFLSGLLARVMVDMADYDCGKL

SEQ ID NO: 52834 - protein, 272 aa, Glycine max
  peptide (1)..(272): Ceres Seq. ID no. 15176316
MVAIEIEEEGNVKLLHMADGSTIRANVLVGCDGVNSVVARWLGLPKPILSGRSATRGLAEYPDGHGFGPEMLQFIGQGFRSGVLPCSDTSVYWNFTWYPSPADGDADESVAKMRRHVLARLTAAKIPAEALDVVERSEMSEVVSSPLRFRSPLALVRGSICRGGVCVAGDAFLPMTPELGQGGCAALEDGVVLARCLGEAFAVGGHGSAEAALEKYAQERRWRAVRLVTAAYVVGFVQQSSNPAIKFLREKFLSGLLARVMVDMADYDCGKL

SEQ ID NO: 52835 - DNA, 1583 bp, Glycine max
  misc_feature (1)..(1583): Ceres Seq. ID no. 15170479
aactcacctgggtgctgcgtgtgaagaaaagaaaagagagaaaaaccgaaacagaaacataaaaagtagctgccaatttcacgttctcattcttccaaattgaaacctcattcctcaatccacgagtttctcgtgacccttctctcatcatcgtcatcttcgtgccctaatcgattatctcgttgcgggtgctgatgattgattgattgggctataaaacgctgccaccgaccatgatcaaccattcataaacaaagagagaaaaaaagcttttttttgctgggtggttttttgtgtgcccaataattttggattgttttgttgtttttttgcattttccgatgacgtattacgagaatgacggtggtggtcggagagaagaggtggtgccggacgttactctcaccatccaatccgatgatagcaatggggactatgtgaaattgagggccaacaacaacgacggttctcctccgggtgcggcggcggagccttctccgccgacgataagagccgccgtgtggtattgggtgaaattggtggtgttgtttctattcctggggtttttggctgtggtagtgcttgtctgggtcggaccctatttcatagacaaggagattattccgattataaattgggagacagagactttcagtactccagtgttaactgttttggtgtttacatctgtggcagtattccccaccctacttttgccttctaccccttccatgtgggtggctggaatgacatttggttatggctttgggttcttgctaattatatctgcagcagctattggtgtatcactcccttttgtcattggcaaactcttccaccataaaattgaagggtggctggagaagtatccgaaaaaggcttctattctaagatctgctggtggagggagctggtttcatcagttccgggctgttgcctttatcagaatttccccattcccttacttaatcttcaactattgtgctgtggcaacaaatgttaagtatgggccttatatggtaggatccttggtaggaatggtgccggaaatatttgttgcaatctatactggaattttgattcggacattggctgatgcttcacatgaaaagcattctctatctgccccacaaattattctcaacgtcgccggcttctgtataacggtggcgacaaccatctttttcacagcttatgctaggagacggcttgatgagttacaaagagaggaggagccattgttgcagtaagtccagaagttttagtctggcttcgttcgttgtttccttatatgaagcagttccttactatgggagtggttttatgaggaaacattattccattggaagagttgaccgtcaaatgtattgtaactagtgggaattggttgaccaaggaaaaggatattggaggaacaagctaacatgaccgaaacctatgtttagttcagcatttccattccttattccttatatatggttcacagaaattgttttatttgttagtgcttctatctcgtttatcattgtatatgaatgaaatgaaattcccggtttactatatagcattgatttgattccaat

SEQ ID NO: 52836 - protein, 302 aa, Glycine max
  peptide (1)..(302): Ceres Seq. ID no. 15170480
MTYYENDGGGRREEVVPDVTLTIQSDDSNGDYVKLRANNNDGSPPGAAAEPSPPTIRAAVWYWVKLVVLFLFLGFLAVVVLVWVGPYFIDKEIIPIINWETETFSTPVLTVLVFTSVAVFPTLLLPSTPSMWVAGMTFGYGFGFLLIISAAAIGVSLPFVIGKLFHHKIEGWLEKYPKKASILRSAGGGSWFHQFRAVAFIRISPFPYLIFNYCAVATNVKYGPYMVGSLVGMVPEIFVAIYTGILIRTLADASHEKHSLSAPQIILNVAGFCITVATTIFFTAYARRRLDELQREEEPLLQ

SEQ ID NO: 52837 - protein, 172 aa, Glycine max
  peptide (1)..(172): Ceres Seq. ID no. 15170481
MWVAGMTFGYGFGFLLIISAAAIGVSLPFVIGKLFHHKIEGWLEKYPKKASILRSAGGGSWFHQFRAVAFIRISPFPYLIFNYCAVATNVKYGPYMVGSLVGMVPEIFVAIYTGILIRTLADASHEKHSLSAPQIILNVAGFCITVATTIFFTAYARRRLDELQREEEPLLQ

SEQ ID NO: 52838 - protein, 167 aa, Glycine max
  peptide (1)..(167): Ceres Seq. ID no. 15170482
MTFGYGFGFLLIISAAAIGVSLPFVIGKLFHHKIEGWLEKYPKKASILRSAGGGSWFHQFRAVAFIRISPFPYLIFNYCAVATNVKYGPYMVGSLVGMVPEIFVAIYTGILIRTLADASHEKHSLSAPQIILNVAGFCITVATTIFFTAYARRRLDELQREEEPLLQ

SEQ ID NO: 52839 - DNA, 1073 bp, Glycine max
  misc_feature (1)..(1073): Ceres Seq. ID no. 15169809
gtgcgggagagacgagcgatggctcgataggcatcctccccaggttcagatcccgacggcatcctccccaggttccagaaccgctgacgtggcgctcctcttcctcctcctcccgcctctcccatcaccgcctcgtctgcctcaccgccggcgaccgtcgctcccgtacccacactccggcgcagggatggctcaatgaggtgtgtgtgagccgcgttgatctggcttctggtggagtgtgaaatggtggatttcccggaagggttgcgacggctcgctgctctcctgctcaagtgctgcgatctcgacataccaaatcgtcccaagggcctcgaggatcctgagcgtctggcaagggaaacagtttttagcgtaaatgagattgaggcattgtatgagctgttcaagaagatcagcagtgctgtggttgatgatggtgtgattaataaggaagaattccaactggcgctgtttaagactaacaggaaagatagcatgtttgctgaccgggtgtttgatttgttcgacacaaagcacaatgggattctagaatttgaagaatttgtgcgagctctttctgtattccatcctaatgcaccagttgatgacaaaattgattttgctttcaaactctatgatctcaaacaacaaggtttcattgaaaagcaagaggtgaagcaaatggtggttgccacacttgctgaatcaggaatgaacctttctgatgaggttatagagggtattatcgacaagacatttgaggaagcagatacaaagcacgatggtaaaatcgacaaggaggaatggcgcaatcttgtcttgaggcatccatctttgttgaagaatatgacactcccatatctaagggatattaccacaacatttccaagctttgtcttcaactctcaggtcgaggatgcttgagaatccagtttctaggttaccactgaagcttgtgaaaggccacggcagaccatgtcgtaggtggaccttgtgtatttttatttctttattcctttttggcgatatccttcttgtgcttggaacaattcttgtaattttttcacttcttt

SEQ ID NO: 52840 - protein, 226 aa, Glycine max
  peptide (1)..(226): Ceres Seq. ID no. 15169810
MVDFPEGLRRLAALLLKCCDLDIPNRPKGLEDPERLARETVFSVNEIEALYELFKKISSAVVDDGVINKEEFQLALFKTNRKDSMFADRVFDLFDTKHNGILEFEEFVRALSVFHPNAPVDDKIDFAFKLYDLKQQGFIEKQEVKQMVVATLAESGMNLSDEVIEGIIDKTFEEADTKHDGKIDKEEWRNLVLRHPSLLKNMTLPYLRDITTTFPSFVFNSQVEDA

SEQ ID NO: 52841 - protein, 142 aa, Glycine max
  peptide (1)..(142): Ceres Seq. ID no. 15169811
MFADRVFDLFDTKHNGILEFEEFVRALSVFHPNAPVDDKIDFAFKLYDLKQQGFIEKQEVKQMVVATLAESGMNLSDEVIEGIIDKTFEEADTKHDGKIDKEEWRNLVLRHPSLLKNMTLPYLRDITTTFPSFVFNSQVEDA

SEQ ID NO: 52842 - DNA, 1192 bp, Glycine max
  misc_feature (1)..(1192): Ceres Seq. ID no. 15170458
atgaagtatcggatatcttaataaataaacaaataaaaaaagtatcggatatctcaaaggtttatccttcagtgaagagaaatggcagctgaggcaaattttgatagcaaaagcagcaggtggtctttgcaggggatgacagctctcgttaccggtggttccaaaggaatcggatatgctatcgtggaggagttggcacaacttggagccactgtacacacttgcgctcgcaacgaagctgaactcaataaatccttaaatgaatggaacacaaaaggatacagagtaactggttcggtctgtgacgtggcgtctcgtgcagaaagacaagacctcatagctagagtctcaaatgagtttaatggcaaactcaatatccttgtaaacaatgtgggaacaaacatacagaaagagaccctggatttcacagaggaagatttcacatttctggtgaatacgaatcttgaatcttgtttccacctaagccagcttgcacatcctctcctaaaagcttcagaagctgcaaacatcattctcatatcctccattgctggtgtggtagcttcaaatatagtatccgttgtgtatggtgcaacaaaaggagcaatgaaccaaatgacaaaacatttggcatgtgaatgggccaaagacaatataaggactaattgcgttgcaccagggccaattagaacccctcttggtgacaagcactttaaagaggaaaaacttaataatagtctgattgcgcgaacccctcttggacggattggagaggcagaggaggtttcttcgttggtggcattcctctgcttacctgcagcatcttacataacaggacaaaccatttgtgttgatggcggcttcaccgtgaacggtctctacataagctaggcttattgtgacagtttcaatgttttgtttagtctgttacactctacttgtattagtttctgtttaagttgtggagagtggagaccctatatctgtttttaaggacgtgataataacagtactcagtgataagtttgtttttcttgttttgatttagtcacatgtcccatgattctaggagcagtataatcgtgggcagtttatcctatttcccgttggttgtaaggctttcagtaataataataataatagccatgtttgcttttcaattcaatgcaaatgctcctcagttcactagtac

SEQ ID NO: 52843 - protein, 269 aa, Glycine max
  peptide (1)..(269): Ceres Seq. ID no. 15170459
MAAEANFDSKSSRWSLQGMTALVTGGSKGIGYAIVEELAQLGATVHTCARNEAELNKSLNEWNTKGYRVTGSVCDVASRAERQDLIARVSNEFNGKLNILVNNVGTNIQKETLDFTEEDFTFLVNTNLESCFHLSQLAHPLLKASEAANIILISSIAGVVASNIVSVVYGATKGAMNQMTKHLACEWAKDNIRTNCVAPGPIRTPLGDKHFKEEKLNNSLIARTPLGRIGEAEEVSSLVAFLCLPAASYITGQTICVDGGFTVNGLYIS

SEQ ID NO: 52844 - protein, 251 aa, Glycine max
  peptide (1)..(251): Ceres Seq. ID no. 15170460
MTALVTGGSKGIGYAIVEELAQLGATVHTCARNEAELNKSLNEWNTKGYRVTGSVCDVASRAERQDLIARVSNEFNGKLNILVNNVGTNIQKETLDFTEEDFTFLVNTNLESCFHLSQLAHPLLKASEAANIILISSIAGVVASNIVSVVYGATKGAMNQMTKHLACEWAKDNIRTNCVAPGPIRTPLGDKHFKEEKLNNSLIARTPLGRIGEAEEVSSLVAFLCLPAASYITGQTICVDGGFTVNGLYIS

SEQ ID NO: 52845 - DNA, 1215 bp, Glycine max
  misc_feature (1)..(1215): Ceres Seq. ID no. 15170438
acgactcgacttcgtttaaacccaaaccctaatctcgacagagcctaaaccctagctcgggcggcggcggcggcggtcatggacggcggcggaggcgtcggaggaggcatggggcccgtaggcggcggggtgggaggcatggtgggacccgtcggcgtcggcggcgggggcggcgggagcgacgtggagctcgtcagcaaaacgctgcagttcgagcacaagctcttctacttcgatctgaaggagaacccgcgggggaggtacctcaagatctccgagaagacgtccaccacgcgctccaccatcatcgtgcccatcgccggcgtcgcctggttcctcgacctcttcgactattacatccgcaccgacgagcgcgacgtcttcagcaaggagctacgcctcgataccaaggtgttctacttcgatattggggagaacaagagaggccgctaccttaaggtttcggaggcatctgtcaatagaaaccgtagcacgataattgttccggctggtagctctggcgaagaaggttgggaagcatttaggaatgtactgttagaaatcaatgacgaagcttcccgactctacgttcttccaaatcatccaagtcagcaacacctggaacctccagagcgccttcctggcctttctgacgatgttggtgctggatttatagctgggcatggcagccaatctgcatctgtaccctaggtagatgttgatgggcctcctattgaagaatttagtggcatggggctgtctaaggtgataagggcagatcagaaaaggtttttctttgacctgggcagcaacaacaggggccattatttgaggatttccgaggtcgctggagctgatcgttcgtcgataatcttgccgctttctggtttgaagcagttccatgagatggtgggacactttgtagatataatgaaggacagacttgaaggaatgacgggcgcgaacgtgcgcactgtcgagcccagccagagatgattagctcgaccttgtggcacttactgctgttatgcctctaggatttgtgtaagcgatgtgctgtgtggttgcgtagatcacgcagtattaattcatctgatggggataataatgtttgatgtttagttttttctttcttctgaattccgtggcgaggattgatttgcttgggaccttttctgttgaggaataataagcagtataatgttcgtgggtggt

SEQ ID NO: 52846 - protein, 210 aa, Glycine max
  peptide (1)..(210): Ceres Seq. ID no. 15170439
MDGGGGVGGGMGPVGGGVGGMVGPVGVGGGGGGSDVELVSKTLQFEHKLFYFDLKENPRGRYLKISEKTSTTRSTIIVPIAGVAWFLDLFDYYIRTDERDVFSKELRLDTKVFYFDIGENKRGRYLKVSEASVNRNRSTIIVPAGSSGEEGWEAFRNVLLEINDEASRLYVLPNHPSQQHLEPPERLPGLSDDVGAGFIAGHGSQSASVP

SEQ ID NO: 52847 - protein, 200 aa, Glycine max
  peptide (1)..(200): Ceres Seq. ID no. 15170440
MGPVGGGVGGMVGPVGVGGGGGGSDVELVSKTLQFEHKLFYFDLKENPRGRYLKISEKTSTTRSTIIVPIAGVAWFLDLFDYYIRTDERDVFSKELRLDTKVFYFDIGENKRGRYLKVSEASVNRNRSTIIVPAGSSGEEGWEAFRNVLLEINDEASRLYVLPNHPSQQHLEPPERLPGLSDDVGAGFIAGHGSQSASVP

SEQ ID NO: 52848 - protein, 190 aa, Glycine max
  peptide (1)..(190): Ceres Seq. ID no. 15170441
MVGPVGVGGGGGGSDVELVSKTLQFEHKLFYFDLKENPRGRYLKISEKTSTTRSTIIVPIAGVAWFLDLFDYYIRTDERDVFSKELRLDTKVFYFDIGENKRGRYLKVSEASVNRNRSTIIVPAGSSGEEGWEAFRNVLLEINDEASRLYVLPNHPSQQHLEPPERLPGLSDDVGAGFIAGHGSQSASVP

SEQ ID NO: 52849 - DNA, 1368 bp, Glycine max
  misc_feature (1)..(1368): Ceres Seq. ID no. 15170447
ttgccaacaaagctctctcctttcctcatcatcacagctcagcctgaccccaactctctctcaggcttccgatctcagatctctgcgatccggtgagatctctctcttcttccgaggaaaaaaaaagggagttcagtagaatcaagatgaaggctctcattctcgttggagggttcgggactcggttgagaccattgactctcagtttcccaaagccccttgttgacttcgccaacaaacccatgatccttcatcagatagaggcgctcaaggcagttggagttgatgaagttgttttggccatcaattaccaaccagaggtgatgcttaacttcttgaaagactttgaggcaaagctcgaaatcaaaatcacttgctcacaagagactgagcctatgggtacggctggtcctctggctctagctagagacaaactggttgacggatctggagagcccttttttgtccttaacagtgatgtgattagtgagtacccactcaaagagatgattgaatttcacaaagctcacggtggggaagcctccattatggtgacaaaggttgatgaaccgtccaagtatggagttgtggtcatggatgaaactacaggaaaagtggagaagtttgtggaaaagccaaaactgtttgtaggcaacaagatcaacgctgggatataccttctgaacccatctgttctcgacaagatcgagctaagaccgacatcgatcgagaaagaaaccttccccaagattgcagcagctcaaggactctacgcgatggtgttaccaggattctggatggacatcgggcaaccccgtgattacataacgggcctgagactctacttagactctctgagaaagaaatctcccgccaagctaaccactggtgcacacattgttgggaacgttctggtggatgaaaccgctaagattggggaagggtgtttgataggtccagacgtggccattggtccaggctgcgttgttgagtcaggggtgaggctttcacggtgcacggtcatgcgtggggcgaggatcaagaaacatgcgtgtatctcgagcagtatcatagggtggcactcgacggttgggcagtgggctaggattgagaacatgacgatcttgggggaagatgttcatgtgtgtgatgagatatacaccaatggaggagttgttttgccacacaaggagatcaaatccaacatcttgaagccagagatagttatgtgattatctatgttggaacctttttttgttttttttttttgtgtatttttatctctcaaactttgtgtttctgttattcttctttggctttgaataaaatataaacaaaatgatgtataaaaaaaaaaaaaaaaaaacc

SEQ ID NO: 52850 - protein, 361 aa, Glycine max
  peptide (1)..(361): Ceres Seq. ID no. 15170448
MKALILVGGFGTRLRPLTLSFPKPLVDFANKPMILHQIEALKAVGVDEVVLAINYQPEVMLNFLKDFEAKLEIKITCSQETEPMGTAGPLALARDKLVDGSGEPFFVLNSDVISEYPLKEMIEFHKAHGGEASIMVTKVDEPSKYGVVVMDETTGKVEKFVEKPKLFVGNKINAGIYLLNPSVLDKIELRPTSIEKETFPKIAAAQGLYAMVLPGFWMDIGQPRDYITGLRLYLDSLRKKSPAKLTTGAHIVGNVLVDETAKIGEGCLIGPDVAIGPGCVVESGVRLSRCTVMRGARIKKHACISSSIIGWHSTVGQWARIENMTILGEDVHVCDEIYTNGGVVLPHKEIKSNILKPEIVM

SEQ ID NO: 52851 - protein, 329 aa, Glycine max
  peptide (1)..(329): Ceres Seq. ID no. 15170449
MILHQIEALKAVGVDEVVLAINYQPEVMLNFLKDFEAKLEIKITCSQETEPMGTAGPLALARDKLVDGSGEPFFVLNSDVISEYPLKEMIEFHKAHGGEASIMVTKVDEPSKYGVVVMDETTGKVEKFVEKPKLFVGNKINAGIYLLNPSVLDKIELRPTSIEKETFPKIAAAQGLYAMVLPGFWMDIGQPRDYITGLRLYLDSLRKKSPAKLTTGAHIVGNVLVDETAKIGEGCLIGPDVAIGPGCVVESGVRLSRCTVMRGARIKKHACISSSIIGWHSTVGQWARIENMTILGEDVHVCDEIYTNGGVVLPHKEIKSNILKPEIVM

SEQ ID NO: 52852 - protein, 302 aa, Glycine max
  peptide (1)..(302): Ceres Seq. ID no. 15170450
MLNFLKDFEAKLEIKITCSQETEPMGTAGPLALARDKLVDGSGEPFFVLNSDVISEYPLKEMIEFHKAHGGEASIMVTKVDEPSKYGVVVMDETTGKVEKFVEKPKLFVGNKINAGIYLLNPSVLDKIELRPTSIEKETFPKIAAAQGLYAMVLPGFWMDIGQPRDYITGLRLYLDSLRKKSPAKLTTGAHIVGNVLVDETAKIGEGCLIGPDVAIGPGCVVESGVRLSRCTVMRGARIKKHACISSSIIGWHSTVGQWARIENMTILGEDVHVCDEIYTNGGVVLPHKEIKSNILKPEIVM

SEQ ID NO: 52853 - DNA, 1440 bp, Glycine max
  misc_feature (1)..(1440): Ceres Seq. ID no. 15170461
agtttcatttatgactttctcgtacttctacgagaaataatctcggtggaaattgtcaggttcttgttgccgcaggcatattattaactttatttatgaagacacaacaaaggactagagtgagtgaatagagacaagacaaagaacaacaaaattaccctgatcagtaaatgcatcatgcatgaatgaatttgataagtcaacttcatttcttttctttaatctctcctttcctctcaggaatacgcttcccaggattacacagcgtcttatgattcagatattattttcgtccctgaccggagttacaggaaatcagatgctttattttgtggggctgaaatattcatccgctacaattgcatgtgcactgacaaatttgctcccagctttcactttcatccttgcagttctcttcagacaagagaatttgggaatcaagaagagggctggtctagcaaaggtattcgggacaatattgtgtgtgagtggagccttgcttttgtcattttaccatggaaaaaccattggtttaggccaatcaagtattcactggagatatgctgagaaaatggaaggaactagctcttctggcaaaggaaacatgttcctaggccctttggtcgtaattcttagcacccttgtttgggcagcatggttcataattcaaaaagacataagcaagacatttccagctccttacacgagcactggcttaatgtgtttcatggcaagctttcaatgcgtgatcattgccgtgtgtgtcgaccacagggcctcagcttggtcactccacaatgctatgagactttcctctgccctttatgcgggaatattttgcactggattagcctattgcctcatgtcgtggaccattgagagaaaaggtcctctttatgtctctgtatttacccctttgcagcttgtcctcactgccattttgagctgggctttgcttcgggagaaattatatgttggaactgccgtagggtctctcttgatagttttgggactctattctgttctctggggaaagagtgaagaggtgaataagggagacggtattgaagaagatgcagttaaagaagcagtcaaggattcgaagaatgacatggaattgcaatcatatgtgccatccaatggtaataatggtcgggttattgcatgaagaagggacgaggcagagtgagattcctcgcaagatgctagtagctaaggattgagaaagtttcggttatttgtctttattttatttttgctctctaccagtaaatttgaattttgatatgtgtaatcttgtgtcacatttgaaaggggttcacaactctttgcagttgcattgaagacatgtattaatattattattattattatttatatattaatcaacccggaatcagttattccattaatgtgtcatcaatgttaaactatgatttc

SEQ ID NO: 52854 - protein, 328 aa, Glycine max
  peptide (1)..(328): Ceres Seq. ID no. 15170462
MNEFDKSTSFLFFNLSFPLRNTLPRITQRLMIQILFSSLTGVTGNQMLYFVGLKYSSATIACALTNLLPAFTFILAVLFRQENLGIKKRAGLAKVFGTILCVSGALLLSFYHGKTIGLGQSSIHWRYAEKMEGTSSSGKGNMFLGPLVVILSTLVWAAWFIIQKDISKTFPAPYTSTGLMCFMASFQCVIIAVCVDHRASAWSLHNAMRLSSALYAGIFCTGLAYCLMSWTIERKGPLYVSVFTPLQLVLTAILSWALLREKLYVGTAVGSLLIVLGLYSVLWGKSEEVNKGDGIEEDAVKEAVKDSKNDMELQSYVPSNGNNGRVIA

SEQ ID NO: 52855 - protein, 298 aa, Glycine max
  peptide (1)..(298): Ceres Seq. ID no. 15170463
MIQILFSSLTGVTGNQMLYFVGLKYSSATIACALTNLLPAFTFILAVLFRQENLGIKKRAGLAKVFGTILCVSGALLLSFYHGKTIGLGQSSIHWRYAEKMEGTSSSGKGNMFLGPLVVILSTLVWAAWFIIQKDISKTFPAPYTSTGLMCFMASFQCVIIAVCVDHRASAWSLHNAMRLSSALYAGIFCTGLAYCLMSWTIERKGPLYVSVFTPLQLVLTAILSWALLREKLYVGTAVGSLLIVLGLYSVLWGKSEEVNKGDGIEEDAVKEAVKDSKNDMELQSYVPSNGNNGRVIA

SEQ ID NO: 52856 - protein, 282 aa, Glycine max
  peptide (1)..(282): Ceres Seq. ID no. 15170464
MLYFVGLKYSSATIACALTNLLPAFTFILAVLFRQENLGIKKRAGLAKVFGTILCVSGALLLSFYHGKTIGLGQSSIHWRYAEKMEGTSSSGKGNMFLGPLVVILSTLVWAAWFIIQKDISKTFPAPYTSTGLMCFMASFQCVIIAVCVDHRASAWSLHNAMRLSSALYAGIFCTGLAYCLMSWTIERKGPLYVSVFTPLQLVLTAILSWALLREKLYVGTAVGSLLIVLGLYSVLWGKSEEVNKGDGIEEDAVKEAVKDSKNDMELQSYVPSNGNNGRVIA

SEQ ID NO: 52857 - DNA, 1987 bp, Glycine max
  misc_feature (1)..(1987): Ceres Seq. ID no. 15176499
attattttgagtgtttgtgagtttgtctgtgacactctctctttctctctctctacgcttcacttttccgtaataaacccttcaaaagcgaaagcggtttctcgtttttggaccttatctctctttctaaggttcgattctgcgtactttgggaggaacagacacacatgaaggattcgaattcgaattcggatctgtttgacccggtcatggcgatggagtccgagtggtctcgcggcggcaccacctccgatgccgatttcgccttcgccttcaacgacagcaacttctccgacagggttctccggatcgagatcatgcacgaccccgtcgacgcccgccctgattccgacgcctgcgccaccattgccgactgggcccgccaccgcaagcgccgccgcgaggatatcaaaaaggataacggtgcggatcttgcttcggtgccagacgagcaagttttgaacgggcatcaatctgaagcggatgagtgtgagaatcaagatgaagaggctgatgcaatggttgaagaaccccattctggtgatgaagctacacatagtaatgattcagactggagcatggactgctctgcaggtgcagttgttagagttaaaacgctgcatatcagttctcctatcttggctgcaaaaagtccttttttctataagcttttctcaaatgggatgagggagtctgagcagagacatgtcaccctcagaattaatgcctctgaagaggctgctctcatggagctactgaattttatgtacagcactaccttgaccactactacagcacctgcattgctagatgtgttgatggctgctgataaatttgaagttgcttcatgcatgagatactgtagccggttattgcggaatatgcctatgacacctgactctgcattgctttatctggagcttccttctagtgtcttaatggctgatgcagtccaaccattgactgatgctgcgaagcagtatcttgctggtcgatacaaggatataaccaagttccaggaagaggttattgccttgcccctagctggagtagaggcaatactgtctagtgatgatctccaggtcgcatcagaagatgctgtatatgattttgtgttgaaatggtctcgacagcagtacactaaactggaagacaggcgagaagtcctgggtacccggcttgcacaattaattcgctttccttacatgacctgccgaaagcttaagaaggtcttgacctgttctgactttgaccatgacgttgcatccaagcttgtacttgagggcctatttttcaaggccgaggctccacaccgtcaacggtcgctggcagcagaagatactgcatcttcaaaccgtcgttttgtggagagagcatacaagtaccgccccgtgaaggtggtagaatttgaacttccccggcagcagtgtgtggtgtacttggatctgaagcgggaggagtgtaacaacctcttcccatccgggcgggtttattcccaggcgttccatttgggtggacaaggtttcttcctatcagcacattgcaacatggaccaacaaagctctttccattgctttgggctgtttttgggaatgcaggaaaagggctcagtgagctttgccgtcgactatgagtttgctgcgaggtctaggccgacagaggaatttgttagcaagtacaaaggcaactacgtgttcactgggggaaaggccgttggctatagaaacttgtttgccattccatggacttcgttcatagctgaggatagtctttactttatcaatggtgtccttcaccttagagctgagctcaccatcaaacactgacccccatttctagttgtaaactttctatctattccagttggtagccttgaccttttttttagatctcaaattctcattttctgttaacactagtaatctatcaaaagcttaaatatacagcatgtgcactaaagtggatagtgttgcatgtgattgagaag

SEQ ID NO: 52858 - protein, 552 aa, Glycine max
  peptide (1)..(552): Ceres Seq. ID no. 15176500
MKDSNSNSDLFDPVMAMESEWSRGGTTSDADFAFAFNDSNFSDRVLRIEIMHDPVDARPDSDACATIADWARHRKRRREDIKKDNGADLASVPDEQVLNGHQSEADECENQDEEADAMVEEPHSGDEATHSNDSDWSMDCSAGAVVRVKTLHISSPILAAKSPFFYKLFSNGMRESEQRHVTLRINASEEAALMELLNFMYSTTLTTTTAPALLDVLMAADKFEVASCMRYCSRLLRNMPMTPDSALLYLELPSSVLMADAVQPLTDAAKQYLAGRYKDITKFQEEVIALPLAGVEAILSSDDLQVASEDAVYDFVLKWSRQQYTKLEDRREVLGTRLAQLIRFPYMTCRKLKKVLTCSDFDHDVASKLVLEGLFFKAEAPHRQRSLAAEDTASSNRRFVERAYKYRPVKVVEFELPRQQCVVYLDLKREECNNLFPSGRVYSQAFHLGGQGFFLSAHCNMDQQSSFHCFGLFLGMQEKGSVSFAVDYEFAARSRPTEEFVSKYKGNYVFTGGKAVGYRNLFAIPWTSFIAEDSLYFINGVLHLRAELTIKH

SEQ ID NO: 52859 - protein, 538 aa, Glycine max
  peptide (1)..(538): Ceres Seq. ID no. 15176501
MAMESEWSRGGTTSDADFAFAFNDSNFSDRVLRIEIMHDPVDARPDSDACATIADWARHRKRRREDIKKDNGADLASVPDEQVLNGHQSEADECENQDEEADAMVEEPHSGDEATHSNDSDWSMDCSAGAVVRVKTLHISSPILAAKSPFFYKLFSNGMRESEQRHVTLRINASEEAALMELLNFMYSTTLTTTTAPALLDVLMAADKFEVASCMRYCSRLLRNMPMTPDSALLYLELPSSVLMADAVQPLTDAAKQYLAGRYKDITKFQEEVIALPLAGVEAILSSDDLQVASEDAVYDFVLKWSRQQYTKLEDRREVLGTRLAQLIRFPYMTCRKLKKVLTCSDFDHDVASKLVLEGLFFKAEAPHRQRSLAAEDTASSNRRFVERAYKYRPVKVVEFELPRQQCVVYLDLKREECNNLFPSGRVYSQAFHLGGQGFFLSAHCNMDQQSSFHCFGLFLGMQEKGSVSFAVDYEFAARSRPTEEFVSKYKGNYVFTGGKAVGYRNLFAIPWTSFIAEDSLYFINGVLHLRAELTIKH

SEQ ID NO: 52860 - protein, 536 aa, Glycine max
  peptide (1)..(536): Ceres Seq. ID no. 15176502
MESEWSRGGTTSDADFAFAFNDSNFSDRVLRIEIMHDPVDARPDSDACATIADWARHRKRRREDIKKDNGADLASVPDEQVLNGHQSEADECENQDEEADAMVEEPHSGDEATHSNDSDWSMDCSAGAVVRVKTLHISSPILAAKSPFFYKLFSNGMRESEQRHVTLRINASEEAALMELLNFMYSTTLTTTTAPALLDVLMAADKFEVASCMRYCSRLLRNMPMTPDSALLYLELPSSVLMADAVQPLTDAAKQYLAGRYKDITKFQEEVIALPLAGVEAILSSDDLQVASEDAVYDFVLKWSRQQYTKLEDRREVLGTRLAQLIRFPYMTCRKLKKVLTCSDFDHDVASKLVLEGLFFKAEAPHRQRSLAAEDTASSNRRFVERAYKYRPVKVVEFELPRQQCVVYLDLKREECNNLFPSGRVYSQAFHLGGQGFFLSAHCNMDQQSSFHCFGLFLGMQEKGSVSFAVDYEFAARSRPTEEFVSKYKGNYVFTGGKAVGYRNLFAIPWTSFIAEDSLYFINGVLHLRAELTIKH

SEQ ID NO: 52861 - DNA, 1305 bp, Glycine max
  misc_feature (1)..(1305): Ceres Seq. ID no. 15170517
taaattccaaacaattccattcctcctttattactttgttttcaaccatctgccccaccttttcccctccctctcttcttgcttgcaccctcctacacaccatgtctcctttctcaaaccctctctttctttgtttctcacacacttcacatagtatataaatatgcatatatttttattcacatgatgacttgcacacgaaagacctttttctccaaagagcactcaccatctctagtttatgatatcttcatttctctctagctgttgcaaaggaagaacaagtcttatttgggaaccacattgaagaagaagtaagaaagaggaagtagtaccaaagcagaagaaaaacaagactgaagatggaaagaagtgtatattactatgtgctacttcttgtatttggtcatttcctttgttcaggttcaagtaggacacagaaggaagcagcaagacatatgaatgtactaaggcataatgaagagaaacaacatgaatttacagcctcaaagtccaccactcaaagggacatcaccacaccaatcactacaattcccaacttagttcccatcacttcaacaaatccaatcctgaatcctaattccaaccctgatacagtctctccagcctccacactcccaatcacaactcctaccatgccaaacaactctccagtgtcctcttcaggtgcaagctggtgcactgcaagcccaacatcctcacaaagagccttacaagtgggattggactatgcttgtggatatggtggcactgattgttctgcaattcaacctggtgggagctgctacttcccaaactctgtcagagaccatgcttcttatgccttcaataagtattatcagaagaatcctgttcctaatagctgcaattttggtggagctgctgtcatcactagcaccaatccaagtactggggcatgtcaatatgcatccactagtattagttcatcagtcttgaacacaacaaacacaagtggtgcaaatgtatttggttcagtacctgtgcccaagaacccctctgcctctgttgctgcagctgccacatcagctagatttgtacaattttgccttattctatggtcattagcaatgttggacaagaattatctataacaataatattgagagttagattttgcttggatttggtctttattttatttgggggatggggagaagggttgtgtactagaaaagcacataggtacaaaaccatcatcaatatgacatacatgatagaacactttgtagaaaagtagcaataatatgaagggtttcagtagat

SEQ ID NO: 52862 - protein, 256 aa, Glycine max
  peptide (1)..(256): Ceres Seq. ID no. 15170518
MERSVYYYVLLLVFGHFLCSGSSRTQKEAARHMNVLRHNEEKQHEFTASKSTTQRDITTPITTIPNLVPITSTNPILNPNSNPDTVSPASTLPITTPTMPNNSPVSSSGASWCTASPTSSQRALQVGLDYACGYGGTDCSAIQPGGSCYFPNSVRDHASYAFNKYYQKNPVPNSCNFGGAAVITSTNPSTGACQYASTSISSSVLNTTNTSGANVFGSVPVPKNPSASVAAAATSARFVQFCLILWSLAMLDKNYL

SEQ ID NO: 52863 - protein, 224 aa, Glycine max
  peptide (1)..(224): Ceres Seq. ID no. 15170519
MNVLRHNEEKQHEFTASKSTTQRDITTPITTIPNLVPITSTNPILNPNSNPDTVSPASTLPITTPTMPNNSPVSSSGASWCTASPTSSQRALQVGLDYACGYGGTDCSAIQPGGSCYFPNSVRDHASYAFNKYYQKNPVPNSCNFGGAAVITSTNPSTGACQYASTSISSSVLNTTNTSGANVFGSVPVPKNPSASVAAAATSARFVQFCLILWSLAMLDKNYL

SEQ ID NO: 52864 - protein, 158 aa, Glycine max
  peptide (1)..(158): Ceres Seq. ID no. 15170520
MPNNSPVSSSGASWCTASPTSSQRALQVGLDYACGYGGTDCSAIQPGGSCYFPNSVRDHASYAFNKYYQKNPVPNSCNFGGAAVITSTNPSTGACQYASTSISSSVLNTTNTSGANVFGSVPVPKNPSASVAAAATSARFVQFCLILWSLAMLDKNYL

SEQ ID NO: 52865 - DNA, 1330 bp, Glycine max
  misc_feature (1)..(1330): Ceres Seq. ID no. 15176317
ataaccatcaagcagtagtggccccttcttccagctcttcttggctgctaaggtgacactctctgtggaatagatacacctcgcgatgaaaatggcgagggccctgcttgtcgcccttcttcttgtctcgtgctttgtggcgcttggcctgtccggccgcgccgatgcggcggccgagaggaagaccgtcggtgtctacgagctcaacaagggggatttctccatcaaggtcaccaactggggtgccaccctcatgtccgtgattctcctcgactcgagaggaaactttggggatgtgatcctgggctacgatacggttgctgaatacatgaatggcaccgcctacttcggagggctgatcggccgcgtcgccaacagaatcgccaacgcccggttcacgctggacgggaaaacctaccggctggttcccaacgacggcaacaacacgctgcacggtggtcaccggggattcgacaaggtcgtgtggacggtgaaggagcatgtcgccggcggcagctcgcccttcatcactctctactaccatagcttcgacggagagcaagggtttccgggcgacgtggacgtgcacgtgacgtaccaactctcgagcccgcacgtgctgagcgtgcgcatgaacgcgacggcacggggcaaggccaccccagtgaacctggcgcaccacgcctactggaacctcggcggcgacggcagcggcaacgtccttggcgaggaggtccgcctcttcgcctcccggtacacgcctgtggatgcctcgctcatcccgacgggccgcatggcgtccgtggctggcacaccctacgacttccgcacgccggccgccgtgggctcgcgcatcggcggcctcctgagccggggcgtcaacgggtacgacatcaactacgtcgtcgacggcaggggcctgcgcccggtagcggtcgtccgggacggcgcgtccggcagggcgatggagctgtgggcggaccagcccggggtgcagttctacacggccaacgggctcagcggggtgagggggaagggtggcaaggtctacggccactacggcgcgctctgcctggagacgcaggggttccccgacgccgtgaaccgcccgagcttcccgtcgcagatcgtccggccggggaaggtgtacaagcatgacatggtgttcaagttctccttctagtaactactagctggtggtatccaaggtcccgtggttggtcgtttgtcaggcaacacagccactcttgtgttttgtgtactgtgtgaatttgatcggctgagcttcaaggggaggaataaaagcatgttgctggttcaaggttttttc

SEQ ID NO: 52866 - protein, 365 aa, Glycine max
  peptide (1)..(365): Ceres Seq. ID no. 15176318
MKMARALLVALLLVSCFVALGLSGRADAAAERKTVGVYELNKGDFSIKVTNWGATLMSVILLDSRGNFGDVILGYDTVAEYMNGTAYFGGLIGRVANRIANARFTLDGKTYRLVPNDGNNTLHGGHRGFDKVVWTVKEHVAGGSSPFITLYYHSFDGEQGFPGDVDVHVTYQLSSPHVLSVRMNATARGKATPVNLAHHAYWNLGGDGSGNVLGEEVRLFASRYTPVDASLIPTGRMASVAGTPYDFRTPAAVGSRIGGLLSRGVNGYDINYVVDGRGLRPVAVVRDGASGRAMELWADQPGVQFYTANGLSGVRGKGGKVYGHYGALCLETQGFPDAVNRPSFPSQIVRPGKVYKHDMVFKFSF

SEQ ID NO: 52867 - protein, 363 aa, Glycine max
  peptide (1)..(363): Ceres Seq. ID no. 15176319
MARALLVALLLVSCFVALGLSGRADAAAERKTVGVYELNKGDFSIKVTNWGATLMSVILLDSRGNFGDVILGYDTVAEYMNGTAYFGGLIGRVANRIANARFTLDGKTYRLVPNDGNNTLHGGHRGFDKVVWTVKEHVAGGSSPFITLYYHSFDGEQGFPGDVDVHVTYQLSSPHVLSVRMNATARGKATPVNLAHHAYWNLGGDGSGNVLGEEVRLFASRYTPVDASLIPTGRMASVAGTPYDFRTPAAVGSRIGGLLSRGVNGYDINYVVDGRGLRPVAVVRDGASGRAMELWADQPGVQFYTANGLSGVRGKGGKVYGHYGALCLETQGFPDAVNRPSFPSQIVRPGKVYKHDMVFKFSF

SEQ ID NO: 52868 - protein, 309 aa, Glycine max
  peptide (1)..(309): Ceres Seq. ID no. 15176320
MSVILLDSRGNFGDVILGYDTVAEYMNGTAYFGGLIGRVANRIANARFTLDGKTYRLVPNDGNNTLHGGHRGFDKVVWTVKEHVAGGSSPFITLYYHSFDGEQGFPGDVDVHVTYQLSSPHVLSVRMNATARGKATPVNLAHHAYWNLGGDGSGNVLGEEVRLFASRYTPVDASLIPTGRMASVAGTPYDFRTPAAVGSRIGGLLSRGVNGYDINYVVDGRGLRPVAVVRDGASGRAMELWADQPGVQFYTANGLSGVRGKGGKVYGHYGALCLETQGFPDAVNRPSFPSQIVRPGKVYKHDMVFKFSF

SEQ ID NO: 52869 - DNA, 1429 bp, Glycine max
  misc_feature (1)..(1429): Ceres Seq. ID no. 15176611
accgtcgattcgcagctcgctcgccaatccaaccaatccataacccggctgcccctcgcccgtctccgccgcacccccaaaaccctagctcccctccccaccccaccccgtccccccaccgcctccggccgccgccgccgcccgcgaagatgccgccgaacctcgagtgccggatgtacgagccgcggttcccggaggtggacgcggcggtgatgatccaggtgaagcacatcgccgacatgggcgcctacgtctccctcctcgagtacaacaacatcgagggcatgatcctcttctccgagctctcccgccgccgcatccgctccatctcctccctcatcaaggtcggccgccaggagccctccatggtgctccgcgtcgaccgcgacaagggctacatcgacctctccaagcgccgcgtctccgaggaggaggccgccacctgcgaggaccgctacaacaagtccaagctcgtccactccatcatgcgccacgccgccgacaccctcggcgtcgacctcgagcccctctaccagcgcatcggctggcccctctaccgcaggtacggccacgccttcgaggccttcaagctcatcgtcaccgaccccgacgccgtgctcgacgtcctcacctacgaggagaccgtcgtcggtcccgatggtgtggaggtgactaacactgtgccggctgtcacccctgaggttaaggatgccctggtcaagaacataaggaggagaatgacaccacagccactcaagattcgtgctgatgttgagatgaaatgcttccagtttgatggtgttctccacattaaggaagccatgaggaaagctgaagctgctggaaatgctgattgccctgtgaagattaagctagttgctcctccgctttatgttctgaccacacagacacttgacaaagaccaggggatagcagttctgacaaatgcaaccaaagtttgtgcagaggcaattgaaaagcacaaggggaaattggtggtgaaggaagcagccagagctgtgagcgagagagacgacaagctgtttgcggacacgattgagaagctgaagctagcaggcgaggaggtcgacggcgacgacgacagcgaggaggaggacaatggcatgggggacgtggacttcacaaaggctggcgctggcacggactgagcgagtctcctcccaagtgggatgaggtcacttgtacagcgccagcaacgaaatgaaggggaagaatgtttggctcctctttgaggaggcacgttggatggatggatgagttttttttactctgttactgatattgatcagttgtaggctacccgtagttttacagattgatttgcttttctctgagcactgatgctgaatactgttaattgcgctttttggtacctgttttcatcaacatttatacatggattttcctc

SEQ ID NO: 52870 - protein, 388 aa, Glycine max
  peptide (1)..(388): Ceres Seq. ID no. 15176612
RRFAARSPIQPIHNPAAPRPSPPHPQNPSSPPHPTPSPHRLRPPPPPAKMPPNLECRMYEPRFPEVDAAVMIQVKHIADMGAYVSLLEYNNIEGMILFSELSRRRIRSISSLIKVGRQEPSMVLRVDRDKGYIDLSKRRVSEEEAATCEDRYNKSKLVHSIMRHAADTLGVDLEPLYQRIGWPLYRRYGHAFEAFKLIVTDPDAVLDVLTYEETVVGPDGVEVTNTVPAVTPEVKDALVKNIRRRMTPQPLKIRADVEMKCFQFDGVLHIKEAMRKAEAAGNADCPVKIKLVAPPLYVLTTQTLDKDQGIAVLTNATKVCAEAIEKHKGKLVVKEAARAVSERDDKLFADTIEKLKLAGEEVDGDDDSEEEDNGMGDVDFTKAGAGTD

SEQ ID NO: 52871 - protein, 339 aa, Glycine max
  peptide (1)..(339): Ceres Seq. ID no. 15176613
MPPNLECRMYEPRFPEVDAAVMIQVKHIADMGAYVSLLEYNNIEGMILFSELSRRRIRSISSLIKVGRQEPSMVLRVDRDKGYIDLSKRRVSEEEAATCEDRYNKSKLVHSIMRHAADTLGVDLEPLYQRIGWPLYRRYGHAFEAFKLIVTDPDAVLDVLTYEETVVGPDGVEVTNTVPAVTPEVKDALVKNIRRRMTPQPLKIRADVEMKCFQFDGVLHIKEAMRKAEAAGNADCPVKIKLVAPPLYVLTTQTLDKDQGIAVLTNATKVCAEAIEKHKGKLVVKEAARAVSERDDKLFADTIEKLKLAGEEVDGDDDSEEEDNGMGDVDFTKAGAGTD

SEQ ID NO: 52872 - protein, 331 aa, Glycine max
  peptide (1)..(331): Ceres Seq. ID no. 15176614
MYEPRFPEVDAAVMIQVKHIADMGAYVSLLEYNNIEGMILFSELSRRRIRSISSLIKVGRQEPSMVLRVDRDKGYIDLSKRRVSEEEAATCEDRYNKSKLVHSIMRHAADTLGVDLEPLYQRIGWPLYRRYGHAFEAFKLIVTDPDAVLDVLTYEETVVGPDGVEVTNTVPAVTPEVKDALVKNIRRRMTPQPLKIRADVEMKCFQFDGVLHIKEAMRKAEAAGNADCPVKIKLVAPPLYVLTTQTLDKDQGIAVLTNATKVCAEAIEKHKGKLVVKEAARAVSERDDKLFADTIEKLKLAGEEVDGDDDSEEEDNGMGDVDFTKAGAGTD

SEQ ID NO: 52873 - DNA, 804 bp, Glycine max
  misc_feature (1)..(804): Ceres Seq. ID no. 15170444
actaacacaacaatattggttaaaaatctccactcattcattttgatatctctctctcttttaaatcaaaactccaaaaaagaactatggaacgtaactccctcttaacggttgcattgctctgcattgtcgtcgccggtgtcggtggccagtctcctgcctcctctccaactagctctcccgccgctccttctgctccaactacttcccctgccaaccctcccgccgctactccttcctctcccatggctaaaacgcctgcttcttcacccgtggaagcacctaagtctccggctcctgtagtatcctctccaccgccgacaccagttcccgagagctctccaccgtctccttcacccaaggcttccgctccggtgagctctccaccggctccaacaccagaagcagttactcctcctgctccagtagccgctccagccgctgatgtaccggctccggctccaaaaaagcataagaagtccaagaagcatcaagcaccggccccggctcctgaacttgacagtccacctgcaccaccgacagaagctcccggccctagctccgaagacgcaagctctcccggtccagccacatccgccgacgatcagagcggagcagagagcacaagggtgttgcggaatgtagcggtgggcgcggctgcaaccgcctgggccgttctcgttatggccttttaagttatttgtatttattttttcgcccttagttctttagttttgttcttttaactctacgattgtctctttcttttttcacatttgagtaatgagtattatttcattgatt

SEQ ID NO: 52874 - protein, 202 aa, Glycine max
  peptide (1)..(202): Ceres Seq. ID no. 15170445
MERNSLLTVALLCIVVAGVGGQSPASSPTSSPAAPSAPTTSPANPPAATPSSPMAKTPASSPVEAPKSPAPVVSSPPPTPVPESSPPSPSPKASAPVSSPPAPTPEAVTPPAPVAAPAADVPAPAPKKHKKSKKHQAPAPAPELDSPPAPPTEAPGPSSEDASSPGPATSADDQSGAESTRVLRNVAVGAAATAWAVLVMAF

SEQ ID NO: 52875 - protein, 149 aa, Glycine max
  peptide (1)..(149): Ceres Seq. ID no. 15170446
MAKTPASSPVEAPKSPAPVVSSPPPTPVPESSPPSPSPKASAPVSSPPAPTPEAVTPPAPVAAPAADVPAPAPKKHKKSKKHQAPAPAPELDSPPAPPTEAPGPSSEDASSPGPATSADDQSGAESTRVLRNVAVGAAATAWAVLVMAF

SEQ ID NO: 52876 - DNA, 1019 bp, Glycine max
  misc_feature (1)..(1019): Ceres Seq. ID no. 14309484
ctccaatcttcttctcttcttttctcgttctctttctcttgtgctgcgtgccaagccagacccatacatacacccacccagcccaccaatcactgccagcagcgacggagtgagggaagcaagcaaggaaggaagggacgctcggatggcgatgggagcggctgtgcgggaggcggcggcggacggcgtcgtgaccttcctctgggtgctctgcgtctccacgctcggcgcctccacggccgccgtcaccacctacctcagcctgcacgaggggatccactacgccctcctcgtcaccgtctccatcctcgccctcctcctcttcgccttcaacctcctctgcgacgccctcggcggcgccagcttcaaccccaccggcgtcgccgccttctacgccgccggcctcaccagcccctcgctcttctccatcgcgctccgcctaccagcgcaggccgccggagccgtgggcggagctctggccatctccgagctgatgccggagcagtacaagcacatgctcggcgggccctcgctcaaggtggatccccacaccggcgccgtcgccgaaggtgtgctcaccttcgtcatcacctttgccgtcctctgcatcatcgtcaagggaccccgcaaccccatcgtcaagacagcgatgctctccgtcaccaccgtcagcctcgtcctcaccggcgccgcatacaccggcccctccatgaaccctgccaacgcctttggttgggcgtatgttaacaatctgcacaacacctgggagcagctgtacgtgtactggatatgccccttcatcggtgccattctcgctgcgtggaccttcagggccgtgttcccgccaccggcccctaagcccaagaccaagaaagcatgatgaactcaagcacaaactttgacttagcaatttggggacctgaagaagcgaacatggtttgctagggaataatttgaaattgtatttaatcacctcaatgttacaccgatgtttaacttaaaagtgatcatttatcagt

SEQ ID NO: 52877 - protein, 292 aa, Glycine max
  peptide (1)..(292): Ceres Seq. ID no. 14309485
SNLLLFFSRSLSLVLRAKPDPYIHPPSPPITASSDGVREASKEGRDARMAMGAAVREAAADGVVTFLWVLCVSTLGASTAAVTTYLSLHEGIHYALLVTVSILALLLFAFNLLCDALGGASFNPTGVAAFYAAGLTSPSLFSIALRLPAQAAGAVGGALAISELMPEQYKHMLGGPSLKVDPHTGAVAEGVLTFVITFAVLCIIVKGPRNPIVKTAMLSVTTVSLVLTGAAYTGPSMNPANAFGWAYVNNLHNTWEQLYVYWICPFIGAILAAWTFRAVFPPPAPKPKTKKA

SEQ ID NO: 52878 - protein, 248 aa, Glycine max
  peptide (1)..(248): Ceres Seq. ID no. 14309486
LQSSSLLFSFSFSCAACQARPIHTPTQPTNHCQQRRSEGSKQGRKGRSDGDGSGCAGGGGGRRRDLPLGALRLHARRLHGRRHHLPQPARGDPLRPPRHRLHPRPPPLRLQPPLRRPRRRQLQPHRRRRLLRRRPHQPLALLHRAPPTSAGRRSRGRSSGHLRADAGAVQAHARRALAQGGSPHRRRRRRCAHLRHHLCRPLHHRQGTPQPHRQDSDALRHHRQPRPHRRRIHRPLHEPCQRLWLGVC

SEQ ID NO: 52879 - protein, 244 aa, Glycine max
  peptide (1)..(244): Ceres Seq. ID no. 14309487
MAMGAAVREAAADGVVTFLWVLCVSTLGASTAAVTTYLSLHEGIHYALLVTVSILALLLFAFNLLCDALGGASFNPTGVAAFYAAGLTSPSLFSIALRLPAQAAGAVGGALAISELMPEQYKHMLGGPSLKVDPHTGAVAEGVLTFVITFAVLCIIVKGPRNPIVKTAMLSVTTVSLVLTGAAYTGPSMNPANAFGWAYVNNLHNTWEQLYVYWICPFIGAILAAWTFRAVFPPPAPKPKTKKA

SEQ ID NO: 52880 - DNA, 594 bp, Glycine max
  misc_feature (1)..(594): Ceres Seq. ID no. 14309458
atcccacagagccaactccaaataaattaaatatataaataaaataaattgaactcctatctggggtttcttttacaaatttatttatttaatttatttggaaaataacaaatcattagtaataaatgaggatgtctaaaaatgtcaaagtgttggtctctctagttcttgtagtgttattggctcttgcagcaaccaatattgaggcaagatacataaattatcgcgatcttcgtagtggagatcacagtttggcttgcgataaggcgaatcctagcacctgcacgaagcaagaagtcaatcgttaccaaagaggatgcgagacggccgatcggtgccgtgaatctcgttaatttatacagatgataaccgaagagcataatcatgcatcaaattagtttcctaattactataatagattgacaggcttctaacttggagaacaaatcttggttagtttatagaaatgcaatcctcgtattgatttgagatgatcaaattgatttcctttattatttaattagtctgttattggttttgtattattttaacacgatgatgttacgatcaaacaaatataaatatattgttccc

SEQ ID NO: 52881 - protein, 75 aa, Glycine max
  peptide (1)..(75): Ceres Seq. ID no. 14309459
MRMSKNVKVLVSLVLVVLLALAATNIEARYINYRDLRSGDHSLACDKANPSTCTKQEVNRYQRGCETADRCRESR

SEQ ID NO: 52882 - protein, 73 aa, Glycine max
  peptide (1)..(73): Ceres Seq. ID no. 14309460
MSKNVKVLVSLVLVVLLALAATNIEARYINYRDLRSGDHSLACDKANPSTCTKQEVNRYQRGCETADRCRESR

SEQ ID NO: 52883 - DNA, 1318 bp, Glycine max
  misc_feature (1)..(1318): Ceres Seq. ID no. 15170451
ccccactttcccctccccccgactgcgaatcattccgttcgtcgctcgacatggcgacggaacctgtagagtttcaggttgtggtgctcagggtgtccatccattgtgaagggtgcaaaaagaaggtgaagaaggtgctcctacatattgatggcgtgtacagatgcgacatcgacgcccggagaaacagggtggcggtcacagtctctccaaagatcgacgccgggatcctcgtcgcgaggctgcgcaagtccggcaagctggcggagccttggccggaggagcccaagcagcagcaggagccgcctccgcctgcagagagccaaagccaagaaaccaagaaccaagcagatgatgccagcaagcctaacgaggccgccgagaagcccgctgccgagccaagcaccgcccagcctccggcgccggagcccgagaagaccgccgaagagaccccaccgccggccgaagaaaacaaagggcccgacgaggccaaggcggagacagggccgcaacaacaacccagcgaggcgaacgagaaagccaagcagcagcagcagcaggagcagcatgatcatcatgataagccgatggacgccagggtgacgatggagtacgacgacgcccgcagcagaggcgtctacggctacgggggcccccaccagtacatgccagcgacacggcagccgccggtgcacgtcatgagctacaacgtggcgcggccgatggcgagctcgtcctactacgccgccgcgccaacgccggcggcgatgccgatgcccacgcccatggcgaggccagggccgtcgcacggcggctacatagacgagtacgcgcctccgaactactacagccggccggcgccatcggcgtacgagccctactactaccccgattcccagccatcaccatacggacagcatcagcgttctgcggccgaggactactactacggagcgcccccgccgcctacgcagaggagcgccttctcgccgccgcgggaggcttacggcgacatgttcaacgacgagaatgccaattcttgcagcgtgatgtgaaggggatccattcggcaggcttagctagttaattcaaagttttttaagtgaggacctctccatgtgttagagccgagattttagtagtagcaaccgatgtattagcagtattgctcaaagttccaagctagtactagaataaaccggtgcatgcatgagaggaagaacgggagggactcatggaacagctctgatggatgcttactggagcaattttgtaatatacttcctctgtgtttgaactgcaaaaacgtcttatattt

SEQ ID NO: 52884 - protein, 350 aa, Glycine max
  peptide (1)..(350): Ceres Seq. ID no. 15170452
PLSPPPDCESFRSSLDMATEPVEFQVVVLRVSIHCEGCKKKVKKVLLHIDGVYRCDIDARRNRVAVTVSPKIDAGILVARLRKSGKLAEPWPEEPKQQQEPPPPAESQSQETKNQADDASKPNEAAEKPAAEPSTAQPPAPEPEKTAEETPPPAEENKGPDEAKAETGPQQQPSEANEKAKQQQQQEQHDHHDKPMDARVTMEYDDARSRGVYGYGGPHQYMPATRQPPVHVMSYNVARPMASSSYYAAAPTPAAMPMPTPMARPGPSHGGYIDEYAPPNYYSRPAPSAYEPYYYPDSQPSPYGQHQRSAAEDYYYGAPPPPTQRSAFSPPREAYGDMFNDENANSCSVM

SEQ ID NO: 52885 - protein, 334 aa, Glycine max
  peptide (1)..(334): Ceres Seq. ID no. 15170453
MATEPVEFQVVVLRVSIHCEGCKKKVKKVLLHIDGVYRCDIDARRNRVAVTVSPKIDAGILVARLRKSGKLAEPWPEEPKQQQEPPPPAESQSQETKNQADDASKPNEAAEKPAAEPSTAQPPAPEPEKTAEETPPPAEENKGPDEAKAETGPQQQPSEANEKAKQQQQQEQHDHHDKPMDARVTMEYDDARSRGVYGYGGPHQYMPATRQPPVHVMSYNVARPMASSSYYAAAPTPAAMPMPTPMARPGPSHGGYIDEYAPPNYYSRPAPSAYEPYYYPDSQPSPYGQHQRSAAEDYYYGAPPPPTQRSAFSPPREAYGDMFNDENANSCSVM

SEQ ID NO: 52886 - DNA, 1420 bp, Glycine max
  misc_feature (1)..(1420): Ceres Seq. ID no. 15176309
atagagatcgttagagtgagtgattgaaattcttgagacccacatcgtgtgtgtttgttttcattcctcggaggatattctaaagatggttgcgagaaccccaccaaagcagaagaagctgttggctgctctcaaccctgttctgattaaagaaacactcaacaaggtggatcagtgcgtggctcggctgcaggaacttcagtacactgtgactggtggaaccaaggtggtgtcaggggtgactctcagccctcgcagcaccagaggctatctcagaaccagtctcaggtgcaagcaagaatcactcaggatcaagaatggtgcctcaaggagatctcctgtggggaagtttccagcaaacacaggtgaatggaagagaatgtcattgcctgcaatgcttgtaggcgaaactgttggagaaattttgcaggcaagtcagtttgccagagaaatagtctcagcagttggtaagaaaactgacccagaggatccaaaaactccaatgtctcaacgcagcaacaaaaaagtagaacttgaaaacacacaactcagggccagaaggaagaaagagaagcaaaccaaagcacagaacgatggttccccatcacttcaaagggctcgttccagaatcaacttcaaggtttctcctcctaaggttagagaatttgataaagaaaggaacaggtatatggcaaatagggtgtctccaagaaataggccatggactagaaaaacagtactattccccaaccctttgttcctctccactcattcctcttcacagcaacagttttgcaagacaaggtcacctatcataacaagaaatagaggaacaacatcacacaagtttttgatcaagtctccatcttcgccatcagggccacaacagtttagcaagaccaggtctcctgtcataacaagaaataggggtggaacaccacacaagtttttgatcaagtctccatcttcagcttccaaatttcaagtccagatcaaaaaaagtccaccaactgtgtctatttcaccaacaaaacctgcaaggttgagcagaagtcctcccaagagatccacttccactgcatccaaattccgtcgatctttctctccttcaagaatagcatccagattagtatcactctcaccattaaggaccaggaaaactgtacagaaaaatgatgggtttgtaagtggactcaaacagcgcccgctatcatcagtgcaataccctgcttgaggaatttaataacacattaatagtgctatgctctctggctactttgtcactttgttgtattttttagtcaccatgtccattcttgatgtccataactgtgctgtgctcttgtggtttttcctttttggtggtttcaggttgtgtgaggatttctctttaatgtccatagcattttttttcccattc

SEQ ID NO: 52887 - protein, 382 aa, Glycine max
  peptide (1)..(382): Ceres Seq. ID no. 15176310
MVARTPPKQKKLLAALNPVLIKETLNKVDQCVARLQELQYTVTGGTKVVSGVTLSPRSTRGYLRTSLRCKQESLRIKNGASRRSPVGKFPANTGEWKRMSLPAMLVGETVGEILQASQFAREIVSAVGKKTDPEDPKTPMSQRSNKKVELENTQLRARRKKEKQTKAQNDGSPSLQRARSRINFKVSPPKVREFDKERNRYMANRVSPRNRPWTRKTVLFPNPLFLSTHSSSQQQFCKTRSPIITRNRGTTSHKFLIKSPSSPSGPQQFSKTRSPVITRNRGGTPHKFLIKSPSSASKFQVQIKKSPPTVSISPTKPARLSRSPPKRSTSTASKFRRSFSPSRIASRLVSLSPLRTRKTVQKNDGFVSGLKQRPLSSVQYPA

SEQ ID NO: 52888 - protein, 284 aa, Glycine max
  peptide (1)..(284): Ceres Seq. ID no. 15176311
MSLPAMLVGETVGEILQASQFAREIVSAVGKKTDPEDPKTPMSQRSNKKVELENTQLRARRKKEKQTKAQNDGSPSLQRARSRINFKVSPPKVREFDKERNRYMANRVSPRNRPWTRKTVLFPNPLFLSTHSSSQQQFCKTRSPIITRNRGTTSHKFLIKSPSSPSGPQQFSKTRSPVITRNRGGTPHKFLIKSPSSASKFQVQIKKSPPTVSISPTKPARLSRSPPKRSTSTASKFRRSFSPSRIASRLVSLSPLRTRKTVQKNDGFVSGLKQRPLSSVQYPA

SEQ ID NO: 52889 - protein, 279 aa, Glycine max
  peptide (1)..(279): Ceres Seq. ID no. 15176312
MLVGETVGEILQASQFAREIVSAVGKKTDPEDPKTPMSQRSNKKVELENTQLRARRKKEKQTKAQNDGSPSLQRARSRINFKVSPPKVREFDKERNRYMANRVSPRNRPWTRKTVLFPNPLFLSTHSSSQQQFCKTRSPIITRNRGTTSHKFLIKSPSSPSGPQQFSKTRSPVITRNRGGTPHKFLIKSPSSASKFQVQIKKSPPTVSISPTKPARLSRSPPKRSTSTASKFRRSFSPSRIASRLVSLSPLRTRKTVQKNDGFVSGLKQRPLSSVQYPA

SEQ ID NO: 52890 - DNA, 563 bp, Glycine max
  misc_feature (1)..(563): Ceres Seq. ID no. 12595786
gctctggcaaaagtagtgacacccgaatgttatgagggagatgtcatagcaaacccattaggttttgctgctcaaaacataagggaagcagcatcaaatggttacggatgagtctataaggtcacaactacatgctagtttaggccaagggcaactgaatcacataagggcttttttcacgggacatgcacacagtattaatattccttttgatgtgaatcatagcattttcctcacaagctggatgaacatgccagtgtatgaatcagattttggttgggaaaagcctttgcattttggtatagtaagtcgggctcaagtaaatagggcaaccatttttccaagccctgatggggatggtgttgttatccctatatttttccagacagcccttatggagctttttttaaagtttttttttgaggatatggataatatggagatatgaaatatcctgtgtttgggatatgcttttgaacatttcaaattctgtttggtgtttttagagtgggaatggtaatanttattttaagaataaggacatgactttggtgatctgttgt

SEQ ID NO: 52891 - protein, 116 aa, Glycine max
  peptide (1)..(116): Ceres Seq. ID no. 12595787
MVTDESIRSQLHASLGQGQLNHIRAFFTGHAHSINIPFDVNHSIFLTSWMNMPVYESDFGWEKPLHFGIVSRAQVNRATIFPSPDGDGVVIPIFFQTALMELFLKFFFEDMDNMEI

SEQ ID NO: 52892 - protein, 67 aa, Glycine max
  peptide (1)..(67): Ceres Seq. ID no. 12595788
MNMPVYESDFGWEKPLHFGIVSRAQVNRATIFPSPDGDGVVIPIFFQTALMELFLKFFFEDMDNMEI

SEQ ID NO: 52893 - protein, 65 aa, Glycine max
  peptide (1)..(65): Ceres Seq. ID no. 12595789
MPVYESDFGWEKPLHFGIVSRAQVNRATIFPSPDGDGVVIPIFFQTALMELFLKFFFEDMDNMEI

SEQ ID NO: 52894 - DNA, 1549 bp, Glycine max
  misc_feature (1)..(1549): Ceres Seq. ID no. 15176963
tttcaccaaacaatttaaccttttgggattgttggtgatacaactattttttcaaacacatccctccattggtagtttggtacttctattttcacttcaatgtagcttgcagttgcagtgtttaatattccaactatttgcaattaccatttcctttcctacatttagtatccttaggatttagtccatgtatgctatacctttccaaccaacattagtggtgtgttgaaaatcagaatataatctgtatttattgtaataatagcggtttataggcatgtgatatctgatttagaggaaacaaaatatcctctatttatgtatgagtaatgtaacaagcctatatgaactcgcatttgttgtgtattcaaacacacggtattcaacctagtcatgtctttgttttctctctcttaacatggtattcagagcctgacagaggcattcctcgaaaatcagaaccgtgactacccagtggacccactgtccccggagacaaattttttttgcccaccgtgttcttccctggtctataataatacatgttcatctctgaaatgtttcaattttgtatttcatgacaggaaaatcaaccattcttagattgctattcagattctttgatcctcattctggaagtataaagatagatgatcaaaatattcgggaggtaacccttgagagtttgcggaagtccattggtgttgttccacaagatactgtacttttcaatgatacaatatttcataacattcactatggtcggctatcagcaacaaaagaggaggtctatgaagctgctcaacaagcagcaattcataacactatcatgaattttcctgataaatattcaactgttgtgggagagcgaggactaaagttaagtggtggtgagaagcaacgtgttgccctagctcgtgcgttcttaaaagcacctgcaatactgttgtgtgatgaagctacaagtgctcttgacagcacaacagaagcagagattttaagtgcattaaagtcagtagcaaataatcggacttccatattcattgctcacaggcttaccacagcaatgcagtgtgacgagatcattgttttggaaaatgggaaggtgattgagcaaggaccccatgaagtgctcttatcaaaagcaggaagatatgcacagctgtggggacagcaaaataacactgttgatgcaattgatacagccatcaagctagaagcataaaatgatagaaacctttctcccttcctcttgctgagaaaaaaaaatgcataatacaatgttaatagcccattattacaattttgaaatttaatgattcctagcctgttgtgagctttctttagtctgtatattattacaatcgtattgttagctagaccaattaatgcatagatcctttgccgggttatgcagtttgatacattctttgtaaccacatataagttctcggccatgatgaatgaggcttgatgagctttctgcaaagagcaagagtttgtattattggaattcaattatagattgtgtgggtatgtattgttgcac

SEQ ID NO: 52895 - protein, 215 aa, Glycine max
  peptide (1)..(215): Ceres Seq. ID no. 15176964
MTGKSTILRLLFRFFDPHSGSIKIDDQNIREVTLESLRKSIGVVPQDTVLFNDTIFHNIHYGRLSATKEEVYEAAQQAAIHNTIMNFPDKYSTVVGERGLKLSGGEKQRVALARAFLKAPAILLCDEATSALDSTTEAEILSALKSVANNRTSIFIAHRLTTAMQCDEIIVLENGKVIEQGPHEVLLSKAGRYAQLWGQQNNTVDAIDTAIKLEA

SEQ ID NO: 52896 - protein, 131 aa, Glycine max
  peptide (1)..(131): Ceres Seq. ID no. 15176965
MNFPDKYSTVVGERGLKLSGGEKQRVALARAFLKAPAILLCDEATSALDSTTEAEILSALKSVANNRTSIFIAHRLTTAMQCDEIIVLENGKVIEQGPHEVLLSKAGRYAQLWGQQNNTVDAIDTAIKLEA

SEQ ID NO: 52897 - DNA, 1683 bp, Glycine max
  misc_feature (1)..(1683): Ceres Seq. ID no. 14311103
gaacaatccatccttgaacgtgcctttagatctgcaaacttcagcttagagcaaaacaataaataaaaaatccaccttttctatcaacctctagctatatccatttttatccaaatgacagaaaaactttccaacaatccatccttgaacgtgcctttactatccgagtggaatcaccatgatgaggagaaagccatagcctctcatccttctaccaaaaatactgtgtccttctttcgcacatgccttaatggactcaatgcaatatcaggtgttggaatactgtcagttccatatgctcttgcatctggagggtggttaagcttggttcttctatttgctattgccgctgcagcattttacacaggcacgttgattaaaagatgtatggacaagaattcgaacattaaaacctacccagatataggtgagcttgcatttggaaagataggaaggctaataatatcagtgtccatgtacacggagctctacttggtttcaatagggttcttgattctggaaggcgataacttgaataacttgtgccccattgaagaggttcagatagctggcttcgtaattggtgggaagcaactgtttgtgatattggttgcccttatcatcttgcccacagtttggttggacaacttgagtatgctttcttatgtatctgcaagtggagtgtttgcttctgctgtaatcatcctatcaatatcatggactggaacatttgatggagttggttttcatcaaaagggaactcttgttaattggcgcggaatccccacagctgttagcttgtatgccttttgctattgtgcacatcccgtcttccccaccttgtacaattccatgactaacaaacatcagttctctaatgtcctattagtatgctttctgttaaccactgtgggttatgcatccatggctataattggttatctaatgtttggtgctgacgttgaatcacaagtaacattaaacctgccactgaacaaagtaagctcaaaattagcaatatatacaaccttggtcaatcccatatccaagttcgctttgatggcaacaccaattaccaatgcgttgaaagatttacttccaagggcgtacaagaatagagcgaccaacatcttagtcagcactgtcttggtaataagcgctaccattgttgccctcagtgttcctttctttggggatctcatgtctctggttggagcgtttttaagtgtcacagcttctattctgcttccatgcttgtgttacttgaagatttcaggcacttacaatgaatttgggtgtgagaccatagccatagtgacaataatagtagcagctatagcaatgggaatatctggaacatatacctctgtcatggaaatagtacatcatttgtaatagacaatgcagtggtccattctattgactgtaaatttcctcaaaaaaggatttttttttttctttcactcatgtgactgtatgtcttacgaggaaaaggagaggtaaatactgatgaagaagtaagatatggttggtgaaaaagaggaaaaggaaaatatatgatacagatcatatatgctatcctatatctagagagagaaagaaaaagagagaaagaaaaagagagaaaaatataaatattataaaatttatgatgtaataaaaaaatattgatgatgtgtttat

SEQ ID NO: 52898 - protein, 426 aa, Glycine max
  peptide (1)..(426): Ceres Seq. ID no. 14311104
MTEKLSNNPSLNVPLLSEWNHHDEEKAIASHPSTKNTVSFFRTCLNGLNAISGVGILSVPYALASGGWLSLVLLFAIAAAAFYTGTLIKRCMDKNSNIKTYPDIGELAFGKIGRLIISVSMYTELYLVSIGFLILEGDNLNNLCPIEEVQIAGFVIGGKQLFVILVALIILPTVWLDNLSMLSYVSASGVFASAVIILSISWTGTFDGVGFHQKGTLVNWRGIPTAVSLYAFCYCAHPVFPTLYNSMTNKHQFSNVLLVCFLLTTVGYASMAIIGYLMFGADVESQVTLNLPLNKVSSKLAIYTTLVNPISKFALMATPITNALKDLLPRAYKNRATNILVSTVLVISATIVALSVPFFGDLMSLVGAFLSVTASILLPCLCYLKISGTYNEFGCETIAIVTIIVAAIAMGISGTYTSVMEIVHHL

SEQ ID NO: 52899 - protein, 335 aa, Glycine max
  peptide (1)..(335): Ceres Seq. ID no. 14311105
MDKNSNIKTYPDIGELAFGKIGRLIISVSMYTELYLVSIGFLILEGDNLNNLCPIEEVQIAGFVIGGKQLFVILVALIILPTVWLDNLSMLSYVSASGVFASAVIILSISWTGTFDGVGFHQKGTLVNWRGIPTAVSLYAFCYCAHPVFPTLYNSMTNKHQFSNVLLVCFLLTTVGYASMAIIGYLMFGADVESQVTLNLPLNKVSSKLAIYTTLVNPISKFALMATPITNALKDLLPRAYKNRATNILVSTVLVISATIVALSVPFFGDLMSLVGAFLSVTASILLPCLCYLKISGTYNEFGCETIAIVTIIVAAIAMGISGTYTSVMEIVHHL

SEQ ID NO: 52900 - protein, 306 aa, Glycine max
  peptide (1)..(306): Ceres Seq. ID no. 14311106
MYTELYLVSIGFLILEGDNLNNLCPIEEVQIAGFVIGGKQLFVILVALIILPTVWLDNLSMLSYVSASGVFASAVIILSISWTGTFDGVGFHQKGTLVNWRGIPTAVSLYAFCYCAHPVFPTLYNSMTNKHQFSNVLLVCFLLTTVGYASMAIIGYLMFGADVESQVTLNLPLNKVSSKLAIYTTLVNPISKFALMATPITNALKDLLPRAYKNRATNILVSTVLVISATIVALSVPFFGDLMSLVGAFLSVTASILLPCLCYLKISGTYNEFGCETIAIVTIIVAAIAMGISGTYTSVMEIVHHL

SEQ ID NO: 52901 - DNA, 1560 bp, Glycine max
  misc_feature (1)..(1560): Ceres Seq. ID no. 14310736
atatttcaacctcctcagatttctttcttagcaaaccaattttcaaccacatgggtatccctcactttctcgttataccatatccagttctgggtcatgtgaatccccttatgcaattgtctgaggctctaaccaagcatggctgcaaaatcacatttctgaacacagagttcagccacaaaagagcaaacaacgctggtgctggactagacaaccttaaggaatcaggaatcaagtttgtgacactcccagatggcttggaacctgaagatgatagaagtgaccatgagaaagttattttgtctatccaaagcaacatgccttctttgcttccaaagctcatagaagatatcaatgctttggatgctgagaatagcataacttgcatagttgctactatgaatatgggttgggccttggaaattggacacaaacttggaattgaaggagctcttctttggactgcatctgcaacttccttggctgcatgctattgcattccaaggctgattgatgatggaattatagactcagaaggagtagcaaccaagaaacaagaattccagctttccctaaatatgcctatgatggaccctgcagaccttccatggggtggcctacgtaaggttttcttccctcaaatagttaaagagatgaaaatcttggagttaggagaatggtggctttgcaacaccacttgtgatcttgagcctggagcacttgccatatctccaaggttcctcccaattggcccattgatggaaagtgacaccaacaaaaattcattctgggaagaggacataacttgcctagattggttggatcagcagccacctcaatctgttgtgtatgtttcttttggtagtttagcaatagttgaacctaaccaattcaaagaactagctctaggacttgatctccttaacatgccttttctttgggttgtacgttccgacaataataacaaggtaaatagtgcataccctgatgaattccatggaagtaaaggtaaaattgtcaattgggtgcctcagaggaagatattgaaccaccctgccatagcttgcttcattagtcactgtggttggaattcaactatagaaggtgtatgcagtggcatacctttcttgtgttggccatttttctctgaccaatttgttaataggtcgtatatttgtgacgtgtggaaggttggattgaaattagacaaggatggaaatggattaatactgaagggagagataaggaagaaggtggaccaattgcttgggaatgaagacatcaaagctagatcgttgaaactgaaggaattgactgtgaataactcagttaatggtgatcaatcttcaaagaatctagaaaagtttattaactgggcaaagtagtactacctcctgctatagtttggattggaagttgtctctctttaatttttctcaatttttatgtctgaaattcgtttactatagctaaacagcagattgcatctccctgttgggtccaaagatactcaaaagaatcttttccaatttcaaaagaatagaagttaagtccaatgac

SEQ ID NO: 52902 - protein, 460 aa, Glycine max
  peptide (1)..(460): Ceres Seq. ID no. 14310737
ISTSSDFFLSKPIFNHMGIPHFLVIPYPVLGHVNPLMQLSEALTKHGCKITFLNTEFSHKRANNAGAGLDNLKESGIKFVTLPDGLEPEDDRSDHEKVILSIQSNMPSLLPKLIEDINALDAENSITCIVATMNMGWALEIGHKLGIEGALLWTASATSLAACYCIPRLIDDGIIDSEGVATKKQEFQLSLNMPMMDPADLPWGGLRKVFFPQIVKEMKILELGEWWLCNTTCDLEPGALAISPRFLPIGPLMESDTNKNSFWEEDITCLDWLDQQPPQSVVYVSFGSLAIVEPNQFKELALGLDLLNMPFLWVVRSDNNNKVNSAYPDEFHGSKGKIVNWVPQRKILNHPAIACFISHCGWNSTIEGVCSGIPFLCWPFFSDQFVNRSYICDVWKVGLKLDKDGNGLILKGEIRKKVDQLLGNEDIKARSLKLKELTVNNSVNGDQSSKNLEKFINWAK

SEQ ID NO: 52903 - protein, 444 aa, Glycine max
  peptide (1)..(444): Ceres Seq. ID no. 14310738
MGIPHFLVIPYPVLGHVNPLMQLSEALTKHGCKITFLNTEFSHKRANNAGAGLDNLKESGIKFVTLPDGLEPEDDRSDHEKVILSIQSNMPSLLPKLIEDINALDAENSITCIVATMNMGWALEIGHKLGIEGALLWTASATSLAACYCIPRLIDDGIIDSEGVATKKQEFQLSLNMPMMDPADLPWGGLRKVFFPQIVKEMKILELGEWWLCNTTCDLEPGALAISPRFLPIGPLMESDTNKNSFWEEDITCLDWLDQQPPQSVVYVSFGSLAIVEPNQFKELALGLDLLNMPFLWVVRSDNNNKVNSAYPDEFHGSKGKIVNWVPQRKILNHPAIACFISHCGWNSTIEGVCSGIPFLCWPFFSDQFVNRSYICDVWKVGLKLDKDGNGLILKGEIRKKVDQLLGNEDIKARSLKLKELTVNNSVNGDQSSKNLEKFINWAK

SEQ ID NO: 52904 - protein, 424 aa, Glycine max
  peptide (1)..(424): Ceres Seq. ID no. 14310739
MQLSEALTKHGCKITFLNTEFSHKRANNAGAGLDNLKESGIKFVTLPDGLEPEDDRSDHEKVILSIQSNMPSLLPKLIEDINALDAENSITCIVATMNMGWALEIGHKLGIEGALLWTASATSLAACYCIPRLIDDGIIDSEGVATKKQEFQLSLNMPMMDPADLPWGGLRKVFFPQIVKEMKILELGEWWLCNTTCDLEPGALAISPRFLPIGPLMESDTNKNSFWEEDITCLDWLDQQPPQSVVYVSFGSLAIVEPNQFKELALGLDLLNMPFLWVVRSDNNNKVNSAYPDEFHGSKGKIVNWVPQRKILNHPAIACFISHCGWNSTIEGVCSGIPFLCWPFFSDQFVNRSYICDVWKVGLKLDKDGNGLILKGEIRKKVDQLLGNEDIKARSLKLKELTVNNSVNGDQSSKNLEKFINWAK

SEQ ID NO: 52905 - DNA, 1259 bp, Glycine max
  misc_feature (1)..(1259): Ceres Seq. ID no. 15174740
gacgtacctcattattcttaaacctccttttctattctattcaattcaataccagtggtggtgactcacttgttgttggagcaaagctgctcgtgatcaattttcgtgttccttcttcgttcccaccgaatgaggattaattatcaattatatatcatatattaggtttgtttgacttgttttcgtttatgtgaaaaacgatttctctattgtatacaacttcggatgcgcatatcgagctttttcggttatcaatgacgttattgcagaatctgagatgttgctttgatcgctactgtggacatactttcacgaacaaccgaagatgctcgctgttgtttaactagaatattctattttgtagcaaatatgttctacgcgttggattggcggagcatggttaacgttttggaccttgaagattttgttgctccggaagatatgaggagcaattgcgacatgttcatttgttggtaaaagagaggttgatcttccgccatgtcttcccttcaactgttccaactaactcagcatggccggagttttctggcttcaaggagaaaaactttgctacttgcaactggtatcttagttgctggtggaactgcagcatatgtgcaatcgaggtttagaggtaatagagatgatttattaggtgattcctatgagcgcaataatgataaagaactcacaaaggaggaggtcatgaaaggaacttctgcaccaaagaataaacaaaagaaaggagggttgaagtcacttcaagtccttgctgcaattcttttatctgagatgggccaattaggtgcaaagaaccttttatctttggtttctatagtggtgctgcgaaccactttgagcaacaggctagcaaaagtgcaaggtttcctatttcgcgccgcttttcttcgacgtgtgccattgtttctgcggctaatttcagaaaatattcttttgtgtttcctcttatcaaccatgcagtctacatctaagtacattactgggactttgagtctgcacttccgtaaaatattgactaaacttatccattctcgctattttgaggtagatattgctgatttgtatgtaaaagcttactatatttgattgtctgtattgagcttgttatccatttatgcattcctactgtcatatgaagtgtctgtatatttacttgtgaactaaaatctttccgagttatttttacctgtttataaggcttgtctgttttcttctttatttgcaatgtatgaaagttc

SEQ ID NO: 52906 - protein, 202 aa, Glycine max
  peptide (1)..(202): Ceres Seq. ID no. 15174741
MSSLQLFQLTQHGRSFLASRRKTLLLATGILVAGGTAAYVQSRFRGNRDDLLGDSYERNNDKELTKEEVMKGTSAPKNKQKKGGLKSLQVLAAILLSEMGQLGAKNLLSLVSIVVLRTTLSNRLAKVQGFLFRAAFLRRVPLFLRLISENILLCFLLSTMQSTSKYITGTLSLHFRKILTKLIHSRYFEVDIADLYVKAYYI

SEQ ID NO: 52907 - protein, 133 aa, Glycine max
  peptide (1)..(133): Ceres Seq. ID no. 15174742
MKGTSAPKNKQKKGGLKSLQVLAAILLSEMGQLGAKNLLSLVSIVVLRTTLSNRLAKVQGFLFRAAFLRRVPLFLRLISENILLCFLLSTMQSTSKYITGTLSLHFRKILTKLIHSRYFEVDIADLYVKAYYI

SEQ ID NO: 52908 - protein, 104 aa, Glycine max
  peptide (1)..(104): Ceres Seq. ID no. 15174743
MGQLGAKNLLSLVSIVVLRTTLSNRLAKVQGFLFRAAFLRRVPLFLRLISENILLCFLLSTMQSTSKYITGTLSLHFRKILTKLIHSRYFEVDIADLYVKAYYI

SEQ ID NO: 52909 - DNA, 1326 bp, Glycine max
  misc_feature (1)..(1326): Ceres Seq. ID no. 14304623
gagggacaacacaacagagaagaaaggggccaaaaccaaaagacaaatcagaaactgaaaaggaactgcacataagcattcacaaaagcaccaaccaacgtaacgcctcaacctcaatctcttcaaactcgcgcgttcttcccccttcgcctcgcagtatatgtattgcaatcctcccaatttggttgagactccacatacgcgacaaggactgccttgtttccgtctctgcactctattctggaactttgtttgaaattaaacgatttacattaactttggtcattgatgtggcccatttgcttgctattcaacaagattctcaaggcaggggatgaaggagaattaaaaggggataatttgaatgcgatagatccgtacctgtttcagcaaccatcaattaacatagattcccatcctccctccttgcgctgttcacacttcattgaagtaccacacataaaccaaatatatacatgggattgtggccttgcttgtgtcttgatggttttgaaaactattggcgtcaacaactgtgatattcaaacactggctgaactatgctgcacaactagcatttggactgttgatttggcatatttattacagagatttgctgttgctttttcctacttcacagttacatttggggcaaacccaaactatagcattgaatcattctacaaggaggaactgcctaatgatctagtgagagtggatttgctatttcaaaaagcagtggaggctggcattgatatacagtgcaggtcaattagtgaagaagagatttctattctcatattgtctgggaaatatattgcaattgtattagttgatcacaacaaattgagtcatgttttgcaagaagatgttcccatgcctggtcttttcagcaacaaccctggctacacaggtcactatgtgttgatatgtggctatgatgctggagcagatatgtttgagattagagatcctgccagctctaagaaacataagaggatttcttcaaagtctttagaagaagctcgcaacacctttggaactgatgaggatcttctgttgatatctttggagaaaagcagtaaccatcatcaaccttttctgcaactttccaatgatgtcaataccgattcttgattttctttacctgttttgaaataattatgttgctgcttttttttttctgcatccttgtgtattttagttgctacactaggcctattatttatttatattcccagtataaacctcttaaaatggttttgtctgggctgtatgtaccgtgtaggtttactcaaaactgtatagtaaatataaattcatttc

SEQ ID NO: 52910 - protein, 282 aa, Glycine max
  peptide (1)..(282): Ceres Seq. ID no. 14304624
MWPICLLFNKILKAGDEGELKGDNLNAIDPYLFQQPSINIDSHPPSLRCSHFIEVPHINQIYTWDCGLACVLMVLKTIGVNNCDIQTLAELCCTTSIWTVDLAYLLQRFAVAFSYFTVTFGANPNYSIESFYKEELPNDLVRVDLLFQKAVEAGIDIQCRSISEEEISILILSGKYIAIVLVDHNKLSHVLQEDVPMPGLFSNNPGYTGHYVLICGYDAGADMFEIRDPASSKKHKRISSKSLEEARNTFGTDEDLLLISLEKSSNHHQPFLQLSNDVNTDS

SEQ ID NO: 52911 - protein, 210 aa, Glycine max
  peptide (1)..(210): Ceres Seq. ID no. 14304625
MVLKTIGVNNCDIQTLAELCCTTSIWTVDLAYLLQRFAVAFSYFTVTFGANPNYSIESFYKEELPNDLVRVDLLFQKAVEAGIDIQCRSISEEEISILILSGKYIAIVLVDHNKLSHVLQEDVPMPGLFSNNPGYTGHYVLICGYDAGADMFEIRDPASSKKHKRISSKSLEEARNTFGTDEDLLLISLEKSSNHHQPFLQLSNDVNTDS

SEQ ID NO: 52912 - DNA, 1526 bp, Glycine max
  misc_feature (1)..(1526): Ceres Seq. ID no. 15174737
agtatgcctatgtaagaaggcatgctatgctattgctatggagaagaaaacaagtgtccaagagtcacgtaaattcaaccaattatttttccccaagcaacacaacaaagtgtacccaattaggctacagagaagctcttcaacttcatccttgtcttcattatcatcatcattgtcacaaaagtcagatgactcttctctaacagattccttgaatctagcagatgagagttttcaatttgcactgaatttgatttcgccgcgttgtcaaagaagagaaccagaaattattaatgatgcacaccaacaacaaattccacagactgctgaggctggtgaattgaaaaggtgcaactggatcactaagaactgtgatgaggcttacattcaatttcacgatgagtgctggggagtcccagcttacgatgacaaaaaattgtttgagctgcttacactatcaggattgctgatagattacaactggaccgaaattctaaaaagaaaggaaattcttagaaaagtttttgctggatttgatcctaatactgtggccaaaatggaggagaaagaaatcatggaaatagcatcaaacaaagaagttttgttagccgattgcagagttaggtgcatagtagacaatgccaaatgcataatgaagattgtgagggaatgtggatcattcagctgctatatatggggctatgtgaatcacaaaccagtgattaacagatacagatacccaagagatgtccctctaaggactacaaaagcagataccatcagcaaggacttgataaagcgtggctttcaatttttgggtccagtgatagtttattcttttatgcaagctgcaggattggcaattgatcatcttgtggattgttataggcacaatgaatgtgtaaggctcgcagaaaggccttggagacatttgtaacataatcgaggattgctaacaacacacgttttaacatatttcttgcaatacactttctattgttgataaaattttattggaaactacaaaattactagtgagtcattgaataagaaatgagactcacaattttgtgattttcaaaaaaaaaaactaatcaataataaatgatgtattcaaaagagttgttataaactgtgttgttagcctttctctctgtaacattcatcagtttacttgcataattttcgattgttttttgtatcaacagctattcagttttccatacatgcctattctagcaagagagggaggtaaaacaatgctttgtagtccctctatttttttattttttggtttttggggtcatttttccttctcttccttccatcccatgtcataatcatcaagtcaagctttgccgttgtcaataaattgaagagggttgcttgcttgcctttgaatttgagtgatgaacagagtcagccttgaggccttggttgtggaacactacatgtttggtatggtaagtgcatcaaagaccaattgtacactactgaatgaaaatgttcttgtttgcattgtttac

SEQ ID NO: 52913 - protein, 311 aa, Glycine max
  peptide (1)..(311): Ceres Seq. ID no. 15174738
VCLCKKACYAIAMEKKTSVQESRKFNQLFFPKQHNKVYPIRLQRSSSTSSLSSLSSSLSQKSDDSSLTDSLNLADESFQFALNLISPRCQRREPEIINDAHQQQIPQTAEAGELKRCNWITKNCDEAYIQFHDECWGVPAYDDKKLFELLTLSGLLIDYNWTEILKRKEILRKVFAGFDPNTVAKMEEKEIMEIASNKEVLLADCRVRCIVDNAKCIMKIVRECGSFSCYIWGYVNHKPVINRYRYPRDVPLRTTKADTISKDLIKRGFQFLGPVIVYSFMQAAGLAIDHLVDCYRHNECVRLAERPWRHL

SEQ ID NO: 52914 - protein, 299 aa, Glycine max
  peptide (1)..(299): Ceres Seq. ID no. 15174739
MEKKTSVQESRKFNQLFFPKQHNKVYPIRLQRSSSTSSLSSLSSSLSQKSDDSSLTDSLNLADESFQFALNLISPRCQRREPEIINDAHQQQIPQTAEAGELKRCNWITKNCDEAYIQFHDECWGVPAYDDKKLFELLTLSGLLIDYNWTEILKRKEILRKVFAGFDPNTVAKMEEKEIMEIASNKEVLLADCRVRCIVDNAKCIMKIVRECGSFSCYIWGYVNHKPVINRYRYPRDVPLRTTKADTISKDLIKRGFQFLGPVIVYSFMQAAGLAIDHLVDCYRHNECVRLAERPWRHL

SEQ ID NO: 52915 - DNA, 1659 bp, Glycine max
  misc_feature (1)..(1659): Ceres Seq. ID no. 14315590
aaaaagcctctatagtttatatagcaagatgaaacgaaaggatataagcattgataaagtatatgatgcacgtgcattaagagtagttgtgggagacaagaatggaactttacatggtcctgcagttcagtgttgttatagtcttcttgacattgtacacaggctttggactccaatagatggtgaatttgatgactacatcattaatccgaagcctagtggctatcagtccttgcacactgcagtccaaggtcctgacaactcacctttagaagtacaaataaggacacagaggatgcatgagtgtgctgaacaaggacttgctgcacattggctttacaaggaaactggcaatccttttttatccatagacagcatggatgaacctgaaactgaagcatcctcctatttctccaaagatctagaggaaggaaattcttcagatattttattaagtaaatataagtcattgaaggctggacatccagtcctcagagtagaaggaagtcacttacttgctgcaattatcatcagtgtagaaaatgatgaaagagaattgctagttgctgtgagctttgggctagcagcttctgaagcagtagctgacagaagatctttccagattaagcgatgggaagcttatgcacgactgtacaaaaaggtgtctgatgaatggtggtttgaaccggggcatggggattggtttacgtgtctagagaagtacacactgtgtcgagatggtatgtatcataagcaagaccaatttgggcgcctactcccaacatttatccaggttatcaattttactgagcaagaagaatctgaatattgggctgttgtatctgctgtgtttgagggcaggcaagtggattggataacatctcggtcaaaatttgacttggttgcatcaacttctgtagaagctggcatcaataacaaggtgaaccttttgagaacaatgctctcttgggaagagcaattgcgctctgaagtaagtttcatgcaagcaaagcatgatgcaaagctttatgatcttcatggttctcttggggaagtggtaattatatgttggcctcatggtgaaattttgaggttaaaggcgggtagcactgctactgatgctgctcaaagagttggtttggagggaaagctggttttgattaacggacagttagtactgcccaacacaaaactcagagatggcgatgtagttgaagtaagaatttaaatcattctttagaaaaatgtaaataattctttatgggtcgtatgtggttaaagtagatggtatagaaatagtttttattttatttagggacgtggattcttggtagaataacgtactttcaaaaattttaaatgtgctggctttaaacttgattccaagaataagttggataaccacatgtgctatcatattttttattgttgtgttggctgtatgtgtggttattactaatttttggtactatggttattcactgtatttggaattaagcattaaaccactgcactttaaaatcatttgaagctgcaataattttatcaagaatccttggaaagagcggccaagccagggaaaatgctgtgtatctgattattagaaatatttgtatgatacagattaaatttatagcaaaacataggcttaggattccc

SEQ ID NO: 52916 - protein, 408 aa, Glycine max
  peptide (1)..(408): Ceres Seq. ID no. 14315591
KSLYSLYSKMKRKDISIDKVYDARALRVVVGDKNGTLHGPAVQCCYSLLDIVHRLWTPIDGEFDDYIINPKPSGYQSLHTAVQGPDNSPLEVQIRTQRMHECAEQGLAAHWLYKETGNPFLSIDSMDEPETEASSYFSKDLEEGNSSDILLSKYKSLKAGHPVLRVEGSHLLAAIIISVENDERELLVAVSFGLAASEAVADRRSFQIKRWEAYARLYKKVSDEWWFEPGHGDWFTCLEKYTLCRDGMYHKQDQFGRLLPTFIQVINFTEQEESEYWAVVSAVFEGRQVDWITSRSKFDLVASTSVEAGINNKVNLLRTMLSWEEQLRSEVSFMQAKHDAKLYDLHGSLGEVVIICWPHGEILRLKAGSTATDAAQRVGLEGKLVLINGQLVLPNTKLRDGDVVEVRI

SEQ ID NO: 52917 - protein, 399 aa, Glycine max
  peptide (1)..(399): Ceres Seq. ID no. 14315592
MKRKDISIDKVYDARALRVVVGDKNGTLHGPAVQCCYSLLDIVHRLWTPIDGEFDDYIINPKPSGYQSLHTAVQGPDNSPLEVQIRTQRMHECAEQGLAAHWLYKETGNPFLSIDSMDEPETEASSYFSKDLEEGNSSDILLSKYKSLKAGHPVLRVEGSHLLAAIIISVENDERELLVAVSFGLAASEAVADRRSFQIKRWEAYARLYKKVSDEWWFEPGHGDWFTCLEKYTLCRDGMYHKQDQFGRLLPTFIQVINFTEQEESEYWAVVSAVFEGRQVDWITSRSKFDLVASTSVEAGINNKVNLLRTMLSWEEQLRSEVSFMQAKHDAKLYDLHGSLGEVVIICWPHGEILRLKAGSTATDAAQRVGLEGKLVLINGQLVLPNTKLRDGDVVEVRI

SEQ ID NO: 52918 - protein, 310 aa, Glycine max
  peptide (1)..(310): Ceres Seq. ID no. 14315593
MHECAEQGLAAHWLYKETGNPFLSIDSMDEPETEASSYFSKDLEEGNSSDILLSKYKSLKAGHPVLRVEGSHLLAAIIISVENDERELLVAVSFGLAASEAVADRRSFQIKRWEAYARLYKKVSDEWWFEPGHGDWFTCLEKYTLCRDGMYHKQDQFGRLLPTFIQVINFTEQEESEYWAVVSAVFEGRQVDWITSRSKFDLVASTSVEAGINNKVNLLRTMLSWEEQLRSEVSFMQAKHDAKLYDLHGSLGEVVIICWPHGEILRLKAGSTATDAAQRVGLEGKLVLINGQLVLPNTKLRDGDVVEVRI

SEQ ID NO: 52919 - DNA, 1554 bp, Glycine max
  misc_feature (1)..(1554): Ceres Seq. ID no. 15174705
aatatcacgtcaagaagcaaagcatcccctggaagcaaaactagagttactaagagcaaatctgagaaggaagaggaaaatagaaagaaaaaggaggaattgatgattcagcggcagaaaagaattgctgaaagaagtgcctctaagaagactggaactggaactaagacttccttgacttctgcaaagaaagagaatcctaagatacatccatccaatgaggagaccaagaaattgcaaaaaccagtcatcaggaattccaccattgaacgtcttgcaactgcccgagtaagtcagtcgaaggtttcaccaagtccagcaaaatcaggtccaaccaagaaaccaaccttgaaggcaaatggtgtacctttgcagaagactacaagcacagaaaagaaacaggacccaaaagaagtcaaatcttcaagtcttaaagaagacgcgaagaaaacaaatggggaggttctaggagccactaatggccaggctaagaatgaaatagaaatctcagtagcattgccaaggaactctggcgccacacagtctgttgaaacaaataacagtaatcttggtttgaaagacaatggagagctatccaagacgtcatcagagaaagatgcgacatctttgatttcagaaagagagcatgtgcacgcaaatgttggccagcttcatgccgatccatctttgccgaatcacaatcttgcgttgggaggaaatcagcccagaggtgaagaagtgtcaaacaagttatcttcacttcctggtgatagcaaacctcaacatattactgatgtgatcacaaatcctacagctgcattacctagcaaacccctcacagtttctgctgtgaactcaaatgttaatcaagaaatacacgagaataatgctatcttgcctcaagtcactgagaaacaaatttctactacccctccacccaataaccaagtgatgatgccagaatcagtccactccaggaagaaatggaacactgatgaggacaattcaaaaccagcaaaaggatttcgtaagcttctattctttggaagaaagagctgaagcaaagcaccctggtggattgattttgtgcaaattggttcataataatcttctgaagtgttttgataagctatcagttctcttttccatgcttttggtttttcaacatttcaaagagtttacttcgtccattcttttgctcaacagaaagtgtttggcacattgaattatttcttgttttgaacacacatatggaagtcatgtggaagattgtagatagtttcctgcttgacacacgaaataacaaagccatgagatggggagttgcttgttacgttagagatccatgatgtaaattatctgaatatggtgtatcctaaggaaggctttcacaggtaataaattttccatgttggaactttttatacgaggcttaacttgtttaatgtcatatgatgccaaaaaaaaaaacctgtttccttgtattcatgaaagttgtaatgtttggttgtgtatgactttcatattatttcatgctgatattctattgcaaac

SEQ ID NO: 52920 - protein, 352 aa, Glycine max
  peptide (1)..(352): Ceres Seq. ID no. 15174706
NITSRSKASPGSKTRVTKSKSEKEEENRKKKEELMIQRQKRIAERSASKKTGTGTKTSLTSAKKENPKIHPSNEETKKLQKPVIRNSTIERLATARVSQSKVSPSPAKSGPTKKPTLKANGVPLQKTTSTEKKQDPKEVKSSSLKEDAKKTNGEVLGATNGQAKNEIEISVALPRNSGATQSVETNNSNLGLKDNGELSKTSSEKDATSLISEREHVHANVGQLHADPSLPNHNLALGGNQPRGEEVSNKLSSLPGDSKPQHITDVITNPTAALPSKPLTVSAVNSNVNQEIHENNAILPQVTEKQISTTPPPNNQVMMPESVHSRKKWNTDEDNSKPAKGFRKLLFFGRKS

SEQ ID NO: 52921 - protein, 318 aa, Glycine max
  peptide (1)..(318): Ceres Seq. ID no. 15174707
MIQRQKRIAERSASKKTGTGTKTSLTSAKKENPKIHPSNEETKKLQKPVIRNSTIERLATARVSQSKVSPSPAKSGPTKKPTLKANGVPLQKTTSTEKKQDPKEVKSSSLKEDAKKTNGEVLGATNGQAKNEIEISVALPRNSGATQSVETNNSNLGLKDNGELSKTSSEKDATSLISEREHVHANVGQLHADPSLPNHNLALGGNQPRGEEVSNKLSSLPGDSKPQHITDVITNPTAALPSKPLTVSAVNSNVNQEIHENNAILPQVTEKQISTTPPPNNQVMMPESVHSRKKWNTDEDNSKPAKGFRKLLFFGRKS

SEQ ID NO: 52922 - DNA, 1360 bp, Glycine max
  misc_feature (1)..(1360): Ceres Seq. ID no. 13637649
aaacacccaaaaataacgagcgagttttgcgtcttaatggaggagagaaagaagcacccttcttttccctccaactatctcactctcgctcaactccaagaacgatggctcaagcagcaaaaccaaatcaaccaaccacaaccacaaccacaaccacagccacaagaacaacacaaccaccaccaccgccaacaaccacaccaagagctggtactcgttcccagaaacggaaacgcttataggtctcgttctcagtttcagtatgttgcgaagaatcggaacgattccgaaactcgccgccgcgcaaccaaggttgcggtggcctccgatgacaactgcaaatcggaggccgtcgccggaatcggtgacgaaaccgccgatctgaatggaaaatccagtgaatcgaagaagaatcagaataataggaggaatgggaaaggaacatggaaaactaagacggagaagagaggagcgcgtggagatggctctggaacaggagcacaggggaaagaagaggcagagaagaaagccacaatcgagaagaagaatgagttggagaagaacggtggttcggcatcggtggatgaggttggacagcgagttagggttttatcgattaactcaggggatgaaaagaagaagaagaagaagaagaacggtggttcggttacggcagaggaggttgttgaacagagcgtgaggattttatcgattaactcggggaacggtaaacagaacaacgggagattagggaaaatgaacaacggttttggaacagcggcacatgggaaaaaagaggctgagaaaaccacaatcgaaaacgagttgaaggagaagaagaacggtggttccgtaacggtggaggaagtggaacagagagttagggtttcatcgaagaacgaggaggaggagaagaagaacggtggttccgtaacggtggaggaaatggaaaagagagttggggtttcttcatcgaataactcagggaatggtaaacagaacggaagattggggaaaatgagcaacagttttcgtcactctgaatctcagaggaagtattacggtggtgaagcaagttatggctatggctatggtaatcgtggtaacggtcactactctaaggttggggtgcagaaaacaacagagaagaagatggtttgggttaagaaggatgagatagttggtggaaattgagaccttagctagatttgtgctcttgtcgataattgaatagaaatagaatcaatcatagggtagcactatcatcaatgctcactctaacgtttgtttgcctcacccatacactcattgatggagattacaatctgtggttatcaaatatcatcatgatttgaatttt

SEQ ID NO: 52923 - protein, 397 aa, Glycine max
  peptide (1)..(397): Ceres Seq. ID no. 13637650
KHPKITSEFCVLMEERKKHPSFPSNYLTLAQLQERWLKQQNQINQPQPQPQPQPQEQHNHHHRQQPHQELVLVPRNGNAYRSRSQFQYVAKNRNDSETRRRATKVAVASDDNCKSEAVAGIGDETADLNGKSSESKKNQNNRRNGKGTWKTKTEKRGARGDGSGTGAQGKEEAEKKATIEKKNELEKNGGSASVDEVGQRVRVLSINSGDEKKKKKKKNGGSVTAEEVVEQSVRILSINSGNGKQNNGRLGKMNNGFGTAAHGKKEAEKTTIENELKEKKNGGSVTVEEVEQRVRVSSKNEEEEKKNGGSVTVEEMEKRVGVSSSNNSGNGKQNGRLGKMSNSFRHSESQRKYYGGEASYGYGYGNRGNGHYSKVGVQKTTEKKMVWVKKDEIVGGN

SEQ ID NO: 52924 - protein, 385 aa, Glycine max
  peptide (1)..(385): Ceres Seq. ID no. 13637651
MEERKKHPSFPSNYLTLAQLQERWLKQQNQINQPQPQPQPQPQEQHNHHHRQQPHQELVLVPRNGNAYRSRSQFQYVAKNRNDSETRRRATKVAVASDDNCKSEAVAGIGDETADLNGKSSESKKNQNNRRNGKGTWKTKTEKRGARGDGSGTGAQGKEEAEKKATIEKKNELEKNGGSASVDEVGQRVRVLSINSGDEKKKKKKKNGGSVTAEEVVEQSVRILSINSGNGKQNNGRLGKMNNGFGTAAHGKKEAEKTTIENELKEKKNGGSVTVEEVEQRVRVSSKNEEEEKKNGGSVTVEEMEKRVGVSSSNNSGNGKQNGRLGKMSNSFRHSESQRKYYGGEASYGYGYGNRGNGHYSKVGVQKTTEKKMVWVKKDEIVGGN

SEQ ID NO: 52925 - DNA, 1560 bp, Glycine max
  misc_feature (1)..(1560): Ceres Seq. ID no. 14306667
tccgacacatttttcattaccgccgtgataacacactaacaccaccacttcatcaactttacttgacaacaatattgtaaaactcaaaatctagtttcatactttttttcttcttcttgaaatggctctccaggctgcttctcttgttcctgcttctttctcggttcttaaagagggaaagagtggtgtgtctctcaaggactccaccttgttcggtctttcattttcagaacctatcaaagctaacttcagctcttctgcattgaggtgcaagagggaattcgaacaaaagctctgtgctgtgagggccgaaacagtggctacagcctctccagcagttaccaagtctacaccagaagggaagaaaacattgaggaagggcagtgttgtgataactggggcttcatctggactaggcctggccactgctaaggctttggctgagacgggaaaatggcatgtaataatggcctgcagggattacctcaaagctgcaagagctgcaaaatccgctggcatggctaaggaaaactacaccatcatgcacttggaccttgcctcgctcgacagtgtccgccaatttgttgataacttcagaagatcggaaatgccgttagatgtgctggtttgcaatgctgctgtttacttgccaactgctaaggaacctaccttcactgctgagggctttgaacttagtgttgggacaaatcatctggggcatttcctcctctcgcgcctgttgcttgaggacttggaaaaatccgattacccttcaaagcgcttgatcatcgttggttcaataacagggaacacaaacacattggctggtaatgtacctcccaaggctaaccttggtgacttgaggggacttcagggtggtttgaatgggctaaacagctcagccatgattgatggtggagacttcgatggtgccaaggcgtacaaggacagcaaagtctgcaatatgctcacaatgcaagaattccacagacgattccatgaggaaactggaatcacatttgcttccctttaccccggttgcattgccacaacaggcctgttcagagagcacattcccttgttcagaactctgttccctccattccagaagtacataaccaaaggctatgtctcagaagatgaagcaggaaagagacttgctcaggttgtaagtgatccaagcctaacaaaatctggtgtttactggagctggaacaaagcatcagcttcgtttgaaaaccagttgtctcaggaggccagtgatacagagaaggctcgtaagatctgggagattagtgagaaacttgttggttttgcctaagtgggaggagcctccaacatcccatgttgttctagagaccttgcacttgcatggaggaagaaaatgatgtctcaaaagagtggatagataacatcctatcattttgaatgcattgatgttgttttgttagctaggagcttctttgctttgatgtaaggtgtcaatggctttttgtgaatcaagactcaataaaatcattcagccatgtgggtgtggtgaagttgctcataaactttctg

SEQ ID NO: 52926 - protein, 399 aa, Glycine max
  peptide (1)..(399): Ceres Seq. ID no. 14306668
MALQAASLVPASFSVLKEGKSGVSLKDSTLFGLSFSEPIKANFSSSALRCKREFEQKLCAVRAETVATASPAVTKSTPEGKKTLRKGSVVITGASSGLGLATAKALAETGKWHVIMACRDYLKAARAAKSAGMAKENYTIMHLDLASLDSVRQFVDNFRRSEMPLDVLVCNAAVYLPTAKEPTFTAEGFELSVGTNHLGHFLLSRLLLEDLEKSDYPSKRLIIVGSITGNTNTLAGNVPPKANLGDLRGLQGGLNGLNSSAMIDGGDFDGAKAYKDSKVCNMLTMQEFHRRFHEETGITFASLYPGCIATTGLFREHIPLFRTLFPPFQKYITKGYVSEDEAGKRLAQVVSDPSLTKSGVYWSWNKASASFENQLSQEASDTEKARKIWEISEKLVGFA

SEQ ID NO: 52927 - protein, 284 aa, Glycine max
  peptide (1)..(284): Ceres Seq. ID no. 14306669
MACRDYLKAARAAKSAGMAKENYTIMHLDLASLDSVRQFVDNFRRSEMPLDVLVCNAAVYLPTAKEPTFTAEGFELSVGTNHLGHFLLSRLLLEDLEKSDYPSKRLIIVGSITGNTNTLAGNVPPKANLGDLRGLQGGLNGLNSSAMIDGGDFDGAKAYKDSKVCNMLTMQEFHRRFHEETGITFASLYPGCIATTGLFREHIPLFRTLFPPFQKYITKGYVSEDEAGKRLAQVVSDPSLTKSGVYWSWNKASASFENQLSQEASDTEKARKIWEISEKLVGFA

SEQ ID NO: 52928 - protein, 267 aa, Glycine max
  peptide (1)..(267): Ceres Seq. ID no. 14306670
MAKENYTIMHLDLASLDSVRQFVDNFRRSEMPLDVLVCNAAVYLPTAKEPTFTAEGFELSVGTNHLGHFLLSRLLLEDLEKSDYPSKRLIIVGSITGNTNTLAGNVPPKANLGDLRGLQGGLNGLNSSAMIDGGDFDGAKAYKDSKVCNMLTMQEFHRRFHEETGITFASLYPGCIATTGLFREHIPLFRTLFPPFQKYITKGYVSEDEAGKRLAQVVSDPSLTKSGVYWSWNKASASFENQLSQEASDTEKARKIWEISEKLVGFA

SEQ ID NO: 52929 - DNA, 1866 bp, Glycine max
  misc_feature (1)..(1866): Ceres Seq. ID no. 14315146
ggtgatcggtgatcggtgatcagtggtttggtgttgttgatagaaaaatgcattccagccctttgcttcttgaggaacccattaggatggcatccattcttgagccatccaagcctactttctttccagctatgacaaaaattgttggcacacttggtctaaagtcacgatcagttgatacaatttcccgttgccttgatgcaggaatgtctgtggcaaggtttgacttctcatggggtgatccagaataccatcaagagacattggaaaatttgagagttgctatcaaaagtaccaagaaactctgtgcggttatgctagatactgtgggtcctgaattacagattgagaataagacagatcacccaatcacccttgaagcagacacattagttgtcttaactccagatcaaaccaaagaagctggttcaaatctcttaccagtaaattttaacggactatcaaaggctgtgaagaagggtgatactatttttatcggaaaatacctgtttactggaagtgaaacagcttccttatggctggaggtcagtgaggtgaaaggtgaggatgtcacctgtctggtaaaaaacactgctacactgtctggatcattgtttactgcacatgtctctcagatccacatcgatcttcctactcttgctgataaagataaggaggtaataagcacatggggtgttcgaaacaatattgacttcctttcattatatacccggcacgttgaagatattcgtcatgcgcgtgaatttctttctaaattgggtgaccttaagcagacacatatttatgcaaagattgaaaatatagagggactgaagcattttgatgaaatattgagagaagcagatggcatcatcctcgctcgtggaaatttagggatagaactcccacctgagaaggttttcttattccaaaaggctgctatttacaagtgcaacatggttggaaagccagttgttgttacacgtgttgtagactctatgactgataatctaagacctactcgtgctgaagcaacagatgttgccaatgcagtgctggatggaagtgatgcaattctccttggagcagagaccctgcggggacaataccctgtagagaccatttctatagttggaaaaatatgtgctgaggcagagaaagttcataatcaagatttgtattttaagaaggctgtcaaatatgtgggagagccaatgagccatttggaatcaattgcttcctctgcggttcgagcagctatcaaggttaaagcctctgttattatttgcttcacttcatctggaagagctgcaagattgattgctaagtacagaccaattatgcctgtcatatccgttgtcattcctcaactgaagacaaatcaactccgatggacattcaccggtgcttttgaggctaggcaatctcttattgtgaggggtctttttcctatgctggcagatccacgacacccggctgagtctaaaagtggaacaaatgaatcaattttgaaggttgctttagatcatggcaaggcttttggcatcataaagccacatgaccgagttgttgtctgccagaaagtagctgactcgtcagttgtgaagattcttgagctcgaagattgattggttcaatacaacttatgtgtcatttgatgcatcataataaaacttcttctcaaccttttcattctagcgtttgtgtttcattgaagtacaataacaaacacataacattgagatacatattgtagagtgggaaagagacttttttgtttgattgtttttttaataggcaatcacagttttgagctataaataatggtattggtatggaaataaaaaaaaatgatgttatatcagc

SEQ ID NO: 52930 - protein, 526 aa, Glycine max
  peptide (1)..(526): Ceres Seq. ID no. 14315147
MHSSPLLLEEPIRMASILEPSKPTFFPAMTKIVGTLGLKSRSVDTISRCLDAGMSVARFDFSWGDPEYHQETLENLRVAIKSTKKLCAVMLDTVGPELQIENKTDHPITLEADTLVVLTPDQTKEAGSNLLPVNFNGLSKAVKKGDTIFIGKYLFTGSETASLWLEVSEVKGEDVTCLVKNTATLSGSLFTAHVSQIHIDLPTLADKDKEVISTWGVRNNIDFLSLYTRHVEDIRHAREFLSKLGDLKQTHIYAKIENIEGLKHFDEILREADGIILARGNLGIELPPEKVFLFQKAAIYKCNMVGKPVVVTRVVDSMTDNLRPTRAEATDVANAVLDGSDAILLGAETLRGQYPVETISIVGKICAEAEKVHNQDLYFKKAVKYVGEPMSHLESIASSAVRAAIKVKASVIICFTSSGRAARLIAKYRPIMPVISVVIPQLKTNQLRWTFTGAFEARQSLIVRGLFPMLADPRHPAESKSGTNESILKVALDHGKAFGIIKPHDRVVVCQKVADSSVVKILELED

SEQ ID NO: 52931 - protein, 513 aa, Glycine max
  peptide (1)..(513): Ceres Seq. ID no. 14315148
MASILEPSKPTFFPAMTKIVGTLGLKSRSVDTISRCLDAGMSVARFDFSWGDPEYHQETLENLRVAIKSTKKLCAVMLDTVGPELQIENKTDHPITLEADTLVVLTPDQTKEAGSNLLPVNFNGLSKAVKKGDTIFIGKYLFTGSETASLWLEVSEVKGEDVTCLVKNTATLSGSLFTAHVSQIHIDLPTLADKDKEVISTWGVRNNIDFLSLYTRHVEDIRHAREFLSKLGDLKQTHIYAKIENIEGLKHFDEILREADGIILARGNLGIELPPEKVFLFQKAAIYKCNMVGKPVVVTRVVDSMTDNLRPTRAEATDVANAVLDGSDAILLGAETLRGQYPVETISIVGKICAEAEKVHNQDLYFKKAVKYVGEPMSHLESIASSAVRAAIKVKASVIICFTSSGRAARLIAKYRPIMPVISVVIPQLKTNQLRWTFTGAFEARQSLIVRGLFPMLADPRHPAESKSGTNESILKVALDHGKAFGIIKPHDRVVVCQKVADSSVVKILELED

SEQ ID NO: 52932 - protein, 498 aa, Glycine max
  peptide (1)..(498): Ceres Seq. ID no. 14315149
MTKIVGTLGLKSRSVDTISRCLDAGMSVARFDFSWGDPEYHQETLENLRVAIKSTKKLCAVMLDTVGPELQIENKTDHPITLEADTLVVLTPDQTKEAGSNLLPVNFNGLSKAVKKGDTIFIGKYLFTGSETASLWLEVSEVKGEDVTCLVKNTATLSGSLFTAHVSQIHIDLPTLADKDKEVISTWGVRNNIDFLSLYTRHVEDIRHAREFLSKLGDLKQTHIYAKIENIEGLKHFDEILREADGIILARGNLGIELPPEKVFLFQKAAIYKCNMVGKPVVVTRVVDSMTDNLRPTRAEATDVANAVLDGSDAILLGAETLRGQYPVETISIVGKICAEAEKVHNQDLYFKKAVKYVGEPMSHLESIASSAVRAAIKVKASVIICFTSSGRAARLIAKYRPIMPVISVVIPQLKTNQLRWTFTGAFEARQSLIVRGLFPMLADPRHPAESKSGTNESILKVALDHGKAFGIIKPHDRVVVCQKVADSSVVKILELED

SEQ ID NO: 52933 - DNA, 1288 bp, Glycine max
  misc_feature (1)..(1288): Ceres Seq. ID no. 14310687
gatgctacaggtggaatcactggtttcagcgtgcgccggcggatccagcgatcggaaaatcgcctgcgagaccctggccgacgacgtccaccccacggatccgccggagtcccacccggattctccgccggagtccttctggctctcgagggacgaggaatacgactggtgggaccgcaacgccgtttacgagcgcaaagaatccaccaaggcaagtaataataattcaacaaacctaaaccctggcatcaactccagcaacaactcccagcgtttctctctcaatttcaagtccaaggcttccaccatcattggcttacctaagccgcagaaaacctccttcgtcgacgtcaagaaccgccgcaaccacaacaagcccagtaacatcaggctgttcccgaaacgcagcgtttcggtcggaaaatctgagtcaggactcgtcgaaccgtcttcgcccaaagtctcttgcatgggaagagtcagatccaagcgcgatcgaaatcgcaagttgagaagttcacgaaagtcttcccctgacacagacgccaaagaaaaacacagcagaagcggaaagaaacccggttttttcgagagttttcgctctattttccggtccggccgaaaagggaaaccggaccggaagaaaagcgatcccctggccgcggactcaactcatgagacgaagagcggtgccgttaactactctagagcgcggcacagcacgtcgagcttgaacgacgtgtcgttcgaggagtcagtctcgcgaaacagcgtgtcggagagcgaaccgcccggtttgggtggcatgatgcggttcgcgtctgggagaaggtctgagtcgtggggagtaggtgattccgaaggacacgtggcacagtagtattggatgaagataaccgttcggcgagggcaaacacgaagtggggccctttgcccttggatgtaagcaattgagataaaaaggcgagtcttttggcgtgggaccaaggcgttggaagagggagtgacgtggcgcgttgaacaaattttacttgttactgtttggaaagtaaaatctttttccttttgtgctgtgcttgattgaatctggtgtattttgtagccacaaagttttgtcttgtaaatatacacgagtcatgagtggtttttgtttctttgaattgagcagatgtatgtatattttgattttctctcttgggtttcaataattgtatgaattgtccaacggtgcatgcgttgccggttccctctccttttcaattaagcaaaattattaagcatgggtgtt

SEQ ID NO: 52934 - protein, 292 aa, Glycine max
  peptide (1)..(292): Ceres Seq. ID no. 14310688
MLQVESLVSACAGGSSDRKIACETLADDVHPTDPPESHPDSPPESFWLSRDEEYDWWDRNAVYERKESTKASNNNSTNLNPGINSSNNSQRFSLNFKSKASTIIGLPKPQKTSFVDVKNRRNHNKPSNIRLFPKRSVSVGKSESGLVEPSSPKVSCMGRVRSKRDRNRKLRSSRKSSPDTDAKEKHSRSGKKPGFFESFRSIFRSGRKGKPDRKKSDPLAADSTHETKSGAVNYSRARHSTSSLNDVSFEESVSRNSVSESEPPGLGGMMRFASGRRSESWGVGDSEGHVAQ

SEQ ID NO: 52935 - DNA, 1324 bp, Glycine max
  misc_feature (1)..(1324): Ceres Seq. ID no. 13593911
tttatacttctgatcatttctaattttgaattcttaattcatgcatgtactcacatgctttgaaagatctttttgttattaagaatacatcagagtcaatatttttatccttgactggtttcaattgatgtttacatgcaactgtttttgtttgcttgcttttatagcatttacataacggttttaattgatgtttacatgcaactgtttatgtttgcttatatagtatttacaacagttccttgcatttaacttcccaggttaatgccttcagggaaaggagagcacttgctttgacattgaatgataccaaaacggcagtgaacaaacttcatcgaatgctcaattttatagttggaattattatactggttatttggctcttgatattggaacttgccaccaccaaatttcttctctttgtgagctcacaggttgtcgtggttgcatttatatttggaaacacctgcaagaccatatttgaagcaattattttcttatttgtcatgcacccatttgatgtgggagatagatgtgaaattgatggggttcagatggttgtagaagaaatgaacatattgacaaccatatttctgagatttgataatcaaaaggtcatcatccctaacaatgtccttgctaccaaggccatatataactattaccggagtcctgacatgggagatgctatcgaattctgtgtacatatatctaccccagttgaaaagatttcactcattaaacacagaatacaaagttacattgataacaagaaggagcactggtatccttcacctttgattgtatacagggattatgaccaattaaacatggtgaggttggctatctggccaactcatagaatgaacttccaagacatgggagaaaggtttgtgaggagatcccttttgcttgaagagatgatcaagattttcagggagcttgacattaattaccggctcttgcccatggacattaatgtgagagccactcctaccacttctgatcggcttccacctagttggacatcagttccaactccaagttgagtagaagaaggaaattcataacctcatgtcatcttgtgtgtgtggaaaacccgcggcattaactgctaggaaatgctatattttagctggatagcatattgtaaagagagggtcttttgtttttagattagcttgatatgtactgaggttagtttgtagtagctatgaagccatgcctaggtttcccatgtagtagttttgttcaaatgattagagggttaatcgctacgtcttttatactataaccatattcagtataagatttctatatgtct

SEQ ID NO: 52936 - protein, 236 aa, Glycine max
  peptide (1)..(236): Ceres Seq. ID no. 13593912
MLNFIVGIIILVIWLLILELATTKFLLFVSSQVVVVAFIFGNTCKTIFEAIIFLFVMHPFDVGDRCEIDGVQMVVEEMNILTTIFLRFDNQKVIIPNNVLATKAIYNYYRSPDMGDAIEFCVHISTPVEKISLIKHRIQSYIDNKKEHWYPSPLIVYRDYDQLNMVRLAIWPTHRMNFQDMGERFVRRSLLLEEMIKIFRELDINYRLLPMDINVRATPTTSDRLPPSWTSVPTPS

SEQ ID NO: 52937 - protein, 180 aa, Glycine max
  peptide (1)..(180): Ceres Seq. ID no. 13593913
MHPFDVGDRCEIDGVQMVVEEMNILTTIFLRFDNQKVIIPNNVLATKAIYNYYRSPDMGDAIEFCVHISTPVEKISLIKHRIQSYIDNKKEHWYPSPLIVYRDYDQLNMVRLAIWPTHRMNFQDMGERFVRRSLLLEEMIKIFRELDINYRLLPMDINVRATPTTSDRLPPSWTSVPTPS

SEQ ID NO: 52938 - protein, 164 aa, Glycine max
  peptide (1)..(164): Ceres Seq. ID no. 13593914
MVVEEMNILTTIFLRFDNQKVIIPNNVLATKAIYNYYRSPDMGDAIEFCVHISTPVEKISLIKHRIQSYIDNKKEHWYPSPLIVYRDYDQLNMVRLAIWPTHRMNFQDMGERFVRRSLLLEEMIKIFRELDINYRLLPMDINVRATPTTSDRLPPSWTSVPTPS

SEQ ID NO: 52939 - DNA, 1300 bp, Glycine max
  misc_feature (1)..(1300): Ceres Seq. ID no. 14306675
aatgttaactatgttcttctttttttgttctcatctccacaccatgtcctaatctttctgcaccatcgttctccatttttggctttacaaaaccactgtgtctgattaagggttctttaatatttccaatatttcttgtagtgaaaaagttgttagctaaaagaagaccaagtttttggtgttgtagaaggaagagaagaattaacatgaaaattcagtgtgacgtgtgtgagagagctccagcaacagtgatttgttgcgcggatgaggctgctttgtgtgccaaatgtgacgttgaagttcatgctgcaaacaagcttgcaagcaagcaccaaagacttcttcttcaatgtctatcaagcaagcttcccacatgtgacatttgccaagacaagccagcattcatattttgtgttgaagacagagcactcttctgtcaggattgtgatgaaccaattcattcagccggaagcctttccgcgaaccaccagcgcttccttgctactggtatccgagtggcctcgagttctaattgcaccaaagacaatgaaaaaagtcactcggagcctcctaataggagtgcacaacaagtttctgcgaaaattcctcctcagcaagtgcctagcttcacatcctcttgggctgttgatgacttattggaactaacaggctttgaatcacctgagaaaaaggaatctctgcagtttggagagctggaatggcttacagatgtgggtattttcggcgaacaatttgctcaggaagccttggctgcagctgaagtacctcagcttcccgaaactcataacagtagcagtgttgcttcatacaaaacctccaaatcctacatgtcccacaaaaagcctaggattgaagtcctaaatgatgatgatgatgatgagtattttactgtgcccgatctcggctaagtacgtggcttgccatatgggatggtgcatgcatgattggaaaagattaattatgggaaaataattgttttttttaagctctattagtaaattgtcaaaaaagaatattattttcccaaaaaaactattccattcagacatgttgatatgttgtatattcaattattatgagaacgataattttcacaagttgtgtggagttgattaagtattgtacttaaggtgtttttttgctggatagcatagaatccatgcctttggggaataaattttccttgtccttatgcttcatacactaggggggattctcccacggtcacatcttccccaatccccctcgaatttgagacggttaattccattttgtttgc

SEQ ID NO: 52940 - protein, 240 aa, Glycine max
  peptide (1)..(240): Ceres Seq. ID no. 14306676
MKIQCDVCERAPATVICCADEAALCAKCDVEVHAANKLASKHQRLLLQCLSSKLPTCDICQDKPAFIFCVEDRALFCQDCDEPIHSAGSLSANHQRFLATGIRVASSSNCTKDNEKSHSEPPNRSAQQVSAKIPPQQVPSFTSSWAVDDLLELTGFESPEKKESLQFGELEWLTDVGIFGEQFAQEALAAAEVPQLPETHNSSSVASYKTSKSYMSHKKPRIEVLNDDDDDEYFTVPDLG

SEQ ID NO: 52941 - protein, 133 aa, Glycine max
  peptide (1)..(133): Ceres Seq. ID no. 14306677
MRLLCVPNVTLKFMLQTSLQASTKDFFFNVYQASFPHVTFAKTSQHSYFVLKTEHSSVRIVMNQFIQPEAFPRTTSASLLLVSEWPRVLIAPKTMKKVTRSLLIGVHNKFLRKFLLSKCLASHPLGLLMTYWN

SEQ ID NO: 52942 - protein, 120 aa, Glycine max
  peptide (1)..(120): Ceres Seq. ID no. 14306678
MLQTSLQASTKDFFFNVYQASFPHVTFAKTSQHSYFVLKTEHSSVRIVMNQFIQPEAFPRTTSASLLLVSEWPRVLIAPKTMKKVTRSLLIGVHNKFLRKFLLSKCLASHPLGLLMTYWN

SEQ ID NO: 52943 - DNA, 1613 bp, Glycine max
  misc_feature (1)..(1613): Ceres Seq. ID no. 14315626
aaaaatatccgtggcaagagacagaaagaaggacactgttcacggttagggtttgagtctcaaccactctttctttaaagcacagtctcgcattcctccttgcctctttgttctctctttttctctctccttctttctttgtttctgtgtgttcgagattgaagaagatgatgcaggctggacccggcggcatggcccaacaagcgaaccaacaatacgcacagcaacagcaacaaccctacatgatgatgccgccacagcctcagccccctcagatgtgggccacatcggcccagcctccgtcccagtcggtggctcctccgcaacccaccagcgccgatgaggtccgtaccctctggatcggtgatttgcagtactggatggacgaaaattatctctacacctgtttggcacacaccggcgaggtggcttcagttaaagtcattcggaacaaacaaactagtcaatcggagggatatgggtttattgagtttactagtcgtgctggtgctgagagagtccttcaaacatacaatggcaccattatgccaaatggcgggcagaacttcagattgaactgggcaactcttagtgcaggtgagaggcgtcacgatgatagcccagatcacaccatatttgttggagacctggctgccgatgttacggattatcttcttcaagagacatttcgggcacgatatccctcaattaagggggccaaagttgtaattgataggctaactggacggacaaagggttatggttttgttaggtttggagatgagagtgaacaggttagagctatgactgaaatgcaaggggttctttgttcaacaaggcccatgcgaattggaccagcctctaataaaaaccctagcactcagtctcagccaaaagcatcatatcagaatcctcaaggggcacagaacgagcatgatccaaataatacaactatttttgtcggcaatttggatcctaacgtcacggatgaccatttgagacaagtttttgggcattatggagagttagttcatgtgaagattccagctggcaagcgatgtggatttgtccaatttgcggaccggagctgtgcggaagaggcactgcgggttttgaatggcacacttctaggcggacaaaatgttaggctttcatgggggcgaagtccttcaaacaaacaggctcaaccagatgcaaaccagtggaatggtagtggtggtggatactacggatatgctcaggggggctatgaaaattatggttatgcccctgctggacaggaccccaatatgtatggcagttatcctgggtatgcgaattaccaacctccccagcaacagcagcaaataggatatagctaagaagttgggcaccaattttttccgttttcttctgtaatgctatgctattgctaagatactcgttttggttgcttctcttttattgtatcgtggagaacaaacttggctgaatacattctatgcgaataggatatagctaagaagtttcttatgacattctatgcgaattttattttgtatccattaaatattgcttgctgaattctatttggtgaaagcgatcacatttgattgttatgtgtaattcgcagc

SEQ ID NO: 52944 - protein, 397 aa, Glycine max
  peptide (1)..(397): Ceres Seq. ID no. 14315627
MMQAGPGGMAQQANQQYAQQQQQPYMMMPPQPQPPQMWATSAQPPSQSVAPPQPTSADEVRTLWIGDLQYWMDENYLYTCLAHTGEVASVKVIRNKQTSQSEGYGFIEFTSRAGAERVLQTYNGTIMPNGGQNFRLNWATLSAGERRHDDSPDHTIFVGDLAADVTDYLLQETFRARYPSIKGAKVVIDRLTGRTKGYGFVRFGDESEQVRAMTEMQGVLCSTRPMRIGPASNKNPSTQSQPKASYQNPQGAQNEHDPNNTTIFVGNLDPNVTDDHLRQVFGHYGELVHVKIPAGKRCGFVQFADRSCAEEALRVLNGTLLGGQNVRLSWGRSPSNKQAQPDANQWNGSGGGYYGYAQGGYENYGYAPAGQDPNMYGSYPGYANYQPPQQQQQIGYS

SEQ ID NO: 52945 - protein, 396 aa, Glycine max
  peptide (1)..(396): Ceres Seq. ID no. 14315628
MQAGPGGMAQQANQQYAQQQQQPYMMMPPQPQPPQMWATSAQPPSQSVAPPQPTSADEVRTLWIGDLQYWMDENYLYTCLAHTGEVASVKVIRNKQTSQSEGYGFIEFTSRAGAERVLQTYNGTIMPNGGQNFRLNWATLSAGERRHDDSPDHTIFVGDLAADVTDYLLQETFRARYPSIKGAKVVIDRLTGRTKGYGFVRFGDESEQVRAMTEMQGVLCSTRPMRIGPASNKNPSTQSQPKASYQNPQGAQNEHDPNNTTIFVGNLDPNVTDDHLRQVFGHYGELVHVKIPAGKRCGFVQFADRSCAEEALRVLNGTLLGGQNVRLSWGRSPSNKQAQPDANQWNGSGGGYYGYAQGGYENYGYAPAGQDPNMYGSYPGYANYQPPQQQQQIGYS

SEQ ID NO: 52946 - protein, 389 aa, Glycine max
  peptide (1)..(389): Ceres Seq. ID no. 14315629
MAQQANQQYAQQQQQPYMMMPPQPQPPQMWATSAQPPSQSVAPPQPTSADEVRTLWIGDLQYWMDENYLYTCLAHTGEVASVKVIRNKQTSQSEGYGFIEFTSRAGAERVLQTYNGTIMPNGGQNFRLNWATLSAGERRHDDSPDHTIFVGDLAADVTDYLLQETFRARYPSIKGAKVVIDRLTGRTKGYGFVRFGDESEQVRAMTEMQGVLCSTRPMRIGPASNKNPSTQSQPKASYQNPQGAQNEHDPNNTTIFVGNLDPNVTDDHLRQVFGHYGELVHVKIPAGKRCGFVQFADRSCAEEALRVLNGTLLGGQNVRLSWGRSPSNKQAQPDANQWNGSGGGYYGYAQGGYENYGYAPAGQDPNMYGSYPGYANYQPPQQQQQIGYS

SEQ ID NO: 52947 - DNA, 1232 bp, Glycine max
  misc_feature (1)..(1232): Ceres Seq. ID no. 14303786
gagtgaagtgcgaaggacaatgagtgttcggtccaaaaacttgaactctgtattctatgcagattcgtaccatcccattcaagctggcagcatcgacggcaccgatgttgttcctcacgataacgccgtttatcgcgctcaactctgttcctccatcggcctctatgacccatttggtgatcccaaggccactggagacccttattgcactctctttgtcgctcgtctctctcgcctcaccaccgaagatgatctccgcaaggtcatgagtaagtatggtcgagtgaagaacttacgcttggttagggacattgtgacgggagcttctcgtggttatgcttttgttgaatacgagactgaaagggagatgcgacgagcatatatggatgctcatcatttgattgttgatgattctgaaatcatagttgattacaacagacagcaattgatgcctggatggattcctagaaggttaggtggtggtcttagtggtaagaaggaatcgggacaacttcgttttggggggagagaaaagccatttcgtgcacccctgaaaccaattccatatgaggagttgaagaagcttggcatcccccctcctcccgagggaagatacatgtcacgctttcaggtgccatcgcctcctagaagtgaaaggagcctttcagacagggaagaagactctcatagccacagaaggggatctaatgacaggaacaggaacaagacggaagatggactcagaagttcagtggacattgaggaagggcattataggagttcaagtcatcgtgataaccactcacgtggaaggagctctatggagaggagtggtcgttaccatgaccggagttcatctgagaaagaacatcgacacgggagttctactgacaaagacaaacattctcagaagagaaaagaaagtgacaggagttcacttgagaaagaacgtcgacacaggagttctactgacaaagacaaacattctcggaagagaaaagaaagagatgaacggtctcaaaggcgggaaaaatatagtcaccattcccctcacaaggactaagctgtacaactcattattatcacccttctgttgtgcttttgtgctttgtgtatggtatatgcatgggagaaatgggaatgcaaagtggaaatcctcaaagatttctcaataaacgcgagactggtgcatgtataggttcaatgataatcatgcttcggtttatattttt

SEQ ID NO: 52948 - protein, 353 aa, Glycine max
  peptide (1)..(353): Ceres Seq. ID no. 14303787
SEVRRTMSVRSKNLNSVFYADSYHPIQAGSIDGTDVVPHDNAVYRAQLCSSIGLYDPFGDPKATGDPYCTLFVARLSRLTTEDDLRKVMSKYGRVKNLRLVRDIVTGASRGYAFVEYETEREMRRAYMDAHHLIVDDSEIIVDYNRQQLMPGWIPRRLGGGLSGKKESGQLRFGGREKPFRAPLKPIPYEELKKLGIPPPPEGRYMSRFQVPSPPRSERSLSDREEDSHSHRRGSNDRNRNKTEDGLRSSVDIEEGHYRSSSHRDNHSRGRSSMERSGRYHDRSSSEKEHRHGSSTDKDKHSQKRKESDRSSLEKERRHRSSTDKDKHSRKRKERDERSQRREKYSHHSPHKD

SEQ ID NO: 52949 - protein, 347 aa, Glycine max
  peptide (1)..(347): Ceres Seq. ID no. 14303788
MSVRSKNLNSVFYADSYHPIQAGSIDGTDVVPHDNAVYRAQLCSSIGLYDPFGDPKATGDPYCTLFVARLSRLTTEDDLRKVMSKYGRVKNLRLVRDIVTGASRGYAFVEYETEREMRRAYMDAHHLIVDDSEIIVDYNRQQLMPGWIPRRLGGGLSGKKESGQLRFGGREKPFRAPLKPIPYEELKKLGIPPPPEGRYMSRFQVPSPPRSERSLSDREEDSHSHRRGSNDRNRNKTEDGLRSSVDIEEGHYRSSSHRDNHSRGRSSMERSGRYHDRSSSEKEHRHGSSTDKDKHSQKRKESDRSSLEKERRHRSSTDKDKHSRKRKERDERSQRREKYSHHSPHKD

SEQ ID NO: 52950 - protein, 265 aa, Glycine max
  peptide (1)..(265): Ceres Seq. ID no. 14303789
MSKYGRVKNLRLVRDIVTGASRGYAFVEYETEREMRRAYMDAHHLIVDDSEIIVDYNRQQLMPGWIPRRLGGGLSGKKESGQLRFGGREKPFRAPLKPIPYEELKKLGIPPPPEGRYMSRFQVPSPPRSERSLSDREEDSHSHRRGSNDRNRNKTEDGLRSSVDIEEGHYRSSSHRDNHSRGRSSMERSGRYHDRSSSEKEHRHGSSTDKDKHSQKRKESDRSSLEKERRHRSSTDKDKHSRKRKERDERSQRREKYSHHSPHKD

SEQ ID NO: 52951 - DNA, 1229 bp, Glycine max
  misc_feature (1)..(1229): Ceres Seq. ID no. 15170578
tttccgtgattgatacaggactcattgacttgatagcatacacccgtagcaacatgagggcatggcattagttaagctagataaactataaaatgctgtcaactactgccgctgctcagcttccaagttgctgatagccgaattcccctcagaaacttctatggcctaagtcttcctcaaacccataattgcagcaaagggaaagaaagcaataacagggctagatacaattccaatttaaatcagaaccacagacatttattatttctacagttcttccctgacagtgacacagaagacagcaataatcaaaatccaagaaccagaaaccactgtcaacatcaagtagatgaacaaagagaattcaaggaaaataaagaggccaggttgcttttctcaaacatgtggtgggtagatgtgaaagcagcacttggccaaagaataaatttggagggcattctatgttcaactatggtgatcttaaaagacccgaaattggcaatgccccatatttctgttcctgatataaggtatgttgattgggctgagctgcgtagaaagggatttaagggtgttgtctttgacaaggataatactattacagcaccttactctttgaagtcctggcctccacttgagtcttcattggagtgttgtaaatcggagtttggtcatgatattgcagtatttagtaactctgcgggacttcatgaatatgaccatgacggttcaaaagctaggatgcttgaaggggcaattggaattaaagtcataagacatagggtgaagaagccagccggtacagctgaagaaattgaaaagcattttggttgtgaagcttcacaattaatcatggttggtgatcggccattcactgacattgtttatggcaatcggaatggatttgtgggtattttgacagagccattgagtcttgctgaggagccgtttattgttaagcaggtgaggaagctagaaacttcatttgtaagtttctggtctagaagagggttggatccacttagccagaagttattgtcagatccaaagccatgtgtcaaagagccatatcattgacaagactaatatccaaacactgcacaattttttggccatcagaagtactgctttttagtaaagtaatgccctttagttaagtaatgcatacatgtcaatatattttttttaaaagcctatctagtttattttttaccacatgttaaatacat

SEQ ID NO: 52952 - protein, 224 aa, Glycine max
  peptide (1)..(224): Ceres Seq. ID no. 15170579
MWWVDVKAALGQRINLEGILCSTMVILKDPKLAMPHISVPDIRYVDWAELRRKGFKGVVFDKDNTITAPYSLKSWPPLESSLECCKSEFGHDIAVFSNSAGLHEYDHDGSKARMLEGAIGIKVIRHRVKKPAGTAEEIEKHFGCEASQLIMVGDRPFTDIVYGNRNGFVGILTEPLSLAEEPFIVKQVRKLETSFVSFWSRRGLDPLSQKLLSDPKPCVKEPYH

SEQ ID NO: 52953 - protein, 201 aa, Glycine max
  peptide (1)..(201): Ceres Seq. ID no. 15170580
MVILKDPKLAMPHISVPDIRYVDWAELRRKGFKGVVFDKDNTITAPYSLKSWPPLESSLECCKSEFGHDIAVFSNSAGLHEYDHDGSKARMLEGAIGIKVIRHRVKKPAGTAEEIEKHFGCEASQLIMVGDRPFTDIVYGNRNGFVGILTEPLSLAEEPFIVKQVRKLETSFVSFWSRRGLDPLSQKLLSDPKPCVKEPYH

SEQ ID NO: 52954 - protein, 191 aa, Glycine max
  peptide (1)..(191): Ceres Seq. ID no. 15170581
MPHISVPDIRYVDWAELRRKGFKGVVFDKDNTITAPYSLKSWPPLESSLECCKSEFGHDIAVFSNSAGLHEYDHDGSKARMLEGAIGIKVIRHRVKKPAGTAEEIEKHFGCEASQLIMVGDRPFTDIVYGNRNGFVGILTEPLSLAEEPFIVKQVRKLETSFVSFWSRRGLDPLSQKLLSDPKPCVKEPYH

SEQ ID NO: 52955 - DNA, 927 bp, Glycine max
  misc_feature (1)..(927): Ceres Seq. ID no. 14304626
ggatcatcacttcacttcactaatacatcatggcagacgagacccagaacaagtatgagagctctgaggttgaggtccaggatcgtggtgtttttgactttctcggtaagaaaaaggatgaagaagacaagcctcatcctcaggaggaggtcatcgccaccgagtttcaaaaagtcactgtctcagaccaaggagagaacaagcacagcctcttagaaaagcttcaccgatctgacagcagctctagctcttcaagtgaggaggaaggagaagatggagagaaaaggaagaagaagaagaaggaaaagaaagggctgaaagagaagatcgaggagaaaatagagggtgatcatcatcatcacaaggatgaggacacaagtgtccctgttgagaaagttgaggttgttgaaacagcacatgctgaggaaaagaaggggttcctcgacaagattaaggagaagctaccagggcacaagaagacagaggaggccacagctactactcctcctccaccaccacctgttgcatcattggagcatggtgaaggtgctcatcatgaaggagaggccaaggagaagaaaggtatattagaaaagataaaagagaagcttcctggttatcactccaagacagaggaggaaaaggaaaaggaaaaggagagtggtgctcattgatatttaagattgagacaaggcttttttgttggttggagatgcatgattgtggtgtgctttgttttcatttcatcatatgacagccttgtgggtttctttggtgtttcttgatgcatacttaatttactttattattgtgtatttatctcttccatttacaaaaaaaaaagtttgtgtaggtttccttctttgaagtaaaaagaaattaaatatgtactgaaaatggaataatagtgtgttttatttgtgtttg

SEQ ID NO: 52956 - protein, 214 aa, Glycine max
  peptide (1)..(214): Ceres Seq. ID no. 14304627
MADETQNKYESSEVEVQDRGVFDFLGKKKDEEDKPHPQEEVIATEFQKVTVSDQGENKHSLLEKLHRSDSSSSSSSEEEGEDGEKRKKKKKEKKGLKEKIEEKIEGDHHHHKDEDTSVPVEKVEVVETAHAEEKKGFLDKIKEKLPGHKKTEEATATTPPPPPPVASLEHGEGAHHEGEAKEKKGILEKIKEKLPGYHSKTEEEKEKEKESGAH

SEQ ID NO: 52957 - DNA, 1518 bp, Glycine max
  misc_feature (1)..(1518): Ceres Seq. ID no. 14305042
aaaactctctctctctctctctacgctaattaaggttcattgggcattggcggattctatttccttttctcaaaacccaatttgcttcttcttcatggaagcactctccttcatcatccccaaagactcttgttctcttctccttcgcactccttcttcatattcctcttcgtctgtcagaactccgccgccgccacttgctttcttcaaaaccacccaacactctcactcgcctcaccttctccgtcttcgcgtttttgccctccctaaccccgacgccgatgaacccaccaacgacttcgctttagcgtctcatcctcaggaaaatttaagccattctgagactgagagttccgaagatgatcaagatgctccaccacaaatggacatgtcgtggtcaacgatcacagccccagctggaagtggatccggtggtggcaccagggctggacttttcagaacacccatttctggtggcgtgcagagtgccacctcagctcacggtttacctagaccggctttagcagtacggaatttgatggagcaggcaagatttgctcatttgtgcactgtaatgtctcgtatgcaccaccgacgagaaggatatccatttggttctctggttgattttgcaccagactcaacgggtcatccaatattttcattttctcctcttgcaattcacacaaggaatttgttggctgacccaagatgcacactggttgtccagatacctggatggagtggcttgtccaatgcaagggtaactctttttggggatgtctatccacttccagaagatcaacaggaatgggctcataagcagtatattgcaaaacatcaacagggtccttctcaacagtggggcaacttctactattttaggatgcagaatataagtgacatatatttcattggaggctttggtactgttgcttgggtggatgtaaaggaatatgaaacccttcaacctgataagattgcagttgatggtggtgaacagtatttaaaggaactcaatgctatcttctcaaaacccctaaagaaacttctatctagtgagactgaggtagatgacgctgcactcatatctatagacagcaaaggaactgatattagggtccgtcaaggtgctcagttcaacattcagaggatatcatttgatgaagggcagagtgtagaaacattggaagaagctaaagctgctcttcggaaattaatacacaaaggaaaagtgtacaatttgcagaaataagatgctggatgggatgtcctcttctccttttggctatagagtagacaatatatggaaccatgcgactttctaatgggacctttttagaatggttaattttatacttttttgcctggttgacatgcaccagaaagtgtattatattcatgcatttgaaagcatattttggtaagagtgggctttattgtgggctataccaccatagtcaaactagaaataatatatcagaactcatgaaataatagtatgattttttcccctcc

SEQ ID NO: 52958 - protein, 417 aa, Glycine max
  peptide (1)..(417): Ceres Seq. ID no. 14305043
KLSLSLSTLIKVHWALADSISFSQNPICFFFMEALSFIIPKDSCSLLLRTPSSYSSSSVRTPPPPLAFFKTTQHSHSPHLLRLRVFALPNPDADEPTNDFALASHPQENLSHSETESSEDDQDAPPQMDMSWSTITAPAGSGSGGGTRAGLFRTPISGGVQSATSAHGLPRPALAVRNLMEQARFAHLCTVMSRMHHRREGYPFGSLVDFAPDSTGHPIFSFSPLAIHTRNLLADPRCTLVVQIPGWSGLSNARVTLFGDVYPLPEDQQEWAHKQYIAKHQQGPSQQWGNFYYFRMQNISDIYFIGGFGTVAWVDVKEYETLQPDKIAVDGGEQYLKELNAIFSKPLKKLLSSETEVDDAALISIDSKGTDIRVRQGAQFNIQRISFDEGQSVETLEEAKAALRKLIHKGKVYNLQK

SEQ ID NO: 52959 - protein, 386 aa, Glycine max
  peptide (1)..(386): Ceres Seq. ID no. 14305044
MEALSFIIPKDSCSLLLRTPSSYSSSSVRTPPPPLAFFKTTQHSHSPHLLRLRVFALPNPDADEPTNDFALASHPQENLSHSETESSEDDQDAPPQMDMSWSTITAPAGSGSGGGTRAGLFRTPISGGVQSATSAHGLPRPALAVRNLMEQARFAHLCTVMSRMHHRREGYPFGSLVDFAPDSTGHPIFSFSPLAIHTRNLLADPRCTLVVQIPGWSGLSNARVTLFGDVYPLPEDQQEWAHKQYIAKHQQGPSQQWGNFYYFRMQNISDIYFIGGFGTVAWVDVKEYETLQPDKIAVDGGEQYLKELNAIFSKPLKKLLSSETEVDDAALISIDSKGTDIRVRQGAQFNIQRISFDEGQSVETLEEAKAALRKLIHKGKVYNLQK

SEQ ID NO: 52960 - protein, 290 aa, Glycine max
  peptide (1)..(290): Ceres Seq. ID no. 14305045
MDMSWSTITAPAGSGSGGGTRAGLFRTPISGGVQSATSAHGLPRPALAVRNLMEQARFAHLCTVMSRMHHRREGYPFGSLVDFAPDSTGHPIFSFSPLAIHTRNLLADPRCTLVVQIPGWSGLSNARVTLFGDVYPLPEDQQEWAHKQYIAKHQQGPSQQWGNFYYFRMQNISDIYFIGGFGTVAWVDVKEYETLQPDKIAVDGGEQYLKELNAIFSKPLKKLLSSETEVDDAALISIDSKGTDIRVRQGAQFNIQRISFDEGQSVETLEEAKAALRKLIHKGKVYNLQK

SEQ ID NO: 52961 - DNA, 1212 bp, Glycine max
  misc_feature (1)..(1212): Ceres Seq. ID no. 14304593
ttgttctttcacaaatggtagccccaaaagtgaggtcatggagcctgagattaagaacaaagatgtctttaagaaaagaaagaccatgtcaacgtgcacagaacaagtgaaggtgtgcttgggaacggcgcatgaaggatctctggatgatggctatagttggagaaaatatggacagaaggatattctcggagctaagtttccaagaggatattacagatgcacatatagaaatgtacaaggatgtctggccacaaagcaggtgcaaaagtcagatgaagacccaatgatatgtgaaataacctacaaaggaagacacacatgcacccaagcaagtcacttaaacaaaacagtgatacccccatcaaagacaaaggtgaacttgttgggagaaaataagcaccaaacccatcaaattaagaatcaaccacggcaagagaaaatagaacaacaaccaccagagacatttttcacatttggatcatcatcaggtcttgaagttaaaatagaggacatcgaccacaaggagggcatattcccatcattttgcttttcttctccatcaatagtagggtcagaaaatggggacgacaacaacagcagcatattctcatacaccatgattgagaacaacttaatggaaagcttctctcctgccttcatatctccaacaacttcagatatagaatcaaacactttctgccactgggggagcactggactaggccaaagtgtgcaaagctcagggtctgatatcactgatatagtttcagcaccaacttcagtcaccaattcaccaataatggaccttgatttctttttcgataagatcgatttcgacacagatttccctttgagcaccatggaactttgcacttaataaattgtccccacttctaagtttacagcatatgtgatttctatgcggattaactgtgagttttgtagatcctgactagcaccataaccgagggaaggaagtctataataatcaccatagatcatgtccataaatgaagacaatgaaaaacttccctcttgtgctaattaagagagttttcatgtacctaggctgcaatgtgaaaataatttgtaggttgtagcttaatttggtgcatgtttggtttgcaatggaaattgttgtaatgcgcgttccaatgtagatcttatggataaaagtaaaatgaaatcaaaagagttctaatcttttag

SEQ ID NO: 52962 - protein, 292 aa, Glycine max
  peptide (1)..(292): Ceres Seq. ID no. 14304594
CSFTNGSPKSEVMEPEIKNKDVFKKRKTMSTCTEQVKVCLGTAHEGSLDDGYSWRKYGQKDILGAKFPRGYYRCTYRNVQGCLATKQVQKSDEDPMICEITYKGRHTCTQASHLNKTVIPPSKTKVNLLGENKHQTHQIKNQPRQEKIEQQPPETFFTFGSSSGLEVKIEDIDHKEGIFPSFCFSSPSIVGSENGDDNNSSIFSYTMIENNLMESFSPAFISPTTSDIESNTFCHWGSTGLGQSVQSSGSDITDIVSAPTSVTNSPIMDLDFFFDKIDFDTDFPLSTMELCT

SEQ ID NO: 52963 - protein, 280 aa, Glycine max
  peptide (1)..(280): Ceres Seq. ID no. 14304595
MEPEIKNKDVFKKRKTMSTCTEQVKVCLGTAHEGSLDDGYSWRKYGQKDILGAKFPRGYYRCTYRNVQGCLATKQVQKSDEDPMICEITYKGRHTCTQASHLNKTVIPPSKTKVNLLGENKHQTHQIKNQPRQEKIEQQPPETFFTFGSSSGLEVKIEDIDHKEGIFPSFCFSSPSIVGSENGDDNNSSIFSYTMIENNLMESFSPAFISPTTSDIESNTFCHWGSTGLGQSVQSSGSDITDIVSAPTSVTNSPIMDLDFFFDKIDFDTDFPLSTMELCT

SEQ ID NO: 52964 - protein, 264 aa, Glycine max
  peptide (1)..(264): Ceres Seq. ID no. 14304596
MSTCTEQVKVCLGTAHEGSLDDGYSWRKYGQKDILGAKFPRGYYRCTYRNVQGCLATKQVQKSDEDPMICEITYKGRHTCTQASHLNKTVIPPSKTKVNLLGENKHQTHQIKNQPRQEKIEQQPPETFFTFGSSSGLEVKIEDIDHKEGIFPSFCFSSPSIVGSENGDDNNSSIFSYTMIENNLMESFSPAFISPTTSDIESNTFCHWGSTGLGQSVQSSGSDITDIVSAPTSVTNSPIMDLDFFFDKIDFDTDFPLSTMELCT

SEQ ID NO: 52965 - DNA, 1831 bp, Glycine max
  misc_feature (1)..(1831): Ceres Seq. ID no. 15174712
aattctggatgtgaatttattgataaatcttctagtacttctgggacatctcaatctcctttggtggaagaaaagtgtgggagcgtcagaaaggtccattccagtagcaataagagagactacattcttcgacagaagtcattccacatggaaaaaagttatcggacatatggacctaaagggtcttcaagaggaggaagactgaatggcttgaatggattaatcttggataaaaaacttaaatctgtatctgagtctactaccataaacttaaagagtgcatcgataaacataagtaaggcagtgggagttgatgtgacacaagacaatttaaatgctgatttttcatctaatgatggaccatcaacccccactgcatttagtctggattctactgttactgtttctcagtcaaccaatactttatcttcagtgcatgaagcaaatgctatacctgcagttggtagcccaaatgtattatcagctacagatactgatctttctctttctttgtcttcaaatagtaagtctcctacaacaactgtccgctgcaataatgaggcacctaatagtagttgtatggggatacctcatgacaggtccctggggaagtggataccccaagatagaaaggatgagatgattttgaagctagttccaagggttcgggagctgcaaaatcagcttcaagaatggacagagtgggcaaatcagaaggttatgcaggctgctcgtcggctgagtaaggatagggccgagcttaagacactgagacaagagaaagatgaagttgaacgtcttaaaaaagaaaaacaatctctagaggaaaacactatgaagaagatttctgagatggaaaatgccttgtctaaagcgagtgcacaggtagaaagaaccaatgctgatgtccggaaacttgaggtggaaaatgctgcactgaggaaagagatggaggttgctaagttacaagcggctgagtcagccacaagctgtcaagaggtctcaaggagggaaaagaagacccaaatgaagtttcaatcatgggagaagcagaaatccttgtttcaggaagagctaatgaatgaaaaacacaaattagctcagttgcagcaagaattagagcaagctaaagtgcaacagcagcaagtcgaggctaggtggcagcaagcagcaaaggcaaaagaagaactcctcctgcaggccagttctataagaaaagaaagggaacaaattgaggagtcagcaaaatcaaaggaggatatgatcaaactgaaagcagaggaaaatctacacaggtacagagatgacatccagaaacttgaaaaagaaattgcacaactgagacagaagaccgactcttctaaaattgctgcactgagaaggggaattgatggaaactatgtcagcagctttatggacgtgaaaagcatggctctgaaagaatcgcgggccacttttatctcagaaatggtttcaaatttaaatgactactctttgatagggggtgtaaagcgggaaagagaatgtgtcatgtgcctttctgaggagatgtctgttgtattcctcccatgtgctcatcaggttgtttgcacaacatgcaatgatctccacgagaaacaaggtatgcaagactgtccttcttgcaggagccccatccagaggcgtatttctgtccgatttgcccgtacataatttatttacttgaatgaaatgagtgttttgaataatgtctgttggaacactcttgcaaagaataatgcattcagaatcatgcatctcgagtttaaagatacattaagttgctttcaatgccaaggttgatttttatgtt

SEQ ID NO: 52966 - protein, 563 aa, Glycine max
  peptide (1)..(563): Ceres Seq. ID no. 15174713
NSGCEFIDKSSSTSGTSQSPLVEEKCGSVRKVHSSSNKRDYILRQKSFHMEKSYRTYGPKGSSRGGRLNGLNGLILDKKLKSVSESTTINLKSASINISKAVGVDVTQDNLNADFSSNDGPSTPTAFSLDSTVTVSQSTNTLSSVHEANAIPAVGSPNVLSATDTDLSLSLSSNSKSPTTTVRCNNEAPNSSCMGIPHDRSLGKWIPQDRKDEMILKLVPRVRELQNQLQEWTEWANQKVMQAARRLSKDRAELKTLRQEKDEVERLKKEKQSLEENTMKKISEMENALSKASAQVERTNADVRKLEVENAALRKEMEVAKLQAAESATSCQEVSRREKKTQMKFQSWEKQKSLFQEELMNEKHKLAQLQQELEQAKVQQQQVEARWQQAAKAKEELLLQASSIRKEREQIEESAKSKEDMIKLKAEENLHRYRDDIQKLEKEIAQLRQKTDSSKIAALRRGIDGNYVSSFMDVKSMALKESRATFISEMVSNLNDYSLIGGVKRERECVMCLSEEMSVVFLPCAHQVVCTTCNDLHEKQGMQDCPSCRSPIQRRISVRFART

SEQ ID NO: 52967 - protein, 514 aa, Glycine max
  peptide (1)..(514): Ceres Seq. ID no. 15174714
MEKSYRTYGPKGSSRGGRLNGLNGLILDKKLKSVSESTTINLKSASINISKAVGVDVTQDNLNADFSSNDGPSTPTAFSLDSTVTVSQSTNTLSSVHEANAIPAVGSPNVLSATDTDLSLSLSSNSKSPTTTVRCNNEAPNSSCMGIPHDRSLGKWIPQDRKDEMILKLVPRVRELQNQLQEWTEWANQKVMQAARRLSKDRAELKTLRQEKDEVERLKKEKQSLEENTMKKISEMENALSKASAQVERTNADVRKLEVENAALRKEMEVAKLQAAESATSCQEVSRREKKTQMKFQSWEKQKSLFQEELMNEKHKLAQLQQELEQAKVQQQQVEARWQQAAKAKEELLLQASSIRKEREQIEESAKSKEDMIKLKAEENLHRYRDDIQKLEKEIAQLRQKTDSSKIAALRRGIDGNYVSSFMDVKSMALKESRATFISEMVSNLNDYSLIGGVKRERECVMCLSEEMSVVFLPCAHQVVCTTCNDLHEKQGMQDCPSCRSPIQRRISVRFART

SEQ ID NO: 52968 - protein, 370 aa, Glycine max
  peptide (1)..(370): Ceres Seq. ID no. 15174715
MGIPHDRSLGKWIPQDRKDEMILKLVPRVRELQNQLQEWTEWANQKVMQAARRLSKDRAELKTLRQEKDEVERLKKEKQSLEENTMKKISEMENALSKASAQVERTNADVRKLEVENAALRKEMEVAKLQAAESATSCQEVSRREKKTQMKFQSWEKQKSLFQEELMNEKHKLAQLQQELEQAKVQQQQVEARWQQAAKAKEELLLQASSIRKEREQIEESAKSKEDMIKLKAEENLHRYRDDIQKLEKEIAQLRQKTDSSKIAALRRGIDGNYVSSFMDVKSMALKESRATFISEMVSNLNDYSLIGGVKRERECVMCLSEEMSVVFLPCAHQVVCTTCNDLHEKQGMQDCPSCRSPIQRRISVRFART

SEQ ID NO: 52969 - DNA, 1396 bp, Glycine max
  misc_feature (1)..(1396): Ceres Seq. ID no. 14304004
gaaatgagaattgcacaattgcaaagtgagaataattccttacttcaaaaagaggctggattggtggaaaaaactaatcagttgctgaatgaaaaggtagttttgagcctgaaagctgagagtttagagagaaaaataaatcttctggagaatgagttgagttcttttagtgagaaagaggttggacttgaaacaagaattgcacaattgcagagtgagaataattccttacttcaaaaagaggctacattggtggaaagaaccaatcaattgctgaatgaaaaggcagttttgagcctgaaaggggagagtttagaacaaaaaatatatcttctggaaagcgatttgaattctttagtcaagaaggagaattcaactaaagaaactatttcaaacctgaatggaaacattgctgtgctacaagcgcaggtggaagaattggaggagtccaggaataatctttttctagaaaaccagcaattgagggaaaaagtgtcgagtcttcagtcaacggtccaaaatcatgaaaacagtaacacttcttcctgctcatgggatgcatctgtaaaggatcttgcttctgaaaacgaggacttgaagtctgaaattgaagcagcctttacgttggtggagaaattgatggctgaaaatgcagaacttgttgagaaggtcaccgagttatgtgttgagctggatcaccgaagtgcagaagtcggacattctggagtcactgaatccaatgggatgactgaatttgttaaacctactggtgttgccattcctctaccagaatctgctgagtatgcgtctgtatcatcccccaagttgaattcattggaagagacttcagtgaaggataatggtaactctaatgatgctaagcatgttgttggggtaacgtcaaactcgtcgttggtatcggctgatgacgctggagaaatcgtgcaaattccattggatgataatgaaatacaagatatagagttgcaggatgctaagaatgtggaaaatgatgctgatgctgtgccaatcacagatgctccgcttatcggtgctccatttcgtttgatatcatttgttgctaattttgttagtggtgctgacttggttaaccaaagctcttcaaacactgctcgttgacttggttgaccaaagctctgttttttttggctggcagtcttgaacatacaataacctcacttacattaggcagaataccaatataggttggcctaatttgggccattttaatgtttgtatgttaattctttgaacacggaaatattgtactggggaaaagcatatagttttatgtgttcttacttcatattgctttcacttttggaaattatacctttaaaaaatggcatcatgaatagacatgcattaattggtg

SEQ ID NO: 52970 - protein, 379 aa, Glycine max
  peptide (1)..(379): Ceres Seq. ID no. 14304005
EMRIAQLQSENNSLLQKEAGLVEKTNQLLNEKVVLSLKAESLERKINLLENELSSFSEKEVGLETRIAQLQSENNSLLQKEATLVERTNQLLNEKAVLSLKGESLEQKIYLLESDLNSLVKKENSTKETISNLNGNIAVLQAQVEELEESRNNLFLENQQLREKVSSLQSTVQNHENSNTSSCSWDASVKDLASENEDLKSEIEAAFTLVEKLMAENAELVEKVTELCVELDHRSAEVGHSGVTESNGMTEFVKPTGVAIPLPESAEYASVSSPKLNSLEETSVKDNGNSNDAKHVVGVTSNSSLVSADDAGEIVQIPLDDNEIQDIELQDAKNVENDADAVPITDAPLIGAPFRLISFVANFVSGADLVNQSSSNTAR

SEQ ID NO: 52971 - protein, 378 aa, Glycine max
  peptide (1)..(378): Ceres Seq. ID no. 14304006
MRIAQLQSENNSLLQKEAGLVEKTNQLLNEKVVLSLKAESLERKINLLENELSSFSEKEVGLETRIAQLQSENNSLLQKEATLVERTNQLLNEKAVLSLKGESLEQKIYLLESDLNSLVKKENSTKETISNLNGNIAVLQAQVEELEESRNNLFLENQQLREKVSSLQSTVQNHENSNTSSCSWDASVKDLASENEDLKSEIEAAFTLVEKLMAENAELVEKVTELCVELDHRSAEVGHSGVTESNGMTEFVKPTGVAIPLPESAEYASVSSPKLNSLEETSVKDNGNSNDAKHVVGVTSNSSLVSADDAGEIVQIPLDDNEIQDIELQDAKNVENDADAVPITDAPLIGAPFRLISFVANFVSGADLVNQSSSNTAR

SEQ ID NO: 52972 - DNA, 1462 bp, Glycine max
  misc_feature (1)..(1462): Ceres Seq. ID no. 14315614
aacacaaacaccacggccgccgccgccaccgagattatcacaacgcgccgccgccaccgagattatcacaacgcgccgccgcagcattcacctccccggagatccaccctttgcatggcagtgagctttctggcgcgcgatgtatcggacctctgccttgggaagccaccgctgaggtcgctctccgctgccgccaccgtcgccgacgccttagacgcgctcaagagctccgacggcgagatccacgtcagcgtgtggagcttcgagaatgaagtgggtcgatgcgtagggaaactgtgcatggtcgatgttatttgctacctttgcagagaggacaatctcttgtctccttctaaatctctcaaagaaccactttcctcaattctccctaaggatcataatctcgttgtgcatcttcaaccttcttctagcttgttggaagctattgatcttatcctacaaggtgcacagaattttgtggtgccaatattgccaacaaagaggagtggagtttcaagaaggaaacagcagcatcagaaggcatcatcaacaatcaacagccatagtagttgtgaattcagttggttgactcaagaggatgtgattaggttccttcttggttccattggggtcttcactccacttcctgctttgtctattgactctcttggcatcgttagctctgatgtgcttgccattgactactactcccctgcatcttctacagttggagccatctcaaagtcccttgcccagcaaacttctgttgccattgtggacagtgatggcactttcattggagagatatcacccttcactctcgcttgttgcgacgagacggtcgcggccgccatggccaccttgtctgcgggggacctaatggcctacattgattgtggaggccctcctgaggatcttgtgagagtggtcaaggcaaggttgaaggagaagaatttggagaagatgttgcaggagttcacaattttgtcatcttgcgagagttcacaattggcatcctcctcgtcttcctccgatgaggagtcaacaacaaggacaccagctaggtctggaaggttggcaaggtcatctagctactcggctaggatggtgaggaaggccgaggctatagtgtgtcatccaaagagctcccttgttgctgtgatgatccaggccattgcacatagagtgaactacttgtgggttattgaggatgattgtagcttagttggcattgtcactttttctaatatgttgaaggtgttcagagaacatttagaaactatgtagattattaggtgatgaggttttggctttggatgcttctggtgagaagcatgaacaccaaggtgtatgagcatggtccttcttttgtaagtattgcaatgtggcccgggaggttttggtttttgttgtgctttatttctgtgtgcttcccttctaataaaaaaactcccttcaacgt

SEQ ID NO: 52973 - protein, 428 aa, Glycine max
  peptide (1)..(428): Ceres Seq. ID no. 14315615
NTNTTAAAATEIITTRRRHRDYHNAPPQHSPPRRSTLCMAVSFLARDVSDLCLGKPPLRSLSAAATVADALDALKSSDGEIHVSVWSFENEVGRCVGKLCMVDVICYLCREDNLLSPSKSLKEPLSSILPKDHNLVVHLQPSSSLLEAIDLILQGAQNFVVPILPTKRSGVSRRKQQHQKASSTINSHSSCEFSWLTQEDVIRFLLGSIGVFTPLPALSIDSLGIVSSDVLAIDYYSPASSTVGAISKSLAQQTSVAIVDSDGTFIGEISPFTLACCDETVAAAMATLSAGDLMAYIDCGGPPEDLVRVVKARLKEKNLEKMLQEFTILSSCESSQLASSSSSSDEESTTRTPARSGRLARSSSYSARMVRKAEAIVCHPKSSLVAVMIQAIAHRVNYLWVIEDDCSLVGIVTFSNMLKVFREHLETM

SEQ ID NO: 52974 - protein, 390 aa, Glycine max
  peptide (1)..(390): Ceres Seq. ID no. 14315616
MAVSFLARDVSDLCLGKPPLRSLSAAATVADALDALKSSDGEIHVSVWSFENEVGRCVGKLCMVDVICYLCREDNLLSPSKSLKEPLSSILPKDHNLVVHLQPSSSLLEAIDLILQGAQNFVVPILPTKRSGVSRRKQQHQKASSTINSHSSCEFSWLTQEDVIRFLLGSIGVFTPLPALSIDSLGIVSSDVLAIDYYSPASSTVGAISKSLAQQTSVAIVDSDGTFIGEISPFTLACCDETVAAAMATLSAGDLMAYIDCGGPPEDLVRVVKARLKEKNLEKMLQEFTILSSCESSQLASSSSSSDEESTTRTPARSGRLARSSSYSARMVRKAEAIVCHPKSSLVAVMIQAIAHRVNYLWVIEDDCSLVGIVTFSNMLKVFREHLETM

SEQ ID NO: 52975 - protein, 328 aa, Glycine max
  peptide (1)..(328): Ceres Seq. ID no. 14315617
MVDVICYLCREDNLLSPSKSLKEPLSSILPKDHNLVVHLQPSSSLLEAIDLILQGAQNFVVPILPTKRSGVSRRKQQHQKASSTINSHSSCEFSWLTQEDVIRFLLGSIGVFTPLPALSIDSLGIVSSDVLAIDYYSPASSTVGAISKSLAQQTSVAIVDSDGTFIGEISPFTLACCDETVAAAMATLSAGDLMAYIDCGGPPEDLVRVVKARLKEKNLEKMLQEFTILSSCESSQLASSSSSSDEESTTRTPARSGRLARSSSYSARMVRKAEAIVCHPKSSLVAVMIQAIAHRVNYLWVIEDDCSLVGIVTFSNMLKVFREHLETM

SEQ ID NO: 52976 - DNA, 1620 bp, Glycine max
  misc_feature (1)..(1620): Ceres Seq. ID no. 14303831
gtttcatttggttttcttccttctcacacttcccccaattcccaaaccaaactctgtcttttcttctctgtacggcactctctcttccggcgttctgggggtcgcatcgccggcgattccccactctgcttctctcttcacccttcaattcaaccctctcgtcttcgcttcactgattccctcttcgaaaatgcttccgatcgcttgctagggttttccttctcccaaatctccgtctccgaaagaaccctgtaccttttcttcctccgattaatcaacttcctagttatggctattcgtgtaactttttccttttcgggctacgtcgcccagagcctcgcctcctccgccggcgtgcgcgtcgccaattcgcgatgtgtccaggaatgctggatccgcacgcgcctcttcgggggcgccacccagaagacggatctagattcctccgccggcggcggagtccgcaatttcgccaggcccaactgctgggcccagtccacttactcgagcctcgccggggaatttctcggcgacggttgcagcaagagcccaatcatcttgggcctgatttcgatcatgaagtcaacggtgggtgtgtctgggtcatccgcggcggctgcgggtattttcggtatttcgccatttaaaaccacttcgattatccccttcttgccaggttcgaagtggcttccttgcaacgagtccgttcccgaccccacctcctgggaggtcgacaaaggtggcacgcgacgcgtcgtttcggaaacagaatcgaattttgccaagattagttggctttcgcggttgatgaacgtgtgttccgaagacgcgaaggctgcgttcactgctcttaccgttagtttactctttaaatcgtccttggctgaacccagatcaattccctcctcttctatgtaccctactcttgaagtaggtgaccgtgttcttaccgagaaggtttcgttcttctttagaaagcctgatgtttcggatatagtcattttcaaagctcctccttggttagaggagtttggttttagttcgtctgatgtatttataaagaggattgtggctaaggctggggacactgttgaggtgcgtgatgggaaactactgataaatggtgctgctgaagaacaagaatttgtattagaggctctagcttatgagatggatccaatggttgtgccagaaggatatgtgtttgtaatgggcgacaatcggaataaaagctttgattctcataactggggtcccctgccggttgagaacattgttggtaggtccatgtttcggtactggcctccatccaaggcatctgacactgatacccatcgtaaactcccacctggtaacaaacctgtggcaatttcttgacatgattcccgcagctttgtgaaggtgatgaaggtttccagatacggtcgtttgttctaaattgttagcttgagctgactttgcacacagtttgggatgaatatcttattcattgatacaaatttgtcgatgacctaataataccattaagcgttcattagtgccatctgagatgtatttctattgctgaagtgcggggagaaaaaaaagaattaaaaaagcatgatgattttgccccccccc

SEQ ID NO: 52977 - protein, 458 aa, Glycine max
  peptide (1)..(458): Ceres Seq. ID no. 14303832
VSFGFLPSHTSPNSQTKLCLFFSVRHSLFRRSGGRIAGDSPLCFSLHPSIQPSRLRFTDSLFENASDRLLGFSFSQISVSERTLYLFFLRLINFLVMAIRVTFSFSGYVAQSLASSAGVRVANSRCVQECWIRTRLFGGATQKTDLDSSAGGGVRNFARPNCWAQSTYSSLAGEFLGDGCSKSPIILGLISIMKSTVGVSGSSAAAAGIFGISPFKTTSIIPFLPGSKWLPCNESVPDPTSWEVDKGGTRRVVSETESNFAKISWLSRLMNVCSEDAKAAFTALTVSLLFKSSLAEPRSIPSSSMYPTLEVGDRVLTEKVSFFFRKPDVSDIVIFKAPPWLEEFGFSSSDVFIKRIVAKAGDTVEVRDGKLLINGAAEEQEFVLEALAYEMDPMVVPEGYVFVMGDNRNKSFDSHNWGPLPVENIVGRSMFRYWPPSKASDTDTHRKLPPGNKPVAIS

SEQ ID NO: 52978 - protein, 362 aa, Glycine max
  peptide (1)..(362): Ceres Seq. ID no. 14303833
MAIRVTFSFSGYVAQSLASSAGVRVANSRCVQECWIRTRLFGGATQKTDLDSSAGGGVRNFARPNCWAQSTYSSLAGEFLGDGCSKSPIILGLISIMKSTVGVSGSSAAAAGIFGISPFKTTSIIPFLPGSKWLPCNESVPDPTSWEVDKGGTRRVVSETESNFAKISWLSRLMNVCSEDAKAAFTALTVSLLFKSSLAEPRSIPSSSMYPTLEVGDRVLTEKVSFFFRKPDVSDIVIFKAPPWLEEFGFSSSDVFIKRIVAKAGDTVEVRDGKLLINGAAEEQEFVLEALAYEMDPMVVPEGYVFVMGDNRNKSFDSHNWGPLPVENIVGRSMFRYWPPSKASDTDTHRKLPPGNKPVAIS

SEQ ID NO: 52979 - protein, 266 aa, Glycine max
  peptide (1)..(266): Ceres Seq. ID no. 14303834
MKSTVGVSGSSAAAAGIFGISPFKTTSIIPFLPGSKWLPCNESVPDPTSWEVDKGGTRRVVSETESNFAKISWLSRLMNVCSEDAKAAFTALTVSLLFKSSLAEPRSIPSSSMYPTLEVGDRVLTEKVSFFFRKPDVSDIVIFKAPPWLEEFGFSSSDVFIKRIVAKAGDTVEVRDGKLLINGAAEEQEFVLEALAYEMDPMVVPEGYVFVMGDNRNKSFDSHNWGPLPVENIVGRSMFRYWPPSKASDTDTHRKLPPGNKPVAIS

SEQ ID NO: 52980 - DNA, 1476 bp, Glycine max
  misc_feature (1)..(1476): Ceres Seq. ID no. 14305026
tcttaaagacgacattgactgctaacaacaataaagtggatcaatcattaaaggcttacttcttcttcttcttcttcttcttcttcttctaacaacaataagatcccatctttcccactcatgaagagacttaacagctcagattcttccactgccctcatgacaatttttccatcatcatcaacagaggaacatagtccgaggaacagccaccacatgtatggcagggagttccgatcgatgttggacggactcgacgaggaagggtgtgttgaagaaccggggcatcaatctgagaagaagcgtcgactaagtgtggaacaagtgaaggctttggagaagaactttgaggttgaaaacaagcttgaacctgagaggaaggtcaagcttgcccaagaacttgggttgcaacctagacaagtagccgtttggttccaaaaccgccgagccagatggaaaaccaaacaattggagagagattatggtgtcctcaaagccaattatgatgctcttaagcttaactttggcaccctcaatcaggacaacgaagccttacgaaagcagataaaggaattgaaatcgaggctgctgcaagaagagaacacagcaggaagcggtgtttcggtgaaggaagaagagataacaacgatgcctgcagactcagaagagaaaacgatggaacaaagtaagagtgacccaccttctgaaacctcgaacattaatcctagttcggagtcgtcggaggaggaccacttgaattacgaatgtttcaacaacaacagcgacgactgtgtcgtcggaggatccgccgcagcatcgctcttgcaagtggacttcatgaaagacggttcttccgacagcgacggatcaagcgcgatcttgaacgaagacaccatgtacttgccgtcttcgatgaactgttttcagttccagaaaccgtatcatcacgcgcagtacgtgaagacggaggagcacaatttcttgagcgccgatgaggcctgcaatttcttctccgatgaacaagcaccgaccctgcaatggtactgtccagaacagtggagctgagatagaagaaacatgggaaaattggaaaccgctttcagaaatttttgtttaatatgttgcacggttgtgttgaacacagctcattgaggtaaaagttgtaaaaaaaggttgccacttgccaacagaggctgcttgaaggtagaaaatgaaacactgtgcagaagatagagttacgaaagagagaacagagatcaatggctgcatggcgtggggtcggagatgaaggatgacgattaaggttaattattactctcgatcgtgggtaatatcaataattattcaatcgtaaagcaaaccatgctgtaaaaaacaaatttcaattcaagtatagaataacgatgtagtactttatcaaacagaaaacgaaaaaaaaaattataaatctgttaaacaatatccttttgcctcact

SEQ ID NO: 52981 - protein, 314 aa, Glycine max
  peptide (1)..(314): Ceres Seq. ID no. 14305027
MKRLNSSDSSTALMTIFPSSSTEEHSPRNSHHMYGREFRSMLDGLDEEGCVEEPGHQSEKKRRLSVEQVKALEKNFEVENKLEPERKVKLAQELGLQPRQVAVWFQNRRARWKTKQLERDYGVLKANYDALKLNFGTLNQDNEALRKQIKELKSRLLQEENTAGSGVSVKEEEITTMPADSEEKTMEQSKSDPPSETSNINPSSESSEEDHLNYECFNNNSDDCVVGGSAAASLLQVDFMKDGSSDSDGSSAILNEDTMYLPSSMNCFQFQKPYHHAQYVKTEEHNFLSADEACNFFSDEQAPTLQWYCPEQWS

SEQ ID NO: 52982 - protein, 301 aa, Glycine max
  peptide (1)..(301): Ceres Seq. ID no. 14305028
MTIFPSSSTEEHSPRNSHHMYGREFRSMLDGLDEEGCVEEPGHQSEKKRRLSVEQVKALEKNFEVENKLEPERKVKLAQELGLQPRQVAVWFQNRRARWKTKQLERDYGVLKANYDALKLNFGTLNQDNEALRKQIKELKSRLLQEENTAGSGVSVKEEEITTMPADSEEKTMEQSKSDPPSETSNINPSSESSEEDHLNYECFNNNSDDCVVGGSAAASLLQVDFMKDGSSDSDGSSAILNEDTMYLPSSMNCFQFQKPYHHAQYVKTEEHNFLSADEACNFFSDEQAPTLQWYCPEQWS

SEQ ID NO: 52983 - protein, 282 aa, Glycine max
  peptide (1)..(282): Ceres Seq. ID no. 14305029
MYGREFRSMLDGLDEEGCVEEPGHQSEKKRRLSVEQVKALEKNFEVENKLEPERKVKLAQELGLQPRQVAVWFQNRRARWKTKQLERDYGVLKANYDALKLNFGTLNQDNEALRKQIKELKSRLLQEENTAGSGVSVKEEEITTMPADSEEKTMEQSKSDPPSETSNINPSSESSEEDHLNYECFNNNSDDCVVGGSAAASLLQVDFMKDGSSDSDGSSAILNEDTMYLPSSMNCFQFQKPYHHAQYVKTEEHNFLSADEACNFFSDEQAPTLQWYCPEQWS

SEQ ID NO: 52984 - DNA, 1332 bp, Glycine max
  misc_feature (1)..(1332): Ceres Seq. ID no. 14306769
acttttcagcggcgaaaatgggaaaacgagagaagcagaagcagaggcatgagaggggtcaccgtggaagagggtctttcaactatcttcaagaagaccatgattttgatgacactccaagatcctcaccctctgaagaagaaggtgctgatggcagcaatgaggaaaaagaagaagatgaagaaaatgtaacaataagtcatgaaaaccaatctcatgatatgccttccaagttcctcctttaccaacaatctgtgcagtctccaaaaggagacataagttatatgcaaaagttctttctcatgtacgtgggtggaaggatgcccctccatcttcaagaagatttctgtggcacggcgcttcttagtacagaatggctccgcagtgattcaagaagaacagtagtaggattagatttggatcttgaggcactcaattggtgcatggaaaacaacatacctaaagttggggctgatggattttcaagaatttccctctttcatgggaatgttttacaacctcttcagtctaaacttgtaaaagtagatcctcaggagctggtaagcaatatttcattgtcacagaatgaagaaaatcttcagactggtgtgccagaatctgatgctccaacaggctctattgctcaagacgataagtatactaagggaaacataacactgcctggaagagatattgtgtgtgcttttaactacagctgctgctgtctacataaacgagcagaactggttatgtatttcaaacatgctcgtggggccttgtcaactaaaggtggaatttttgtgatggatttatatgggggtacgtcgtcagagcacaagttgaggcttcagagaagatttcctaattttacgtatgtatgggagcaagctgaatttgatattattcaacggaagacaaggattagcctccattttcatatgaagaaggaacaaagaaaacttcgccatgcattttcatacagctggcggttgtggacattacctgaaattagggattgcctagaagaggctggatttcggtctgttcacttttgggttcgagagatgccagacaccacagaaattatgaaaacagagggatttggtgcaggaaagaatgtaaaatacgaagaggcaacaagttttcagcaacaagattcttggaatgcttacatagttggtgttgcatagcttcatcttagaaagtgtagtttctgttacattaactttgtcacaagactcacaactagacaagcataacttgtaatcagttccattgcttggaacttccctttcttttatatgaaaattgaattggatttggcttgagatt

SEQ ID NO: 52985 - protein, 395 aa, Glycine max
  peptide (1)..(395): Ceres Seq. ID no. 14306770
FSAAKMGKREKQKQRHERGHRGRGSFNYLQEDHDFDDTPRSSPSEEEGADGSNEEKEEDEENVTISHENQSHDMPSKFLLYQQSVQSPKGDISYMQKFFLMYVGGRMPLHLQEDFCGTALLSTEWLRSDSRRTVVGLDLDLEALNWCMENNIPKVGADGFSRISLFHGNVLQPLQSKLVKVDPQELVSNISLSQNEENLQTGVPESDAPTGSIAQDDKYTKGNITLPGRDIVCAFNYSCCCLHKRAELVMYFKHARGALSTKGGIFVMDLYGGTSSEHKLRLQRRFPNFTYVWEQAEFDIIQRKTRISLHFHMKKEQRKLRHAFSYSWRLWTLPEIRDCLEEAGFRSVHFWVREMPDTTEIMKTEGFGAGKNVKYEEATSFQQQDSWNAYIVGVA

SEQ ID NO: 52986 - protein, 390 aa, Glycine max
  peptide (1)..(390): Ceres Seq. ID no. 14306771
MGKREKQKQRHERGHRGRGSFNYLQEDHDFDDTPRSSPSEEEGADGSNEEKEEDEENVTISHENQSHDMPSKFLLYQQSVQSPKGDISYMQKFFLMYVGGRMPLHLQEDFCGTALLSTEWLRSDSRRTVVGLDLDLEALNWCMENNIPKVGADGFSRISLFHGNVLQPLQSKLVKVDPQELVSNISLSQNEENLQTGVPESDAPTGSIAQDDKYTKGNITLPGRDIVCAFNYSCCCLHKRAELVMYFKHARGALSTKGGIFVMDLYGGTSSEHKLRLQRRFPNFTYVWEQAEFDIIQRKTRISLHFHMKKEQRKLRHAFSYSWRLWTLPEIRDCLEEAGFRSVHFWVREMPDTTEIMKTEGFGAGKNVKYEEATSFQQQDSWNAYIVGVA

SEQ ID NO: 52987 - protein, 322 aa, Glycine max
  peptide (1)..(322): Ceres Seq. ID no. 14306772
MPSKFLLYQQSVQSPKGDISYMQKFFLMYVGGRMPLHLQEDFCGTALLSTEWLRSDSRRTVVGLDLDLEALNWCMENNIPKVGADGFSRISLFHGNVLQPLQSKLVKVDPQELVSNISLSQNEENLQTGVPESDAPTGSIAQDDKYTKGNITLPGRDIVCAFNYSCCCLHKRAELVMYFKHARGALSTKGGIFVMDLYGGTSSEHKLRLQRRFPNFTYVWEQAEFDIIQRKTRISLHFHMKKEQRKLRHAFSYSWRLWTLPEIRDCLEEAGFRSVHFWVREMPDTTEIMKTEGFGAGKNVKYEEATSFQQQDSWNAYIVGVA

SEQ ID NO: 52988 - DNA, 1896 bp, Glycine max
  misc_feature (1)..(1896): Ceres Seq. ID no. 15176403
agcttttctgcgatcaatggagttcgacccgatcccaatcggttcgtgctccaaagaacaccagatgatctataaggagtggttcaattacgctgattcagatagcgatggccgcattacggggagtgatgccaccaagtttttcgccatgtccaatttgccccgcgaagatcttaagcaggtgtgggctattgcagattcaaagcgacaaggatatcttggtttcactgaatttatcattgctatgcagctagtttctttggctcaatctgggcactcaataacacccgatctgctgactagtgatgttgattttacaaatggaaaacctccctcaatggagggtttggacgtattactagttaagaaaaagcataaacaaaaagaggttgatgcaaatggtagttctcaattgcagccatcaccatcaagtaattggttttcttcaaagtcaacaaaaaaggtgcctctttcctctgtgacatcaataattgacggcttgaagagactctacattcagaagttgaagccattagaagttacttaccgttttaatgattttgtatccccattactgacaaatagtgactttgatgccaaaccaatggttatgcttttgggtcagtactcaactggtaaaacaacatttatcaaacatctgcttaaaagtagttatccaggagcacatattggacctgagccaacaactgataggtttgttgttgtcatgtctggatctgatgagagaagcgttcctggaaatactgttgctgtccaagcagacatgccatttagtggtcttacaacttttggcacagcatttttgtcaaaatttgtgtgttcacagatgcctcatcctctactggaacacatcacatttgttgacactccgggagttctatctggagaaaagcaacgcacacaacgagcatatgattttacgggtgtaacatcttggtttgctgctaagtgtgatttgattctccttctgtttgatcctcacaaacttgacatcagtgatgagttcaatcgtgtgatatcatccttacgggggcatgatgacaaaatccgagtggttttgaacaaggcagaccaagttgatacccaacaattgatgagggtttatggagccttaatgtggtcacttgggaaggtgctgaagacacctgaagtaatgcgagtgtatattggctccttcaatgacaagcctgtaaatgatgctgccactggtccacttgggaaggaactctttgaaaaggaacaggatgatctactctcggatctgaaagatgtaccaaaagcagcttgtgatcgaagaatcaatgagtttgtaaaacgggcccgagcagccaagatacatgcttacattatcagccatcttaaaaaggagatgcctgctatgataggcaaagctaaagctcaacaaaagctcatcgataatttggcagctgaatttggaaaggtacaaagggagttccatttacctcctggcgattttccaaatgtagagtttttcagagagagattgagtggttacaatattgataagtttgaaaaattgaaaccaaaaatgacacaagcagttgatgacatgttagcttacgacattcctaatctcttgaagaattttaggaatccctatgattaaatttctgagcaattgagtcggtgctataattagattagttagagtgacatttgtagcgtacaaattttacgggatctttatgcaatgtatgtgtgtcatgagatctttatgtgccatccggtggcctttcttttctagtaggaagttttattatttaatatatgtttttgtatttatgtatattttgttatctacaatcaagtgtcaagacagaaaataaagggaaaacacaattacttgtttgcatc

SEQ ID NO: 52989 - protein, 548 aa, Glycine max
  peptide (1)..(548): Ceres Seq. ID no. 15176404
AFLRSMEFDPIPIGSCSKEHQMIYKEWFNYADSDSDGRITGSDATKFFAMSNLPREDLKQVWAIADSKRQGYLGFTEFIIAMQLVSLAQSGHSITPDLLTSDVDFTNGKPPSMEGLDVLLVKKKHKQKEVDANGSSQLQPSPSSNWFSSKSTKKVPLSSVTSIIDGLKRLYIQKLKPLEVTYRFNDFVSPLLTNSDFDAKPMVMLLGQYSTGKTTFIKHLLKSSYPGAHIGPEPTTDRFVVVMSGSDERSVPGNTVAVQADMPFSGLTTFGTAFLSKFVCSQMPHPLLEHITFVDTPGVLSGEKQRTQRAYDFTGVTSWFAAKCDLILLLFDPHKLDISDEFNRVISSLRGHDDKIRVVLNKADQVDTQQLMRVYGALMWSLGKVLKTPEVMRVYIGSFNDKPVNDAATGPLGKELFEKEQDDLLSDLKDVPKAACDRRINEFVKRARAAKIHAYIISHLKKEMPAMIGKAKAQQKLIDNLAAEFGKVQREFHLPPGDFPNVEFFRERLSGYNIDKFEKLKPKMTQAVDDMLAYDIPNLLKNFRNPYD

SEQ ID NO: 52990 - protein, 543 aa, Glycine max
  peptide (1)..(543): Ceres Seq. ID no. 15176405
MEFDPIPIGSCSKEHQMIYKEWFNYADSDSDGRITGSDATKFFAMSNLPREDLKQVWAIADSKRQGYLGFTEFIIAMQLVSLAQSGHSITPDLLTSDVDFTNGKPPSMEGLDVLLVKKKHKQKEVDANGSSQLQPSPSSNWFSSKSTKKVPLSSVTSIIDGLKRLYIQKLKPLEVTYRFNDFVSPLLTNSDFDAKPMVMLLGQYSTGKTTFIKHLLKSSYPGAHIGPEPTTDRFVVVMSGSDERSVPGNTVAVQADMPFSGLTTFGTAFLSKFVCSQMPHPLLEHITFVDTPGVLSGEKQRTQRAYDFTGVTSWFAAKCDLILLLFDPHKLDISDEFNRVISSLRGHDDKIRVVLNKADQVDTQQLMRVYGALMWSLGKVLKTPEVMRVYIGSFNDKPVNDAATGPLGKELFEKEQDDLLSDLKDVPKAACDRRINEFVKRARAAKIHAYIISHLKKEMPAMIGKAKAQQKLIDNLAAEFGKVQREFHLPPGDFPNVEFFRERLSGYNIDKFEKLKPKMTQAVDDMLAYDIPNLLKNFRNPYD

SEQ ID NO: 52991 - protein, 527 aa, Glycine max
  peptide (1)..(527): Ceres Seq. ID no. 15176406
MIYKEWFNYADSDSDGRITGSDATKFFAMSNLPREDLKQVWAIADSKRQGYLGFTEFIIAMQLVSLAQSGHSITPDLLTSDVDFTNGKPPSMEGLDVLLVKKKHKQKEVDANGSSQLQPSPSSNWFSSKSTKKVPLSSVTSIIDGLKRLYIQKLKPLEVTYRFNDFVSPLLTNSDFDAKPMVMLLGQYSTGKTTFIKHLLKSSYPGAHIGPEPTTDRFVVVMSGSDERSVPGNTVAVQADMPFSGLTTFGTAFLSKFVCSQMPHPLLEHITFVDTPGVLSGEKQRTQRAYDFTGVTSWFAAKCDLILLLFDPHKLDISDEFNRVISSLRGHDDKIRVVLNKADQVDTQQLMRVYGALMWSLGKVLKTPEVMRVYIGSFNDKPVNDAATGPLGKELFEKEQDDLLSDLKDVPKAACDRRINEFVKRARAAKIHAYIISHLKKEMPAMIGKAKAQQKLIDNLAAEFGKVQREFHLPPGDFPNVEFFRERLSGYNIDKFEKLKPKMTQAVDDMLAYDIPNLLKNFRNPYD

SEQ ID NO: 52992 - DNA, 1388 bp, Glycine max
  misc_feature (1)..(1388): Ceres Seq. ID no. 15226389
aactccaaagttttcaaactcataacaacaactccttctgttcacaaactcatcttcaattccttttctgatctacgcaaggttaaggttaattttatctatctacttggacatgaacgaaatcgatgttccttcgttctttctctgccccatttcgctagatatcatgaaggatccagtgacggtctcaacgggcatcacctacgaccgtgaaagcatcgaaacctggctgttctcgaagaaaaacacgacatgccccattaccaaactgcccttgatagattacaccgatctcacaccaaaccacacccttcgtagactcatccaagcgtggtgttccatgaacgcttctcacggcatcgaaaggatcccaacccctaaaccccccgttaacaagaaccaaatttcgaagcttctcaaagacgcttctcattcccctctcacatgcctcagaagactcaaatccatctcttccggaagcgaaacaaataagcggtgcatggaggcttctggcgctgttgagtttctagcatcaattgtaatcaacaccaaccgcaacattgattcttcacatgaggctgactcaaacgacggatctggattcgagttgaaaacaagtgcatgcgatgaagcgttgagtttgcttcataatcttcatttatccgaacaagggttgaagactctcttaagcttcagaaacggcgagtttattgagtctttaacaagagtcatgcaaaaggggttctttgaatcacgcgcttatgctgtgttcttgttgaaatctatttccgaagtggctgaaccagtgcaactattgcatctaatacaagaactttttgtcgaactggtacaagtcctgaaggatcaaatttcacagaagacatcaaaggcgacccttcaaaccctgatccaattctctccttgggggaggaacaggatcagagctgtggaagcagctgctgttcctgttttgattgagcttcttctcgattgcaaggagagaaagccttgtgagatgatgctggtgttgttggagctgctatgccagtgtgctgagggaagagcagaacttttgagccatgcagcaggtcttgccattgtgtccaaaaagattctaagggtttcgactttggcgaatgatagagctgttaagattattctgtctctttcgaggttctctgcgactccacatgttgttcaagaaatgctgaaactcggtgtggtcgcgaaattgtgcttggtgcttcaggtggatagtggaaacagggctaaggaaaaagctagagagatactcaaattgcatgctcgggcgtggaggaattctccatgcataccgaacaatttgcttaattcatacccgaattatgtgcaaaaaaaaaaaaaaaaaa

SEQ ID NO: 52993 - protein, 425 aa, Glycine max
  peptide (1)..(425): Ceres Seq. ID no. 15226390
MNEIDVPSFFLCPISLDIMKDPVTVSTGITYDRESIETWLFSKKNTTCPITKLPLIDYTDLTPNHTLRRLIQAWCSMNASHGIERIPTPKPPVNKNQISKLLKDASHSPLTCLRRLKSISSGSETNKRCMEASGAVEFLASIVINTNRNIDSSHEADSNDGSGFELKTSACDEALSLLHNLHLSEQGLKTLLSFRNGEFIESLTRVMQKGFFESRAYAVFLLKSISEVAEPVQLLHLIQELFVELVQVLKDQISQKTSKATLQTLIQFSPWGRNRIRAVEAAAVPVLIELLLDCKERKPCEMMLVLLELLCQCAEGRAELLSHAAGLAIVSKKILRVSTLANDRAVKIILSLSRFSATPHVVQEMLKLGVVAKLCLVLQVDSGNRAKEKAREILKLHARAWRNSPCIPNNLLNSYPNYVQKKKKK

SEQ ID NO: 52994 - protein, 407 aa, Glycine max
  peptide (1)..(407): Ceres Seq. ID no. 15226391
MKDPVTVSTGITYDRESIETWLFSKKNTTCPITKLPLIDYTDLTPNHTLRRLIQAWCSMNASHGIERIPTPKPPVNKNQISKLLKDASHSPLTCLRRLKSISSGSETNKRCMEASGAVEFLASIVINTNRNIDSSHEADSNDGSGFELKTSACDEALSLLHNLHLSEQGLKTLLSFRNGEFIESLTRVMQKGFFESRAYAVFLLKSISEVAEPVQLLHLIQELFVELVQVLKDQISQKTSKATLQTLIQFSPWGRNRIRAVEAAAVPVLIELLLDCKERKPCEMMLVLLELLCQCAEGRAELLSHAAGLAIVSKKILRVSTLANDRAVKIILSLSRFSATPHVVQEMLKLGVVAKLCLVLQVDSGNRAKEKAREILKLHARAWRNSPCIPNNLLNSYPNYVQKKKKK

SEQ ID NO: 52995 - protein, 349 aa, Glycine max
  peptide (1)..(349): Ceres Seq. ID no. 15226392
MNASHGIERIPTPKPPVNKNQISKLLKDASHSPLTCLRRLKSISSGSETNKRCMEASGAVEFLASIVINTNRNIDSSHEADSNDGSGFELKTSACDEALSLLHNLHLSEQGLKTLLSFRNGEFIESLTRVMQKGFFESRAYAVFLLKSISEVAEPVQLLHLIQELFVELVQVLKDQISQKTSKATLQTLIQFSPWGRNRIRAVEAAAVPVLIELLLDCKERKPCEMMLVLLELLCQCAEGRAELLSHAAGLAIVSKKILRVSTLANDRAVKIILSLSRFSATPHVVQEMLKLGVVAKLCLVLQVDSGNRAKEKAREILKLHARAWRNSPCIPNNLLNSYPNYVQKKKKK

SEQ ID NO: 52996 - DNA, 1351 bp, Glycine max
  misc_feature (1)..(1351): Ceres Seq. ID no. 14304925
gtgaaggctttcacttgtgagcttagaaaactgaagatgggtttcacaggggagttggtaagaagtgtcttctccaaaaatcgttctgatgggtctcatgaaaacaaagtgaggcgcaatagtgctaaaaatagaagaatgttatctgtgaggtcattcttgtgtggtgatgaattcaattcagtccttgcagagaatgattcagcttcagttaagagctctgaagtcacggtttcacagtccgtacatgagggcttgttaaacgatgaaggagacactgaaagtgaagaaactgtggagaatgtagcacagaacaggccaagttcaaactccaaaaagtcattgaatgaggaagaagcagctgttcttattcaatcagcatttagaggcttcctgttgaggcgtcaaaatggagaaatcaaatcacaaactggaaaagatgagttcaatttagtaacagaaagtccagacaaaaagtccataggcacatcaattgatgtccaaacctcaaactctacggaagttttctctgtcgaaggagaaataaagggcatttgccaccgtattcagcgcaggaccagaactcaagcaataaagcaaaaggaagattgggatgacagcacagtaagtagctatgtttcaaaaatgaggatgcagaatagaatggaggcttcaaccaggagggaaagagcactggcttatgctttctcacaacagctaagaatctgttcaaagaggaaatctccaaaatttaacagcatggagtcaaatatgagttggagttggcttgagcggtggatggcaacgcgccttccggagacatcatcagttgaaagccatgccatgaagcagtatgacccttctaatggtagtcacaaattcacaatcatgacaagattttttgatgctgctggggaagaaaaggagagctgcgggtcaaatgaagtgccccttcattttgataactattccatcaattcacgagaagaaaaagttagcttcaaaccacatacaccaaagaccaacttcaaagctaggagaactgtttcaaggcggaaaacagtgcctagttatcaattccatgaagagcagccaaaggtaagcaaaagagatggttcaggcgatgctagcaaggatattaagcaaaaacaaaagcaagtgggaagcaggacagaaattgcattaagcacctcgaaagcttctaatgtgtaacttgtaaaaaataaagtcaaagtatgtgtctagtattgagatgtaatggttggattctctagtagattcttgattccataaatcttatgtgtacattgtacataatatcaagtacaagattgagatggttgttctgatg

SEQ ID NO: 52997 - protein, 403 aa, Glycine max
  peptide (1)..(403): Ceres Seq. ID no. 14304926
VKAFTCELRKLKMGFTGELVRSVFSKNRSDGSHENKVRRNSAKNRRMLSVRSFLCGDEFNSVLAENDSASVKSSEVTVSQSVHEGLLNDEGDTESEETVENVAQNRPSSNSKKSLNEEEAAVLIQSAFRGFLLRRQNGEIKSQTGKDEFNLVTESPDKKSIGTSIDVQTSNSTEVFSVEGEIKGICHRIQRRTRTQAIKQKEDWDDSTVSSYVSKMRMQNRMEASTRRERALAYAFSQQLRICSKRKSPKFNSMESNMSWSWLERWMATRLPETSSVESHAMKQYDPSNGSHKFTIMTRFFDAAGEEKESCGSNEVPLHFDNYSINSREEKVSFKPHTPKTNFKARRTVSRRKTVPSYQFHEEQPKVSKRDGSGDASKDIKQKQKQVGSRTEIALSTSKASNV

SEQ ID NO: 52998 - protein, 391 aa, Glycine max
  peptide (1)..(391): Ceres Seq. ID no. 14304927
MGFTGELVRSVFSKNRSDGSHENKVRRNSAKNRRMLSVRSFLCGDEFNSVLAENDSASVKSSEVTVSQSVHEGLLNDEGDTESEETVENVAQNRPSSNSKKSLNEEEAAVLIQSAFRGFLLRRQNGEIKSQTGKDEFNLVTESPDKKSIGTSIDVQTSNSTEVFSVEGEIKGICHRIQRRTRTQAIKQKEDWDDSTVSSYVSKMRMQNRMEASTRRERALAYAFSQQLRICSKRKSPKFNSMESNMSWSWLERWMATRLPETSSVESHAMKQYDPSNGSHKFTIMTRFFDAAGEEKESCGSNEVPLHFDNYSINSREEKVSFKPHTPKTNFKARRTVSRRKTVPSYQFHEEQPKVSKRDGSGDASKDIKQKQKQVGSRTEIALSTSKASNV

SEQ ID NO: 52999 - protein, 357 aa, Glycine max
  peptide (1)..(357): Ceres Seq. ID no. 14304928
MLSVRSFLCGDEFNSVLAENDSASVKSSEVTVSQSVHEGLLNDEGDTESEETVENVAQNRPSSNSKKSLNEEEAAVLIQSAFRGFLLRRQNGEIKSQTGKDEFNLVTESPDKKSIGTSIDVQTSNSTEVFSVEGEIKGICHRIQRRTRTQAIKQKEDWDDSTVSSYVSKMRMQNRMEASTRRERALAYAFSQQLRICSKRKSPKFNSMESNMSWSWLERWMATRLPETSSVESHAMKQYDPSNGSHKFTIMTRFFDAAGEEKESCGSNEVPLHFDNYSINSREEKVSFKPHTPKTNFKARRTVSRRKTVPSYQFHEEQPKVSKRDGSGDASKDIKQKQKQVGSRTEIALSTSKASNV

SEQ ID NO: 53000 - DNA, 1715 bp, Glycine max
  misc_feature (1)..(1715): Ceres Seq. ID no. 14306565
acactagtactcactgttgttcattgtgaaatcatcatcatcatgggttgctcagcctcaagaaccatcaccatagtggccaacaacaataaccaattagaggatccatcttctgcttctcttgcttcttctttctcttcctcttctgcctcacacaaatccattaactctacttcttcaccagcagcagcaccagttagaagaagagctctttctctcccaatgcctcttgttcatcaccctcccataaaaaagggtgacacacaccaccttgtctccctcacctccaccacctatggctcccttctcctcattgaccaaaaagacccaaacttgacccaaaaaaaccaaccccgcctcaccaaaacctcaaaccaaactgacccagcacactcactctccccagactcagtcatcaacacttgggaactcatggatggcttagatgaagaagaagaagaagaagaagaagaaattgccaatgccaagaagaagcctccttacacttccattttggacaaaccaagttcatgcaggtacacagcatttgatggttctgcaaggaagaaactgcttgattcctttgaatcactgaaaacttcacagacagcaatggaaaaggaaaactcttcttcttctccagcaccaaccaagaagccactttggcagcacttatccgaggaagctttgcttgctaagttggatccgagtgtggcttggagttacagaagagcattatcatcaaggaatctaggtagaaacaccttatctagagatgtaaggtcaatggggtctagccctttgatatttcattcttcttctttttcatttggtaagaacaatagtttgtgccgtttgtctggcactgaggacagaatagtgctttattgcactagtttgagagggatccgaaagacctatgaggattgttgttcggttaggatgattctgaggggcttcatggttgcggttgatgagagggacatctcaatggactcgtcctataggaaggagttgaaggatgctcttggtggaaaagcagtgacattgccacaggtctttatcagagggaggtatgtggggaatgctgagcaaatgaagcatctgaatgagtctggagaattggcaaggcttttggagggtttccccactcaggatcctgggtttgtgtgtgacaactgtggtgatgccaggtttgtgccatgccccaattgcaatggtagcaggaaggtgtttgagcatgaggaaggagggttgagaaggtgccctgattgcaatgagaatggcttgataagatgtccaggttgctgcccatgattggtggaaattagtcatctgaatcaggtataccccgattcgtgaagagtaatttctagaactactgatatccatttaagagataagtatctcttaaggtatatttttcagtgcccagaaagcctatggatcgaattcctgaccacaagcttaaaaaatgattaattatctgtcaatcatatcacatcatattgataatgatgttcttgtgtttgtttattggagtagaatttgtcattataaattttgacaactaccaagaatgcacatttcagtttcgtcctttgtttttagttagtactactttcagctgttatttgtttatgtcagacttttgctttattagcgtttaattacccttgtgaacagcagaaaataaaaaactgacaaggttatgt

SEQ ID NO: 53001 - protein, 438 aa, Glycine max
  peptide (1)..(438): Ceres Seq. ID no. 14306566
TLVLTVVHCEIIIIMGCSASRTITIVANNNNQLEDPSSASLASSFSSSSASHKSINSTSSPAAAPVRRRALSLPMPLVHHPPIKKGDTHHLVSLTSTTYGSLLLIDQKDPNLTQKNQPRLTKTSNQTDPAHSLSPDSVINTWELMDGLDEEEEEEEEEIANAKKKPPYTSILDKPSSCRYTAFDGSARKKLLDSFESLKTSQTAMEKENSSSSPAPTKKPLWQHLSEEALLAKLDPSVAWSYRRALSSRNLGRNTLSRDVRSMGSSPLIFHSSSFSFGKNNSLCRLSGTEDRIVLYCTSLRGIRKTYEDCCSVRMILRGFMVAVDERDISMDSSYRKELKDALGGKAVTLPQVFIRGRYVGNAEQMKHLNESGELARLLEGFPTQDPGFVCDNCGDARFVPCPNCNGSRKVFEHEEGGLRRCPDCNENGLIRCPGCCP

SEQ ID NO: 53002 - protein, 424 aa, Glycine max
  peptide (1)..(424): Ceres Seq. ID no. 14306567
MGCSASRTITIVANNNNQLEDPSSASLASSFSSSSASHKSINSTSSPAAAPVRRRALSLPMPLVHHPPIKKGDTHHLVSLTSTTYGSLLLIDQKDPNLTQKNQPRLTKTSNQTDPAHSLSPDSVINTWELMDGLDEEEEEEEEEIANAKKKPPYTSILDKPSSCRYTAFDGSARKKLLDSFESLKTSQTAMEKENSSSSPAPTKKPLWQHLSEEALLAKLDPSVAWSYRRALSSRNLGRNTLSRDVRSMGSSPLIFHSSSFSFGKNNSLCRLSGTEDRIVLYCTSLRGIRKTYEDCCSVRMILRGFMVAVDERDISMDSSYRKELKDALGGKAVTLPQVFIRGRYVGNAEQMKHLNESGELARLLEGFPTQDPGFVCDNCGDARFVPCPNCNGSRKVFEHEEGGLRRCPDCNENGLIRCPGCCP

SEQ ID NO: 53003 - protein, 364 aa, Glycine max
  peptide (1)..(364): Ceres Seq. ID no. 14306568
MPLVHHPPIKKGDTHHLVSLTSTTYGSLLLIDQKDPNLTQKNQPRLTKTSNQTDPAHSLSPDSVINTWELMDGLDEEEEEEEEEIANAKKKPPYTSILDKPSSCRYTAFDGSARKKLLDSFESLKTSQTAMEKENSSSSPAPTKKPLWQHLSEEALLAKLDPSVAWSYRRALSSRNLGRNTLSRDVRSMGSSPLIFHSSSFSFGKNNSLCRLSGTEDRIVLYCTSLRGIRKTYEDCCSVRMILRGFMVAVDERDISMDSSYRKELKDALGGKAVTLPQVFIRGRYVGNAEQMKHLNESGELARLLEGFPTQDPGFVCDNCGDARFVPCPNCNGSRKVFEHEEGGLRRCPDCNENGLIRCPGCCP

SEQ ID NO: 53004 - DNA, 1305 bp, Glycine max
  misc_feature (1)..(1305): Ceres Seq. ID no. 14304693
aaaccaatgaacacggtgtcaagccacctgaaaccctagttcaaaaatttgcatatcctacagtaacaacctcaatagacccaacaatcccagtcccagctcccccaatagatcaaggtcagaagatgaggaagaaaatgagaaagagaagtgcccttataagcaaaggagcagaacctgatgaacatgatgacaagccacctggaaccccagttcaaagatctatacatcctatagcagaaccctcaatagacccaacaattccagcaagccaaactcctccagtagacccagcaaccccagtagaccctgaaccgatgaccaagaaaaagaggaagaagaaaaggaacagtgcaaaaaatgaagggttagaatctgagaaacacaatgctgatcgaattgcaraaaccccagttcaaaaaactgaaggatccacaactgaaaattctatgggcagatgcaatgttgagccagctggtaaaaccctggttcagattactgacactctcagagtgactaaatccccctttaaacatcatggtgaaagttccttgagatgccgggcatgccgacagcctggtcatagattccaacaatgccagcggctgaaatgtctttccatggatgaggaagtttgcttcttttgtggggaaattggacattcccttggaaaatgcgatgtgtctcaagcagggggaggaaggtttgctaagtgcttactctgttatggacatggacacttcagctataactgtcctcaaaatggtcatggaattgatccaaaggtgcttgcagtcaatggggctatcaatagaacagcagtggaagctcgaagagagctcttgccgaggtttaatatgtgagcagggatggtctttcggatcactccaagtcaatttacacaagtactcgtgctcatgtatatagttctggatctcggttccttagcggcctaagttttgatgattttatatcatgtctggtagcatggtgcccaatttttttttttttttatttcaagttctcttatgtaacataaacggtaatattatttcagaccttgttgggtttttgaatccattttgtatttcttttctacgtggggactagttgggataatgcctcagtctactccttgcagaagttagaattaagatagtggagtagtaagttcaacacgggaattggcccccaaatttctgaattcagttgatgataatagttgagacaatttggtcgcagtccctcggaatatagaatggattgcctgagtaatgatgtatgaactttatttacgattttttt

SEQ ID NO: 53005 - protein, 286 aa, Glycine max
  peptide (1)..(286): Ceres Seq. ID no. 14304694
  misc_feature (135)..(135): Xaa is any aa, unknown or other
TNEHGVKPPETLVQKFAYPTVTTSIDPTIPVPAPPIDQGQKMRKKMRKRSALISKGAEPDEHDDKPPGTPVQRSIHPIAEPSIDPTIPASQTPPVDPATPVDPEPMTKKKRKKKRNSAKNEGLESEKHNADRIAXTPVQKTEGSTTENSMGRCNVEPAGKTLVQITDTLRVTKSPFKHHGESSLRCRACRQPGHRFQQCQRLKCLSMDEEVCFFCGEIGHSLGKCDVSQAGGGRFAKCLLCYGHGHFSYNCPQNGHGIDPKVLAVNGAINRTAVEARRELLPRFNM

SEQ ID NO: 53006 - protein, 245 aa, Glycine max
  peptide (1)..(245): Ceres Seq. ID no. 14304695
  misc_feature (94)..(94): Xaa is any aa, unknown or other
MRKKMRKRSALISKGAEPDEHDDKPPGTPVQRSIHPIAEPSIDPTIPASQTPPVDPATPVDPEPMTKKKRKKKRNSAKNEGLESEKHNADRIAXTPVQKTEGSTTENSMGRCNVEPAGKTLVQITDTLRVTKSPFKHHGESSLRCRACRQPGHRFQQCQRLKCLSMDEEVCFFCGEIGHSLGKCDVSQAGGGRFAKCLLCYGHGHFSYNCPQNGHGIDPKVLAVNGAINRTAVEARRELLPRFNM

SEQ ID NO: 53007 - protein, 241 aa, Glycine max
  peptide (1)..(241): Ceres Seq. ID no. 14304696
  misc_feature (90)..(90): Xaa is any aa, unknown or other
MRKRSALISKGAEPDEHDDKPPGTPVQRSIHPIAEPSIDPTIPASQTPPVDPATPVDPEPMTKKKRKKKRNSAKNEGLESEKHNADRIAXTPVQKTEGSTTENSMGRCNVEPAGKTLVQITDTLRVTKSPFKHHGESSLRCRACRQPGHRFQQCQRLKCLSMDEEVCFFCGEIGHSLGKCDVSQAGGGRFAKCLLCYGHGHFSYNCPQNGHGIDPKVLAVNGAINRTAVEARRELLPRFNM

SEQ ID NO: 53008 - DNA, 1574 bp, Glycine max
  misc_feature (1)..(1574): Ceres Seq. ID no. 14306569
actctctccatcaaataccaatcaatcaaaaagccagcgagaaaatgaaaattcgtggtggaataatcatagactgaagagaaaagttgtcgttgtgcagtgcactgtcatggaagaggatgaagagacgcagcaacgagtcactgactcgtccctctccaccgagtcacgcacttccactccttctgatggagcgccacccaactcggaaaccctagttcaccgctcctcgcttccgcatgaccttgccactcatatgcagggcagctctaccgcacataaaggtggaaaagctgagagtaaggtgtcagctcagcctcctgatgaggaaactattgaaaaagatgcagttgaggcacctcaaaaacagacagaaaatcaacttcagtctgtttgttcaacttcattatctgaactatcaccaacttctgtttcacattctttatcatctgcccttagtcccactgtatcacaacagagaccatctcctcccaaggctaatagtgtacaagtgtcgaaaggagacaaaggaacaccttctgatggtacaaccttatcttctgtttctgctgtaagggcatctgcatctgatggatacaactggcggaagtacggccagaagcaagtgaagaatcctatgggttctcgaagctattacaagtgtacccattcaaattgttgtgctaagaagattaaattttgtgaccattcaggacatgtgatagagattgtttataaaagtcaacataatcatgatcctccgcataaaattgataccaccaaggaaagtaagctcctgccttccagtgaacctaaagaagaaagcagtgttccaaagcagtctaccaaagttctgaataattctgatccatcatcttctccgaaagaacctttgcaagaagcaccctgcaatggtgataagaatctagaaaactcatctaatgttgagaatggtaaaattattttgaaggaaaagcatgtcaatgaccgagagccaaaaagaagattgaacaatggtgatttggattcagcagtaaaacatggcaagaaaccaaagtttgttgtacatgcgacagaggatgtggggatatcaggtgatggataccggtggcgcaagtagggacaaaagttggtgaagggaaatccacatttcagaaactactacagatgcacttcttctggatgtcctgtccgaaagcacattgagactgctgtggataattcaaaagctctcatcataacatacaagggagtgcatgatcatgacatgcctgtacccaagaaacgacatggcccgcctagtgcttcacttgtggctgcggcagcacctgcttcaatgaacaatgtgcagttcaaaaaaactggcttgctgcaaagccaggaaactgaagctcaatgttcagaggacacagaaggagaattgatgggggaagcgatggaccttgagggtgagaaagcaattgagtcggctcgaactcttttgagcataggttttgaaattaaaccttgttgaatacatcttttcataaactcatgcagttgcatctatataaattaattggtaggcctcatgt

SEQ ID NO: 53009 - protein, 372 aa, Glycine max
  peptide (1)..(372): Ceres Seq. ID no. 14306570
LSPSNTNQSKSQRENENSWWNNHRLKRKVVVVQCTVMEEDEETQQRVTDSSLSTESRTSTPSDGAPPNSETLVHRSSLPHDLATHMQGSSTAHKGGKAESKVSAQPPDEETIEKDAVEAPQKQTENQLQSVCSTSLSELSPTSVSHSLSSALSPTVSQQRPSPPKANSVQVSKGDKGTPSDGTTLSSVSAVRASASDGYNWRKYGQKQVKNPMGSRSYYKCTHSNCCAKKIKFCDHSGHVIEIVYKSQHNHDPPHKIDTTKESKLLPSSEPKEESSVPKQSTKVLNNSDPSSSPKEPLQEAPCNGDKNLENSSNVENGKIILKEKHVNDREPKRRLNNGDLDSAVKHGKKPKFVVHATEDVGISGDGYRWRK

SEQ ID NO: 53010 - protein, 336 aa, Glycine max
  peptide (1)..(336): Ceres Seq. ID no. 14306571
MEEDEETQQRVTDSSLSTESRTSTPSDGAPPNSETLVHRSSLPHDLATHMQGSSTAHKGGKAESKVSAQPPDEETIEKDAVEAPQKQTENQLQSVCSTSLSELSPTSVSHSLSSALSPTVSQQRPSPPKANSVQVSKGDKGTPSDGTTLSSVSAVRASASDGYNWRKYGQKQVKNPMGSRSYYKCTHSNCCAKKIKFCDHSGHVIEIVYKSQHNHDPPHKIDTTKESKLLPSSEPKEESSVPKQSTKVLNNSDPSSSPKEPLQEAPCNGDKNLENSSNVENGKIILKEKHVNDREPKRRLNNGDLDSAVKHGKKPKFVVHATEDVGISGDGYRWRK

SEQ ID NO: 53011 - protein, 287 aa, Glycine max
  peptide (1)..(287): Ceres Seq. ID no. 14306572
MQGSSTAHKGGKAESKVSAQPPDEETIEKDAVEAPQKQTENQLQSVCSTSLSELSPTSVSHSLSSALSPTVSQQRPSPPKANSVQVSKGDKGTPSDGTTLSSVSAVRASASDGYNWRKYGQKQVKNPMGSRSYYKCTHSNCCAKKIKFCDHSGHVIEIVYKSQHNHDPPHKIDTTKESKLLPSSEPKEESSVPKQSTKVLNNSDPSSSPKEPLQEAPCNGDKNLENSSNVENGKIILKEKHVNDREPKRRLNNGDLDSAVKHGKKPKFVVHATEDVGISGDGYRWRK

SEQ ID NO: 53012 - DNA, 1608 bp, Glycine max
  misc_feature (1)..(1608): Ceres Seq. ID no. 13532807
atttttttcatatacaacaaacacggattcattgcatcaccgtcaccaccactttcatcatcataaaacatttttcatataaataaaatatattcattcattcacacatcgtaataatcattatctatcattctctctctttcaattttagacagaagactaaaagagtgaagagaacaaacagagcaatggaaggaggaggagctgctccgccggccgacaccgtgatgtccgacgcggcgcctccgccgcagcaagcgatggctatggggatcgagaatattccggcgacgctgagccacggtggcaggttcatccaatacaacatattcggaaacatattcgaagtcaccgccaaatacaagccacccatcatgcccatcggaaaaggcgcatacggcatcgtttgctcggctttgaactcggagacgaatgagcacgttgccatcaagaagattgcgaatgcgtttgataacaagattgatgcaaagaggaccctccgtgaaatcaagctgcttcgtcacatggatcatgaaaacgtggttgcaatcagggatatagtgccaccacctcaaagggagatattcaatgatgtttacattgcatatgagttgatggacactgaccttcaccaaattattcgttcaaaccaaggattatcagaggagcactgtcagtattttctgtatcaaatcctccgtgggttgaagtacatacattctgccaatgttctgcatagggacttaaaacctagcaaccttctcctgaatgccaactgtgacttaaaaatttgtgattttggactggctcgtgtcacgtctgaaactgattttatgactgaatatgttgttacaagatggtaccgtgcaccagagcttctgttgaactcttctgattacactgcagcaattgatgtatggtctgttggttgtattttcatggaactgatggatcgcaagcctttgtttcctggcagagatcatgtgcatcagttgcgtctacttatggagctgattggcaccccatcagaggctgatttggggttcctgaatgaaaatgctaagagatacattaggcaactacccctttaccgccgtcaatctttccaggaaaagtttccacatgtccatcctgaagctatagatcttgttgaaaaaatgttaacttttgatcctagaaaaaggattactgttgaagatgcactggcgcacccgtacttgacatctctgcatgacatcagtgatgaaccagtgtgcatgactcccttcaactttgactttgaacaacatgctttgacggaggaacagatgaaagaactgatataccgagaggctctagcatttaaccctgagtatcagcagtagtagtgatagtcttgttgtcattggatttggatcgtgtgatgtttgtgtccatagatcaagggatttcattgtgtatatatatctatcatctgaaaccagatgatcttggagttgaattatttccatcagagacatgattggtagactggaacaatcgtaaggtatttgtattggcttatttgcttcatattattattgtccaattcattggctccagccaactgataaatcttttcttggtctc

SEQ ID NO: 53013 - protein, 391 aa, Glycine max
  peptide (1)..(391): Ceres Seq. ID no. 13532808
MEGGGAAPPADTVMSDAAPPPQQAMAMGIENIPATLSHGGRFIQYNIFGNIFEVTAKYKPPIMPIGKGAYGIVCSALNSETNEHVAIKKIANAFDNKIDAKRTLREIKLLRHMDHENVVAIRDIVPPPQREIFNDVYIAYELMDTDLHQIIRSNQGLSEEHCQYFLYQILRGLKYIHSANVLHRDLKPSNLLLNANCDLKICDFGLARVTSETDFMTEYVVTRWYRAPELLLNSSDYTAAIDVWSVGCIFMELMDRKPLFPGRDHVHQLRLLMELIGTPSEADLGFLNENAKRYIRQLPLYRRQSFQEKFPHVHPEAIDLVEKMLTFDPRKRITVEDALAHPYLTSLHDISDEPVCMTPFNFDFEQHALTEEQMKELIYREALAFNPEYQQ

SEQ ID NO: 53014 - protein, 378 aa, Glycine max
  peptide (1)..(378): Ceres Seq. ID no. 13532809
MSDAAPPPQQAMAMGIENIPATLSHGGRFIQYNIFGNIFEVTAKYKPPIMPIGKGAYGIVCSALNSETNEHVAIKKIANAFDNKIDAKRTLREIKLLRHMDHENVVAIRDIVPPPQREIFNDVYIAYELMDTDLHQIIRSNQGLSEEHCQYFLYQILRGLKYIHSANVLHRDLKPSNLLLNANCDLKICDFGLARVTSETDFMTEYVVTRWYRAPELLLNSSDYTAAIDVWSVGCIFMELMDRKPLFPGRDHVHQLRLLMELIGTPSEADLGFLNENAKRYIRQLPLYRRQSFQEKFPHVHPEAIDLVEKMLTFDPRKRITVEDALAHPYLTSLHDISDEPVCMTPFNFDFEQHALTEEQMKELIYREALAFNPEYQQ

SEQ ID NO: 53015 - protein, 367 aa, Glycine max
  peptide (1)..(367): Ceres Seq. ID no. 13532810
MAMGIENIPATLSHGGRFIQYNIFGNIFEVTAKYKPPIMPIGKGAYGIVCSALNSETNEHVAIKKIANAFDNKIDAKRTLREIKLLRHMDHENVVAIRDIVPPPQREIFNDVYIAYELMDTDLHQIIRSNQGLSEEHCQYFLYQILRGLKYIHSANVLHRDLKPSNLLLNANCDLKICDFGLARVTSETDFMTEYVVTRWYRAPELLLNSSDYTAAIDVWSVGCIFMELMDRKPLFPGRDHVHQLRLLMELIGTPSEADLGFLNENAKRYIRQLPLYRRQSFQEKFPHVHPEAIDLVEKMLTFDPRKRITVEDALAHPYLTSLHDISDEPVCMTPFNFDFEQHALTEEQMKELIYREALAFNPEYQQ

SEQ ID NO: 53016 - DNA, 998 bp, Glycine max
  misc_feature (1)..(998): Ceres Seq. ID no. 12606804
aggaaagagaatggaatttcctcactgctcccttcaaacagattacagctgttgcatcagtatgtgcggatccttgctgaactttcacaagaaaagtataatacaggattgtatctagagtcgcttgcagttgagttggtggttttagctatatggaaaaagactctagaaatttgtagcttttggatggcctcaattacaaagagtgagttgcctggaagcagttcggctaatgaatccatatctgctagtgatgttgacttgccacagtctacagaacagaaaataaattttagtgatccttcatctatctccttgtgggcgaaacatgagtttattgatgcagttgatcgtgctgagaaactatcatgtcatgttcaaaatatggatagggcagctgagatgccagatgcaatggaaattatattccaaaaagctctcttaattgggacaagtggtgctgtagatgaatatatggaggtccgagatagggctggtgcatcttactcaaaagcgatgcttctactttcatttatcgtggcagaagcagagaaccttgcagtgaacccaccattttncacttgtatccgctaataaggagcgaatcttacaatatattcacagcttgcagtctcgtaaaaaattttcagcggagtcctcttcagagaaagcacattcacttttatcaaagtaaataactggtttttatagtgactttgcatcaccacttttggaatcggtgaagcaatttgttgttggcatgaatgttgacttcctatgatgagtacggacgagaagcaacctttgacagataccatattgtatatagatagatatatatgacctatcatggccttgtaaggccactttgcctttactgcatgatttcatgtatagaatgtgtaattctttgacatggaatttgtaaatagtgtatagcttatagtcctgtgcaatttttaaaccactattatcaatgaattgagagtttttagggg

SEQ ID NO: 53017 - protein, 197 aa, Glycine max
  peptide (1)..(197): Ceres Seq. ID no. 12606805
  misc_feature (193)..(193): Xaa is any aa, unknown or other
RKENGISSLLPSNRLQLLHQYVRILAELSQEKYNTGLYLESLAVELVVLAIWKKTLEICSFWMASITKSELPGSSSANESISASDVDLPQSTEQKINFSDPSSISLWAKHEFIDAVDRAEKLSCHVQNMDRAAEMPDAMEIIFQKALLIGTSGAVDEYMEVRDRAGASYSKAMLLLSFIVAEAENLAVNPPFXTCIR

SEQ ID NO: 53018 - protein, 135 aa, Glycine max
  peptide (1)..(135): Ceres Seq. ID no. 12606806
  misc_feature (131)..(131): Xaa is any aa, unknown or other
MASITKSELPGSSSANESISASDVDLPQSTEQKINFSDPSSISLWAKHEFIDAVDRAEKLSCHVQNMDRAAEMPDAMEIIFQKALLIGTSGAVDEYMEVRDRAGASYSKAMLLLSFIVAEAENLAVNPPFXTCIR

SEQ ID NO: 53019 - DNA, 1350 bp, Glycine max
  misc_feature (1)..(1350): Ceres Seq. ID no. 14306781
ggcagaaccatcgctcaagctcacactcacagtaaaatccaaaccaaaatggcggaaaataaagccattgaagaagctcagagcaagttccgttcagagttccttcaagttctgcgtagtaggcgacccgctcaagttccattaacagtcgaattcgcgaagccagtggtgaatcctttgcatcagaactctcctccatcgatcgaagagatcaagataatggagtcgtgtccgagaactgatatagagaaccttgaagacttgctcgaggaggagaatctctatttgaatatagaggaaggagagcaaggacggttgcctttgttgattttgaagttgaaggaaagcgataagcagagaaaaaggcctgcagttgtttttcttcacagtacgaacaaatacaaagaagtcctacgtccattgcttaaggcgtatgcttcgcgaggatatatagcaatttctgttgattctcgttaccatggagaacgtgctaccagcgcaaccacctatcgcgatgcacttatttctgcatggaaaactggtgagacgatgccattcatatttgacacggtctgggacttgattagattggcagattatctaacacagagagaggatatagacccttctaggataggaatcactggaatatcacttggaggaatgcatgcatggtttgctgcagttgctgatactcgctatgctgtggttgctcctctgattggcattcagggatttcaatgggccataggcaacgataaatggcaggctcgagttgatagtataaagcctctttttgaggcggctcgtgatgatttgggtaaaggtgctattgacaaagaagtggtggagaaggtgtgggaccgaattgctcctggtttagcttcccaatttgactcaccttattcagttccaactatcgcaccacgtcctttgcttattgttaatggtgcggaagatcctcggtgtcccgttgcaggcttggaaattccaagggcacaagcaagccaggcatatggacagtttgactgtttagataatttcaagattattacagaacctggagttggacaccaattaacgagacttcaagtgaaagaatcatcttattggtttgacaggttcttgaacccttagcccgtgccctcatatgtgttcatcaagccctgtgtggttgttgctctagctcattgcctcatttctattgtcattgtgtcatgatatcaaagtcaataaattgtcaaatagaaatcatcatcatgatgactcttaaggtacagtcaataaatttattatgtatgatggtgtgtaattgaatgatagtaaaaaaaaaaattatattgtcattgc

SEQ ID NO: 53020 - protein, 378 aa, Glycine max
  peptide (1)..(378): Ceres Seq. ID no. 14306782
GRTIAQAHTHSKIQTKMAENKAIEEAQSKFRSEFLQVLRSRRPAQVPLTVEFAKPVVNPLHQNSPPSIEEIKIMESCPRTDIENLEDLLEEENLYLNIEEGEQGRLPLLILKLKESDKQRKRPAVVFLHSTNKYKEVLRPLLKAYASRGYIAISVDSRYHGERATSATTYRDALISAWKTGETMPFIFDTVWDLIRLADYLTQREDIDPSRIGITGISLGGMHAWFAAVADTRYAVVAPLIGIQGFQWAIGNDKWQARVDSIKPLFEAARDDLGKGAIDKEVVEKVWDRIAPGLASQFDSPYSVPTIAPRPLLIVNGAEDPRCPVAGLEIPRAQASQAYGQFDCLDNFKIITEPGVGHQLTRLQVKESSYWFDRFLNP

SEQ ID NO: 53021 - protein, 362 aa, Glycine max
  peptide (1)..(362): Ceres Seq. ID no. 14306783
MAENKAIEEAQSKFRSEFLQVLRSRRPAQVPLTVEFAKPVVNPLHQNSPPSIEEIKIMESCPRTDIENLEDLLEEENLYLNIEEGEQGRLPLLILKLKESDKQRKRPAVVFLHSTNKYKEVLRPLLKAYASRGYIAISVDSRYHGERATSATTYRDALISAWKTGETMPFIFDTVWDLIRLADYLTQREDIDPSRIGITGISLGGMHAWFAAVADTRYAVVAPLIGIQGFQWAIGNDKWQARVDSIKPLFEAARDDLGKGAIDKEVVEKVWDRIAPGLASQFDSPYSVPTIAPRPLLIVNGAEDPRCPVAGLEIPRAQASQAYGQFDCLDNFKIITEPGVGHQLTRLQVKESSYWFDRFLNP

SEQ ID NO: 53022 - protein, 305 aa, Glycine max
  peptide (1)..(305): Ceres Seq. ID no. 14306784
MESCPRTDIENLEDLLEEENLYLNIEEGEQGRLPLLILKLKESDKQRKRPAVVFLHSTNKYKEVLRPLLKAYASRGYIAISVDSRYHGERATSATTYRDALISAWKTGETMPFIFDTVWDLIRLADYLTQREDIDPSRIGITGISLGGMHAWFAAVADTRYAVVAPLIGIQGFQWAIGNDKWQARVDSIKPLFEAARDDLGKGAIDKEVVEKVWDRIAPGLASQFDSPYSVPTIAPRPLLIVNGAEDPRCPVAGLEIPRAQASQAYGQFDCLDNFKIITEPGVGHQLTRLQVKESSYWFDRFLNP

SEQ ID NO: 53023 - DNA, 1480 bp, Glycine max
  misc_feature (1)..(1480): Ceres Seq. ID no. 14306627
gataatacagcacaaaaaaacttcacacacacaacacaacactttcctctctctctctctctctctctctctagggttccaagtttgaacttgaaagtgttgaactttctctagctttttcacaaatttggttgcacttgcaactgaggcaggaaagagggatcaccagggggcacgagaggaggaagaggaaagagaagaaaaaacaagaaaagtagagaaaggggtaggtgttgtacagaaatagaaattaaaaaattgagtgaaaaattaaaagggaaatttttttagaagaagagtgatagggatatggggaggggaagagtggagttgaagaggatagagaacaagataaacaggcaagtcacttttgcaaagaggagaaatgggcttctcaagaaagcctatgagctatctgttctctgtgatgctgaggttgccctcatcatcttctccaaccgaggcaagctttatgagttctgtagcagctctagcatgctcaaaacacttgaaaggtaccagaaatgcagctatggtgctgtggaagttagcaaacctgccaaagagctcgagcagagcagctaccgtgaatacttgaagctgaaagcaagatttgaatcacttcaaaggacccaaagaaaccttttaggggaagacttaggcccactgaatatcaaagaacttgagcatcttgaacggcaattggattcatctctaaagcaagtgaggtccacaaagacacaattcatgctggaccagttatctgatcttcaaaccaagatgttagtagaagcaaacagatccttgacagtgaagctggaagaaatcaattcaagaaaccactacaggcaatcatgggaagctggtgatcaaagtatgccatatggtggtggtggtccagagaattctcactctcattctcactctcagggcttcttccaaccattggaatgcaaccctacactacatattggtcctgattacaggtacaatgctgtagcttcagatcagataactgccacaactcaacctcaacaagtgagtggctttattccagggtggatgctttgaactaattaggctcagtgcattcaggtggagacataaaaaagcaaacaccttacaaaagggcaaaagccaaaaatgcatcttggtgttggcaaggtgtaaatgcaaccctgcttctacagttattttggtgtataagaaactgatgttgtgacttgttcaaacttttgaacttttagccatagacatatatggcaatttataacattaggtatcttttaaaggatccctttttattattaaatatctgaacgaccgatttcaattttcttctattgcattacatattaatcttggcttgatgtaagctcagttttcttctaggtttttgcttgcattataagtgaaagattgtaaaatttcatgaagctctgaaatctcttttcaatctttcataaaaaaaatatacatc

SEQ ID NO: 53024 - protein, 253 aa, Glycine max
  peptide (1)..(253): Ceres Seq. ID no. 14306628
MGRGRVELKRIENKINRQVTFAKRRNGLLKKAYELSVLCDAEVALIIFSNRGKLYEFCSSSSMLKTLERYQKCSYGAVEVSKPAKELEQSSYREYLKLKARFESLQRTQRNLLGEDLGPLNIKELEHLERQLDSSLKQVRSTKTQFMLDQLSDLQTKMLVEANRSLTVKLEEINSRNHYRQSWEAGDQSMPYGGGGPENSHSHSHSQGFFQPLECNPTLHIGPDYRYNAVASDQITATTQPQQVSGFIPGWML

SEQ ID NO: 53025 - protein, 191 aa, Glycine max
  peptide (1)..(191): Ceres Seq. ID no. 14306629
MLKTLERYQKCSYGAVEVSKPAKELEQSSYREYLKLKARFESLQRTQRNLLGEDLGPLNIKELEHLERQLDSSLKQVRSTKTQFMLDQLSDLQTKMLVEANRSLTVKLEEINSRNHYRQSWEAGDQSMPYGGGGPENSHSHSHSQGFFQPLECNPTLHIGPDYRYNAVASDQITATTQPQQVSGFIPGWML

SEQ ID NO: 53026 - DNA, 1277 bp, Glycine max
  misc_feature (1)..(1277): Ceres Seq. ID no. 14306617
aattcttccactaccccttttcgttattcttcttcaattctcccaaaaatcatatttttacactctgagtggtttttcagcttgtgggtcgatgtcaactgtgtcaaaagatgacaacttggcgctttcttcggaggactcttcatgcccagaagagtctgagcttgaattgggtcttgggttgagcctctcctctggctcttcatcaaaatctcatcaccaccatcatgctagaatttacactgctaaggattttccttcttctgcagcagcagcagcagcagcagcatcatcaccttcctcttcttcttcctctcccaacaacatcactgctggcaccaagagagctgctgccgattctcttgttgccaataaccgtcccagtcaagtagttggatggcctccacttcgaacatatagagtgaatagcttcaatagccatgcaaaatcaactgaagtattcaactctgtggctgagaaaagtaagaccgataatactgtggccaggaagactaatgacaatggcaatgataataacataaatgccaaagagaaaagacacctcaggagttccctgtttgtcaaggtaaatatggatgggataccaattggaaggaaggttgatttgagtgctcatagttcctatgaaaccttagcgcaaacattagaggatatgtttaatgaatcaactacagtcaccacttgcaaaggatcaaatggtgaggattatggctttattatcggaggagaaaggcattcaaaattattagatggatcttccaagtttgtgctcacttatgaagacaaggaaggagattggatgcttgttggggatgttccctgggggatgttctttagctcagtgaggaggctaagaatcatgaggacatctgaggctaatggacttgcaccgagattggaagaaaacataaaaaagagatgcaagcccatatagattccgttttcatggctaaggacatgaaaaacctgtcaaatagatgaagaggaaaaaccgaaacagaaaagtataggaatactgcaaatgtatgaagttttgagatttgaatgataaaatctcacacttttgcttaattaattcagtttgtttgtttaatttggtatctttgttgcggcctctctattcatctcacttggagggtgcaggcatcatagattttcatgcaatacaactaatcatacaagtcagactgcttgttagtgttgtaaatgtggaatgtttgctaactatttcagctataaagttttgtttgaacttc

SEQ ID NO: 53027 - protein, 317 aa, Glycine max
  peptide (1)..(317): Ceres Seq. ID no. 14306618
ILPLPLFVILLQFSQKSYFYTLSGFSACGSMSTVSKDDNLALSSEDSSCPEESELELGLGLSLSSGSSSKSHHHHHARIYTAKDFPSSAAAAAAAASSPSSSSSSPNNITAGTKRAAADSLVANNRPSQVVGWPPLRTYRVNSFNSHAKSTEVFNSVAEKSKTDNTVARKTNDNGNDNNINAKEKRHLRSSLFVKVNMDGIPIGRKVDLSAHSSYETLAQTLEDMFNESTTVTTCKGSNGEDYGFIIGGERHSKLLDGSSKFVLTYEDKEGDWMLVGDVPWGMFFSSVRRLRIMRTSEANGLAPRLEENIKKRCKPI

SEQ ID NO: 53028 - protein, 287 aa, Glycine max
  peptide (1)..(287): Ceres Seq. ID no. 14306619
MSTVSKDDNLALSSEDSSCPEESELELGLGLSLSSGSSSKSHHHHHARIYTAKDFPSSAAAAAAAASSPSSSSSSPNNITAGTKRAAADSLVANNRPSQVVGWPPLRTYRVNSFNSHAKSTEVFNSVAEKSKTDNTVARKTNDNGNDNNINAKEKRHLRSSLFVKVNMDGIPIGRKVDLSAHSSYETLAQTLEDMFNESTTVTTCKGSNGEDYGFIIGGERHSKLLDGSSKFVLTYEDKEGDWMLVGDVPWGMFFSSVRRLRIMRTSEANGLAPRLEENIKKRCKPI

SEQ ID NO: 53029 - DNA, 1318 bp, Glycine max
  misc_feature (1)..(1318): Ceres Seq. ID no. 14315634
atgaaaagtacatgcagatgtgtatgaacttcatatcatctttccttcagctatatcttcgtgaggatgatctattgtttgaagtgcttttgctattgtttagcatatcatcttctctccaggaacagtctgaaagtaaggatgctgcgtatcatgatgtaatgaaagattttccttttgagctgtcagacatttttaattctgtgcacctttttcatctgtttctttcagagatacattatgatcaccaagtgcttcttgattacctcatttcaaaagatactggaataagctgtgctaaatatcttctaagatgcttgcatttgatatgcaactcatggaagttatttgtggaatttccattatttggagaatttttggatcaatcatcttgcaagagaagaaaaattgtaggggatggtctacactttctagcagatggaatgcctacgtcaattgacaacagtggaagtatcatattgcatatcaagaattataaggaagacaggggtggcttcaagtactacaatattaagccattcaagaaagccggagaatgtttactatctttgaacaattctgtatataatcttcatcaaaagaagttgtttccgtataatcctaaagtgcttctgaaacgtctaagaagatttcaagagttatgctgtcaggaaaagggattccatggactgaagactgagtaataattaccaaaactgcatgtctgattctgaaagcttggctatcttatgctattaatggctatagaactacatttttgggtattggtggcacggatggacaggaaatagagaaattttgtgctggttcatagttgtatgggtaagatggctactacactggcttagatcagacttagtgcccacagctgtcaacattgtgctactggtgtccatctagtgacagtcttggttcacttcaaatccgtcgattattctatgggtttggggttacatgtcatctctggagaatctggtgagccatatcatggatccagggtgcatgaatggttcctaccagtcttcaatcttgaatttgtaaaggtactaatccattccctcaacttttagccagcagcatgatcttccctttgcgataccttttgtactatatcctccaggtaatccaagcaattatcgcattgaaggatgtctttcttgcggatacctgcctttctcttggtacttggagcttgcattcatgctcctacaaaaaagcatgtaatgagtagaagaccaaaagtgtaaaacttcgttggtttggttaagctagtaccccttcgtttgaaggctggggt

SEQ ID NO: 53030 - protein, 233 aa, Glycine max
  peptide (1)..(233): Ceres Seq. ID no. 14315635
EKYMQMCMNFISSFLQLYLREDDLLFEVLLLLFSISSSLQEQSESKDAAYHDVMKDFPFELSDIFNSVHLFHLFLSEIHYDHQVLLDYLISKDTGISCAKYLLRCLHLICNSWKLFVEFPLFGEFLDQSSCKRRKIVGDGLHFLADGMPTSIDNSGSIILHIKNYKEDRGGFKYYNIKPFKKAGECLLSLNNSVYNLHQKKLFPYNPKVLLKRLRRFQELCCQEKGFHGLKTE

SEQ ID NO: 53031 - protein, 230 aa, Glycine max
  peptide (1)..(230): Ceres Seq. ID no. 14315636
MQMCMNFISSFLQLYLREDDLLFEVLLLLFSISSSLQEQSESKDAAYHDVMKDFPFELSDIFNSVHLFHLFLSEIHYDHQVLLDYLISKDTGISCAKYLLRCLHLICNSWKLFVEFPLFGEFLDQSSCKRRKIVGDGLHFLADGMPTSIDNSGSIILHIKNYKEDRGGFKYYNIKPFKKAGECLLSLNNSVYNLHQKKLFPYNPKVLLKRLRRFQELCCQEKGFHGLKTE

SEQ ID NO: 53032 - protein, 228 aa, Glycine max
  peptide (1)..(228): Ceres Seq. ID no. 14315637
MCMNFISSFLQLYLREDDLLFEVLLLLFSISSSLQEQSESKDAAYHDVMKDFPFELSDIFNSVHLFHLFLSEIHYDHQVLLDYLISKDTGISCAKYLLRCLHLICNSWKLFVEFPLFGEFLDQSSCKRRKIVGDGLHFLADGMPTSIDNSGSIILHIKNYKEDRGGFKYYNIKPFKKAGECLLSLNNSVYNLHQKKLFPYNPKVLLKRLRRFQELCCQEKGFHGLKTE

SEQ ID NO: 53033 - DNA, 1130 bp, Glycine max
  misc_feature (1)..(1130): Ceres Seq. ID no. 14306479
gcttaaattaatcttcgttttggcctcaaccaacaataattctagtttctctcattccttctgtcccttaattgcgaagcaaatctttcttcttcccatggaaatggaaccgacgtgcgtcgacacttccctcaaccttaacgttattccttccccacacatcgaccacctcgcgggagaagttttgtttgaagagttgcggcgtctaagcagtgagaacaagaggctaactgagacgctgaaccacttgtgcgagagctatgttgccttgcagaaacatttgagtgaattcagccaacttaggaacgcaaattttgataaagaaggaacttgtgcagttccgtcgctaaagagaaagcccgagagtgagaattgtgtgaatctgtttggtactgagtgcaacaccatcacagaggaagaaacattcaaaaggcccaagcatagcaccgagccaaaggtttccaaagttcttacacggacagatgcatctgatactggcttatatgtgagggacggatatcagtggagaaaatacggtcagaaagtcactagagataacccttctcctagggcttacttcaagtgttcatatgcccctagctgtccagtaaaaaagaaggtgcaaagaagtgtagaagatccaagtgtgttggtaacaacttacgaaggggagcacaaccatgggcaacaacatcaaactgcagaaatatcaattaattcatcaagcaaaagtgaaacacctaggcctgcagtttcaccctcagccatgaatattcggagtagtgcagcagcaggtccaattgtaacacttgacttggtcaagtcaaaagttgttgacattaatgcgcaaaagtcatctctccagcagtttttagttcaccaaatggctacttctttgacaagagatcctaatttcacagccgcacttgcttctgccatctctggaagaattctagatgatacttctgtgggaaaacgttgaattattaagagatatatatgtattaatttcactgatgaacatatatgaattttgtcacttttcttcgttttaatatttaataacagctagtcacgaggagtagtgttctatgcagcatctatatttatcttatacaagtaaattttat

SEQ ID NO: 53034 - protein, 326 aa, Glycine max
  peptide (1)..(326): Ceres Seq. ID no. 14306480
LKLIFVLASTNNNSSFSHSFCPLIAKQIFLLPMEMEPTCVDTSLNLNVIPSPHIDHLAGEVLFEELRRLSSENKRLTETLNHLCESYVALQKHLSEFSQLRNANFDKEGTCAVPSLKRKPESENCVNLFGTECNTITEEETFKRPKHSTEPKVSKVLTRTDASDTGLYVRDGYQWRKYGQKVTRDNPSPRAYFKCSYAPSCPVKKKVQRSVEDPSVLVTTYEGEHNHGQQHQTAEISINSSSKSETPRPAVSPSAMNIRSSAAAGPIVTLDLVKSKVVDINAQKSSLQQFLVHQMATSLTRDPNFTAALASAISGRILDDTSVGKR

SEQ ID NO: 53035 - protein, 294 aa, Glycine max
  peptide (1)..(294): Ceres Seq. ID no. 14306481
MEMEPTCVDTSLNLNVIPSPHIDHLAGEVLFEELRRLSSENKRLTETLNHLCESYVALQKHLSEFSQLRNANFDKEGTCAVPSLKRKPESENCVNLFGTECNTITEEETFKRPKHSTEPKVSKVLTRTDASDTGLYVRDGYQWRKYGQKVTRDNPSPRAYFKCSYAPSCPVKKKVQRSVEDPSVLVTTYEGEHNHGQQHQTAEISINSSSKSETPRPAVSPSAMNIRSSAAAGPIVTLDLVKSKVVDINAQKSSLQQFLVHQMATSLTRDPNFTAALASAISGRILDDTSVGKR

SEQ ID NO: 53036 - protein, 292 aa, Glycine max
  peptide (1)..(292): Ceres Seq. ID no. 14306482
MEPTCVDTSLNLNVIPSPHIDHLAGEVLFEELRRLSSENKRLTETLNHLCESYVALQKHLSEFSQLRNANFDKEGTCAVPSLKRKPESENCVNLFGTECNTITEEETFKRPKHSTEPKVSKVLTRTDASDTGLYVRDGYQWRKYGQKVTRDNPSPRAYFKCSYAPSCPVKKKVQRSVEDPSVLVTTYEGEHNHGQQHQTAEISINSSSKSETPRPAVSPSAMNIRSSAAAGPIVTLDLVKSKVVDINAQKSSLQQFLVHQMATSLTRDPNFTAALASAISGRILDDTSVGKR

SEQ ID NO: 53037 - DNA, 1289 bp, Glycine max
  misc_feature (1)..(1289): Ceres Seq. ID no. 15176069
aaataaaattaactcctaaatttttcaacacataaaatggaattctccttccctattcatgatgtgctctccattgaccatgaaggtttcgccatcctgaatgctgcaaccactaaatccacttcccgtctcagcgaaaccccttcctattacaagccctacaccaaaactaaagccgatcccgttaaccaaggcttaacggagatcttggatcgcatgggtgctgccagtagcaaggctcaaggactaaagcaagtgataacaaatcatataaagtttacaacaagtggtgataatagattatatataaaagcagaagagaatagagtatatgggattctcaaagtgggaaagaagaacttgttttacagagactcaagaggaactgtaaaggaacttcaacctctgtgtgtattggacttttatgtgcatgaatcttgtcaaagaagtggtctcggaaaacagatttttgagatgatgttggaaaaagagaatattgatcctagtaaaatagcttatgatcgtccttctccgaaacttattggcttcttgaagaaacactacggacttgtcagctatgtccctcaaaataacaactttgtcgttttcaatgccttttgggataatcccaataagactttccaaggaaatagagctccaactagccatagcaatcatcatgggcatcatcatgaggaaagaaagaataatttgcatagtgatagaggttattcaagaggaactctggcaaatcaagaaagaaattatcataatagaaatggaaatacttcatataacagtcttccccaagagcaagaaagagttatagtaaaagatgatattaaaggtagaggaggtgctaatagtatgaaagatgattttgctgtttcttcgatgaatgataatatgaagtcaacagagacattgataaaagaaacagaggccaaaattcaaaaattgaatttggaaaaacagaaattaatggttccagaagaaagaagacaaaaagaatatcatagtacgactcctccatgggcaaatcatgctgaccatttcaataactataaaacatcaaattgttatggaaatcattacaatagattccaacctttaggtcgacatggaaaataaggaaattataggagagtttttttagataatttatttgtaaaagaaataaatataaatgtttgtttttgacgtatatgataaatattgataagaagatttattgaagcgaaaaaagtatcaataagtatatgcgtatgatttttattactcactacact

SEQ ID NO: 53038 - protein, 364 aa, Glycine max
  peptide (1)..(364): Ceres Seq. ID no. 15176070
MEFSFPIHDVLSIDHEGFAILNAATTKSTSRLSETPSYYKPYTKTKADPVNQGLTEILDRMGAASSKAQGLKQVITNHIKFTTSGDNRLYIKAEENRVYGILKVGKKNLFYRDSRGTVKELQPLCVLDFYVHESCQRSGLGKQIFEMMLEKENIDPSKIAYDRPSPKLIGFLKKHYGLVSYVPQNNNFVVFNAFWDNPNKTFQGNRAPTSHSNHHGHHHEERKNNLHSDRGYSRGTLANQERNYHNRNGNTSYNSLPQEQERVIVKDDIKGRGGANSMKDDFAVSSMNDNMKSTETLIKETEAKIQKLNLEKQKLMVPEERRQKEYHSTTPPWANHADHFNNYKTSNCYGNHYNRFQPLGRHGK

SEQ ID NO: 53039 - protein, 304 aa, Glycine max
  peptide (1)..(304): Ceres Seq. ID no. 15176071
MGAASSKAQGLKQVITNHIKFTTSGDNRLYIKAEENRVYGILKVGKKNLFYRDSRGTVKELQPLCVLDFYVHESCQRSGLGKQIFEMMLEKENIDPSKIAYDRPSPKLIGFLKKHYGLVSYVPQNNNFVVFNAFWDNPNKTFQGNRAPTSHSNHHGHHHEERKNNLHSDRGYSRGTLANQERNYHNRNGNTSYNSLPQEQERVIVKDDIKGRGGANSMKDDFAVSSMNDNMKSTETLIKETEAKIQKLNLEKQKLMVPEERRQKEYHSTTPPWANHADHFNNYKTSNCYGNHYNRFQPLGRHGK

SEQ ID NO: 53040 - protein, 218 aa, Glycine max
  peptide (1)..(218): Ceres Seq. ID no. 15176072
MMLEKENIDPSKIAYDRPSPKLIGFLKKHYGLVSYVPQNNNFVVFNAFWDNPNKTFQGNRAPTSHSNHHGHHHEERKNNLHSDRGYSRGTLANQERNYHNRNGNTSYNSLPQEQERVIVKDDIKGRGGANSMKDDFAVSSMNDNMKSTETLIKETEAKIQKLNLEKQKLMVPEERRQKEYHSTTPPWANHADHFNNYKTSNCYGNHYNRFQPLGRHGK

SEQ ID NO: 53041 - DNA, 1379 bp, Glycine max
  misc_feature (1)..(1379): Ceres Seq. ID no. 14304944
attttttataagtcgcttgctttttttcttcttcttcttcttcttcttttttcattcattcatttgtatttaatctacattacaacttttttttttcattcattcatttgtgttagccttgtatgtttatttataagttttaaccttaagtatatatcatttgttttctgttgatattttatacctattaacctgtgcataataagtgcagtatatctttatagagtgaatagcttctgtacgctttctgcttcaatgaaagactctaactaaatataaactgactggagctggttattgtttagctgtgtaagcagagttgtgtccataaacttagtcctgtatggagagaaacatgcacgttccttgctttctaagttttgtcattgactacatcaggacagtgtccccgattcattagtatgcatgcagatatatgaaggggtataggccttgggaaggaaaagaaggattttgctcctctaaataagggaggaaaaatttgagaaaatcacattccttgttgtttgtttccttcttttggaatttaactatgtaggggctctaagctgattttgagagtgttgttaaatatctgctatagtggtattgcattgcagaattccttggatctgtaattgagactccgtccactactgcaactgctatgggtcttgtggttgtggcatgtgtcatacatcctcttgtcatctttgatcctcacccagacaaagaacccctaagttggagtactcgaatgaagattgctgttggagctgctcgtggccttgaatatctccattgtaaagcagatccacctgttatctacagggacttgaaatctgcgaacatcttgttagataatgaattcaacccaaaactgtcagattttgggcttgctaaacttggacctgttggagacaatacccatgtttcaaccagagtgatgggaacatatggttactgtgcaccagagtatgccatgagcggcaaattaactcttaaatctgatatatatagctttggtgtgcttttgttggagttgatcactggacgtagggcaatagatactaatagaagaccaggagagcaaaacttggtttcatgggtaaatatttagtttgtatagtttatttaaaaagaaattcccctttaagtttagtatgttagtcttagctttgtatgcaagtgattccttttagattttcatcttttcactagcatattgagatttctcatataaaattttatgagaaagtgtggaaaaactagaaattagagcatgtctcatctcattaatcattatgaaaactctagcgtgttataaggcgtttcctgccttcttcataaattataatgaatccttgggattctttgac

SEQ ID NO: 53042 - protein, 150 aa, Glycine max
  peptide (1)..(150): Ceres Seq. ID no. 14304945
MGLVVVACVIHPLVIFDPHPDKEPLSWSTRMKIAVGAARGLEYLHCKADPPVIYRDLKSANILLDNEFNPKLSDFGLAKLGPVGDNTHVSTRVMGTYGYCAPEYAMSGKLTLKSDIYSFGVLLLELITGRRAIDTNRRPGEQNLVSWVNI

SEQ ID NO: 53043 - protein, 120 aa, Glycine max
  peptide (1)..(120): Ceres Seq. ID no. 14304946
MKIAVGAARGLEYLHCKADPPVIYRDLKSANILLDNEFNPKLSDFGLAKLGPVGDNTHVSTRVMGTYGYCAPEYAMSGKLTLKSDIYSFGVLLLELITGRRAIDTNRRPGEQNLVSWVNI

SEQ ID NO: 53044 - DNA, 821 bp, Glycine max
  misc_feature (1)..(821): Ceres Seq. ID no. 12606912
atgatttctctctatatagaatatcgaaattttagaactgaagtgttgaatcgatgtagttttggtgaagatccatgtttatatactcgaaaagcgttaatttgatgtttgaaaggttgttcataatttttgtttcttgttaacagttgttttttgttgatttggttgtggtgcagacaaaaaacaaggatcagaaccgttgaatcaagttgaggaagatggcactagtctctggaggaagatcaacactgaaccctaacgcccctctttacattcctgccgcgtttcgccaagtggaggatttctctccggaatggtggcagctggtgacgacgctgacatggtaccatgactactggctaagccagcagcacgatgagggagccttctacggcgaggacgacgggtttgatggcaatgatgtcgttgatttgcttcctgattcgtttgatcttgatgctggcgaggatctttttgaagagtttataagatcttctgaatcccaagaagaaactgggcccaaagtaactgcatgaggcttagagatgaacccatttaaagaatctacctaccaacctaagagactggacccaaggccttagctttaggtcagttagatgatatgtttgcatcatgttatccgtagcttcaactttctgtaacttcttgtataggcaaaggtttcaaaccttcaatctatccttctcttgcttttgccaaaatgttatggtgaatagggaaggaaaaagatggaaaaaaatgtgactgtttcatgtactgatattgtaaaagctgctaaaagtattcaaattacaaaatgt

SEQ ID NO: 53045 - protein, 105 aa, Glycine max
  peptide (1)..(105): Ceres Seq. ID no. 12606913
MALVSGGRSTLNPNAPLYIPAAFRQVEDFSPEWWQLVTTLTWYHDYWLSQQHDEGAFYGEDDGFDGNDVVDLLPDSFDLDAGEDLFEEFIRSSESQEETGPKVTA

SEQ ID NO: 53046 - DNA, 1418 bp, Glycine max
  misc_feature (1)..(1418): Ceres Seq. ID no. 15177221
gataggtacattgtcagacatctctgccaatgacgcttattattctagtattttaagaattttcagtcaaaagtgacatgatcctgcaatcatcaaacacatctttttaaggctcaatttaaaagttcaagaggtgtcatcaggcgttgagatagaaaagaaaacatgaggggaaaggcaggttcaggaaagaccattttgtttgtatgcattgcatgctttcttgcgggaaccctcttcaatggccagatgtggacacgcccctccaaccatgaaaatgaaaatacactactacgtctaccacccagacctgattgtgatcataagcgaaaactgattgaaggcaaacctggtgatgtaatggaggaagtcgtaaagactcatcaagctatcaagtcactggataaggcagtttcgacactggaaatggaactgacagcaagccaaactggtgggcggcaacggtcttctaaccacagtgtacagaaggcttttgtggtgattggtattaacacagcatttagcagcaaaaggcgaagagactcgatacgccaaacatggttatctaaacgaaatcagctgaaggaattagagaaagagaagggcattgttgtaaggttcgtgatcgggcacagtacaacaccgggtggcattcttgataaagcaattgatgcagaagaggcagaacacaaggacttcctcaggttagaccatgttgagggctaccatgagctatccaccaagactcgcctctacttttccactattacttctatgtgggatgctgatttctatgtcaaggtcgacgatgatatccatttaaatctaggtatgttagtgagtacacttgctaagtaccgatcaagacccaggatttatattggttgcatgaaatctggtcctgttctatatcaaaaaggagtaaagtatcatgaggctgagaactggaagtttggagaggaaggaaacaagtattttaggcatgccactggccaaatatatgccatctccaaggatctcgctacttatatatccatcaattggcccatattgcacagatacgcaaatgaagacgtatctttaggttcatggttattgggcctagaagttgaacatgtcgatgaacgctctatgtgttgcgggacccctccagattgtgattggaaggcaaggacgggaaatgtgtgcgtggcatccttcgactggtcatgcagtggtatctgtaagtcggtagagagaatgagagatatacacaaaacttgtggggagggtgacggagctgtttggaacgttgacctttaattctcaaattgagacatagaaaatcttatagctttactacttttgcattaagaggaattgaatccattttccttatattttaatgaaatttgagggacaatatctatactaaaaag

SEQ ID NO: 53047 - protein, 378 aa, Glycine max
  peptide (1)..(378): Ceres Seq. ID no. 15177222
MRGKAGSGKTILFVCIACFLAGTLFNGQMWTRPSNHENENTLLRLPPRPDCDHKRKLIEGKPGDVMEEVVKTHQAIKSLDKAVSTLEMELTASQTGGRQRSSNHSVQKAFVVIGINTAFSSKRRRDSIRQTWLSKRNQLKELEKEKGIVVRFVIGHSTTPGGILDKAIDAEEAEHKDFLRLDHVEGYHELSTKTRLYFSTITSMWDADFYVKVDDDIHLNLGMLVSTLAKYRSRPRIYIGCMKSGPVLYQKGVKYHEAENWKFGEEGNKYFRHATGQIYAISKDLATYISINWPILHRYANEDVSLGSWLLGLEVEHVDERSMCCGTPPDCDWKARTGNVCVASFDWSCSGICKSVERMRDIHKTCGEGDGAVWNVDL

SEQ ID NO: 53048 - protein, 350 aa, Glycine max
  peptide (1)..(350): Ceres Seq. ID no. 15177223
MWTRPSNHENENTLLRLPPRPDCDHKRKLIEGKPGDVMEEVVKTHQAIKSLDKAVSTLEMELTASQTGGRQRSSNHSVQKAFVVIGINTAFSSKRRRDSIRQTWLSKRNQLKELEKEKGIVVRFVIGHSTTPGGILDKAIDAEEAEHKDFLRLDHVEGYHELSTKTRLYFSTITSMWDADFYVKVDDDIHLNLGMLVSTLAKYRSRPRIYIGCMKSGPVLYQKGVKYHEAENWKFGEEGNKYFRHATGQIYAISKDLATYISINWPILHRYANEDVSLGSWLLGLEVEHVDERSMCCGTPPDCDWKARTGNVCVASFDWSCSGICKSVERMRDIHKTCGEGDGAVWNVDL

SEQ ID NO: 53049 - protein, 313 aa, Glycine max
  peptide (1)..(313): Ceres Seq. ID no. 15177224
MEEVVKTHQAIKSLDKAVSTLEMELTASQTGGRQRSSNHSVQKAFVVIGINTAFSSKRRRDSIRQTWLSKRNQLKELEKEKGIVVRFVIGHSTTPGGILDKAIDAEEAEHKDFLRLDHVEGYHELSTKTRLYFSTITSMWDADFYVKVDDDIHLNLGMLVSTLAKYRSRPRIYIGCMKSGPVLYQKGVKYHEAENWKFGEEGNKYFRHATGQIYAISKDLATYISINWPILHRYANEDVSLGSWLLGLEVEHVDERSMCCGTPPDCDWKARTGNVCVASFDWSCSGICKSVERMRDIHKTCGEGDGAVWNVDL

SEQ ID NO: 53050 - DNA, 1893 bp, Glycine max
  misc_feature (1)..(1893): Ceres Seq. ID no. 15226954
ccccccccccccccccataaggagctttgactagtgctgatatgctgctggaaatttattcttaaatgtgttgctactatttgttaacttgtccattatctacagctagggatcttgtgtaaaccttttgacatccctcaagagaaagaggaatagagtgaagtatgagtattggaatatagttcgataggatttatatgattatgaaaggatttcatttcattacttaggcatattcgtttaatctggtaagttaatagcagttctgaacattggtaatggattcatggccaactatagaacttaagaagttaaaataatcttttgctaatgtgtggattccatactgtgataaatgtgctgctgtttgtttacttgtcctttatctgcggctaggaatcttgtgtaagccttttgacatcctttaaatgaaataggaatagaatgaagtttgagaattggaatatagttcaatagggggttatatgattatgaaaggatttcatttctttactaaggcatattcgtttgatctggcaagttagtagcggtaataacctgagaagttaactaatgtatgggaaatgtgcggattccatacttgtctaaaagtaacctagaacagagttgctatttaggtttggaatatatgctttcatgttgcaaattagcaatattccttgttgacataatatgctctccatcaatcagacattatcttgtaactgaaaatgtttacttggaaaacattattctcctcctataagaacagtaggtaacattatttcctgttatcctgaacttgtttcttcagaatctaaagttaaagtaaattttggccttctgttttgtctgtgttttatcaaggtcgaagttgttttcttttggataggctatgctaatcatttgtgtttaattttcaatgttactttaataaagagtgctctcatcaggaatttactgaatgagactatccacttgtttagaagcacgatttacaacccccaacaatttacatcccagatgtgaaaatctcagaagcaacagctagtagcattatcggatgtgaaaaatcacgtctccgattcatttccaaacatgctacggagtttctgtcatgtcaaagggtttagtgatatgttgcaatatatatgtatgtgaatttgatatctgtttgaaattctttatttaaaaactgtaagtacatcattgaataccaaattccaattctaatactctacttttcagtaagctctcatattttagcaaccatccagtacctgttgtattagaaccacataccataaaccaaaacctcatgtgtctttataaagctgaaatccgataactgttgtttgatttttgacagatgatgtattcattcctagaccgagttatcaacctgggacttcctaggacaagagatttccaaggtgtgaaccccaacagctttgatgggcatgggaactacagcattggcattaaggaccagggtgtgttcccagagatcagagccgatgttgttggtaagcctcggggaatggatatctgcatcgtgacgacggctaataccgaccaagaagcacagaaattgttagctcttatgggtatgcccttcagagagggaagtggtcctgccacgacaattcggaaaaagaagcttaagtctcatcattttgatgcaaaatcaaagggaagaggaaggaggtgacatagttttgatgcaaaatcataggataaaaggaagtaaggttggaaccagaagagactgtgttgtattcctggtttcattcagatgtaatattatttttgattctttatgtaagaggcttggacatgccatcaactatgtcgctatgaggttataatgtggtcttgcagatcttgcttgct

SEQ ID NO: 53051 - protein, 113 aa, Glycine max
  peptide (1)..(113): Ceres Seq. ID no. 15226955
MMYSFLDRVINLGLPRTRDFQGVNPNSFDGHGNYSIGIKDQGVFPEIRADVVGKPRGMDICIVTTANTDQEAQKLLALMGMPFREGSGPATTIRKKKLKSHHFDAKSKGRGRR

SEQ ID NO: 53052 - protein, 112 aa, Glycine max
  peptide (1)..(112): Ceres Seq. ID no. 15226956
MYSFLDRVINLGLPRTRDFQGVNPNSFDGHGNYSIGIKDQGVFPEIRADVVGKPRGMDICIVTTANTDQEAQKLLALMGMPFREGSGPATTIRKKKLKSHHFDAKSKGRGRR

SEQ ID NO: 53053 - protein, 62 aa, Glycine max
  peptide (1)..(62): Ceres Seq. ID no. 15226957
MQNQREEEGGDIVLMQNHRIKGSKVGTRRDCVVFLVSFRCNIIFDSLCKRLGHAINYVAMRL

SEQ ID NO: 53054 - DNA, 1691 bp, Glycine max
  misc_feature (1)..(1691): Ceres Seq. ID no. 15174842
gtaatgctcacatctcagaccctttcatttatatgcatagaaatgtgacgaaaagaaaaaaacttgatctgtttcatgagttgagttaatacccactttgcctatgtttacttcaaactcttgttctgcattgtccactcttactctgatttgcctgctgcaatggttctttaggttgctttctcttacaatttttgtgggtaaactttagatctgtccattatgttgagatttagcttctttgagtaaaaagtaaaagcacattaccaaagttaatgagatgttttacctaattcaaatgagaagtgaatatactatctcattttacatatatgggatccccccccccccccgaaggaatatctagctatgggagacattgatccagcttttatacaatccacagaacaccgtcccatagcaaaggtggtggaagttagagagattccagtgatagacctttcagaaggtagaaaagaattactcatttcagaaattggcaaagcatgtgaggagtggggatttttccaagtaataaatcatggggtaccctttgagattagtagagaggttgagattgtctccaagaagttctttgagacgagcttagaggagaagaagaaagtgaaaagagatgaatttaatgcaatggggtaccatgatggggagcacaccaagaacgtaagagactggaaagaggtgtttgattaccttgttgaaaacactgcacaagtcccatcttcccatgagccaaatgatttggatttgaggactctcaccaaccaatggccccaaaactctcctcattttagggaaacattgcaagagtatgctcgagaagtggaaaagctagcttacaagttgttggagctgatttcacagagcttgggtttggctgctgacaaattccatggctgtttcaagaaccaactcagcatggtgcgactcaattactatcccgcatgccctttccctgacctggcacttggtgttggtcgccacaaggattccagtgctttaactgtgcttgcccaagatgatgttggaggattacaagttaagagaaaatcagatggagaatggattcctgttaaacctaccccaaatgcatttattatcaatgtgggggatatagttcaggtttggagcaatgacaagtacgagagcgtggagcacagggtggtggtgaatacagaaaaggaaaggttttcaattccattcttctttttccctgctcaccatgttatggtgaagcctgccgaggagctggtaaatgagcaaaatccagcaagatatagagaatacaagtatggtaagttctttgccaacagaaaccggagtgatttcaagaagcgtgatgtggagaatatccaaattcatcacttcaggatcttggatgaggcatttgggttggcatcctcaatatcatccatatctgagcataactagttctatctgctagttccatcatttcaaatccaaacaaaattgtgttggttcgattctgccaataaataataaaatattgagctttagttctagtatgtgttgttctctaaatttttattctatataaagagttcaagacatggactagtgtaagttgtagtgtgagtatctggtaacaccttagaagtcctggttgagtataaaatcactgtgaaatcaatacaaaagaagacattttatcc

SEQ ID NO: 53055 - protein, 359 aa, Glycine max
  peptide (1)..(359): Ceres Seq. ID no. 15174843
MGDIDPAFIQSTEHRPIAKVVEVREIPVIDLSEGRKELLISEIGKACEEWGFFQVINHGVPFEISREVEIVSKKFFETSLEEKKKVKRDEFNAMGYHDGEHTKNVRDWKEVFDYLVENTAQVPSSHEPNDLDLRTLTNQWPQNSPHFRETLQEYAREVEKLAYKLLELISQSLGLAADKFHGCFKNQLSMVRLNYYPACPFPDLALGVGRHKDSSALTVLAQDDVGGLQVKRKSDGEWIPVKPTPNAFIINVGDIVQVWSNDKYESVEHRVVVNTEKERFSIPFFFFPAHHVMVKPAEELVNEQNPARYREYKYGKFFANRNRSDFKKRDVENIQIHHFRILDEAFGLASSISSISEHN

SEQ ID NO: 53056 - protein, 266 aa, Glycine max
  peptide (1)..(266): Ceres Seq. ID no. 15174844
MGYHDGEHTKNVRDWKEVFDYLVENTAQVPSSHEPNDLDLRTLTNQWPQNSPHFRETLQEYAREVEKLAYKLLELISQSLGLAADKFHGCFKNQLSMVRLNYYPACPFPDLALGVGRHKDSSALTVLAQDDVGGLQVKRKSDGEWIPVKPTPNAFIINVGDIVQVWSNDKYESVEHRVVVNTEKERFSIPFFFFPAHHVMVKPAEELVNEQNPARYREYKYGKFFANRNRSDFKKRDVENIQIHHFRILDEAFGLASSISSISEHN

SEQ ID NO: 53057 - DNA, 1357 bp, Glycine max
  misc_feature (1)..(1357): Ceres Seq. ID no. 14306773
tcagcgctacgtaggcccccccccccaagaacgataacaaaattgaaatcgaattgggtgcgaagtgaaatgttgcaaaccctaggaggcgtaatccctcgcttcgtgagtcgctcatggctccgaaacctgacggtgcgtgcaatggcattctcttcctcctcctccgattatggagaccagtcacgtggtggccttccccgcttctactccgaaactcttcctccttccaagggtagtgttatacgcgtgcaaggtgatgaattctggcatatgacaaaagttttgaggttaaccaccaatgatagggtacagctcttcaatgggaaaggaagtctggtagaaggatgcatacagagcattgatcgaactggacttgattttgttgcattgaatgatttgatatcaatccctccacaaaatacacaattgcatgtatttgctggttttggtactctgaagggtggccgtgctgactggcttgtagagaaatgcacagaatttggagccaatagtgttactcctctattgactgaacattctccgtcaatctcagaaaatcgggtggacagattgaaacgtgtcattttagcagcatccaaacaaagtcaacgactgcatgaaatggtcttgaaacatcctatagagattgatgaccttttgcaccttattgcgcaatcaaagctatctcttgttgcaactgcgaaggcaactcctgttcttagtgcattggcatcgttggaaaaggaaactagtggcttaatcataattggaccagaaggagatttcactgagaaagaagtgagtatgatgatggaagcaggtgctacagctgttagtcttggacctcatcgtcttcgggttgaaactgccacgatagcacttttggcaactgtcatgttatggtctgactcacagcaaatttcagtctgttgattcctcagtgtagctgagagagtacgtggatgacacagaggagtgggaggactacataatcattgccctggattgagaaacaaaaccgtctcctgcaagtgggagtgaagctttgcacagcaagtgtgcttttgaatgccttaatttgtgtgactggtgtatttgccatgaatattcatattaagctatttgatacagggatgcctcagttcctcgggactatttttggaggcattgctgcttgcatattcttgtatttggttaccgttttttggtatatggtggactagctgcccaccaaattgtgttccaaatataaatgtaatttgatttgaaagttagttttctatgtaggtgctagaaattttttcactacaagacaactacgggaagtcagtaacaatttctttctaatatattc

SEQ ID NO: 53058 - protein, 311 aa, Glycine max
  peptide (1)..(311): Ceres Seq. ID no. 14306774
SALRRPPPPRTITKLKSNWVRSEMLQTLGGVIPRFVSRSWLRNLTVRAMAFSSSSSDYGDQSRGGLPRFYSETLPPSKGSVIRVQGDEFWHMTKVLRLTTNDRVQLFNGKGSLVEGCIQSIDRTGLDFVALNDLISIPPQNTQLHVFAGFGTLKGGRADWLVEKCTEFGANSVTPLLTEHSPSISENRVDRLKRVILAASKQSQRLHEMVLKHPIEIDDLLHLIAQSKLSLVATAKATPVLSALASLEKETSGLIIIGPEGDFTEKEVSMMMEAGATAVSLGPHRLRVETATIALLATVMLWSDSQQISVC

SEQ ID NO: 53059 - protein, 288 aa, Glycine max
  peptide (1)..(288): Ceres Seq. ID no. 14306775
MLQTLGGVIPRFVSRSWLRNLTVRAMAFSSSSSDYGDQSRGGLPRFYSETLPPSKGSVIRVQGDEFWHMTKVLRLTTNDRVQLFNGKGSLVEGCIQSIDRTGLDFVALNDLISIPPQNTQLHVFAGFGTLKGGRADWLVEKCTEFGANSVTPLLTEHSPSISENRVDRLKRVILAASKQSQRLHEMVLKHPIEIDDLLHLIAQSKLSLVATAKATPVLSALASLEKETSGLIIIGPEGDFTEKEVSMMMEAGATAVSLGPHRLRVETATIALLATVMLWSDSQQISVC

SEQ ID NO: 53060 - protein, 263 aa, Glycine max
  peptide (1)..(263): Ceres Seq. ID no. 14306776
MAFSSSSSDYGDQSRGGLPRFYSETLPPSKGSVIRVQGDEFWHMTKVLRLTTNDRVQLFNGKGSLVEGCIQSIDRTGLDFVALNDLISIPPQNTQLHVFAGFGTLKGGRADWLVEKCTEFGANSVTPLLTEHSPSISENRVDRLKRVILAASKQSQRLHEMVLKHPIEIDDLLHLIAQSKLSLVATAKATPVLSALASLEKETSGLIIIGPEGDFTEKEVSMMMEAGATAVSLGPHRLRVETATIALLATVMLWSDSQQISVC

SEQ ID NO: 53061 - DNA, 1575 bp, Glycine max
  misc_feature (1)..(1575): Ceres Seq. ID no. 14311171
gatgaacaatcaaccaagaaaacagtgagcacagttcagttgcacaccttctctgtgcttcttcttcgatgttcaattacaataacaccaactcgcttcatgaaacaccccactccaatttcgccctgtcacaatcgcatcactcatgcattggccactgtcacataaccgcgatcgctggatacgacaccctttcgttctagggtttcccctccaccactatggccatcagaggcgtcaatttcaaatggttcgatggctttttcttgtccatgctcgccaccagcatagctattgtggcaattaattggaagcggtatcaatcttgtactcaccctttgcacatatggactgtggttgactacgctgctgttttcactttccggcttttgatgtttgttgataacgggcttgcttcgggaatgggtttagattttgggtggccgcagagatatgctcgcttctgtggaagagtagttgtactttcaattcttgcattgcttctctatccatttctttgggcttggacaataattggtaccctgtggttcagcaacactaaaatctgcttgcctggagggggccagaaatggggcttccttatctggttactttttagctactgtggactcctctgtattgcttgcttggcaatgcggaagtggttaaaacgaagacaagcacgcatgttaggtgctcaagagggtatccctgtatccgcatttggggttctagttgaaatgatccgagtacctgattgggcatttgaagctgcaggtcaagaaacaaggagtatggcccaagatgctgcatatcatcctggactttacctaactccagcccagagagaagcagttgaagctttaattcaggaactcccatcgttcaggttaactgctgttcctactaattgcagtgaatgcctcatctgcttagaagaattccatgtaggaaatcaggtccgtggcctgccctgtgctcacaattttcatgttgaatgcattgatgagtggcttcggcttaatgtgaattgtcctcggtgccgttgctcagtatttcctaatcttgatctcagtgctctgtccaatatccgttctgagtctgaacagtcttctgccactgctgtgacaagcagagatatgacaggacaaacttctagtcagagttaccttctgagattacaggggcctctccacccagtttgtgttgactttgcagggccagctggtgagacagacaatgctttggaaaatgctgaaaatggtgttgtacctgttgtgactcaaaatatgtcaactagagatcaggccacttctggtgaacacatgcctgttggtctttcctcttcccaaaattagattgcttctcaactctgttatattcctaacccattcgtgagaagttgcaggttacatatcagtatccagccattgcctgaagctttatatatgatgtactttctaacatgaaaatttctggactgattcataaagaaatggatcagcttcctttttttctgagggatcttgtagaaataaagacttgaagggtgaaaatataccttttttttacttc

SEQ ID NO: 53062 - protein, 378 aa, Glycine max
  peptide (1)..(378): Ceres Seq. ID no. 14311172
MAIRGVNFKWFDGFFLSMLATSIAIVAINWKRYQSCTHPLHIWTVVDYAAVFTFRLLMFVDNGLASGMGLDFGWPQRYARFCGRVVVLSILALLLYPFLWAWTIIGTLWFSNTKICLPGGGQKWGFLIWLLFSYCGLLCIACLAMRKWLKRRQARMLGAQEGIPVSAFGVLVEMIRVPDWAFEAAGQETRSMAQDAAYHPGLYLTPAQREAVEALIQELPSFRLTAVPTNCSECLICLEEFHVGNQVRGLPCAHNFHVECIDEWLRLNVNCPRCRCSVFPNLDLSALSNIRSESEQSSATAVTSRDMTGQTSSQSYLLRLQGPLHPVCVDFAGPAGETDNALENAENGVVPVVTQNMSTRDQATSGEHMPVGLSSSQN

SEQ ID NO: 53063 - protein, 361 aa, Glycine max
  peptide (1)..(361): Ceres Seq. ID no. 14311173
MLATSIAIVAINWKRYQSCTHPLHIWTVVDYAAVFTFRLLMFVDNGLASGMGLDFGWPQRYARFCGRVVVLSILALLLYPFLWAWTIIGTLWFSNTKICLPGGGQKWGFLIWLLFSYCGLLCIACLAMRKWLKRRQARMLGAQEGIPVSAFGVLVEMIRVPDWAFEAAGQETRSMAQDAAYHPGLYLTPAQREAVEALIQELPSFRLTAVPTNCSECLICLEEFHVGNQVRGLPCAHNFHVECIDEWLRLNVNCPRCRCSVFPNLDLSALSNIRSESEQSSATAVTSRDMTGQTSSQSYLLRLQGPLHPVCVDFAGPAGETDNALENAENGVVPVVTQNMSTRDQATSGEHMPVGLSSSQN

SEQ ID NO: 53064 - protein, 321 aa, Glycine max
  peptide (1)..(321): Ceres Seq. ID no. 14311174
MFVDNGLASGMGLDFGWPQRYARFCGRVVVLSILALLLYPFLWAWTIIGTLWFSNTKICLPGGGQKWGFLIWLLFSYCGLLCIACLAMRKWLKRRQARMLGAQEGIPVSAFGVLVEMIRVPDWAFEAAGQETRSMAQDAAYHPGLYLTPAQREAVEALIQELPSFRLTAVPTNCSECLICLEEFHVGNQVRGLPCAHNFHVECIDEWLRLNVNCPRCRCSVFPNLDLSALSNIRSESEQSSATAVTSRDMTGQTSSQSYLLRLQGPLHPVCVDFAGPAGETDNALENAENGVVPVVTQNMSTRDQATSGEHMPVGLSSSQN

SEQ ID NO: 53065 - DNA, 1431 bp, Glycine max
  misc_feature (1)..(1431): Ceres Seq. ID no. 15177561
attaatttttttgggttaaatttctatgcacttttactctcaaccaatcagaaaatcattgttggtatgacttttaagatagttattgtaaaagtcaataaacttaccatataactatgtgattggataacaatgtaaaaaccatttacactataagtgcatacactatttagtatttactatttactcaatcaagtttaatttctatgcacagtcaatgtaaaaattttacatggtcaatcaatcataaattatggtttgcgcttttaagataattattatagaagtctttcaaacttatcatactatcaaaacgcatacactacttacccagtctttgtattattaaatgtatagttttctgaattcttatttgcttttatcctatgcagatatcagtctggaagaagacgaatttgatatttttgttcttcctattgaggaaacttatactccccttctactccttcaccctgttttgcatcatactacccttgaccatgttcatacccgagtctgaactacccctttgggtgatatgttatgtccccatcatcatgtctttcctaaacatccttccatccccaaaatctatccctttcctagttccttatcttctgtttgagaacaccatgtcagtcacaaagttcaatgccatgatttctggattgtttcagctaggaagtgcttatgagtgggtagtgacaaagaagacagggagatcctcagagtcagatttgttggccttggctgagagagagtcaaagtcttcaaatgaagaaaagattctaagaagacactcagagtctggcttggagttattaggcaaacttaagcaatcagaagtaccttcaaagaaaaaaagaaacaagctctataggaaggagctagcacttgcacttcttttgctcacagcatctgcaagaagtcttttgtcagcacatggtgttcacttctattttttgctcttccaaggattgtcatttctcataatgggtctggacttgattggtgagcaagtgagctgaaataactaataaggattggaaattgttttacttgtttttgacaccaatacttttggttgaatccagattttagttgaagttcattaagatacaatcgtaagattacatagcagctggcaagacaatgaaatatatagattaaagttgattgtcccatcataaaatataaaaaataatgataataataagcattgaggatcatagacaaaaacaaatgcaattttttttaatttcttttcccatttttgtgtagactttgtcagggagtgatgatttattgcctttttttttgtggattttcacttatgtaaagctttaggattgagagaatattgttggaacataactgtatctattgtctttcagaatagattgtgaaatgagtaacccctactgtattaag

SEQ ID NO: 53066 - protein, 213 aa, Glycine max
  peptide (1)..(213): Ceres Seq. ID no. 15177562
MQISVWKKTNLIFLFFLLRKLILPFYSFTLFCIILPLTMFIPESELPLWVICYVPIIMSFLNILPSPKSIPFLVPYLLFENTMSVTKFNAMISGLFQLGSAYEWVVTKKTGRSSESDLLALAERESKSSNEEKILRRHSESGLELLGKLKQSEVPSKKKRNKLYRKELALALLLLTASARSLLSAHGVHFYFLLFQGLSFLIMGLDLIGEQVS

SEQ ID NO: 53067 - protein, 175 aa, Glycine max
  peptide (1)..(175): Ceres Seq. ID no. 15177563
MFIPESELPLWVICYVPIIMSFLNILPSPKSIPFLVPYLLFENTMSVTKFNAMISGLFQLGSAYEWVVTKKTGRSSESDLLALAERESKSSNEEKILRRHSESGLELLGKLKQSEVPSKKKRNKLYRKELALALLLLTASARSLLSAHGVHFYFLLFQGLSFLIMGLDLIGEQVS

SEQ ID NO: 53068 - protein, 156 aa, Glycine max
  peptide (1)..(156): Ceres Seq. ID no. 15177564
MSFLNILPSPKSIPFLVPYLLFENTMSVTKFNAMISGLFQLGSAYEWVVTKKTGRSSESDLLALAERESKSSNEEKILRRHSESGLELLGKLKQSEVPSKKKRNKLYRKELALALLLLTASARSLLSAHGVHFYFLLFQGLSFLIMGLDLIGEQVS

SEQ ID NO: 53069 - DNA, 1660 bp, Glycine max
  misc_feature (1)..(1660): Ceres Seq. ID no. 15170151
atgagttctaatatatcattcaaaagtttttgaaatgttgtcaccccttcttctatttctatgcctaactcttcctttgtttttgttgtccttcttcaaataccgtaaaaccttcaagaatccaccacttccaccaggtcctagaggccttcccataatagggaatcttcatcaactagatagtccttctcttcatgagcagctatggcatctctcaaagaaatatggtcctttattttcccttcaatttggattaaggccagccatagttgtttcctctccaaaattggccaaagaggtaatgaaagacaatgaccttgagtgctgtggacgacctaaattactaggccaacagaaactaacctataatgggttagacatgggattttcctcatacgatagttattggagagaaatcagaaaaatttgtgttgtccatgtccttagctccaaacgtgtccaaagctttacctcaataagacattttgaggtcaagcagatgataaaaaaaatatctaggcatgcctcatcttcaaaagttacaaatttaaatgaagtgcttatatctcttattagtactattgtatgtagaattgttttggggagaaggtatgaagaggagggatctgaaggtagcagattccataagttgttcaatgagtgtgaagctatgttgggtaacttctttgtttcagattatattcctttcatgggttggattgataaactcaggggactggatgcacgtcttgaacgcaatttcaaggagatggataagttctaccaagaagccattgatgaacacatgaattctaagaaaaaaactccagaggaagaggatttagttgatgtcttacttcaactgaaagagaacaacacgtttcccatagatctcaccaatgataacatcaaagcagtgctcttgaacttacttgtaggagctacaggtacaactgaagtcacaacaatctgggccatgactgaactaataaaaaatccaagcattatgaagaaagtgcaagaagaaattagaggcttaagtggtaagaaagatttcttggatgaagatgatattcaaaagttttcctacttaagggcagtgataaaagagacacttagattgcacttaccagcaccactacttataccaagagaaacaaataaaaaatgcatgttagatggctacgaaattccagccaagacattattatatgtgaatgcttgggcaattcatagagatcctaaggcttggaaagatccagaagagtttatacctgagaggtttttaaattgcgacatagatctttatggacaagattttgagtttattccattcggtgctggtcgtagattgtgccctggtatgaatatggcatttgctgcattggatcttatacttgctaatcttctttattcctttgactgggaattgccacaaggaatgaaaaaggaagacattgatactgaagtgttgccaggagttacacagcataagaagaatcctctgtgtgttgtggccaagtgctatatgtaaaatccaaaagtcgtaactactgctgaaaaaaataaaataaaataattaatgattgtactcttccaacgaagattattaaataaagatgtaagcactccaaaataaaaatatttctgttgtgtttat

SEQ ID NO: 53070 - protein, 499 aa, Glycine max
  peptide (1)..(499): Ceres Seq. ID no. 15170152
MLSPLLLFLCLTLPLFLLSFFKYRKTFKNPPLPPGPRGLPIIGNLHQLDSPSLHEQLWHLSKKYGPLFSLQFGLRPAIVVSSPKLAKEVMKDNDLECCGRPKLLGQQKLTYNGLDMGFSSYDSYWREIRKICVVHVLSSKRVQSFTSIRHFEVKQMIKKISRHASSSKVTNLNEVLISLISTIVCRIVLGRRYEEEGSEGSRFHKLFNECEAMLGNFFVSDYIPFMGWIDKLRGLDARLERNFKEMDKFYQEAIDEHMNSKKKTPEEEDLVDVLLQLKENNTFPIDLTNDNIKAVLLNLLVGATGTTEVTTIWAMTELIKNPSIMKKVQEEIRGLSGKKDFLDEDDIQKFSYLRAVIKETLRLHLPAPLLIPRETNKKCMLDGYEIPAKTLLYVNAWAIHRDPKAWKDPEEFIPERFLNCDIDLYGQDFEFIPFGAGRRLCPGMNMAFAALDLILANLLYSFDWELPQGMKKEDIDTEVLPGVTQHKKNPLCVVAKCYM

SEQ ID NO: 53071 - protein, 410 aa, Glycine max
  peptide (1)..(410): Ceres Seq. ID no. 15170153
MKDNDLECCGRPKLLGQQKLTYNGLDMGFSSYDSYWREIRKICVVHVLSSKRVQSFTSIRHFEVKQMIKKISRHASSSKVTNLNEVLISLISTIVCRIVLGRRYEEEGSEGSRFHKLFNECEAMLGNFFVSDYIPFMGWIDKLRGLDARLERNFKEMDKFYQEAIDEHMNSKKKTPEEEDLVDVLLQLKENNTFPIDLTNDNIKAVLLNLLVGATGTTEVTTIWAMTELIKNPSIMKKVQEEIRGLSGKKDFLDEDDIQKFSYLRAVIKETLRLHLPAPLLIPRETNKKCMLDGYEIPAKTLLYVNAWAIHRDPKAWKDPEEFIPERFLNCDIDLYGQDFEFIPFGAGRRLCPGMNMAFAALDLILANLLYSFDWELPQGMKKEDIDTEVLPGVTQHKKNPLCVVAKCYM

SEQ ID NO: 53072 - protein, 384 aa, Glycine max
  peptide (1)..(384): Ceres Seq. ID no. 15170154
MGFSSYDSYWREIRKICVVHVLSSKRVQSFTSIRHFEVKQMIKKISRHASSSKVTNLNEVLISLISTIVCRIVLGRRYEEEGSEGSRFHKLFNECEAMLGNFFVSDYIPFMGWIDKLRGLDARLERNFKEMDKFYQEAIDEHMNSKKKTPEEEDLVDVLLQLKENNTFPIDLTNDNIKAVLLNLLVGATGTTEVTTIWAMTELIKNPSIMKKVQEEIRGLSGKKDFLDEDDIQKFSYLRAVIKETLRLHLPAPLLIPRETNKKCMLDGYEIPAKTLLYVNAWAIHRDPKAWKDPEEFIPERFLNCDIDLYGQDFEFIPFGAGRRLCPGMNMAFAALDLILANLLYSFDWELPQGMKKEDIDTEVLPGVTQHKKNPLCVVAKCYM

SEQ ID NO: 53073 - DNA, 1184 bp, Glycine max
  misc_feature (1)..(1184): Ceres Seq. ID no. 14311232
agtgcagaaggaatcaaaatttgaattcagatacttaaaatttgaagaactgctatgaaagaacatcccaccatttagatttttgagagtatttatttgggtgggtcccgtgagatgtatgtgcaattgtccctgttttgataacagaaaaaaaggggaaaggggtaagaatatgtaattaggatacattctgcaagaaatttttttcttaaaatgtcatgaacattagtgttttggatttcatgaaaatttgttgcatcatttataaattaggactaaatgtgacataagaattgcaacaaaagatagatagacatttcttgattgcttttatattaacattgtttgacaattgacctaggtatggagaatctggcctttgggacacccaataaatcaatttatgaatgcattcaccgaccaccgtgactctgatcttctcattgtcagccatttctcactcttactgggatgtgcgcttcctatttggatgtctactgggtacaatgatcgacctcttgctccttttgcgggaatattgagtctaggaattggagacacaatggcatcaatggttggacacaagtatggtgttctgaggtggagtaaaacaggcaagaaaactgttgaaggtactgcagctggtataacttctgtattggctgcttgttctttactccttccactcttagcatcgactggatacattctcactcagcattggttctctcttcttctagctgtgactgtaagtggtttgttggaggcttacacaacacaacttgacaatgcatttataccactttttttctatagtcttctctgtttgtagacacagcttagttaatcttggacgagcgacgaggctctgcaaatatatgttgtctctgggcacattgtttatgcagaggtcagataactattaaccaatgcaattgtactttaccagtttagggttgtggtatacatagtagatagtagttaggattgtatctatacagaaatgatagatatacgagtgttcatttaaagggtttatacccaacacgcataacacaatgtatgcagagtgacagtttcccatttttgttggaacctatgtgaggccatgacaagaggagagttgttgaacatctagtggacaatggtaaagaaattgttaatatctcatttttcattcgtag

SEQ ID NO: 53074 - protein, 142 aa, Glycine max
  peptide (1)..(142): Ceres Seq. ID no. 14311233
MNAFTDHRDSDLLIVSHFSLLLGCALPIWMSTGYNDRPLAPFAGILSLGIGDTMASMVGHKYGVLRWSKTGKKTVEGTAAGITSVLAACSLLLPLLASTGYILTQHWFSLLLAVTVSGLLEAYTTQLDNAFIPLFFYSLLCL

SEQ ID NO: 53075 - protein, 113 aa, Glycine max
  peptide (1)..(113): Ceres Seq. ID no. 14311234
MSTGYNDRPLAPFAGILSLGIGDTMASMVGHKYGVLRWSKTGKKTVEGTAAGITSVLAACSLLLPLLASTGYILTQHWFSLLLAVTVSGLLEAYTTQLDNAFIPLFFYSLLCL

SEQ ID NO: 53076 - protein, 89 aa, Glycine max
  peptide (1)..(89): Ceres Seq. ID no. 14311235
MASMVGHKYGVLRWSKTGKKTVEGTAAGITSVLAACSLLLPLLASTGYILTQHWFSLLLAVTVSGLLEAYTTQLDNAFIPLFFYSLLCL

SEQ ID NO: 53077 - DNA, 828 bp, Glycine max
  misc_feature (1)..(828): Ceres Seq. ID no. 13637658
gacatcaaggtttgtgaagcatctaagtgagatacacagtagttaggtagcaagcataagtgtctaaccttagaaacatatctgctacatatcgtgtgcattttggaattgtgccactaaaattctattcatctatggctgcctcatcttatgctatgcaatcaatccttgcaaaccctatgatccgcatttccagcgggtctagggagaaccattttggtgttcctgcttatcacatgagaaggaatgttggcctgagagttaggtccatggctgaggaagagcaaccaagtcagcctgcgaccccagttacaccaccaccagcagaacccaaaccacagccagtctctactccttcaccaaaggtgagcaccaagttttctgatgtgttggcgttcagtgggccagcacctgagaggatcaatggaaggttggccatgattgggtttgtgggtgcaatggcagtggaagtagccaaagggcaaggtgtgtttgaacaaatatccaatggtggtatcccatggttcttgggaacaagtgtggtccttacccttgcttccttgattccactcttccaagggatcagcgtggagtctaagtccaaagggttcatgtcctcagatgcagaactgtggaatgggagatttgctatgttgggtttggttgctctggcttttactgagtatgttaagggtggtaccttggtgtaattcagtcatgaatgcacaccaaaatggtcttaagtcattcgtggttagaaagaccaatctctttttgtacttggtgcctttatttaatcagcatataaaattatcatttttttttttc

SEQ ID NO: 53078 - protein, 191 aa, Glycine max
  peptide (1)..(191): Ceres Seq. ID no. 13637659
MAASSYAMQSILANPMIRISSGSRENHFGVPAYHMRRNVGLRVRSMAEEEQPSQPATPVTPPPAEPKPQPVSTPSPKVSTKFSDVLAFSGPAPERINGRLAMIGFVGAMAVEVAKGQGVFEQISNGGIPWFLGTSVVLTLASLIPLFQGISVESKSKGFMSSDAELWNGRFAMLGLVALAFTEYVKGGTLV

SEQ ID NO: 53079 - protein, 184 aa, Glycine max
  peptide (1)..(184): Ceres Seq. ID no. 13637660
MQSILANPMIRISSGSRENHFGVPAYHMRRNVGLRVRSMAEEEQPSQPATPVTPPPAEPKPQPVSTPSPKVSTKFSDVLAFSGPAPERINGRLAMIGFVGAMAVEVAKGQGVFEQISNGGIPWFLGTSVVLTLASLIPLFQGISVESKSKGFMSSDAELWNGRFAMLGLVALAFTEYVKGGTLV

SEQ ID NO: 53080 - protein, 176 aa, Glycine max
  peptide (1)..(176): Ceres Seq. ID no. 13637661
MIRISSGSRENHFGVPAYHMRRNVGLRVRSMAEEEQPSQPATPVTPPPAEPKPQPVSTPSPKVSTKFSDVLAFSGPAPERINGRLAMIGFVGAMAVEVAKGQGVFEQISNGGIPWFLGTSVVLTLASLIPLFQGISVESKSKGFMSSDAELWNGRFAMLGLVALAFTEYVKGGTLV

SEQ ID NO: 53081 - DNA, 991 bp, Glycine max
  misc_feature (1)..(991): Ceres Seq. ID no. 13593910
atccattccatttctttccaacacacacttttctctctctatctctctctctctctctctctggttgtctttcattttgttcattgttgttgatgatgtcacgcgccgccgtgttattacacgcgcaggaggaggaggaggaggaggaggaggagtgtagtacttcgacgtcgtcgtcgatcgggaggaacagcgacgtgtcgtcggagagatcaatggaggaaggagaaaacgaggtggaaagtgcctaccatggacctttgcatgccatggaaactttggaagaggttcttcccatcaggagaggcatctcgaacttttataatggtaagtctaagtcattcacaaccctggctgatgcagtgtcttccccatcagtgaaagacatagcaaagccagagaatgcatacaccagaaggcgtaggaacttgatggcattgaaccatgtcttggacaagaataatagaaactaccctctaagaagcagtggtggtggcatttgcaagagatcaatcagcttgagtagaagttctctagctcttgcagttgccatgaacaactccgacagcagtagtagtatcacaagcgaagattccggttccagctcgaattcgttacactctccctctcctctaccgcctctccatccccgaaatagagtgtcttcttcttccggctcaggtccatcctctcctttgttgcggaatttctctccctggagatcattttccgtggctgatctacagcagcattgtgccattgctgcaacaataaagatttcaagtccctccgttggaaataaaacagctcatccatcatagtaaaaaaaaaaaaaaaacaaagaggataacaaactatatgttattaacttttagcttatttgaatgaatatcttgctctagtcctatttgtttgagggagcaaaaacttgtagaagcaatgcctttacgtacgtacgatcacttcagattaacttccgtaagatatgatg

SEQ ID NO: 53082 - protein, 272 aa, Glycine max
  peptide (1)..(272): Ceres Seq. ID no. 15221252
PFHFFPTHTFLSLSLSLSLSGCLSFCSLLLMMSRAAVLLHAQEEEEEEEEECSTSTSSSIGRNSDVSSERSMEEGENEVESAYHGPLHAMETLEEVLPIRRGISNFYNGKSKSFTTLADAVSSPSVKDIAKPENAYTRRRRNLMALNHVLDKNNRNYPLRSSGGGICKRSISLSRSSLALAVAMNNSDSSSSITSEDSGSSSNSLHSPSPLPPLHPRNRVSSSSGSGPSSPLLRNFSPWRSFSVADLQQHCAIAATIKISSPSVGNKTAHPS

SEQ ID NO: 53083 - protein, 242 aa, Glycine max
  peptide (1)..(242): Ceres Seq. ID no. 15221253
MMSRAAVLLHAQEEEEEEEEECSTSTSSSIGRNSDVSSERSMEEGENEVESAYHGPLHAMETLEEVLPIRRGISNFYNGKSKSFTTLADAVSSPSVKDIAKPENAYTRRRRNLMALNHVLDKNNRNYPLRSSGGGICKRSISLSRSSLALAVAMNNSDSSSSITSEDSGSSSNSLHSPSPLPPLHPRNRVSSSSGSGPSSPLLRNFSPWRSFSVADLQQHCAIAATIKISSPSVGNKTAHPS

SEQ ID NO: 53084 - protein, 241 aa, Glycine max
  peptide (1)..(241): Ceres Seq. ID no. 15221254
MSRAAVLLHAQEEEEEEEEECSTSTSSSIGRNSDVSSERSMEEGENEVESAYHGPLHAMETLEEVLPIRRGISNFYNGKSKSFTTLADAVSSPSVKDIAKPENAYTRRRRNLMALNHVLDKNNRNYPLRSSGGGICKRSISLSRSSLALAVAMNNSDSSSSITSEDSGSSSNSLHSPSPLPPLHPRNRVSSSSGSGPSSPLLRNFSPWRSFSVADLQQHCAIAATIKISSPSVGNKTAHPS

SEQ ID NO: 53085 - DNA, 1380 bp, Glycine max
  misc_feature (1)..(1380): Ceres Seq. ID no. 14316215
gaagatcagaaatgcaaatgtcaagattcacccaattccgagctctactccgcggcaccaccagccaccagcgctcccctctccgccaccccgccgtcgccgattcttcatttgcatcaaaaccctcagtctctaatgcctccgcgttccgcccctcttcgccggtgttccacccgcaacaacgcctcggcaatagcacctttcgattcttctcctccaatttcgacaaaggatttgcgcagaaggtgtttgataagcctgcggcagcagtgacttcggccttttcgcggtaccgcgaggcaattgggttgcaaatcgaggcgttcttcaagaggaatactctgtttctttggggcgccggtggagttgtgctctgcgccgttctatggaggatccttttcgggatcgccaacctcttcgttggactctccgaaggcatggctaagtatggcttccttgccctttcatctgctatcgttgcttttactggcttgtatattcgcacgaggctcacaatcaacccggataaagtttatagaatggccatgacaaaacttaacacgtcagctgggattcttgaagttatgggtgctcctctttctggaactgatttgagagcatatatcatgtcagggggtgggctcactgtaaagaagttcaagccaagtgttagaagccgacggtgttttctaattttccccataagagggtctgagaaaaagggtctagtcagtgttgaagtcaagaaaaagaagggtcagtatgatatgaagctgctggctgttgatgttcccatggcttctggtccagaccagcggttgtttctaattggggatgaagaagagtacagggtcggtggggggctaatatctgatcttagagacccagtagtgagagcaatggcagcaaccaaggaatttgatgatcttgatgagattgaggaagaggaagatgctgaaagagaacgtcaagagactgaaagaaaggagcgtgaagagattgaaaagctggaaaagagtagtggcacctagtggataggctttcgagatgtttctcttgtgatttattctcttgttgattacaggaggttgatgttgtttaaacacaatttattttgtatcagtttcgagttttccctagatttagaaacccttgtaccacaaatggccaagtttatctgaaaataaagctgacagggatcaacgtgcattggaatggactcggcgtttgttggtttcgatgttgccttgtctcaagtggattatccttgtctacgatatagttactatctgccacggttgtatgtcatttcagggacctaaattttgacccacctgcccccttccccttccccttgaatggaaagttgtttctagtatt

SEQ ID NO: 53086 - protein, 342 aa, Glycine max
  peptide (1)..(342): Ceres Seq. ID no. 14316216
RSEMQMSRFTQFRALLRGTTSHQRSPLRHPAVADSSFASKPSVSNASAFRPSSPVFHPQQRLGNSTFRFFSSNFDKGFAQKVFDKPAAAVTSAFSRYREAIGLQIEAFFKRNTLFLWGAGGVVLCAVLWRILFGIANLFVGLSEGMAKYGFLALSSAIVAFTGLYIRTRLTINPDKVYRMAMTKLNTSAGILEVMGAPLSGTDLRAYIMSGGGLTVKKFKPSVRSRRCFLIFPIRGSEKKGLVSVEVKKKKGQYDMKLLAVDVPMASGPDQRLFLIGDEEEYRVGGGLISDLRDPVVRAMAATKEFDDLDEIEEEEDAERERQETERKEREEIEKLEKSSGT

SEQ ID NO: 53087 - protein, 339 aa, Glycine max
  peptide (1)..(339): Ceres Seq. ID no. 14316217
MQMSRFTQFRALLRGTTSHQRSPLRHPAVADSSFASKPSVSNASAFRPSSPVFHPQQRLGNSTFRFFSSNFDKGFAQKVFDKPAAAVTSAFSRYREAIGLQIEAFFKRNTLFLWGAGGVVLCAVLWRILFGIANLFVGLSEGMAKYGFLALSSAIVAFTGLYIRTRLTINPDKVYRMAMTKLNTSAGILEVMGAPLSGTDLRAYIMSGGGLTVKKFKPSVRSRRCFLIFPIRGSEKKGLVSVEVKKKKGQYDMKLLAVDVPMASGPDQRLFLIGDEEEYRVGGGLISDLRDPVVRAMAATKEFDDLDEIEEEEDAERERQETERKEREEIEKLEKSSGT

SEQ ID NO: 53088 - protein, 337 aa, Glycine max
  peptide (1)..(337): Ceres Seq. ID no. 14316218
MSRFTQFRALLRGTTSHQRSPLRHPAVADSSFASKPSVSNASAFRPSSPVFHPQQRLGNSTFRFFSSNFDKGFAQKVFDKPAAAVTSAFSRYREAIGLQIEAFFKRNTLFLWGAGGVVLCAVLWRILFGIANLFVGLSEGMAKYGFLALSSAIVAFTGLYIRTRLTINPDKVYRMAMTKLNTSAGILEVMGAPLSGTDLRAYIMSGGGLTVKKFKPSVRSRRCFLIFPIRGSEKKGLVSVEVKKKKGQYDMKLLAVDVPMASGPDQRLFLIGDEEEYRVGGGLISDLRDPVVRAMAATKEFDDLDEIEEEEDAERERQETERKEREEIEKLEKSSGT

SEQ ID NO: 53089 - DNA, 1363 bp, Glycine max
  misc_feature (1)..(1363): Ceres Seq. ID no. 14304724
tcagatatgtaggccccccccccggtgatgaagaaaagttctggtacctcccagaaacttggttcatttctaagtccaggggcaccaaactatagagagaaaagcattgggagccaaaaggggtggagctcagagagggtgttgctgcagccatcatcaaacagcataaggaatgctagtgtggctaacttgacacccttcaacagtggaagaacaataccttcaaaatgggatgatgctgagaggtggatttgtagccccgtttcaggctatgccaacaacaaaaccaattcctatacacaacttcagcagcggcgaccaaaatcgaaaagtggtccaattatgcctccaggaacaggctactactccaattactcacccacaattccactgagccaaggtttggtagtgaagaacttcatgatgggtggttctcccttttcaactggggtgttggcaccggatgctatctctcttcaccattattatgcacatgaggctgtttttggtacccgttatgactttgacaatagtatgcaatgcttcagtccattcctcaatgaaaatagtgtagctctcccatcagtgtctagtgcacccatgtggtcagaactgctatgtgacccttcgcctaattctcaagacgagaaacgaaacgaaattaagaatgaggacaccgtgacatctcctctctcaaaatgtgacaaaggcactcaaatgagccctcctgagcctgagaatgatgcacccacttcgacaatggatcaacaaaataacctttctgcaaagttagaggtcagagatgtagagatagacagcgaggctagtattattaggtggtctaagagccatgtacccaagctgagcttgctacctggtaaacactcaagaaaaattagtagaacggaaaccaaagcttcaggtttggataatgcagagtcgacgttggactcatccaagattcagagggaggaagccaaaatcgttgcatgggagagtttgcagaaagccaaggctgaagctgaaatacgaaaactagagatgaaattagaaaagaagaaatcgtcatcaatggataagattcaaagcaaactgagaagggcgcagatggaggctgaaaagatgagaaaccaaataactgtagaagaggagggtcagcaggtttccaagactcgaaaagtattttcattccacaaatatgcccagatatggtttccaaggagctgcttcggcactcatgctctccatgattaattcattatttaatatttaatcccatatctgaaatcactaaggtttagtcccgataaacgcatcgataatcatatttcaagtcataggtcatttttattttttatttttg

SEQ ID NO: 53090 - protein, 408 aa, Glycine max
  peptide (1)..(408): Ceres Seq. ID no. 14304725
MKKSSGTSQKLGSFLSPGAPNYREKSIGSQKGWSSERVLLQPSSNSIRNASVANLTPFNSGRTIPSKWDDAERWICSPVSGYANNKTNSYTQLQQRRPKSKSGPIMPPGTGYYSNYSPTIPLSQGLVVKNFMMGGSPFSTGVLAPDAISLHHYYAHEAVFGTRYDFDNSMQCFSPFLNENSVALPSVSSAPMWSELLCDPSPNSQDEKRNEIKNEDTVTSPLSKCDKGTQMSPPEPENDAPTSTMDQQNNLSAKLEVRDVEIDSEASIIRWSKSHVPKLSLLPGKHSRKISRTETKASGLDNAESTLDSSKIQREEAKIVAWESLQKAKAEAEIRKLEMKLEKKKSSSMDKIQSKLRRAQMEAEKMRNQITVEEEGQQVSKTRKVFSFHKYAQIWFPRSCFGTHALHD

SEQ ID NO: 53091 - protein, 303 aa, Glycine max
  peptide (1)..(303): Ceres Seq. ID no. 14304726
MPPGTGYYSNYSPTIPLSQGLVVKNFMMGGSPFSTGVLAPDAISLHHYYAHEAVFGTRYDFDNSMQCFSPFLNENSVALPSVSSAPMWSELLCDPSPNSQDEKRNEIKNEDTVTSPLSKCDKGTQMSPPEPENDAPTSTMDQQNNLSAKLEVRDVEIDSEASIIRWSKSHVPKLSLLPGKHSRKISRTETKASGLDNAESTLDSSKIQREEAKIVAWESLQKAKAEAEIRKLEMKLEKKKSSSMDKIQSKLRRAQMEAEKMRNQITVEEEGQQVSKTRKVFSFHKYAQIWFPRSCFGTHALHD

SEQ ID NO: 53092 - protein, 277 aa, Glycine max
  peptide (1)..(277): Ceres Seq. ID no. 14304727
MMGGSPFSTGVLAPDAISLHHYYAHEAVFGTRYDFDNSMQCFSPFLNENSVALPSVSSAPMWSELLCDPSPNSQDEKRNEIKNEDTVTSPLSKCDKGTQMSPPEPENDAPTSTMDQQNNLSAKLEVRDVEIDSEASIIRWSKSHVPKLSLLPGKHSRKISRTETKASGLDNAESTLDSSKIQREEAKIVAWESLQKAKAEAEIRKLEMKLEKKKSSSMDKIQSKLRRAQMEAEKMRNQITVEEEGQQVSKTRKVFSFHKYAQIWFPRSCFGTHALHD

SEQ ID NO: 53093 - DNA, 1302 bp, Glycine max
  misc_feature (1)..(1302): Ceres Seq. ID no. 13637592
cccccccccacatacacatggaggaagcaatgaggcgtctcaacggggtagctccgattatcggacccgactcgaaaggcgacggtggactcatcgccaataacccgaaacggacctcggccgtgaacaagagggctttaagagaagacggcggcggtggtggcggcggcggagcgatgaggtaccgcggcgtgaggcgcaggccgtgggggcgttacgcggcggagataagggaccctcaatcgaaggagcggcgatggctgggaaccttcgacacggcggaggaagccgcttgcgcctacgactgcgctgctagagccatgaggggtctcaaagctcgcaccaacttcgtttacccaacttctccgcaaccttcttccgccaccaccgaacacttgttccctaacttcaacaacaacaacaactttcacaaacactcactcttcaatcaccaccgtaaccgccacataaccggttccaacacttgttttgaccaacctcactccgttgacttttcagcccctcgaaacccttcttctctcaacatgcttctctttcgtgaccttattcactctaacccttctttgctttcttcttcttccactcagaacttccacgaccagttttacaacaagagtacttctactttttcatcgttacctgtttctccttctcttgctccccctagttattcgatgaataattcttgtggaggaggctctttgtctgttaagatgaacacgtttcccacttgtggaactaattttgctgaaaaaggtgatgatggtgatggttttttctctcgtgagtcttcggattcggggttgttggaggagatagttaacaagttcttgcctagaacgaagcctagtaaatgcgagactacttttgcaaatcctcaggaggagtcgcttcttctccctccgcttgtttctgaatcaacgcttgtttccaccgggcaacaatactatgatgatgacatgaaaaaagggtttccaaagaacgggggtctaggtgttttttattctgatcaaggttttcccatgcagcaattcgacacctctaatgggtttaatagcatggctatggagaatgatcaaaacattattaataatgcagagaactgtgtcgttgaagatgtttttcagtaccaagagcttcttaatgctttcgcaatcagaatgcaaaatgcttaattagttaacatttccagtgtctgcatctcaatgctagttgtgtatgtagtcatgttgaatctgtcacttctcaatgttggtctggcctttcaattagaaacttatt

SEQ ID NO: 53094 - protein, 397 aa, Glycine max
  peptide (1)..(397): Ceres Seq. ID no. 13637593
PPHIHMEEAMRRLNGVAPIIGPDSKGDGGLIANNPKRTSAVNKRALREDGGGGGGGGAMRYRGVRRRPWGRYAAEIRDPQSKERRWLGTFDTAEEAACAYDCAARAMRGLKARTNFVYPTSPQPSSATTEHLFPNFNNNNNFHKHSLFNHHRNRHITGSNTCFDQPHSVDFSAPRNPSSLNMLLFRDLIHSNPSLLSSSSTQNFHDQFYNKSTSTFSSLPVSPSLAPPSYSMNNSCGGGSLSVKMNTFPTCGTNFAEKGDDGDGFFSRESSDSGLLEEIVNKFLPRTKPSKCETTFANPQEESLLLPPLVSESTLVSTGQQYYDDDMKKGFPKNGGLGVFYSDQGFPMQQFDTSNGFNSMAMENDQNIINNAENCVVEDVFQYQELLNAFAIRMQNA

SEQ ID NO: 53095 - protein, 392 aa, Glycine max
  peptide (1)..(392): Ceres Seq. ID no. 13637594
MEEAMRRLNGVAPIIGPDSKGDGGLIANNPKRTSAVNKRALREDGGGGGGGGAMRYRGVRRRPWGRYAAEIRDPQSKERRWLGTFDTAEEAACAYDCAARAMRGLKARTNFVYPTSPQPSSATTEHLFPNFNNNNNFHKHSLFNHHRNRHITGSNTCFDQPHSVDFSAPRNPSSLNMLLFRDLIHSNPSLLSSSSTQNFHDQFYNKSTSTFSSLPVSPSLAPPSYSMNNSCGGGSLSVKMNTFPTCGTNFAEKGDDGDGFFSRESSDSGLLEEIVNKFLPRTKPSKCETTFANPQEESLLLPPLVSESTLVSTGQQYYDDDMKKGFPKNGGLGVFYSDQGFPMQQFDTSNGFNSMAMENDQNIINNAENCVVEDVFQYQELLNAFAIRMQNA

SEQ ID NO: 53096 - protein, 388 aa, Glycine max
  peptide (1)..(388): Ceres Seq. ID no. 13637595
MRRLNGVAPIIGPDSKGDGGLIANNPKRTSAVNKRALREDGGGGGGGGAMRYRGVRRRPWGRYAAEIRDPQSKERRWLGTFDTAEEAACAYDCAARAMRGLKARTNFVYPTSPQPSSATTEHLFPNFNNNNNFHKHSLFNHHRNRHITGSNTCFDQPHSVDFSAPRNPSSLNMLLFRDLIHSNPSLLSSSSTQNFHDQFYNKSTSTFSSLPVSPSLAPPSYSMNNSCGGGSLSVKMNTFPTCGTNFAEKGDDGDGFFSRESSDSGLLEEIVNKFLPRTKPSKCETTFANPQEESLLLPPLVSESTLVSTGQQYYDDDMKKGFPKNGGLGVFYSDQGFPMQQFDTSNGFNSMAMENDQNIINNAENCVVEDVFQYQELLNAFAIRMQNA

SEQ ID NO: 53097 - DNA, 1965 bp, Glycine max
  misc_feature (1)..(1965): Ceres Seq. ID no. 14304811
ggagtcaaatattcctcaaaacaacgcattcctttcactgccccttcccaattcccttccctgattgtcaattggatcttcatgagttcaacaaccactggagcatacttcgtttcctgtgttgcgggaaacaagaacaacgacctcttctgctgggttttgctctgcttgctgccaaaatttttgggaactccatttgcctacatcaactttctcttgattcaggccattgacaggaatccatcggcggtggaggttttgggaaacttcggggtggttaacctatagtctttattagtttggtcgtcagcagcagcatatttagatcccttattgttgagtggtgtgagaaatggtgtcctctcagttttctgcttttactttggctggctacaaaccgtctcagactcagttactctttcctgcaaagcttgttgatactgtgaacacagagcatattgagctggatttctctgatgtctttggtcctgttacgttagatttgaataacattgattccactaccagtgagcctatggaagaagtgaacgagctggtttatgatgacccaccagtgatttacactcgctcacattctctggttggcccttcaacttgtgttagtcaatcacttaagcttggcaaactcaccatacatgagactgaggattcattggaactagtggagcatgtcaatggagaggccattaaagacatcaaagaatcttcctttgttgaggaatcattgaaagatgaagatgggaatctcatgaagatccacagagttagcattgacgatttcgagattttgaaggttgttgggcagggtgcatttgcaaaagtttatcaggtgaggaaaaagggtacttctgaaatatatgctatgaaggttatgcggaaggacaagattatggagaagaaccatgctgaatacatgaaagctgagagggatatttggacaaagatagaacacccatttgttgttcaactcagatactcttttcagacaaaatacagactgtatcttgtgctggattttgtaaatgggggccatctctttttccagctttatcaccaaggccttttcagagaggatctagcacgcatatatacagctgagattgtttctgcagtttcccatctccatgcaaatggaataatgcatagggatctaaagcctgaaaatatcctactggatgctgatggccatgttatgttgactgattttggcttagctaaacaatttgaagagagtacaagatcaaattcgatgtgtggtacattagagtacatggcacctgaaattattcttggcaaaggccatgataaggctgctgattggtggagtgtaggtgttctactgtttgagatgcttactggaaagccgcctttctgtggtggaaaccgtgacaaaattcagcagaagatagttaaagacaagattaagctgccagcatttttgtcaagtgaagcacattcactgttgaaagggctgctacagaaggaacaagctaggcgcttaggttgtggacctcggggtgttgaggaaattaaaagccacaagtggtttaaaccaatcaattggagaaagttggaagcaagagaaatccaaccaagctttaggccagaagtagctggtgtgcactgtgttgccaactttgagaagcgctggactgatatgcctgttgtggactcaccagctgccagcccaaatggtggaaacccctttaaggatttctcttatgtgaggcctgcagcctcttttcttcaaaggaataaccctgcttactagccagcttgaaatggcgttggcttaagatgccaacatgaaacattttcatgtgcccttgacttgtgtgaactttgcaggttgtgggttcattcacttattatgtgcaccttgctgcggctctctgcaaatgtattgagctgtcatgtatgcagaaaataaattactttatttac

SEQ ID NO: 53098 - protein, 479 aa, Glycine max
  peptide (1)..(479): Ceres Seq. ID no. 14304812
MVSSQFSAFTLAGYKPSQTQLLFPAKLVDTVNTEHIELDFSDVFGPVTLDLNNIDSTTSEPMEEVNELVYDDPPVIYTRSHSLVGPSTCVSQSLKLGKLTIHETEDSLELVEHVNGEAIKDIKESSFVEESLKDEDGNLMKIHRVSIDDFEILKVVGQGAFAKVYQVRKKGTSEIYAMKVMRKDKIMEKNHAEYMKAERDIWTKIEHPFVVQLRYSFQTKYRLYLVLDFVNGGHLFFQLYHQGLFREDLARIYTAEIVSAVSHLHANGIMHRDLKPENILLDADGHVMLTDFGLAKQFEESTRSNSMCGTLEYMAPEIILGKGHDKAADWWSVGVLLFEMLTGKPPFCGGNRDKIQQKIVKDKIKLPAFLSSEAHSLLKGLLQKEQARRLGCGPRGVEEIKSHKWFKPINWRKLEAREIQPSFRPEVAGVHCVANFEKRWTDMPVVDSPAASPNGGNPFKDFSYVRPAASFLQRNNPAY

SEQ ID NO: 53099 - protein, 418 aa, Glycine max
  peptide (1)..(418): Ceres Seq. ID no. 14304813
MEEVNELVYDDPPVIYTRSHSLVGPSTCVSQSLKLGKLTIHETEDSLELVEHVNGEAIKDIKESSFVEESLKDEDGNLMKIHRVSIDDFEILKVVGQGAFAKVYQVRKKGTSEIYAMKVMRKDKIMEKNHAEYMKAERDIWTKIEHPFVVQLRYSFQTKYRLYLVLDFVNGGHLFFQLYHQGLFREDLARIYTAEIVSAVSHLHANGIMHRDLKPENILLDADGHVMLTDFGLAKQFEESTRSNSMCGTLEYMAPEIILGKGHDKAADWWSVGVLLFEMLTGKPPFCGGNRDKIQQKIVKDKIKLPAFLSSEAHSLLKGLLQKEQARRLGCGPRGVEEIKSHKWFKPINWRKLEAREIQPSFRPEVAGVHCVANFEKRWTDMPVVDSPAASPNGGNPFKDFSYVRPAASFLQRNNPAY

SEQ ID NO: 53100 - protein, 340 aa, Glycine max
  peptide (1)..(340): Ceres Seq. ID no. 14304814
MKIHRVSIDDFEILKVVGQGAFAKVYQVRKKGTSEIYAMKVMRKDKIMEKNHAEYMKAERDIWTKIEHPFVVQLRYSFQTKYRLYLVLDFVNGGHLFFQLYHQGLFREDLARIYTAEIVSAVSHLHANGIMHRDLKPENILLDADGHVMLTDFGLAKQFEESTRSNSMCGTLEYMAPEIILGKGHDKAADWWSVGVLLFEMLTGKPPFCGGNRDKIQQKIVKDKIKLPAFLSSEAHSLLKGLLQKEQARRLGCGPRGVEEIKSHKWFKPINWRKLEAREIQPSFRPEVAGVHCVANFEKRWTDMPVVDSPAASPNGGNPFKDFSYVRPAASFLQRNNPAY

SEQ ID NO: 53101 - DNA, 1263 bp, Glycine max
  misc_feature (1)..(1263): Ceres Seq. ID no. 13637600
accgggccccccctcgagtcagctacgtaggccccccccccttttaagtaaacctcattagactagtatttggtaaatcaaaattttcctaatctcttgtctgtaattgatttggccagcaacaacacctgaacattgatataaatgctttggtaacaaagttggaaaagctggagaaggaagtgatcttccagaaggggaacaaatttgatccatccaagaaattgaatgtgatgaagatagaaatggccaaacttgagtggtacaagaagtattccaaaaataataagattggctactatgacagcttcaagaggggtatctcaacaagcgacctagatgttgttcagtgccagaaaaccctcagaaattactggattgacatggttgcagaggcagagctgaaacctcagacagaaggtgcagcttttcgtactcgctggctttttggcggaactaattacaggagaatgtttgaacccctagatattgctgagtactacgcgaatggtggtaaagactatgaggctaagggaagatctagacattatatagtgttgcaggagtggctggaagaggataagaaagaaaaaagcaattcaaacagtacaaacaaaaaggatgtggaatctattttaacttttgactcttgcttttgggcacatgttgaagaagctatcctttcatgcaaagtgttgaaggatgaacaatctagtgtgacagagaaggaagaggaaactgggaagttgcttgaattcgagaagtatgtttatgggttgctcacgaaatatgaagtgtcatcagagattttcctaaggcaaagcagctacatgatttggtggaatcagtataaggcaattaagggaacttcttataattcagcactcgcagacttcatgagcaatcccgatcattataatgtgctgtatattaagggaacttataatttcccccctcaggcttagtgattagtgaacgtccgtgtggttgaacagtgtaaaataaattgtggttttatctcactgtgcaccttttaataagctttttttatattttcccttgttgatttttgttaaggatcttggttttaccctcccttgtgttgtggtattggaaactcatgcaattgtcttgacttgtgatattggaaactcttgcaattgtcttaccttgcaaaccttcactcattattcttgaaaatttaagttgagagcaatggatgcaggctagtttgtattaatgtaatctgaaaggctcgctgtg

SEQ ID NO: 53102 - protein, 243 aa, Glycine max
  peptide (1)..(243): Ceres Seq. ID no. 13637601
MKIEMAKLEWYKKYSKNNKIGYYDSFKRGISTSDLDVVQCQKTLRNYWIDMVAEAELKPQTEGAAFRTRWLFGGTNYRRMFEPLDIAEYYANGGKDYEAKGRSRHYIVLQEWLEEDKKEKSNSNSTNKKDVESILTFDSCFWAHVEEAILSCKVLKDEQSSVTEKEEETGKLLEFEKYVYGLLTKYEVSSEIFLRQSSYMIWWNQYKAIKGTSYNSALADFMSNPDHYNVLYIKGTYNFPPQA

SEQ ID NO: 53103 - protein, 239 aa, Glycine max
  peptide (1)..(239): Ceres Seq. ID no. 13637602
MAKLEWYKKYSKNNKIGYYDSFKRGISTSDLDVVQCQKTLRNYWIDMVAEAELKPQTEGAAFRTRWLFGGTNYRRMFEPLDIAEYYANGGKDYEAKGRSRHYIVLQEWLEEDKKEKSNSNSTNKKDVESILTFDSCFWAHVEEAILSCKVLKDEQSSVTEKEEETGKLLEFEKYVYGLLTKYEVSSEIFLRQSSYMIWWNQYKAIKGTSYNSALADFMSNPDHYNVLYIKGTYNFPPQA

SEQ ID NO: 53104 - protein, 193 aa, Glycine max
  peptide (1)..(193): Ceres Seq. ID no. 13637603
MVAEAELKPQTEGAAFRTRWLFGGTNYRRMFEPLDIAEYYANGGKDYEAKGRSRHYIVLQEWLEEDKKEKSNSNSTNKKDVESILTFDSCFWAHVEEAILSCKVLKDEQSSVTEKEEETGKLLEFEKYVYGLLTKYEVSSEIFLRQSSYMIWWNQYKAIKGTSYNSALADFMSNPDHYNVLYIKGTYNFPPQA

SEQ ID NO: 53105 - DNA, 1150 bp, Glycine max
  misc_feature (1)..(1150): Ceres Seq. ID no. 14301403
aacaatttattagaaacatccaactttaaacatatttgtgattcactcttgcagtgtgttttcaataggaaaagttagcttttgagtttcttacagcattcaattatattgaaatttatagattgccatgctaacctgttcaagtccactattctacagtgcaaagccaggattttttcatgaggaaaatcgtgccaccctatttgaggttgtgcctgagactggaatgctactcaatacagataatggctctcctataccccaggtgggtaatacctcagcaaggctattcacagaagcaaagaatcatgcttgtccagttttccagggaggcaatgtttctcatctgcataaactgctttccattgaatcaagttcacaggttctctatgttggggatcacatttatggagatatactacgcagcaaaaaggttcttggatggagaacaatgcttgtaatcccagagctggagaaggaggttaaactactctgggaatctagggatacccgcaaggaacttcaattcttgaggagtgagcgtgactgcattgaggatgaaatacatcatttgaaatggtctctcaaattcaagaatccagatgctgattccaagcagaagttatcttctgaacttgataaattaaagcttgaaagagagagagtgcgattaagtcatcaagaagctcagaaaaaattacatcaaaggtttcacgagccatggggacagcttatgaaaactggttatcagaattctcgctttgctcatcaggttgagagatttgcttgcctttatactagtcaagtatctaacctgggcttatactctccagacaagtattacagacctagtgaagatttcatgcaacatgaatttggcattatggcttgtgagacgccagacatttaagttgaggaatttggggtagtttggatttggaaaccgaattgccgaattctgctctgcccagtgttcagtgttcctggttctcatctcccttctctgttttgttggctttggacagagctccgtttagtaattgatctctccccctcccccccaaagaaaagaaaaagaaaaaattgctatatagtattatttttaacgtttgctacagtgggtaaaaaatactagattttagcgttgtat

SEQ ID NO: 53106 - protein, 260 aa, Glycine max
  peptide (1)..(260): Ceres Seq. ID no. 14301404
MLTCSSPLFYSAKPGFFHEENRATLFEVVPETGMLLNTDNGSPIPQVGNTSARLFTEAKNHACPVFQGGNVSHLHKLLSIESSSQVLYVGDHIYGDILRSKKVLGWRTMLVIPELEKEVKLLWESRDTRKELQFLRSERDCIEDEIHHLKWSLKFKNPDADSKQKLSSELDKLKLERERVRLSHQEAQKKLHQRFHEPWGQLMKTGYQNSRFAHQVERFACLYTSQVSNLGLYSPDKYYRPSEDFMQHEFGIMACETPDI

SEQ ID NO: 53107 - protein, 227 aa, Glycine max
  peptide (1)..(227): Ceres Seq. ID no. 14301405
MLLNTDNGSPIPQVGNTSARLFTEAKNHACPVFQGGNVSHLHKLLSIESSSQVLYVGDHIYGDILRSKKVLGWRTMLVIPELEKEVKLLWESRDTRKELQFLRSERDCIEDEIHHLKWSLKFKNPDADSKQKLSSELDKLKLERERVRLSHQEAQKKLHQRFHEPWGQLMKTGYQNSRFAHQVERFACLYTSQVSNLGLYSPDKYYRPSEDFMQHEFGIMACETPDI

SEQ ID NO: 53108 - protein, 152 aa, Glycine max
  peptide (1)..(152): Ceres Seq. ID no. 14301406
MLVIPELEKEVKLLWESRDTRKELQFLRSERDCIEDEIHHLKWSLKFKNPDADSKQKLSSELDKLKLERERVRLSHQEAQKKLHQRFHEPWGQLMKTGYQNSRFAHQVERFACLYTSQVSNLGLYSPDKYYRPSEDFMQHEFGIMACETPDI

SEQ ID NO: 53109 - DNA, 1219 bp, Glycine max
  misc_feature (1)..(1219): Ceres Seq. ID no. 14315662
tttcaaactcactacttcgcggccttcccaattctcagctcctcctcgttactcatgctctgtaaaaaagataaaagcttccggaagtcagcaaacaggatccatacgacatggagacaaccttgatgcaacgaagagcaggagtttgctggagaagtttcagaggaaaatgccaatggaattccttagcacccttttcaacaaacaatctatgttgagtgactttacaaccaaagatattgtagatggggaaagatcatccaaatgggtttcagcattcctctttggacaaactatatcagtgatttctcctgatgtttcatatgcaagcagctcagcaagaataaatgagatatatgaggttggagagttgtttgatttaagcatccaactaatatacttggtattgctattaggtttgctagggactggaactttctttgtgattcgtcaagttcttgtccgcagagaacttgacctatctgccaaagagttgcaggagcaagtaagaagtggtgatgctggtgcaactgagctttttgaacttggtgcagtgatgctgcgcaggaaattttaccctgctgctaccaagttcttgcttcaagcaattgagaaatgggatggggataatccggatcttgcccaggtttacaacgctcttggtgtgagctatgtccgcgatgggaaagttgacaaaggaattgctcagtttgagacagctgtcaagcttcaaccaggccatgtcacagcttggaacaatctcggtgatgcctttgagagtaaaaaggactacaagtctgctctaaaggcatttgaagaagtcctactatttgatcctaacaacaaggttgcccggcctaggagagattctttgaagggacttgttgatgcaaccaaaggagttactgtcatcaagtcaacagagaagaagtgagtgtcattgtatcaactcactatgaatatggcattgttaaatacatagttttcaataacttggttgtgttggaaggaattttggctctattggtgtagttactgcttactagctgaggcatactagtgctgcgaaatgtagttgaaattgaaacttgaaagtgctcgattctccaatgggttaccaaagctttgctctggtgctgatggtgtattcacttgtgaaaattcctttatttttttaaatggtcattttcgtgccttgttaaaaaaaaaaaaaaaaaat

SEQ ID NO: 53110 - protein, 310 aa, Glycine max
  peptide (1)..(310): Ceres Seq. ID no. 14315663
FKLTTSRPSQFSAPPRYSCSVKKIKASGSQQTGSIRHGDNLDATKSRSLLEKFQRKMPMEFLSTLFNKQSMLSDFTTKDIVDGERSSKWVSAFLFGQTISVISPDVSYASSSARINEIYEVGELFDLSIQLIYLVLLLGLLGTGTFFVIRQVLVRRELDLSAKELQEQVRSGDAGATELFELGAVMLRRKFYPAATKFLLQAIEKWDGDNPDLAQVYNALGVSYVRDGKVDKGIAQFETAVKLQPGHVTAWNNLGDAFESKKDYKSALKAFEEVLLFDPNNKVARPRRDSLKGLVDATKGVTVIKSTEKK

SEQ ID NO: 53111 - protein, 254 aa, Glycine max
  peptide (1)..(254): Ceres Seq. ID no. 14315664
MPMEFLSTLFNKQSMLSDFTTKDIVDGERSSKWVSAFLFGQTISVISPDVSYASSSARINEIYEVGELFDLSIQLIYLVLLLGLLGTGTFFVIRQVLVRRELDLSAKELQEQVRSGDAGATELFELGAVMLRRKFYPAATKFLLQAIEKWDGDNPDLAQVYNALGVSYVRDGKVDKGIAQFETAVKLQPGHVTAWNNLGDAFESKKDYKSALKAFEEVLLFDPNNKVARPRRDSLKGLVDATKGVTVIKSTEKK

SEQ ID NO: 53112 - protein, 252 aa, Glycine max
  peptide (1)..(252): Ceres Seq. ID no. 14315665
MEFLSTLFNKQSMLSDFTTKDIVDGERSSKWVSAFLFGQTISVISPDVSYASSSARINEIYEVGELFDLSIQLIYLVLLLGLLGTGTFFVIRQVLVRRELDLSAKELQEQVRSGDAGATELFELGAVMLRRKFYPAATKFLLQAIEKWDGDNPDLAQVYNALGVSYVRDGKVDKGIAQFETAVKLQPGHVTAWNNLGDAFESKKDYKSALKAFEEVLLFDPNNKVARPRRDSLKGLVDATKGVTVIKSTEKK

SEQ ID NO: 53113 - DNA, 1245 bp, Glycine max
  misc_feature (1)..(1245): Ceres Seq. ID no. 14310701
gaacaacaccaaaaaaaatggcacttgtgagccacgtttgtgtgagatgtgtagccacacccacttccccagagtccccaaattcggcacccttgccagacccaaggcaaaccaaggttctccttccgaagaagaagcctcagaaatggtccaccggggtggctcccggggagtacggtggccctcccaccaccaccaaactccgcaaatactggggcggcgatgacgaagaccctttggcctctgatgactatatgtggaacaaggagtttatgggtcgcttccaaaagttgattgaggaacccaatgctcaaccccctcctgcaaaggaagagccttcagggtttctaagcttaaatagagtcatgagcctggacagtttggaagttgatttgagcaaagaactcgcagctcctgtaaatcataatgcacacctgcaaattgatgcagaaactaatgtgacaggaagcaatagggtaagatataaatcagcaccaacacgtcgtgagcaagaaaaatgggatagagctaccaaggccgcaactggaggcagtgatgtgatgttccgggaaataaggcagtctcgtgaagatccaaaagttttggctgctcaagctgaggagcagtataataagttaaagaggaagttgcaaatctttaccttgggtataggtggtgttggtctggtttcagcttatgtttcttattcccctgagattgcagctagctttggtgctggctttcttggttctttggcgtatattcgtatgctgggaagtagcgtggactcgctaaggactgatggtgcaaagggatttgtcaagggagcaattgggcagccaagattactggttcctgttgttttggtcatggtctataaccgctggaatgcgattctggttccagaatttggatctatgcacttagaattgataccaatgctagtaggttttttcacatacaagattgcaacttttgctcaagctatagaggaggcaattactgtagctacaagaaagacctgaagaatattaggggtggagggggaggatgccatgtcattatatttgggtttttctctcccacatattgaacatataattgtatttatgtttttccatatttggattattgattataatatccagatatttggtcttaagtcttctctcccacaataagcacatatcgacttcatttttttcatatttacgatcagtgatatcaagggacacaattaaattc

SEQ ID NO: 53114 - protein, 340 aa, Glycine max
  peptide (1)..(340): Ceres Seq. ID no. 14310702
TTPKKMALVSHVCVRCVATPTSPESPNSAPLPDPRQTKVLLPKKKPQKWSTGVAPGEYGGPPTTTKLRKYWGGDDEDPLASDDYMWNKEFMGRFQKLIEEPNAQPPPAKEEPSGFLSLNRVMSLDSLEVDLSKELAAPVNHNAHLQIDAETNVTGSNRVRYKSAPTRREQEKWDRATKAATGGSDVMFREIRQSREDPKVLAAQAEEQYNKLKRKLQIFTLGIGGVGLVSAYVSYSPEIAASFGAGFLGSLAYIRMLGSSVDSLRTDGAKGFVKGAIGQPRLLVPVVLVMVYNRWNAILVPEFGSMHLELIPMLVGFFTYKIATFAQAIEEAITVATRKT

SEQ ID NO: 53115 - protein, 335 aa, Glycine max
  peptide (1)..(335): Ceres Seq. ID no. 14310703
MALVSHVCVRCVATPTSPESPNSAPLPDPRQTKVLLPKKKPQKWSTGVAPGEYGGPPTTTKLRKYWGGDDEDPLASDDYMWNKEFMGRFQKLIEEPNAQPPPAKEEPSGFLSLNRVMSLDSLEVDLSKELAAPVNHNAHLQIDAETNVTGSNRVRYKSAPTRREQEKWDRATKAATGGSDVMFREIRQSREDPKVLAAQAEEQYNKLKRKLQIFTLGIGGVGLVSAYVSYSPEIAASFGAGFLGSLAYIRMLGSSVDSLRTDGAKGFVKGAIGQPRLLVPVVLVMVYNRWNAILVPEFGSMHLELIPMLVGFFTYKIATFAQAIEEAITVATRKT

SEQ ID NO: 53116 - protein, 256 aa, Glycine max
  peptide (1)..(256): Ceres Seq. ID no. 14310704
MWNKEFMGRFQKLIEEPNAQPPPAKEEPSGFLSLNRVMSLDSLEVDLSKELAAPVNHNAHLQIDAETNVTGSNRVRYKSAPTRREQEKWDRATKAATGGSDVMFREIRQSREDPKVLAAQAEEQYNKLKRKLQIFTLGIGGVGLVSAYVSYSPEIAASFGAGFLGSLAYIRMLGSSVDSLRTDGAKGFVKGAIGQPRLLVPVVLVMVYNRWNAILVPEFGSMHLELIPMLVGFFTYKIATFAQAIEEAITVATRKT

SEQ ID NO: 53117 - DNA, 1559 bp, Glycine max
  misc_feature (1)..(1559): Ceres Seq. ID no. 14306538
agaaatagagagtaagcctgagatcatggaaaaagttggtgtggctgtaaatagcaaaaatcaagaatccaaagcaacttccaccattaccattaagggtttcatgagccttctaatgaaaagtgtagatgagaatggtgatggtagcaagagagttatttctctgggtatgggtgacccaactctcaccacttattttcccatctcaaatgtagctgaaaaagctgttgctgaagcacttcagtcacacaggtttcgtgactatgctcccactgcaggtcttccacaggccaggattgcaattgctgaatacctgtctcgtgaccttccttaccaattatcaagtgatgatgtttacatcacttgtggatgcacacaagccattgatgtttcagtggcgatgcttgctcgccccggtgcaaacatcattcttccaagaccaggtttcccactctatgaacttagcgcttcatttagaggagttgaagtgaggcattatgatctgcttccagagaaaggttgggaggttgatctagatgctgttgaagctcttgctgatcagaacactgttgctttggtgattataaatcctgggaatccttgtgggaatgtgtacagttaccatcatttggagaagattgctgaaactgcaaaacgggttggaacaattgtgattgctgatgaagtttatggccatcttgcatttgcgggcaagccttttgtgccaatgggagtttttggctctattgttcctgttctgactcttggctcattttctaagagatggatagttcctggatggaggcttagttggtttgtgacaaatgatccatctggcacttttagaaatccaaaggtagatgagcgctttaaaaagtactttgatcttttgggaggtccagccaccttcatccaggcagctgtacctcagataattgagcatactgaaaaggttttcttcaagaaaaccattgataatttgaggcatgttgcagatatatgttgtaaagagttgaaggatattccatacattatttgcccttataaaccagaagggtccatggctatgatggtgaaactaaacctttcacttctggaggatattagcgatgatattgatttctgtttcaagcttgctaaggaggaatctgttatcattcttccaggaactgcggtagggctgaataattggcttcgtattattttcgctacagatccagttgctcttgtagagggtttgaagagggtaaaatctttttgtgaaagacatgcaagaaagtggtcaatgactacagaataaaatccacaaattaaggcggctactattttgtattgaatacctagcttctcaaatatccaatttttacaaaattggatcgttttacgaataattgggttctcaaatatccatttttttgtgccagctctagtttatcactagcttttaaggaaggattctccaagtatctaggtgtttatcaattggtatttgtgtttattgttgtatctaaaaaattatatattttaaataattttgtgacgctatatattaatcaggt

SEQ ID NO: 53118 - protein, 432 aa, Glycine max
  peptide (1)..(432): Ceres Seq. ID no. 14306539
EIESKPEIMEKVGVAVNSKNQESKATSTITIKGFMSLLMKSVDENGDGSKRVISLGMGDPTLTTYFPISNVAEKAVAEALQSHRFRDYAPTAGLPQARIAIAEYLSRDLPYQLSSDDVYITCGCTQAIDVSVAMLARPGANIILPRPGFPLYELSASFRGVEVRHYDLLPEKGWEVDLDAVEALADQNTVALVIINPGNPCGNVYSYHHLEKIAETAKRVGTIVIADEVYGHLAFAGKPFVPMGVFGSIVPVLTLGSFSKRWIVPGWRLSWFVTNDPSGTFRNPKVDERFKKYFDLLGGPATFIQAAVPQIIEHTEKVFFKKTIDNLRHVADICCKELKDIPYIICPYKPEGSMAMMVKLNLSLLEDISDDIDFCFKLAKEESVIILPGTAVGLNNWLRIIFATDPVALVEGLKRVKSFCERHARKWSMTTE

SEQ ID NO: 53119 - protein, 424 aa, Glycine max
  peptide (1)..(424): Ceres Seq. ID no. 14306540
MEKVGVAVNSKNQESKATSTITIKGFMSLLMKSVDENGDGSKRVISLGMGDPTLTTYFPISNVAEKAVAEALQSHRFRDYAPTAGLPQARIAIAEYLSRDLPYQLSSDDVYITCGCTQAIDVSVAMLARPGANIILPRPGFPLYELSASFRGVEVRHYDLLPEKGWEVDLDAVEALADQNTVALVIINPGNPCGNVYSYHHLEKIAETAKRVGTIVIADEVYGHLAFAGKPFVPMGVFGSIVPVLTLGSFSKRWIVPGWRLSWFVTNDPSGTFRNPKVDERFKKYFDLLGGPATFIQAAVPQIIEHTEKVFFKKTIDNLRHVADICCKELKDIPYIICPYKPEGSMAMMVKLNLSLLEDISDDIDFCFKLAKEESVIILPGTAVGLNNWLRIIFATDPVALVEGLKRVKSFCERHARKWSMTTE

SEQ ID NO: 53120 - protein, 398 aa, Glycine max
  peptide (1)..(398): Ceres Seq. ID no. 14306541
MSLLMKSVDENGDGSKRVISLGMGDPTLTTYFPISNVAEKAVAEALQSHRFRDYAPTAGLPQARIAIAEYLSRDLPYQLSSDDVYITCGCTQAIDVSVAMLARPGANIILPRPGFPLYELSASFRGVEVRHYDLLPEKGWEVDLDAVEALADQNTVALVIINPGNPCGNVYSYHHLEKIAETAKRVGTIVIADEVYGHLAFAGKPFVPMGVFGSIVPVLTLGSFSKRWIVPGWRLSWFVTNDPSGTFRNPKVDERFKKYFDLLGGPATFIQAAVPQIIEHTEKVFFKKTIDNLRHVADICCKELKDIPYIICPYKPEGSMAMMVKLNLSLLEDISDDIDFCFKLAKEESVIILPGTAVGLNNWLRIIFATDPVALVEGLKRVKSFCERHARKWSMTTE

SEQ ID NO: 53121 - DNA, 1334 bp, Glycine max
  misc_feature (1)..(1334): Ceres Seq. ID no. 14306553
acacgccaattctaatcagcaggatcattccaatatgggcaacagaattgttatgggaaattcccttctctttatctctttcttcatcttcagctttagtttcttggaggctcaaaaggctccagcagtttatgtgtttggagactcacttgttgatgttggcaacaacaattacttgagtctctccattgaaaaggcaattcttcctcactatggcattgattttccaactaagaaacccactgggagatttagcaatggcaagaatgctgcagatttaattgctgaaaacttgggcctacctacttctccaccttatctctccctagtatctaaggtccacaacaacaacaagaagaacgtatctttcttgggtggtgttaattttgcctccggaggtgctggaatatttaatgcctcagataaaggatttaggcaatcaatacctttgccaaagcaagtggactactactcacaagtgcatgaacaactgatacaacaaataggagcatctactctcgggaaacacctctcaaagtccatcttcattgtggtgattggtggcaatgatatctttggttactttgactcaaaggatcttcaaaagaaaaacacccctcagcagtacgtggattccatggcttccacattaaaagtgcaactacagagattatacaacaatggtgcaaagaaatttgagattgctggtgttggtgcaattgggtgctgccctgcatacagggtcaagaacaaaacagaatgtgtttctgaagccaatgacttgtcggttaaatataatgaagctcttcaatccatgttaaaggaatggcaattggagaacaaagacataagttactcttactttgatacttatgctgccatccaagaccttgttcacaatccagcttcttacggatttgctaatgtgaaagctgcatgttgtggacttggtgagttgaatgcccaaattccatgcctgccaatttcgagcatttgttccaatagaaaagaccatattttctgggatgcattccatcctacagaggcagctgctcgcatctttgtggatgaaatttttaatggaccttcaaaatacatatctcctattaatatggaacagttactggccatttgaattggcaaataaattagtcacttagtcctttgtaatgtgctttccttttttgtggggttacttgttatcaagcaacacactggaacccaaaaaatgaagagaaaaaaaaacatcttattagattaaacatttggattaatctaattgtacgaaagagtgagtttatgaacttttagctcaagtgatttattttatattt

SEQ ID NO: 53122 - protein, 377 aa, Glycine max
  peptide (1)..(377): Ceres Seq. ID no. 14306554
HANSNQQDHSNMGNRIVMGNSLLFISFFIFSFSFLEAQKAPAVYVFGDSLVDVGNNNYLSLSIEKAILPHYGIDFPTKKPTGRFSNGKNAADLIAENLGLPTSPPYLSLVSKVHNNNKKNVSFLGGVNFASGGAGIFNASDKGFRQSIPLPKQVDYYSQVHEQLIQQIGASTLGKHLSKSIFIVVIGGNDIFGYFDSKDLQKKNTPQQYVDSMASTLKVQLQRLYNNGAKKFEIAGVGAIGCCPAYRVKNKTECVSEANDLSVKYNEALQSMLKEWQLENKDISYSYFDTYAAIQDLVHNPASYGFANVKAACCGLGELNAQIPCLPISSICSNRKDHIFWDAFHPTEAAARIFVDEIFNGPSKYISPINMEQLLAI

SEQ ID NO: 53123 - protein, 366 aa, Glycine max
  peptide (1)..(366): Ceres Seq. ID no. 14306555
MGNRIVMGNSLLFISFFIFSFSFLEAQKAPAVYVFGDSLVDVGNNNYLSLSIEKAILPHYGIDFPTKKPTGRFSNGKNAADLIAENLGLPTSPPYLSLVSKVHNNNKKNVSFLGGVNFASGGAGIFNASDKGFRQSIPLPKQVDYYSQVHEQLIQQIGASTLGKHLSKSIFIVVIGGNDIFGYFDSKDLQKKNTPQQYVDSMASTLKVQLQRLYNNGAKKFEIAGVGAIGCCPAYRVKNKTECVSEANDLSVKYNEALQSMLKEWQLENKDISYSYFDTYAAIQDLVHNPASYGFANVKAACCGLGELNAQIPCLPISSICSNRKDHIFWDAFHPTEAAARIFVDEIFNGPSKYISPINMEQLLAI

SEQ ID NO: 53124 - protein, 360 aa, Glycine max
  peptide (1)..(360): Ceres Seq. ID no. 14306556
MGNSLLFISFFIFSFSFLEAQKAPAVYVFGDSLVDVGNNNYLSLSIEKAILPHYGIDFPTKKPTGRFSNGKNAADLIAENLGLPTSPPYLSLVSKVHNNNKKNVSFLGGVNFASGGAGIFNASDKGFRQSIPLPKQVDYYSQVHEQLIQQIGASTLGKHLSKSIFIVVIGGNDIFGYFDSKDLQKKNTPQQYVDSMASTLKVQLQRLYNNGAKKFEIAGVGAIGCCPAYRVKNKTECVSEANDLSVKYNEALQSMLKEWQLENKDISYSYFDTYAAIQDLVHNPASYGFANVKAACCGLGELNAQIPCLPISSICSNRKDHIFWDAFHPTEAAARIFVDEIFNGPSKYISPINMEQLLAI

SEQ ID NO: 53125 - DNA, 1490 bp, Glycine max
  misc_feature (1)..(1490): Ceres Seq. ID no. 14315642
gttaacaaagattccagcaccaaatcagaatatagcccaaagcaatgtggcattctatgagccaataacgatcgttccttcatttccacaaaagaatatcaatcaatatgcacaagtggaaccacaagtttatacagagaataatatgaatgggaactatggaggaggaatggtacctcagaacaagaataatatgagcggaatgactcaattcaaccctctcatgaacttgaatgcgatgaatcatatgccaacagcaaatgaaataaatcattataacaatgtgcctggctacaataatatgaataatctcagcaataacataccaaaattaaccagcatgcacagcaataatacctatactagcaatagtactctagataccacaattacaaacctcacaaatatgagcaatatgagcagtatgaatgatataagcaatctcagtaacctcagcaatgtcagtaatgtcagcagcatgagcaatattactcaaacgagtaataataataacccatataatcttcaaatgagcaattttatgaatcaacagaattggtttaataattatttgcaatattatttaccaataatgcatcccttccaataccagaaaatggaacaagatttcaatgcaaatcccgcttttaatccatatatgggcaatatatttgttcccgctgctgctgctgccgtgaacaatcagccagaagaagtaccaaaagttgcaaaggctacaaaagcaaagacgacaaacaaaagatcatcaaaacaagcaaatgtcaataaaactactatcaatagcaataaacctctcaatgagaacctggatgataagaaggtgcttgatacattgaatgaattggattatgacttcttggaatgttataaagtttctgaagagaatctaaattgcaagagagtcggaggtccaggaatccaggatctggatgaactggtcaagaaaagacaagtaccaaacccgtttgtgggagtagaatgaatgaatacgatatattgcagaagaaatgacgctgaattttgagacagagttctcgccaacaaaatcttttacttactttaaaaaccccaaaaaaattgtaatattatttgagattttctcctgacctgtggagagctttcaaaaaagagattttctcttgctgcatcatcatcaaattttatcttttatcgttggacttcataaaggagatgttttgttttttctgggtgaaaaaaattgtacagaagagtgaagcaaattacttgggaaaaatcaaacagcaacttgaagagtccagattatgttttattattcagtcctattttgtgtctatcttccgctttttattattaatatttttttaataccgtgtgttgccatctattcttttaaaaccaacccgaaaagactgagaggaaaaaaagagcccacagtgaaaaattgaggggaatccttaccaaaaaagaatttaatcaagaagaaccgc

SEQ ID NO: 53126 - protein, 333 aa, Glycine max
  peptide (1)..(333): Ceres Seq. ID no. 14315643
LTKIPAPNQNIAQSNVAFYEPITIVPSFPQKNINQYAQVEPQVYTENNMNGNYGGGMVPQNKNNMSGMTQFNPLMNLNAMNHMPTANEINHYNNVPGYNNMNNLSNNIPKLTSMHSNNTYTSNSTLDTTITNLTNMSNMSSMNDISNLSNLSNVSNVSSMSNITQTSNNNNPYNLQMSNFMNQQNWFNNYLQYYLPIMHPFQYQKMEQDFNANPAFNPYMGNIFVPAAAAAVNNQPEEVPKVAKATKAKTTNKRSSKQANVNKTTINSNKPLNENLDDKKVLDTLNELDYDFLECYKVSEENLNCKRVGGPGIQDLDELVKKRQVPNPFVGVE

SEQ ID NO: 53127 - protein, 285 aa, Glycine max
  peptide (1)..(285): Ceres Seq. ID no. 14315644
MNGNYGGGMVPQNKNNMSGMTQFNPLMNLNAMNHMPTANEINHYNNVPGYNNMNNLSNNIPKLTSMHSNNTYTSNSTLDTTITNLTNMSNMSSMNDISNLSNLSNVSNVSSMSNITQTSNNNNPYNLQMSNFMNQQNWFNNYLQYYLPIMHPFQYQKMEQDFNANPAFNPYMGNIFVPAAAAAVNNQPEEVPKVAKATKAKTTNKRSSKQANVNKTTINSNKPLNENLDDKKVLDTLNELDYDFLECYKVSEENLNCKRVGGPGIQDLDELVKKRQVPNPFVGVE

SEQ ID NO: 53128 - protein, 277 aa, Glycine max
  peptide (1)..(277): Ceres Seq. ID no. 14315645
MVPQNKNNMSGMTQFNPLMNLNAMNHMPTANEINHYNNVPGYNNMNNLSNNIPKLTSMHSNNTYTSNSTLDTTITNLTNMSNMSSMNDISNLSNLSNVSNVSSMSNITQTSNNNNPYNLQMSNFMNQQNWFNNYLQYYLPIMHPFQYQKMEQDFNANPAFNPYMGNIFVPAAAAAVNNQPEEVPKVAKATKAKTTNKRSSKQANVNKTTINSNKPLNENLDDKKVLDTLNELDYDFLECYKVSEENLNCKRVGGPGIQDLDELVKKRQVPNPFVGVE

SEQ ID NO: 53129 - DNA, 1365 bp, Glycine max
  misc_feature (1)..(1365): Ceres Seq. ID no. 14315670
aggcacttgcttgggatctctctgcaaacttctttctttttccatttctctttttagatttgcatttttttagttgttttatgtatgtatgcatgtattcattgaacttggagaaaattgggtaataagcagttgctacaatatggcttgaaagttgaaacttattatgcgtgtgcttggatatatgttgttttggtggttgcatgtcttcgttaattgaccaaaatgttgtgggttttgtggctgtacttcttatatattgattctgtgagtggatattgagaagaaaagattggagaatcttcaaatcttcaaatttactagtgtctctagactctaatcatttgatgtactatactgtagaagatggacttaggttgttatatatatatatatatgcccatctgcattggacacaacagtactgtttctttgtatagtttgttgtcttacaaaaattaactttaagcctaatgtaatggcttttacggaaagaaaaaatctagcctaatatcatatttgtttgtgggatgcagctgagaaacttagtatgggcaacttcaaaacatgatgtctaccttatctccaactactctgttaatcactggtcatcattaagtggtaatttgactgagataatcaattttgctgggcatgtggcaccgccccctactgagcgtttgaataagaaaggagtaagcttttgtacatggatcacacatgatgataatgctatatcaaatgcagttgaaatatatgacagcttgagcattactcacgaaaggattagctggaatccaacctgttgatattcctgggatccaaaattcccgttcttatctgaataatttaaatcatcaccaaaagcatcaaaacaatttagtaagattggtgtctagggattttatcagcagtaatggcttgtcaacgagaagaagtaactgcactggctagaggaattgtagtgtaattcgatctctagcttcgcaaacatcagtcgctgatccagtgttgtcctcttcaagaagcaatgctggtgacacttacaagaaatcaactttaatccttattcggcatggtgagtcgttatggaatgagaagaacttattcacagggtgtgttgatgtccttctaagcaagaagggtatagatgaggcaattgaagctgggaaaagaattagcagcattccttctgaagctggaatttatgcctatactagggtatgctgtttatagcccttttaagaccctttcttttttttaatgaaatgtttaacaatagatattatttttctggaaggctgcaatggcacttgcagacctctaccaatagatagaatagaacataaaaatggttttgcttgt

SEQ ID NO: 53130 - protein, 92 aa, Glycine max
  peptide (1)..(92): Ceres Seq. ID no. 14315671
MQLRNLVWATSKHDVYLISNYSVNHWSSLSGNLTEIINFAGHVAPPPTERLNKKGVSFCTWITHDDNAISNAVEIYDSLSITHERISWNPTC

SEQ ID NO: 53131 - DNA, 1297 bp, Glycine max
  misc_feature (1)..(1297): Ceres Seq. ID no. 14315684
aattgctatccaagctttaccttatttcttctgcatgtgaacatatatttattttttcattttctttcttctgccccctattcttttttagttggttgttatggttaaatagtatcatgttcatgacgtctcaaatgcaagtaacatcatggattttgtagagactgtgagagtgagtgaacgtgcccctaggtgtttatgcttaagcaggaaaaaaaatctcaggattagtgaggtggagatcaaagatcactaacttatttgaatttctgcatatgtcaactagtatagtatttgagaaagatgtttgttgtttgatttcttcgacctcattaagtcaaacaacttagaattaattatttaactaagctacttgtattgtcatcatccagttatttgtggataccatatctcgtctgtttatgtttaccttgctatttctctctttctctttattgcaattttgaagtcatttgcctactgatgttcacttttaccaatcgaatacaatttatgagcagtctgcattggatgatgatatatggtttatattacattcaattcactgtgtatgttattgttatgttatgccaattgccaccgaagaaggtcagaaacacaatgagttcgtcgaacctgagagatctccaacgcgaattggagaacaaagccaacgatctcagcaagcttcaaaaggaaattgcaaagaatcaccaaatgagaaagaagtacacactccagcttggcgagaacgagctcgtccttaaggaactggatttattgaaagatgacacaaatgtttataagttgattgggccagtacttgttaagcaagatttggccgaggccaatgcaaatgtccgcaagaggatcgaatacatctcagctgaattgaagcgtcttgatgccactgttcaagatttggaagagaagcaaaatagcaagaaagatgcaatactaaaattgcaacaaaggattcaatcacttcaggctgggaaaggcaaggcatagttttccctcacatattgttccagcattgtaatttgaccgtgctaaggttggatgtgcatttgtattttgtgcctctttgttttggactgaagttgactcttaggaatgtgtttcgggaaacaatttggaaattagattgatattattatagttggtattggctcattttcaagaaaatgacctgtacaaggttctgtggaaggcttagagaagtcatttgttgcaagggctactttttgtggaaaagccattggcttttttctaatgcatggactatttttttttt

SEQ ID NO: 53132 - protein, 175 aa, Glycine max
  peptide (1)..(175): Ceres Seq. ID no. 14315685
MFTFTNRIQFMSSLHWMMIYGLYYIQFTVYVIVMLCQLPPKKVRNTMSSSNLRDLQRELENKANDLSKLQKEIAKNHQMRKKYTLQLGENELVLKELDLLKDDTNVYKLIGPVLVKQDLAEANANVRKRIEYISAELKRLDATVQDLEEKQNSKKDAILKLQQRIQSLQAGKGKA

SEQ ID NO: 53133 - protein, 165 aa, Glycine max
  peptide (1)..(165): Ceres Seq. ID no. 14315686
MSSLHWMMIYGLYYIQFTVYVIVMLCQLPPKKVRNTMSSSNLRDLQRELENKANDLSKLQKEIAKNHQMRKKYTLQLGENELVLKELDLLKDDTNVYKLIGPVLVKQDLAEANANVRKRIEYISAELKRLDATVQDLEEKQNSKKDAILKLQQRIQSLQAGKGKA

SEQ ID NO: 53134 - protein, 159 aa, Glycine max
  peptide (1)..(159): Ceres Seq. ID no. 14315687
MMIYGLYYIQFTVYVIVMLCQLPPKKVRNTMSSSNLRDLQRELENKANDLSKLQKEIAKNHQMRKKYTLQLGENELVLKELDLLKDDTNVYKLIGPVLVKQDLAEANANVRKRIEYISAELKRLDATVQDLEEKQNSKKDAILKLQQRIQSLQAGKGKA

SEQ ID NO: 53135 - protein, 129 aa, Glycine max
  peptide (1)..(129): Ceres Seq. ID no. 14315688
MSSSNLRDLQRELENKANDLSKLQKEIAKNHQMRKKYTLQLGENELVLKELDLLKDDTNVYKLIGPVLVKQDLAEANANVRKRIEYISAELKRLDATVQDLEEKQNSKKDAILKLQQRIQSLQAGKGKA

SEQ ID NO: 53136 - DNA, 1453 bp, Glycine max
  misc_feature (1)..(1453): Ceres Seq. ID no. 13637608
agcatgaagatggaatttttcctcactgatcacaccttgtccaacattaaagttaatgacaccggagttgccttgactgctttcggtcctttctctaagctcagagccaccgatgttgatggtgatgtctatgaattcgaagctctccaattccatttccacgctcctgctgaacataccattaatgaaggaagatacgaattggaacttcacattgttcacaagatgactgaagaatctgaaaagagagccaaaactcacagaaacctcgctgtcgtcgcagtcttctttgaacttgataaagaccccagaactacccccaacgctttcatcgatgctcttaagcttgacagatgcggttgcgatcttgacctcaatatgtacgaacttctctctcaagacctcactgaaatgaccagcttctttgcttacaagggtggtttgactacccctccttgcagtgaaactgtcaactggtacttgtttgaaaagcccgttaagatcactcaagctcaattgaaccactttaacctcagatggaaagacaacatgaacttcgcttgtggtgaaggtaacaacagacccattcaagccctcaacaacagaactgttctcaagagtaacaactgctgtgtcatgggtaaatctcaagaatacatgagagaaatgatggctgaagttaaacccagagaagaagtcagtctcaccttgaacagagaaatgatgattggtgaactctctgtcaagagccaccacactagagttgatacccaaagctttattgattcccctaccttcaagaaaaaggctagctactctgaacaagtcggragaaaagagcttccctggcgaaaccccaagcagtatgaaaaagagcgcttactccaagacttcaatccacaaccccgtcaccacttttaccaacgttgtggaatccaaaaactaaaaaagtctaatcactcagaacattttttctccttcatagtcaaggagaaatatgggaaggaataacccatccaaaccacctctaatttaaaatgaaagttggtttcttcagagttgaaaaacttttaaaggcgaaaaacatataaaaataaaaaaagccttttagtcagtcttaagacagctttctatcttacttcaaccattgactagcgcatacaatataaatatccgcggttagtgttcccagtgagctagaatgtattgttttactcccgtctgagatttcagagtcttctgaaactctctttcaaaactttgtctacagcccataaatctatcaattatatattatttgctataaatttatctttttgtttaaactgctggatatcgatcttatatgtttaacgctttttatttgtttaagatgttaagaatattatattctagttggmccttttdggtctgacgtttataattcaatcatcagaawtaatckgtctcctcc

SEQ ID NO: 53137 - protein, 336 aa, Glycine max
  peptide (1)..(336): Ceres Seq. ID no. 15220384
  misc_feature (277)..(277): Xaa is any aa, unknown or other
SMKMEFFLTDHTLSNIKVNDTGVALTAFGPFSKLRATDVDGDVYEFEALQFHFHAPAEHTINEGRYELELHIVHKMTEESEKRAKTHRNLAVVAVFFELDKDPRTTPNAFIDALKLDRCGCDLDLNMYELLSQDLTEMTSFFAYKGGLTTPPCSETVNWYLFEKPVKITQAQLNHFNLRWKDNMNFACGEGNNRPIQALNNRTVLKSNNCCVMGKSQEYMREMMAEVKPREEVSLTLNREMMIGELSVKSHHTRVDTQSFIDSPTFKKKASYSEQVXRKELPWRNPKQYEKERLLQDFNPQPRHHFYQRCGIQKLKKSNHSEHFFSFIVKEKYGKE

SEQ ID NO: 53138 - protein, 335 aa, Glycine max
  peptide (1)..(335): Ceres Seq. ID no. 15220385
  misc_feature (276)..(276): Xaa is any aa, unknown or other
MKMEFFLTDHTLSNIKVNDTGVALTAFGPFSKLRATDVDGDVYEFEALQFHFHAPAEHTINEGRYELELHIVHKMTEESEKRAKTHRNLAVVAVFFELDKDPRTTPNAFIDALKLDRCGCDLDLNMYELLSQDLTEMTSFFAYKGGLTTPPCSETVNWYLFEKPVKITQAQLNHFNLRWKDNMNFACGEGNNRPIQALNNRTVLKSNNCCVMGKSQEYMREMMAEVKPREEVSLTLNREMMIGELSVKSHHTRVDTQSFIDSPTFKKKASYSEQVXRKELPWRNPKQYEKERLLQDFNPQPRHHFYQRCGIQKLKKSNHSEHFFSFIVKEKYGKE

SEQ ID NO: 53139 - protein, 333 aa, Glycine max
  peptide (1)..(333): Ceres Seq. ID no. 15220386
  misc_feature (274)..(274): Xaa is any aa, unknown or other
MEFFLTDHTLSNIKVNDTGVALTAFGPFSKLRATDVDGDVYEFEALQFHFHAPAEHTINEGRYELELHIVHKMTEESEKRAKTHRNLAVVAVFFELDKDPRTTPNAFIDALKLDRCGCDLDLNMYELLSQDLTEMTSFFAYKGGLTTPPCSETVNWYLFEKPVKITQAQLNHFNLRWKDNMNFACGEGNNRPIQALNNRTVLKSNNCCVMGKSQEYMREMMAEVKPREEVSLTLNREMMIGELSVKSHHTRVDTQSFIDSPTFKKKASYSEQVXRKELPWRNPKQYEKERLLQDFNPQPRHHFYQRCGIQKLKKSNHSEHFFSFIVKEKYGKE

SEQ ID NO: 53140 - DNA, 1064 bp, Glycine max
  misc_feature (1)..(1064): Ceres Seq. ID no. 14306682
gactaagaagatgaccatatctttaaaccccatcgtcagcttcagctcaacgaagttggaaacaaagtatcaggatgcatcaagatattctgttggagcttctttaccaaaggcaacccagtttacacctttgttgatagtgtctagatcgagaaagcttgtcaaggaaagaagatttggtccttgtttttcagtggcagatagtgatcagcttgcagcagacaacagtagtagcaaggattttgacaatgctgaaaattcggcaaccaatgatcagtcagcatccgtgaattccccagatgaaaacttccaattgcaaaccgaagtaaatgcggagtcaggatctccaacattagaggcttccatttccaatggttcaattaaccaagagcaaaggtcagaagcatctcctaagtcacaatctgcaaccaaacgagcttccctgactgcaagagagaggttaaaggcagctcgatccatcaaccgatacgcgcaatcaaaagcatctaagccagacatgagcagcagggtgttggaggcttcaaaacaaagtgacaaagggtcagggaagaaaaaatctggacttccagaggcccctactaatttgtttgatgatagcaaacgagggttgtcaacaggcttcactttccaatttcctggaggttctgatctctttttcattatcttctcatttgtttttatcagcacagtgatgtttgcaacaacttacattgtgtggaaagttggtgcaatccatttcaatgagtactgaggtgtggtgttaagaattcaccataaaaaaaacagatagttgatttattatatatatgtagacaagcttcggctgcttcaaacttcatgaactgatgatgttgatgatcagtttttcacattttaggtgcttagatcttctattttttcaagttaattattgttatcattattattttataagcaagaagagatatttagttcagggtggatgtagaatacaatatataatgctcaacagtcaacattgtacctgtccttttattttctttttaaagtgtttttgattgatt

SEQ ID NO: 53141 - protein, 256 aa, Glycine max
  peptide (1)..(256): Ceres Seq. ID no. 14306683
TKKMTISLNPIVSFSSTKLETKYQDASRYSVGASLPKATQFTPLLIVSRSRKLVKERRFGPCFSVADSDQLAADNSSSKDFDNAENSATNDQSASVNSPDENFQLQTEVNAESGSPTLEASISNGSINQEQRSEASPKSQSATKRASLTARERLKAARSINRYAQSKASKPDMSSRVLEASKQSDKGSGKKKSGLPEAPTNLFDDSKRGLSTGFTFQFPGGSDLFFIIFSFVFISTVMFATTYIVWKVGAIHFNEY

SEQ ID NO: 53142 - protein, 253 aa, Glycine max
  peptide (1)..(253): Ceres Seq. ID no. 14306684
MTISLNPIVSFSSTKLETKYQDASRYSVGASLPKATQFTPLLIVSRSRKLVKERRFGPCFSVADSDQLAADNSSSKDFDNAENSATNDQSASVNSPDENFQLQTEVNAESGSPTLEASISNGSINQEQRSEASPKSQSATKRASLTARERLKAARSINRYAQSKASKPDMSSRVLEASKQSDKGSGKKKSGLPEAPTNLFDDSKRGLSTGFTFQFPGGSDLFFIIFSFVFISTVMFATTYIVWKVGAIHFNEY

SEQ ID NO: 53143 - DNA, 956 bp, Glycine max
  misc_feature (1)..(956): Ceres Seq. ID no. 15225271
ccgggccccccctygartcagctacgtaggcccccccccccccccaattcttttaaacaacaaacaacaacaacaactatttctcttactacaacaatgtatcaacaaccttcaacctacactaaccaagttccccccaccaccttcaacaatgccaacactaaccctttgactggtggcttcaacaacgccaacgttgaccccttgagaaacaacctcaacaacgccaaccaattgggtggcttcaacaatgctaatgttgatcccatgagaaacaacctccacaacgccaaccccatgactggtggcttcaacaacgctggtgttgatcccttgagaaacaactacaacaacactactaaccccatgactggtggtttcaacaatgccggcccaatgactgatggactcagaaaccaaactgctcctgaaactggtatccccatccgcaagaagcttggttatggcttcggaaccgtcaccttcagaccccttgaagcaagaatgaacaaggacaccgaccttattggtaagatggatccttactgcaagttcaagattggtcttcacatcggaaagagctctgttgccaaggctcaaggcaagaaccccgtctggaatgatgccattaccatcaaatcaaagggagaagaattcgccaccatcaagctcaaggataaggatagacttaccttcaacgatagagtcggaaaggcaaagattcctttgaacaatgtttacaatggtgaaagagttcaataatggattcctttgcacaagggagataagatgactggtgaagttttggtcgaaatgcaattcgttcctaatgtctaaagaatatagtcttatgagtatgatcgaatacgttttgatcattatttgttttgtaaataatgcaataaagtctatattataaagtatgataaccgtaagatattcaaagtcttgaatcc

SEQ ID NO: 53144 - protein, 253 aa, Glycine max
  peptide (1)..(253): Ceres Seq. ID no. 15225272
  misc_feature (5)..(5): Xaa is any aa, unknown or other
  misc_feature (6)..(6): Xaa is any aa, unknown or other
PGPPXXQLRRPPPPPNSFKQQTTTTTISLTTTMYQQPSTYTNQVPPTTFNNANTNPLTGGFNNANVDPLRNNLNNANQLGGFNNANVDPMRNNLHNANPMTGGFNNAGVDPLRNNYNNTTNPMTGGFNNAGPMTDGLRNQTAPETGIPIRKKLGYGFGTVTFRPLEARMNKDTDLIGKMDPYCKFKIGLHIGKSSVAKAQGKNPVWNDAITIKSKGEEFATIKLKDKDRLTFNDRVGKAKIPLNNVYNGERVQ

SEQ ID NO: 53145 - protein, 221 aa, Glycine max
  peptide (1)..(221): Ceres Seq. ID no. 15225273
MYQQPSTYTNQVPPTTFNNANTNPLTGGFNNANVDPLRNNLNNANQLGGFNNANVDPMRNNLHNANPMTGGFNNAGVDPLRNNYNNTTNPMTGGFNNAGPMTDGLRNQTAPETGIPIRKKLGYGFGTVTFRPLEARMNKDTDLIGKMDPYCKFKIGLHIGKSSVAKAQGKNPVWNDAITIKSKGEEFATIKLKDKDRLTFNDRVGKAKIPLNNVYNGERVQ

SEQ ID NO: 53146 - protein, 164 aa, Glycine max
  peptide (1)..(164): Ceres Seq. ID no. 15225274
MRNNLHNANPMTGGFNNAGVDPLRNNYNNTTNPMTGGFNNAGPMTDGLRNQTAPETGIPIRKKLGYGFGTVTFRPLEARMNKDTDLIGKMDPYCKFKIGLHIGKSSVAKAQGKNPVWNDAITIKSKGEEFATIKLKDKDRLTFNDRVGKAKIPLNNVYNGERVQ

SEQ ID NO: 53147 - DNA, 873 bp, Glycine max
  misc_feature (1)..(873): Ceres Seq. ID no. 15225465
ataaactcatcaattttcaacattcaatattggaaattggttcttgcatggatgagaatactgatactgagactgattccaatgaggatgagagtactactactgacaccaaaaaagtggatcaactatcaaaggaaaattctggtgttgcagttgagcttaaagttaatgacaacagtaaatcggttaaagttaatgttactaacataccccttgtcagttatgcacctaaagcatccaagtcttccgctccgtctgacctgggtattgacaaatccatattcatcaagcctaaaacatttcaccttacagtactcatgcttaagctatggaacaaagagcgaattaagacagcctctgaggtcttgcaggaatgcatcaaaggttctttggcaaaagcccgtgttctgtatgctcctgtggaagagactggcgctacacgccactgtgatgaatgcaaggcataggaaaagaacaagtggacaagaaaggtcgattcttttgatgcacggggcatattcaagcagtattgatcagaggactgggggcagtatcttattcctgaagctcatctttcgcagagattttctttcaacgaaaatggatactatcattgttgtgcttcaattccttttcctgaaaataagcaggtagaatgactggtgtcttgttgattgttgcctcactttcttttgtatggaataaggatttggatggtagccttaccaaatatattaaacttatctaccagcaaaagaaaatgcctgggattattagatcaatttttagttagtgttttcctcaacaattgatattgcctcttgtaaacttcaacttcctaattggtagtttatcgttgattgtttaaggaat

SEQ ID NO: 53148 - protein, 217 aa, Glycine max
  peptide (1)..(217): Ceres Seq. ID no. 15225466
INSSIFNIQYWKLVLAWMRILILRLIPMRMRVLLLTPKKWINYQRKILVLQLSLKLMTTVNRLKLMLLTYPLSVMHLKHPSLPLRLTWVLTNPYSSSLKHFTLQYSCLSYGTKSELRQPLRSCRNASKVLWQKPVFCMLLWKRLALHATVMNARHRKRTSGQERSILLMHGAYSSSIDQRTGGSILFLKLIFRRDFLSTKMDTIIVVLQFLFLKISR

SEQ ID NO: 53149 - protein, 200 aa, Glycine max
  peptide (1)..(200): Ceres Seq. ID no. 15225467
MRILILRLIPMRMRVLLLTPKKWINYQRKILVLQLSLKLMTTVNRLKLMLLTYPLSVMHLKHPSLPLRLTWVLTNPYSSSLKHFTLQYSCLSYGTKSELRQPLRSCRNASKVLWQKPVFCMLLWKRLALHATVMNARHRKRTSGQERSILLMHGAYSSSIDQRTGGSILFLKLIFRRDFLSTKMDTIIVVLQFLFLKISR

SEQ ID NO: 53150 - protein, 190 aa, Glycine max
  peptide (1)..(190): Ceres Seq. ID no. 15225468
MRMRVLLLTPKKWINYQRKILVLQLSLKLMTTVNRLKLMLLTYPLSVMHLKHPSLPLRLTWVLTNPYSSSLKHFTLQYSCLSYGTKSELRQPLRSCRNASKVLWQKPVFCMLLWKRLALHATVMNARHRKRTSGQERSILLMHGAYSSSIDQRTGGSILFLKLIFRRDFLSTKMDTIIVVLQFLFLKISR

SEQ ID NO: 53151 - protein, 139 aa, Glycine max
  peptide (1)..(139): Ceres Seq. ID no. 15225469
MDENTDTETDSNEDESTTTDTKKVDQLSKENSGVAVELKVNDNSKSVKVNVTNIPLVSYAPKASKSSAPSDLGIDKSIFIKPKTFHLTVLMLKLWNKERIKTASEVLQECIKGSLAKARVLYAPVEETGATRHCDECKA

SEQ ID NO: 53152 - DNA, 1030 bp, Glycine max
  misc_feature (1)..(1030): Ceres Seq. ID no. 13593846
gattgaaaatcacgaaaatgatgtcaggaaattacacctccatcgatagccaaaaggtttcaggatctgtacctgctgttgatcctccacccttccaattctcagattcaaatcttcagacatttcctccatctggagcacagggcaagattggtggtggctcgagacatccacgtgatgttgatgatacgttttcaaaaccagtgtctggttctgatgaaccccagcagcagagtggttggtttaaggctttctcacttgcttcttacaaaccatactttgatgttgacactatagatgttctagacaggattaaagactcactctatccattcaatggaacattcaatgaaaaaactgcttcccaccctgatttgtatggaccgttctggatttgcaccacattaatatttgtagcagcatctattggcacatttgtgacatacatagctcacaaactgaaggaccaggaatggaactatgacataaatctggtgacttggtctgccggcttgttctatggttatgtcaccattgttcctctttgtttgtatgtaatcctcaagtacttctctgtaccatcgggctttgtccaactactctgtctctatggatattccttgtttgtctttattccagcactgtgtatgtctgttgtgccattggagatattcagatggatggttgctggtgtggctgggttcatgtcagcaacttttgtggcactaaacctccgagcacatattatgtcagcaggtgaaagatgggttttgattgttgctagcatttttgtattgcagttggctctagctgtcgcattaaaggtctgcctcttcacagtaacagtatgagagtaaagtagtattatcatcattcagcatcaatgaattgtagataacgaagagagaactttttgctgttttaaatttagttatataatttgtaggtgaaatgcggttatcagattaaactgtcatttaattcattcatggcgatatagaggcaaataaaaatagtttgtacgttggat

SEQ ID NO: 53153 - protein, 282 aa, Glycine max
  peptide (1)..(282): Ceres Seq. ID no. 13593847
LKITKMMSGNYTSIDSQKVSGSVPAVDPPPFQFSDSNLQTFPPSGAQGKIGGGSRHPRDVDDTFSKPVSGSDEPQQQSGWFKAFSLASYKPYFDVDTIDVLDRIKDSLYPFNGTFNEKTASHPDLYGPFWICTTLIFVAASIGTFVTYIAHKLKDQEWNYDINLVTWSAGLFYGYVTIVPLCLYVILKYFSVPSGFVQLLCLYGYSLFVFIPALCMSVVPLEIFRWMVAGVAGFMSATFVALNLRAHIMSAGERWVLIVASIFVLQLALAVALKVCLFTVTV

SEQ ID NO: 53154 - protein, 277 aa, Glycine max
  peptide (1)..(277): Ceres Seq. ID no. 13593848
MMSGNYTSIDSQKVSGSVPAVDPPPFQFSDSNLQTFPPSGAQGKIGGGSRHPRDVDDTFSKPVSGSDEPQQQSGWFKAFSLASYKPYFDVDTIDVLDRIKDSLYPFNGTFNEKTASHPDLYGPFWICTTLIFVAASIGTFVTYIAHKLKDQEWNYDINLVTWSAGLFYGYVTIVPLCLYVILKYFSVPSGFVQLLCLYGYSLFVFIPALCMSVVPLEIFRWMVAGVAGFMSATFVALNLRAHIMSAGERWVLIVASIFVLQLALAVALKVCLFTVTV

SEQ ID NO: 53155 - protein, 276 aa, Glycine max
  peptide (1)..(276): Ceres Seq. ID no. 13593849
MSGNYTSIDSQKVSGSVPAVDPPPFQFSDSNLQTFPPSGAQGKIGGGSRHPRDVDDTFSKPVSGSDEPQQQSGWFKAFSLASYKPYFDVDTIDVLDRIKDSLYPFNGTFNEKTASHPDLYGPFWICTTLIFVAASIGTFVTYIAHKLKDQEWNYDINLVTWSAGLFYGYVTIVPLCLYVILKYFSVPSGFVQLLCLYGYSLFVFIPALCMSVVPLEIFRWMVAGVAGFMSATFVALNLRAHIMSAGERWVLIVASIFVLQLALAVALKVCLFTVTV

SEQ ID NO: 53156 - DNA, 1277 bp, Glycine max
  misc_feature (1)..(1277): Ceres Seq. ID no. 13637457
gaacgtggaaaaatcaatgaaagttgaagattcaaaggaacactaaaacgacttgatacacgactcaattaaaaattcaaaggaacattgagacgatcctagcgcagctccggccaaaagatccgttgatgtttgttctcaggttcacattgcctttttacattttcgctgcacttgttgttccaccaattctcttcataggaaaatctttgtaggcttgtgctggaaatgctctgtgacttgtgctaatagtatcaccaaaagaagtcaaagaatcagaaagcattaatctggatttgcagtttgcacatattggcagtagttttcttttttcatttttcaattgttaaactagatgtctagaagacccccactccctcgtctcctccttaacaatgtctcttgcatgagaaatgcccagcaagttctgcgccatgtgaatgtctctcttcatgatggaggggcacttgtgctaacaggtgcaaatggctcgggaaagacaactttcctgcgcatgttagctgggttttcccgcccttctgctggtgaaatcctttggaatggacatgacattcaacaatctacaatattccatcagtataaacttcagcttaactggctctctctcaaggatgccattgataataagatgtcagttcttaacaatgtacaatggtttgaacttcttgaaaacaaggaagggaaggctatggctgcactagagttgatgggactaggaagattagccaacgaaaaaccaaggatgctatctatgggccagcggaaaagactgcaacttgccagattgctggcacttgatcgccccatatggttgctagatgagccttcagttgcactagatgatgacggtgtgaagttacttgagtatattattgcagaacacaggaaatatggaggaattgtgattgtggcaactcatctacccattgagatagaagattccttagtcttgaggcttccaccaaggtttccaaggaggatgacccttgtggatatgcttgaccgggcagatatcagttaattcctattttcgttcacattctcttcaaaacaggataggtgttgtaatcagctttgtgcaaatgtcatttgtgacaattcagtcaggattcacaattgagttgtctttatattgcagtcgtagtgctggtcatgcttgtatacttgtctgatgcctttgttcttgtatctttcatttcataaaacatttttaagaggccctgaaaatcatatattctggggggacattcaggctt

SEQ ID NO: 53157 - protein, 228 aa, Glycine max
  peptide (1)..(228): Ceres Seq. ID no. 13637458
MSRRPPLPRLLLNNVSCMRNAQQVLRHVNVSLHDGGALVLTGANGSGKTTFLRMLAGFSRPSAGEILWNGHDIQQSTIFHQYKLQLNWLSLKDAIDNKMSVLNNVQWFELLENKEGKAMAALELMGLGRLANEKPRMLSMGQRKRLQLARLLALDRPIWLLDEPSVALDDDGVKLLEYIIAEHRKYGGIVIVATHLPIEIEDSLVLRLPPRFPRRMTLVDMLDRADIS

SEQ ID NO: 53158 - protein, 211 aa, Glycine max
  peptide (1)..(211): Ceres Seq. ID no. 13637459
MRNAQQVLRHVNVSLHDGGALVLTGANGSGKTTFLRMLAGFSRPSAGEILWNGHDIQQSTIFHQYKLQLNWLSLKDAIDNKMSVLNNVQWFELLENKEGKAMAALELMGLGRLANEKPRMLSMGQRKRLQLARLLALDRPIWLLDEPSVALDDDGVKLLEYIIAEHRKYGGIVIVATHLPIEIEDSLVLRLPPRFPRRMTLVDMLDRADIS

SEQ ID NO: 53159 - protein, 175 aa, Glycine max
  peptide (1)..(175): Ceres Seq. ID no. 13637460
MLAGFSRPSAGEILWNGHDIQQSTIFHQYKLQLNWLSLKDAIDNKMSVLNNVQWFELLENKEGKAMAALELMGLGRLANEKPRMLSMGQRKRLQLARLLALDRPIWLLDEPSVALDDDGVKLLEYIIAEHRKYGGIVIVATHLPIEIEDSLVLRLPPRFPRRMTLVDMLDRADIS

SEQ ID NO: 53160 - DNA, 837 bp, Glycine max
  misc_feature (1)..(837): Ceres Seq. ID no. 15226943
cagctacgtaggccccccccccatatacttgatgtcactgatactttaaaatatcagatgattctagtggaatgatccctgagcatgatttcaagaccgagtatgaagttgaatcttgcagcactggccaaaagaatggtaatggctgtcttgatgtgaagagaacaagcctcccaatgcaaaagggtggttatgtcatatatggtgttgctcatcagcattcaggtgccactggatcaactctctatgcacaggatggaagggttatatgttcttcaataccaaggtatggaaagggaaaggaagcaggaaacgaagtagactacattgtaggaatgagcacatgttatcctcaaccaggttctgtaaagataattgatggtgaaactataactctagagtctaactacagcagcagccgtggccacactggagtaatggggcttttctacctattggtggcagaacagcttccacaccaacacttcagatattcttctcgttcttcattttttatgaatataaatagtataattcattgatagataagttgtgagatgcaaatataagttgagtgtcatatcgatggtatcacagtatgtatcacggttaaaagaaatacagaaatacatatcgatggaacatatacttctcatattcggcagcaataggacaacacacgcaagaaccggcaaagagcatattttcaagtttaaggattgtwgtaatgtgattatcaattatttgtattggtgagggtttgtaatgtttgtcttaaaccagtcttgcttattatggttgtgtgatatgtaatactatatatatcatgtttgttgt

SEQ ID NO: 53161 - protein, 156 aa, Glycine max
  peptide (1)..(156): Ceres Seq. ID no. 15226944
MIPEHDFKTEYEVESCSTGQKNGNGCLDVKRTSLPMQKGGYVIYGVAHQHSGATGSTLYAQDGRVICSSIPRYGKGKEAGNEVDYIVGMSTCYPQPGSVKIIDGETITLESNYSSSRGHTGVMGLFYLLVAEQLPHQHFRYSSRSSFFMNINSIIH

SEQ ID NO: 53162 - protein, 121 aa, Glycine max
  peptide (1)..(121): Ceres Seq. ID no. 15226945
MQKGGYVIYGVAHQHSGATGSTLYAQDGRVICSSIPRYGKGKEAGNEVDYIVGMSTCYPQPGSVKIIDGETITLESNYSSSRGHTGVMGLFYLLVAEQLPHQHFRYSSRSSFFMNINSIIH

SEQ ID NO: 53163 - DNA, 982 bp, Glycine max
  misc_feature (1)..(982): Ceres Seq. ID no. 13582421
atgatggcttctttttcagttcagtagagtagagtgagcgaaagtggaaaacaaaaatggaggagactcaagtgctgcacgaactccacaagctatcacagatagaatcagaggaaaccctaaaccaaatgctatgcaccctttggtccactcgtaaaacgggtcttcccctctccgacaagtcccatttccaatccctcctccacctcccttccccctcccatctcgaccccgttttagcgtgcctccgttccctcgtcagaaaatgcgcgcaccagaacctcgcccgcgacgaccttctcagactgtttccccgcgatcttccgattcagttgcaaacgaatttgatatcagcgttgcagagaaacagagatcggtggaaggaggacgtgagtcacgtgattccgcagctgaagggaacgataaactttgctccttcgctgctttggccgcgccaagaacaagattttgatgcggtggcggtgccggcggttgttcctgatgttggcccttcgggggtgaattcgtgcttccagtgtgatgccgttggtgcttctgataacttggaaaaccttccttgcctcaaatcaatgacgtggaccatggagaatcgtggctcatcccctgcagatagagtagctataatcagccttaagctgcatgattatagcaagtctccatcaggtgaaacagagataaagtttcagctcacaagggacacacttgaggctatgctgagatccatgacatacatcagggaacaactaaatgctgttgagacttcttcaggaccagcaaacaagaaacaaaagcagtagcttattttccagaaattaatgctgtagttagtaatattaagacaaatatctcatcctattagtcattggatgttataactgatttttgtccctccgattctttgatggatgccattaaggcttaagcaaacttaatggtttgttataaactatctctctcaatg

SEQ ID NO: 53164 - protein, 253 aa, Glycine max
  peptide (1)..(253): Ceres Seq. ID no. 13582422
MEETQVLHELHKLSQIESEETLNQMLCTLWSTRKTGLPLSDKSHFQSLLHLPSPSHLDPVLACLRSLVRKCAHQNLARDDLLRLFPRDLPIQLQTNLISALQRNRDRWKEDVSHVIPQLKGTINFAPSLLWPRQEQDFDAVAVPAVVPDVGPSGVNSCFQCDAVGASDNLENLPCLKSMTWTMENRGSSPADRVAIISLKLHDYSKSPSGETEIKFQLTRDTLEAMLRSMTYIREQLNAVETSSGPANKKQKQ

SEQ ID NO: 53165 - protein, 229 aa, Glycine max
  peptide (1)..(229): Ceres Seq. ID no. 13582423
MLCTLWSTRKTGLPLSDKSHFQSLLHLPSPSHLDPVLACLRSLVRKCAHQNLARDDLLRLFPRDLPIQLQTNLISALQRNRDRWKEDVSHVIPQLKGTINFAPSLLWPRQEQDFDAVAVPAVVPDVGPSGVNSCFQCDAVGASDNLENLPCLKSMTWTMENRGSSPADRVAIISLKLHDYSKSPSGETEIKFQLTRDTLEAMLRSMTYIREQLNAVETSSGPANKKQKQ

SEQ ID NO: 53166 - DNA, 1770 bp, Glycine max
  misc_feature (1)..(1770): Ceres Seq. ID no. 14316223
aaattacaaagtccaaaagtcacctaacagaggtaagaaccaagtaaaagcatcgtgtaatgtggacagttgcacaacagaaatggatagtcagccgtccggttcttctgcagatgctgtagatgttaatgagtctggaagtagcaagttaggtggatctgagcctgagggtgctgttctctgcttgcaggatcgattaaagtggcttgatcagcctgtcatcagaaaggaagaggatatatcttcgctacaaaagaaacaaaccatcaaagaccaagttaacatagaaagaactgtggataatgaaagcctatcaaaagagaagaaatcagcggtgccatcctcatctagtagtcctccaagaaacttacctgttcaaatgaagtcagaaaaccaaactagagttactggagatcctgttcatgtcaggaaaacatcttttggtgtctcacaatcaactgataaagaggcgtcttcatcttcaacttctgtatcacaagtaacaattggtccaaaaacagaaatccagaaagcttcacccccaagactaaccgaaagatccatggcacaagtggctatgttgtcaaggccatctagtgctccactagttcctggtggtcccaggcccactgctgctgttgtctccatggttcaaactgctccactacttgcacgctctgtgagtgcaactggtcggttaggtcctgatccctcacctgctactcatagttatgttccccagtcctatagaaatgcaataatggggaatcctgtggtgtcaactgctgccagtcttcctcattccagctccagttcaggagtaaacccatctcctggctattcacatccacccatggtatcatccccactatttatctcccggagctccgacaaaatggattcaaatacttcccagtctggtgttccctttggtatgatttcacgggatgttttacagaacggacctaattggattgatagttctcaaagggaagccagcagaagcatgcactatgaacctccttcccgactaaatgatgttcaaaacctagacttgttcaggccaatagattgtagatctttgggcaacataccaagtgagttcccagtttacacatccaggcgtccgaaccaaggggcgttggtggatgagttcccacacctcgatatcattaatgacctgcttgatgaaccaagggaccatggtattgggaaggcatccagggcaagttcagtcttccactccctcaatgatggaccacagttgctaaatcgtcaattcacttttcctagagacttgggtaccgatgatgatttgggatcttccaccagttcttgtaggcttgagagatcacgtagttaccatgatgccgggtttcaacaagggtatagcacatctggttggcattatgattcactgcaggattatgttcctcaggccagtacattatcatatggaaatggcaaggtagatgggatgattccaaaccaatggcaggttgctgatctatcttatctaggcatgagaaacactgagaatagttactcgtactatcaagattactcaaatatggcatgtggtgtcaatggttatactgtattcaggccttcaaatggtccgtagagggaaaagatgacaaaggttgcccacaaattagtggtcatcaacaaatgtaataatgtatttgaggaaattgttgggtctctttagattggagtgaggttgtatccccttgataggaaaacattttgtaaagagtgtttccgatt

SEQ ID NO: 53167 - protein, 540 aa, Glycine max
  peptide (1)..(540): Ceres Seq. ID no. 14316224
NYKVQKSPNRGKNQVKASCNVDSCTTEMDSQPSGSSADAVDVNESGSSKLGGSEPEGAVLCLQDRLKWLDQPVIRKEEDISSLQKKQTIKDQVNIERTVDNESLSKEKKSAVPSSSSSPPRNLPVQMKSENQTRVTGDPVHVRKTSFGVSQSTDKEASSSSTSVSQVTIGPKTEIQKASPPRLTERSMAQVAMLSRPSSAPLVPGGPRPTAAVVSMVQTAPLLARSVSATGRLGPDPSPATHSYVPQSYRNAIMGNPVVSTAASLPHSSSSSGVNPSPGYSHPPMVSSPLFISRSSDKMDSNTSQSGVPFGMISRDVLQNGPNWIDSSQREASRSMHYEPPSRLNDVQNLDLFRPIDCRSLGNIPSEFPVYTSRRPNQGALVDEFPHLDIINDLLDEPRDHGIGKASRASSVFHSLNDGPQLLNRQFTFPRDLGTDDDLGSSTSSCRLERSRSYHDAGFQQGYSTSGWHYDSLQDYVPQASTLSYGNGKVDGMIPNQWQVADLSYLGMRNTENSYSYYQDYSNMACGVNGYTVFRPSNGP

SEQ ID NO: 53168 - protein, 513 aa, Glycine max
  peptide (1)..(513): Ceres Seq. ID no. 14316225
MDSQPSGSSADAVDVNESGSSKLGGSEPEGAVLCLQDRLKWLDQPVIRKEEDISSLQKKQTIKDQVNIERTVDNESLSKEKKSAVPSSSSSPPRNLPVQMKSENQTRVTGDPVHVRKTSFGVSQSTDKEASSSSTSVSQVTIGPKTEIQKASPPRLTERSMAQVAMLSRPSSAPLVPGGPRPTAAVVSMVQTAPLLARSVSATGRLGPDPSPATHSYVPQSYRNAIMGNPVVSTAASLPHSSSSSGVNPSPGYSHPPMVSSPLFISRSSDKMDSNTSQSGVPFGMISRDVLQNGPNWIDSSQREASRSMHYEPPSRLNDVQNLDLFRPIDCRSLGNIPSEFPVYTSRRPNQGALVDEFPHLDIINDLLDEPRDHGIGKASRASSVFHSLNDGPQLLNRQFTFPRDLGTDDDLGSSTSSCRLERSRSYHDAGFQQGYSTSGWHYDSLQDYVPQASTLSYGNGKVDGMIPNQWQVADLSYLGMRNTENSYSYYQDYSNMACGVNGYTVFRPSNGP

SEQ ID NO: 53169 - protein, 414 aa, Glycine max
  peptide (1)..(414): Ceres Seq. ID no. 14316226
MKSENQTRVTGDPVHVRKTSFGVSQSTDKEASSSSTSVSQVTIGPKTEIQKASPPRLTERSMAQVAMLSRPSSAPLVPGGPRPTAAVVSMVQTAPLLARSVSATGRLGPDPSPATHSYVPQSYRNAIMGNPVVSTAASLPHSSSSSGVNPSPGYSHPPMVSSPLFISRSSDKMDSNTSQSGVPFGMISRDVLQNGPNWIDSSQREASRSMHYEPPSRLNDVQNLDLFRPIDCRSLGNIPSEFPVYTSRRPNQGALVDEFPHLDIINDLLDEPRDHGIGKASRASSVFHSLNDGPQLLNRQFTFPRDLGTDDDLGSSTSSCRLERSRSYHDAGFQQGYSTSGWHYDSLQDYVPQASTLSYGNGKVDGMIPNQWQVADLSYLGMRNTENSYSYYQDYSNMACGVNGYTVFRPSNGP

SEQ ID NO: 53170 - DNA, 1591 bp, Glycine max
  misc_feature (1)..(1591): Ceres Seq. ID no. 14306493
aaaaaagacataacattccctcccctgtctccaatattgattagccttagccacaaaacaatgttttccccaagagacatgccttctccatcctcaatcttttctgcctacgcctccatgacagcctccatcatgctcctacgttccatggccaacgacctcgttccccaaccaatccgtggctacctttacagcacgttccgttacctcataaagcctcgctccccaaccctcaccctcatcatcgaagagtccaccggcatagcccgtaaccaagtctacgacgctgcagaagcgtacctctccacccgtgtcagccccgaaaacgagaggctcaaaatcagcaagagcgcaaaggagaagaaattaaccgttcggttggagaagggcgagaaggtagtcgactgcttcgacggcgcgtgcttcaagtggagattcatctgcgcggaatccgagaagaacaaccccaacgaccacagcaacaataacagcatctccgtacggtccgaaaagcggtcttttgagctgagcttcccgaagaagtacaaggaaatggttctggactcttacctgcccttcattctcgaaaaggccaaggagatgaaagacgaggaaagggttctgaagatgcacactctcaacacctcgtattgttacagtggggtcaaatgggactctataaatctcgagcatccttcaacttttgagacgctggcgatggagccggagttgaagaatgcggtgattgaggacttggataggttcgtgaagaggaaggagttttataagagggttgggagggcgtggaaacgtggctacttgctctatggccctcctggtactggcaagtctagcttgatagctgctatggccaattacttgaagtttgacatctttgacctccaacttgggaacatagtaagggattctgacctcaggaaactgcttctggcgactgctaatagatccattttggtcattgaagacattgattgcagtgtggatctgccagagcgtcgccatggtgatcatggacgtaaacaaactgacgtacagttgaccttgtctggattactgaacttcatagacgggttatggtctagttgtggagacgagagaatcatcatattcaccaccaaccacaaggagaggctagacccagcactgttgaggccaggaagaatggacatgcacattcacatgtcctattgctcctaccaaggcttcaagattttggcctcaaactacttagaaactccctctgatcaccccctctttggtgaggtagaggggctaatagaggacatacaaataacccctgcgcaagtggcagaggagctgatgaagaacgaagaccctgaggccacacttgaaggattcgtgaagctacttaagaggaagaagatggaaggtgatgtgtgtgagaactctactcctgataaagcagaacctactcatcagcaatctaagaggcgcaaggttggttgcaagcaaaaacgaggtgttggaattaacaagagcattagtggtgtcactcaaataaggacaagaagaatgagagggtgtagtttgtaatcacctggtctcagaa

SEQ ID NO: 53171 - protein, 524 aa, Glycine max
  peptide (1)..(524): Ceres Seq. ID no. 14306494
KKDITFPPLSPILISLSHKTMFSPRDMPSPSSIFSAYASMTASIMLLRSMANDLVPQPIRGYLYSTFRYLIKPRSPTLTLIIEESTGIARNQVYDAAEAYLSTRVSPENERLKISKSAKEKKLTVRLEKGEKVVDCFDGACFKWRFICAESEKNNPNDHSNNNSISVRSEKRSFELSFPKKYKEMVLDSYLPFILEKAKEMKDEERVLKMHTLNTSYCYSGVKWDSINLEHPSTFETLAMEPELKNAVIEDLDRFVKRKEFYKRVGRAWKRGYLLYGPPGTGKSSLIAAMANYLKFDIFDLQLGNIVRDSDLRKLLLATANRSILVIEDIDCSVDLPERRHGDHGRKQTDVQLTLSGLLNFIDGLWSSCGDERIIIFTTNHKERLDPALLRPGRMDMHIHMSYCSYQGFKILASNYLETPSDHPLFGEVEGLIEDIQITPAQVAEELMKNEDPEATLEGFVKLLKRKKMEGDVCENSTPDKAEPTHQQSKRRKVGCKQKRGVGINKSISGVTQIRTRRMRGCSL

SEQ ID NO: 53172 - protein, 504 aa, Glycine max
  peptide (1)..(504): Ceres Seq. ID no. 14306495
MFSPRDMPSPSSIFSAYASMTASIMLLRSMANDLVPQPIRGYLYSTFRYLIKPRSPTLTLIIEESTGIARNQVYDAAEAYLSTRVSPENERLKISKSAKEKKLTVRLEKGEKVVDCFDGACFKWRFICAESEKNNPNDHSNNNSISVRSEKRSFELSFPKKYKEMVLDSYLPFILEKAKEMKDEERVLKMHTLNTSYCYSGVKWDSINLEHPSTFETLAMEPELKNAVIEDLDRFVKRKEFYKRVGRAWKRGYLLYGPPGTGKSSLIAAMANYLKFDIFDLQLGNIVRDSDLRKLLLATANRSILVIEDIDCSVDLPERRHGDHGRKQTDVQLTLSGLLNFIDGLWSSCGDERIIIFTTNHKERLDPALLRPGRMDMHIHMSYCSYQGFKILASNYLETPSDHPLFGEVEGLIEDIQITPAQVAEELMKNEDPEATLEGFVKLLKRKKMEGDVCENSTPDKAEPTHQQSKRRKVGCKQKRGVGINKSISGVTQIRTRRMRGCSL

SEQ ID NO: 53173 - protein, 498 aa, Glycine max
  peptide (1)..(498): Ceres Seq. ID no. 14306496
MPSPSSIFSAYASMTASIMLLRSMANDLVPQPIRGYLYSTFRYLIKPRSPTLTLIIEESTGIARNQVYDAAEAYLSTRVSPENERLKISKSAKEKKLTVRLEKGEKVVDCFDGACFKWRFICAESEKNNPNDHSNNNSISVRSEKRSFELSFPKKYKEMVLDSYLPFILEKAKEMKDEERVLKMHTLNTSYCYSGVKWDSINLEHPSTFETLAMEPELKNAVIEDLDRFVKRKEFYKRVGRAWKRGYLLYGPPGTGKSSLIAAMANYLKFDIFDLQLGNIVRDSDLRKLLLATANRSILVIEDIDCSVDLPERRHGDHGRKQTDVQLTLSGLLNFIDGLWSSCGDERIIIFTTNHKERLDPALLRPGRMDMHIHMSYCSYQGFKILASNYLETPSDHPLFGEVEGLIEDIQITPAQVAEELMKNEDPEATLEGFVKLLKRKKMEGDVCENSTPDKAEPTHQQSKRRKVGCKQKRGVGINKSISGVTQIRTRRMRGCSL

SEQ ID NO: 53174 - DNA, 1538 bp, Glycine max
  misc_feature (1)..(1538): Ceres Seq. ID no. 14304760
gtcgaaagagaatagcaaaaagcacagaacaatccgaaaatggcggaacgcgaaacctccgaatccgaggacccctcgagttcagggtcggagtacgaggatgcacaaacggtagagggcaatggtgtgaagaagaagaagggtttgtcggagtacgagaaacagaggatgccgagaattgccgagaacagagccaggttggaggctctgggtttgccccaaatcgcttcctcgttaaagggttcttcgcagcctcataaagccacgaagggcaaagagaagaagaataaggttaacgatgacgatgatgaagaatatgaacccgaagaagacgagggagaacaagtatcgggttcttcaagtgaagaaaatgaggaccgtaaagacgaggactttgcaattgaaaacgcttcagggtcacggaaaagaaaggtgaagaacaaaagtttgaaaaagaaagccagagtttctgggaagaaacatgttagtaattcagagtacattgattacgatgatgatgaagctcttaggcaggcaattgctctttccttgcaagactctgcagaaggttcttatttgcctgacaagaatgtagtgaacaccagcaagaccgagaaaaagggaagcggtcatgttcaagaagataagggaagaaagaagaacaaaaaatcgtttgctagtcggctgcaactgactgaggatgagctcattgtacacttcttccagctagatgaagcaggaaaaggaactataagtgtaagggatatacaaagggcagctacagctcatgattttttatggacagacaaagagttagttgatatgattcgctacttcgatagtgatggagatggaaaggtaaggatcagaaggtctttctgattctgtttttctggcaggaggtcaggaagaaaacctataggctttttatgactttcaatttgaattttggcggataattgctaaaaccttttgaactatagaatgtattctttaggattcttagttcttacactagtccaaatatgttttgttgattgcaagtacttactgagcagtttaacctctttcactttattcatatttttcagtataacttcaaggtcagaaagcatagttctttcttacatcttttgagaaatatgaaaattggtgaatttgaccccttagcatcaaaattgtggaaaattaccatgaaaaattttgtgcactatgtttgattattgttgttgttattattattgttaaaaataattggctctgttgcagataagccttgatgatttctggaagattgttgttcgttgcaacttgattaaagggtcttgaaaatcttgatagaatcatggttagccagagatgatagcacattggaagatattacaaggactgttaaatatatatatatatatatatatatatatatatatatatatatatatatatatatatatatatatatatatatttcatggagtgacacagatttagtattccttgtatcccattatcactatatataacttatattgtactgt

SEQ ID NO: 53175 - protein, 280 aa, Glycine max
  peptide (1)..(280): Ceres Seq. ID no. 14304761
MAERETSESEDPSSSGSEYEDAQTVEGNGVKKKKGLSEYEKQRMPRIAENRARLEALGLPQIASSLKGSSQPHKATKGKEKKNKVNDDDDEEYEPEEDEGEQVSGSSSEENEDRKDEDFAIENASGSRKRKVKNKSLKKKARVSGKKHVSNSEYIDYDDDEALRQAIALSLQDSAEGSYLPDKNVVNTSKTEKKGSGHVQEDKGRKKNKKSFASRLQLTEDELIVHFFQLDEAGKGTISVRDIQRAATAHDFLWTDKELVDMIRYFDSDGDGKVRIRRSF

SEQ ID NO: 53176 - protein, 237 aa, Glycine max
  peptide (1)..(237): Ceres Seq. ID no. 14304762
MPRIAENRARLEALGLPQIASSLKGSSQPHKATKGKEKKNKVNDDDDEEYEPEEDEGEQVSGSSSEENEDRKDEDFAIENASGSRKRKVKNKSLKKKARVSGKKHVSNSEYIDYDDDEALRQAIALSLQDSAEGSYLPDKNVVNTSKTEKKGSGHVQEDKGRKKNKKSFASRLQLTEDELIVHFFQLDEAGKGTISVRDIQRAATAHDFLWTDKELVDMIRYFDSDGDGKVRIRRSF

SEQ ID NO: 53177 - DNA, 1490 bp, Glycine max
  misc_feature (1)..(1490): Ceres Seq. ID no. 14311287
ggatgcatttatacttacaccgaatcacgaggcgacaacatcgacatggagggtctcatcaacggcttcatcaacgttgctctcggagctgatggtggcgatcgggaagaacaacaacacgggagagacgaccgtagtagaagctcctgggctgaagtcgtctcccaggatcaacaagatcaccctcttcctcatcaccaacacaaggaacaatatcgtcctcagtacgaggagccccaatctcaaagttcctacaaaccccagaaggtggatgaaggtgaagatggatggcagactgttggtagaaagccttcaaggcatccacataaggttcaaaaggacaactggaacagctataaacgacctgctgatgagcaagaatactctaatgaggttgaagttggtgctgatgtggagccctcagaagatgaacttgctgatctgtcaagagcttgtgaaaaactctgggctcttgatttaaatcgtttggtacctggcttacactatgaaattgactgtggagaagggaaaaaggtataccaaaaggaagatatggcacaggggagcttgtttacttgggttagcgatgatgtattcagaaagcctacatttgcccgttttctttcacttttagataattacaatccacatcaaggatgtaaggaagtagtcacatctgaagagagacaagagcaagcttctttcatagaagaaatcagtagaacagcaccaattaagtatcttcacaagtatcttgcatccaagcaaattgtatcagggaattaccaagatttcaaaagaatgattaccagtctgtggtttgacctttatggccgtggtggcacttctggttcctcttctgcttttgaacatgtttttgttggagaaaccaaacaatgtggtgaagtttctggctttcataactggctgcagttttaccttgaagaagcaaaggggagagttgattatcaaggatatatttttccccgtcgacggggagaaactcctgactctgaagctcagcttctgactattcagtttgaatggaatggtgtcctaaaatctgtatccagcactttggttggagtgagccctgaatttgaaattgctttgtataccctgtgtttctatgttggtagggaggataaccacattcagcttggtccatatggggttaatatcaagtgctatcgattgggtgatcgaattggatctgttttccccattgcagattcttgaattttcagtttccagcattggtagtagttgttccctatgaaatcgtttgttatgcatacttgagaacttgtaactcatgggtgtaaaggcaacaataccaattagatcaagtagtacaaggtagcacaatatttactgaattacatacatttggtggttcttttgtcttgtatgaagacagaaattcttgtggaactagtttacttaatttcttcattaagtccttaatgatatgctagtatgttgttatt

SEQ ID NO: 53178 - protein, 412 aa, Glycine max
  peptide (1)..(412): Ceres Seq. ID no. 14311288
GCIYTYTESRGDNIDMEGLINGFINVALGADGGDREEQQHGRDDRSRSSWAEVVSQDQQDHPLPHHQHKEQYRPQYEEPQSQSSYKPQKVDEGEDGWQTVGRKPSRHPHKVQKDNWNSYKRPADEQEYSNEVEVGADVEPSEDELADLSRACEKLWALDLNRLVPGLHYEIDCGEGKKVYQKEDMAQGSLFTWVSDDVFRKPTFARFLSLLDNYNPHQGCKEVVTSEERQEQASFIEEISRTAPIKYLHKYLASKQIVSGNYQDFKRMITSLWFDLYGRGGTSGSSSAFEHVFVGETKQCGEVSGFHNWLQFYLEEAKGRVDYQGYIFPRRRGETPDSEAQLLTIQFEWNGVLKSVSSTLVGVSPEFEIALYTLCFYVGREDNHIQLGPYGVNIKCYRLGDRIGSVFPIADS

SEQ ID NO: 53179 - protein, 397 aa, Glycine max
  peptide (1)..(397): Ceres Seq. ID no. 14311289
MEGLINGFINVALGADGGDREEQQHGRDDRSRSSWAEVVSQDQQDHPLPHHQHKEQYRPQYEEPQSQSSYKPQKVDEGEDGWQTVGRKPSRHPHKVQKDNWNSYKRPADEQEYSNEVEVGADVEPSEDELADLSRACEKLWALDLNRLVPGLHYEIDCGEGKKVYQKEDMAQGSLFTWVSDDVFRKPTFARFLSLLDNYNPHQGCKEVVTSEERQEQASFIEEISRTAPIKYLHKYLASKQIVSGNYQDFKRMITSLWFDLYGRGGTSGSSSAFEHVFVGETKQCGEVSGFHNWLQFYLEEAKGRVDYQGYIFPRRRGETPDSEAQLLTIQFEWNGVLKSVSSTLVGVSPEFEIALYTLCFYVGREDNHIQLGPYGVNIKCYRLGDRIGSVFPIADS

SEQ ID NO: 53180 - protein, 228 aa, Glycine max
  peptide (1)..(228): Ceres Seq. ID no. 14311290
MAQGSLFTWVSDDVFRKPTFARFLSLLDNYNPHQGCKEVVTSEERQEQASFIEEISRTAPIKYLHKYLASKQIVSGNYQDFKRMITSLWFDLYGRGGTSGSSSAFEHVFVGETKQCGEVSGFHNWLQFYLEEAKGRVDYQGYIFPRRRGETPDSEAQLLTIQFEWNGVLKSVSSTLVGVSPEFEIALYTLCFYVGREDNHIQLGPYGVNIKCYRLGDRIGSVFPIADS

SEQ ID NO: 53181 - DNA, 1606 bp, Glycine max
  misc_feature (1)..(1606): Ceres Seq. ID no. 14304756
cgcggccgcccgatggagatcgacccgctcgtcaccgtggtgcaggagatgggccgcttgaccggtcgcccgacgccggcgctggattcggtgctggcgatggtgacccagcgcgcccgcatcgccggcctctatgacggcgtctccgcgcccgcggatcctcgcgcgctggcggtggcgtgatggcgggcgagacaaaaaagtggctgcgcttccgccacgccggcaccaccggcttcggcacgctctccgcatccggcatcagcgtgcatgagggcgagatgttcggccgcaacgccgccaccggcaggatgctggcgctgccggaggtcgagctgctggcgccctgcgcccccagcaagatcgtcgcgctctggaataattttcacgcgctcgcggccaagctcaaccagccggagccgcctgagccgctctatctgctcaaggccaccacgaccatcacgacaccaggcgccgtgatccgccgcccgtcctattacgacggcaagaccacctatgaaggcgagctcggcatcatcatcggcaagacctgcgcgcgcgtctcgcccgatgaagccgacagcttcatcttcggctacacctgcgtcaacgacatcaccgccaacgacatcctgaccagcgaccccacctttccccaatgggcccgcgccaagggcatcgacgattacggcccgttcggccctgtcatcaccaccggcctcgatccggccaggctcaccgtccgcaccatcctcaacggcgccgagcggcagaactatccgatctccgacatgattttttccgcgcaagccctggtgagcaagatctcccatgacatgaccctgcttccgggcgacctcatcgcggtcggcacctcggtcggcgtcggcgtgatgaaggagccggtcaatacggtgacggtcgcgatcgacggcatcggcgagctgaccaacgagtttcggttgtagccccgacgtcattccggggcgcgcgtagcgcgagctacggtgccaattgcgaacctgagaatccactcccctaccgtctctgctgctcgatggattccgggctcggcgctttcgcgccgccccggaatgacggctaagccgcccacctccacccgaccggccgacgcaaccagccgtggatcgcgcctccggacacgcccagcaacccgtccgccccttgatctcggttccactctccaatagcaatcatggcgaaaatatgcaccggcgtggggcgtcgcgatgtggctgtttttcctggctgcctggtttgtcctgctcgccgccatcgcgctggtcgccccgcaggcgtttggcctggacatcacccatttgcccgccctgttcgcgagccagccgatgccacagcgcatcgcgatcggtgcgatcctcgtggccgggctgacgctgatcggcgcctcggcctggcggctctcgcgccaggaccggcgcctcgacacgctccgtgatcgcctcaagaagacccgggaagacgtcgtcgtcgcccatgccttacagaaccatctcgacaccacggtccagcacctgatcgagagcgatccccgggaggccgtgtccgcactgcacgacaagctcgg

SEQ ID NO: 53182 - protein, 261 aa, Glycine max
  peptide (1)..(261): Ceres Seq. ID no. 14304757
MAGETKKWLRFRHAGTTGFGTLSASGISVHEGEMFGRNAATGRMLALPEVELLAPCAPSKIVALWNNFHALAAKLNQPEPPEPLYLLKATTTITTPGAVIRRPSYYDGKTTYEGELGIIIGKTCARVSPDEADSFIFGYTCVNDITANDILTSDPTFPQWARAKGIDDYGPFGPVITTGLDPARLTVRTILNGAERQNYPISDMIFSAQALVSKISHDMTLLPGDLIAVGTSVGVGVMKEPVNTVTVAIDGIGELTNEFRL

SEQ ID NO: 53183 - protein, 228 aa, Glycine max
  peptide (1)..(228): Ceres Seq. ID no. 14304758
MFGRNAATGRMLALPEVELLAPCAPSKIVALWNNFHALAAKLNQPEPPEPLYLLKATTTITTPGAVIRRPSYYDGKTTYEGELGIIIGKTCARVSPDEADSFIFGYTCVNDITANDILTSDPTFPQWARAKGIDDYGPFGPVITTGLDPARLTVRTILNGAERQNYPISDMIFSAQALVSKISHDMTLLPGDLIAVGTSVGVGVMKEPVNTVTVAIDGIGELTNEFRL

SEQ ID NO: 53184 - protein, 218 aa, Glycine max
  peptide (1)..(218): Ceres Seq. ID no. 14304759
MLALPEVELLAPCAPSKIVALWNNFHALAAKLNQPEPPEPLYLLKATTTITTPGAVIRRPSYYDGKTTYEGELGIIIGKTCARVSPDEADSFIFGYTCVNDITANDILTSDPTFPQWARAKGIDDYGPFGPVITTGLDPARLTVRTILNGAERQNYPISDMIFSAQALVSKISHDMTLLPGDLIAVGTSVGVGVMKEPVNTVTVAIDGIGELTNEFRL

SEQ ID NO: 53185 - DNA, 1449 bp, Glycine max
  misc_feature (1)..(1449): Ceres Seq. ID no. 15174638
agttcgaccaaacggcgtcgttgccatacgatttctcggagttacccgatctcgacacggatcagattcaaaacctcaaaccaacgctggtaacaatggaagaagactcagggataagactcgttcacacgctgatgacgtgtgcggattccgtgcaacatggcgacctccctttcgcgggctccctcatcgagaacatgcaggggctgctggcgcacgtgaataccaacatcggaatcggtaaagtcgccggatacttcatcgatgccttgcgccgccgtatctttgcgcaaggcgtgtttctaacgtcgtgttcgtatccgatcgaggacgacgtactctaccaccactactacgaggcctgcccttacttgaagttcgcgcatttcactgcgaaccaggctattttagaagccttcaacggccatgattgtgtccacgtgattgacttcaacctcatgcaggggctccagtggcccgcgctgattcaggccctggcgcttcggcccggtgggcctccgctgttgaggctcacgggaattgggcttccctcgtccgacaaccgcgacacgctccgcgaaattgggctcaggctcgctgagctggcgcggtccgtgaatgttaggtttgcatttcgtggcgtggcggcgtggcgccttgaagacgtgaagccgtggatgctgcaggtgaatccgaacgaagccgtggcggttaactccatcatgcagttgcatcggcttcttgcttcggactccgatccagcaggttcgggcatcgaaaccgtgctgggttggatccgaagcttgaacccgaagattatttccgttgtagaacaggaggcgaatcataacgaggacatgttcttggagcggttcacggaagcgttacattactactcgaccgttttcgactcgcttgaagcgtgtccggtcgaaccggacaaggcgcttgcggagatgtacctgcagagggagatatgcaacgtggtgtgctgcgagggaccggcgcgagtcgagaggcacgagccgctggataagtggaggaagcggctcgggaaagccggcttcaagccgctgcatttggggtccaacgcgtacaagcaggccagcatgttgttgactcttttctcggctgaagggtattgcgtggaagagaatcaaggatgcttgactttggggtggcatagccgccctctcattgcggcttcggcttggcatgccgcgccggtgcaggacagggaaacgctgcgtttcgagcagtgagtcatgggtttgaagaaacggaaaatttgtttatttattgtagtaactagtaaacaaaaagagtggtgtataatgtaaatttttctatctttctttattttctctttctttttttttcttttctgtttttttttaaatggtcatttttgcgaaattagtttgtggatcgtctatcctttcaattttc

SEQ ID NO: 53186 - protein, 419 aa, Glycine max
  peptide (1)..(419): Ceres Seq. ID no. 15174639
FDQTASLPYDFSELPDLDTDQIQNLKPTLVTMEEDSGIRLVHTLMTCADSVQHGDLPFAGSLIENMQGLLAHVNTNIGIGKVAGYFIDALRRRIFAQGVFLTSCSYPIEDDVLYHHYYEACPYLKFAHFTANQAILEAFNGHDCVHVIDFNLMQGLQWPALIQALALRPGGPPLLRLTGIGLPSSDNRDTLREIGLRLAELARSVNVRFAFRGVAAWRLEDVKPWMLQVNPNEAVAVNSIMQLHRLLASDSDPAGSGIETVLGWIRSLNPKIISVVEQEANHNEDMFLERFTEALHYYSTVFDSLEACPVEPDKALAEMYLQREICNVVCCEGPARVERHEPLDKWRKRLGKAGFKPLHLGSNAYKQASMLLTLFSAEGYCVEENQGCLTLGWHSRPLIAASAWHAAPVQDRETLRFEQ

SEQ ID NO: 53187 - protein, 388 aa, Glycine max
  peptide (1)..(388): Ceres Seq. ID no. 15174640
MEEDSGIRLVHTLMTCADSVQHGDLPFAGSLIENMQGLLAHVNTNIGIGKVAGYFIDALRRRIFAQGVFLTSCSYPIEDDVLYHHYYEACPYLKFAHFTANQAILEAFNGHDCVHVIDFNLMQGLQWPALIQALALRPGGPPLLRLTGIGLPSSDNRDTLREIGLRLAELARSVNVRFAFRGVAAWRLEDVKPWMLQVNPNEAVAVNSIMQLHRLLASDSDPAGSGIETVLGWIRSLNPKIISVVEQEANHNEDMFLERFTEALHYYSTVFDSLEACPVEPDKALAEMYLQREICNVVCCEGPARVERHEPLDKWRKRLGKAGFKPLHLGSNAYKQASMLLTLFSAEGYCVEENQGCLTLGWHSRPLIAASAWHAAPVQDRETLRFEQ

SEQ ID NO: 53188 - protein, 375 aa, Glycine max
  peptide (1)..(375): Ceres Seq. ID no. 15174641
MTCADSVQHGDLPFAGSLIENMQGLLAHVNTNIGIGKVAGYFIDALRRRIFAQGVFLTSCSYPIEDDVLYHHYYEACPYLKFAHFTANQAILEAFNGHDCVHVIDFNLMQGLQWPALIQALALRPGGPPLLRLTGIGLPSSDNRDTLREIGLRLAELARSVNVRFAFRGVAAWRLEDVKPWMLQVNPNEAVAVNSIMQLHRLLASDSDPAGSGIETVLGWIRSLNPKIISVVEQEANHNEDMFLERFTEALHYYSTVFDSLEACPVEPDKALAEMYLQREICNVVCCEGPARVERHEPLDKWRKRLGKAGFKPLHLGSNAYKQASMLLTLFSAEGYCVEENQGCLTLGWHSRPLIAASAWHAAPVQDRETLRFEQ

SEQ ID NO: 53189 - DNA, 1244 bp, Glycine max
  misc_feature (1)..(1244): Ceres Seq. ID no. 14304716
aacatcacacatcacaacacaacttccacattccgatggaggagtcatgggaaaattggcatcttcatatggaaaccggttgcgagaacgatttcttaggcaagtgtcacggcactgacgatgacgagttcttcagagacatccttcagcaaccaccacctgcggctttctcttccgaaagcgaaagcgatcactccttcctcgctgtccaaaacacttctagcatccccaacgacggtgccgttttgtctcctaggaattacctcgtcaaaagcagcagctccaactccttggtctctcaaaacgcttccaaacgacctcgtcgtttgtcctctcccaggacttacattctgtccttcgacaactcaaccatggttccggccacacccgaaacccgcccccgctcctccaataattcccctctgcctgccaaacgggccctggaaagcccaggcccagtagcccgaaggcccaaccaaggagctaagaagataagaacctcttctcagaccatcgatcacataatggccgagagacgacggaggcaggaactcacggagaggttcatagcactctcagccacgattcccggcttgaacaagacggacaaggcttctgtacttcgagcagcaattgattacgtgaaacaacttcaagaaagggtacaggaactggagaaacaagacaaaaaaaggagtacagagtcagtaatattcatcaagaaacccgacccaaatggaaacgatgaagacaccacctccactgaaacgaactgtagcatccttcctgagatggaagcaagggtgatggggaaggaggtgctcattgagatccactgtgagaaagaaaatggtgttgagctaaaaatattggaccaccttgaaaatcttcatctcagtgttaccggaagcagtgtcttgccatttggaaattctgctctctgcattaccatcacaactcagatgggtgacgggtaccaaatgactgtgaatgatctagtgaaaaaccttagacaattgttctcaaaatcacatgtgctaagcgacagcgatccgtactagtgtatcaaacaatgagttgtagtgtatggaaatcgaaagttttggatttattactctctttgattttggcttgttttcatgttgatcgtaacgttaataaacaaatactaaatgtctgacatgaatttatgcccggcatctaccctgatatcccattaatgtgaaaacgaaatttctttttag

SEQ ID NO: 53190 - protein, 352 aa, Glycine max
  peptide (1)..(352): Ceres Seq. ID no. 14304717
HHTSQHNFHIPMEESWENWHLHMETGCENDFLGKCHGTDDDEFFRDILQQPPPAAFSSESESDHSFLAVQNTSSIPNDGAVLSPRNYLVKSSSSNSLVSQNASKRPRRLSSPRTYILSFDNSTMVPATPETRPRSSNNSPLPAKRALESPGPVARRPNQGAKKIRTSSQTIDHIMAERRRRQELTERFIALSATIPGLNKTDKASVLRAAIDYVKQLQERVQELEKQDKKRSTESVIFIKKPDPNGNDEDTTSTETNCSILPEMEARVMGKEVLIEIHCEKENGVELKILDHLENLHLSVTGSSVLPFGNSALCITITTQMGDGYQMTVNDLVKNLRQLFSKSHVLSDSDPY

SEQ ID NO: 53191 - protein, 341 aa, Glycine max
  peptide (1)..(341): Ceres Seq. ID no. 14304718
MEESWENWHLHMETGCENDFLGKCHGTDDDEFFRDILQQPPPAAFSSESESDHSFLAVQNTSSIPNDGAVLSPRNYLVKSSSSNSLVSQNASKRPRRLSSPRTYILSFDNSTMVPATPETRPRSSNNSPLPAKRALESPGPVARRPNQGAKKIRTSSQTIDHIMAERRRRQELTERFIALSATIPGLNKTDKASVLRAAIDYVKQLQERVQELEKQDKKRSTESVIFIKKPDPNGNDEDTTSTETNCSILPEMEARVMGKEVLIEIHCEKENGVELKILDHLENLHLSVTGSSVLPFGNSALCITITTQMGDGYQMTVNDLVKNLRQLFSKSHVLSDSDPY

SEQ ID NO: 53192 - protein, 330 aa, Glycine max
  peptide (1)..(330): Ceres Seq. ID no. 14304719
METGCENDFLGKCHGTDDDEFFRDILQQPPPAAFSSESESDHSFLAVQNTSSIPNDGAVLSPRNYLVKSSSSNSLVSQNASKRPRRLSSPRTYILSFDNSTMVPATPETRPRSSNNSPLPAKRALESPGPVARRPNQGAKKIRTSSQTIDHIMAERRRRQELTERFIALSATIPGLNKTDKASVLRAAIDYVKQLQERVQELEKQDKKRSTESVIFIKKPDPNGNDEDTTSTETNCSILPEMEARVMGKEVLIEIHCEKENGVELKILDHLENLHLSVTGSSVLPFGNSALCITITTQMGDGYQMTVNDLVKNLRQLFSKSHVLSDSDPY

SEQ ID NO: 53193 - DNA, 1447 bp, Glycine max
  misc_feature (1)..(1447): Ceres Seq. ID no. 14304969
tcttcatctcaaagtttcactctcactcttcttcttcttcttcttcatcctttctgatctgtgctgttttttcagggtacaacaaaattgggtgctttcggttaaactgtgatgtctccgccagtgctgagcataggggaggaggagggtaaaagcaatgtcactttgttggtttcctcatcaaccaccatggaaagtgtgtgtctcaagagcttagaatttaaagagcgcaactacatgggattatctgattgttcttctgtggacagctcggttccgtccttctctgaagagactaaaagtaatctgaacctgaaagccactgaactcaggctcgggcttccaggatcacagtctcctgatagagattctgatctttgcttaagaagctcaactcaatttgatgaaaaaactttgtttccgttgcgtcctttgactgatgatcaccattcttcagccaagactgctgttttgggaaacaaaagagggttctctgatgccatgaacggcttctcctcagaggggaaattcctagttgattcggaggccgccaatccgatactgtctcccaggcctgcttctaacttgggattaaaacctggttctacacttgagaaggttggagttcagcaaaccaaaatgaaagaagtagcaacaacaaaggccaatgaagctagacccactattgatggttctgcaaataataataacagtgcaccagctaccaaggctcaggttgtgggatggcctcctataagatcattccggaaaaattcattggctaccacttcaaagaacaatgaagaagttgatggaaaagtgggggttggtgcactgtttgtcaaggtcagtatggatggtgctccctatttaaggaaagtagacttgaagaattactctacatatccagaattatcttctgctctagaaaagatgttcagctgttttactatgagtaaatgtggatctcatggaattctgggcagggagatgctgaatgaaaccaagctgaaggaccttcttcatggatcagaatatgttcttacatatgaggacagagagggcgattggatgcttgtgggtgatgttccctgggagatgtttattgaaacatgcaagaggctgaggatcatgaagagttctgatgccattggtctagctcccagggctgttgaaaaatgtaagagcagaacctaggcagtaccagtgttcctcttcgaacatggtgtattggaagcgagaactgaaggcatatgggactggatagaatctcatactaagctgccataatccttctattgtttattatgtgtccgttttatgttgtcatggcgtttatgatttagtaagcttcttttcaagattgttgtgataaaacttaacaaaactctaagacttgactgtgggagtagctatattttatgtacccgagttaatgttatggttg

SEQ ID NO: 53194 - protein, 361 aa, Glycine max
  peptide (1)..(361): Ceres Seq. ID no. 14304970
MSPPVLSIGEEEGKSNVTLLVSSSTTMESVCLKSLEFKERNYMGLSDCSSVDSSVPSFSEETKSNLNLKATELRLGLPGSQSPDRDSDLCLRSSTQFDEKTLFPLRPLTDDHHSSAKTAVLGNKRGFSDAMNGFSSEGKFLVDSEAANPILSPRPASNLGLKPGSTLEKVGVQQTKMKEVATTKANEARPTIDGSANNNNSAPATKAQVVGWPPIRSFRKNSLATTSKNNEEVDGKVGVGALFVKVSMDGAPYLRKVDLKNYSTYPELSSALEKMFSCFTMSKCGSHGILGREMLNETKLKDLLHGSEYVLTYEDREGDWMLVGDVPWEMFIETCKRLRIMKSSDAIGLAPRAVEKCKSRT

SEQ ID NO: 53195 - protein, 335 aa, Glycine max
  peptide (1)..(335): Ceres Seq. ID no. 14304971
MESVCLKSLEFKERNYMGLSDCSSVDSSVPSFSEETKSNLNLKATELRLGLPGSQSPDRDSDLCLRSSTQFDEKTLFPLRPLTDDHHSSAKTAVLGNKRGFSDAMNGFSSEGKFLVDSEAANPILSPRPASNLGLKPGSTLEKVGVQQTKMKEVATTKANEARPTIDGSANNNNSAPATKAQVVGWPPIRSFRKNSLATTSKNNEEVDGKVGVGALFVKVSMDGAPYLRKVDLKNYSTYPELSSALEKMFSCFTMSKCGSHGILGREMLNETKLKDLLHGSEYVLTYEDREGDWMLVGDVPWEMFIETCKRLRIMKSSDAIGLAPRAVEKCKSRT

SEQ ID NO: 53196 - protein, 319 aa, Glycine max
  peptide (1)..(319): Ceres Seq. ID no. 14304972
MGLSDCSSVDSSVPSFSEETKSNLNLKATELRLGLPGSQSPDRDSDLCLRSSTQFDEKTLFPLRPLTDDHHSSAKTAVLGNKRGFSDAMNGFSSEGKFLVDSEAANPILSPRPASNLGLKPGSTLEKVGVQQTKMKEVATTKANEARPTIDGSANNNNSAPATKAQVVGWPPIRSFRKNSLATTSKNNEEVDGKVGVGALFVKVSMDGAPYLRKVDLKNYSTYPELSSALEKMFSCFTMSKCGSHGILGREMLNETKLKDLLHGSEYVLTYEDREGDWMLVGDVPWEMFIETCKRLRIMKSSDAIGLAPRAVEKCKSRT

SEQ ID NO: 53197 - DNA, 1613 bp, Glycine max
  misc_feature (1)..(1613): Ceres Seq. ID no. 14311095
ggtatcagcataaaccacaacacattcaattccaccatgagaacttctttggggagtttttcttcacccttcacaagcttccgttccgcctcatcatggttcgaggtgtacgccgctttctccacattcatgatgcttctgagaaccgcgatcaacgatctcataccccaccaagttcgcaccttcatagtcacaaagataaaggctttgttctcagatcgccaaaatattaaccaggtctcactccagatcaacgagatttgggatggccaaatcaaccagctcttccaagccgcccaagagtatctccctgctcaaatatcccactcttacaagtccctcaaagttggaaagctcccaaagcacaagaacattgcggtggcagtggatggaacacaagaggtcgtggatcttttccaaggcatcaagctcagctggaagctcgttgagaaaagccccaaaagcgattctgatcaccgcgatcatcatcctaagtctagcggtgttggttacgagaggaagtcatttactctaagctttgatgagaagcatagagatgtagtaatgaacaagtacattaaccacgttctaagcacttaccaggacatgcagacagagcagaaaaccatcaagatccattccattggtggaaggtgttggcagaagagtgacttaactcatccagcttcctttgactcgcttgcattggaacctgagcagaaacaagccattattgatgatttgaatcggtttttgcgacggaaggagctttacaagaaggtggggaagccttggaaacgtggctacctcctttatgggcctcccgggacaggaaaatctagccttattgctgctatagccaactacttgaagtttgatgtgtatgatttggagctaagctctatgttttctaactcggaactcatgcgagtcatgagggaaacaaccaaccgctccatcatcgtcatcgaagacatagactgcaacaaagaggtgcatgctcgaccaacaacgaaacctttttcagattcagattcagacttcgaccgcaagcgtgttaaggttaagccttacaggtttactctgtcgggtctgcttaacaacatggatggtttgtggtcaagtggtggagaggagcgaattataatattcactactaaccacagagagagaattgaccctgcattgctgcgccctggtcgtatggacatgcacattcacttgtccttcctcaaaggcaaggcctttcgagtcttggcttccaattatttaggaattgaagatcattcactttttgaagaaattgatggactattggagaaattagaagtcacccctgcagtagtagcagagcaactgatgagaaatgaggatcctgaagttgctttggaaggacttgttgaatttctcaaagaaaaggacaaagaaagcctacttagatttatgaatgagactgcagactaaatagcatgttttagagtcttttcatctgtatcaccaccagtataagatgcagaataaaaatgaatgccctttgcttttgtaatgtttaggatttgtacttatgtatggaattgttgtacaatttcaatgcaaaaaagatttgaagattt

SEQ ID NO: 53198 - protein, 487 aa, Glycine max
  peptide (1)..(487): Ceres Seq. ID no. 14311096
GISINHNTFNSTMRTSLGSFSSPFTSFRSASSWFEVYAAFSTFMMLLRTAINDLIPHQVRTFIVTKIKALFSDRQNINQVSLQINEIWDGQINQLFQAAQEYLPAQISHSYKSLKVGKLPKHKNIAVAVDGTQEVVDLFQGIKLSWKLVEKSPKSDSDHRDHHPKSSGVGYERKSFTLSFDEKHRDVVMNKYINHVLSTYQDMQTEQKTIKIHSIGGRCWQKSDLTHPASFDSLALEPEQKQAIIDDLNRFLRRKELYKKVGKPWKRGYLLYGPPGTGKSSLIAAIANYLKFDVYDLELSSMFSNSELMRVMRETTNRSIIVIEDIDCNKEVHARPTTKPFSDSDSDFDRKRVKVKPYRFTLSGLLNNMDGLWSSGGEERIIIFTTNHRERIDPALLRPGRMDMHIHLSFLKGKAFRVLASNYLGIEDHSLFEEIDGLLEKLEVTPAVVAEQLMRNEDPEVALEGLVEFLKEKDKESLLRFMNETAD

SEQ ID NO: 53199 - protein, 475 aa, Glycine max
  peptide (1)..(475): Ceres Seq. ID no. 14311097
MRTSLGSFSSPFTSFRSASSWFEVYAAFSTFMMLLRTAINDLIPHQVRTFIVTKIKALFSDRQNINQVSLQINEIWDGQINQLFQAAQEYLPAQISHSYKSLKVGKLPKHKNIAVAVDGTQEVVDLFQGIKLSWKLVEKSPKSDSDHRDHHPKSSGVGYERKSFTLSFDEKHRDVVMNKYINHVLSTYQDMQTEQKTIKIHSIGGRCWQKSDLTHPASFDSLALEPEQKQAIIDDLNRFLRRKELYKKVGKPWKRGYLLYGPPGTGKSSLIAAIANYLKFDVYDLELSSMFSNSELMRVMRETTNRSIIVIEDIDCNKEVHARPTTKPFSDSDSDFDRKRVKVKPYRFTLSGLLNNMDGLWSSGGEERIIIFTTNHRERIDPALLRPGRMDMHIHLSFLKGKAFRVLASNYLGIEDHSLFEEIDGLLEKLEVTPAVVAEQLMRNEDPEVALEGLVEFLKEKDKESLLRFMNETAD

SEQ ID NO: 53200 - protein, 444 aa, Glycine max
  peptide (1)..(444): Ceres Seq. ID no. 14311098
MMLLRTAINDLIPHQVRTFIVTKIKALFSDRQNINQVSLQINEIWDGQINQLFQAAQEYLPAQISHSYKSLKVGKLPKHKNIAVAVDGTQEVVDLFQGIKLSWKLVEKSPKSDSDHRDHHPKSSGVGYERKSFTLSFDEKHRDVVMNKYINHVLSTYQDMQTEQKTIKIHSIGGRCWQKSDLTHPASFDSLALEPEQKQAIIDDLNRFLRRKELYKKVGKPWKRGYLLYGPPGTGKSSLIAAIANYLKFDVYDLELSSMFSNSELMRVMRETTNRSIIVIEDIDCNKEVHARPTTKPFSDSDSDFDRKRVKVKPYRFTLSGLLNNMDGLWSSGGEERIIIFTTNHRERIDPALLRPGRMDMHIHLSFLKGKAFRVLASNYLGIEDHSLFEEIDGLLEKLEVTPAVVAEQLMRNEDPEVALEGLVEFLKEKDKESLLRFMNETAD

SEQ ID NO: 53201 - DNA, 1469 bp, Glycine max
  misc_feature (1)..(1469): Ceres Seq. ID no. 14311337
gatttaggcctataattcattctttgtggccaatgaagtttcggacccacatgtgtgtctctagataaacaaaaaattacttgagaaaacgggcccttttcaaaagaagatacgagtgcttaaataaagaaaagaggaacagctaaatgagaagaccaaggcaatgttaaagctaattgaagaagatgcagattcctttgcccaacgtgcagagatgtattacaagaagagaccacagcttgtgagcatggttgaagatttctataggacacaccgctcattagccgagcggtatgatcaagtcactggaattcgccagcagaagacaggatcacctttttctccaatcaagaatcatcaatcagagaagttgatgagttttacacatgacagttatgatagctattctgagtgttttgatgtagaggagtctgtggaatctgaagttgatgatcctgagcaagaagaggaagaggttaccaaatttgataactgtatagaagaggaggaagttaagattgtggctgcaaatgatgaagtgatggggctgaggaaagaaatcaacagacttggtgaagagaacaaggatcataaagatcaaattaaggagaaatataacgtttatgatgaagttatggtgttgagggaagaagtagaaggactcagaaaagagaatagagtgcagaaggatgagctcaaccagaaaagtatcatttgtggtgaagtaatgatattgagggaagaaatagaacgactcaaagaagagaatagagagcagaaggatgaactcaaccagaaagatatcatttgtggtgaagtaatgatgttgagggaagaaattgaaggactcagaaaagagaatagagagcagaagggtgaactcaaccagaaaagtatcatttgtagtgacgtaatgatgttgagggaagaaatagaacgactcagaaaagagaatagagagcaaaatgatgaactcaagcagaaaggtaccatttatggtgaagtaatgatgttaaggaaggagatagaaagagtcagcgaagagaatatggtacagaaggaccatctcatgcaaaaagacctagagaaaatagaggtgattagacacctgagtttagctatagatgtgctgaagcaggagaatgtaaagatgagaagcttcattgctaaggaatttaccaacaaatggaacaacccatttgagtttaaaaaactcatgggatcattatcgatgaagttgtttaatggaaagaatcaacctagtattgtagctctatagatatggttcagaaagtaaatagcgtagttctgtagagcaatcttataaaaatgtctacgtaaatattttggggacttatcaagtaacccacaattcttgtaaacagtacattcctaatcagagaatcctagtagactttcctatacaactaattaatatttttatacatccttcgttagcgaaaaaaaag

SEQ ID NO: 53202 - protein, 371 aa, Glycine max
  peptide (1)..(371): Ceres Seq. ID no. 14311338
MLKLIEEDADSFAQRAEMYYKKRPQLVSMVEDFYRTHRSLAERYDQVTGIRQQKTGSPFSPIKNHQSEKLMSFTHDSYDSYSECFDVEESVESEVDDPEQEEEEVTKFDNCIEEEEVKIVAANDEVMGLRKEINRLGEENKDHKDQIKEKYNVYDEVMVLREEVEGLRKENRVQKDELNQKSIICGEVMILREEIERLKEENREQKDELNQKDIICGEVMMLREEIEGLRKENREQKGELNQKSIICSDVMMLREEIERLRKENREQNDELKQKGTIYGEVMMLRKEIERVSEENMVQKDHLMQKDLEKIEVIRHLSLAIDVLKQENVKMRSFIAKEFTNKWNNPFEFKKLMGSLSMKLFNGKNQPSIVAL

SEQ ID NO: 53203 - protein, 354 aa, Glycine max
  peptide (1)..(354): Ceres Seq. ID no. 14311339
MYYKKRPQLVSMVEDFYRTHRSLAERYDQVTGIRQQKTGSPFSPIKNHQSEKLMSFTHDSYDSYSECFDVEESVESEVDDPEQEEEEVTKFDNCIEEEEVKIVAANDEVMGLRKEINRLGEENKDHKDQIKEKYNVYDEVMVLREEVEGLRKENRVQKDELNQKSIICGEVMILREEIERLKEENREQKDELNQKDIICGEVMMLREEIEGLRKENREQKGELNQKSIICSDVMMLREEIERLRKENREQNDELKQKGTIYGEVMMLRKEIERVSEENMVQKDHLMQKDLEKIEVIRHLSLAIDVLKQENVKMRSFIAKEFTNKWNNPFEFKKLMGSLSMKLFNGKNQPSIVAL

SEQ ID NO: 53204 - protein, 343 aa, Glycine max
  peptide (1)..(343): Ceres Seq. ID no. 14311340
MVEDFYRTHRSLAERYDQVTGIRQQKTGSPFSPIKNHQSEKLMSFTHDSYDSYSECFDVEESVESEVDDPEQEEEEVTKFDNCIEEEEVKIVAANDEVMGLRKEINRLGEENKDHKDQIKEKYNVYDEVMVLREEVEGLRKENRVQKDELNQKSIICGEVMILREEIERLKEENREQKDELNQKDIICGEVMMLREEIEGLRKENREQKGELNQKSIICSDVMMLREEIERLRKENREQNDELKQKGTIYGEVMMLRKEIERVSEENMVQKDHLMQKDLEKIEVIRHLSLAIDVLKQENVKMRSFIAKEFTNKWNNPFEFKKLMGSLSMKLFNGKNQPSIVAL

SEQ ID NO: 53205 - DNA, 1423 bp, Glycine max
  misc_feature (1)..(1423): Ceres Seq. ID no. 12611971
ctacctcctcttcctcttcctcttcctgcatttctccgcgtgtgtgtatgtgtgtatactctctcaagtacgcacatacatacacatccattcgtacataaatacttatatctcttcttccttcgccgttaattctctgaatccctagctcttctgttctccgatccgatcatggcctcgcttgtcaacaacgctaacggcgccgtcaatggttttcctggaatatcccagaagctcattatcgataccgaccctgggatcgatgatagcatggccattcttatggcttttcaaagtccagatgtggaggttctgggtttgacaaccatttttggtaatacaactaccgaactttcaacactcaatgctttgcttttgtgtgagatggcaggccgtgaagatattccagttgcacagggaagccatgagccattgaagggtggaaagcctcgtgttgctgattttgttcatggtaaagatggactagggaacacattcctacccccacctaaaggtgagaaaattgagaaaagtgctagtgagtttttggtagagaaagtctctgaatatcctggtgaagtatctgtgctagcacttggaccactaacaaatttggctttggcaatcaaaagggattcttcctttgcaagcaaagtgaagagaatagttatacttggtggtgcattctttgccttggggaatgtgaatcctgctgcagaagccaatatccatggagacccggaagccgcagatattgtgtttacctctggggcagatattgttgttattggaataaacattacaacccaagtccaattcacagatgctgatctcctcgaactgaaggaatctaaaggaaagtatgctcccttcttgagtgacatatgcaaattctatagggactttcatgtaaaatctgatggtgtccacggaattttcctccacgatcctgtaagttttgtggcagttgtgcgtccagatcttttcacatacaagaagggggtagtgagggtagaaacacaaggcatctgtgttgggcatacacttatggaccaaggattgaaaaactggaatacgagcaacccatggacgggttattctcctgttgcagttgcttggacagtgaatctcgaggaagttcttgattatatcagggagctggtgatgaaaccctgaagtataggcatttgtactacccttctgacagacaaaaagcattggaaagtgataggacgatagcttcttatttgcaaaaatatgcataaggtcattttctttatttcattcaaggtcacaatgagttcttaccccgtttaatattataaagttcatgtaccaatgaaattctctttacatgaacttatttgtgtttggatttcgctactcttatttgagaagaaagcagtcattctttacttttcct

SEQ ID NO: 53206 - protein, 334 aa, Glycine max
  peptide (1)..(334): Ceres Seq. ID no. 12611972
MASLVNNANGAVNGFPGISQKLIIDTDPGIDDSMAILMAFQSPDVEVLGLTTIFGNTTTELSTLNALLLCEMAGREDIPVAQGSHEPLKGGKPRVADFVHGKDGLGNTFLPPPKGEKIEKSASEFLVEKVSEYPGEVSVLALGPLTNLALAIKRDSSFASKVKRIVILGGAFFALGNVNPAAEANIHGDPEAADIVFTSGADIVVIGINITTQVQFTDADLLELKESKGKYAPFLSDICKFYRDFHVKSDGVHGIFLHDPVSFVAVVRPDLFTYKKGVVRVETQGICVGHTLMDQGLKNWNTSNPWTGYSPVAVAWTVNLEEVLDYIRELVMKP

SEQ ID NO: 53207 - protein, 301 aa, Glycine max
  peptide (1)..(301): Ceres Seq. ID no. 12611973
MAILMAFQSPDVEVLGLTTIFGNTTTELSTLNALLLCEMAGREDIPVAQGSHEPLKGGKPRVADFVHGKDGLGNTFLPPPKGEKIEKSASEFLVEKVSEYPGEVSVLALGPLTNLALAIKRDSSFASKVKRIVILGGAFFALGNVNPAAEANIHGDPEAADIVFTSGADIVVIGINITTQVQFTDADLLELKESKGKYAPFLSDICKFYRDFHVKSDGVHGIFLHDPVSFVAVVRPDLFTYKKGVVRVETQGICVGHTLMDQGLKNWNTSNPWTGYSPVAVAWTVNLEEVLDYIRELVMKP

SEQ ID NO: 53208 - protein, 297 aa, Glycine max
  peptide (1)..(297): Ceres Seq. ID no. 12611974
MAFQSPDVEVLGLTTIFGNTTTELSTLNALLLCEMAGREDIPVAQGSHEPLKGGKPRVADFVHGKDGLGNTFLPPPKGEKIEKSASEFLVEKVSEYPGEVSVLALGPLTNLALAIKRDSSFASKVKRIVILGGAFFALGNVNPAAEANIHGDPEAADIVFTSGADIVVIGINITTQVQFTDADLLELKESKGKYAPFLSDICKFYRDFHVKSDGVHGIFLHDPVSFVAVVRPDLFTYKKGVVRVETQGICVGHTLMDQGLKNWNTSNPWTGYSPVAVAWTVNLEEVLDYIRELVMKP

SEQ ID NO: 53209 - DNA, 561 bp, Glycine max
  misc_feature (1)..(561): Ceres Seq. ID no. 12564563
acgctcaattcattttcttctcctctctctctctcctagggttagggttttctctcttcatcactctctgtgtcgctccgtttcaatggctcagcaagacgctcaaaacggcgggtcggagaatgccgctgctgctgctacggtgtcgtttgtcgctgtgaagccgcagctcctcgtcgaagctcccaaagccaacgacgccattctgttcttcaaggctgcgtttggcgctgaggaagttggccgtacgctcaaccctaagcgcaaagctgagcacgagctccctctcatactctccgcagaactcaaaatcgctggctccaccattctcgtcgccgacctcgttgatgacacttcttcgccagcgaaaacggggggaaacggtgtcgttttgtgcttggagacggaggacgtggatggggcagtagctaaggcggtgagcgctggtgcagttgcggagggcgaagtagcggaaggtgaagtcgcgtgctgcggcgggcgcgtggggaaggttaaggacccgtatggcttcgtttggctcttctgcactccagggaagaa

SEQ ID NO: 53210 - protein, 186 aa, Glycine max
  peptide (1)..(186): Ceres Seq. ID no. 12564564
RSIHFLLLSLSPRVRVFSLHHSLCRSVSMAQQDAQNGGSENAAAAATVSFVAVKPQLLVEAPKANDAILFFKAAFGAEEVGRTLNPKRKAEHELPLILSAELKIAGSTILVADLVDDTSSPAKTGGNGVVLCLETEDVDGAVAKAVSAGAVAEGEVAEGEVACCGGRVGKVKDPYGFVWLFCTPGK

SEQ ID NO: 53211 - protein, 158 aa, Glycine max
  peptide (1)..(158): Ceres Seq. ID no. 12564565
MAQQDAQNGGSENAAAAATVSFVAVKPQLLVEAPKANDAILFFKAAFGAEEVGRTLNPKRKAEHELPLILSAELKIAGSTILVADLVDDTSSPAKTGGNGVVLCLETEDVDGAVAKAVSAGAVAEGEVAEGEVACCGGRVGKVKDPYGFVWLFCTPGK

SEQ ID NO: 53212 - DNA, 1659 bp, Glycine max
  misc_feature (1)..(1659): Ceres Seq. ID no. 14304502
attctaggttccgcaccccgcaaaggaacccgaacctgccatgtgctcgtcgcattccccgaaccaccgttcgaaatgcagagctccagcacctgccaatgccatcatcttcctccttgtaccactcctctgttccctctccttcattaacgtcaattcccagattctagaagcatgctctgccgctacggattgtgggccaggtttgttctgtggcaattgcccctctttgggcttgaagcaacccatctgcaccagaggccaagtcacacttcccacttccattgtcaatgggttgcccttcaacaagtacacgtggatagtgacccacaattccttcagcattgtcgatgcaccgcctttgcccggtgttcagagaattaccttttacaatcaagaagacactgtcactaaccagttgaggaatggagttaggggactgatgttggacatgtacgacttccagaatgatatatggctctgtcactcatttcgcgggcaatgcttcaacttcactgcatttcaaccggcagttaatactttgaaagaagtggaggcgttcttgacggaaaatccaactgagattgttaccatcataattgaagactatgtgcacactccaaaggggttgactaatgtgttcacaagtgctggactggataagtattggtttcctgtgtccaagatgccgaaaaagggtgacgattggcccactgtgacggagatggttcaagcaaatcaccgacttgttgttttcacttccgatgcttcaaaggaagcaggggaaggaatagcttatcagtggaagcacatggttgaaaatgagtctggagatcctggagtgcaacagggttcttgtccgcacagaaaagaatcaaaggcattaaattctaaaagtcattcacttttcctgatgaattactttccgacatatccagttgaagctgactcttgcaaagagcattcagctccacttgctgagatggtcaatacctgttacaaagctgcagggaatttgatgcccaactttatagctgttaatttttacatgaggagtgatggaggtggtgtttttgatattgtggataaaatgaatggccatacactgtgtgggtgtagcactgtcacagcctgccaggtgggtgtaccctttgggtcttgcaagaatatttctgtacctagtacgagtccagtgactaatactgctggaagctttactggatctgttcagttctctaaatcagcttcagctgtccatcttccaaattgtttgcttgtcgtcttttacttcctgcaaagtcttgctgcaactatgatgactataagcactgttttataacttatgtaaggtagtctttaaagaaggatctctagtatcttagcatgtacactgcagtattgtctcaagctgtgaaatgtcatggaactgttactaggttagaaaaattagatatagacaaattcttgtttcttgctgaggttatgttcaaggatctgtgaagttatttgagttggtagtcatgagagaccaagaatttatctggagctataagtagttcaggtatgttatagttatacttatattcttggatgtacaaatcaaattctagatattgcaagtatgcaactctggatgcatcactttctttcttttctctc

SEQ ID NO: 53213 - protein, 432 aa, Glycine max
  peptide (1)..(432): Ceres Seq. ID no. 14304503
MCSSHSPNHRSKCRAPAPANAIIFLLVPLLCSLSFINVNSQILEACSAATDCGPGLFCGNCPSLGLKQPICTRGQVTLPTSIVNGLPFNKYTWIVTHNSFSIVDAPPLPGVQRITFYNQEDTVTNQLRNGVRGLMLDMYDFQNDIWLCHSFRGQCFNFTAFQPAVNTLKEVEAFLTENPTEIVTIIIEDYVHTPKGLTNVFTSAGLDKYWFPVSKMPKKGDDWPTVTEMVQANHRLVVFTSDASKEAGEGIAYQWKHMVENESGDPGVQQGSCPHRKESKALNSKSHSLFLMNYFPTYPVEADSCKEHSAPLAEMVNTCYKAAGNLMPNFIAVNFYMRSDGGGVFDIVDKMNGHTLCGCSTVTACQVGVPFGSCKNISVPSTSPVTNTAGSFTGSVQFSKSASAVHLPNCLLVVFYFLQSLAATMMTISTVL

SEQ ID NO: 53214 - protein, 298 aa, Glycine max
  peptide (1)..(298): Ceres Seq. ID no. 14304504
MLDMYDFQNDIWLCHSFRGQCFNFTAFQPAVNTLKEVEAFLTENPTEIVTIIIEDYVHTPKGLTNVFTSAGLDKYWFPVSKMPKKGDDWPTVTEMVQANHRLVVFTSDASKEAGEGIAYQWKHMVENESGDPGVQQGSCPHRKESKALNSKSHSLFLMNYFPTYPVEADSCKEHSAPLAEMVNTCYKAAGNLMPNFIAVNFYMRSDGGGVFDIVDKMNGHTLCGCSTVTACQVGVPFGSCKNISVPSTSPVTNTAGSFTGSVQFSKSASAVHLPNCLLVVFYFLQSLAATMMTISTVL

SEQ ID NO: 53215 - protein, 295 aa, Glycine max
  peptide (1)..(295): Ceres Seq. ID no. 14304505
MYDFQNDIWLCHSFRGQCFNFTAFQPAVNTLKEVEAFLTENPTEIVTIIIEDYVHTPKGLTNVFTSAGLDKYWFPVSKMPKKGDDWPTVTEMVQANHRLVVFTSDASKEAGEGIAYQWKHMVENESGDPGVQQGSCPHRKESKALNSKSHSLFLMNYFPTYPVEADSCKEHSAPLAEMVNTCYKAAGNLMPNFIAVNFYMRSDGGGVFDIVDKMNGHTLCGCSTVTACQVGVPFGSCKNISVPSTSPVTNTAGSFTGSVQFSKSASAVHLPNCLLVVFYFLQSLAATMMTISTVL

SEQ ID NO: 53216 - DNA, 2250 bp, Glycine max
  misc_feature (1)..(2250): Ceres Seq. ID no. 13495070
aacttcattttctccttccgttcctttcttcgttccttccccaacccaatcttcgccttcgcccacaacaactcctccttcaggatcgctgccaacgttactttccatttttacccttcatcctcgagaaaaaaatggcgaacgcagcatctggtatggccgtccatgatgagtgcaagctaaagtttctggagctcaaggcgaagaggacgtaccggtatatcgtttttaagattgaggagaaatcgaagcaagttattgtggagaagctgggtgaccctgcaaatggctatgatgaattcgctgccagtcttcctgctgatgagtgtcgatatgctgtttatgattttgattttgtcactgaagagaattgccaaaagagcagaattttcttcattgcttggtcccctgatacatctagggttaggagcaagatgatttatgccagctccaaagatagattcaagagggagcttgatggaattcagattgagctgcaagcaactgatcctactgagatgggtcttgatgtgttcaaaagccgtgccaattaaatgattccgattattcataaataggagttgtgatggggatggtcaacttggctaatttggactcaattttccaagttttgacatgaggtctattgcagcttcaacaaagcttctcttgttccagtgtatcttgtggtttgcgacatataacccgtgtttgggtgtaatcttagtcctattcctagtagttaattttgtaactgttctttgtgtgattgaacgaaaatttgggaccaggtattgatgtaatgttgccagttgccatcttactaatgtcttatgacttaaattaactaaaatactttcttgaaaacaatttaatacatattatgaactatgttatcataacaaagtcgaggggtaagttttgtggatgcaaaaaaaaaaaaaaaatcgaaacgaggtcgttttgtgttccgccgaaggcaccggaggttgtagcaggctagcagctatggatttggcatccaatctcggtggcaagattgacaaagccgaagttctctctgccgttcagaagtatgagaagtatcatgtttgctatggaggtcaagaggaagagaggaaagctaattataccgatatggttaataaatactacgatcttgttaccagcttttatgagtttggctggggggaatctttccattttgcacccagatggaaaggggaatctcttcgagagagcatcaagcgacatgaacacttccttcctttacaacttggactgaagccagggcagaaggttttggatgttggatgtggaattgggggaccattaagagaaatttctcgatttagctcaacttcaattaccgggttgaataacaatgagtaccagataacaagaggaaaggaactcaatcgcattgctggagtggacaagacttgcaattttgtcaaggctgacttcatgaaaatgccattcccagacaacagttttgatgcagtgtatgcgattgaagccacttgccatgcaccggatgcttatggatgctataaagagatttttagagtgttaaagcctggtcaatattttgctgcttatgaatggtgcatgaccgattcttttgatccccaaaacccagagcaccaaaaaatcaaggcagaaattgagattggtgatgggctacctgacattcgattgactgctaagtgtcttgaagctctgaagcaagcaggttttgaggtaatatgggagaaagatctagcagtggactctcctcttccttggtatttgcctttagacaaaagtcacttctcactgagtagcttccgtctaactgctgtcgggcgacttttcaccaaaaacatggtcaaggttctggagtatgttggactggctccaaagggtagtctaagggttcaagacttcctggagaaggctgcagagggactagttgaaggagggaagagagagattttcacaccaatgtacttcttcctggcacggaagcctgatttagacaggaactaagctggctgtacaaataggttgctgttttcatcagttacggtgattctggtagggtgaaccgtaagctaggattgtttttggccttgttgccttagtgattcttgctgtttctttgttttgtttaggttaccaacacttcattttgctgcttgtttcgatgaagcagtgctcctccatattatgtttaccctacatattatatgctcttttactttgttt

SEQ ID NO: 53217 - protein, 367 aa, Glycine max
  peptide (1)..(367): Ceres Seq. ID no. 13495071
MQKKKKNRNEVVLCSAEGTGGCSRLAAMDLASNLGGKIDKAEVLSAVQKYEKYHVCYGGQEEERKANYTDMVNKYYDLVTSFYEFGWGESFHFAPRWKGESLRESIKRHEHFLPLQLGLKPGQKVLDVGCGIGGPLREISRFSSTSITGLNNNEYQITRGKELNRIAGVDKTCNFVKADFMKMPFPDNSFDAVYAIEATCHAPDAYGCYKEIFRVLKPGQYFAAYEWCMTDSFDPQNPEHQKIKAEIEIGDGLPDIRLTAKCLEALKQAGFEVIWEKDLAVDSPLPWYLPLDKSHFSLSSFRLTAVGRLFTKNMVKVLEYVGLAPKGSLRVQDFLEKAAEGLVEGGKREIFTPMYFFLARKPDLDRN

SEQ ID NO: 53218 - protein, 340 aa, Glycine max
  peptide (1)..(340): Ceres Seq. ID no. 13495072
MDLASNLGGKIDKAEVLSAVQKYEKYHVCYGGQEEERKANYTDMVNKYYDLVTSFYEFGWGESFHFAPRWKGESLRESIKRHEHFLPLQLGLKPGQKVLDVGCGIGGPLREISRFSSTSITGLNNNEYQITRGKELNRIAGVDKTCNFVKADFMKMPFPDNSFDAVYAIEATCHAPDAYGCYKEIFRVLKPGQYFAAYEWCMTDSFDPQNPEHQKIKAEIEIGDGLPDIRLTAKCLEALKQAGFEVIWEKDLAVDSPLPWYLPLDKSHFSLSSFRLTAVGRLFTKNMVKVLEYVGLAPKGSLRVQDFLEKAAEGLVEGGKREIFTPMYFFLARKPDLDRN

SEQ ID NO: 53219 - protein, 297 aa, Glycine max
  peptide (1)..(297): Ceres Seq. ID no. 13495073
MVNKYYDLVTSFYEFGWGESFHFAPRWKGESLRESIKRHEHFLPLQLGLKPGQKVLDVGCGIGGPLREISRFSSTSITGLNNNEYQITRGKELNRIAGVDKTCNFVKADFMKMPFPDNSFDAVYAIEATCHAPDAYGCYKEIFRVLKPGQYFAAYEWCMTDSFDPQNPEHQKIKAEIEIGDGLPDIRLTAKCLEALKQAGFEVIWEKDLAVDSPLPWYLPLDKSHFSLSSFRLTAVGRLFTKNMVKVLEYVGLAPKGSLRVQDFLEKAAEGLVEGGKREIFTPMYFFLARKPDLDRN

SEQ ID NO: 53220 - DNA, 1230 bp, Glycine max
  misc_feature (1)..(1230): Ceres Seq. ID no. 15177557
gatctgcccctttctctgtgcaattagcgtgccctaggcctgsccatgggagacgaagaagaggaggaggtgctcggttcgggtcaatcagcctccaccaacagcttgccacctcccgctgatagcacactcctcaaattgaaccatctcgacatacatgctgatgatgctgtatcacacgcttctcttgctgccaagaagaaaaagagaggcggccaacgggctgttggacctgataagagtggaagaggtctccgccaatttagtatgaaagtgtgtgagaaggtagaaagcaggggaagaacaacatacaatgaggtggcagatgagcttgttgccgaattttctgaaccaagcaatagtgaattgccccctgatcagcaacaatatgatgagaaaaacatccgccgaagggtctatgatgctctgaacgttctcatggcaatggatattatttctaaggacaaaaaagaaattcaatggaggggccttcctcgtactactgtgaatgatattgaagaactaaagacagagcgtcttgggctcaggaatagaattgaaaagaaaacagcctatctgcaggagcttgaggagcaattcgtaggtcttcagaaccttattcaacgaaatgagcagttatatagctcaggaaatcctcccagtggaggtgtatctttaccttttattttggtacagacacgtcctcatgcaactgtggaagtggaaatatcagaagatatgcagcttgttcattttgatttcaatagcactccttttgagctgcatgacgacaattatgttctcaaggcaatgaaatttggtgagagaccactggaagataatatgacacataatcttactgatggaggtgaaggttctagcatgtcaggcttgtgtcagccgcaggctcctacaattctaaatgtgtcaaacaggcctccaacatcacctcctctccctggcatactaaaggcaagagttaagcaagagcattaatctgtaaggttatcatattatgttgtcttatgtaaaagcatgtttgtatattttgtagagaaatttgctgcagttgatagaccgtcataatagttattcatcagttcagccaagtcattctgtaggttagaagcagatcggtatatcttctttgttaggggtagactttggcacattctttgcctatcatccgtcatttattaccgtaaaatttttaattttttgttttcccac

SEQ ID NO: 53221 - protein, 316 aa, Glycine max
  peptide (1)..(316): Ceres Seq. ID no. 15177558
MGDEEEEEVLGSGQSASTNSLPPPADSTLLKLNHLDIHADDAVSHASLAAKKKKRGGQRAVGPDKSGRGLRQFSMKVCEKVESRGRTTYNEVADELVAEFSEPSNSELPPDQQQYDEKNIRRRVYDALNVLMAMDIISKDKKEIQWRGLPRTTVNDIEELKTERLGLRNRIEKKTAYLQELEEQFVGLQNLIQRNEQLYSSGNPPSGGVSLPFILVQTRPHATVEVEISEDMQLVHFDFNSTPFELHDDNYVLKAMKFGERPLEDNMTHNLTDGGEGSSMSGLCQPQAPTILNVSNRPPTSPPLPGILKARVKQEH

SEQ ID NO: 53222 - protein, 242 aa, Glycine max
  peptide (1)..(242): Ceres Seq. ID no. 15177559
MKVCEKVESRGRTTYNEVADELVAEFSEPSNSELPPDQQQYDEKNIRRRVYDALNVLMAMDIISKDKKEIQWRGLPRTTVNDIEELKTERLGLRNRIEKKTAYLQELEEQFVGLQNLIQRNEQLYSSGNPPSGGVSLPFILVQTRPHATVEVEISEDMQLVHFDFNSTPFELHDDNYVLKAMKFGERPLEDNMTHNLTDGGEGSSMSGLCQPQAPTILNVSNRPPTSPPLPGILKARVKQEH

SEQ ID NO: 53223 - protein, 185 aa, Glycine max
  peptide (1)..(185): Ceres Seq. ID no. 15177560
MAMDIISKDKKEIQWRGLPRTTVNDIEELKTERLGLRNRIEKKTAYLQELEEQFVGLQNLIQRNEQLYSSGNPPSGGVSLPFILVQTRPHATVEVEISEDMQLVHFDFNSTPFELHDDNYVLKAMKFGERPLEDNMTHNLTDGGEGSSMSGLCQPQAPTILNVSNRPPTSPPLPGILKARVKQEH

SEQ ID NO: 53224 - DNA, 1679 bp, Glycine max
  misc_feature (1)..(1679): Ceres Seq. ID no. 14311291
tattataattttattttcaatcacatgagttacaaatgtatctgcgtgcaaaaaagattgaatgttccttgaagatactaaataatacaattttatcaagcagaaccaagttatatttttaagtgtatcgttacctatcattgcattctattacaaatattctatcattgcattctattacatgggattataagtgttctgatttgtctttagttatatttttaattacttaatgttctaattaattgaaaaaaccattttttaaataaagttgctttctgattagtatttgttagagatgcaatataaagtcattcatgtatcgttacctagcagcttgagctttttggatagtttgttaatgacatggtatgaaattctctgactatgtggtctagagttcaatcctttatactcttattcttctaataaaacgttaaatttcaaccaaggtagatcatatgtggacttgtgcattatccacacttaatgtccaaaaggctcttgcatgagaggcatgttaaagatgtaaaataaaatcattcatgtatcttcacctatgaacttaagctttttggataatttgttcttgatagtaataattagtaaaatcaaatctgttatttaaatgtatcaaaatttacatgtgaaaatttaaattggtctaagttcattatagtttgtctttgactattatagtcctttatacctttctttaaatgggtatgtactaagttgtggggatgttatcgcatcatcactttccttttttatgaaatttcattaacattaagtttaaaaacttccagccactaggtcacttgatttttcctgctcaatttataggttactcaaatgaagcaggagcatgacaagaggcaagcaagcctcatagctgaacacaacgaacagctaaagcgtacccaactgcaagctgaaaatgaattgagagagaaaacaatgtttatgaggaatgatcatgaagctcagatcaaagcattgaggtgtgaacttgaagatgagtgtcggaagctggaagaggagttgcatcttcaaaaaatccaaagaagacaggcaaagggctttgttgcagttgcagtggaaagtgatgagtgacaagcctaaagaggaccaagaagtgaattcaaaacaggccacgaggttgtaacatatgaaagtccgcgaccgatgatggggattcatcgtttagtgtttgtgttatttcgtcaactgggtagggaaacagtgtatgcaccaggatggcgccagaatttcaacactagagaatttgctgaactctacaaccttggattgccagttgctgctgtctatttcaacattcagagggaatctggctctggtggaagaaggttataccattgagggttctagaaatatttctcccacactctttagtagtaaatgagtgcttttcaacttaatattaaactgagcatatagtgaaataaattgcttgctagatcagttggtagcaacaagtcctctacatatacacataaatgaaatcgaagcatctcggttcatttttcttatttctattatcagctgcagaatgttatagatatattatatatgtaaagtggaaaacaacttgagcccaagttaaattatggggtacttatacttttgctaaaaaaaaaaaaaaaaaaaaaaaaaag

SEQ ID NO: 53225 - protein, 86 aa, Glycine max
  peptide (1)..(86): Ceres Seq. ID no. 14311292
MKQEHDKRQASLIAEHNEQLKRTQLQAENELREKTMFMRNDHEAQIKALRCELEDECRKLEEELHLQKIQRRQAKGFVAVAVESDE

SEQ ID NO: 53226 - protein, 64 aa, Glycine max
  peptide (1)..(64): Ceres Seq. ID no. 14311293
MMGIHRLVFVLFRQLGRETVYAPGWRQNFNTREFAELYNLGLPVAAVYFNIQRESGSGGRRLYH

SEQ ID NO: 53227 - protein, 63 aa, Glycine max
  peptide (1)..(63): Ceres Seq. ID no. 14311294
MGIHRLVFVLFRQLGRETVYAPGWRQNFNTREFAELYNLGLPVAAVYFNIQRESGSGGRRLYH

SEQ ID NO: 53228 - DNA, 1533 bp, Glycine max
  misc_feature (1)..(1533): Ceres Seq. ID no. 15176423
gaggacaaaactcgaagcagaaactcaactcaccaacacagttgcattattttctttccagatccaactcaaaattgcaatgggagtagaagatacagatatttgtatcatcaaggagccagatcatgttgtagtctattcagatggcatttcccatgattcaggtcatgaagctggaagtgatcatcacaatattacagagtcttatgaacaaatcaatgagactactgaacatcatagttcagaggagagtgcaaaggaatatgaggtgaaggaatgtacaacagaaatttctgttaaggtctctgatgtctctaatgttaaaaaatgtgaggataagttaacctcagattctgagggtgtcctcagtgagaaaagttttaaatctcacaaaacaaggtgtaaacataagccacgagataccgggaagaatggatcaagacctcctgttacaggcagtgcccaaatcaggcccacagttccacaaccgttttccctagcaactgagaagcgtgcttcgatcgcaactcgtcctgcttttgaagaagacaacaagggcagtaacgagagaaaatctttgaacaaaaaaaatgtgctatctcccaatctgtttaaacagaatcagttgaaatctcctgtagtttcaagaatgccattgcaacctgataacaagaagcatcctgatgatgatgattcttgttcagttgcttcaataactgcagcttctgtgagatcaatcaagtccaggacaactgttgcttctgctcccgtgtttcggtctactcaacgtgcagaaaaacggaaggagttttattcaaaattagaggaaaagcagcaagcaatggaagctgagaagaatcaaagtgaagctaggaccaaggaagagatggaggaagctatcaagcagctaaggaagagtctaacttttaaagcaagccctatgccaagcttttaccatgaagggcctcctcctaaggttgaattgaagaagcttccagccacgcgagcaaaatctccaaagctgggtcggcgaaagagcaacaatggtgcagttaatttatctgaaggtgacaaggagaaaggagctggaatcaggagaaagcatcacacaccgaagaccaacaactatggtgataagagtgatgtaaatggcttatctgaccccaaaaacaagaccaagcatattgaaggaattaatgcaaccgaggtaactggacaagcaaacttggagattggcagccagtgaagttttcagtgagattagattctcatttttctaatttatatgtatccagggactgtggtcttgtttcttgcaacaagcatcttcactttgtttttccttttaacttatgagcacttgctgctgtgtgcattgtgtaattagtgaaagtgtttatttgtaatttatttcaaattatttgtaaaattcaatcatgttgctcataagagcaatttgagcatttgtttgtctgtctgaagtccaggatcagattgttttaagtcgccattaaataatgctgttcgattaac

SEQ ID NO: 53229 - protein, 414 aa, Glycine max
  peptide (1)..(414): Ceres Seq. ID no. 15176424
RTKLEAETQLTNTVALFSFQIQLKIAMGVEDTDICIIKEPDHVVVYSDGISHDSGHEAGSDHHNITESYEQINETTEHHSSEESAKEYEVKECTTEISVKVSDVSNVKKCEDKLTSDSEGVLSEKSFKSHKTRCKHKPRDTGKNGSRPPVTGSAQIRPTVPQPFSLATEKRASIATRPAFEEDNKGSNERKSLNKKNVLSPNLFKQNQLKSPVVSRMPLQPDNKKHPDDDDSCSVASITAASVRSIKSRTTVASAPVFRSTQRAEKRKEFYSKLEEKQQAMEAEKNQSEARTKEEMEEAIKQLRKSLTFKASPMPSFYHEGPPPKVELKKLPATRAKSPKLGRRKSNNGAVNLSEGDKEKGAGIRRKHHTPKTNNYGDKSDVNGLSDPKNKTKHIEGINATEVTGQANLEIGSQ

SEQ ID NO: 53230 - protein, 388 aa, Glycine max
  peptide (1)..(388): Ceres Seq. ID no. 15176425
MGVEDTDICIIKEPDHVVVYSDGISHDSGHEAGSDHHNITESYEQINETTEHHSSEESAKEYEVKECTTEISVKVSDVSNVKKCEDKLTSDSEGVLSEKSFKSHKTRCKHKPRDTGKNGSRPPVTGSAQIRPTVPQPFSLATEKRASIATRPAFEEDNKGSNERKSLNKKNVLSPNLFKQNQLKSPVVSRMPLQPDNKKHPDDDDSCSVASITAASVRSIKSRTTVASAPVFRSTQRAEKRKEFYSKLEEKQQAMEAEKNQSEARTKEEMEEAIKQLRKSLTFKASPMPSFYHEGPPPKVELKKLPATRAKSPKLGRRKSNNGAVNLSEGDKEKGAGIRRKHHTPKTNNYGDKSDVNGLSDPKNKTKHIEGINATEVTGQANLEIGSQ

SEQ ID NO: 53231 - DNA, 1291 bp, Glycine max
  misc_feature (1)..(1291): Ceres Seq. ID no. 14310917
gaatcttaaataagagaacagcccaaaacctttcaaaatacacatgctgcaaattgctcacccaatcaccagccatgggagaggttgacgcagcattcatccaagacccaccacacaggccaaagctctccaccatccaagccgaaggaattcccataattgatctctctccaataaccaaccacagagtttcagacccttctgctattgaaggcttagtgaaggagataggtagtgcatgcaacgagtggggtttcttccaagtaacaaaccatggagtgcccctcactctaaggcaaaacattgagaaagcctcaaaattgttctttgcacagagtgcggaggaaaagagaaaggttagcagaaatgagagctctccagcgggttattatgacacagaacacaccaaaaacgttagggactggaaagaagtctttgattttctagccaaagaacccactttcattcctgtcacttctgatgaacatgatgatcgagtcaatcagtggactaatcaatcccctgaataccctctaaactttagggttgtaacacaagagtatattcaagagatggaaaagctgtcctttaagattttagagcttatagctttgagcttaggccttgaagcaaagaggtttgaagaatttttcatcaaagaccaaactagctttattcgactcaaccactatcctccatgcccttatcctgaccttgctcttggcgtcggtcgacacaaggaccctggtgccttaaccattcttgcacaggatgaggttggaggacttgaagtgagacgtaaagcagatcaagagtggataagagtgaaacccaccccagatgcttatatcatcaacattggtgacactgttcaggtttggagcaatgatgcatatgagagtgtggatcacagagtggtggtcaactctgagaaggaaaggttttccattcctttcttcttcttccctgcacacgacaccgaagttaagcctttggaggagctgataaatgagcaaaacccttcaaaatataggccatacaagtggggcaagtttcttgtccacagagggaacagcaattttaagaagcaaaatgaggagaacattcaaatttatcattacaagatagcttaaagggtaaattgtgtatgatattatcatgatatgaggcagcgttgatccaagacaacgttactgatatgaataagtccgatcaacttcactgctaaatttcctagtgtgccttatgtattgaacaatcactgaataaaagaactaaattattaccattt

SEQ ID NO: 53232 - protein, 376 aa, Glycine max
  peptide (1)..(376): Ceres Seq. ID no. 14310918
ILNKRTAQNLSKYTCCKLLTQSPAMGEVDAAFIQDPPHRPKLSTIQAEGIPIIDLSPITNHRVSDPSAIEGLVKEIGSACNEWGFFQVTNHGVPLTLRQNIEKASKLFFAQSAEEKRKVSRNESSPAGYYDTEHTKNVRDWKEVFDFLAKEPTFIPVTSDEHDDRVNQWTNQSPEYPLNFRVVTQEYIQEMEKLSFKILELIALSLGLEAKRFEEFFIKDQTSFIRLNHYPPCPYPDLALGVGRHKDPGALTILAQDEVGGLEVRRKADQEWIRVKPTPDAYIINIGDTVQVWSNDAYESVDHRVVVNSEKERFSIPFFFFPAHDTEVKPLEELINEQNPSKYRPYKWGKFLVHRGNSNFKKQNEENIQIYHYKIA

SEQ ID NO: 53233 - protein, 352 aa, Glycine max
  peptide (1)..(352): Ceres Seq. ID no. 14310919
MGEVDAAFIQDPPHRPKLSTIQAEGIPIIDLSPITNHRVSDPSAIEGLVKEIGSACNEWGFFQVTNHGVPLTLRQNIEKASKLFFAQSAEEKRKVSRNESSPAGYYDTEHTKNVRDWKEVFDFLAKEPTFIPVTSDEHDDRVNQWTNQSPEYPLNFRVVTQEYIQEMEKLSFKILELIALSLGLEAKRFEEFFIKDQTSFIRLNHYPPCPYPDLALGVGRHKDPGALTILAQDEVGGLEVRRKADQEWIRVKPTPDAYIINIGDTVQVWSNDAYESVDHRVVVNSEKERFSIPFFFFPAHDTEVKPLEELINEQNPSKYRPYKWGKFLVHRGNSNFKKQNEENIQIYHYKIA

SEQ ID NO: 53234 - DNA, 1589 bp, Glycine max
  misc_feature (1)..(1589): Ceres Seq. ID no. 14304288
aatcgcaactcgcgaaagttgttttgtaaagtcgtcacttcccacttcgtctccgttgctgtagttgtgttctgtgtgggtcgctgaagggcccttcatcagcacagatggatttccatggattcctaaacgacttgcaggattgggaattttctagaaaggataaagcacgaccacaaaaggaaaatgttggcttcatcttctcgaattacgggatctgtgggtgtggagaaggcatcaaaaggagataccatttcttttgataatgcaagaaattctccaggacagtatgatttatcaagaattaatcatttgcatagtagttttgttcctgaagatgttcctgatgctgcttccgagaaagacctgggcaacgagtttttcaagcagaaaaagtttaaggaagctagagactgctattcaaggagcattgccttatcaccaacagctgtagcatatgcaaatagggcaatggccaatatcaagctcagaagattccaagaggctgaggatgactgcacagaggccttaaatcttgatgatcgttacataaaagcatactcacgaagagcaacagctagaaaagaacttggaaaaattaaagaatcaatggacgatgctgaatttgccttgaggttggaaccaaacaatcaagaaatcaagaaacagtatgctgatgctaagtctttctatgagaaagatattcttcagaaagcatcaggggttctgagaagcactgtacagggaactcaaaaagtgggaaagtcagaggaaaaagttaatggagacagcatccaccccatttcacgtagtactcaaaagtctggactagctgaagttcatcatcataaaaagagaaataaaagccagaagctggcctcaatcacaaggagatgatggttctaagggaggtttgagtgcaagcaacagtttggagcagagaaatcacagaattaccaagccagaaatgaaagcttctgttcaacagcttgcttctcgcgctgcttctagagccatgtctgaagctgccaaaaacgtaacacctccaactacagcttatcagtttgaggtctcctggagagcattttcaggtgatcttgctctgcaggctcgtctattaaaggctatatctccccatgaattgccgaaaatattcaaaaatgccttgtcttctaccatactaattgagatcatcaagtgtcttgcatctcttttcactgaggacatggatctggttgtcagttatttggagcatttgaccaaggtaccaagatttgatgtgattgtaatgtgcctttcatcaacaaataaggatgacatacgcaagatctgggatgaagtgttcagcggtgaggcaacaccaatagagtatgcagagattctggacaaccttcaatcaaagttcggccttggacagtgacatcttcccctgtatgttttaatatttttttttcctcggtggatcctctcccttccgcaactatcttcacttgtaaattattatgctattgaaatgtttgagcattattgacggtcaacttgatccatctttaagcgttagttgataatgaggaaatgggaggaaaaag

SEQ ID NO: 53235 - protein, 236 aa, Glycine max
  peptide (1)..(236): Ceres Seq. ID no. 14304289
MLASSSRITGSVGVEKASKGDTISFDNARNSPGQYDLSRINHLHSSFVPEDVPDAASEKDLGNEFFKQKKFKEARDCYSRSIALSPTAVAYANRAMANIKLRRFQEAEDDCTEALNLDDRYIKAYSRRATARKELGKIKESMDDAEFALRLEPNNQEIKKQYADAKSFYEKDILQKASGVLRSTVQGTQKVGKSEEKVNGDSIHPISRSTQKSGLAEVHHHKKRNKSQKLASITRR

SEQ ID NO: 53236 - protein, 150 aa, Glycine max
  peptide (1)..(150): Ceres Seq. ID no. 14304290
MKASVQQLASRAASRAMSEAAKNVTPPTTAYQFEVSWRAFSGDLALQARLLKAISPHELPKIFKNALSSTILIEIIKCLASLFTEDMDLVVSYLEHLTKVPRFDVIVMCLSSTNKDDIRKIWDEVFSGEATPIEYAEILDNLQSKFGLGQ

SEQ ID NO: 53237 - protein, 141 aa, Glycine max
  peptide (1)..(141): Ceres Seq. ID no. 14304291
MANIKLRRFQEAEDDCTEALNLDDRYIKAYSRRATARKELGKIKESMDDAEFALRLEPNNQEIKKQYADAKSFYEKDILQKASGVLRSTVQGTQKVGKSEEKVNGDSIHPISRSTQKSGLAEVHHHKKRNKSQKLASITRR

SEQ ID NO: 53238 - DNA, 1316 bp, Glycine max
  misc_feature (1)..(1316): Ceres Seq. ID no. 15176375
gaaattcaaaaaaaaaaaaaaaaaacctgttacagagagatacagagagagagagacggagatggagatggagaaaacgggcgcaggagtagtagtgttatcggcgaaggaggcattcgagaagcttgagaaggtcggagaagggacatacgggaaggtgtacagggcacgagagaaggccactgggaaaatcgttgctctcaagaagactcgtcttcacgaggaccaagacggtgttcctcccaccacacttcgcgaggtttccatcttgcgaatgctctctcgcgatccccatgtcgttaggttaatggatgtgaagcaaggccagaacaaggaagggaagacagtgttgtacttggtgtttgagtacatggacactgatctcaagaaattcatccgctccttcgatcaaccgggacaaaacattccacccgaaactatcaaaagcttgatgtaccagctttgcaaggggattgctttctgccacggtcatggcatcttgcacagggacttgaagcctcacaatctgttgatggaccgaaaaacaatgatgcttaaaattgctgatcttggactcgctcgggcatttactgtgccaattaagaaatatacacatgagatactaaccctgtggtatagagctcatgaagtcctcttgggtgctacccattactcaatggcagtggacatatggtccgttggctgcatatttgccgaacttgtcaccagacgagctctctttcctggtgattccgagcttcaacaactcctgcatatattcaggctattgggtactcctaatgaagaggtgtggccaggggtgagtaaactaaaggactggcatgaatacccccaatggaactctcaaagtctgtcaacggctgttccaggtttggaggagcttggactcgatttgctatctcaaatgttggagtatgaaccttccaagaggatttctgcaaagaaagcaatggaacatgcttacttcgatgacctggacaagaggaatctttagaaagacacagattgattcaagatttggttgtagaaatttatgactaccaatttatttttatgcttctctcgagcgtgtatcgttttaggatgatggacttttgctgtttaacttttcatatttgaggactgacggagtgattgattgcgcttgggatttatttgcagaaactacatttgaaattaggattagtaaaaaaaatgttctgtttagttttcaatataaagcaatagagatagttgcatctacagctacatgtggatcttgcatgacttcctataaatgaagggataactttcac

SEQ ID NO: 53239 - protein, 337 aa, Glycine max
  peptide (1)..(337): Ceres Seq. ID no. 15176376
KFKKKKKKPVTERYRERETEMEMEKTGAGVVVLSAKEAFEKLEKVGEGTYGKVYRAREKATGKIVALKKTRLHEDQDGVPPTTLREVSILRMLSRDPHVVRLMDVKQGQNKEGKTVLYLVFEYMDTDLKKFIRSFDQPGQNIPPETIKSLMYQLCKGIAFCHGHGILHRDLKPHNLLMDRKTMMLKIADLGLARAFTVPIKKYTHEILTLWYRAHEVLLGATHYSMAVDIWSVGCIFAELVTRRALFPGDSELQQLLHIFRLLGTPNEEVWPGVSKLKDWHEYPQWNSQSLSTAVPGLEELGLDLLSQMLEYEPSKRISAKKAMEHAYFDDLDKRNL

SEQ ID NO: 53240 - protein, 317 aa, Glycine max
  peptide (1)..(317): Ceres Seq. ID no. 15176377
MEMEKTGAGVVVLSAKEAFEKLEKVGEGTYGKVYRAREKATGKIVALKKTRLHEDQDGVPPTTLREVSILRMLSRDPHVVRLMDVKQGQNKEGKTVLYLVFEYMDTDLKKFIRSFDQPGQNIPPETIKSLMYQLCKGIAFCHGHGILHRDLKPHNLLMDRKTMMLKIADLGLARAFTVPIKKYTHEILTLWYRAHEVLLGATHYSMAVDIWSVGCIFAELVTRRALFPGDSELQQLLHIFRLLGTPNEEVWPGVSKLKDWHEYPQWNSQSLSTAVPGLEELGLDLLSQMLEYEPSKRISAKKAMEHAYFDDLDKRNL

SEQ ID NO: 53241 - protein, 315 aa, Glycine max
  peptide (1)..(315): Ceres Seq. ID no. 15176378
MEKTGAGVVVLSAKEAFEKLEKVGEGTYGKVYRAREKATGKIVALKKTRLHEDQDGVPPTTLREVSILRMLSRDPHVVRLMDVKQGQNKEGKTVLYLVFEYMDTDLKKFIRSFDQPGQNIPPETIKSLMYQLCKGIAFCHGHGILHRDLKPHNLLMDRKTMMLKIADLGLARAFTVPIKKYTHEILTLWYRAHEVLLGATHYSMAVDIWSVGCIFAELVTRRALFPGDSELQQLLHIFRLLGTPNEEVWPGVSKLKDWHEYPQWNSQSLSTAVPGLEELGLDLLSQMLEYEPSKRISAKKAMEHAYFDDLDKRNL

SEQ ID NO: 53242 - DNA, 1745 bp, Glycine max
  misc_feature (1)..(1745): Ceres Seq. ID no. 14304573
aaaaataaaataaaaaggaaacgtatagaaaaagcttttccaagaattggcaaaaagagaagaagggagagagattcatgttcatattttccccttcgtgcccgtcaagtttctgattctctttttcaattcctttctctttcaggtgattttttctccacgataaagttgcgatttcgccggtgtcgttttgccgcaagatggtgtcgttttcgggaatataaaatcagggttgaagttctttcttcagcattgaatctttggttacataggttggtttctttagaactcgattcaatttcaaataattggtcctccctttttgtggaactcaattctattaggttagtggaaagagaaaaaaaaaacatggttgaatcaattgctgcaacttcactccttggccaccgtccaatttgtggtggaaatttaaccagggatgtatctgttaaacgcaaatctttgaatactgttcggttcccaacaactgagtttcttggtggtggaaggattgtggtttctctggctttgcctaaatctgataagcaagataggtttgtgttttcatcaattaaggccttggctgtggagttaacaagagaagcacatgcttatagggaagagaaattgcccaacagggataccaagattgatcgtggatttgatcaaaggcctgattcgtggcctcctgcgaatagggcagataaaccgtcgcttcggaatccactactccgtcatgagaggatgggatgtggttggttgggtgctatatttgagtgggagggtgttctaattgaagacaaccctgatttagagaagcaggcttggctggcactctctcaggaagaaggcaaaccctctcctcctgcttttatcctcaagagaatagagggcatgaagaatgaacaggcgatttcagaagtgctgtgttggtctagggatccggcacagttgagaagaatggctaatagaaaggaagaaatctaccaatctttgcagggtgggatatataggttcttgtctggatccaaggagtttgttagtgttttgatgcattataagataccaatggcattggtttccacgcggcctaggaaggctcttgagtctgctataggggagattgggattgaggacactttcagtgttattgtagcagcagaggatgttcataggggaaagcctgatccagaaatgtttgtgtatgctgcacagcttttgaacttcatacctgagaggtgcattgtgtttggtaactccaatctaacagtggaggctgcacatgaagcgcggatgaagtgtgtggctgttgctagcaagcatcctgtatatgagcttggggctgcagacttggttgtcaggcgcctagatgagctttcagtggttgatttgaagaatcttgcagacattgaaatgactgaatttgggtctgtggagcctgagatggagctggaggtggaaaaagattatggctcatcatcagttgatgacaatttctggtaaatcctataatgtacagttgattgaacctcatctgattgttgatgatattagttacaggttagttacttgtgtatatggtaatcagaataaatggggggaaaaaatgataagtggtatgcattgaacattgatgttactactaatgcattttctgttcatatacattcacgaatttttagatttgatttactggtgtttccatccataaaatagaatacaaattacctcatgaagtttaggtc

SEQ ID NO: 53243 - protein, 500 aa, Glycine max
  peptide (1)..(500): Ceres Seq. ID no. 14304574
KNKIKRKRIEKAFPRIGKKRRRERDSCSYFPLRARQVSDSLFQFLSLSGDFFSTIKLRFRRCRFAARWCRFREYKIRVEVLSSALNLWLHRLVSLELDSISNNWSSLFVELNSIRLVEREKKNMVESIAATSLLGHRPICGGNLTRDVSVKRKSLNTVRFPTTEFLGGGRIVVSLALPKSDKQDRFVFSSIKALAVELTREAHAYREEKLPNRDTKIDRGFDQRPDSWPPANRADKPSLRNPLLRHERMGCGWLGAIFEWEGVLIEDNPDLEKQAWLALSQEEGKPSPPAFILKRIEGMKNEQAISEVLCWSRDPAQLRRMANRKEEIYQSLQGGIYRFLSGSKEFVSVLMHYKIPMALVSTRPRKALESAIGEIGIEDTFSVIVAAEDVHRGKPDPEMFVYAAQLLNFIPERCIVFGNSNLTVEAAHEARMKCVAVASKHPVYELGAADLVVRRLDELSVVDLKNLADIEMTEFGSVEPEMELEVEKDYGSSSVDDNFW

SEQ ID NO: 53244 - protein, 377 aa, Glycine max
  peptide (1)..(377): Ceres Seq. ID no. 14304575
MVESIAATSLLGHRPICGGNLTRDVSVKRKSLNTVRFPTTEFLGGGRIVVSLALPKSDKQDRFVFSSIKALAVELTREAHAYREEKLPNRDTKIDRGFDQRPDSWPPANRADKPSLRNPLLRHERMGCGWLGAIFEWEGVLIEDNPDLEKQAWLALSQEEGKPSPPAFILKRIEGMKNEQAISEVLCWSRDPAQLRRMANRKEEIYQSLQGGIYRFLSGSKEFVSVLMHYKIPMALVSTRPRKALESAIGEIGIEDTFSVIVAAEDVHRGKPDPEMFVYAAQLLNFIPERCIVFGNSNLTVEAAHEARMKCVAVASKHPVYELGAADLVVRRLDELSVVDLKNLADIEMTEFGSVEPEMELEVEKDYGSSSVDDNFW

SEQ ID NO: 53245 - protein, 252 aa, Glycine max
  peptide (1)..(252): Ceres Seq. ID no. 14304576
MGCGWLGAIFEWEGVLIEDNPDLEKQAWLALSQEEGKPSPPAFILKRIEGMKNEQAISEVLCWSRDPAQLRRMANRKEEIYQSLQGGIYRFLSGSKEFVSVLMHYKIPMALVSTRPRKALESAIGEIGIEDTFSVIVAAEDVHRGKPDPEMFVYAAQLLNFIPERCIVFGNSNLTVEAAHEARMKCVAVASKHPVYELGAADLVVRRLDELSVVDLKNLADIEMTEFGSVEPEMELEVEKDYGSSSVDDNFW

SEQ ID NO: 53246 - DNA, 1393 bp, Glycine max
  misc_feature (1)..(1393): Ceres Seq. ID no. 14311088
acattactcaactcatcctttctggttctggttcaacacagcacaccatttctaatgctgtaaaatttgtaccatgcagcaaggggctctgcttctgcttttgtgcttggtctctctgttccccctcactcactatgcctgactttcttgccacaaacccacttaccttttcagctgcagaatctccaagattccccttcctcaattcacgcccaactcttacaccaagaacccaactcaacccaaattcccgtgtcctcttttctcccaaaccatccaaaaccagttgcaataacaagagtgtctctttggcactgagctccaggtcgaatgaagggccatcaaggggttatggcttttacaacgagcttgagtttgaggacagaaatgaggaaactttggggttggagataaaccctgttgttgctgaggattcccagagtgaaactgagtctctcccatttgatggggtggaaggtgatgataattataagggagaggatgatttggttcgggttcagggggatgcagatggagatggggatggtttgaagaaagattatgatgatgacgatgatcaaggtgagaatgagaaatttggaggtaaacttagagtcagaagaggtaaacaggtaattagaaggtcgaatttgttggccaagcaagtgatcagtattcgctctgcgcttagcttggggttcgtttcacagctttgggtggacacttcctcttggatggtgttgtttgtggaggttagaccaaacttgctctctggggattcagagaaattccttctggaggacattagtcagattggagatgttgtccttgtccaggatgaaagtgtgatagacaatgaatttaaaatggttggattggagacactggttggatacaaagttgtaacaccctctcgaaggaatattggaaaggtgcgagggtacactttcagtatcaattcaggtgctgttgaagaacttgaacttgattcatttggactatccattattccatcaagtttggtgagtacctacgctttgctggttgaggacgtgctggaagtagtatttgacgcagttgttgtgcatgaagctgcagctttacgaattcaaaggctttctaaggggtttttgggcaaccagaatgtgagaatttcagtggatgattttgaagatttagactctgaacaatctgatacatacggtcctatttcaatgagaagaaaaagtaccggaggaaagaaacctaatcaaagagattgggatgatgaagataattgggagcttccgatggactatccttgattctaatggattttctactaaatttcatgtaaaacacatttttgtttattaaaaataatgaaaatttgaataaacctattaaatacacc

SEQ ID NO: 53247 - protein, 433 aa, Glycine max
  peptide (1)..(433): Ceres Seq. ID no. 14311089
ITQLILSGSGSTQHTISNAVKFVPCSKGLCFCFCAWSLCSPSLTMPDFLATNPLTFSAAESPRFPFLNSRPTLTPRTQLNPNSRVLFSPKPSKTSCNNKSVSLALSSRSNEGPSRGYGFYNELEFEDRNEETLGLEINPVVAEDSQSETESLPFDGVEGDDNYKGEDDLVRVQGDADGDGDGLKKDYDDDDDQGENEKFGGKLRVRRGKQVIRRSNLLAKQVISIRSALSLGFVSQLWVDTSSWMVLFVEVRPNLLSGDSEKFLLEDISQIGDVVLVQDESVIDNEFKMVGLETLVGYKVVTPSRRNIGKVRGYTFSINSGAVEELELDSFGLSIIPSSLVSTYALLVEDVLEVVFDAVVVHEAAALRIQRLSKGFLGNQNVRISVDDFEDLDSEQSDTYGPISMRRKSTGGKKPNQRDWDDEDNWELPMDYP

SEQ ID NO: 53248 - protein, 389 aa, Glycine max
  peptide (1)..(389): Ceres Seq. ID no. 14311090
MPDFLATNPLTFSAAESPRFPFLNSRPTLTPRTQLNPNSRVLFSPKPSKTSCNNKSVSLALSSRSNEGPSRGYGFYNELEFEDRNEETLGLEINPVVAEDSQSETESLPFDGVEGDDNYKGEDDLVRVQGDADGDGDGLKKDYDDDDDQGENEKFGGKLRVRRGKQVIRRSNLLAKQVISIRSALSLGFVSQLWVDTSSWMVLFVEVRPNLLSGDSEKFLLEDISQIGDVVLVQDESVIDNEFKMVGLETLVGYKVVTPSRRNIGKVRGYTFSINSGAVEELELDSFGLSIIPSSLVSTYALLVEDVLEVVFDAVVVHEAAALRIQRLSKGFLGNQNVRISVDDFEDLDSEQSDTYGPISMRRKSTGGKKPNQRDWDDEDNWELPMDYP

SEQ ID NO: 53249 - DNA, 1818 bp, Glycine max
  misc_feature (1)..(1818): Ceres Seq. ID no. 15176444
aacaacaatggcaagaaaaactttagcttggtccttgcttctagggatggcttgttccatagttattggttcatatgaggagagctttcctactaggacattttctagtaacaactatcatgaagcaatacaaagattgcagtcatttaaggcctctctaacaagacatgattccattgcttcagcctcatcttccttatcaaccttctcaagcccttcttctgctccttctccttctctctcacttcagggcgtgaacaatccacgcgtgtaccgtgtgacgtcttatggtgcagatccaacgggtaattcggatagcactgaagcactccttgcagccatagaagatgcagccaagggtcctagtgaaggatatttgatggaaggcatcagagaccttggaggtgctcagattaatcttgagggtggaaattacttgatcagccggtcactcaagttgccggtggccggggtggggaaccttatgatacatggagggactataagagcctcagataattttccagaagacggctatatcattgatttgtcaccctcttctaatggaagaaacagtttaccatcctacaattttgagttcataactctcaaggaactcttgctggactcaaacttcaggggtggaggcatttcagtcataaactcacttaggactaacatagacaattgttacatcacacatttcaccaccaatggaattttagtccaaagtggtcatgaaacatacatcaggaactctttcctcggccagcatataactgctggcggcgacaaaaatgagaggaacttctcaggcactggaataaccctccagggtaatgacaatgctgtcactgatgttgtaattttctctgctgctataggaataatggttactggtcaagctaatgccttttctggtgtacattgttacaataaggccactggctttggaggcactggaatttatttgaaactaccaggtttgacccaaaccaggattgtgaattcttacatggattacactagtattgtggcggaagacccggttcaactccatatctccagcagtttcttccttggtgatgccaatattgtcctaaagtccaagaatggaattgtgaatggtgttgatattgttgataacatgttctcaggttcaaatcagggtgttgaaattgttcagcttgaccaatcaaatagtcctttccaacaaattgatcaagttattgttgatagaaacattgcaagggggatgaagttaaaggccacagttgccaaaatgtctatgcaagggaatggaacctcttggagtgttgattttaacaatgttttgctttttcctaacctcataaagaatgttcagtactctttaagctcctcaggcagcaccttccccaatcatgctctgaggaacgtgtccgagaatcgtgttgtgattgaaacaaatgaagcagtggctgccaatgtttttgttacggtggatcaaagtgcgttaagttgaagaaggtctgaaggtggtgaccaaaaagtttggtcaagagtcttgactcgaaggaattgtgcataccgagttgtgaactctttctttggatcaacttaaagtaaccatagtaccatatactaaacactgctatagatttagaagatgtagattgactgaaccacacattatacagtaactgaatgaaaagtattgtattgataaaagatatactctttctatagtttgtttttgtaaaacaggtcctaggttgaatcaaaaccagcatcttgttctcattatacagaataaaaaaaatgagagaattttattat

SEQ ID NO: 53250 - protein, 500 aa, Glycine max
  peptide (1)..(500): Ceres Seq. ID no. 15176445
TTMARKTLAWSLLLGMACSIVIGSYEESFPTRTFSSNNYHEAIQRLQSFKASLTRHDSIASASSSLSTFSSPSSAPSPSLSLQGVNNPRVYRVTSYGADPTGNSDSTEALLAAIEDAAKGPSEGYLMEGIRDLGGAQINLEGGNYLISRSLKLPVAGVGNLMIHGGTIRASDNFPEDGYIIDLSPSSNGRNSLPSYNFEFITLKELLLDSNFRGGGISVINSLRTNIDNCYITHFTTNGILVQSGHETYIRNSFLGQHITAGGDKNERNFSGTGITLQGNDNAVTDVVIFSAAIGIMVTGQANAFSGVHCYNKATGFGGTGIYLKLPGLTQTRIVNSYMDYTSIVAEDPVQLHISSSFFLGDANIVLKSKNGIVNGVDIVDNMFSGSNQGVEIVQLDQSNSPFQQIDQVIVDRNIARGMKLKATVAKMSMQGNGTSWSVDFNNVLLFPNLIKNVQYSLSSSGSTFPNHALRNVSENRVVIETNEAVAANVFVTVDQSALS

SEQ ID NO: 53251 - protein, 498 aa, Glycine max
  peptide (1)..(498): Ceres Seq. ID no. 15176446
MARKTLAWSLLLGMACSIVIGSYEESFPTRTFSSNNYHEAIQRLQSFKASLTRHDSIASASSSLSTFSSPSSAPSPSLSLQGVNNPRVYRVTSYGADPTGNSDSTEALLAAIEDAAKGPSEGYLMEGIRDLGGAQINLEGGNYLISRSLKLPVAGVGNLMIHGGTIRASDNFPEDGYIIDLSPSSNGRNSLPSYNFEFITLKELLLDSNFRGGGISVINSLRTNIDNCYITHFTTNGILVQSGHETYIRNSFLGQHITAGGDKNERNFSGTGITLQGNDNAVTDVVIFSAAIGIMVTGQANAFSGVHCYNKATGFGGTGIYLKLPGLTQTRIVNSYMDYTSIVAEDPVQLHISSSFFLGDANIVLKSKNGIVNGVDIVDNMFSGSNQGVEIVQLDQSNSPFQQIDQVIVDRNIARGMKLKATVAKMSMQGNGTSWSVDFNNVLLFPNLIKNVQYSLSSSGSTFPNHALRNVSENRVVIETNEAVAANVFVTVDQSALS

SEQ ID NO: 53252 - protein, 485 aa, Glycine max
  peptide (1)..(485): Ceres Seq. ID no. 15176447
MACSIVIGSYEESFPTRTFSSNNYHEAIQRLQSFKASLTRHDSIASASSSLSTFSSPSSAPSPSLSLQGVNNPRVYRVTSYGADPTGNSDSTEALLAAIEDAAKGPSEGYLMEGIRDLGGAQINLEGGNYLISRSLKLPVAGVGNLMIHGGTIRASDNFPEDGYIIDLSPSSNGRNSLPSYNFEFITLKELLLDSNFRGGGISVINSLRTNIDNCYITHFTTNGILVQSGHETYIRNSFLGQHITAGGDKNERNFSGTGITLQGNDNAVTDVVIFSAAIGIMVTGQANAFSGVHCYNKATGFGGTGIYLKLPGLTQTRIVNSYMDYTSIVAEDPVQLHISSSFFLGDANIVLKSKNGIVNGVDIVDNMFSGSNQGVEIVQLDQSNSPFQQIDQVIVDRNIARGMKLKATVAKMSMQGNGTSWSVDFNNVLLFPNLIKNVQYSLSSSGSTFPNHALRNVSENRVVIETNEAVAANVFVTVDQSALS

SEQ ID NO: 53253 - DNA, 1718 bp, Glycine max
  misc_feature (1)..(1718): Ceres Seq. ID no. 14311074
actactactacattagtgaagaccatttttcaattagtctcctctctctctctctctctctcacacacacactttggccttaacagaaccgaacacaacacgagagagatagagatacaacagaagaacaaactccgacatctctcgctttctctactttgccctgtttttattcggaagcaagcaaggcttaaatatatagatccctctttcccgtgtttttccttggatgaatctcaatctgaatggtataaggaataaaaaattcatcgtcataatcaggtatggaagttgggagcgtggtgttagtatggtggtggattagtctgatcccgaggattttatcagatccaagcgacgaagcatgcctgacgaacctaagcaagtccttggaagacccaaacaaactgctccataactggaaggaagagaacttcgccaagccctgcaacgactcctcctcgaatctccgaggcgcaatctgcaacaacggacgcatctacaagctctccctcaacaacctctctctccgcggcaccatatcccctttcctctcaaactgtaccaatctccaaaccctagacctctcctccaacttcctcacaggcccaatccccccagaactacagtccctggtcaacctcgccgttctgaacctctcttcgaacagtctccaaggggtgatccccccggtgctcacaatgtgcgcctacctcaacatcatcgacctccacgataatttgcttactgggcccatccctcagcaattgggcctgctcgttcgcctctccgctttcgatgtgtccaataaccgcctctcagggcccatcccggcttcgctttccaaccggagcgggaacttgcccagattcaacgccagctcattcctagagaataaggatctctacggttacccgttgccgccgcttaggaatagagggttgtccgttttggccattgttgggatcggcttgggaagtggccttgctagcttggtgcttagcttcaccggggtttgtatttggttgaaatttaccgagcgcaagatggcgctcgaggaaggcaaaatcagccaccttatgcctgattattgaatattgaaacaacaccttttaatcaccaattactacaatagtttcaaattattccaattccaagctagtactagtatctttcattattcaacttgattgatcggatcgctgatgcttcttcacctcagaaaaaaaaaaaaaatagtacccgtaccaggagggtagggtaggttagtgggtgcggtgctgctactgctacatgaagtcttgaagatgcgctgcgccgttgaactgctaaaatatatactacaaactcatcaaacagctggtgccatctttctaatctgcacaagagtcacattatcggaaggagccgctgggggacaccaacggtactacacagccacatggattgggacttgttgttgttctactcttgttcacttgttagtccaacgtcaactagtcaaccctctttatttactatatgtaaccctccctacttagcttaggattaggatcactatttttagatcatgcaaaacttactaacttagtatattagattattttattttaatttgaatctgaataaaatattcagatgatgaattttgtcattgtttctactctaatgagattatatttaacaatgggtaattaaatgatagtattattatactt

SEQ ID NO: 53254 - protein, 269 aa, Glycine max
  peptide (1)..(269): Ceres Seq. ID no. 14311075
MEVGSVVLVWWWISLIPRILSDPSDEACLTNLSKSLEDPNKLLHNWKEENFAKPCNDSSSNLRGAICNNGRIYKLSLNNLSLRGTISPFLSNCTNLQTLDLSSNFLTGPIPPELQSLVNLAVLNLSSNSLQGVIPPVLTMCAYLNIIDLHDNLLTGPIPQQLGLLVRLSAFDVSNNRLSGPIPASLSNRSGNLPRFNASSFLENKDLYGYPLPPLRNRGLSVLAIVGIGLGSGLASLVLSFTGVCIWLKFTERKMALEEGKISHLMPDY

SEQ ID NO: 53255 - DNA, 1164 bp, Glycine max
  misc_feature (1)..(1164): Ceres Seq. ID no. 13637509
atcatgcgttctcagcttgtgaaatcgaatatcaaaacccctccaaggccaaaacggcgtcgtcaaccactcaaatcatggcctgttactttctccccctttgctcgcgctctcgctctctctcgcatcacctctctctctccaccaaaccctaccccaaccctctctgctaagaaaccgcaaccctctcatggatctgtccatgcagatttatcccaaccggaacactccgagtcttccgacgaggacttcgatggagttgtccaagcagatttttcatttttcgatcccaaacctaatgattttcacggagccaagaccttgctgcaaacctacctcgacgaccaggaatgggatttgagtgcctttgtagacttgattttggcacagaccaccgtaggctctgttgttaagatagaggacgacgaggatgaagggctcttcgctcttgttactgctcttaatttatatagatacagggagcataagtgtattgcgacagttaaggattttctcctccataaagtgcgccaagagaagagtgtccatgaccagttgaaattgctgttgggggagcaagcgcatgatgttggtctcctggtatcgcagcgcatggtgaaccttcctccccagcttctgccacctctttatgatgccctttttgatgaagtgtcctgggccacggaagatgagccgacggaggagctccagaattccttcaagtttaagcattatataatacttaccaaaatttacgtgctcaagaatgtagaacagaaaagaaaacagagcaatggtagtgatgaggcaataatatacataaagcttgaggatgaaatttttcacaagttaagctcgtggtccttctgttttccattgcaaactcagcagcttgcacctcatgagctgaggaattacaggtcaacgggattaatcgtggctgttgaagctgacaaaattccaacatttcgtcaagaattagcttctctaataaatgaaacctgaaggcatcgacaaggctactggataatttattatatgatagaatcttaatactttcatgagacatgcatttttacgcagattgaattctttttgcaagggtttgagctgccaaattttgaaattttgttttttaattttctatgatcccttttgttctgc

SEQ ID NO: 53256 - protein, 334 aa, Glycine max
  peptide (1)..(334): Ceres Seq. ID no. 13637510
IMRSQLVKSNIKTPPRPKRRRQPLKSWPVTFSPFARALALSRITSLSPPNPTPTLSAKKPQPSHGSVHADLSQPEHSESSDEDFDGVVQADFSFFDPKPNDFHGAKTLLQTYLDDQEWDLSAFVDLILAQTTVGSVVKIEDDEDEGLFALVTALNLYRYREHKCIATVKDFLLHKVRQEKSVHDQLKLLLGEQAHDVGLLVSQRMVNLPPQLLPPLYDALFDEVSWATEDEPTEELQNSFKFKHYIILTKIYVLKNVEQKRKQSNGSDEAIIYIKLEDEIFHKLSSWSFCFPLQTQQLAPHELRNYRSTGLIVAVEADKIPTFRQELASLINET

SEQ ID NO: 53257 - protein, 333 aa, Glycine max
  peptide (1)..(333): Ceres Seq. ID no. 13637511
MRSQLVKSNIKTPPRPKRRRQPLKSWPVTFSPFARALALSRITSLSPPNPTPTLSAKKPQPSHGSVHADLSQPEHSESSDEDFDGVVQADFSFFDPKPNDFHGAKTLLQTYLDDQEWDLSAFVDLILAQTTVGSVVKIEDDEDEGLFALVTALNLYRYREHKCIATVKDFLLHKVRQEKSVHDQLKLLLGEQAHDVGLLVSQRMVNLPPQLLPPLYDALFDEVSWATEDEPTEELQNSFKFKHYIILTKIYVLKNVEQKRKQSNGSDEAIIYIKLEDEIFHKLSSWSFCFPLQTQQLAPHELRNYRSTGLIVAVEADKIPTFRQELASLINET

SEQ ID NO: 53258 - DNA, 1367 bp, Glycine max
  misc_feature (1)..(1367): Ceres Seq. ID no. 15174776
agttagttgtttaatgaacgcaattcggtcccgttggttgacgagaatggcagaagacattgggaaaagcaacctcgaatcctcttctgcttcaacaacttcccgaggcttctggccttctgtcttacgttggatcccctcttccaccgatcacatcatcaatgctgaaaaacgccttctctctcttgtcaagactccgtatgctcaagaacaggtcaatataggttccggtccacctgattccaaagttagatggttccgttcatctagcaatgaaccacggtttattaacacggttacatttgacagtaaggatgattctcctacgctggtgatggttcatggatatgcagcatcgcagggtttcttctttcgcaattttgatgcccttgcctcccgtttcagagtgattgctattgatcaacttggttggggtggatctagcaggcctgactttacatgcagaagcactgaagaaactgaggcatggttcattgattcttttgaggaatggagaaaggccaaaaacctgagcaattttatactacttggacattcttttggtggttatgttgcttccaagtacgcacttaagcaccctgagcatgtcaatcacttgattctggtgggacctgctggattttcatcagaatcagaaagaattacaaagttcttatcaacatggaaaggatcaatcctgaaccaaatatgggaatctaattttacacctcagaaaatcatcagaggtttaggtccttggggtcctgatatggtcctcaagtataccagtgccaggtttgttacatatacaactggggaaacgctgacagaatctgaatcgagattactgacagattatgtttaccatactttagcagccaaagctagtggcgagctgtgcttaaaatatatattttcatttggaggactcccgaggtcacctcttcttcacagtgcttcagagtggaaggtgcctaccaccttcatatatggttttcaggactggatgaattatgaaggagcccaagaagcacgcaaacaaatgaaggttccatgtgaaatccttagggttccccaggccgggcactttgtgttcattgacaacccaagtggcttccattcagcagtgttttatgcttgtagaaggtttcttaggcctgatccagacagtgaatcccttcctgaagggctaacctctgcatagagtataatcttgtgtaatgctgtctatgattatatatttcttttacaaattaaactcctttatttattcaagccatgtcctattcatgcttaaatggaatttgcaattgtaacttgtaatggcaattcaaaaaataatgacgtctaatataaatttcattact

SEQ ID NO: 53259 - protein, 400 aa, Glycine max
  peptide (1)..(400): Ceres Seq. ID no. 15174777
VSCLMNAIRSRWLTRMAEDIGKSNLESSSASTTSRGFWPSVLRWIPSSTDHIINAEKRLLSLVKTPYAQEQVNIGSGPPDSKVRWFRSSSNEPRFINTVTFDSKDDSPTLVMVHGYAASQGFFFRNFDALASRFRVIAIDQLGWGGSSRPDFTCRSTEETEAWFIDSFEEWRKAKNLSNFILLGHSFGGYVASKYALKHPEHVNHLILVGPAGFSSESERITKFLSTWKGSILNQIWESNFTPQKIIRGLGPWGPDMVLKYTSARFVTYTTGETLTESESRLLTDYVYHTLAAKASGELCLKYIFSFGGLPRSPLLHSASEWKVPTTFIYGFQDWMNYEGAQEARKQMKVPCEILRVPQAGHFVFIDNPSGFHSAVFYACRRFLRPDPDSESLPEGLTSA

SEQ ID NO: 53260 - protein, 396 aa, Glycine max
  peptide (1)..(396): Ceres Seq. ID no. 15174778
MNAIRSRWLTRMAEDIGKSNLESSSASTTSRGFWPSVLRWIPSSTDHIINAEKRLLSLVKTPYAQEQVNIGSGPPDSKVRWFRSSSNEPRFINTVTFDSKDDSPTLVMVHGYAASQGFFFRNFDALASRFRVIAIDQLGWGGSSRPDFTCRSTEETEAWFIDSFEEWRKAKNLSNFILLGHSFGGYVASKYALKHPEHVNHLILVGPAGFSSESERITKFLSTWKGSILNQIWESNFTPQKIIRGLGPWGPDMVLKYTSARFVTYTTGETLTESESRLLTDYVYHTLAAKASGELCLKYIFSFGGLPRSPLLHSASEWKVPTTFIYGFQDWMNYEGAQEARKQMKVPCEILRVPQAGHFVFIDNPSGFHSAVFYACRRFLRPDPDSESLPEGLTSA

SEQ ID NO: 53261 - protein, 385 aa, Glycine max
  peptide (1)..(385): Ceres Seq. ID no. 15174779
MAEDIGKSNLESSSASTTSRGFWPSVLRWIPSSTDHIINAEKRLLSLVKTPYAQEQVNIGSGPPDSKVRWFRSSSNEPRFINTVTFDSKDDSPTLVMVHGYAASQGFFFRNFDALASRFRVIAIDQLGWGGSSRPDFTCRSTEETEAWFIDSFEEWRKAKNLSNFILLGHSFGGYVASKYALKHPEHVNHLILVGPAGFSSESERITKFLSTWKGSILNQIWESNFTPQKIIRGLGPWGPDMVLKYTSARFVTYTTGETLTESESRLLTDYVYHTLAAKASGELCLKYIFSFGGLPRSPLLHSASEWKVPTTFIYGFQDWMNYEGAQEARKQMKVPCEILRVPQAGHFVFIDNPSGFHSAVFYACRRFLRPDPDSESLPEGLTSA

SEQ ID NO: 53262 - DNA, 1266 bp, Glycine max
  misc_feature (1)..(1266): Ceres Seq. ID no. 14311229
accatttctcttccctcaactaaactcatattccaaaacgcagagccaaaccatgtcgttccccttcaaccactctcacgccacccacacccaccaccgcagggacgacgacgacgacgaacgacccaccgtttaccctccgccgggaaactccttcagcaacccgccacctccgttctacggcgtccctcaaccaccaccccctcagccggagacccacgtgttccattccgctcacgtgacaccaggacacgtgtcccatgacttcaacaactactccgctcccccgcctccacccccttcccaccatcatcatgatcgtcatcatgactccttcacccacgcttacccacctgctcccgctgcagctgattaccccgctcacggaggcagcagtaccaccgtgcaccacgtggctcacgagtctcaccaccacaccccccattccgctttctcctcccacaacaacgcaccccccaccactgttcatcacgtgagccaccaggttaacaccggtggtctctcgaccaaacccactgtcagggttttcaccaaagctaatcccaatttctctctcaccattcgtcgcggccaagtcattctcgctccctccgatcccaccaatgagtaccagcattggtataaggatgagaagtacagcacgagggtgaaggatgaagaggggtgccctgctttctctttgatcaacaaggccactggtgaggccttgaagcactccatcggtgctactcatccagttcggctgataccttacaagccagactatcttgatgagtctattctttggactgaaagccgtgacttaggagatggccacagagctataaggatggtcaacaatgttcatcttaatgtggatgcttttcatggcgataagaattctggaggtgtgcgtgatggcactacaatagtcctctgggactggaacaaaggtgataaccaacggtggaagatcttaccttactgagtaaaattgacgggatttgtgagtggctttgaagatgcattaagttgagaggactattggcccttctatttgagtagtttggtgttgtctagagtatgaatggtgtgtattgcatttactggtaccaagcaatcggcttttttcaatagaataagtgtgtttatctaatatttattgcatacatgtggcactggttaatgtgctgattgccatatatatattggtatacagttcatgtatcttcttactagtatatcttaatgtgattcagtgtgaac

SEQ ID NO: 53263 - protein, 328 aa, Glycine max
  peptide (1)..(328): Ceres Seq. ID no. 14311230
PFLFPQLNSYSKTQSQTMSFPFNHSHATHTHHRRDDDDDERPTVYPPPGNSFSNPPPPFYGVPQPPPPQPETHVFHSAHVTPGHVSHDFNNYSAPPPPPPSHHHHDRHHDSFTHAYPPAPAAADYPAHGGSSTTVHHVAHESHHHTPHSAFSSHNNAPPTTVHHVSHQVNTGGLSTKPTVRVFTKANPNFSLTIRRGQVILAPSDPTNEYQHWYKDEKYSTRVKDEEGCPAFSLINKATGEALKHSIGATHPVRLIPYKPDYLDESILWTESRDLGDGHRAIRMVNNVHLNVDAFHGDKNSGGVRDGTTIVLWDWNKGDNQRWKILPY

SEQ ID NO: 53264 - protein, 311 aa, Glycine max
  peptide (1)..(311): Ceres Seq. ID no. 14311231
MSFPFNHSHATHTHHRRDDDDDERPTVYPPPGNSFSNPPPPFYGVPQPPPPQPETHVFHSAHVTPGHVSHDFNNYSAPPPPPPSHHHHDRHHDSFTHAYPPAPAAADYPAHGGSSTTVHHVAHESHHHTPHSAFSSHNNAPPTTVHHVSHQVNTGGLSTKPTVRVFTKANPNFSLTIRRGQVILAPSDPTNEYQHWYKDEKYSTRVKDEEGCPAFSLINKATGEALKHSIGATHPVRLIPYKPDYLDESILWTESRDLGDGHRAIRMVNNVHLNVDAFHGDKNSGGVRDGTTIVLWDWNKGDNQRWKILPY

SEQ ID NO: 53265 - DNA, 1195 bp, Glycine max
  misc_feature (1)..(1195): Ceres Seq. ID no. 14304689
aaagtaaaccatgaattctctatcactcttcaccttcctctgcgcaatttgtgcgcactccgtcgccgtcacctccgcggcatatccttccatccccggcacggaaaccggagagtgctccctccgcggcgtcggcgtcggcgacggtgttctggtccctccgcggcgagaagtgtacgaggaggggcgaatcttcgacatcacccacaggtatgtccccgagatgccggtgtgggactcgacggaggggctcgggcagcacttcctgtggctcgaaaagagcatgaagaatggctcgcgcgctaacaactccaacatgaagctcggtgttcacaccggcacccatgtcgacgcgcccggtcacttttacgacaattactacgacgccggcttcgatgttgactcactcgacctaacactcctcaatggccttgcacttttggttgatgttccacgggataaaaacattactgctgaggttatgaagtccttgaatatccctagaggtgtaagccgcgtgcttttcagaactttaaacactgacaggcaactcatgtttaagaaagaatttgacacaagctatgtgggattcaaggaggatggtgcaaaatggctggcagagaacaccgacatcaaacttgtaggagtcgattacttatctgttgctgcttatgatcactccattccatctcatcttgttttcctggaaagcaaggaaatcattcttgtggaaggcctaaagcttgatgatgtcccagcaggaatatattcactgaattgcttgcctcttaggttggttcactctgaggcatcaccaattcgatgcattctgatcaaatgatcaaatgatggggtcaaacctggttttcaattgcacggatgaacctgccacaagaagcaacgtagccacgaatacaattagtggtgtccataagaagcagtttgatgcaaattgcaagctaagctgatagtagtatgttgaattactcttagtttacgtccttgggttggaaagtactgaattattgtgattaaacttcagttgcggactagggggtccacctgtattaacttatgcttttaatattttcctaggcaagtacttgtgcaattctgaagacgcatgcttgtacgtctcaataattatatctatttctctttgaaaaataatgaaatactactaataatctcgggc

SEQ ID NO: 53266 - protein, 276 aa, Glycine max
  peptide (1)..(276): Ceres Seq. ID no. 14304690
MNSLSLFTFLCAICAHSVAVTSAAYPSIPGTETGECSLRGVGVGDGVLVPPRREVYEEGRIFDITHRYVPEMPVWDSTEGLGQHFLWLEKSMKNGSRANNSNMKLGVHTGTHVDAPGHFYDNYYDAGFDVDSLDLTLLNGLALLVDVPRDKNITAEVMKSLNIPRGVSRVLFRTLNTDRQLMFKKEFDTSYVGFKEDGAKWLAENTDIKLVGVDYLSVAAYDHSIPSHLVFLESKEIILVEGLKLDDVPAGIYSLNCLPLRLVHSEASPIRCILIK

SEQ ID NO: 53267 - protein, 205 aa, Glycine max
  peptide (1)..(205): Ceres Seq. ID no. 14304691
MPVWDSTEGLGQHFLWLEKSMKNGSRANNSNMKLGVHTGTHVDAPGHFYDNYYDAGFDVDSLDLTLLNGLALLVDVPRDKNITAEVMKSLNIPRGVSRVLFRTLNTDRQLMFKKEFDTSYVGFKEDGAKWLAENTDIKLVGVDYLSVAAYDHSIPSHLVFLESKEIILVEGLKLDDVPAGIYSLNCLPLRLVHSEASPIRCILIK

SEQ ID NO: 53268 - protein, 185 aa, Glycine max
  peptide (1)..(185): Ceres Seq. ID no. 14304692
MKNGSRANNSNMKLGVHTGTHVDAPGHFYDNYYDAGFDVDSLDLTLLNGLALLVDVPRDKNITAEVMKSLNIPRGVSRVLFRTLNTDRQLMFKKEFDTSYVGFKEDGAKWLAENTDIKLVGVDYLSVAAYDHSIPSHLVFLESKEIILVEGLKLDDVPAGIYSLNCLPLRLVHSEASPIRCILIK

SEQ ID NO: 53269 - DNA, 561 bp, Glycine max
  misc_feature (1)..(561): Ceres Seq. ID no. 13580958
ttatttttttcacatgagtttggtaattagccttcttcagtctccgttatttttgttttataaacctgctgtcttaggtaagcttagctactggtttcttgtttcttggtggtggaatgagaacattttcaacaaacaaccattccattgctgctttgctaattactctatatccacgcttgccgactggtccaaatgataacagatgccaccttcaggcatttcgccatctctatgtccttgcaacagaggcgcgatggattcagacagttgatgttgacacgggtctgcctgtttatgctcctcttgaggtcacagtcagagaaactgagcattatgcagaatccagcttttgcgaggtcaccccttgccttctgccagaacgatcaattttgaaaagaatacgtgtttgtgggcctcgctactggcctcaagtaatagactttaccccagaagataaaccttggtggaattttggagacaagaataatccatttaattctggtattcttttcatcaaaaagaaaggttggagcttgttcatatgttgatgatcccatt

SEQ ID NO: 53270 - protein, 144 aa, Glycine max
  peptide (1)..(144): Ceres Seq. ID no. 13580959
MRTFSTNNHSIAALLITLYPRLPTGPNDNRCHLQAFRHLYVLATEARWIQTVDVDTGLPVYAPLEVTVRETEHYAESSFCEVTPCLLPERSILKRIRVCGPRYWPQVIDFTPEDKPWWNFGDKNNPFNSGILFIKKKGWSLFIC

SEQ ID NO: 53271 - DNA, 1439 bp, Glycine max
  misc_feature (1)..(1439): Ceres Seq. ID no. 15169350
gagaactagattcagattcagattcagatgtcctgaagcgccctcacacatggccacgacaacaaggtcaccgaatcgttcctccgaggacgccgccgatcccacgccgttcctcggcacttcttccgacgaatccacctccggccgccgcctcctccgccgcccgagtctccgcgaggctgcgcgcttcctgcgccaggccagcggccgccgcctcatgcgcgagccgtccatggtggtgcgggaggcggcggcggagcagctcgaggagaggcagagcgattgggcctattccaagcccgtcgtcgtcttggacattctctggaacttcgccttcgtcgcggccgccgcaaccgtcttcattctcagccgcaacgagaatcccaacatgcctctcaggctgtggattgtaggctacgctctgcagtgcgttcttcacgtcgcgtgcgtctgcgtcgagtaccagcgccgcctacgccgccgcgaacagtccaacgccgccgctatcgcgggtggcggcagcggagatttgggtccgccttcgatggacggctctggacactacgtgtcgttggcgcagttcgacgacgatggtataagtatggcaaagcatttggaatcagccaacacaatgttttcgtttatttggtgggttgttggattctattgggtgtcagctgatagtgaatctttggtccgagattctcccctgctctactggttatgtatagccttcctgggttttgatgttttctttgtcgttttctgtatggcactagcatgcatcgttggtattgctgtttgctgttgtcttccatgtatcattgcactcctgtatgcagttgcagaccaggaaggggcatcaaaagaagacattgagcagttgtcaaaattcaagttccaaagaactgaaactaatgagaaacttgctgggaatacacaaggagctgctggaggaataatgattgaatgcgatgctgattctcccattgaacatgttctttctgacgaggatgcggaatgttgcatctgcctttctgcttatgatgacggggttgaacttagacaacttccttgtggccaccattttcactgtgcctgtgtggacaaatggctgcatatcaatgctacatgccccctctgcaagtacaacatcttgaaaagtaccagtcatgctcaagacgaagtgtagtcagaatagctcctagcagccatgttggggaaattgcatctcttttggtttacagtataataggcacaacttgttaatataattcaatgcaggcctttattgtagttgctactgctgcatatcgtttatctcatagtgatagttgttttgattattcttcgttatggtggcttcttaatggttgtgtacatctgctcattgtataccgtaaataattatcttgaggaaagttggttgacgttttttt

SEQ ID NO: 53272 - protein, 396 aa, Glycine max
  peptide (1)..(396): Ceres Seq. ID no. 15169351
RTRFRFRFRCPEAPSHMATTTRSPNRSSEDAADPTPFLGTSSDESTSGRRLLRRPSLREAARFLRQASGRRLMREPSMVVREAAAEQLEERQSDWAYSKPVVVLDILWNFAFVAAAATVFILSRNENPNMPLRLWIVGYALQCVLHVACVCVEYQRRLRRREQSNAAAIAGGGSGDLGPPSMDGSGHYVSLAQFDDDGISMAKHLESANTMFSFIWWVVGFYWVSADSESLVRDSPLLYWLCIAFLGFDVFFVVFCMALACIVGIAVCCCLPCIIALLYAVADQEGASKEDIEQLSKFKFQRTETNEKLAGNTQGAAGGIMIECDADSPIEHVLSDEDAECCICLSAYDDGVELRQLPCGHHFHCACVDKWLHINATCPLCKYNILKSTSHAQDEV

SEQ ID NO: 53273 - protein, 380 aa, Glycine max
  peptide (1)..(380): Ceres Seq. ID no. 15169352
MATTTRSPNRSSEDAADPTPFLGTSSDESTSGRRLLRRPSLREAARFLRQASGRRLMREPSMVVREAAAEQLEERQSDWAYSKPVVVLDILWNFAFVAAAATVFILSRNENPNMPLRLWIVGYALQCVLHVACVCVEYQRRLRRREQSNAAAIAGGGSGDLGPPSMDGSGHYVSLAQFDDDGISMAKHLESANTMFSFIWWVVGFYWVSADSESLVRDSPLLYWLCIAFLGFDVFFVVFCMALACIVGIAVCCCLPCIIALLYAVADQEGASKEDIEQLSKFKFQRTETNEKLAGNTQGAAGGIMIECDADSPIEHVLSDEDAECCICLSAYDDGVELRQLPCGHHFHCACVDKWLHINATCPLCKYNILKSTSHAQDEV

SEQ ID NO: 53274 - protein, 324 aa, Glycine max
  peptide (1)..(324): Ceres Seq. ID no. 15169353
MREPSMVVREAAAEQLEERQSDWAYSKPVVVLDILWNFAFVAAAATVFILSRNENPNMPLRLWIVGYALQCVLHVACVCVEYQRRLRRREQSNAAAIAGGGSGDLGPPSMDGSGHYVSLAQFDDDGISMAKHLESANTMFSFIWWVVGFYWVSADSESLVRDSPLLYWLCIAFLGFDVFFVVFCMALACIVGIAVCCCLPCIIALLYAVADQEGASKEDIEQLSKFKFQRTETNEKLAGNTQGAAGGIMIECDADSPIEHVLSDEDAECCICLSAYDDGVELRQLPCGHHFHCACVDKWLHINATCPLCKYNILKSTSHAQDEV

SEQ ID NO: 53275 - DNA, 1213 bp, Glycine max
  misc_feature (1)..(1213): Ceres Seq. ID no. 14306765
gatctaaactaaaccactctctcttctcttcattctccctcttaattcttttctcttttctttctttcacacaaactcctcttattatgatgggtcttgatcaagatgctagcagcaactctggccttcatcttattctagggttagctttgactgccaccaccactactactccatcactaccatccatttccaacaagcttgatcatgttgatcatcatcaccatcttataactcttagaccaacaacaaagtcaccctataattcctctgaggctgaaccatcattaacgttgggcttgtcccgtgagagttacctcaaagtacccaaaaacatcataggacaaaacagcaacaacaaagtctcgtcttgtgatgaccctcttgatcacttgtccacacagactaattcacctcatcacagtgctgtttcctccttctccagtggcagggtcaagagggagagggatctcagttgcgaagaagttgtggatgcaacagagattgatcagagggaccatagctgtgaaggaatagtaagagccactgacgaagacgaagacggcaccgccgccagaaagaaacttaggcttagtaaagaacaatctgctttgctagaagaaagcttcaaacaacatagcaccctcaatcctaaacagaagcaagctttggcgaagcagttgaatcttaggccacgacaagttgaggtgtggttccagaacaggagagccagaacaaagctgaagcagacagaggtggactgcgagttcctaaagaaatgttgtgagacattaacagacgaaaacagacggttacagaaggagcttcaagagcttaaagcactgaaactggctcagcctctgtacatgcctatgcctgcggcaacactcaccatgtgcccctcttgtgagaggctcggcggcggcatcaacggtggcggcggcggttcccctaagacaccattctccatggctcctaagcctcacttcttcaaccccttcgccaacccttctgcagcatgttgattgattgttattataattaggcttttaattagttttcattaaaaaaaaaaaaaacagcaaaaaccaaagaagagttgccccacaacctttgtatttttttggttgagggatacgtcttatgaactacatagctagtgaaaaaaaggttaagggtgtaattaattaactaatatactgtagaaatttgc

SEQ ID NO: 53276 - protein, 340 aa, Glycine max
  peptide (1)..(340): Ceres Seq. ID no. 14306766
SKLNHSLFSSFSLLILFSFLSFTQTPLIMMGLDQDASSNSGLHLILGLALTATTTTTPSLPSISNKLDHVDHHHHLITLRPTTKSPYNSSEAEPSLTLGLSRESYLKVPKNIIGQNSNNKVSSCDDPLDHLSTQTNSPHHSAVSSFSSGRVKRERDLSCEEVVDATEIDQRDHSCEGIVRATDEDEDGTAARKKLRLSKEQSALLEESFKQHSTLNPKQKQALAKQLNLRPRQVEVWFQNRRARTKLKQTEVDCEFLKKCCETLTDENRRLQKELQELKALKLAQPLYMPMPAATLTMCPSCERLGGGINGGGGGSPKTPFSMAPKPHFFNPFANPSAAC

SEQ ID NO: 53277 - protein, 312 aa, Glycine max
  peptide (1)..(312): Ceres Seq. ID no. 14306767
MMGLDQDASSNSGLHLILGLALTATTTTTPSLPSISNKLDHVDHHHHLITLRPTTKSPYNSSEAEPSLTLGLSRESYLKVPKNIIGQNSNNKVSSCDDPLDHLSTQTNSPHHSAVSSFSSGRVKRERDLSCEEVVDATEIDQRDHSCEGIVRATDEDEDGTAARKKLRLSKEQSALLEESFKQHSTLNPKQKQALAKQLNLRPRQVEVWFQNRRARTKLKQTEVDCEFLKKCCETLTDENRRLQKELQELKALKLAQPLYMPMPAATLTMCPSCERLGGGINGGGGGSPKTPFSMAPKPHFFNPFANPSAAC

SEQ ID NO: 53278 - protein, 311 aa, Glycine max
  peptide (1)..(311): Ceres Seq. ID no. 14306768
MGLDQDASSNSGLHLILGLALTATTTTTPSLPSISNKLDHVDHHHHLITLRPTTKSPYNSSEAEPSLTLGLSRESYLKVPKNIIGQNSNNKVSSCDDPLDHLSTQTNSPHHSAVSSFSSGRVKRERDLSCEEVVDATEIDQRDHSCEGIVRATDEDEDGTAARKKLRLSKEQSALLEESFKQHSTLNPKQKQALAKQLNLRPRQVEVWFQNRRARTKLKQTEVDCEFLKKCCETLTDENRRLQKELQELKALKLAQPLYMPMPAATLTMCPSCERLGGGINGGGGGSPKTPFSMAPKPHFFNPFANPSAAC

SEQ ID NO: 53279 - DNA, 1562 bp, Glycine max
  misc_feature (1)..(1562): Ceres Seq. ID no. 15174752
aaaacccacaaacacttgagtcagacaaaaagatggaaacctctaataacaaccatgatgctcctcctccacctctacttaaagacctgaaggtgaccatccacaatgcctccatgatttttccatccaaagagattgagagaaagtcccttttcttgtcaaacattgacaaggtcctcaactttgatgtggaaacggttcacttctttggtgcccacaaagattttcctcctcatgttgtgaatgagaggctcaagaatgccctagaggatgcccttgtggtttatgacttcttgggtggaagattgaagctcaactatgacaccaaaagattggagatggattgtaatccagagggagctggattcgtggtggcttccagcgagtacaatttggatcagataggggacttggattatccaaatccagcttttgcacaattggtacatcagaataaggattttcttaaagatggtgatgttccactctgtgttgcccaggtgacatccttcaagtgtggtggttttgcaattggcatatctactagccacaccacctttgatggcctcagcttcaaaaccttcctagacaacattgcttcaatagccgctaagaagcccttggttgtcacgccctgtcatgacaggcacctcctagccgcccgatccccaccacgtgtcaccttcccacaccctgagatgctcaagctaagtgaccagctcccaacatgccccgagtccaacatctttgaggcctccaccgaacaacttgatttcaaggtcttcaaactaacattaaacgacatcacaaaattgaaggaagaggctaggaattcttcaattagtggtggcctaagtactaaatgtgtcactggctttaacgttatcactgcctacatatggagatgcaaggcactttcgtgctacaatgatgagaaccctaataggtcatcaactatactatatgctgtagatatacgttcaagattgaaccctccattgcctaaatcatacgcgggtaacgcagtgttaactgcttatgccacggcaaagtgtaaggagctagaagaatggccttttatgaagctagttgaaatggtgcgtgagggagcaactaggatgacaaatgagtatgcaagatctatcatagattggggagagataaacaatgggtttcccaatggggaggttttggtgtcttcatggtggagattagggtttgaggaagtggagtatccgtgggggaagccaaagtattgttgcccagtggtgtatcataagaaggatattattttgttgtttcctccggttggtggaggtgaaggggtgagtattattgtggctcttcctcctaaggaaatggaaaaattccatgggctcttcaacaagttcttgacttcacattgagggaaatgatgggtctttcttcctcctcctatggaaatggaaagattccatgcatgcttaagttcatgacttgagaattatgtctctccctctattgatatccttattaatatgacatctttagcttttcgctagttgttatgtaaaaaaaaaaag

SEQ ID NO: 53280 - protein, 467 aa, Glycine max
  peptide (1)..(467): Ceres Seq. ID no. 15174753
NPQTLESDKKMETSNNNHDAPPPPLLKDLKVTIHNASMIFPSKEIERKSLFLSNIDKVLNFDVETVHFFGAHKDFPPHVVNERLKNALEDALVVYDFLGGRLKLNYDTKRLEMDCNPEGAGFVVASSEYNLDQIGDLDYPNPAFAQLVHQNKDFLKDGDVPLCVAQVTSFKCGGFAIGISTSHTTFDGLSFKTFLDNIASIAAKKPLVVTPCHDRHLLAARSPPRVTFPHPEMLKLSDQLPTCPESNIFEASTEQLDFKVFKLTLNDITKLKEEARNSSISGGLSTKCVTGFNVITAYIWRCKALSCYNDENPNRSSTILYAVDIRSRLNPPLPKSYAGNAVLTAYATAKCKELEEWPFMKLVEMVREGATRMTNEYARSIIDWGEINNGFPNGEVLVSSWWRLGFEEVEYPWGKPKYCCPVVYHKKDIILLFPPVGGGEGVSIIVALPPKEMEKFHGLFNKFLTSH

SEQ ID NO: 53281 - protein, 457 aa, Glycine max
  peptide (1)..(457): Ceres Seq. ID no. 15174754
METSNNNHDAPPPPLLKDLKVTIHNASMIFPSKEIERKSLFLSNIDKVLNFDVETVHFFGAHKDFPPHVVNERLKNALEDALVVYDFLGGRLKLNYDTKRLEMDCNPEGAGFVVASSEYNLDQIGDLDYPNPAFAQLVHQNKDFLKDGDVPLCVAQVTSFKCGGFAIGISTSHTTFDGLSFKTFLDNIASIAAKKPLVVTPCHDRHLLAARSPPRVTFPHPEMLKLSDQLPTCPESNIFEASTEQLDFKVFKLTLNDITKLKEEARNSSISGGLSTKCVTGFNVITAYIWRCKALSCYNDENPNRSSTILYAVDIRSRLNPPLPKSYAGNAVLTAYATAKCKELEEWPFMKLVEMVREGATRMTNEYARSIIDWGEINNGFPNGEVLVSSWWRLGFEEVEYPWGKPKYCCPVVYHKKDIILLFPPVGGGEGVSIIVALPPKEMEKFHGLFNKFLTSH

SEQ ID NO: 53282 - protein, 430 aa, Glycine max
  peptide (1)..(430): Ceres Seq. ID no. 15174755
MIFPSKEIERKSLFLSNIDKVLNFDVETVHFFGAHKDFPPHVVNERLKNALEDALVVYDFLGGRLKLNYDTKRLEMDCNPEGAGFVVASSEYNLDQIGDLDYPNPAFAQLVHQNKDFLKDGDVPLCVAQVTSFKCGGFAIGISTSHTTFDGLSFKTFLDNIASIAAKKPLVVTPCHDRHLLAARSPPRVTFPHPEMLKLSDQLPTCPESNIFEASTEQLDFKVFKLTLNDITKLKEEARNSSISGGLSTKCVTGFNVITAYIWRCKALSCYNDENPNRSSTILYAVDIRSRLNPPLPKSYAGNAVLTAYATAKCKELEEWPFMKLVEMVREGATRMTNEYARSIIDWGEINNGFPNGEVLVSSWWRLGFEEVEYPWGKPKYCCPVVYHKKDIILLFPPVGGGEGVSIIVALPPKEMEKFHGLFNKFLTSH

SEQ ID NO: 53283 - DNA, 1245 bp, Glycine max
  misc_feature (1)..(1245): Ceres Seq. ID no. 14304608
aatctttcttcccagtttttctccaaccttctcaaagatgacgcaacgcacccatcttcttcacactcactatcacaaccaaacgattctttggaaggagtgccaccctatcccttatacaagcgcttttcttcagctctgttgaagtgtatggattctgaaacattttgtaggacaggcgccaatttagccatgaccgatgaatttgaagattcttccatgcagcagaagcgtaatgagtggcacagattgattgtggagaaggggtttgaaatagagaatattttgaagagtgtttcctttgaattccatgtccaagagcctttcttttcacagctaaatgatggcctaaaaacaattgaagggaggtgtgccactgggaaatacaataggatcaaatcaggaaatctaattctctttaataagtcggtggtgtttgaagttcagggagtaagacggtatcctacattctttgccatgttggaggcagaaagccttggaaaagttcttcctggagttgaaagtagtgaagaaggtgtaaaagtctaccagagattttgcacagaggagaaggaacaagcaaatggtgtcctttgcaatcgttgtttcaaaattcacccctcaaccatacgattctttggctagattattctgtgaattgagctatgagggtgttcaaagccttctaggtctcatgcataccacagggacaattcctaatgcacttcctccaccaatatcaactctattagcatcatttaattttccatgcaatccaaatgaaaatggcttgactgatggagctcgtgcattggccaagcatgcttgtaggagtagcagtggttattggggttctctgaatggaaatgttgtctttgaaataagggttgctaatggatatggtgcacgctggacagaagatggaagtaagtttattggatttttagaaccctacatgcaagatgggcactcaaagcgatggaagcactagttctgctggccagaccacgacaactacagctaaaaatgtcactagttttccttttatcttgtgatggaactatgtttatggcacagtatttgtttttctctctctttatttcagctaaggactttagctaactatctagtctaatgtctcagagtaatctacttaagtagacttctgtatacagatgatggattcagtataagtattacttgtttcatcctgtacttttaagaaagaagtatccgtttagctcg

SEQ ID NO: 53284 - protein, 214 aa, Glycine max
  peptide (1)..(214): Ceres Seq. ID no. 14304609
NLSSQFFSNLLKDDATHPSSSHSLSQPNDSLEGVPPYPLYKRFSSALLKCMDSETFCRTGANLAMTDEFEDSSMQQKRNEWHRLIVEKGFEIENILKSVSFEFHVQEPFFSQLNDGLKTIEGRCATGKYNRIKSGNLILFNKSVVFEVQGVRRYPTFFAMLEAESLGKVLPGVESSEEGVKVYQRFCTEEKEQANGVLCNRCFKIHPSTIRFFG

SEQ ID NO: 53285 - protein, 164 aa, Glycine max
  peptide (1)..(164): Ceres Seq. ID no. 14304610
MDSETFCRTGANLAMTDEFEDSSMQQKRNEWHRLIVEKGFEIENILKSVSFEFHVQEPFFSQLNDGLKTIEGRCATGKYNRIKSGNLILFNKSVVFEVQGVRRYPTFFAMLEAESLGKVLPGVESSEEGVKVYQRFCTEEKEQANGVLCNRCFKIHPSTIRFFG

SEQ ID NO: 53286 - protein, 150 aa, Glycine max
  peptide (1)..(150): Ceres Seq. ID no. 14304611
MTDEFEDSSMQQKRNEWHRLIVEKGFEIENILKSVSFEFHVQEPFFSQLNDGLKTIEGRCATGKYNRIKSGNLILFNKSVVFEVQGVRRYPTFFAMLEAESLGKVLPGVESSEEGVKVYQRFCTEEKEQANGVLCNRCFKIHPSTIRFFG

SEQ ID NO: 53287 - DNA, 1530 bp, Glycine max
  misc_feature (1)..(1530): Ceres Seq. ID no. 12563809
aaaagtcaccgattacgttctctaaaattcactcccaaaaaactctatttgattccaccgaaaccctaaccccctttcgacgaacgaagggcaatcagttgctcgctccttggatccattcttgaaattctcgttatcgctcttcgaactcaagctctctcgctcacgatttctgcttctgcaccaatttctgcggtttctcaagatttagaggttctaagtggttcatttctttgaagcatgccggggttaacgtgcaacgcttgcaacaccgaattcaaagatgatacagagcaaaagctccattacaaatccgagtggcatcgatacaatctcaagcgcaaggtggctggggttcctggggtgaccgaggcgttatttctggctagacaatctgtgcttgctcaagagaaaaataaactgggtgaaacccccatgctctacagctgtggtctttgtggaaaggattataaaagttctaaggctcatgctgagcaccttaaatcacgtggtcatatgatgcaggcctctgaaggaactagtcacgcagatgagaaggcaatagttaagcctcttccacaacgtgttgtgaataggcctcctcctaggagagaggtagataactctgaaaatgaggaaagtgaagatgaatgggaggaggttgatcctgaagaggatttggttgatggtgctgcaaagtccttgactgatttgaatgtgaatgagcatggtgaaaatgttgatatggaggtagatgatgattttgaggagttagacccctcttgttgctttatgtgtgatcaagagcacaaatcaatagaaaactgcatggttcacatgcacaagcatcatggattcttcattcctgatgttgagtatttgaaggatccaaaaggcctcctcacctatcttggccttaaggtcaaaagggactacatgtgtctgtactgcaatgatcgatgttatccattcagcagcttggaagcagtcaggaaacatatggaggcaaaaagtcactgtaaagtgcattatggtgatggtgatgatgacgaggaggtagaattagatgagttctatgattatagcagcagttatgtggatgatcaaggcaagcagcttgttgcgtcttgtgatgcatctaacaatgtagaacttgttggtgggtctgagctcataatcaccacgaaatctggtgaaagatcatcaaccaaaacactaggttcccgtgaatttttgcgttattatcgtcaaaaacctcggccatcactagcaaatatggctatcactgctgcgttggcttcaaggtacaggagcatgggcttgaccactatccaatcaagggagaagattgtgaggatgaaagtgctgaaggaaatgaataggtcaggtgtggacaatatgcgtactaagatggcgatgaagagtaatgtcatcaggaacctgccaaagaatgtaccatattagtcctcactggtaatagttttacatgagtggtgctgtgtattaattttttctatgaaataatttttc

SEQ ID NO: 53288 - protein, 407 aa, Glycine max
  peptide (1)..(407): Ceres Seq. ID no. 12563810
MPGLTCNACNTEFKDDTEQKLHYKSEWHRYNLKRKVAGVPGVTEALFLARQSVLAQEKNKLGETPMLYSCGLCGKDYKSSKAHAEHLKSRGHMMQASEGTSHADEKAIVKPLPQRVVNRPPPRREVDNSENEESEDEWEEVDPEEDLVDGAAKSLTDLNVNEHGENVDMEVDDDFEELDPSCCFMCDQEHKSIENCMVHMHKHHGFFIPDVEYLKDPKGLLTYLGLKVKRDYMCLYCNDRCYPFSSLEAVRKHMEAKSHCKVHYGDGDDDEEVELDEFYDYSSSYVDDQGKQLVASCDASNNVELVGGSELIITTKSGERSSTKTLGSREFLRYYRQKPRPSLANMAITAALASRYRSMGLTTIQSREKIVRMKVLKEMNRSGVDNMRTKMAMKSNVIRNLPKNVPY

SEQ ID NO: 53289 - protein, 342 aa, Glycine max
  peptide (1)..(342): Ceres Seq. ID no. 12563811
MLYSCGLCGKDYKSSKAHAEHLKSRGHMMQASEGTSHADEKAIVKPLPQRVVNRPPPRREVDNSENEESEDEWEEVDPEEDLVDGAAKSLTDLNVNEHGENVDMEVDDDFEELDPSCCFMCDQEHKSIENCMVHMHKHHGFFIPDVEYLKDPKGLLTYLGLKVKRDYMCLYCNDRCYPFSSLEAVRKHMEAKSHCKVHYGDGDDDEEVELDEFYDYSSSYVDDQGKQLVASCDASNNVELVGGSELIITTKSGERSSTKTLGSREFLRYYRQKPRPSLANMAITAALASRYRSMGLTTIQSREKIVRMKVLKEMNRSGVDNMRTKMAMKSNVIRNLPKNVPY

SEQ ID NO: 53290 - protein, 315 aa, Glycine max
  peptide (1)..(315): Ceres Seq. ID no. 12563812
MMQASEGTSHADEKAIVKPLPQRVVNRPPPRREVDNSENEESEDEWEEVDPEEDLVDGAAKSLTDLNVNEHGENVDMEVDDDFEELDPSCCFMCDQEHKSIENCMVHMHKHHGFFIPDVEYLKDPKGLLTYLGLKVKRDYMCLYCNDRCYPFSSLEAVRKHMEAKSHCKVHYGDGDDDEEVELDEFYDYSSSYVDDQGKQLVASCDASNNVELVGGSELIITTKSGERSSTKTLGSREFLRYYRQKPRPSLANMAITAALASRYRSMGLTTIQSREKIVRMKVLKEMNRSGVDNMRTKMAMKSNVIRNLPKNVPY

SEQ ID NO: 53291 - DNA, 1360 bp, Glycine max
  misc_feature (1)..(1360): Ceres Seq. ID no. 15170203
gccacaccataattttcacactcactacacctcaccaaataatgaaccatggaataccaataccacccatcatcttatggcgtctcttcctcttctcactctagccaccatcaacaagggtcaacaacaccgaaatccctctcttcacaacgcagcctcgtctcagttccctccctcaaccaccaccaccacctccacaccccgaattccaccgtctaccaccactgcctcacaaccctcaagggtcacacctcctcctacatctcctccttaaccctctccggcaaattcctctacaccggctcctccgaccgcgaaatccgctcctggaaccgcatcccagaaaactcatcaaacaacaatgacaatagcaacaccgtactcacgggaaacggtgctgttaagtcgttagtaattcagtcaaacaaacttttcagcgcgcatcaagaccacaaaatccgtgtctggaaaataagcactaacaacaacaacgataacgatcatgaccagaaatacacacacgtggccacactccccaccctcggcgaccgcgcctcgaaaatcttgatccccaagaaccaggtacaaatccgaaggcacaagaaatgcacctgggttcaccacgtggacaccgtctcggctttggccctgtccagagacggaaccttgctgtactcagtctcttgggacagaacactcaaaatctggaaaacgaaagacttcacgtgcctggagtccctcgccaacgcgcacgacgacgccatcaacgctgtcgcagtctcctacgatgggcgcgtctacaccggatcagcggacaagaaaatcaaggtgtggaagaaattcgcaggagaaaagaaacacactttaatagaaaccttggagaagcacaactctggggttaatgctttggctctaagcagcgacgagaatgttgtatattctggtgcatgcgatagggctattttggtttgggagaagaaagagggtgatgatgggaaaatgggggtggtgggtgctttaaggggacacaccaagtccattttgtgtttatctgttgtggcggatttggtgtgtagtggctctgcggatacaacgattaggatttggagaggttgtgttgattcgcatgaatactcttgtttagcggttttggaagggcacagggcttcgattaagtgcataagcgcagtggttgaccactgcaacaacaacaacaacaacacatcgcagtccgaagcattattatcttttctagtctatagtggcggtttggactgcgacattaaggtgtggcagattttacttccggctagctaaattataggacccatcataataataataataggttttttaaatt

SEQ ID NO: 53292 - protein, 422 aa, Glycine max
  peptide (1)..(422): Ceres Seq. ID no. 15170204
MEYQYHPSSYGVSSSSHSSHHQQGSTTPKSLSSQRSLVSVPSLNHHHHLHTPNSTVYHHCLTTLKGHTSSYISSLTLSGKFLYTGSSDREIRSWNRIPENSSNNNDNSNTVLTGNGAVKSLVIQSNKLFSAHQDHKIRVWKISTNNNNDNDHDQKYTHVATLPTLGDRASKILIPKNQVQIRRHKKCTWVHHVDTVSALALSRDGTLLYSVSWDRTLKIWKTKDFTCLESLANAHDDAINAVAVSYDGRVYTGSADKKIKVWKKFAGEKKHTLIETLEKHNSGVNALALSSDENVVYSGACDRAILVWEKKEGDDGKMGVVGALRGHTKSILCLSVVADLVCSGSADTTIRIWRGCVDSHEYSCLAVLEGHRASIKCISAVVDHCNNNNNNTSQSEALLSFLVYSGGLDCDIKVWQILLPAS

SEQ ID NO: 53293 - DNA, 1393 bp, Glycine max
  misc_feature (1)..(1393): Ceres Seq. ID no. 14304528
gattcaacaagagctagctccgcaagataaagaaaggtcttagaatacttgcaaacacacaaacacaaaacaccctttttccaagaacaagagcaagagcctcaacctcagagctgtgataacttgttccaatgagcatgttaggcctgagagacctagttctcatagctcaaaccccttcttcccttcaccaccaacaccaaggccaacccatttcagaaaaccagactcacactcacactccaaaccttcctttgccttcttcagcagcttctctcagtgttggctttggaattttccctctcctcactgccacaccatgtgtgccacagcctcatcaaaacaatgaggttcaagagtgtggtggtggtggtgccaatagtaacactaccaccaccaattattggaacctcaagatgtgccaagaagtgaataatcctccaaagaagggtgtgatcaacgtggctgatcatgatgatgagaagggtgtgatggagagtgaggaaaacggggtctatgggcctgactttagggtgtgccaagattgtggcaacagggctaagaaagattgcgtctttagaagatgcaggacttgctgcaagggacgtgggtatgattgtaacactcacgtgaagagcacgtggatcccctccgttcgccgccgcgagcgcgagatcacggtggcttccggtggcggtgttggcggcaatggtggttgtaagaggccaagagctgtggtggggtcatctcaaaatgccacttctcatagttccaactctaatgctacaactcctaagaccttagctactagctcttttcatcaagatgctagcttcaagcagtctttaccgggtcatgttcgtgcaccagcagtgttcaagtgccatagagtctctgccattgggaatggtgaagatgagtttgcatacttggcaacggtccagattagtgggcatgtgttcaaagggtttctctatgaccatggtgttgatgggaaaaccgcaaatgtagtcccttgtgtctcggaactgcagctgggaaacaattgcagtgggaagaacagagaatgttcctctgcaattgcaattggggttgcaaataacaatgcataccctgcttctgcgagttgaagattgctttagagatggaaagatttcaccacagagaacaaattgttttagaatcccatgttgcacctcaaattattgaaagaggtagagggctatgtacccacaaggccacgacgaggactggccaaatggtgatggatcagtttcgtgaacctcaaaagaagccagttcatttgcaattttgttttctgggaaaaatgaccatatatgctaaattggtctttaattgtgtaaatttatcttccaaaaatgtttatatctac

SEQ ID NO: 53294 - protein, 332 aa, Glycine max
  peptide (1)..(332): Ceres Seq. ID no. 14304529
MSMLGLRDLVLIAQTPSSLHHQHQGQPISENQTHTHTPNLPLPSSAASLSVGFGIFPLLTATPCVPQPHQNNEVQECGGGGANSNTTTTNYWNLKMCQEVNNPPKKGVINVADHDDEKGVMESEENGVYGPDFRVCQDCGNRAKKDCVFRRCRTCCKGRGYDCNTHVKSTWIPSVRRREREITVASGGGVGGNGGCKRPRAVVGSSQNATSHSSNSNATTPKTLATSSFHQDASFKQSLPGHVRAPAVFKCHRVSAIGNGEDEFAYLATVQISGHVFKGFLYDHGVDGKTANVVPCVSELQLGNNCSGKNRECSSAIAIGVANNNAYPASAS

SEQ ID NO: 53295 - protein, 330 aa, Glycine max
  peptide (1)..(330): Ceres Seq. ID no. 14304530
MLGLRDLVLIAQTPSSLHHQHQGQPISENQTHTHTPNLPLPSSAASLSVGFGIFPLLTATPCVPQPHQNNEVQECGGGGANSNTTTTNYWNLKMCQEVNNPPKKGVINVADHDDEKGVMESEENGVYGPDFRVCQDCGNRAKKDCVFRRCRTCCKGRGYDCNTHVKSTWIPSVRRREREITVASGGGVGGNGGCKRPRAVVGSSQNATSHSSNSNATTPKTLATSSFHQDASFKQSLPGHVRAPAVFKCHRVSAIGNGEDEFAYLATVQISGHVFKGFLYDHGVDGKTANVVPCVSELQLGNNCSGKNRECSSAIAIGVANNNAYPASAS

SEQ ID NO: 53296 - protein, 237 aa, Glycine max
  peptide (1)..(237): Ceres Seq. ID no. 14304531
MCQEVNNPPKKGVINVADHDDEKGVMESEENGVYGPDFRVCQDCGNRAKKDCVFRRCRTCCKGRGYDCNTHVKSTWIPSVRRREREITVASGGGVGGNGGCKRPRAVVGSSQNATSHSSNSNATTPKTLATSSFHQDASFKQSLPGHVRAPAVFKCHRVSAIGNGEDEFAYLATVQISGHVFKGFLYDHGVDGKTANVVPCVSELQLGNNCSGKNRECSSAIAIGVANNNAYPASAS

SEQ ID NO: 53297 - DNA, 1448 bp, Glycine max
  misc_feature (1)..(1448): Ceres Seq. ID no. 14304565
tatatatatatattaaaatctcagatatataattatatgacttaaatttaattttttcactctcaatcagatatcctgctgttatatgatatctcatataatatatatttgtgtgtcaacttaacccttactacaagatttaaatgcgtaggagttttttcaagcatcgggaccatcattctactctttggtttgtggcggttgcgtaaagttgtaaggaaaaagatagcaaagaaacgcaaagaaaagttcttcaaacaaaatggaggattgttgttagaacaaagactatctactggtgaagttaatgttgacaaaactaaactctttagcttaaaggaattagggaaggccactgatcactttaatataaacagaatacttggaaaaggaggtcaaggtacagtttacaaaggtatgttagtagatggaaaaattgttgcagtgaaaaaatttaaggtcaacggaaatgttgaagaattcatcaacgaatttgtcattctttcacaaattaaccacagaaatgtggttaagttgttgggatgttgtttggagactgaaatccctttgcttgtttatgaattcattcccaatggtaacctttatgaatatttacatggacaaaatgatgagttaccaatgacatgggatatgcgtttgagaattgccactgaagtggctggagctctattttacttgcactcagctgcttctcaacccatttatcatagagatgtgaagtcaacaaatatattattggatgagaagtataaggcaaaagtagcagactttggggcatcaagaatggtttccattgaagccactcacctcactactgcagttcaaggaacttttggatacttagatcctgaatattttcatacaagtcaattgacagagaagagtgatgtctacagctttggagtggttcttgttgaacttttaacaggacaaaaaccaatatcctcagtgaacgaacaaggacttcaaagtttagcttcatattttcttctttgtatggaggaaaatcgtttttttgatattgttgatgcaagagtcatgcaggaagtggagaaagaacacataattgtagttgccaatcttgcaagaagatgcttacagttgaatgggagaaagcgaccaactatgaaagaagtcacattagaattggaaagtatccaaaaactggaaaaccagtgtaatgcacaagagcaacaagaagaacttgagcttgctggaaatgaagatagccaattttgggctgcgtattctacaacttcgactgcagggcaaacttcagacagcaaaacatcaaccttggagattatgcctattcttatcaaataattgttgaattctcttaacttgttttgttgtgtgtaaaattaaaaataaaaataaaaacatatggacgaatttaacgttcaaaagcataattatggtatgat

SEQ ID NO: 53298 - protein, 309 aa, Glycine max
  peptide (1)..(309): Ceres Seq. ID no. 14304566
MLVDGKIVAVKKFKVNGNVEEFINEFVILSQINHRNVVKLLGCCLETEIPLLVYEFIPNGNLYEYLHGQNDELPMTWDMRLRIATEVAGALFYLHSAASQPIYHRDVKSTNILLDEKYKAKVADFGASRMVSIEATHLTTAVQGTFGYLDPEYFHTSQLTEKSDVYSFGVVLVELLTGQKPISSVNEQGLQSLASYFLLCMEENRFFDIVDARVMQEVEKEHIIVVANLARRCLQLNGRKRPTMKEVTLELESIQKLENQCNAQEQQEELELAGNEDSQFWAAYSTTSTAGQTSDSKTSTLEIMPILIK

SEQ ID NO: 53299 - protein, 235 aa, Glycine max
  peptide (1)..(235): Ceres Seq. ID no. 14304567
MTWDMRLRIATEVAGALFYLHSAASQPIYHRDVKSTNILLDEKYKAKVADFGASRMVSIEATHLTTAVQGTFGYLDPEYFHTSQLTEKSDVYSFGVVLVELLTGQKPISSVNEQGLQSLASYFLLCMEENRFFDIVDARVMQEVEKEHIIVVANLARRCLQLNGRKRPTMKEVTLELESIQKLENQCNAQEQQEELELAGNEDSQFWAAYSTTSTAGQTSDSKTSTLEIMPILIK

SEQ ID NO: 53300 - protein, 231 aa, Glycine max
  peptide (1)..(231): Ceres Seq. ID no. 14304568
MRLRIATEVAGALFYLHSAASQPIYHRDVKSTNILLDEKYKAKVADFGASRMVSIEATHLTTAVQGTFGYLDPEYFHTSQLTEKSDVYSFGVVLVELLTGQKPISSVNEQGLQSLASYFLLCMEENRFFDIVDARVMQEVEKEHIIVVANLARRCLQLNGRKRPTMKEVTLELESIQKLENQCNAQEQQEELELAGNEDSQFWAAYSTTSTAGQTSDSKTSTLEIMPILIK

SEQ ID NO: 53301 - DNA, 1286 bp, Glycine max
  misc_feature (1)..(1286): Ceres Seq. ID no. 14304654
agaaaggcctaatccagctgagaaaaaaaatggatgtagagaaagccttccacatgactggaggagttggcaaaactagctatgccaagaattcctcactacagaagaaggaatctgataaagtgaagcacataatcatacaaacagttgaggagctttaccttgcaaccactccaaagagcataggcattgctgatttgggatgttcctctggaccaaacaccctatcaatcatcaaagacatctttcaggccatccaaggcacaagccaaaggatcatgcaccactccacagagttcagggtgtacttcaatgatcttccaacaaatgacttcaattcaatcttcaaggccctcccagagttccaaaagttgcttaggcaagacaggaaaaatgggttcccttccattttcatgggaggctaccctggctcattttatggaagactgttcccaaacagttacttgcactttgtccactcctccttcagtcttcactggctttcaagggttcctccatcactctatgatgagcacaaaaggccattgaacaaagggtgtgtttacatttgtgaatcaagccctgaagtggtgtctcaagcatactatcaacaattccaagaagatttttccttgttccttaggtcaaggtcagaagaactagtagtaggtggaagaatggtgctgatatttttggggagaaggggcccagaacatgttgacagaggcaactctttcttctgggagattctttcccgttcatttgctattctagtctcacagggagaagtagagcaagagaagtttgattcatatgatgtacatttctatgcaccatcaagggaagagatagaagaagaggtgagaaaagaagggtcattgaagttggagaggctagagatgtttgaaatggacaagagtcacaatgagcatggaagtgatgagagctatggcacacaggttgctgtggcagttagggccattcaagaatcaatgatctcacaccactttggagaagggatcttggaaagtttgtttcagaattttgcaaagttggtagatgaagaaatggctaaggaggatattagaccaatctcttttgttctggttctcagaaaaatatgatactatgattattattattattatacaaaaatattaattatatagtaatattaattattttggtttgcagtaattagacgtgtttaaattgcagccatttactgcccatcactgtaatcatcatgatcagtctaatgtaaagtgttggtgtttcggtttaag

SEQ ID NO: 53302 - protein, 373 aa, Glycine max
  peptide (1)..(373): Ceres Seq. ID no. 14304655
KGLIQLRKKMDVEKAFHMTGGVGKTSYAKNSSLQKKESDKVKHIIIQTVEELYLATTPKSIGIADLGCSSGPNTLSIIKDIFQAIQGTSQRIMHHSTEFRVYFNDLPTNDFNSIFKALPEFQKLLRQDRKNGFPSIFMGGYPGSFYGRLFPNSYLHFVHSSFSLHWLSRVPPSLYDEHKRPLNKGCVYICESSPEVVSQAYYQQFQEDFSLFLRSRSEELVVGGRMVLIFLGRRGPEHVDRGNSFFWEILSRSFAILVSQGEVEQEKFDSYDVHFYAPSREEIEEEVRKEGSLKLERLEMFEMDKSHNEHGSDESYGTQVAVAVRAIQESMISHHFGEGILESLFQNFAKLVDEEMAKEDIRPISFVLVLRKI

SEQ ID NO: 53303 - protein, 364 aa, Glycine max
  peptide (1)..(364): Ceres Seq. ID no. 14304656
MDVEKAFHMTGGVGKTSYAKNSSLQKKESDKVKHIIIQTVEELYLATTPKSIGIADLGCSSGPNTLSIIKDIFQAIQGTSQRIMHHSTEFRVYFNDLPTNDFNSIFKALPEFQKLLRQDRKNGFPSIFMGGYPGSFYGRLFPNSYLHFVHSSFSLHWLSRVPPSLYDEHKRPLNKGCVYICESSPEVVSQAYYQQFQEDFSLFLRSRSEELVVGGRMVLIFLGRRGPEHVDRGNSFFWEILSRSFAILVSQGEVEQEKFDSYDVHFYAPSREEIEEEVRKEGSLKLERLEMFEMDKSHNEHGSDESYGTQVAVAVRAIQESMISHHFGEGILESLFQNFAKLVDEEMAKEDIRPISFVLVLRKI

SEQ ID NO: 53304 - protein, 356 aa, Glycine max
  peptide (1)..(356): Ceres Seq. ID no. 14304657
MTGGVGKTSYAKNSSLQKKESDKVKHIIIQTVEELYLATTPKSIGIADLGCSSGPNTLSIIKDIFQAIQGTSQRIMHHSTEFRVYFNDLPTNDFNSIFKALPEFQKLLRQDRKNGFPSIFMGGYPGSFYGRLFPNSYLHFVHSSFSLHWLSRVPPSLYDEHKRPLNKGCVYICESSPEVVSQAYYQQFQEDFSLFLRSRSEELVVGGRMVLIFLGRRGPEHVDRGNSFFWEILSRSFAILVSQGEVEQEKFDSYDVHFYAPSREEIEEEVRKEGSLKLERLEMFEMDKSHNEHGSDESYGTQVAVAVRAIQESMISHHFGEGILESLFQNFAKLVDEEMAKEDIRPISFVLVLRKI

SEQ ID NO: 53305 - DNA, 1422 bp, Glycine max
  misc_feature (1)..(1422): Ceres Seq. ID no. 13593889
ccccccccaatggctttagaaacaatgttgaagcttctttaaataacagtgaattacggaaagattcagccattctaataaatgagatgggggtcaatggagattgttatgatggtagaaacaaggaagttaacccagttcttggcgaaagctcagaatgggaaattcaatgggaggatcttgatattggtgagcgtattggtattggttcttatggtgaagtttatcgtgctgaatgcaatggcactgaagttgctgtaaagaagtttctggaccaagatttctctggtgatgcgctagctcagttcaaatctgaagttgagatcatgataaggctgcggcatcctaatgtcgtgctcttcatgggagctattactcgctccccacatttctctatcttgacagagtttcttccaagaggcagtttatataggctattgcatcgtcccaatcttcgacttgatgagaagaaacggttgcgcatggctctagatgtggctaagggaatgaattacttgcacacgagccatcctcccattgtccaccgagatttaaagtctccaaatcttcttgttgacaggcattgggttgttaaggtctgtgattttggtctgtcacgaatgaagcaccatacatatttgtcatccaaatcctgtgctggaacgcctgagtggatggcaccagaagtcttgagaaatgagccagccaatgagaagtgtgatgtgtatagttttggtgtgatcttgtgggagttgactaccacaagaattccctggcaaggtttgaacccaatgcaggttgttggagctgttggattccaaaataaacggcttgaaattccagaagatgtcaatccagtagtggcacaaataatacgtgattgctggcaaacggagccacacttgcggccatcattctcacaactgatgtctcgtctttaccgacttcaacatttgattgtcccaaaaacaagctcaacacattaaacgaagttgtctataacatagctattgtaataatacttaaagctgttccttggttcaaagaaccagaacagctaaagtttttcttttcttttctttttttcgtccatcttgacatatcaagatattgctgaactggtaagtgtcaggtacattctaagttgggactggacacaacccattcagaaaagagcagggtccctccccaatatctgcataagtgcagtggaggtttagttggagtaggtacaaatgaagaatccccagagggaagaaaggcaagaaacataaaggaaaaaaaaaaagtacaaaattattctttgtctgtagaggtcttatttggaattgtaacatgcgatctctcaggttctcatgcaaatgtaaaaaagaaaaagaacaaaaaaaaaacagaaaaaaagaacattatgtatttcccgtt

SEQ ID NO: 53306 - protein, 327 aa, Glycine max
  peptide (1)..(327): Ceres Seq. ID no. 13593890
PPNGFRNNVEASLNNSELRKDSAILINEMGVNGDCYDGRNKEVNPVLGESSEWEIQWEDLDIGERIGIGSYGEVYRAECNGTEVAVKKFLDQDFSGDALAQFKSEVEIMIRLRHPNVVLFMGAITRSPHFSILTEFLPRGSLYRLLHRPNLRLDEKKRLRMALDVAKGMNYLHTSHPPIVHRDLKSPNLLVDRHWVVKVCDFGLSRMKHHTYLSSKSCAGTPEWMAPEVLRNEPANEKCDVYSFGVILWELTTTRIPWQGLNPMQVVGAVGFQNKRLEIPEDVNPVVAQIIRDCWQTEPHLRPSFSQLMSRLYRLQHLIVPKTSSTH

SEQ ID NO: 53307 - protein, 299 aa, Glycine max
  peptide (1)..(299): Ceres Seq. ID no. 13593891
MGVNGDCYDGRNKEVNPVLGESSEWEIQWEDLDIGERIGIGSYGEVYRAECNGTEVAVKKFLDQDFSGDALAQFKSEVEIMIRLRHPNVVLFMGAITRSPHFSILTEFLPRGSLYRLLHRPNLRLDEKKRLRMALDVAKGMNYLHTSHPPIVHRDLKSPNLLVDRHWVVKVCDFGLSRMKHHTYLSSKSCAGTPEWMAPEVLRNEPANEKCDVYSFGVILWELTTTRIPWQGLNPMQVVGAVGFQNKRLEIPEDVNPVVAQIIRDCWQTEPHLRPSFSQLMSRLYRLQHLIVPKTSSTH

SEQ ID NO: 53308 - protein, 219 aa, Glycine max
  peptide (1)..(219): Ceres Seq. ID no. 13593892
MIRLRHPNVVLFMGAITRSPHFSILTEFLPRGSLYRLLHRPNLRLDEKKRLRMALDVAKGMNYLHTSHPPIVHRDLKSPNLLVDRHWVVKVCDFGLSRMKHHTYLSSKSCAGTPEWMAPEVLRNEPANEKCDVYSFGVILWELTTTRIPWQGLNPMQVVGAVGFQNKRLEIPEDVNPVVAQIIRDCWQTEPHLRPSFSQLMSRLYRLQHLIVPKTSSTH

SEQ ID NO: 53309 - DNA, 1168 bp, Glycine max
  misc_feature (1)..(1168): Ceres Seq. ID no. 12562983
aatcgaattgaatcgaagagtgaagaaagatgcttccctcatttctaagcctggtgtcagtgtacagcctctacctccgacgctgcttcacgggcgcggggctctcatcgcagacgcttagagtggacgacgaatccacgctccacttctgggccccgacaaacccaacggcccagaagccttccctggttctgatccacgggtttgggccggagtccatatggcagtggcgcaaacaggtccaattcttagcccctcacttcaacgtgtacgttccggacctaatattcttcggaggatcgagcaccaagtccagcgaaaggagcgaaacgtttcaggcagcgtcggtggggaagcttttggacaagttggaggttgagaagttccacgtggtggggacgagttatgggggcatggtggcttacaatttggccaagatgttgggtgaagacagggtgcaaaaagtggttattgctagctccggtgtgaacatgatcaagagcagcaacgtggcgttggtgcagagggcgcaactggagaagattgaggatctgatgctgcctcctacgccacaacacttgcgaatattgatgaagttctccatccacaagcctccccaactcttgcctgattttttactccgggacttcttggctaaattatacggagaaaataggaaggaaaaaatggagcttctgaaagggttaaccgtcggaagggatgatacttcaagaatttcacctcttcaacaagaggttctcatagtctggggagaagaagaccgaatatttccgctgaagttggcccacgaactaaaagagataatcagtaaaaaggcaagattggaattgataaaggaggcatcccatgtgcctcaaatggaaaagccaagagaattcaacaacattctcctaaatttcttacaggagcattcttgagtaattttttaaaagcattgttatatacattaggagcataatctgtctacatgtgaacgagaagtgctacaacaagcgaatacgaaaaccaaaactcgcatgctattgttagagtgacctctaatattttatatatttctgcaattatactattgttttaaattatacttgggaatcccccacaagttaactagtccataaagtagttataagacagatttttttgcgtc

SEQ ID NO: 53310 - protein, 302 aa, Glycine max
  peptide (1)..(302): Ceres Seq. ID no. 12562984
MLPSFLSLVSVYSLYLRRCFTGAGLSSQTLRVDDESTLHFWAPTNPTAQKPSLVLIHGFGPESIWQWRKQVQFLAPHFNVYVPDLIFFGGSSTKSSERSETFQAASVGKLLDKLEVEKFHVVGTSYGGMVAYNLAKMLGEDRVQKVVIASSGVNMIKSSNVALVQRAQLEKIEDLMLPPTPQHLRILMKFSIHKPPQLLPDFLLRDFLAKLYGENRKEKMELLKGLTVGRDDTSRISPLQQEVLIVWGEEDRIFPLKLAHELKEIISKKARLELIKEASHVPQMEKPREFNNILLNFLQEHS

SEQ ID NO: 53311 - protein, 174 aa, Glycine max
  peptide (1)..(174): Ceres Seq. ID no. 12562985
MVAYNLAKMLGEDRVQKVVIASSGVNMIKSSNVALVQRAQLEKIEDLMLPPTPQHLRILMKFSIHKPPQLLPDFLLRDFLAKLYGENRKEKMELLKGLTVGRDDTSRISPLQQEVLIVWGEEDRIFPLKLAHELKEIISKKARLELIKEASHVPQMEKPREFNNILLNFLQEHS

SEQ ID NO: 53312 - protein, 166 aa, Glycine max
  peptide (1)..(166): Ceres Seq. ID no. 12562986
MLGEDRVQKVVIASSGVNMIKSSNVALVQRAQLEKIEDLMLPPTPQHLRILMKFSIHKPPQLLPDFLLRDFLAKLYGENRKEKMELLKGLTVGRDDTSRISPLQQEVLIVWGEEDRIFPLKLAHELKEIISKKARLELIKEASHVPQMEKPREFNNILLNFLQEHS

SEQ ID NO: 53313 - DNA, 1360 bp, Glycine max
  misc_feature (1)..(1360): Ceres Seq. ID no. 14304628
aagaaatatttggttatcaaactaggaaagagatcaaaatgaagctatttcaatgggtgcatcgaaaacttcggcagaatagtatagatcctttcaaggatttcacacttggaaatccctgtacttgccttacagtgcagccaacacttgacaatcaatattcccagtcaaagccaagcttcagctccacaaatcaacccagtttctcaaagccacaccatcaggaaaatcaaacatcttactctgggttggttgatagcagagaagataagtctcaagaagaaacacctgcaataatctctgagctctttgaaggttttctaacaattggaactcttggtgcagaaacagtcaccaatgaaccaggaacaccaacatttgctatgccttcagaaaacataacatcgagaagtgaagaggtgacaggaaatgaactgaagctcataagttacgagcttgagaaatttcttgagactgaaaaagaagaaagtttgtatgattcatcaggaagaaacagctatgttagcattatcacacttagtgaaaaggaaatagatggacccaaagctgaagattacagaaacaaagctgtatgtccactgcaaggatatttactggggtcctcatttgaactaccagaaacaaaagaagtaaggaaagaaagagcatctcttgctgagctactttataagacaaagtcaacaagtcaagattgtatagacacaggaatacaaggagaaacacaagtcaagagaacacctaagtctgctgccatgcatattatgagaaagatattgaaaagggtccacagttcttcaaaaagctgtaacacttccaggaatgatgctgattctgcttcaaccaataaaaaactccaaaaggttcaacgtatgtttcacaaaaaagtctatcctgaaagccctgtagacggaaaagattgcattcaatcccacaaaggtaagataaaaaatgtccctcatgaatactttcaggaatatgaaaatgggaagttcacaaacccagacaaaggcaaaagatttcattcagataccaaatcaagaaagtggtcccaacactgtatgaccaattggaacccaccacagcatgggctaatttgcagtagctcaactggaaacaatgagcactggatcaaaacagatgcagagtatttggtgctggagctgtagcaacttaagctgtactaaagtcgtgatgaattgagcctctataagagagacttgtcaaaactagtattgataatttgatattatgatcgtgttatgcatgtacttggagtgatcatgtattcaataaatctgagtttcgtgaaagcttcttaataaatagacatgtttggttc

SEQ ID NO: 53314 - protein, 394 aa, Glycine max
  peptide (1)..(394): Ceres Seq. ID no. 14304629
EIFGYQTRKEIKMKLFQWVHRKLRQNSIDPFKDFTLGNPCTCLTVQPTLDNQYSQSKPSFSSTNQPSFSKPHHQENQTSYSGLVDSREDKSQEETPAIISELFEGFLTIGTLGAETVTNEPGTPTFAMPSENITSRSEEVTGNELKLISYELEKFLETEKEESLYDSSGRNSYVSIITLSEKEIDGPKAEDYRNKAVCPLQGYLLGSSFELPETKEVRKERASLAELLYKTKSTSQDCIDTGIQGETQVKRTPKSAAMHIMRKILKRVHSSSKSCNTSRNDADSASTNKKLQKVQRMFHKKVYPESPVDGKDCIQSHKGKIKNVPHEYFQEYENGKFTNPDKGKRFHSDTKSRKWSQHCMTNWNPPQHGLICSSSTGNNEHWIKTDAEYLVLEL

SEQ ID NO: 53315 - protein, 382 aa, Glycine max
  peptide (1)..(382): Ceres Seq. ID no. 14304630
MKLFQWVHRKLRQNSIDPFKDFTLGNPCTCLTVQPTLDNQYSQSKPSFSSTNQPSFSKPHHQENQTSYSGLVDSREDKSQEETPAIISELFEGFLTIGTLGAETVTNEPGTPTFAMPSENITSRSEEVTGNELKLISYELEKFLETEKEESLYDSSGRNSYVSIITLSEKEIDGPKAEDYRNKAVCPLQGYLLGSSFELPETKEVRKERASLAELLYKTKSTSQDCIDTGIQGETQVKRTPKSAAMHIMRKILKRVHSSSKSCNTSRNDADSASTNKKLQKVQRMFHKKVYPESPVDGKDCIQSHKGKIKNVPHEYFQEYENGKFTNPDKGKRFHSDTKSRKWSQHCMTNWNPPQHGLICSSSTGNNEHWIKTDAEYLVLEL

SEQ ID NO: 53316 - protein, 267 aa, Glycine max
  peptide (1)..(267): Ceres Seq. ID no. 14304631
MPSENITSRSEEVTGNELKLISYELEKFLETEKEESLYDSSGRNSYVSIITLSEKEIDGPKAEDYRNKAVCPLQGYLLGSSFELPETKEVRKERASLAELLYKTKSTSQDCIDTGIQGETQVKRTPKSAAMHIMRKILKRVHSSSKSCNTSRNDADSASTNKKLQKVQRMFHKKVYPESPVDGKDCIQSHKGKIKNVPHEYFQEYENGKFTNPDKGKRFHSDTKSRKWSQHCMTNWNPPQHGLICSSSTGNNEHWIKTDAEYLVLEL

SEQ ID NO: 53317 - DNA, 1568 bp, Glycine max
  misc_feature (1)..(1568): Ceres Seq. ID no. 14310729
gggaatgccaatacccacctcttagcatggaaataataagtaacataaccccatgtgtattttcatattcctgggaatcaactattcttgggaacgtttttacaaaacttgtagcaaacatgagaatgcgatattctcaagtccatattcatgagaatatttcttgataacttgaaacaaacgcctcctttaggtaaagcatgaggtttctttttccatctctaacaatatgctaccagaaggagcataatgtgaatcttgtctttgagcgttttcatgtcaatagatgcacatggagacacatttacttatttgataatacataaatgttgtactattttatatttgataatgtgtagatgttatgctattttatctatccattcagttataaatagcttaagctgtgttattctcaaattaacgcattattcattatcaaaaaggttcctctctctttggcaataaggatagcatccctcaaagggacattgcggttgcagataaagccacctccgtctgatcaattgtggtttggtttcacatttatgcctgatatagacttcagcttggaatcatttgttggagaacacaagataactaattcacacatagctttgttcctggtcaatcgactcaaggcagcgatccgggaaactttagtgctcccaaattgtgaaagcatatgcattccatggatgctagccgaaaaggatgattgggttcctaggagtgtcgctccgttcatatggatccacccagaatcggggaacgagatttcaacctcagttgataccaataatcaaccttgtggtggattgaaagctagtgcaaggaccttaagtggtgatggtccagaactcaaacaacataaaccgccaaagtgtaccaaatctagtcaggaaccagctaggaaatcagattctgtggcacttccaccaatttcctctagttcagtaacattaaggagcagcaaaagttcggaagaactgacaagacctctgttagagaatgacaaaccacaagaaactagagatttgcaagaacttagaactacttcattgcagaatgataatactaatgaagctagtgaagagaagatgggggatatttctgtgagtgaatcacctcccagaaacgtggtgatggataaacaatatagttcaattgaacaggatgattcaaggccaaggaaaattggaaaaagggaaagaattcttgatttgaaaaagaggatgagtgagaaattggaagaaagagtcggcacattgttgagaagataagaggaccatgagaaatataaacaaagtaaatgtcagaatggttacaaatttgttactgattttttactattgcagacattagtaccattcataaataaaaatgtggggtattaggtattgtttcattgatgagttgtatattttttaggggcttagaagatcatatggaactagatatatacatcacagaaaatactttcatttcgttccacgggagttccacaacactgacgtaatccacttgtaaatttgcaattgtcacagggtataatagaaaactcattt

SEQ ID NO: 53318 - protein, 244 aa, Glycine max
  peptide (1)..(244): Ceres Seq. ID no. 14310730
MPDIDFSLESFVGEHKITNSHIALFLVNRLKAAIRETLVLPNCESICIPWMLAEKDDWVPRSVAPFIWIHPESGNEISTSVDTNNQPCGGLKASARTLSGDGPELKQHKPPKCTKSSQEPARKSDSVALPPISSSSVTLRSSKSSEELTRPLLENDKPQETRDLQELRTTSLQNDNTNEASEEKMGDISVSESPPRNVVMDKQYSSIEQDDSRPRKIGKRERILDLKKRMSEKLEERVGTLLRR

SEQ ID NO: 53319 - protein, 194 aa, Glycine max
  peptide (1)..(194): Ceres Seq. ID no. 14310731
MLAEKDDWVPRSVAPFIWIHPESGNEISTSVDTNNQPCGGLKASARTLSGDGPELKQHKPPKCTKSSQEPARKSDSVALPPISSSSVTLRSSKSSEELTRPLLENDKPQETRDLQELRTTSLQNDNTNEASEEKMGDISVSESPPRNVVMDKQYSSIEQDDSRPRKIGKRERILDLKKRMSEKLEERVGTLLRR

SEQ ID NO: 53320 - DNA, 1169 bp, Glycine max
  misc_feature (1)..(1169): Ceres Seq. ID no. 14306908
aatttttttgtaattactgtgggatttattgtcctctgcctagtgtttttttttcctgcttttataattatttcttgttttgccataaaagaaagtcaatacatgtcatcattggttcttgttgtagggtaaatcaaaaaagcgtctctccaaaagagatctggttgaaagggttagggttctggatggtccggaaaaggataatgtatttcggggatttagaccagttgctgcaccatctgacctgttgaaagcttccagggcaaaaaagttgctccagaagaaggcaattgaaaaggagaaaagaaaagctgaggcactggcctctggaattgactggctaagtgatgattcagatgatgagcctcagaaagaaaacagagaacctcccttgtgtaatcttctcaaagatgaagaacatcaccagctaataattgatttgtgcaaggcattagcatccttgcaaaggtattgggaagcactggagattattaatctctttctaagattggcccatacatctctgtctactgaaaaaaaagaggagcttcgatctcttggagctcaaatggcatataacaccacagatccgaaacatgggtttgattgtgtaaaatacattgttcagcaacatccacacagtgttgcagcttggaattgctactacaaggttatctcaagattggaaaaccgagatacaagacattacaaatttgtacgtggtatgcaaggaaagtttgtggattgtgtgcctcctatccttatttctgggcatcagtttaccatatgtagccatcatcaagatgcagcaaggaaataccttgaagcttataaactattgccagagaatcctttggttaatctttgtgttggaacagccttgatcaacttagcattgggtttaagacttcaaaataagcatcaatgtgttgtacaaggtttagcattcctctacaataatttgagaatctgcgagaacagccaggtttgtctgctcagcatttcatgaatatttttgtgcccgtttaagaagaaaatgttttattattaataaaagatgataataagaaaaagatatcacctttttttatacataggactggctaagttcgtgtacatattctacaaattcttatccaatagaaaattatgctcgggtaattattatc

SEQ ID NO: 53321 - protein, 146 aa, Glycine max
  peptide (1)..(146): Ceres Seq. ID no. 14306909
MAYNTTDPKHGFDCVKYIVQQHPHSVAAWNCYYKVISRLENRDTRHYKFVRGMQGKFVDCVPPILISGHQFTICSHHQDAARKYLEAYKLLPENPLVNLCVGTALINLALGLRLQNKHQCVVQGLAFLYNNLRICENSQVCLLSIS

SEQ ID NO: 53322 - protein, 94 aa, Glycine max
  peptide (1)..(94): Ceres Seq. ID no. 14306910
MQGKFVDCVPPILISGHQFTICSHHQDAARKYLEAYKLLPENPLVNLCVGTALINLALGLRLQNKHQCVVQGLAFLYNNLRICENSQVCLLSIS

SEQ ID NO: 53323 - protein, 82 aa, Glycine max
  peptide (1)..(82): Ceres Seq. ID no. 14306911
FFCNYCGIYCPLPSVFFSCFYNYFLFCHKRKSIHVIIGSCCRVNQKSVSPKEIWLKGLGFWMVRKRIMYFGDLDQLLHHLTC

SEQ ID NO: 53324 - DNA, 1338 bp, Glycine max
  misc_feature (1)..(1338): Ceres Seq. ID no. 12484482
gaccataagtcgatagtagagaaaaatatatccaactaatggctacccttattgctcctagccaccattcccgggttgaggatgctgaagctctccgaaatgctttcaaaggatggggggctgatgacaaggccattatagcaatactgggtcacagaaatgttcatcagaggcaagaaatcagaaaagcttatgaggagatttaccaagaggatctcatcaaacgccttgagtccgagatctctggtgactttgagagagctatgtaccggtggatgttgcagcctgcggatcgtgatgctgttttggtgaatgtggcaatcaagaatggcaccaaagactaccatgtgattgcagagattgcttgtgtcctatcagctgaagagctcttggcagtgaggcgggcctaccaccgccgctacaagtgttccttggaggaagatgtggcagctaacaccaccggcaatcttcgccagcttttggttggattggtgacctcatataggtatgagggtgatgagatcaatgtaaaattttcacaaactgaagctaatgttcttcatgaatctgtcaaggagaagaaaggcaacagtgaagaagtcatcaggatccttactacaagaagcaaaactcaacttgtggcaactttcaaccgctacagagatgaacatggaatttccatcagtaagaaattgttggatcaaacatctgatgacttccacaaggtgttgcacactgctattcgctgcatcaatgaccataagaagtactatgagaaggttttgcgcaatgcagtcaagaagtttggaactgacgaggatggactaagccgtgtgattgttacaagggctgagaaggatctgaaggacatcaaagagctctactacaagagaaacagtgttcaccttgaggatgaagtgtccaaggaaacttctggggactacaagaagttcctcctcactctcttggggaaataagactaagttaagaacttgctctaagggcatcttagtaatgggtttttgttaattatgtcattggtttctggtttgtgcgatttcattatgttagttttccagtaagagtttgttatatctggttaagtttttgagacaacaagaactcgtgtcttgtttgagggcatgcgtgccatttcttagggttgtgttggtacttggcatgctcttattagaggacctctatgctgcgtgtttcctttggattatgctattacctcacctggtttgcttttaatgaaaggttgataacaaatttatatgtacttgaattcttcattttaaattctaatcagcagaggcaccggtagcaagttnttct

SEQ ID NO: 53325 - protein, 312 aa, Glycine max
  peptide (1)..(312): Ceres Seq. ID no. 12484483
MATLIAPSHHSRVEDAEALRNAFKGWGADDKAIIAILGHRNVHQRQEIRKAYEEIYQEDLIKRLESEISGDFERAMYRWMLQPADRDAVLVNVAIKNGTKDYHVIAEIACVLSAEELLAVRRAYHRRYKCSLEEDVAANTTGNLRQLLVGLVTSYRYEGDEINVKFSQTEANVLHESVKEKKGNSEEVIRILTTRSKTQLVATFNRYRDEHGISISKKLLDQTSDDFHKVLHTAIRCINDHKKYYEKVLRNAVKKFGTDEDGLSRVIVTRAEKDLKDIKELYYKRNSVHLEDEVSKETSGDYKKFLLTLLGK

SEQ ID NO: 53326 - protein, 237 aa, Glycine max
  peptide (1)..(237): Ceres Seq. ID no. 12484484
MYRWMLQPADRDAVLVNVAIKNGTKDYHVIAEIACVLSAEELLAVRRAYHRRYKCSLEEDVAANTTGNLRQLLVGLVTSYRYEGDEINVKFSQTEANVLHESVKEKKGNSEEVIRILTTRSKTQLVATFNRYRDEHGISISKKLLDQTSDDFHKVLHTAIRCINDHKKYYEKVLRNAVKKFGTDEDGLSRVIVTRAEKDLKDIKELYYKRNSVHLEDEVSKETSGDYKKFLLTLLGK

SEQ ID NO: 53327 - protein, 233 aa, Glycine max
  peptide (1)..(233): Ceres Seq. ID no. 12484485
MLQPADRDAVLVNVAIKNGTKDYHVIAEIACVLSAEELLAVRRAYHRRYKCSLEEDVAANTTGNLRQLLVGLVTSYRYEGDEINVKFSQTEANVLHESVKEKKGNSEEVIRILTTRSKTQLVATFNRYRDEHGISISKKLLDQTSDDFHKVLHTAIRCINDHKKYYEKVLRNAVKKFGTDEDGLSRVIVTRAEKDLKDIKELYYKRNSVHLEDEVSKETSGDYKKFLLTLLGK

SEQ ID NO: 53328 - DNA, 1249 bp, Glycine max
  misc_feature (1)..(1249): Ceres Seq. ID no. 13593886
attcactctcttctatcccttgcctcaccaccttaaatttgttatgcgcgaacacttgaaaaataatagtgaaaatgtggagtgctcccacagatgaacgatgtttggttgtttatctgaccttcttgaacaatatttgtggaagctgaatttctgttttcaaactggggtctgttgaaagatggactgtcttgagggagcacctgctggattcgttgatgacttgatggtcctctaaaggaagtccccaaactaatcatggctcccatctaatgtatcacccttggtagggactggtggaaatggtatcctataggtaaatacgctggaaagatcttaatgggctggtaatctgacttaccttcccacttctttcctctcccttgggtgtttccaacttcctgttgagagcatagcctgtgccacggttggctgttaaaattgaaattatctatttatttagtagtttctatattgccctacagagtttttagatattcaatcaaaactctgaagtaaataattgggtgttctaaggttgtggcataacatgactttctgatctggcaaaagattatccatccaggttcaattgagttcatgaatggtctggatttcactacatcaatgccctctggctatcaagaggctggagagcctgtattgttgatcagttaatttggaaagtgaatttcgaaaaagttaattatttttgcgtatgaatttactttggaaaagagagaactattttctgattattttttcgtcttccagcaggactctttaaggggtggtggtaaatggagcaatggagctgagatgactgaggaagaagcattagcagagcagcaaaggatgtttgcagaggcgcgtgctaggatgaacggtggagccattgcttccaagcagccagatgctgaccaaagtttagatagctaactttaggatcttcattgaagcatagacaaagcaccaccctgactcctgtctgtgcttccaatgagctcgatggtgtacaaaaaccattcactagtttgctggcccatgtggatgtgctcatttgtattctttcgataaatccatatttgtaagtcaatgtaattagtgagagatcatgaaaaccctcccgtttagcatttacttgtaattatttaatttacgtttttgtatcttctacatactaacaactcctagcttgattctgacagtagctactatgttagattgtaacaaattattaaatatgtag

SEQ ID NO: 53329 - protein, 39 aa, Glycine max
  peptide (1)..(39): Ceres Seq. ID no. 13593887
MTEEEALAEQQRMFAEARARMNGGAIASKQPDADQSLDS

SEQ ID NO: 53330 - protein, 31 aa, Glycine max
  peptide (1)..(31): Ceres Seq. ID no. 13593888
FTLFYPLPHHLKFVMREHLKNNSENVECSHR

SEQ ID NO: 53331 - DNA, 1463 bp, Glycine max
  misc_feature (1)..(1463): Ceres Seq. ID no. 14306707
gacacatacaaacatccatcatcattattattttactccgaacgagttgacaccgattccactcactcaaccatgagccgattcaggcgttttgagctcatagaacaaccacctttcttccactcctgctactctttcccttccttcgtcctccaagactcactctctctcgacctcgacctcttgccacttcccagccacttcgacgctttcgcagatctggtgcacgcgccgtcgttcgcttaccggcgcgtggagaggcatctcgagaatgagttgcgtttgcagagcctctctgaccgtgtggcggagctggagtcgcggttcgaccgtgtgctcggcggagatcggaagtacacgtggacagcggagatcaagggagcggagaagaacgggttcgataggaagtacaagtgggttgcggaggtcgctgaggaggaagataagaagaagaagaagaataagaagaagcaggtgaaggtgctgaaggataagagcgcgaggtggactcttcagctggagaatgaggatgctgaggaagaagaggagaagaagaagaagttgctgaagggcgttgcgaggaacgtgaaatggacggctgagatcacgggaaaaggggagaacagtgggagctcgaggaagtacacttttcaggtgcagagtggggatgctgagaagaaggagaaaaagaacaagggaaatgggaatggattgcgtattgtggagattcaggagccaattggtcatagagatgtggttttgagacaggcatttgccaagaggtttggagctgttcaaaatgagaggggcaaaaagaaggacctgtctcctcaagatgctgccttgttgatccagatcagctttagagcttacttgatccgtaggtcaaaggctctccgtgcccttagagaactggccattgcaaagtctaaattaaaggaaatcagagcccagttcaataacttttcctaccgacgtcatgtagctcgtgatgcggaggaacgccagcggttttctgagaaaatcattgtcttgctcctcactgttgatgccattgagggatctgatattatggtaagatctgcgaagaggtcaatggtggatgagctggaagcaatgcttgatgtggtagatccccagcctggtggaagatcagcatcgctctacttcaaaagaaggacatttgatatgcctgatggagtcatcaggaaggaaatagaagaaggggttgcacaggttgtgcaaatgcttgaagaagcagagaatagtagtgaagcatgaccgtgagatcaagaaagtaatatctatctgtttatttcgtgttttccttctgctgttgtagtttgtttgcagagacgtattttagtctaagatttcaagacttctaaattaggctttccatccaatggtatttgttttgctgaacttttggcactttctgaacgaaaagattggcttgtgtc

SEQ ID NO: 53332 - protein, 426 aa, Glycine max
  peptide (1)..(426): Ceres Seq. ID no. 14306708
DTYKHPSSLLFYSERVDTDSTHSTMSRFRRFELIEQPPFFHSCYSFPSFVLQDSLSLDLDLLPLPSHFDAFADLVHAPSFAYRRVERHLENELRLQSLSDRVAELESRFDRVLGGDRKYTWTAEIKGAEKNGFDRKYKWVAEVAEEEDKKKKKNKKKQVKVLKDKSARWTLQLENEDAEEEEEKKKKLLKGVARNVKWTAEITGKGENSGSSRKYTFQVQSGDAEKKEKKNKGNGNGLRIVEIQEPIGHRDVVLRQAFAKRFGAVQNERGKKKDLSPQDAALLIQISFRAYLIRRSKALRALRELAIAKSKLKEIRAQFNNFSYRRHVARDAEERQRFSEKIIVLLLTVDAIEGSDIMVRSAKRSMVDELEAMLDVVDPQPGGRSASLYFKRRTFDMPDGVIRKEIEEGVAQVVQMLEEAENSSEA

SEQ ID NO: 53333 - protein, 402 aa, Glycine max
  peptide (1)..(402): Ceres Seq. ID no. 14306709
MSRFRRFELIEQPPFFHSCYSFPSFVLQDSLSLDLDLLPLPSHFDAFADLVHAPSFAYRRVERHLENELRLQSLSDRVAELESRFDRVLGGDRKYTWTAEIKGAEKNGFDRKYKWVAEVAEEEDKKKKKNKKKQVKVLKDKSARWTLQLENEDAEEEEEKKKKLLKGVARNVKWTAEITGKGENSGSSRKYTFQVQSGDAEKKEKKNKGNGNGLRIVEIQEPIGHRDVVLRQAFAKRFGAVQNERGKKKDLSPQDAALLIQISFRAYLIRRSKALRALRELAIAKSKLKEIRAQFNNFSYRRHVARDAEERQRFSEKIIVLLLTVDAIEGSDIMVRSAKRSMVDELEAMLDVVDPQPGGRSASLYFKRRTFDMPDGVIRKEIEEGVAQVVQMLEEAENSSEA

SEQ ID NO: 53334 - DNA, 1596 bp, Glycine max
  misc_feature (1)..(1596): Ceres Seq. ID no. 15169334
tttttgtgatgacagtgtttcaaaagtaactgaaacgatggatcctcctaaagaacaagaacaccaggaatccatagtttcaccttccacagatgaagttttgacatcttcgaaacgtggaaggccacgaaaaacaaagcctaccaagttcgtaatcaacgagaaatccaatcccacatcaacaccccgaagatctaaaagaataaagcatgtagcagataaaactgccaacaatgttcccgaagtatcttcatccgaggaattattgaagggacgtactgcagaaaattcacaagcagatggcaaagaagtctcttcagatattgacgccttagtaatctacaaaagaaaaagactacctcgaaagaggtcttctggtcaaataagcaagtctccaaagaaaactgctccttcagagcctccatctgctgcaatttcaagctctactactgcatcaccccctcatcaagatcctcctgcagctacttcacccagcgctgatgctcctcatattgaaaatacaaatactgctgagccagtattgagtaaaagccttgtcgaagaggtcgagaaggtgaaccctgctccagccaatgctcaagaacaggttgcttctagtaagggtcaagaatctccagatcaagttgacccaaaggttgatgaagtctctactgggaacacctcactcgatctagaagccattaacaaaatgatcgaagatgaccctttgagtgctattgaaaatatcctgacagggaaggtttccatttgttctaagactccacaatctatcactcagtcagaacaaccaaaagttcaaggctcccctgcagatgttctgtcaaaagagctaaaagacttaatgcagatctttagcttaggtgattttgttactgaccatgaacaaatgtcaaaggtcctacttattcttgaagagttgcagaagaatgagaagtttctttctcttgaacagcaagcattcataaaggccttcagactcttcttcaacaatgctgttactcaccgcaaacagtgtgatacggctggaataaagaaagtcgagttgaaccgagctaaagaagatatccttctgaaactgcaagaagttaaacatacacaggagcaaatcacatcgaccatttcaaatgccaacaacagggtcaatgaaatatcttcttatattgaacaacttgaagaacggttatccaaactgaaggaagagagggagacctttcagttggctattaaggaaggcgagaaacaaagggagacattgaagaatgatagcatcttatgggctcatcagactaaggacctggtttttgatcttgcagagattgaggccaaagaaaaaatccttggacagcaacttgaaacagacaatgatgcatatgaccaatttaaagcatcctttcctttttaatttctgtttgaaaattggtagttgtaattactctgttatgttcaattcatgtatggtttagttcatgcatgtttagtttatgttcctttaagcaatttaaggatttagacccagttaagtgtagaattataacctttgattacaaaattaatggatgaaattttaacaatttc

SEQ ID NO: 53335 - protein, 473 aa, Glycine max
  peptide (1)..(473): Ceres Seq. ID no. 15169335
FCDDSVSKVTETMDPPKEQEHQESIVSPSTDEVLTSSKRGRPRKTKPTKFVINEKSNPTSTPRRSKRIKHVADKTANNVPEVSSSEELLKGRTAENSQADGKEVSSDIDALVIYKRKRLPRKRSSGQISKSPKKTAPSEPPSAAISSSTTASPPHQDPPAATSPSADAPHIENTNTAEPVLSKSLVEEVEKVNPAPANAQEQVASSKGQESPDQVDPKVDEVSTGNTSLDLEAINKMIEDDPLSAIENILTGKVSICSKTPQSITQSEQPKVQGSPADVLSKELKDLMQIFSLGDFVTDHEQMSKVLLILEELQKNEKFLSLEQQAFIKAFRLFFNNAVTHRKQCDTAGIKKVELNRAKEDILLKLQEVKHTQEQITSTISNANNRVNEISSYIEQLEERLSKLKEERETFQLAIKEGEKQRETLKNDSILWAHQTKDLVFDLAEIEAKEKILGQQLETDNDAYDQFKASFPF

SEQ ID NO: 53336 - protein, 461 aa, Glycine max
  peptide (1)..(461): Ceres Seq. ID no. 15169336
MDPPKEQEHQESIVSPSTDEVLTSSKRGRPRKTKPTKFVINEKSNPTSTPRRSKRIKHVADKTANNVPEVSSSEELLKGRTAENSQADGKEVSSDIDALVIYKRKRLPRKRSSGQISKSPKKTAPSEPPSAAISSSTTASPPHQDPPAATSPSADAPHIENTNTAEPVLSKSLVEEVEKVNPAPANAQEQVASSKGQESPDQVDPKVDEVSTGNTSLDLEAINKMIEDDPLSAIENILTGKVSICSKTPQSITQSEQPKVQGSPADVLSKELKDLMQIFSLGDFVTDHEQMSKVLLILEELQKNEKFLSLEQQAFIKAFRLFFNNAVTHRKQCDTAGIKKVELNRAKEDILLKLQEVKHTQEQITSTISNANNRVNEISSYIEQLEERLSKLKEERETFQLAIKEGEKQRETLKNDSILWAHQTKDLVFDLAEIEAKEKILGQQLETDNDAYDQFKASFPF

SEQ ID NO: 53337 - protein, 237 aa, Glycine max
  peptide (1)..(237): Ceres Seq. ID no. 15169337
MIEDDPLSAIENILTGKVSICSKTPQSITQSEQPKVQGSPADVLSKELKDLMQIFSLGDFVTDHEQMSKVLLILEELQKNEKFLSLEQQAFIKAFRLFFNNAVTHRKQCDTAGIKKVELNRAKEDILLKLQEVKHTQEQITSTISNANNRVNEISSYIEQLEERLSKLKEERETFQLAIKEGEKQRETLKNDSILWAHQTKDLVFDLAEIEAKEKILGQQLETDNDAYDQFKASFPF

SEQ ID NO: 53338 - DNA, 1372 bp, Glycine max
  misc_feature (1)..(1372): Ceres Seq. ID no. 14306467
aagaagacccccaactcttcatgggattcccagagaaaacagaacgctgcatatgagtcttgcagaagcttgtaactatcagaagaacatatttgctcttgattcagaaagcaaacccttggatctgcctagctctaccaaaaatcttacacaaaatttgggcccgacaatggagggtttgagggatgcagttgatgaagctcctaaggaccaaccttgtgaagcttccacacaggtgcaccttgaagctttaaaggaagcatctctagagaaacccaaagaggtatttactgaatttccccaggaagcaccaattgaagctccaaatccaaatgaagtttccaaggaagttgatactgtatccaatagccatgaaagaaagaggcccattaaaatcaaggtcaagcaatcttctgccaccagtagggctgatactgataatcaagtggttgaatgttctttaggtggtcgtaatgaaatggatcatggagctagcagttcagtttctgtagatgcaccccagaggaattttgccgatactgttagcatcagtaatcataatattgacgaagttaattcttggcatgatcgtggttcgcgcatgactgccagcattggcagtgcaaagtttttgagtgatggtgatgaattggtcaaagaactgcagtgcactgctgattcaagtatagtttattcacaacctcagccagaagatccatcatcatccagtattatccaggataacaatatagatgctgatgcacgacgatatgccagccttcaaactctttcagttgcaagatttgatcctgacggagaatcattaggtaaagaaatttctgctcgggggaaagaaaagcacaaaagcaaggaaaagaaacggaaacaggaaagtaataaaggacaccatgatgatgcagaatatttggagcgaaaacgactaaagaaagagaaaaaacatcgggaaaaagagctggcaaaacttcagagtgatgaagcaaagagatcctccattgatttgtcaagcaagaaagtggaacccgtagtggacgttgctagacaggttaaatctgttgaacccagtggatataattctaaagtagaaataaaaaagatagataccaaatcggagccatctgaaggcacatctggtgcaccaaaaattcgaattaaaattaaaaaccgaatgctcagcaagtcctagggaatataatgtcctttattttgtggatgctagaatgaaaatcacaactccttcatattttctaggttgtatttttcttttcattatccggcgtagtagatcatttaggtacatacaattattgattcaatgagctttattcgctggtagttcttatctgattttaga

SEQ ID NO: 53339 - protein, 400 aa, Glycine max
  peptide (1)..(400): Ceres Seq. ID no. 14306468
RRPPTLHGIPRENRTLHMSLAEACNYQKNIFALDSESKPLDLPSSTKNLTQNLGPTMEGLRDAVDEAPKDQPCEASTQVHLEALKEASLEKPKEVFTEFPQEAPIEAPNPNEVSKEVDTVSNSHERKRPIKIKVKQSSATSRADTDNQVVECSLGGRNEMDHGASSSVSVDAPQRNFADTVSISNHNIDEVNSWHDRGSRMTASIGSAKFLSDGDELVKELQCTADSSIVYSQPQPEDPSSSSIIQDNNIDADARRYASLQTLSVARFDPDGESLGKEISARGKEKHKSKEKKRKQESNKGHHDDAEYLERKRLKKEKKHREKELAKLQSDEAKRSSIDLSSKKVEPVVDVARQVKSVEPSGYNSKVEIKKIDTKSEPSEGTSGAPKIRIKIKNRMLSKS

SEQ ID NO: 53340 - protein, 383 aa, Glycine max
  peptide (1)..(383): Ceres Seq. ID no. 14306469
MSLAEACNYQKNIFALDSESKPLDLPSSTKNLTQNLGPTMEGLRDAVDEAPKDQPCEASTQVHLEALKEASLEKPKEVFTEFPQEAPIEAPNPNEVSKEVDTVSNSHERKRPIKIKVKQSSATSRADTDNQVVECSLGGRNEMDHGASSSVSVDAPQRNFADTVSISNHNIDEVNSWHDRGSRMTASIGSAKFLSDGDELVKELQCTADSSIVYSQPQPEDPSSSSIIQDNNIDADARRYASLQTLSVARFDPDGESLGKEISARGKEKHKSKEKKRKQESNKGHHDDAEYLERKRLKKEKKHREKELAKLQSDEAKRSSIDLSSKKVEPVVDVARQVKSVEPSGYNSKVEIKKIDTKSEPSEGTSGAPKIRIKIKNRMLSKS

SEQ ID NO: 53341 - protein, 344 aa, Glycine max
  peptide (1)..(344): Ceres Seq. ID no. 14306470
MEGLRDAVDEAPKDQPCEASTQVHLEALKEASLEKPKEVFTEFPQEAPIEAPNPNEVSKEVDTVSNSHERKRPIKIKVKQSSATSRADTDNQVVECSLGGRNEMDHGASSSVSVDAPQRNFADTVSISNHNIDEVNSWHDRGSRMTASIGSAKFLSDGDELVKELQCTADSSIVYSQPQPEDPSSSSIIQDNNIDADARRYASLQTLSVARFDPDGESLGKEISARGKEKHKSKEKKRKQESNKGHHDDAEYLERKRLKKEKKHREKELAKLQSDEAKRSSIDLSSKKVEPVVDVARQVKSVEPSGYNSKVEIKKIDTKSEPSEGTSGAPKIRIKIKNRMLSKS

SEQ ID NO: 53342 - DNA, 1350 bp, Glycine max
  misc_feature (1)..(1350): Ceres Seq. ID no. 14306793
ggtgcatggcaactgaaccgagtgagagcacacaaaggaacacccttgtcgttagaaagccatgttttggcctcccaacaggttgccctcaatgcctctctgcttacatttttctcaagctctctcaagttcccttcaacttggattaccaccctaactaccctgattctgatcagattccttactttgaggatggtgattctgtgacatacaataatgagaaggaggggatcattgagtgcttgaaaaggaatgtgggtggtgatttagatagtgaggtttcttctctccctgattggataccaaccaaagtgatggccaccacttggcttgctgatgcacttgagtatgaactgtgggtgggatgtgatggttcctctgcttatagcatctattattctgatcttccctggcctatcggcaaggttctcttttggaagaaagcttattgggtaaagcagaaacatgggataagtgaagagaatgtagaagtaaaggaagaagagatttatgggagagcaaactctgcatatgatgctctgtcgacttggttaggggaacaaaactacctttttgaaaacaggccatcgagcttggatgctatttttcttgcacatgcattagttgttcttcaagctttacctgaatcatcaattttgcggaccaattttttggaacatgccaatttagtgagatatgtgcaacgatgtaagacagaacttatagtagctggtacttctgcttccaatgatccatattttcatgcagacccatcatcatcagcttctagaggtcgttcaacttcaagttcaaagcccaagactaaacccaaaaggcagccgccaacaaaggaggagaaaaccttgagaagaagggctaaatattttgtggtagcacagctagttgctgttgttcttttcgtcagtgtcttgtctggatatagaaataatgctgctgacatggagttagacaatgacgacttgggctatgaatgaaaatacattcatttgtttatcttctcaatgacaaagcctaggctgactgcatgttgaagatgcatccccgtttcttgtgtatgatccaaatatagaagcacggaaaattatcattcacttcaaaatttcctatcataggatccattttgataattttttaagagtagtagctttacattttcattggaatatggtgcaggttttttacttgtggtaaatgaaccttggtttgagaggatctatgggtctgttagccttgtgcatgtaaattttgggaggggtatgtttacaattatcttgtgctgttgtgcatactgtcagatggagatgccaaatatatcagtccttttatgag

SEQ ID NO: 53343 - protein, 330 aa, Glycine max
  peptide (1)..(330): Ceres Seq. ID no. 14306794
CMATEPSESTQRNTLVVRKPCFGLPTGCPQCLSAYIFLKLSQVPFNLDYHPNYPDSDQIPYFEDGDSVTYNNEKEGIIECLKRNVGGDLDSEVSSLPDWIPTKVMATTWLADALEYELWVGCDGSSAYSIYYSDLPWPIGKVLFWKKAYWVKQKHGISEENVEVKEEEIYGRANSAYDALSTWLGEQNYLFENRPSSLDAIFLAHALVVLQALPESSILRTNFLEHANLVRYVQRCKTELIVAGTSASNDPYFHADPSSSASRGRSTSSSKPKTKPKRQPPTKEEKTLRRRAKYFVVAQLVAVVLFVSVLSGYRNNAADMELDNDDLGYE

SEQ ID NO: 53344 - protein, 329 aa, Glycine max
  peptide (1)..(329): Ceres Seq. ID no. 14306795
MATEPSESTQRNTLVVRKPCFGLPTGCPQCLSAYIFLKLSQVPFNLDYHPNYPDSDQIPYFEDGDSVTYNNEKEGIIECLKRNVGGDLDSEVSSLPDWIPTKVMATTWLADALEYELWVGCDGSSAYSIYYSDLPWPIGKVLFWKKAYWVKQKHGISEENVEVKEEEIYGRANSAYDALSTWLGEQNYLFENRPSSLDAIFLAHALVVLQALPESSILRTNFLEHANLVRYVQRCKTELIVAGTSASNDPYFHADPSSSASRGRSTSSSKPKTKPKRQPPTKEEKTLRRRAKYFVVAQLVAVVLFVSVLSGYRNNAADMELDNDDLGYE

SEQ ID NO: 53345 - protein, 226 aa, Glycine max
  peptide (1)..(226): Ceres Seq. ID no. 14306796
MATTWLADALEYELWVGCDGSSAYSIYYSDLPWPIGKVLFWKKAYWVKQKHGISEENVEVKEEEIYGRANSAYDALSTWLGEQNYLFENRPSSLDAIFLAHALVVLQALPESSILRTNFLEHANLVRYVQRCKTELIVAGTSASNDPYFHADPSSSASRGRSTSSSKPKTKPKRQPPTKEEKTLRRRAKYFVVAQLVAVVLFVSVLSGYRNNAADMELDNDDLGYE

SEQ ID NO: 53346 - DNA, 1225 bp, Glycine max
  misc_feature (1)..(1225): Ceres Seq. ID no. 14304245
ggtgagatatttgcaattatcttgggttgcaatggagggagtgttgcttcccgtgtgtccttcaccttcttcttgctctgcaactcctaaacccagaatccccattccgctacgctcttctttcccttctccattattacacaaccgtttcttctcccaaaacgcagcgttttcccttcgcaactctctccgcacttccaccttcgcactcgcgcaacacgaagctcccgttctgggcaaacccgataacaacaacaactcttcaccctatcttcccaaaatcgataagacgggacgcttctgcagccccagagccgccagagaactcgcactgtcgataatctatgctgcgtgcttggagggaatggacccggttcggctctttgagaaacggatgaatgcgcggcgagaagccggatataaatttaatgaggaaaagttgttggagtataatcatatgagtttcggagggccgcctgttactgttggatcggacgaagaagcaaatgagctactgcggcacattgaagaagagtctgccattgaagcagaagtccttacagctcctccaaagctggtatacaacaaactgattttaagattcaccaagaaactattggttgcagtcagggatacatgggacagtcatgtcctggtcattaacaaaattgccccacaaaattggaagaatgaaccagctgcgaagattttagagctgtctattcttcacttggccatgtccgaaatggaagtgctagaaacgagacaccaaatcgtcattaatgaggcggtagatcttgctaaacggttttgtgatggagcagcccctcgcatcattaacggctgtctccgcacatttttccgagaactggagcttgaagcatcgaataaccaggtttagttgaccttgatgtacattgtcagattgtctacacgttgtagttcttgggtcattgaaaagcttgacgtgcatttcaggaaatatcacctatgggggtttgataatttgcatattgacctgtagacaaggcctgagttaggaatcgtgttgtttgaaactggtagagttattatgacattttgtttttacagcagttattatgacattgcaatattgtaatcgtgtatatgtatattttatgtatgctagctcgtgggatttgtaataaattttgtttaagttaaagaacttttgaaatttaatttaattaagtacttttgaaac

SEQ ID NO: 53347 - protein, 299 aa, Glycine max
  peptide (1)..(299): Ceres Seq. ID no. 14304246
VRYLQLSWVAMEGVLLPVCPSPSSCSATPKPRIPIPLRSSFPSPLLHNRFFSQNAAFSLRNSLRTSTFALAQHEAPVLGKPDNNNNSSPYLPKIDKTGRFCSPRAARELALSIIYAACLEGMDPVRLFEKRMNARREAGYKFNEEKLLEYNHMSFGGPPVTVGSDEEANELLRHIEEESAIEAEVLTAPPKLVYNKLILRFTKKLLVAVRDTWDSHVLVINKIAPQNWKNEPAAKILELSILHLAMSEMEVLETRHQIVINEAVDLAKRFCDGAAPRIINGCLRTFFRELELEASNNQV

SEQ ID NO: 53348 - protein, 289 aa, Glycine max
  peptide (1)..(289): Ceres Seq. ID no. 14304247
MEGVLLPVCPSPSSCSATPKPRIPIPLRSSFPSPLLHNRFFSQNAAFSLRNSLRTSTFALAQHEAPVLGKPDNNNNSSPYLPKIDKTGRFCSPRAARELALSIIYAACLEGMDPVRLFEKRMNARREAGYKFNEEKLLEYNHMSFGGPPVTVGSDEEANELLRHIEEESAIEAEVLTAPPKLVYNKLILRFTKKLLVAVRDTWDSHVLVINKIAPQNWKNEPAAKILELSILHLAMSEMEVLETRHQIVINEAVDLAKRFCDGAAPRIINGCLRTFFRELELEASNNQV

SEQ ID NO: 53349 - protein, 178 aa, Glycine max
  peptide (1)..(178): Ceres Seq. ID no. 14304248
MDPVRLFEKRMNARREAGYKFNEEKLLEYNHMSFGGPPVTVGSDEEANELLRHIEEESAIEAEVLTAPPKLVYNKLILRFTKKLLVAVRDTWDSHVLVINKIAPQNWKNEPAAKILELSILHLAMSEMEVLETRHQIVINEAVDLAKRFCDGAAPRIINGCLRTFFRELELEASNNQV

SEQ ID NO: 53350 - DNA, 1327 bp, Glycine max
  misc_feature (1)..(1327): Ceres Seq. ID no. 14306737
agcaacaaatgatgtcattccttgcaaaggctgttcagagtcctggttttttagctcaatttgtacaacagcaaaatgagagtagtagacgcataacggaggcaaataaaaaacgccggcttaagcaggagggtattggtgaaatggaacatactgctgcttctgatggccaaattgttaaatatcaacctctgataaatgaagcagcaaaagcaatgctgaggcaaatgatgaaattggatacttctcgactagaatcttttagtaataacgctgataattacttgattggtgatcattcatcatcatccggtgcaacggacaggggaaactctttgagccggacttctggagtaacacttcaagtggtccctctgactacaatccagtcttctcacattccatctgcaacagggataggggatgacccttcaacaggaaaatctgagattctatctactcctcaagttgtagcctgtgatgaagttacgaaagctcagtactctaatgtaaatgtttcggttggagaatctaatgcacctgctatccctgttactcaaacagatgaaatcatgcgggacctctctacaataccagacatagtggcaggaaatattcttgatattcctcaagaaaattatatggcacctgagacaggcggtgaaggatatatggatcctacttcatttggagtgaatgtgtcattgcccattgattttgatagtatttcacctgaagcagacattgatgatttgttgaacaatcctcacttttgggatgatattttgcgaactccagtgtcagaggagattgatacgaatgatgctgaagtattcaaggagaatgaggtgcagccaatggaaaatggattggacaaatcacaaaatatggaccaacttactgagcagatgggcctactttcttctgatgccaaaagaatttgagtgtattatgaaagtgtacattattaatatttcatattgtgcaaggtaaccttagcctagacaatgggttatgttgttttagctaattacacctccaattgctcactcaggactcacatgcttttttgtttggtctggtttagtttgtgcatatgagaccgaacctaattgcttttgtagatttacgttcatttttccttagacccgtacctggttctgttctattgtcatcccttaatgtaagtaaggttctaagaggctagcttattgatgtgaagcgtcttagaaatgtgtaattttttaaaagtcatatcaacagggattcataataggatgatagtgtaaaataagtttatattatcaagtgcatgaccattaaactt

SEQ ID NO: 53351 - protein, 313 aa, Glycine max
  peptide (1)..(313): Ceres Seq. ID no. 14306738
QQMMSFLAKAVQSPGFLAQFVQQQNESSRRITEANKKRRLKQEGIGEMEHTAASDGQIVKYQPLINEAAKAMLRQMMKLDTSRLESFSNNADNYLIGDHSSSSGATDRGNSLSRTSGVTLQVVPLTTIQSSHIPSATGIGDDPSTGKSEILSTPQVVACDEVTKAQYSNVNVSVGESNAPAIPVTQTDEIMRDLSTIPDIVAGNILDIPQENYMAPETGGEGYMDPTSFGVNVSLPIDFDSISPEADIDDLLNNPHFWDDILRTPVSEEIDTNDAEVFKENEVQPMENGLDKSQNMDQLTEQMGLLSSDAKRI

SEQ ID NO: 53352 - protein, 311 aa, Glycine max
  peptide (1)..(311): Ceres Seq. ID no. 14306739
MMSFLAKAVQSPGFLAQFVQQQNESSRRITEANKKRRLKQEGIGEMEHTAASDGQIVKYQPLINEAAKAMLRQMMKLDTSRLESFSNNADNYLIGDHSSSSGATDRGNSLSRTSGVTLQVVPLTTIQSSHIPSATGIGDDPSTGKSEILSTPQVVACDEVTKAQYSNVNVSVGESNAPAIPVTQTDEIMRDLSTIPDIVAGNILDIPQENYMAPETGGEGYMDPTSFGVNVSLPIDFDSISPEADIDDLLNNPHFWDDILRTPVSEEIDTNDAEVFKENEVQPMENGLDKSQNMDQLTEQMGLLSSDAKRI

SEQ ID NO: 53353 - protein, 310 aa, Glycine max
  peptide (1)..(310): Ceres Seq. ID no. 14306740
MSFLAKAVQSPGFLAQFVQQQNESSRRITEANKKRRLKQEGIGEMEHTAASDGQIVKYQPLINEAAKAMLRQMMKLDTSRLESFSNNADNYLIGDHSSSSGATDRGNSLSRTSGVTLQVVPLTTIQSSHIPSATGIGDDPSTGKSEILSTPQVVACDEVTKAQYSNVNVSVGESNAPAIPVTQTDEIMRDLSTIPDIVAGNILDIPQENYMAPETGGEGYMDPTSFGVNVSLPIDFDSISPEADIDDLLNNPHFWDDILRTPVSEEIDTNDAEVFKENEVQPMENGLDKSQNMDQLTEQMGLLSSDAKRI

SEQ ID NO: 53354 - DNA, 1284 bp, Glycine max
  misc_feature (1)..(1284): Ceres Seq. ID no. 14306797
gtcagaactgccaacagatagccccatctctttctccttctccctaaacctcgaactcagcacccccatccactggtgattgtttgattgagccttgaagaaatggaccacagcgctgatgcacatcgcacggacttgatgaccataacgcggttcgtgctgaacgagcaatccaagcacccggagtcacgcggcgatttcaccatcttgctcagtcacattgttctcggttgcaagttcgtttgttccgctgtcagcaaggctggtcttgctaaacttattggactcgctggagaaaccaatgttcagggtgaagaacagaagaaacttgatgttctttccaatgaggttttcatcaaggctctcataagcagtggccgaacatgcatcttggtttctgaagaagacgaagaagcgataattgtggagccttctaagcgcggaaagtactgtgtttgctttgacccattggatggctcgtccaacattgattgtggggtttccattggcacaatttttggggtttatgcgttgaaagatgtccatgaaccaaccatagaagatgtcctgcttcctgggaagaacatggtggcagctggttactgtatgtatggaagctcttgcacgcttgtgttaagcactggagcaggtgttaatggtttcacccttgacccatctcttggtgagttcatcctaactcaccctaacattaagatcccaaagaaaggtaaaatttattcagtgaatgaaggaaatgccaaaaactgggatcgtcctactgctacttacgttgaaaaatgcaagtttcctgaagatggttcatcaccaaagtctctaagatatattggaagcatggtagctgatgttcatcgtacgttgctttatggaggcatctttttgtaccctgctgacaaaaaaagtccaaatggaaaacttcgtgtcctgtatgaagtcttcccaatgtcattcttgatggaacaggcaggaggacagtctttcacgggcaaggaacgggcacttgatttagttccaacgaagttgcatgagcgatctcccatattccttggtagctatgatgatgttgaggaaatcaaagctctttatgctgctgctgagggtgaacaagaatgaaattggaaaggtttcttgtatctttcgctacttacaagcgcttgttttctaattgttactagcaagtgcttataagaaaactagttatctggtcatgtatatgttaataaaattggttgatgtgcctgtcagggctatagaatttatttagat

SEQ ID NO: 53355 - protein, 342 aa, Glycine max
  peptide (1)..(342): Ceres Seq. ID no. 14306798
MDHSADAHRTDLMTITRFVLNEQSKHPESRGDFTILLSHIVLGCKFVCSAVSKAGLAKLIGLAGETNVQGEEQKKLDVLSNEVFIKALISSGRTCILVSEEDEEAIIVEPSKRGKYCVCFDPLDGSSNIDCGVSIGTIFGVYALKDVHEPTIEDVLLPGKNMVAAGYCMYGSSCTLVLSTGAGVNGFTLDPSLGEFILTHPNIKIPKKGKIYSVNEGNAKNWDRPTATYVEKCKFPEDGSSPKSLRYIGSMVADVHRTLLYGGIFLYPADKKSPNGKLRVLYEVFPMSFLMEQAGGQSFTGKERALDLVPTKLHERSPIFLGSYDDVEEIKALYAAAEGEQE

SEQ ID NO: 53356 - protein, 330 aa, Glycine max
  peptide (1)..(330): Ceres Seq. ID no. 14306799
MTITRFVLNEQSKHPESRGDFTILLSHIVLGCKFVCSAVSKAGLAKLIGLAGETNVQGEEQKKLDVLSNEVFIKALISSGRTCILVSEEDEEAIIVEPSKRGKYCVCFDPLDGSSNIDCGVSIGTIFGVYALKDVHEPTIEDVLLPGKNMVAAGYCMYGSSCTLVLSTGAGVNGFTLDPSLGEFILTHPNIKIPKKGKIYSVNEGNAKNWDRPTATYVEKCKFPEDGSSPKSLRYIGSMVADVHRTLLYGGIFLYPADKKSPNGKLRVLYEVFPMSFLMEQAGGQSFTGKERALDLVPTKLHERSPIFLGSYDDVEEIKALYAAAEGEQE

SEQ ID NO: 53357 - protein, 181 aa, Glycine max
  peptide (1)..(181): Ceres Seq. ID no. 14306800
MVAAGYCMYGSSCTLVLSTGAGVNGFTLDPSLGEFILTHPNIKIPKKGKIYSVNEGNAKNWDRPTATYVEKCKFPEDGSSPKSLRYIGSMVADVHRTLLYGGIFLYPADKKSPNGKLRVLYEVFPMSFLMEQAGGQSFTGKERALDLVPTKLHERSPIFLGSYDDVEEIKALYAAAEGEQE

SEQ ID NO: 53358 - DNA, 1461 bp, Glycine max
  misc_feature (1)..(1461): Ceres Seq. ID no. 14304941
gcaccctcgtacaggcggcacagcttcgtaccccgttctttttctcactgacaaccctaacctaaagtctccgctgcgcacagctgctccgccgtgactctgtggtcgacggtataaagtatatgccaaactaatgttaatttctcttcctctttactccatcattcatcaatctatcatatgtgaactttcaaaaatggtggatgtggttctgaatgaaaccagattatatgattggcatttatgcaaaagttgaatgatctaatgccgattaaatttccgagctaacccctgtctccgcattttcttcagattgtgttatatgcattgttgcagatgaaggtgaaaaagcagaagaggcacaggaagattttgacgttttacactgcttgcttcggttttcggaagccttacaaggttctatgtgatggcacatttgttcatcaccttcttgtgaatcgaataacccctgctgacacggccattggcaatgtcctcagtgctacgatcaagctctacacaacaagatgtgttctagctgagttgaaacgacttggtagctcgtattctgaggctctcgaggcagctcataaacttatagttgcaagatgtgagcatgaaaaatgtaagagcgcagatgcttgcatcatggaggttgttggagaaaaaaattctgagcatttctttgttgctagtcaggacactgacctgcggaaacagttgcaagaggtacctggtgtgcctctcatatttggtcttagaaatgctcttttccttgaatctccatctgcatttcagcggcaatatgtcaaaacttctgaagaaggacgattacatatgacacagaaggagtaccagatatttaaggatagggtaatgaatagattgactggtgaggaagccaacaattccattactgaaataatggaaattgaagattcagaagatcagaccataaatgtgcaggcagtagagaagggtattacctcaaggaatcgtatggaaatcaaggatgaacctcagttcaagagaaaaagagctaagggtccaaacccactttcatgcaagaagaagaaaagtgaaaaacaaaatattggtcctttgaaggaaacgaatgaagacaacacagtgaagagaagtaggaaaaggaagaggtcacataaacaaaaaatggcaacagaaacaagcagttaggtccatatatatatatatatatatatatatatatatacacagttacaaataggtatttttagaagagctccttgactttactgcttctgttgagtcgagagaaaagcaagttttaaatccatgctgacatggaaggggaagtgtatcgagattagttgcttgttgaattttatactgtgtctattttgctggctatcgtatttttacctacggatagccaaatagccgttgttcacggtggaaatagattctgatatttatgatctt

SEQ ID NO: 53359 - protein, 285 aa, Glycine max
  peptide (1)..(285): Ceres Seq. ID no. 14304942
MKVKKQKRHRKILTFYTACFGFRKPYKVLCDGTFVHHLLVNRITPADTAIGNVLSATIKLYTTRCVLAELKRLGSSYSEALEAAHKLIVARCEHEKCKSADACIMEVVGEKNSEHFFVASQDTDLRKQLQEVPGVPLIFGLRNALFLESPSAFQRQYVKTSEEGRLHMTQKEYQIFKDRVMNRLTGEEANNSITEIMEIEDSEDQTINVQAVEKGITSRNRMEIKDEPQFKRKRAKGPNPLSCKKKKSEKQNIGPLKETNEDNTVKRSRKRKRSHKQKMATETSS

SEQ ID NO: 53360 - protein, 181 aa, Glycine max
  peptide (1)..(181): Ceres Seq. ID no. 14304943
MEVVGEKNSEHFFVASQDTDLRKQLQEVPGVPLIFGLRNALFLESPSAFQRQYVKTSEEGRLHMTQKEYQIFKDRVMNRLTGEEANNSITEIMEIEDSEDQTINVQAVEKGITSRNRMEIKDEPQFKRKRAKGPNPLSCKKKKSEKQNIGPLKETNEDNTVKRSRKRKRSHKQKMATETSS

SEQ ID NO: 53361 - DNA, 1677 bp, Glycine max
  misc_feature (1)..(1677): Ceres Seq. ID no. 15226862
cagctacgtaggccccccccccgctttgttaattttatttgtgctatcacgcctatcatacattattgtattgtaccactttataaagcagagggatttaaagcataagaatgcgtcgctgccttagttcatgttttgtcgcgagaggtaaggacaaggatgctcaggggaagagggcacaaccccagactcacactgtaaaaaaagttcatgtgtccaccgatgataatggccttagtaatagtggctcacactcgccaccaagagagaccaaaccaattgggctttacggatacgtgcaagagagacatggacatagtctctacacgtggaagcaagccttcttgaaactagagagtggttatctcttatgttatagtactggtgtctcgggttccccctgcaagatgctccctctgcatatatgcatggttcgcccgttgaaacgttctggcttccgggtgatctgtgccactcaattctcgctcacctttagggctaaagatgtagcggaaatgagagaatgggtagctgagattcaggctggcattgccgaagccttgaccgctcagtctgccccagctgcctgtactggtagagatacgttgtcagcattgcgaagcaagcatactgccaacagatactgtgctgactgtggagctccagatcctacgtgggtatcgacttccctgggatcattaatttgtatcgaatgctcaggagtacacagaagcttagggtcacatatatcgaaagtgagatcatttgagttggaccattgggatccaaaagacgtgaagactgacgggatcggaaattctgaagttaatacattgtatgaggcttccatacctaaacactgtaccaagccagacattaattccgacagagagacaagagaaaactggatcatggataagtatgtgcacaagcgcttcacaaagaagaccttgcacacaaacaatactcgccgtccatccacacctaatattaccctctctgttgttcctaaatctggaagcacttctaatcttcctgatgtctcttctcttcctctttccaacgccacatctacggccgccggtgccccatcactctctctcactctctctccaaaagagtccctctctccatcgccccatttggctcatgacttcacaagtaaactgccacctagtttacaaggcggtgtagttaggccacgtacgcctgactgtctaccgacttcccatatcggttccaatgtctttaataagaagatgccatacggagccgccaccgcagtggacttatcagcaaggagaggatcagtgggatcattcttatatgcccccaacaacactcgaacttctgcccgccgtagttcgatgtttcaaaatcagcgcgtaatgtagaaagattctctctctttctcattttttctattattctctcatccatccattccgctactattcttgggttctctatcggcttaaatatttttgttttatcttatatatatcttttttatcggaacacccctctggatagtagttttttttttctctcattcatgaatgattgaatatggactattgtaaagattcttctgagctttttgctctactttgtaaaaacttgtaatttttgtatcactacattcaaccccaaattaattattagtaaataatttct

SEQ ID NO: 53362 - protein, 427 aa, Glycine max
  peptide (1)..(427): Ceres Seq. ID no. 15226863
MRRCLSSCFVARGKDKDAQGKRAQPQTHTVKKVHVSTDDNGLSNSGSHSPPRETKPIGLYGYVQERHGHSLYTWKQAFLKLESGYLLCYSTGVSGSPCKMLPLHICMVRPLKRSGFRVICATQFSLTFRAKDVAEMREWVAEIQAGIAEALTAQSAPAACTGRDTLSALRSKHTANRYCADCGAPDPTWVSTSLGSLICIECSGVHRSLGSHISKVRSFELDHWDPKDVKTDGIGNSEVNTLYEASIPKHCTKPDINSDRETRENWIMDKYVHKRFTKKTLHTNNTRRPSTPNITLSVVPKSGSTSNLPDVSSLPLSNATSTAAGAPSLSLTLSPKESLSPSPHLAHDFTSKLPPSLQGGVVRPRTPDCLPTSHIGSNVFNKKMPYGAATAVDLSARRGSVGSFLYAPNNTRTSARRSSMFQNQRVM

SEQ ID NO: 53363 - protein, 328 aa, Glycine max
  peptide (1)..(328): Ceres Seq. ID no. 15226864
MLPLHICMVRPLKRSGFRVICATQFSLTFRAKDVAEMREWVAEIQAGIAEALTAQSAPAACTGRDTLSALRSKHTANRYCADCGAPDPTWVSTSLGSLICIECSGVHRSLGSHISKVRSFELDHWDPKDVKTDGIGNSEVNTLYEASIPKHCTKPDINSDRETRENWIMDKYVHKRFTKKTLHTNNTRRPSTPNITLSVVPKSGSTSNLPDVSSLPLSNATSTAAGAPSLSLTLSPKESLSPSPHLAHDFTSKLPPSLQGGVVRPRTPDCLPTSHIGSNVFNKKMPYGAATAVDLSARRGSVGSFLYAPNNTRTSARRSSMFQNQRVM

SEQ ID NO: 53364 - protein, 321 aa, Glycine max
  peptide (1)..(321): Ceres Seq. ID no. 15226865
MVRPLKRSGFRVICATQFSLTFRAKDVAEMREWVAEIQAGIAEALTAQSAPAACTGRDTLSALRSKHTANRYCADCGAPDPTWVSTSLGSLICIECSGVHRSLGSHISKVRSFELDHWDPKDVKTDGIGNSEVNTLYEASIPKHCTKPDINSDRETRENWIMDKYVHKRFTKKTLHTNNTRRPSTPNITLSVVPKSGSTSNLPDVSSLPLSNATSTAAGAPSLSLTLSPKESLSPSPHLAHDFTSKLPPSLQGGVVRPRTPDCLPTSHIGSNVFNKKMPYGAATAVDLSARRGSVGSFLYAPNNTRTSARRSSMFQNQRVM

SEQ ID NO: 53365 - DNA, 1186 bp, Glycine max
  misc_feature (1)..(1186): Ceres Seq. ID no. 14306522
gtagctttaattacttcgggaatatcaacgaaacatcatcgttggtcactttctaccaaaccacaacgctcaaattgttttcttttgctatcactgttaccgaatccctcactttcttcttcatcttcttctcctttgtcacttctcagcaccactcaatctcttcaatttctttcttctactggcaataagcatcagcacactgccacatccagttcccttctgtgtgttcctttcttctactctctccagtccagccaaaacgaagctccttccatcattttcagttttttctgtcaagtgttgttgcttcttctcccaaactcgtccaaacattgctggtaacaagtcccccatgaacttgttgagcagaattgttgggttgggtagcccaagggcagcagaaaacatgaattcaaccactgctcggggaccagatgatgacataccagcaccaggtcaacagtttgcccagtttggtgctggctgcttttggagtgttgagctggccttccagagggcatcaggggtgatcaagacagaagttggttatagccaggggcagttgcataatccaagctatgaggatgtgtgtacggggaccacacaccactcggaggttgtcagggtccaatatgatcccaatgtatgtagctatgagagtttgcttgatgtgttctgggctagacatgatcctaccacactgaatcggcagggaaatgatgtgggaacacaatacaggtctggaatatactattacacacctgaacaagagaaggcagccatagagtctttagaacaacaacagaagaagctgaacaggaagattgttactgagatccttcctgccaagaagttctacagggctgaagaataccatcaacagtaccttgagaaaggagggagatttggttccaagcaatctgcttctaagggatgcaatgatccaattcgatgctatggttagattaatatgactagatgtttaaagcagggagttttcttgataagtatttgttaatataccaataaagtaagtcacaatctacctactctctgtattctatttatagggtgaagatcactatagaatccgaatcagttttagagttatatagtattttatatgtatagttatctaaaaactgattttataacacctttaatcagtgactcttctcgagtt

SEQ ID NO: 53366 - protein, 203 aa, Glycine max
  peptide (1)..(203): Ceres Seq. ID no. 14306523
MNLLSRIVGLGSPRAAENMNSTTARGPDDDIPAPGQQFAQFGAGCFWSVELAFQRASGVIKTEVGYSQGQLHNPSYEDVCTGTTHHSEVVRVQYDPNVCSYESLLDVFWARHDPTTLNRQGNDVGTQYRSGIYYYTPEQEKAAIESLEQQQKKLNRKIVTEILPAKKFYRAEEYHQQYLEKGGRFGSKQSASKGCNDPIRCYG

SEQ ID NO: 53367 - protein, 185 aa, Glycine max
  peptide (1)..(185): Ceres Seq. ID no. 14306524
MNSTTARGPDDDIPAPGQQFAQFGAGCFWSVELAFQRASGVIKTEVGYSQGQLHNPSYEDVCTGTTHHSEVVRVQYDPNVCSYESLLDVFWARHDPTTLNRQGNDVGTQYRSGIYYYTPEQEKAAIESLEQQQKKLNRKIVTEILPAKKFYRAEEYHQQYLEKGGRFGSKQSASKGCNDPIRCYG

SEQ ID NO: 53368 - protein, 114 aa, Glycine max
  peptide (1)..(114): Ceres Seq. ID no. 14306525
VALITSGISTKHHRWSLSTKPQRSNCFLLLSLLPNPSLSSSSSSPLSLLSTTQSLQFLSSTGNKHQHTATSSSLLCVPFFYSLQSSQNEAPSIIFSFFCQVLLLLLPNSSKHCW

SEQ ID NO: 53369 - DNA, 1409 bp, Glycine max
  misc_feature (1)..(1409): Ceres Seq. ID no. 14311025
gctttgccccttgttttcgttctgctatggcacccgatgccgccgccgccgtcgccgccaacggcaaaaagagaagacgctatcttcctcacaataaggcagtgaagaagaagggttcgtaccctctgcggcctggcgtgcaaggctttttcatcacttgcgatggcggcagagaacaccaagcctctcgtgaagctctcaatattctcgattccttttatgaagagctagttgatggggaaaaggagttacccagcaaacctttaaataaaaaaatcacgtttgctgattctgactcttctagtagtgatggtgaggaagaggaggaggaggaggaggaggaggaggaggaggaggaggaggccgtgcatgatggggatgaggaaaagggggacaaaaagccaaaattggatacttctagtgacgacaatgccagtcatgacgatggagcaggtgaaaaatcagatcctcataacgttgatgaaccgcacactcaggaagaaaataaaacttgtgataataaagggaataatggcaatcttaagactacaaaagggacagcagatgatctaccagctgtgaaacagtgctgcaaaacaaacgtgcctgcatgtaattttagtgacaaagtggaacacaagtctattgataagttaattgaagaagaattcaaagaattgggagacaagaataagaggcgctttgtcaagcttgattctggttgtaatggtgtagtatttgttcaaatgcggaagaaagatggagaccgaagccccaaggatatagttcaccggatagtgacatcagcagcatcaacagggaaacatatgtcaaggtttattttgagaattttgccaattgaagtctcatgttatgcttcaaaggaggaaatttcaagaacaatcaagcctcttgtggaacagtactttcctgtggaaactcaaaatccactcaagtttgctgtactgtatgaggcacgggcaaatactggtgttgacaggatggaaatcatcgatgctgtggcaaagtcagttcctggaccccataaagttgatctcaaaaatcctgataaaactatagtagttgaaattgccaggactgtgtgcttgatcggggtcattgagaaatataaggagctttccaagtacaatctgaggcagttaacatcacgtaaagactaagccttcttgcagcattatagtacctttcccttttgcttcatgttgatactctggtctgtgactgttgttgtcatttggttaagtgttagattagatgactcttgcagctagtctcctttgactgagtgtagttagtaagttctcacaaatcaaacgagaaacccttacatggaagtagagttatatacgctcaatccatttaaatatcatagttggatttacaataag

SEQ ID NO: 53370 - protein, 392 aa, Glycine max
  peptide (1)..(392): Ceres Seq. ID no. 14311026
FAPCFRSAMAPDAAAAVAANGKKRRRYLPHNKAVKKKGSYPLRPGVQGFFITCDGGREHQASREALNILDSFYEELVDGEKELPSKPLNKKITFADSDSSSSDGEEEEEEEEEEEEEEEEAVHDGDEEKGDKKPKLDTSSDDNASHDDGAGEKSDPHNVDEPHTQEENKTCDNKGNNGNLKTTKGTADDLPAVKQCCKTNVPACNFSDKVEHKSIDKLIEEEFKELGDKNKRRFVKLDSGCNGVVFVQMRKKDGDRSPKDIVHRIVTSAASTGKHMSRFILRILPIEVSCYASKEEISRTIKPLVEQYFPVETQNPLKFAVLYEARANTGVDRMEIIDAVAKSVPGPHKVDLKNPDKTIVVEIARTVCLIGVIEKYKELSKYNLRQLTSRKD

SEQ ID NO: 53371 - protein, 384 aa, Glycine max
  peptide (1)..(384): Ceres Seq. ID no. 14311027
MAPDAAAAVAANGKKRRRYLPHNKAVKKKGSYPLRPGVQGFFITCDGGREHQASREALNILDSFYEELVDGEKELPSKPLNKKITFADSDSSSSDGEEEEEEEEEEEEEEEEAVHDGDEEKGDKKPKLDTSSDDNASHDDGAGEKSDPHNVDEPHTQEENKTCDNKGNNGNLKTTKGTADDLPAVKQCCKTNVPACNFSDKVEHKSIDKLIEEEFKELGDKNKRRFVKLDSGCNGVVFVQMRKKDGDRSPKDIVHRIVTSAASTGKHMSRFILRILPIEVSCYASKEEISRTIKPLVEQYFPVETQNPLKFAVLYEARANTGVDRMEIIDAVAKSVPGPHKVDLKNPDKTIVVEIARTVCLIGVIEKYKELSKYNLRQLTSRKD

SEQ ID NO: 53372 - DNA, 1383 bp, Glycine max
  misc_feature (1)..(1383): Ceres Seq. ID no. 15176387
accgatagcgttccgaattttccgcatagggaaaatgttgattcgacgattgccttggacggcgatttgttttgccgcagcacttcacttccgtttcggcgctaccaatggacttcccattagcattcgcaagcaacttccctcttctctcttctccttcttctgctccagctccctctgctacctgtaatttcatgttcatgccatgcctaggttcatttcactttcggtacatatttagtctcttggcgccaccataagaggctgaggagttgtgtaccattcccttcttgttgggtccactcgtccaagtcccattaacttggatgttgaaccacctgattccaatacgagttaacatataactcgtactagacctaaaaagtggagacattatactttcttcgaggcatgaccttgtggcgacagaaacaattataatattccttgcatcactcacccaatttgaatttcaattttcaactcgtagggtcaccaaaaggatacacctcactcgcactctctgaaacccggtctttacctcgttggaacaccaatcggaaatctcgaagatatcactctgagggctattcgcgtgctgaactcggctgacgtcatactctcagaggacacgaggcactcggggaagttgcttcatcactatcacatcaaaacaccccttatgagttatcacaagttcaatgaatcgcaaagggaacaggttgtgctgaggaggttgaagcagggtgagattgtggctctcataagtgatgctggaatgccaggcatcagtgatcccggtatggagttggccaaactgtgtgtgagtgagaatatcctggttgttccaatccctggtccctgtgctttggtatcagctctttctgcctcgggtttaactactgatgaatttacatttgttggttttcttcctaaacattcggaattgagaagaaaaaggctcatggtttcagctgatcaaactacaactcaaatattttatgttgctcctcacaagctttctcagttccttgatgagagttcttcaatttttggtgatgcaaggcaatgtgttattgctcgggaaatgactaagttacatgaagagcgggatgacaccttggaggaaaatgctagtagagtaaaagccattaaatgcattaagcctgcttttgcagtaccattacacgtagttagtcgaatggatcttgccggtgctgtcttttggtacattttaattccttaactttcagaaactaagaagaattcccaacttacaaggcatatgcttgctttatttatattatgatctcatcacaaattaatacgtgttatattaacatgtaatttatttatttaagtggtattagatttgatatcttc

SEQ ID NO: 53373 - protein, 187 aa, Glycine max
  peptide (1)..(187): Ceres Seq. ID no. 15176388
MSYHKFNESQREQVVLRRLKQGEIVALISDAGMPGISDPGMELAKLCVSENILVVPIPGPCALVSALSASGLTTDEFTFVGFLPKHSELRRKRLMVSADQTTTQIFYVAPHKLSQFLDESSSIFGDARQCVIAREMTKLHEERDDTLEENASRVKAIKCIKPAFAVPLHVVSRMDLAGAVFWYILIP

SEQ ID NO: 53374 - protein, 155 aa, Glycine max
  peptide (1)..(155): Ceres Seq. ID no. 15176389
MPGISDPGMELAKLCVSENILVVPIPGPCALVSALSASGLTTDEFTFVGFLPKHSELRRKRLMVSADQTTTQIFYVAPHKLSQFLDESSSIFGDARQCVIAREMTKLHEERDDTLEENASRVKAIKCIKPAFAVPLHVVSRMDLAGAVFWYILIP

SEQ ID NO: 53375 - protein, 147 aa, Glycine max
  peptide (1)..(147): Ceres Seq. ID no. 15176390
MELAKLCVSENILVVPIPGPCALVSALSASGLTTDEFTFVGFLPKHSELRRKRLMVSADQTTTQIFYVAPHKLSQFLDESSSIFGDARQCVIAREMTKLHEERDDTLEENASRVKAIKCIKPAFAVPLHVVSRMDLAGAVFWYILIP

SEQ ID NO: 53376 - DNA, 1386 bp, Glycine max
  misc_feature (1)..(1386): Ceres Seq. ID no. 14310972
agggtttgagcagaaaagagattgtgttggattggtttccattcccaattcccaatcgtgttgggtggccatggattctctactggcgaactatgcctcttcagatgaagaagaagatcaacagccatccccaccaaaaacgacgacgttttcctcccttcctcaacccaaactttctctgtttcaatcccttcctcaacccaaatcttctctgtttcaatcccttcctccacccaaacaaccttccaccgaaagctcttccctccctaaccctaaccctaaccctgaccctaaaccccaaatcgaaaagacacaacccaaacgcgtcgtgcaattcaggcccccaatcatccctctcccacacccttcacaacacgacgatgacgacgatgacgacgacgacgacgaagaagaagaacgaaacagaagaaagaaaaagttagagtcctccacgcaaacctcatcggtcaagtccttcctcgccagcattccagcacccaggaacaccgccactctcggcgttcaagcaagttccggttcaggccggaaatccatcctcgaaaccgaaacaccgccaccggcatcgaattccggtggtttcagcaatgttcccgtcgatcaaagtacaggggattatgaaaattttgatgattaccaatatgccactgaccagtatgctagttattatggcaattttggttcgggtgccgagccagggagttcgggtactgaaccaaaggctggggttgctgcttatggaactgaacagtatgggaattatggtgatgcctatgcttcctatggggattatggacagtatgggaataattggggtgacgtgtcggcgccaccggtgctggaagcttctgggattgatgtcagtgtggtaaggattcctgggaagagagggaggcatgagattccgacggaagtgattgaggtgaagcaagaagagttgattaagaatcggccaagagaggatcaggtcaagctaactgggattgcattcggacccacttatcagcctgcttcgacaaaggggaagcctacaaagctgcacaagaggaaacatcaaattggttcattgtactttgatatgaaacaaaatgaaatgaaacttgctgagcggcgtgtaaagggcatgcttaccaaagctgaaacacaagcgaaatatggatggtgatttgagatgatgatattggaaatacttacattgaaacgtgaaaaagcaaagtcgaagttttcatatttagttgcaatccttgtgtttcactgttctgtgtacatttgctccgtctttaagtgcaaattatgtatttctattcttatagccagtggaattttataccgtacatttttttatgacaaaaaaaatcatttctttcg

SEQ ID NO: 53377 - protein, 393 aa, Glycine max
  peptide (1)..(393): Ceres Seq. ID no. 14310973
GFEQKRDCVGLVSIPNSQSCWVAMDSLLANYASSDEEEDQQPSPPKTTTFSSLPQPKLSLFQSLPQPKSSLFQSLPPPKQPSTESSSLPNPNPNPDPKPQIEKTQPKRVVQFRPPIIPLPHPSQHDDDDDDDDDDEEEERNRRKKKLESSTQTSSVKSFLASIPAPRNTATLGVQASSGSGRKSILETETPPPASNSGGFSNVPVDQSTGDYENFDDYQYATDQYASYYGNFGSGAEPGSSGTEPKAGVAAYGTEQYGNYGDAYASYGDYGQYGNNWGDVSAPPVLEASGIDVSVVRIPGKRGRHEIPTEVIEVKQEELIKNRPREDQVKLTGIAFGPTYQPASTKGKPTKLHKRKHQIGSLYFDMKQNEMKLAERRVKGMLTKAETQAKYGW

SEQ ID NO: 53378 - protein, 370 aa, Glycine max
  peptide (1)..(370): Ceres Seq. ID no. 14310974
MDSLLANYASSDEEEDQQPSPPKTTTFSSLPQPKLSLFQSLPQPKSSLFQSLPPPKQPSTESSSLPNPNPNPDPKPQIEKTQPKRVVQFRPPIIPLPHPSQHDDDDDDDDDDEEEERNRRKKKLESSTQTSSVKSFLASIPAPRNTATLGVQASSGSGRKSILETETPPPASNSGGFSNVPVDQSTGDYENFDDYQYATDQYASYYGNFGSGAEPGSSGTEPKAGVAAYGTEQYGNYGDAYASYGDYGQYGNNWGDVSAPPVLEASGIDVSVVRIPGKRGRHEIPTEVIEVKQEELIKNRPREDQVKLTGIAFGPTYQPASTKGKPTKLHKRKHQIGSLYFDMKQNEMKLAERRVKGMLTKAETQAKYGW

SEQ ID NO: 53379 - DNA, 1307 bp, Glycine max
  misc_feature (1)..(1307): Ceres Seq. ID no. 14310748
ttcgtctctcctcacattttttcttcttctttcttctttcttttgggcgccgttcctgtctctcctcacatttttcttctctcttctctctcctcggcgccccaccgcgcgacccctcctttccccctcccccttcgcctccgccgcgacacccaccttccccttccggacctccgtgcgacccccccccctccgccgtgttttagttgcaaagttttagagttggattggaagattgtgaacttagaaagatggtgaagttgactatgattgctcgtgttactgatggtcttcctctagctgaaggtctggatgatggtcgtgatcttaaagatgcggaattttacaaactgcaagtcaaggctttgtttaagaatctctcaagaggacattatgaagcatcaaggatgtcagttgaaactggcccttatgtttttcattatattatagaaggacgggtctgttacttgacaatgtgtgatcgtgcataccctaagaaactagcctttcaatatcttgaagagctcaggaacgagtttgagcgtgttaatgggtctcaaattgaaactgctgcaagaccttatgccttcattaagtttgatacatttatgcagaagacaaagaaactttatcaggatacccatactcagcgcaatattgcaaagttgaatgatgaactctatgaagtccaccagataatgactcggaatgtgcaggaagttcttggtgttggtgaacagttggaccaggtcagccaaatgtccagtcgcttatcatcagaatctcgcatatatgctgataaggctagagatttaaaccggcaggctctgattcggaagtgggcccctgttgctattgtttttggagttgtcttcgtacttttctggatcaaaaataaactatggtgatcgagctcagtatgaaatttaaaacctggattctgtggcttcttgcttttctcacatgattatccagatttgcacagattggtgggaaccctttatgcatgagatgatgtcaactttttcttgacaacttcggtttagaaaaaaaaaaaaagactatcctttgttacatctggatcagtctttctggaacaggaaccttttgacctttatagtaaggagccaggatatgagaaaactttatccccgtggggatgcatgtaggcatttcttctttatacttctcaattattttcaggattattgcgttaatgaattaaatatattacctcttcgattttattgtttccatttgagccgctgaattaaaattgcgtttttatatacagctaacataatgac

SEQ ID NO: 53380 - protein, 218 aa, Glycine max
  peptide (1)..(218): Ceres Seq. ID no. 14310749
MVKLTMIARVTDGLPLAEGLDDGRDLKDAEFYKLQVKALFKNLSRGHYEASRMSVETGPYVFHYIIEGRVCYLTMCDRAYPKKLAFQYLEELRNEFERVNGSQIETAARPYAFIKFDTFMQKTKKLYQDTHTQRNIAKLNDELYEVHQIMTRNVQEVLGVGEQLDQVSQMSSRLSSESRIYADKARDLNRQALIRKWAPVAIVFGVVFVLFWIKNKLW

SEQ ID NO: 53381 - protein, 213 aa, Glycine max
  peptide (1)..(213): Ceres Seq. ID no. 14310750
MIARVTDGLPLAEGLDDGRDLKDAEFYKLQVKALFKNLSRGHYEASRMSVETGPYVFHYIIEGRVCYLTMCDRAYPKKLAFQYLEELRNEFERVNGSQIETAARPYAFIKFDTFMQKTKKLYQDTHTQRNIAKLNDELYEVHQIMTRNVQEVLGVGEQLDQVSQMSSRLSSESRIYADKARDLNRQALIRKWAPVAIVFGVVFVLFWIKNKLW

SEQ ID NO: 53382 - protein, 166 aa, Glycine max
  peptide (1)..(166): Ceres Seq. ID no. 14310751
MSVETGPYVFHYIIEGRVCYLTMCDRAYPKKLAFQYLEELRNEFERVNGSQIETAARPYAFIKFDTFMQKTKKLYQDTHTQRNIAKLNDELYEVHQIMTRNVQEVLGVGEQLDQVSQMSSRLSSESRIYADKARDLNRQALIRKWAPVAIVFGVVFVLFWIKNKLW

SEQ ID NO: 53383 - DNA, 1313 bp, Glycine max
  misc_feature (1)..(1313): Ceres Seq. ID no. 15174591
acacctctttcagagtcagcttttaactatgtgcattgcaagctatgagccttctggcagtcaagttcagcttacacttgagaggggtcttcctgctatggttgcttctttcacttctaaacaattgccatatccatctctctcctttgacatgttgcattgtgcaagatgtggcattgattgggaccgaaaagatggcattctcatgattgaagctgatagacttttaagaccggggggctactttgtctggacttcaccacttacaaatgctcgtgacaaagacagtcagaaaagatggaagttcatacaaagttttgctgaaaacctttgctgggatatgctgtcacagcaagatgaaactgtcgtatggaagaaaactagtaaaaggaattgctatagttcaagaaagaatagttctccccctcctttatgtggcagaggctatgatgtggagtctccgtattatcgagaactgcaaaactgcataggaggaacacatagcagccgctggatttctgtccaagagagggaaacttggccttccagagatcacttgaacaaaaaggagcttgcaatctttgggttgcaatctgatgaatttgctgaggactctgaaagctggaaagcagcagttcgaaattattggtctcttctgtcacctttaatattttctgatcatccaaagagacctggtgatgaggaccctccaccaccttataacatgctaagaaatgtgctagacatgaatgctcatgttggtggttttaattctgcaatgttgcaagctggaaaatccatatgggtaatgaatgtggtccctctgagtggactcaactatcttcccttgatccaggatcgaggttatgttggtgttttgcacgattggtgtgaggccttcccaacgtaccctagaacctatgacttggtccatgcagcaggacttttatcccttgaatttgctcagcagcgcagctgtaccatgcttgacatgttcattgaaattgacaggttacttcgtccagagggttggattataattcgtgacacagttcctttaatagagtcagcaagagctctaacaacaaggctaaagtgggatgcgcgagttgtagaaattgaaagtgacagcgatcagagactcctgatctgtcaaaaacctttctttaagagacaggcaaattaattcattcatgcccagaagaaattagaccataatattcatatattcatttttcataatgttcatttattatcataatgctccgccatagaaagtggggattgaaaattttggacagaaaagaaagccg

SEQ ID NO: 53384 - protein, 394 aa, Glycine max
  peptide (1)..(394): Ceres Seq. ID no. 15174592
HLFQSQLLTMCIASYEPSGSQVQLTLERGLPAMVASFTSKQLPYPSLSFDMLHCARCGIDWDRKDGILMIEADRLLRPGGYFVWTSPLTNARDKDSQKRWKFIQSFAENLCWDMLSQQDETVVWKKTSKRNCYSSRKNSSPPPLCGRGYDVESPYYRELQNCIGGTHSSRWISVQERETWPSRDHLNKKELAIFGLQSDEFAEDSESWKAAVRNYWSLLSPLIFSDHPKRPGDEDPPPPYNMLRNVLDMNAHVGGFNSAMLQAGKSIWVMNVVPLSGLNYLPLIQDRGYVGVLHDWCEAFPTYPRTYDLVHAAGLLSLEFAQQRSCTMLDMFIEIDRLLRPEGWIIIRDTVPLIESARALTTRLKWDARVVEIESDSDQRLLICQKPFFKRQAN

SEQ ID NO: 53385 - protein, 385 aa, Glycine max
  peptide (1)..(385): Ceres Seq. ID no. 15174593
MCIASYEPSGSQVQLTLERGLPAMVASFTSKQLPYPSLSFDMLHCARCGIDWDRKDGILMIEADRLLRPGGYFVWTSPLTNARDKDSQKRWKFIQSFAENLCWDMLSQQDETVVWKKTSKRNCYSSRKNSSPPPLCGRGYDVESPYYRELQNCIGGTHSSRWISVQERETWPSRDHLNKKELAIFGLQSDEFAEDSESWKAAVRNYWSLLSPLIFSDHPKRPGDEDPPPPYNMLRNVLDMNAHVGGFNSAMLQAGKSIWVMNVVPLSGLNYLPLIQDRGYVGVLHDWCEAFPTYPRTYDLVHAAGLLSLEFAQQRSCTMLDMFIEIDRLLRPEGWIIIRDTVPLIESARALTTRLKWDARVVEIESDSDQRLLICQKPFFKRQAN

SEQ ID NO: 53386 - protein, 362 aa, Glycine max
  peptide (1)..(362): Ceres Seq. ID no. 15174594
MVASFTSKQLPYPSLSFDMLHCARCGIDWDRKDGILMIEADRLLRPGGYFVWTSPLTNARDKDSQKRWKFIQSFAENLCWDMLSQQDETVVWKKTSKRNCYSSRKNSSPPPLCGRGYDVESPYYRELQNCIGGTHSSRWISVQERETWPSRDHLNKKELAIFGLQSDEFAEDSESWKAAVRNYWSLLSPLIFSDHPKRPGDEDPPPPYNMLRNVLDMNAHVGGFNSAMLQAGKSIWVMNVVPLSGLNYLPLIQDRGYVGVLHDWCEAFPTYPRTYDLVHAAGLLSLEFAQQRSCTMLDMFIEIDRLLRPEGWIIIRDTVPLIESARALTTRLKWDARVVEIESDSDQRLLICQKPFFKRQAN

SEQ ID NO: 53387 - DNA, 1369 bp, Glycine max
  misc_feature (1)..(1369): Ceres Seq. ID no. 15176548
agcttgagcgatgtcgggcctgtataactccaacttctcaccagtgagagctgcttctcctcagattagaaccaacccagaagtcgacagtcagtaccttacggagttgctggcagagcatcagaagtttggtcccttcatgcaagcccttcccatatgcagtcgtctcttgaatcaagaaatattaagagtttctggaatgctgtccaatcaaggttttggtgactttgacagactgcggcatagaagccctagtcctatggcttcttcaaacctcatgtcaagtgtcactggaacgggattgggtggatggaatagtcttcagcaggagagattacgcggaactcctggaatgacaatggactggcaagttgcacctgcaagtcctagttcatacacagttaagaggattttgcgcttggaaattccagttgatacataccccaatttcaattttgttggaagacttctgggacccagaggcaattctctaaaacgggtagaagcttctacaggttgtcgtgtgtatattagaggaaagggttcaataaaagatccagacaaggaagaaaaattaagaggaagaccaggctatgagcatctcaatgagcaactccacattttgattgaggctgatttacctgctaatgttgttgacttaagactccggcaagctcaggaaattatagaagaattgctcaaacctgtggaagagtctgaggactatattaagaggcagcagttgcgtgaattggcgatgctgaattcaaatttcagagaagagagtcctggaccaagtggaagtgtatctccattcaactccagtggaatgaaacgagctaaaactggccgatgaaaggtttccttgttacttgtagatgagtgttattgttttggagctatctcaatcaaagcatctatgaaagaataggctaacaattattgctggctagtattctggtggttttaaatcctctccctttattttacatttttcttctaaaacaactggagtcaaagctagaaagatttttagagagaaaaaaaatgataatataattgggtattgagaataggtgtgttcaaatgagtctttttcttgcacacttcatacatttattattgaatttattcttgcatctgtaacttgtgagaagcatgagatatatgttatgggtgaagttttaggtcttgagtggatcaaattttgtgggcatgtgacatgccgggtctcatcagtattcaaagattagttatagtataggttgaattttttttagttgtttgtctcaaacatttgtattttattcactgtgttacagttattgaacgatacatgtcatgtcacagatatctttccatgtaaaag

SEQ ID NO: 53388 - protein, 281 aa, Glycine max
  peptide (1)..(281): Ceres Seq. ID no. 15176549
MSGLYNSNFSPVRAASPQIRTNPEVDSQYLTELLAEHQKFGPFMQALPICSRLLNQEILRVSGMLSNQGFGDFDRLRHRSPSPMASSNLMSSVTGTGLGGWNSLQQERLRGTPGMTMDWQVAPASPSSYTVKRILRLEIPVDTYPNFNFVGRLLGPRGNSLKRVEASTGCRVYIRGKGSIKDPDKEEKLRGRPGYEHLNEQLHILIEADLPANVVDLRLRQAQEIIEELLKPVEESEDYIKRQQLRELAMLNSNFREESPGPSGSVSPFNSSGMKRAKTGR

SEQ ID NO: 53389 - protein, 238 aa, Glycine max
  peptide (1)..(238): Ceres Seq. ID no. 15176550
MQALPICSRLLNQEILRVSGMLSNQGFGDFDRLRHRSPSPMASSNLMSSVTGTGLGGWNSLQQERLRGTPGMTMDWQVAPASPSSYTVKRILRLEIPVDTYPNFNFVGRLLGPRGNSLKRVEASTGCRVYIRGKGSIKDPDKEEKLRGRPGYEHLNEQLHILIEADLPANVVDLRLRQAQEIIEELLKPVEESEDYIKRQQLRELAMLNSNFREESPGPSGSVSPFNSSGMKRAKTGR

SEQ ID NO: 53390 - protein, 218 aa, Glycine max
  peptide (1)..(218): Ceres Seq. ID no. 15176551
MLSNQGFGDFDRLRHRSPSPMASSNLMSSVTGTGLGGWNSLQQERLRGTPGMTMDWQVAPASPSSYTVKRILRLEIPVDTYPNFNFVGRLLGPRGNSLKRVEASTGCRVYIRGKGSIKDPDKEEKLRGRPGYEHLNEQLHILIEADLPANVVDLRLRQAQEIIEELLKPVEESEDYIKRQQLRELAMLNSNFREESPGPSGSVSPFNSSGMKRAKTGR

SEQ ID NO: 53391 - DNA, 1057 bp, Glycine max
  misc_feature (1)..(1057): Ceres Seq. ID no. 13637473
cccccccccctacaaccaaatggttgtttatattgaagcctgtgaatctggatctatgtttaacaagatccttcctgccaatatcagcatttatgccactactgcttctaatcctgatgaaagctcatgggctacctattgctctcctgatgacaaggtcaatggcaaagaaattggctcatgcttgggagacttgtactctgtgaatttcttggagaatttggaatctgccaaccctgctaaggagactttgttgaagcaatatcagattattaagaagaagactacagcttctgaagttatgcaatatggtgagcttaagattgataaggaaatcattggattattcgaaggaaataacactaaagaagaagctctggttgctgaaaaggaagaagattttgcaaagtacacttctttggtcgactcaagatatgtcaagttaaattatttgaagagaaagcatgaaaaactcggcactgaacaaactgcttatggtcttgctgaagaattggactccatgaagaaatttgatagcagctttggaagcttgagctctgctcttaatttgaatgttgatgctaaagttgatgacattgatttcgagtgcttgaagactagagtcgctatgtatgaaggtgtctgtggaaagttcagtgattatggcttgaagtacgtcagatatttgcacttctcttgtgtccaaggtgttgatatttacgatttcgaaagtgctttaatgagagcttgctaatgtatggtcgattgatgaaatagttattgagagaaaataggtagtgtcatgcattcattgatactttataaaatttcaggatagtatcttgaaattactttaatacttatactttgaactatattacatactttcgtaacatataatgactttataactatgcatgaagtgaaaattacattttaataaaaatacttgatatatctaaaaaaaaaaaaaaaaaaataaaaaaaaaaaaaaaaaagaattcctgcagcccgggggatccactagttctagagcggccgccaccgcggggagctc

SEQ ID NO: 53392 - protein, 250 aa, Glycine max
  peptide (1)..(250): Ceres Seq. ID no. 13637474
PPPYNQMVVYIEACESGSMFNKILPANISIYATTASNPDESSWATYCSPDDKVNGKEIGSCLGDLYSVNFLENLESANPAKETLLKQYQIIKKKTTASEVMQYGELKIDKEIIGLFEGNNTKEEALVAEKEEDFAKYTSLVDSRYVKLNYLKRKHEKLGTEQTAYGLAEELDSMKKFDSSFGSLSSALNLNVDAKVDDIDFECLKTRVAMYEGVCGKFSDYGLKYVRYLHFSCVQGVDIYDFESALMRAC

SEQ ID NO: 53393 - protein, 244 aa, Glycine max
  peptide (1)..(244): Ceres Seq. ID no. 13637475
MVVYIEACESGSMFNKILPANISIYATTASNPDESSWATYCSPDDKVNGKEIGSCLGDLYSVNFLENLESANPAKETLLKQYQIIKKKTTASEVMQYGELKIDKEIIGLFEGNNTKEEALVAEKEEDFAKYTSLVDSRYVKLNYLKRKHEKLGTEQTAYGLAEELDSMKKFDSSFGSLSSALNLNVDAKVDDIDFECLKTRVAMYEGVCGKFSDYGLKYVRYLHFSCVQGVDIYDFESALMRAC

SEQ ID NO: 53394 - protein, 232 aa, Glycine max
  peptide (1)..(232): Ceres Seq. ID no. 13637476
MFNKILPANISIYATTASNPDESSWATYCSPDDKVNGKEIGSCLGDLYSVNFLENLESANPAKETLLKQYQIIKKKTTASEVMQYGELKIDKEIIGLFEGNNTKEEALVAEKEEDFAKYTSLVDSRYVKLNYLKRKHEKLGTEQTAYGLAEELDSMKKFDSSFGSLSSALNLNVDAKVDDIDFECLKTRVAMYEGVCGKFSDYGLKYVRYLHFSCVQGVDIYDFESALMRAC

SEQ ID NO: 53395 - DNA, 1850 bp, Glycine max
  misc_feature (1)..(1850): Ceres Seq. ID no. 15226772
ccgggccccccctcgagtcavctdcgtaggccccccccccccctagttttgttaatactttatagtatagttttagtcacaaaaataaatgattctttgcatttattgcatgttttgacatgcaaattcatttaattgctatttaatatttttaaaatggtatggtatactgtcaatgttttaaaggtgctatctatggtcattattggctttggaaaagagaaaaggggttaggccggtagaggttagattttgtatcataattgtctgcatctatgtatattttatatacattcatccaaacaagtgagatcactagtttattgtgactttgaaggatgaaaggagtgaatccacaattggatcttatgtgaactgttacgattaaagacttgaattgcatgtgtgtgtgcattggaatttatgattttgagttatttcttaaaaatctcttacaagttcattcatttgcattcagcaatcagcttttataaaattttgacatgatccgtacaggtagtaaggctagcaaacgttatggagtaacttgcttagtagggagggagaaagcataatgaaaaagttagggagtaatttttaaggcattgtgaataagaaatttgataatgacaggggaaggtcaaagactaaaaggtttaataaatggtcacgttccacctagtaaacttggcaacccaacccagcctgcttccttaccctccatcttaaacagccaacttatgattttgagtttgattggttttcaatacgttagtaagtgcaccatttaaactttgtttgaccctccttatttttctgaagacagctctcatgtaaaaaaattaaaacatatatctgaaatcctgaaaaattatctctcctactcaacaaatttggtttgggacaaactgttccgaacctttgattgatgggtaaatgtttatttagctgtttatcaaagacggttgtgttctgtttgtgaagtgccaaccttgtaagttgtgactagtaggttccctgttgtaacaattgaacttgttggctcaacctgtggtcgagcatataacaggcagtggcattttcatacaatttccttactgcatttatgtgattcttcatccagagcatgacaattttctgtaccacagtttcatagttcctattaattgttccgttgcgctgttgcagttcattagtgaagctcatttggaagcatgccgaaggcagcgtctttactcaatagcaggctactattatgtgaagaatcacatctgttggggaaagcttagacttaaccccgttgattatccagtctctctgctgatctagaatttttaagatttttcccaacacaatagtgatgtagtttttatgcagaataattggagttcgtactagaattacctacagatttattgagtcgtttatttgggcatatgatctgtagatttatttatttttatgattgttattcatctttaacttttaaaaaaaaaaaaaaaaaaaaaaaaaaaaaaaaaaaaaaaaaaaaaaaaaaaaaaaaaaaaaaaaaagaaaaaaaaaaaaaaaatttttaaaaaaaaaaaaagaaaaaagaaaaaaaaagggttyyckggcgcccgggggryccccwaattttaaagggggccccccccggggggggcccccmtttttkkycccyttaggggggggwaawttccgcgttkgkkktaaamsggggmaaaaggggttccsgggggaaaattgtttycccccccaaattccccaaaaaaaaaaggccggaaagaaaaaggggaaacccggggggggcaaaagggggggcaaaccccatttaagggggggggggcccc

SEQ ID NO: 53396 - protein, 54 aa, Glycine max
  peptide (1)..(54): Ceres Seq. ID no. 15226773
MTGEGQRLKGLINGHVPPSKLGNPTQPASLPSILNSQLMILSLIGFQYVSKCTI

SEQ ID NO: 53397 - protein, 46 aa, Glycine max
  peptide (1)..(46): Ceres Seq. ID no. 15226774
MICRFIYFYDCYSSLTFKKKKKKKKKKKKKKKKKKKKKKEKKKKNF

SEQ ID NO: 53398 - protein, 44 aa, Glycine max
  peptide (1)..(44): Ceres Seq. ID no. 15226775
  misc_feature (7)..(7): Xaa is any aa, unknown or other
  misc_feature (8)..(8): Xaa is any aa, unknown or other
PGPPSSXXRRPPPPLVLLILYSIVLVTKINDSLHLLHVLTCKFI

SEQ ID NO: 53399 - DNA, 1352 bp, Glycine max
  misc_feature (1)..(1352): Ceres Seq. ID no. 14310624
ttgaaattttatcgaggaagtggcatttgctttggactggagcattaataacagtgtcacctccacaaatgctgccattgcaagggataagatcaagaagcaattcagcagtcatttatcacaaaatcaaagtaaaacagatgttgaagataaacagtcttctcgcttgccctcatttgcatatcctgacgaacagtgtgaactcttcaacacacagaatgatcagtgtgatctccttgaagagattagaaaactaaaatatgatttgaggagcacaaaaactgcgaagaaagacttggaagaaaagctgctgtcagtaactgatgagagtcagaacttagcaaaacaatgtcaagaagcacaaaataacatcaaaggtttagaatcagaaatcgaggcactgaaagaatccaaagcaacactagaagatcagattgagaaacagaagattataaatgaagatcttgatacacaacttacaatagctcagaccaaattaaatgacatctttcaaaagttttcgtccttagaagttgaattagaggataaaaagaactcctgtgaggatttagaggcaacatgtctagaacttcaactccagctggaaagcattgcaaagaaggaatctccaacatatggcaaatacgaagtagaaaagatatatcaaactggctgggagatcacaacagcttcatcaaagttggcagagtgccaagaaaccatcctaaaccttaggaaacaactcaaggcacttgcttcatctaatgaagtagcaatttttgacaaggttgtctccacaactaatactatggccaatccaactcagaagaagaacttgatcaaacgatcctctctacgcaatcaaatgcaagcagaggatgaagctaaaggagggatgcataagtctgtccaaactgaagaaactaaaagcgataaagatgtgcagaggccaccccttcttcaatctgaaaccgaaaaatctctgccaagtcccaaaagtctcacttcggagcaacatgatagaagcaaaaccacaggctctttggcaattgtgccaggtaagaagcaaataggctttggttttctgaggaagctgctgtcgagacgaaagaaaggaaggggtaagggaactaagttgttagccaaagcatgaataagaatgatcttggagagaatgcgaagacatgcttctggtgtaacatgcttttgtcttttattagattagattctggtggaacttgtttttatcttgtattggagatgattgaggttggagttgagacacagagtgaaagagaggtttggtgctgtaaatatagctggtgtaaataagttcattggcatttgagatt

SEQ ID NO: 53400 - protein, 114 aa, Glycine max
  peptide (1)..(114): Ceres Seq. ID no. 14310625
MANPTQKKNLIKRSSLRNQMQAEDEAKGGMHKSVQTEETKSDKDVQRPPLLQSETEKSLPSPKSLTSEQHDRSKTTGSLAIVPGKKQIGFGFLRKLLSRRKKGRGKGTKLLAKA

SEQ ID NO: 53401 - protein, 95 aa, Glycine max
  peptide (1)..(95): Ceres Seq. ID no. 14310626
MQAEDEAKGGMHKSVQTEETKSDKDVQRPPLLQSETEKSLPSPKSLTSEQHDRSKTTGSLAIVPGKKQIGFGFLRKLLSRRKKGRGKGTKLLAKA

SEQ ID NO: 53402 - protein, 85 aa, Glycine max
  peptide (1)..(85): Ceres Seq. ID no. 14310627
MHKSVQTEETKSDKDVQRPPLLQSETEKSLPSPKSLTSEQHDRSKTTGSLAIVPGKKQIGFGFLRKLLSRRKKGRGKGTKLLAKA

SEQ ID NO: 53403 - DNA, 1652 bp, Glycine max
  misc_feature (1)..(1652): Ceres Seq. ID no. 13593854
ccccccacacaccatcctctccccacaagaataagcccgttcatgttcctctaccaccgaacacaccccgccaccacctctcgctaacgtgcgccccttccttatcctgcgcttcgacaccccttcttttctttttttactttttcccttattccccttccttcataagctccgcgttctctctctctctctctctctctctctctctctctctctctcggatcggagcgaggctggcggttccggcgttggggacgttagggttagggtttccgagagatgtggtatgctccaggcattgatgaatctgttctcgctgtgttggaagccgtttggccgcgatgctgatcgaatcgattccatcggagttatcggaagagaaggcaaagacggcttgctctggttccgcgacttcggaaaatatggctccggtgatttctccatggctgtcgttcaggccaaccaggttctcgaagaccagagccagatcgagtctggtcctctcggcaccttcgtcggcatctacgacggtcacggaggacccgacgcatcaagatacgtttgcgatcacttgtttcgccattttcaagcaatatcagctgagtcacgcggggttgtgacaactgagacaatcgaaagagcatttcgccaaacagaagaggggtacatggccctcgtgtcaggctcgtggaatgctcgacctcatattgcaagtgctgggacctgttgtctagttggagtgatatttcagcagacactctttgtggcaaacgctggagattcccgtgttgtattgggtaagaaagttggcaacactggaggtatggctgcaattcagctgtctacagaacacaatgcaaatcttgaggctgttaggcaggaacttaaagaattacatcctcatgatccccaaattgttgtcctcaaacatggagtgtggagagtaaaaggcattattcaggtttctagatctataggtgatgtatatttgaagcatgcacagtttaaccgagaaccacttaatgcaaaattcagacttcctgaaccgatgaacatgcctatcttgagtgctaatcccactattctttctcatgctctccaaccaaatgattccttccttatatttgcatctgatggtttatgggagcatttgagtaacgagaaagctgtggatattgtaaacagcaatccacatgcgggtagtgccaagagacttatcaaggctgctctccatgaagcagcaagaaaacgagaaatgcgatattcagacctccgtaagattgacaagaaagttcgacgccattttcatgatgatatatccgttattgttttattcttaaatcacgaccttatttccagaggcacagtgctagacccgacactttcaattcgaagcgctctcgatcactgacttgtatcactgtaagcagtcttgtacgagtttttggcaactgtaccgatacctgaagcattggtaggtacctggctataatatgtcatttctatggcacatatggcttctggtaccgacatcattcttgaggcacgagaatttattaagttataacatattattagaaatttattcataaagaggaaaaaaataaataccaaaaaaaaaaaaaaaaaagaattcctgcagccccggggga

SEQ ID NO: 53404 - protein, 374 aa, Glycine max
  peptide (1)..(374): Ceres Seq. ID no. 15221241
MLQALMNLFSLCWKPFGRDADRIDSIGVIGREGKDGLLWFRDFGKYGSGDFSMAVVQANQVLEDQSQIESGPLGTFVGIYDGHGGPDASRYVCDHLFRHFQAISAESRGVVTTETIERAFRQTEEGYMALVSGSWNARPHIASAGTCCLVGVIFQQTLFVANAGDSRVVLGKKVGNTGGMAAIQLSTEHNANLEAVRQELKELHPHDPQIVVLKHGVWRVKGIIQVSRSIGDVYLKHAQFNREPLNAKFRLPEPMNMPILSANPTILSHALQPNDSFLIFASDGLWEHLSNEKAVDIVNSNPHAGSAKRLIKAALHEAARKREMRYSDLRKIDKKVRRHFHDDISVIVLFLNHDLISRGTVLDPTLSIRSALDH

SEQ ID NO: 53405 - protein, 369 aa, Glycine max
  peptide (1)..(369): Ceres Seq. ID no. 15221242
MNLFSLCWKPFGRDADRIDSIGVIGREGKDGLLWFRDFGKYGSGDFSMAVVQANQVLEDQSQIESGPLGTFVGIYDGHGGPDASRYVCDHLFRHFQAISAESRGVVTTETIERAFRQTEEGYMALVSGSWNARPHIASAGTCCLVGVIFQQTLFVANAGDSRVVLGKKVGNTGGMAAIQLSTEHNANLEAVRQELKELHPHDPQIVVLKHGVWRVKGIIQVSRSIGDVYLKHAQFNREPLNAKFRLPEPMNMPILSANPTILSHALQPNDSFLIFASDGLWEHLSNEKAVDIVNSNPHAGSAKRLIKAALHEAARKREMRYSDLRKIDKKVRRHFHDDISVIVLFLNHDLISRGTVLDPTLSIRSALDH

SEQ ID NO: 53406 - protein, 322 aa, Glycine max
  peptide (1)..(322): Ceres Seq. ID no. 15221243
MAVVQANQVLEDQSQIESGPLGTFVGIYDGHGGPDASRYVCDHLFRHFQAISAESRGVVTTETIERAFRQTEEGYMALVSGSWNARPHIASAGTCCLVGVIFQQTLFVANAGDSRVVLGKKVGNTGGMAAIQLSTEHNANLEAVRQELKELHPHDPQIVVLKHGVWRVKGIIQVSRSIGDVYLKHAQFNREPLNAKFRLPEPMNMPILSANPTILSHALQPNDSFLIFASDGLWEHLSNEKAVDIVNSNPHAGSAKRLIKAALHEAARKREMRYSDLRKIDKKVRRHFHDDISVIVLFLNHDLISRGTVLDPTLSIRSALDH

SEQ ID NO: 53407 - DNA, 1760 bp, Glycine max
  misc_feature (1)..(1760): Ceres Seq. ID no. 14304276
ggtgccttcactctgacaatggatccagcgttacccattgtagcgctgtcgcttctcttgggtgccatcatcgccttcctcatcttcaacacctacttctgcaagcgccaatccgaaatccgatccatcgccgatccaaatccaaattcaaattcgaatcccaaactcgtgtcttccaaaccccctcccaagaagcctctctccaaaccccattcctccgacaaggatcaaaacaagcgtcaccatccgttggatttgaataccttgaagggtcatggtgatgcagtgacaggggtatgcttctcccgcgatggacgaaatttggcaactgcttgcgctgatggagttgtgagagtattcaagttggatgatgcttcgagtaaaagtttcaagtttctaaggattaatttgcctgccggcggtcatccaacggcagttgcattttccgatgatgcatcctccattgttgtggcgtcttatactctgtccggttgttcattatacatgtatggagaagagaaacctaaaacatctgaagacaaaccacaagcaaagcttcctctccccgaaattaagtgggagcatcacaaagttcatgataagaagtcaataattactatgtttggagcctctgcaacttatggcactgctgatggaagtacaattattgcctcgtgttcagaagggactgacatcattctttggcatggaaaaactgggaagagtgttgggcatgtcgatacaaatcaattgaaaaataacatggctactatatcacccaacggtcgttttattgcagctgcagcatttactgccgatgtgaagatctgggagattgtatatgcaaaggatggatctgtgaaggaagttttaaatgttatgcagcttaaggggcataagagtgctgtgacttggttatgctttacgccaaactctgagcaaataatcactgcatccaaggatggttcaatgagaatatggaatatcaatgttcgctatcatcttgatgaggatccaaagacgctaaaggtgttcccaattcctcttcatgattcttccggtactacattgcactatgatcgcatgagtgtttcccctgatggaaattttttggctgcgacccatggttccacattgcagtggttatgtgttgagactggaaaggttctggatacaactgaaaaagcccatgatagtgacatttcatgcatttcatgggctcctaaaactattccaatgggaaatgaacaagttttggttttagccacagccagtgctgacaagaaagtgaagttatgggcatctccatctatccctgcatcctaagccactatgctagtgcccggaatgctaccattagtatgcctttgcacgcgctgacactaattatgttaaagagagatgcttctaaagttctgggatttggtctcttcatagttggttcagtcacttcacaactttttagagctgcatggtatcattgaaaagttgaatgagaaacaaggatgagctgaaatgatgcaatcccttcagttgctgctactgctcagactctgtatcttgacgaattttttgactaataatttatatagacagagagataatgttgttggttttcgttgtgttagtgaggctgacgtgaatggtgaagtgtgatgcgagaatagtttatttgtagaactttggaagagaacataatggacatgttactagtggctacagtttgtcatttaaagaagaaaaaaaaaaacattttcatg

SEQ ID NO: 53408 - protein, 441 aa, Glycine max
  peptide (1)..(441): Ceres Seq. ID no. 14304277
GAFTLTMDPALPIVALSLLLGAIIAFLIFNTYFCKRQSEIRSIADPNPNSNSNPKLVSSKPPPKKPLSKPHSSDKDQNKRHHPLDLNTLKGHGDAVTGVCFSRDGRNLATACADGVVRVFKLDDASSKSFKFLRINLPAGGHPTAVAFSDDASSIVVASYTLSGCSLYMYGEEKPKTSEDKPQAKLPLPEIKWEHHKVHDKKSIITMFGASATYGTADGSTIIASCSEGTDIILWHGKTGKSVGHVDTNQLKNNMATISPNGRFIAAAAFTADVKIWEIVYAKDGSVKEVLNVMQLKGHKSAVTWLCFTPNSEQIITASKDGSMRIWNINVRYHLDEDPKTLKVFPIPLHDSSGTTLHYDRMSVSPDGNFLAATHGSTLQWLCVETGKVLDTTEKAHDSDISCISWAPKTIPMGNEQVLVLATASADKKVKLWASPSIPAS

SEQ ID NO: 53409 - protein, 435 aa, Glycine max
  peptide (1)..(435): Ceres Seq. ID no. 14304278
MDPALPIVALSLLLGAIIAFLIFNTYFCKRQSEIRSIADPNPNSNSNPKLVSSKPPPKKPLSKPHSSDKDQNKRHHPLDLNTLKGHGDAVTGVCFSRDGRNLATACADGVVRVFKLDDASSKSFKFLRINLPAGGHPTAVAFSDDASSIVVASYTLSGCSLYMYGEEKPKTSEDKPQAKLPLPEIKWEHHKVHDKKSIITMFGASATYGTADGSTIIASCSEGTDIILWHGKTGKSVGHVDTNQLKNNMATISPNGRFIAAAAFTADVKIWEIVYAKDGSVKEVLNVMQLKGHKSAVTWLCFTPNSEQIITASKDGSMRIWNINVRYHLDEDPKTLKVFPIPLHDSSGTTLHYDRMSVSPDGNFLAATHGSTLQWLCVETGKVLDTTEKAHDSDISCISWAPKTIPMGNEQVLVLATASADKKVKLWASPSIPAS

SEQ ID NO: 53410 - protein, 273 aa, Glycine max
  peptide (1)..(273): Ceres Seq. ID no. 14304279
MYGEEKPKTSEDKPQAKLPLPEIKWEHHKVHDKKSIITMFGASATYGTADGSTIIASCSEGTDIILWHGKTGKSVGHVDTNQLKNNMATISPNGRFIAAAAFTADVKIWEIVYAKDGSVKEVLNVMQLKGHKSAVTWLCFTPNSEQIITASKDGSMRIWNINVRYHLDEDPKTLKVFPIPLHDSSGTTLHYDRMSVSPDGNFLAATHGSTLQWLCVETGKVLDTTEKAHDSDISCISWAPKTIPMGNEQVLVLATASADKKVKLWASPSIPAS

SEQ ID NO: 53411 - DNA, 1785 bp, Glycine max
  misc_feature (1)..(1785): Ceres Seq. ID no. 14310998
gaacagcacaaggaaacaaaaccaacccttttgagcttgcacaactctgatggtagttgcacaactacttcagactctctctctctgagtgcctcaccacacagattctgtgatataccaatggaggccctcaatgctgctggcttgacccctctatctgtgctctctgatagaacaaaaacaagaactaaacacccttctgtttctgcatgcaaagtctcaaacttttccacctccaccaacaagaaacaagcattgctgcaaagttgcatatcaaaaactttgcatggggggctgattcttgcagcttcggctgttaatggtggagctgccacagccttaacgtacgatgaggcactgggacaacctttgagcctccctggtactggggactttgatgtgaatggctttgtggagagtgtcgctggctttgcagctgagaaccctgcaattgttgccgggggagtggttgttttggcagtgccattggttttgtctcaggttttcaagaagcctaaggcttggggtgttgagtctgctaagaacgcgtatgctaaacttggggctgatgggaatgctcagctgcttgacataagggcactggtggagattaggcaagtggggtccccagatgttgggggtctaaagaagaaagccgtgtcaataccttataagggtgatgataagccagggttcttgaagaagcttgcattgaagtttaaggagccagagaataccacattgtttattcttgacaaatttgatgggaactctgaactggttgcagagttggttaccattaatggatttaaagcagcttatgcaattaaggatggtgcagaaggaccgcgaggatggaagagtagtggtcttccttggatagcaccacggaaaacattgagtttggacaatctgacagatgctatatctgaagcaataggagatacctctgatggtgtggcagttactcttgggattgctgcagctgctgctggacttagtatattagctttttctgagatagaatcaatcctccaagttgtaggatcagctgcgctcattcagtttgcaagcaagaagcttttgtttgctgaggaccgaaagcaaaccgtgaaacaacttgatgagttcttgaacaccaaggttgcccctaaagaacttgttgatgaaataaaggatattggaaaggctcttctaccatcctctaccaataataaggctcttcctgctccagaagagaaaagttcagagcttgctacagctgatagcactgtacagaatgcagtagctactcccgagcccaaagcggatgcagtagctcctgaagtaaactcagtgcccaaaactgaagtgaaggcagaagaatcatttcctgcacaaccaaggccactttcaccatacccatattatccagatttcaagcctccaacatctcctaccccttcacagccctagaccttcacttcttttaatcttgaacataattccatagaaggcaaatcaattgtccaaatatccagcatgtatcaagaggtgtacaatactacaatctataatcctatcagaaaaagtcatgcatcttaatttgcagataagatccgtgacataagttgtataattttaaagtttgttatgattatccatccacttgtgctactgggtacactttttgtaattgatggatgtgttgtagaggtaggtgtcaagttaacattgtagttattttaacatttagtataacattcaatctttcagttttggagtaagcaaataaggtttatgtac

SEQ ID NO: 53412 - protein, 484 aa, Glycine max
  peptide (1)..(484): Ceres Seq. ID no. 14310999
EQHKETKPTLLSLHNSDGSCTTTSDSLSLSASPHRFCDIPMEALNAAGLTPLSVLSDRTKTRTKHPSVSACKVSNFSTSTNKKQALLQSCISKTLHGGLILAASAVNGGAATALTYDEALGQPLSLPGTGDFDVNGFVESVAGFAAENPAIVAGGVVVLAVPLVLSQVFKKPKAWGVESAKNAYAKLGADGNAQLLDIRALVEIRQVGSPDVGGLKKKAVSIPYKGDDKPGFLKKLALKFKEPENTTLFILDKFDGNSELVAELVTINGFKAAYAIKDGAEGPRGWKSSGLPWIAPRKTLSLDNLTDAISEAIGDTSDGVAVTLGIAAAAAGLSILAFSEIESILQVVGSAALIQFASKKLLFAEDRKQTVKQLDEFLNTKVAPKELVDEIKDIGKALLPSSTNNKALPAPEEKSSELATADSTVQNAVATPEPKADAVAPEVNSVPKTEVKAEESFPAQPRPLSPYPYYPDFKPPTSPTPSQP

SEQ ID NO: 53413 - protein, 444 aa, Glycine max
  peptide (1)..(444): Ceres Seq. ID no. 14311000
MEALNAAGLTPLSVLSDRTKTRTKHPSVSACKVSNFSTSTNKKQALLQSCISKTLHGGLILAASAVNGGAATALTYDEALGQPLSLPGTGDFDVNGFVESVAGFAAENPAIVAGGVVVLAVPLVLSQVFKKPKAWGVESAKNAYAKLGADGNAQLLDIRALVEIRQVGSPDVGGLKKKAVSIPYKGDDKPGFLKKLALKFKEPENTTLFILDKFDGNSELVAELVTINGFKAAYAIKDGAEGPRGWKSSGLPWIAPRKTLSLDNLTDAISEAIGDTSDGVAVTLGIAAAAAGLSILAFSEIESILQVVGSAALIQFASKKLLFAEDRKQTVKQLDEFLNTKVAPKELVDEIKDIGKALLPSSTNNKALPAPEEKSSELATADSTVQNAVATPEPKADAVAPEVNSVPKTEVKAEESFPAQPRPLSPYPYYPDFKPPTSPTPSQP

SEQ ID NO: 53414 - DNA, 1218 bp, Glycine max
  misc_feature (1)..(1218): Ceres Seq. ID no. 12611963
accgggccccccctcgagtcagctacgtaggcccccccccccttgatagaatattttctcaggttggtgtggattactatatcatgtgttgcttctgtcttgagatttgacttcagctgtctagggccacagacaacccaaatccctacccctcccctccaaataacatgcactgtcctttcacttatgtttatatgaattatcagagcatttgttgaagatgcagattttgattcacttcaatattatctcaggttcccagaaggtttaccagtaaggttgagggaaagatgggttatgaagattttgtttacttcatactgtcagaagaggataaatcatctgagccaagtcttgagtattggttcaagtgcattgatttggatggaaatggagttctgacacggaatgaactgcaatttttttatgaggagcaattgcatcgaatggagtgcatggcccaagaacctgtgctttttgaggatatactgtgccagattattgacatgattggacctgaggatgagagctatataactctgcgtgacctgaaaggtggtaaactctcaggaagtgttttcaatatcctgttcaatctgaataagttcatggcctttgaaactcgtgacccatttttgattcgtcaggaacgtgagaatcctacattgacagagtgggatcgctttgctcatagagaatatattaggctttcaatggaagaagatgtagaggatgcctctaacggtagtgcagaagtttgggatgaatcactagaggctcccttctgacatcatttattgtatgagaagatattaatgcccccgatcggatggactggccattgttcagagacacgactcaggttcagcttggaatgccaactttactttgccccagaaagggggaaattccaagctcagatatggaatgcggtttcaatggggggcaagcagcaacaacgatattcagacatgcatgtactgacatatattgggaccattatcatgaaagttttgtcgcgggaccagtgcccatgtaaagtgaggacctttgctaagaggtgattagccaagttgaattaaattgacatcattttgagtcgcttaccttaagtagcgagattttctgatggatttttttagtaatttgatttacttatcgagtcacttttgcctcggatctgtccaacagtacaatcgtgatttgatttgtttcgtc

SEQ ID NO: 53415 - protein, 165 aa, Glycine max
  peptide (1)..(165): Ceres Seq. ID no. 12611964
MGYEDFVYFILSEEDKSSEPSLEYWFKCIDLDGNGVLTRNELQFFYEEQLHRMECMAQEPVLFEDILCQIIDMIGPEDESYITLRDLKGGKLSGSVFNILFNLNKFMAFETRDPFLIRQERENPTLTEWDRFAHREYIRLSMEEDVEDASNGSAEVWDESLEAPF

SEQ ID NO: 53416 - protein, 113 aa, Glycine max
  peptide (1)..(113): Ceres Seq. ID no. 12611965
MECMAQEPVLFEDILCQIIDMIGPEDESYITLRDLKGGKLSGSVFNILFNLNKFMAFETRDPFLIRQERENPTLTEWDRFAHREYIRLSMEEDVEDASNGSAEVWDESLEAPF

SEQ ID NO: 53417 - protein, 110 aa, Glycine max
  peptide (1)..(110): Ceres Seq. ID no. 12611966
MAQEPVLFEDILCQIIDMIGPEDESYITLRDLKGGKLSGSVFNILFNLNKFMAFETRDPFLIRQERENPTLTEWDRFAHREYIRLSMEEDVEDASNGSAEVWDESLEAPF

SEQ ID NO: 53418 - DNA, 1393 bp, Glycine max
  misc_feature (1)..(1393): Ceres Seq. ID no. 14304220
tattttttaaaaatgtattgttatttgctgaataccttttataagcaggaagtcaggcatatatagtttcaagaaggcccatgaaagggcatggaagggagatgattcagttgggtgttcgaattgctgatgccccagcagaaggggaaaatatgacaggagcctccaaagatatgaatgtagaatctattccttccttgtttcaagatattattgagcgtatggtttcctcgcaagtaatgactgtgaagcctgattgctgcattgtggatttctataatgagggtgatcactcacaaccccacagttggccatcatggtatggaaggcctgtttatgtgctttttctgactgaatgtgaaatgacttttggaagagtaattgcctcagagcatcctggggattataggggcagtatcaagctttctctagttcctgggtcccttctggttatgcagggtaaatccagtgattttgctaagcatgctcttccttccacacgcaaacaacgcatactggttaccttcacaaagtcccaaccaagaaagtcactatcaagtgatgctcaacagcttgcctcggcagtagcatcttctcattggggtccaccgccaagccgatctcccaatcatgttcgtcatcacgtaggccccaagcattacgctacacttccaacaactggggtactgccagctccacccattcgaccacaaatggcagctcccgttggcatgcaaccattgtttgttgctgctccagttgtacctcccatgccattttctgcacctgtgccaatcccagctggttctaccggatggacagctgcacctcctccaaggcatcctcctcctcgagtccctgctcctggaacaggagtcttcctacctccatcgggctcaggtaattcatctcaacagttaccagcaagtactttggctgaagttaacccaagcacggaaactccaaccatgccggagaaggaaaatgggaaaattaatcataatagtacaagtgcttcaccaaaaggaaaagtgcaaaagcaagaatgcaatgggcatgctgatggaactcaagttgaaccagctctagagacacggctagatagcaatgacaaagctgcaccaagtcattgagctgtaccatacttatagagagagagagagagagagaggtaaagcttatcacacgaacacgataggctgtgaacttaacttgagtttgaagcaaatgtaaagcgcggcaacaggagatatcactatatatatactgcagaggagaacaagggaaggaggtagaacttttggttctctctgtaatcctttctttgctccattccttttttgttgtcttaaaatattaactattacaggaagggaaacccattcttaattcg

SEQ ID NO: 53419 - protein, 350 aa, Glycine max
  peptide (1)..(350): Ceres Seq. ID no. 14304221
MKGHGREMIQLGVRIADAPAEGENMTGASKDMNVESIPSLFQDIIERMVSSQVMTVKPDCCIVDFYNEGDHSQPHSWPSWYGRPVYVLFLTECEMTFGRVIASEHPGDYRGSIKLSLVPGSLLVMQGKSSDFAKHALPSTRKQRILVTFTKSQPRKSLSSDAQQLASAVASSHWGPPPSRSPNHVRHHVGPKHYATLPTTGVLPAPPIRPQMAAPVGMQPLFVAAPVVPPMPFSAPVPIPAGSTGWTAAPPPRHPPPRVPAPGTGVFLPPSGSGNSSQQLPASTLAEVNPSTETPTMPEKENGKINHNSTSASPKGKVQKQECNGHADGTQVEPALETRLDSNDKAAPSH

SEQ ID NO: 53420 - protein, 343 aa, Glycine max
  peptide (1)..(343): Ceres Seq. ID no. 14304222
MIQLGVRIADAPAEGENMTGASKDMNVESIPSLFQDIIERMVSSQVMTVKPDCCIVDFYNEGDHSQPHSWPSWYGRPVYVLFLTECEMTFGRVIASEHPGDYRGSIKLSLVPGSLLVMQGKSSDFAKHALPSTRKQRILVTFTKSQPRKSLSSDAQQLASAVASSHWGPPPSRSPNHVRHHVGPKHYATLPTTGVLPAPPIRPQMAAPVGMQPLFVAAPVVPPMPFSAPVPIPAGSTGWTAAPPPRHPPPRVPAPGTGVFLPPSGSGNSSQQLPASTLAEVNPSTETPTMPEKENGKINHNSTSASPKGKVQKQECNGHADGTQVEPALETRLDSNDKAAPSH

SEQ ID NO: 53421 - protein, 326 aa, Glycine max
  peptide (1)..(326): Ceres Seq. ID no. 14304223
MTGASKDMNVESIPSLFQDIIERMVSSQVMTVKPDCCIVDFYNEGDHSQPHSWPSWYGRPVYVLFLTECEMTFGRVIASEHPGDYRGSIKLSLVPGSLLVMQGKSSDFAKHALPSTRKQRILVTFTKSQPRKSLSSDAQQLASAVASSHWGPPPSRSPNHVRHHVGPKHYATLPTTGVLPAPPIRPQMAAPVGMQPLFVAAPVVPPMPFSAPVPIPAGSTGWTAAPPPRHPPPRVPAPGTGVFLPPSGSGNSSQQLPASTLAEVNPSTETPTMPEKENGKINHNSTSASPKGKVQKQECNGHADGTQVEPALETRLDSNDKAAPSH

SEQ ID NO: 53422 - DNA, 1374 bp, Glycine max
  misc_feature (1)..(1374): Ceres Seq. ID no. 14304094
agagagatcagagatgtgtgggagagcacgttgtactctgagagcggatgatgtcccaagggcttgtcaccgcagcacttcccctactcgcactcttcatatcgaccggtataggccagcgtataatgtgtcaccgggattcgacgtgccagtggttcgtagagatgacgcgtctggcggtgaaggctatgttcttcaatgcatgaaatggggtttaatccccagttttacaaagaagacagagaagcctgatcactacaggatgtttaatgctcgatctgaatctatagatgaaaaggcatcatttcgccgtctgcttcctaaaagcaggtgccttgtggcagtagaaggattttatgagtggaaaaaggatggttcaaagaaacagccttactatattcacttcaaagatggacgaccacttgtctttgctgctctttatgactcatggcaaaattctgaaggtgaaacactatatacattcactattgttacaacctcttcatcttcagcacttcagtggcttcatgacaggatgcctgttattttgggcagcaaggaatcaactgatatttggctaagcagttctgcttccagttttaagagtgtgatgaagccatatgaagaatctgatttggtgtggtacccagtgacatctgctatgggcaaggcatcatttgatggacctgagtgcataaaggagattcaagtaaaagcacaagggaacacttcaatctctatgttcttttcaaaaaaaggagatgaaagtaaagacacaaagccagaacagaaagcatcatgtcctgaagttgtcaaaactgaacatacagaagacctgactgaaagtaaagacacaaagccagagcagaaaacatcaagtcatgaatttgtcaagactgaacctacagaagacttgagagaaagagctaaaactgaggagggaggcaatgacttaaaattccatggttcttcccattctcaaaatgtttctatgctcccaattaagcgtgagtatgagacattttcggctgctgattcaaagccagcattggcaaatcatgatcagataagtccaaaccctgcaaagaaaaaggaaaaagcaaagactgctaatgataaacaaccaaccctgttttcatactttggaaaaagtaaccactaaactaactggttttggttttgcattaacatgaggattgctatgtttgtattggtgtaaattacacatgcattttcttttagcttgtgtatttccatgtaggccttgttttatatgcacattttcaatctctactcttgttggaaggtctttctttagtccatggttcatgttcaagaggagctttataattaaatagcaaggctttttgtatt

SEQ ID NO: 53423 - protein, 386 aa, Glycine max
  peptide (1)..(386): Ceres Seq. ID no. 14304095
ERSEMCGRARCTLRADDVPRACHRSTSPTRTLHIDRYRPAYNVSPGFDVPVVRRDDASGGEGYVLQCMKWGLIPSFTKKTEKPDHYRMFNARSESIDEKASFRRLLPKSRCLVAVEGFYEWKKDGSKKQPYYIHFKDGRPLVFAALYDSWQNSEGETLYTFTIVTTSSSSALQWLHDRMPVILGSKESTDIWLSSSASSFKSVMKPYEESDLVWYPVTSAMGKASFDGPECIKEIQVKAQGNTSISMFFSKKGDESKDTKPEQKASCPEVVKTEHTEDLTESKDTKPEQKTSSHEFVKTEPTEDLRERAKTEEGGNDLKFHGSSHSQNVSMLPIKREYETFSAADSKPALANHDQISPNPAKKKEKAKTANDKQPTLFSYFGKSNH

SEQ ID NO: 53424 - protein, 382 aa, Glycine max
  peptide (1)..(382): Ceres Seq. ID no. 14304096
MCGRARCTLRADDVPRACHRSTSPTRTLHIDRYRPAYNVSPGFDVPVVRRDDASGGEGYVLQCMKWGLIPSFTKKTEKPDHYRMFNARSESIDEKASFRRLLPKSRCLVAVEGFYEWKKDGSKKQPYYIHFKDGRPLVFAALYDSWQNSEGETLYTFTIVTTSSSSALQWLHDRMPVILGSKESTDIWLSSSASSFKSVMKPYEESDLVWYPVTSAMGKASFDGPECIKEIQVKAQGNTSISMFFSKKGDESKDTKPEQKASCPEVVKTEHTEDLTESKDTKPEQKTSSHEFVKTEPTEDLRERAKTEEGGNDLKFHGSSHSQNVSMLPIKREYETFSAADSKPALANHDQISPNPAKKKEKAKTANDKQPTLFSYFGKSNH

SEQ ID NO: 53425 - protein, 319 aa, Glycine max
  peptide (1)..(319): Ceres Seq. ID no. 14304097
MKWGLIPSFTKKTEKPDHYRMFNARSESIDEKASFRRLLPKSRCLVAVEGFYEWKKDGSKKQPYYIHFKDGRPLVFAALYDSWQNSEGETLYTFTIVTTSSSSALQWLHDRMPVILGSKESTDIWLSSSASSFKSVMKPYEESDLVWYPVTSAMGKASFDGPECIKEIQVKAQGNTSISMFFSKKGDESKDTKPEQKASCPEVVKTEHTEDLTESKDTKPEQKTSSHEFVKTEPTEDLRERAKTEEGGNDLKFHGSSHSQNVSMLPIKREYETFSAADSKPALANHDQISPNPAKKKEKAKTANDKQPTLFSYFGKSNH

SEQ ID NO: 53426 - DNA, 1352 bp, Glycine max
  misc_feature (1)..(1352): Ceres Seq. ID no. 15225034
aattcatgcttgtctttgccaatattctaaagtttgaattttcatcgcaacaggttagttgggatgagcctgatttgctacataatgtgaagcgagtgagcccatggttggttgagttggtatctaacgtgccaatcatccatctggcagccttctctccaccaaggaagaagcttaggttcccccttgacgttcagtttccgataccatcgttttcaggcaacccctttgggtcttctagctctagcagccccttttgttgtctctctgataacgctcctgcaggcatacagggagccaggcattctcaaattggaatatctttatcagatctccaccttaacaataagctgcagttggggttgcttccaactaaagtccaccagcttaatttgcacgccgggatttctaatgctaagagtaaagaaagtctatcatccttgctctccatgggaaattctaacatgactttggagaaatctgatcatgtcaagagacaccattttttgcttttcggtcaaccgatactcaccgagcaacaaatctctagatcttctagtgatgtcgccacggatgatgagaataaggaaaagaagaagaagggatttcttagtgactcccagtcttcagtttcaccaggaaatttatcttctactgccgagttctcttggcaactcggttctgataccagtcattgcaaggttttcatggagtctgaagatgtaggacggacacttgacttgtcctgcctttcttcttatcaagagttgtacatgagactcgctaacatgtttggaatagagaggtctgatatgttgagtcatgttctctactgcgactcatccggtgctcttaagcaaattggagaggaacccttcagtgagttcatgaagacagcaaaaagattgaccattctgacggattcaaacaacaaagatagtagaaggtgggagaaagaaaattaatgaaatatgtataggatgtgcttccggggaagatactattgtatgtgcaagtgtaactgttccttcctctttgtgacttcaaagtctgttttgcagggtttggatcacaggaactcgaaatgctgaacatggattggatgctgcatcaaataagacaggtcctctcagtatatttgcttaatatggtgtggcatggcatcggagacattgtttttagatatgaaaagttgaaggacatagttattactcagttgtaagagatgctaatatgaactgaaaattccatcaatattggcgtctttgttttcgatgtccatttgtagaaaataatgatttttcctgtatgatggacaattactattctaatattaattaattaattaacct

SEQ ID NO: 53427 - protein, 320 aa, Glycine max
  peptide (1)..(320): Ceres Seq. ID no. 15225035
FMLVFANILKFEFSSQQVSWDEPDLLHNVKRVSPWLVELVSNVPIIHLAAFSPPRKKLRFPLDVQFPIPSFSGNPFGSSSSSSPFCCLSDNAPAGIQGARHSQIGISLSDLHLNNKLQLGLLPTKVHQLNLHAGISNAKSKESLSSLLSMGNSNMTLEKSDHVKRHHFLLFGQPILTEQQISRSSSDVATDDENKEKKKKGFLSDSQSSVSPGNLSSTAEFSWQLGSDTSHCKVFMESEDVGRTLDLSCLSSYQELYMRLANMFGIERSDMLSHVLYCDSSGALKQIGEEPFSEFMKTAKRLTILTDSNNKDSRRWEKEN

SEQ ID NO: 53428 - protein, 319 aa, Glycine max
  peptide (1)..(319): Ceres Seq. ID no. 15225036
MLVFANILKFEFSSQQVSWDEPDLLHNVKRVSPWLVELVSNVPIIHLAAFSPPRKKLRFPLDVQFPIPSFSGNPFGSSSSSSPFCCLSDNAPAGIQGARHSQIGISLSDLHLNNKLQLGLLPTKVHQLNLHAGISNAKSKESLSSLLSMGNSNMTLEKSDHVKRHHFLLFGQPILTEQQISRSSSDVATDDENKEKKKKGFLSDSQSSVSPGNLSSTAEFSWQLGSDTSHCKVFMESEDVGRTLDLSCLSSYQELYMRLANMFGIERSDMLSHVLYCDSSGALKQIGEEPFSEFMKTAKRLTILTDSNNKDSRRWEKEN

SEQ ID NO: 53429 - protein, 171 aa, Glycine max
  peptide (1)..(171): Ceres Seq. ID no. 15225037
MGNSNMTLEKSDHVKRHHFLLFGQPILTEQQISRSSSDVATDDENKEKKKKGFLSDSQSSVSPGNLSSTAEFSWQLGSDTSHCKVFMESEDVGRTLDLSCLSSYQELYMRLANMFGIERSDMLSHVLYCDSSGALKQIGEEPFSEFMKTAKRLTILTDSNNKDSRRWEKEN

SEQ ID NO: 53430 - DNA, 796 bp, Glycine max
  misc_feature (1)..(796): Ceres Seq. ID no. 12581497
aaggattattctaaaaaaatacagggatttgaaatttcatttgttgaatcttgcttactttcattttaatataatgatctctattagttaatctattaatatctattagttaatctattaatagaatataagtaatatagaatctaagtaattcacggttaggatagatctaaaccagctcattatatatatattacaacttactatgccaactatgaaacaacttattagaaacacaagacagccaatccgaaacgtcacaaaatccccagctcttcggggatgccctcagcgccgaggaacgtgtaccagggtgtatgtgcgactcgttcagatcatatactaagaagaaaaaaccaatttcattttttcagtattgttgatcggttaagatagtgtgaatgtagttttcccattcagactatcttaacttatatatatacattctttacattcttctatcttgtatcaaatttatggtttcgattggtgcaaacccaatagtcttaatttacaatttaagatgagaaggactttcccatcggtaacaaaacaaatataaagttacccgttaagcggagaaaatactatttcaattaaagataaagtatgtccttaatgaatgaattttgatggattttggacgaacggaataagaaggtcagctacccagcaaattttcataattaaataccgttactgtataactagatttcattgtgaaaaaatctacttactaaactaaatattggatgggtagagccaaagagtgtgaactgtacaagttaacaataac

SEQ ID NO: 53431 - protein, 46 aa, Glycine max
  peptide (1)..(46): Ceres Seq. ID no. 12581498
MPTMKQLIRNTRQPIRNVTKSPALRGCPQRRGTCTRVYVRLVQIIY

SEQ ID NO: 53432 - protein, 43 aa, Glycine max
  peptide (1)..(43): Ceres Seq. ID no. 12581499
MKQLIRNTRQPIRNVTKSPALRGCPQRRGTCTRVYVRLVQIIY

SEQ ID NO: 53433 - protein, 40 aa, Glycine max
  peptide (1)..(40): Ceres Seq. ID no. 12581500
MNFDGFWTNGIRRSATQQIFIIKYRYCITRFHCEKIYLLN

SEQ ID NO: 53434 - DNA, 1076 bp, Glycine max
  misc_feature (1)..(1076): Ceres Seq. ID no. 15176051
ttttttagttaaaattttcacttatttgatgataccaagttctttgtatatattattattcactcttgattcagaggaatggcaattgaggatccctgtgccccccacggccttcgccttgtgatagaggactacccttatgctgttgatggactagaaatatgggatgctattcagacatgggttaagaactatgtctccttgtattacccaacagatgatgcaattaagaaagactctgagctccaagcttggtggaaggaagctgttgagacgggtcacggtgacttgaaagacaagccatggtggcctaagttgaacactcctcaagatttggttcacatttgctccattatcatatggatagcttcagctctccatgcagcagtgaattttggacaatacccttatggaggtttgatcctaaaccgtccaactttaaccagaagatttctccctgaaccaggaagcaaagaatatgaggagctttcaaccaattatcaaaaggcttacctgagaacaattacaagaaagattgaggcccttgtggacctttcagtgatagagatattgtcaagacatgcttctgatgagatctaccttgggaagagggacagtgacgattggactgatgaccaaaaggcaattcaagcctttgaaaagtttggaaccaagctgaaggaaattgaggccaaaatcaattcgaggaacaaagattcaagccttagaaaccgtaatggaccggttcagatgccttatactgtgcttcttcctaccagtgaggaaggccttactttcagaggaattcccaacagcatctctatctaaggccagagtgcgtttatgtgtggttctctttccaaacctacgttacctttctcgttgacgagtaaatatgcaagcttatgcatgcatataataattgtcttatgcattcttaagtgttgtatgtggacgttatctagttttcgtatttaataagaatggtatcaccattactttgtttttactatcatgttcacccgtagtatgtaagattgatatcccaaactatgattatgaaatcaaatttctcc

SEQ ID NO: 53435 - protein, 249 aa, Glycine max
  peptide (1)..(249): Ceres Seq. ID no. 15176052
MAIEDPCAPHGLRLVIEDYPYAVDGLEIWDAIQTWVKNYVSLYYPTDDAIKKDSELQAWWKEAVETGHGDLKDKPWWPKLNTPQDLVHICSIIIWIASALHAAVNFGQYPYGGLILNRPTLTRRFLPEPGSKEYEELSTNYQKAYLRTITRKIEALVDLSVIEILSRHASDEIYLGKRDSDDWTDDQKAIQAFEKFGTKLKEIEAKINSRNKDSSLRNRNGPVQMPYTVLLPTSEEGLTFRGIPNSISI

SEQ ID NO: 53436 - DNA, 849 bp, Glycine max
  misc_feature (1)..(849): Ceres Seq. ID no. 14304536
atatttcaagcctcttcatagtttccatggttatctaaatataccatttgagattttgaatactatttgggtattgaatgtcacttgagaggagtgaggactaatactttttcttttgtataattgcatcaaattttgcagaatactactcaagtgagatactttgatttaactccctttgttcatggatgaaaaactcaattgaagtaattcactggactactttgtcctcttggtctgaggttgaagctatttgatttctgaatttcgctagtttcttaatctgagtatggctgggaaccaagatcagttagagatcaagtttctgttgagtgatggtacagatattggccccaaaagttatgctgctgccactagtattgcaacactgaaagaaagtgttcttgctcaatggccaaaagataaagagtatggaccaagaactgtaaaagatttgaagttaattagtgccggaaaaatattggagaacaacagaacagtgggagaatgtcagagtcccctgtgtgatctacctggtggagttataacaatgcatgtggttgtgcaaccaccttctgtggagaaagataagaaagtagcaagtgaagcgaagcagagcaaatgtgtttgtgtgatattatagtgtccaaattgaatagaagttgtcatgtatttaggtggttaaaagttacacttgtattcattttaaaagtaatctatggctttcaaaagatttcctcatacacaaattctttgggtgcatgcctcattgtctgattgatgtaaatgctgattgaaatgaactctaaaattattctcgtgcttcagcttgaaaaaaaaaaaaaaaag

SEQ ID NO: 53437 - protein, 117 aa, Glycine max
  peptide (1)..(117): Ceres Seq. ID no. 14304537
MAGNQDQLEIKFLLSDGTDIGPKSYAAATSIATLKESVLAQWPKDKEYGPRTVKDLKLISAGKILENNRTVGECQSPLCDLPGGVITMHVVVQPPSVEKDKKVASEAKQSKCVCVIL

SEQ ID NO: 53438 - DNA, 1341 bp, Glycine max
  misc_feature (1)..(1341): Ceres Seq. ID no. 14304475
gtggttgtgggtaggtgctgctgctgcttccattcctattcttacagtgaaggttcaatggaagggacaatgcagcttgcatacgagactgttgtgaagctcatgctggctgcactcgaacgcaacgtgctccctgacgtcatcaccaggagactcacgcgcttgctgttggctactcgccttcgctctgcttacaaaccctcctcccaacttcaactctccgatctcctctacttcgcgcattcattacaagagatgcccatagcaatcaacactgacaagcctaagtctcaacattatgaattaccaaccgctttcttcaagctcgtcctcggaaacaatctcaaatacagctgttgttatttctcttctgcctcaatgacgctggatgatgctgaagaagcaatgttgaaactgtactgtgagagatcaaacctgaaagatggtcatacagtgcttgatgtgggatgcggttggggatcgttggctctatacattgccaagaattacactaactgtagggttacaggaatctgcaattccacaactcaaaaggcttatattgaggagaagtgtagggatcttcagctgcaaaatttgaatattatagttgctgatattagcacatttgaaatggagacttcttatgacagaatattttccatagaaatgtttgagcatatgaagaactataaagatcttctgaagaagatatccaaatggatgaaagaggatagccttttatttgttcattacttctgccacaaagcatttgcctaccactttgaggacaaaaatgaagatgactggattacaagatacttctttactggaggaactatgccttcggcaaatctacttctttatttccaagatgatgttactgtcaccaaccattggctagtaaatgggaaacactacgcacagaccagtgaagaatggctcaaaagaatggaccagagaatgactttcatcaagccaattatgcaatcaacatacggcaaggactcagctaccaagtggactgcttattggagaacattcttcatagctgtagcagaactttttggatacaataacggtgaagaatggatggttgcacacttccttttcaaaaagaaataaataagccgaaacctagtctttttatttgactatttgagaacggccttaggacaaaaaagctgctacacgaggttgcacccttcaataatgttgtatacttttattagttaacttgttttagttggttgcttgtctttatttttccctgttgtaatggtgttgccactccaaccttattttatcttaaattttgggaaagtccaattcaaccctcgg

SEQ ID NO: 53439 - protein, 374 aa, Glycine max
  peptide (1)..(374): Ceres Seq. ID no. 14304476
VVVGRCCCCFHSYSYSEGSMEGTMQLAYETVVKLMLAALERNVLPDVITRRLTRLLLATRLRSAYKPSSQLQLSDLLYFAHSLQEMPIAINTDKPKSQHYELPTAFFKLVLGNNLKYSCCYFSSASMTLDDAEEAMLKLYCERSNLKDGHTVLDVGCGWGSLALYIAKNYTNCRVTGICNSTTQKAYIEEKCRDLQLQNLNIIVADISTFEMETSYDRIFSIEMFEHMKNYKDLLKKISKWMKEDSLLFVHYFCHKAFAYHFEDKNEDDWITRYFFTGGTMPSANLLLYFQDDVTVTNHWLVNGKHYAQTSEEWLKRMDQRMTFIKPIMQSTYGKDSATKWTAYWRTFFIAVAELFGYNNGEEWMVAHFLFKKK

SEQ ID NO: 53440 - protein, 355 aa, Glycine max
  peptide (1)..(355): Ceres Seq. ID no. 14304477
MEGTMQLAYETVVKLMLAALERNVLPDVITRRLTRLLLATRLRSAYKPSSQLQLSDLLYFAHSLQEMPIAINTDKPKSQHYELPTAFFKLVLGNNLKYSCCYFSSASMTLDDAEEAMLKLYCERSNLKDGHTVLDVGCGWGSLALYIAKNYTNCRVTGICNSTTQKAYIEEKCRDLQLQNLNIIVADISTFEMETSYDRIFSIEMFEHMKNYKDLLKKISKWMKEDSLLFVHYFCHKAFAYHFEDKNEDDWITRYFFTGGTMPSANLLLYFQDDVTVTNHWLVNGKHYAQTSEEWLKRMDQRMTFIKPIMQSTYGKDSATKWTAYWRTFFIAVAELFGYNNGEEWMVAHFLFKKK

SEQ ID NO: 53441 - protein, 351 aa, Glycine max
  peptide (1)..(351): Ceres Seq. ID no. 14304478
MQLAYETVVKLMLAALERNVLPDVITRRLTRLLLATRLRSAYKPSSQLQLSDLLYFAHSLQEMPIAINTDKPKSQHYELPTAFFKLVLGNNLKYSCCYFSSASMTLDDAEEAMLKLYCERSNLKDGHTVLDVGCGWGSLALYIAKNYTNCRVTGICNSTTQKAYIEEKCRDLQLQNLNIIVADISTFEMETSYDRIFSIEMFEHMKNYKDLLKKISKWMKEDSLLFVHYFCHKAFAYHFEDKNEDDWITRYFFTGGTMPSANLLLYFQDDVTVTNHWLVNGKHYAQTSEEWLKRMDQRMTFIKPIMQSTYGKDSATKWTAYWRTFFIAVAELFGYNNGEEWMVAHFLFKKK

SEQ ID NO: 53442 - DNA, 1203 bp, Glycine max
  misc_feature (1)..(1203): Ceres Seq. ID no. 14306557
gacaatttctcttctagcaatcaaccatctttggatcaaccctccaatttgtttacaatatggaacagaccctctcctttgaatttgagcatgaatttgttcaaaacacggcaagagtgaaatctgttgatatgcatccaactgagccatggattctactgggtttgtattcaggaactatttctatttggaactatcagacaaagactgaagagaagtctttaaaaatcagcgaatctccagtgagatcagcaaagttcattgctcgggaaaactggattgttgcagctacggatgacaaaaacattcacgtctacaattatgacaaaatggaaaagatagtagaatttgcggaacataaagattatatcaggagtttagctgttcatcctgtcctgccatatgtaatatcagcttcagatgatcaggttctaaaattgtggaattggaggaaaggttggtcttgttatgagaactttgaagggcactcacattatgtgatgcaagtggcattcaaccctaaggatccatctacctttgctagtgcatcccttgatggcaccttgaagatctggagccttgattcctctgctccaaattttaccctggaaggacaccagaaaggagtgaattgtgttgattacttcataaccaacgacaaacaatatcttttaagtggttctgatgattacactgccaaggtatgggattatcattctagaaactgtgtacagacgcttgaaggacatgaaaacaatgttacagcaatatgtgctcatcctgagcttcctataataataacagcttcagaggattctactgttaaaatatgggatgctgtcacttacaggcttcaaaccacgttgaactttggtctcaagagagtatggagtattggatacaagaaaggatcatctcagcttgcatttggttgtgaccaaggatttctaattgttaagatttcagaaggaagaccccaataagccaacatctggtagccagatgactagttatgatgagcttaactgcccagagaacatcatattctgccgttggttgtttatttctgagttgttactagttactagaataaattaatttagaatctacatattaccttatgtaatatattggtgtatgtacctgtgtgttcggattaatgtgttgccatttgagtgatatatataatatattttttttatc

SEQ ID NO: 53443 - protein, 307 aa, Glycine max
  peptide (1)..(307): Ceres Seq. ID no. 14306558
MEQTLSFEFEHEFVQNTARVKSVDMHPTEPWILLGLYSGTISIWNYQTKTEEKSLKISESPVRSAKFIARENWIVAATDDKNIHVYNYDKMEKIVEFAEHKDYIRSLAVHPVLPYVISASDDQVLKLWNWRKGWSCYENFEGHSHYVMQVAFNPKDPSTFASASLDGTLKIWSLDSSAPNFTLEGHQKGVNCVDYFITNDKQYLLSGSDDYTAKVWDYHSRNCVQTLEGHENNVTAICAHPELPIIITASEDSTVKIWDAVTYRLQTTLNFGLKRVWSIGYKKGSSQLAFGCDQGFLIVKISEGRPQ

SEQ ID NO: 53444 - protein, 283 aa, Glycine max
  peptide (1)..(283): Ceres Seq. ID no. 14306559
MHPTEPWILLGLYSGTISIWNYQTKTEEKSLKISESPVRSAKFIARENWIVAATDDKNIHVYNYDKMEKIVEFAEHKDYIRSLAVHPVLPYVISASDDQVLKLWNWRKGWSCYENFEGHSHYVMQVAFNPKDPSTFASASLDGTLKIWSLDSSAPNFTLEGHQKGVNCVDYFITNDKQYLLSGSDDYTAKVWDYHSRNCVQTLEGHENNVTAICAHPELPIIITASEDSTVKIWDAVTYRLQTTLNFGLKRVWSIGYKKGSSQLAFGCDQGFLIVKISEGRPQ

SEQ ID NO: 53445 - protein, 217 aa, Glycine max
  peptide (1)..(217): Ceres Seq. ID no. 14306560
MEKIVEFAEHKDYIRSLAVHPVLPYVISASDDQVLKLWNWRKGWSCYENFEGHSHYVMQVAFNPKDPSTFASASLDGTLKIWSLDSSAPNFTLEGHQKGVNCVDYFITNDKQYLLSGSDDYTAKVWDYHSRNCVQTLEGHENNVTAICAHPELPIIITASEDSTVKIWDAVTYRLQTTLNFGLKRVWSIGYKKGSSQLAFGCDQGFLIVKISEGRPQ

SEQ ID NO: 53446 - DNA, 1142 bp, Glycine max
  misc_feature (1)..(1142): Ceres Seq. ID no. 14304090
gttctctctgtagcacggaacagaggatcgaaaataatcagccgcatcacacaccgtttccaccacgatccaattatggaggttgagattgatggctctgttactgtcgaaacagtaggaaatactgctatgggtgaggtcagtagcatagctgatgacaacagagaaggtggaagttctgttgaaccaaatgacaaacaagatcaacatgataacatgactcaagattcctctggagggatcactatcccaactgcaattcccacagtatcagttgtttcagttgaagagccctatgtgggtcaggagtttgggtcagaagcagcagcacatgcattttataatgcttatgctacagatgttggattcattgtacgtgtgagtaaactctcgcggtcaaggcgtgatggaactgctattggacgcactcttgtttgcaacaaagagggtttcagaatggctgacaaacgtgaaaagattgtgaggcaaagggctgagaccagggttggttgcagggcaatgattatggtgaggaaacttagttctggcaaatgggttattgcaaagtttgtaaaggaacacacacatccgttgactcctggcaaaggtagaagggatttctactatgaacaatatccgactgaacaagataaaattcgggaactatctcagcagttggcaactgagaaaaagcgatctgcggcctataaaaggcatcttgaattgatatttgagcaaattgaagagcagaacgagaacctttcaaagaaaatacagcacatagtagacagtgtgaaggagatggaagccaaagaagaacatagtagacagtgggaaggagatggaagccaaagaagaacatattagacagtgtgaaggagatggaaaccaaagaacaacagtgtagactctgatagattcaactttgaacgcgatacttttagttggtagaagaaactagttcagtcaaatgtagaggtcctttgagtccactattgtcaagttgtgccaacaatgtaataactcataacagacattcaaacgccctgatagagtttcattcttccatcatttttctagtatttcctttgtgtatagaatgagactgctgttgagaatgctgtggctgaatattctccatc

SEQ ID NO: 53447 - protein, 288 aa, Glycine max
  peptide (1)..(288): Ceres Seq. ID no. 14304091
VLSVARNRGSKIISRITHRFHHDPIMEVEIDGSVTVETVGNTAMGEVSSIADDNREGGSSVEPNDKQDQHDNMTQDSSGGITIPTAIPTVSVVSVEEPYVGQEFGSEAAAHAFYNAYATDVGFIVRVSKLSRSRRDGTAIGRTLVCNKEGFRMADKREKIVRQRAETRVGCRAMIMVRKLSSGKWVIAKFVKEHTHPLTPGKGRRDFYYEQYPTEQDKIRELSQQLATEKKRSAAYKRHLELIFEQIEEQNENLSKKIQHIVDSVKEMEAKEEHSRQWEGDGSQRRTY

SEQ ID NO: 53448 - protein, 263 aa, Glycine max
  peptide (1)..(263): Ceres Seq. ID no. 14304092
MEVEIDGSVTVETVGNTAMGEVSSIADDNREGGSSVEPNDKQDQHDNMTQDSSGGITIPTAIPTVSVVSVEEPYVGQEFGSEAAAHAFYNAYATDVGFIVRVSKLSRSRRDGTAIGRTLVCNKEGFRMADKREKIVRQRAETRVGCRAMIMVRKLSSGKWVIAKFVKEHTHPLTPGKGRRDFYYEQYPTEQDKIRELSQQLATEKKRSAAYKRHLELIFEQIEEQNENLSKKIQHIVDSVKEMEAKEEHSRQWEGDGSQRRTY

SEQ ID NO: 53449 - protein, 245 aa, Glycine max
  peptide (1)..(245): Ceres Seq. ID no. 14304093
MGEVSSIADDNREGGSSVEPNDKQDQHDNMTQDSSGGITIPTAIPTVSVVSVEEPYVGQEFGSEAAAHAFYNAYATDVGFIVRVSKLSRSRRDGTAIGRTLVCNKEGFRMADKREKIVRQRAETRVGCRAMIMVRKLSSGKWVIAKFVKEHTHPLTPGKGRRDFYYEQYPTEQDKIRELSQQLATEKKRSAAYKRHLELIFEQIEEQNENLSKKIQHIVDSVKEMEAKEEHSRQWEGDGSQRRTY

SEQ ID NO: 53450 - DNA, 952 bp, Glycine max
  misc_feature (1)..(952): Ceres Seq. ID no. 14306634
aaacagtgcaaattaacaatcgttgttacaactttgcaacacaaacgtatttggaatttggggctaggttcatatatcggttgctacttaattcattatctatggccagtgaggcagcaggtattacaagacgggatggaacaagaacaacctcagcagcagcagcagcagcagcggtggttgaagagatcgtacctaattcgggatggacagacgaccattcgagccattttcttcttgtggatcttcctgaatttaggaaggaggaggtgacccttcaagttgatggctccgatggccgtataattgtgaaaggcgaaaggcaaacaaatgaacagaaacgtattcactttgagctggcctttccattgccaccagattcagatgtggataatatatccggaaactttgacagtgaaatccttcacgtgcatgtccccaagcgagcttcacatcaagaacacagagaaagtggtcatgagatagagagagcttcaaataatggcagtgttggaaggccacaagaaattgtaagtgaggaacacgaagttgttaatgaggggagggatcatggtcatttatcaacacgaggaagatagagataagaaggaagaaagaagaaatgaaaatgcacagtacatggataatggttattctaaaaaattaacaaggaagttggagcaaaaacgcgacatgtcaagagctctagtggaggttttgatgagaaacaagggagttgttacaactgctgttgtggccttttcgtttgggttgtatgtatctaataagttccattcatggaatgaaccataagtggagtcccttcatgacatgcatccatgaataacatgcataccatactgcttttatttctcatgcttgagtatatagatacaatcaataatgtatgtaccatgctgatgttataagcaatgcaataacatgtcgacgc

SEQ ID NO: 53451 - protein, 198 aa, Glycine max
  peptide (1)..(198): Ceres Seq. ID no. 14306635
TVQINNRCYNFATQTYLEFGARFIYRLLLNSLSMASEAAGITRRDGTRTTSAAAAAAAVVEEIVPNSGWTDDHSSHFLLVDLPEFRKEEVTLQVDGSDGRIIVKGERQTNEQKRIHFELAFPLPPDSDVDNISGNFDSEILHVHVPKRASHQEHRESGHEIERASNNGSVGRPQEIVSEEHEVVNEGRDHGHLSTRGR

SEQ ID NO: 53452 - protein, 165 aa, Glycine max
  peptide (1)..(165): Ceres Seq. ID no. 14306636
MASEAAGITRRDGTRTTSAAAAAAAVVEEIVPNSGWTDDHSSHFLLVDLPEFRKEEVTLQVDGSDGRIIVKGERQTNEQKRIHFELAFPLPPDSDVDNISGNFDSEILHVHVPKRASHQEHRESGHEIERASNNGSVGRPQEIVSEEHEVVNEGRDHGHLSTRGR

SEQ ID NO: 53453 - DNA, 1281 bp, Glycine max
  misc_feature (1)..(1281): Ceres Seq. ID no. 14304170
ataataatcacttggaaacaaccgcgctaaggttggaacttggaggaacttgtgtctgtgtgtccttttttccagagtcatggctatggctttgagtctctcccaattccctgttcgtgggtctgtttctttgcccaaaagaagactacccagaagaagcttttgcattaggggcatgtcagaaacctcttccacttcttctgtgagcacccaacaagaacaaccaacttctgataatgcttcttcagtgacaattgctcctccccctaacttcaagccccctgagcctaaacgctttgcaattaggcctgataagaccagtgaagtgtttggagctttgcttcctttgatctttcgttttgccactggagttttcgtttctgggtattctttttcaattgtttctaaggatgaaattcctacagacgaatatgctttggaacttaatggcgttaccataaaagaaacagcaaaattaggccctcgcccagagaagcctattgaaatatatgaatttgagagctgtccattttgccgaaaggttagagaaattgttgccattttggatcttgatgttcttttctatccttgtccaagaaatggcccaaatttccgtcaaaaggttctagagatgggtggcaaactgcagttcccctacatggttgacccaaacacaggcgcttcaatgtatgaatcagatgacataattcggtatttggttgacaaatatggcgatggaaacgttcctttatctttatcacttggatttttaacgacactaacggctggtcttggtatgcttagtcgtatttcaaaggggactacttatactccagcgaagttccctccaaagcctcttaaattatgggcatatgaggggtctcctttctgcaaacttgtacgtgaagtacttgtggaattggagctgccacacttgcttgtcagttgtgctaggggtagcccaaagagacatatactttatcagaaaactggaactttccaggcaccttttttggaagatccaaacactgggatagaaatgtttgaaagtgcagaaatcatagagtatctaagagcaacatacgctctttagtaagtgatgctatgatagggagaggcttgtaagggtttttaagtctcatgatatgcaccttcatttccttttgtaaatgtaattgctaatggttctaagttctaacgggtaaatcaaattttctctatatagaaatttcaaatagtggaatcaagtgcctcaatatttagcaatggtttgaggtggtt

SEQ ID NO: 53454 - protein, 337 aa, Glycine max
  peptide (1)..(337): Ceres Seq. ID no. 14304171
MAMALSLSQFPVRGSVSLPKRRLPRRSFCIRGMSETSSTSSVSTQQEQPTSDNASSVTIAPPPNFKPPEPKRFAIRPDKTSEVFGALLPLIFRFATGVFVSGYSFSIVSKDEIPTDEYALELNGVTIKETAKLGPRPEKPIEIYEFESCPFCRKVREIVAILDLDVLFYPCPRNGPNFRQKVLEMGGKLQFPYMVDPNTGASMYESDDIIRYLVDKYGDGNVPLSLSLGFLTTLTAGLGMLSRISKGTTYTPAKFPPKPLKLWAYEGSPFCKLVREVLVELELPHLLVSCARGSPKRHILYQKTGTFQAPFLEDPNTGIEMFESAEIIEYLRATYAL

SEQ ID NO: 53455 - protein, 335 aa, Glycine max
  peptide (1)..(335): Ceres Seq. ID no. 14304172
MALSLSQFPVRGSVSLPKRRLPRRSFCIRGMSETSSTSSVSTQQEQPTSDNASSVTIAPPPNFKPPEPKRFAIRPDKTSEVFGALLPLIFRFATGVFVSGYSFSIVSKDEIPTDEYALELNGVTIKETAKLGPRPEKPIEIYEFESCPFCRKVREIVAILDLDVLFYPCPRNGPNFRQKVLEMGGKLQFPYMVDPNTGASMYESDDIIRYLVDKYGDGNVPLSLSLGFLTTLTAGLGMLSRISKGTTYTPAKFPPKPLKLWAYEGSPFCKLVREVLVELELPHLLVSCARGSPKRHILYQKTGTFQAPFLEDPNTGIEMFESAEIIEYLRATYAL

SEQ ID NO: 53456 - protein, 305 aa, Glycine max
  peptide (1)..(305): Ceres Seq. ID no. 14304173
MSETSSTSSVSTQQEQPTSDNASSVTIAPPPNFKPPEPKRFAIRPDKTSEVFGALLPLIFRFATGVFVSGYSFSIVSKDEIPTDEYALELNGVTIKETAKLGPRPEKPIEIYEFESCPFCRKVREIVAILDLDVLFYPCPRNGPNFRQKVLEMGGKLQFPYMVDPNTGASMYESDDIIRYLVDKYGDGNVPLSLSLGFLTTLTAGLGMLSRISKGTTYTPAKFPPKPLKLWAYEGSPFCKLVREVLVELELPHLLVSCARGSPKRHILYQKTGTFQAPFLEDPNTGIEMFESAEIIEYLRATYAL

SEQ ID NO: 53457 - DNA, 1395 bp, Glycine max
  misc_feature (1)..(1395): Ceres Seq. ID no. 15170403
aagtttgaagcggcgccaccatagttggtgtagctagcgagggagggatatagggggaagcgtttattcattcattaagatggcatcggagcttcaattgcccccaggcttcagattccatccaacggaccaggagctggtgttgcactatctctgccgtaaatgcgcatcgcagcctatcgccgttcccatcatcgccgaaatcgacctctacaaatacgacccctgggacctacccggattggcttcctacggagagaaagagtggtacttcttttcaccacgggaccggaaatacccgaacggttccaggccgaaccgggcggcgggaaccggttactggaaggcaaccggggcggataagcccattggccaccccaaaccggttgggataaaaaaagctttggtgttttacgcagggaaagctccgaaaggggacaagagcaattggatcatgcacgagtatcgtctcgccgatgtagatcgctccgttcgcaaaaagaacagcctaaggttagatgattgggtgctttgccgtatttacaacaagaagggcacgatcgagaagttccaaccaagcagcgatgttgttgttagccgaaaaatggaatcatcggagatcgaagacaggaagccggagattctgaaaagcggaggaggttgtcttctgccgccggttccgccgccgcaagcgaaggcggcggtgaagaaggattacatgtacttcgacccgtcggattcaatcccgaagctgcacacggactcgagctgttcggagcacgtggtatcgccggaattcgcgagcgaggtgcagagcgagccaaagtggaaggagtgggagaaaagcctcgagtttccgtttaattacgtggatgccactctgaacaacagcaacagcttcacgacgcaattccagggcaataatcagatgatgtcgccgctgcaggacatgttcatgtactggcccaacaagcccttctgaacaaaccgatccacgccgcccattcgcatttgcacggtagcacgagactcaaggtctatgagtgtgcctgtgcgaccacacacagacgattatttatcaagttagcttagctagggcaaagaaagataaaaacattgaagctggaaacgcatgtgtttgttgggtccaccgtctgcaccggttctttttggtgttttgctatgtgacgacgacgacgacgatgacgatccaacggtgcatgtttgttgacctgtccctagtagtagtagcatgtgtacagctattgtatgtagaatgtagataggtacactactacacgttgttgtcatgtgatcatagaagctctcttaccgggaaaaataaaaattgatagaaggatggaaggtgtatttggaccttccctaattaatatt

SEQ ID NO: 53458 - protein, 300 aa, Glycine max
  peptide (1)..(300): Ceres Seq. ID no. 15170404
MASELQLPPGFRFHPTDQELVLHYLCRKCASQPIAVPIIAEIDLYKYDPWDLPGLASYGEKEWYFFSPRDRKYPNGSRPNRAAGTGYWKATGADKPIGHPKPVGIKKALVFYAGKAPKGDKSNWIMHEYRLADVDRSVRKKNSLRLDDWVLCRIYNKKGTIEKFQPSSDVVVSRKMESSEIEDRKPEILKSGGGCLLPPVPPPQAKAAVKKDYMYFDPSDSIPKLHTDSSCSEHVVSPEFASEVQSEPKWKEWEKSLEFPFNYVDATLNNSNSFTTQFQGNNQMMSPLQDMFMYWPNKPF

SEQ ID NO: 53459 - protein, 175 aa, Glycine max
  peptide (1)..(175): Ceres Seq. ID no. 15170405
MHEYRLADVDRSVRKKNSLRLDDWVLCRIYNKKGTIEKFQPSSDVVVSRKMESSEIEDRKPEILKSGGGCLLPPVPPPQAKAAVKKDYMYFDPSDSIPKLHTDSSCSEHVVSPEFASEVQSEPKWKEWEKSLEFPFNYVDATLNNSNSFTTQFQGNNQMMSPLQDMFMYWPNKPF

SEQ ID NO: 53460 - DNA, 1216 bp, Glycine max
  misc_feature (1)..(1216): Ceres Seq. ID no. 15174595
ttctccctcttgcttctttcaacaacttagcattgtattgtcttcaaactttgcttcttccatactttcttctttttccttagccatcattgattgttgcctttcttggctttaaaatggagttcgaggaccgcttcagacaccaggctcagagaccaaaatatgactgccttctttttgatttagatgacactttgtatcccctcaaatctggtcttgcaaaatcatgtctccaaaatattaaagactacatggttgagaagcttggcatacaccctagcaaaattgatgacttgtccaacctcctttacaagaattatggaacaactatggctggtctaagggcaattggatatgactttgactatgatgaatatcacagttttgttcatggaagattaccttatgagaacctaaaaccagaccaagttctgaggaacctgttgctgagcctaccctatagaaaacttatcttcacaaacgcagacaaagttcacgcggcgaaggcgcttaacaggcttggattagaagactgctttgaaggaatcatatgctttgagacccttaatcccatccacaagagcattgtttctgatgatgaagatgacattgagtttgtaggttcaagaaccaccaatccaaccaccacttgtaatggttcaggcacctctcaaatctttgacatcatagggcattttgctcagctcaatcccagtgcagtcttgccaaagacaccaattgtttgcaagccatcagaaaatgccattgaactggccctcaatatagccaatcttaacccacagagaactttgttcttcgaggacagtacccgcaacatacaagctggaaaacgtgtggggcttcacactgtgctggttggtacatcacaaagatgtaaaggtgcagattatgctttggaaagcattcacaaccttagggaggctgtgcctgaactatgggaggctgatataaaatcagaagctgcataccctggaaagctagctgtggagacatcagtcacagcttgagattattattatgtgcatgaaattaattaagccccttcaatattgttcatttaatcaaaattgaaaacccgaccaccaacaaaaaaaaaagagagagagagaagaagcccacgggaattcccccaacttcagatgatgtagttgtagttgatgtagatgctttgtaagttgcaataaattagtcattc

SEQ ID NO: 53461 - protein, 303 aa, Glycine max
  peptide (1)..(303): Ceres Seq. ID no. 15174596
MEFEDRFRHQAQRPKYDCLLFDLDDTLYPLKSGLAKSCLQNIKDYMVEKLGIHPSKIDDLSNLLYKNYGTTMAGLRAIGYDFDYDEYHSFVHGRLPYENLKPDQVLRNLLLSLPYRKLIFTNADKVHAAKALNRLGLEDCFEGIICFETLNPIHKSIVSDDEDDIEFVGSRTTNPTTTCNGSGTSQIFDIIGHFAQLNPSAVLPKTPIVCKPSENAIELALNIANLNPQRTLFFEDSTRNIQAGKRVGLHTVLVGTSQRCKGADYALESIHNLREAVPELWEADIKSEAAYPGKLAVETSVTA

SEQ ID NO: 53462 - protein, 258 aa, Glycine max
  peptide (1)..(258): Ceres Seq. ID no. 15174597
MVEKLGIHPSKIDDLSNLLYKNYGTTMAGLRAIGYDFDYDEYHSFVHGRLPYENLKPDQVLRNLLLSLPYRKLIFTNADKVHAAKALNRLGLEDCFEGIICFETLNPIHKSIVSDDEDDIEFVGSRTTNPTTTCNGSGTSQIFDIIGHFAQLNPSAVLPKTPIVCKPSENAIELALNIANLNPQRTLFFEDSTRNIQAGKRVGLHTVLVGTSQRCKGADYALESIHNLREAVPELWEADIKSEAAYPGKLAVETSVTA

SEQ ID NO: 53463 - protein, 232 aa, Glycine max
  peptide (1)..(232): Ceres Seq. ID no. 15174598
MAGLRAIGYDFDYDEYHSFVHGRLPYENLKPDQVLRNLLLSLPYRKLIFTNADKVHAAKALNRLGLEDCFEGIICFETLNPIHKSIVSDDEDDIEFVGSRTTNPTTTCNGSGTSQIFDIIGHFAQLNPSAVLPKTPIVCKPSENAIELALNIANLNPQRTLFFEDSTRNIQAGKRVGLHTVLVGTSQRCKGADYALESIHNLREAVPELWEADIKSEAAYPGKLAVETSVTA

SEQ ID NO: 53464 - DNA, 1546 bp, Glycine max
  misc_feature (1)..(1546): Ceres Seq. ID no. 14303850
acaaaaacctaaactcactcagtcctacgatacgattctcttccgcctcccttcccttcaactccacggcgcagatccgaggagtttgggaaaccctaattcattcctctttgcttcttctatctctattcctctaacaccagtgatggcaggtttggctccagaaggatcgcagtttgatgctcggcaatatgattctaagatgaatgaattgctttccgccgatggacaagaatttttcacttcatatgacgaagtctatgatagttttgatgcaatgggccttcaagaaaatcttctgagaggcatatatgcttatggttttgagaggccttctgcaatccagcagaggggaattgttcctttctgcaagggtctggatgtgattcagcaggctcagtctggaactggaaagacagcaacgttctgttcaggaattttgcagcagcttgactatggattggttcagtgtcaggctttggttttggcaccaacaagggagcttgcacagcagattgagaaggttatgcgagctctaggtgattaccttggtgtcaaggttcatgcttgtgttggtgggaccagtgttcgtgaggatcagcgcattctccaagctggtgtccatactgttgttggcactcctgggcgtgtatttgacatgctacggagacagtctcttcgtccagatcacataaagatgtttgttttggatgaggctgatgaaatgctttctcgtggtttcaaggaccagatctatgacatcttccagcttctgccgggtcaaattcaggttggagtgttctctgctacaatgccacctgaggccttggagattacgaggaagttcatgaataagccagtgagaatcctggtaaagcgtgatgaattgacccttgagggtatcaaacagttttatgtgaatgttgataaggaagactggaaactagagacattatgtgacctttatgagactttggctatcacccagagtgtcatctttgtgaacacaaggcgtaaggtggactggctcactgacaagatgcgaagcaatgaccatacagtctcagccacccatggagacatggaccaaaacactcgtgacatcatcatgcgggaatttcgctctggctcttctcgagttctaattaccactgacctcttggctcgtggtatagatgtacagcaggtgtctttggttataaactatgatctgccaacccaacctgaaaattatcttcatcgcataggacgaagtgggcgttttggaagaaaaggtgttgccataaactttgtgactttggatgatgcaagaatgctgtctgatattcaaaagttctacaatgtgactgtagaggagttgccatcaaatgttgctgatctgctctgatgggttaattttcattctttgttaagtcatcagagggctattactttttgccaattattattttgtgctctttgtttttctttttcaaattttagcattagagttccaatacacctgactttatttttataatggattctataaaatttgtttatttgc

SEQ ID NO: 53465 - protein, 461 aa, Glycine max
  peptide (1)..(461): Ceres Seq. ID no. 14303851
QKPKLTQSYDTILFRLPSLQLHGADPRSLGNPNSFLFASSISIPLTPVMAGLAPEGSQFDARQYDSKMNELLSADGQEFFTSYDEVYDSFDAMGLQENLLRGIYAYGFERPSAIQQRGIVPFCKGLDVIQQAQSGTGKTATFCSGILQQLDYGLVQCQALVLAPTRELAQQIEKVMRALGDYLGVKVHACVGGTSVREDQRILQAGVHTVVGTPGRVFDMLRRQSLRPDHIKMFVLDEADEMLSRGFKDQIYDIFQLLPGQIQVGVFSATMPPEALEITRKFMNKPVRILVKRDELTLEGIKQFYVNVDKEDWKLETLCDLYETLAITQSVIFVNTRRKVDWLTDKMRSNDHTVSATHGDMDQNTRDIIMREFRSGSSRVLITTDLLARGIDVQQVSLVINYDLPTQPENYLHRIGRSGRFGRKGVAINFVTLDDARMLSDIQKFYNVTVEELPSNVADLL

SEQ ID NO: 53466 - protein, 413 aa, Glycine max
  peptide (1)..(413): Ceres Seq. ID no. 14303852
MAGLAPEGSQFDARQYDSKMNELLSADGQEFFTSYDEVYDSFDAMGLQENLLRGIYAYGFERPSAIQQRGIVPFCKGLDVIQQAQSGTGKTATFCSGILQQLDYGLVQCQALVLAPTRELAQQIEKVMRALGDYLGVKVHACVGGTSVREDQRILQAGVHTVVGTPGRVFDMLRRQSLRPDHIKMFVLDEADEMLSRGFKDQIYDIFQLLPGQIQVGVFSATMPPEALEITRKFMNKPVRILVKRDELTLEGIKQFYVNVDKEDWKLETLCDLYETLAITQSVIFVNTRRKVDWLTDKMRSNDHTVSATHGDMDQNTRDIIMREFRSGSSRVLITTDLLARGIDVQQVSLVINYDLPTQPENYLHRIGRSGRFGRKGVAINFVTLDDARMLSDIQKFYNVTVEELPSNVADLL

SEQ ID NO: 53467 - protein, 394 aa, Glycine max
  peptide (1)..(394): Ceres Seq. ID no. 14303853
MNELLSADGQEFFTSYDEVYDSFDAMGLQENLLRGIYAYGFERPSAIQQRGIVPFCKGLDVIQQAQSGTGKTATFCSGILQQLDYGLVQCQALVLAPTRELAQQIEKVMRALGDYLGVKVHACVGGTSVREDQRILQAGVHTVVGTPGRVFDMLRRQSLRPDHIKMFVLDEADEMLSRGFKDQIYDIFQLLPGQIQVGVFSATMPPEALEITRKFMNKPVRILVKRDELTLEGIKQFYVNVDKEDWKLETLCDLYETLAITQSVIFVNTRRKVDWLTDKMRSNDHTVSATHGDMDQNTRDIIMREFRSGSSRVLITTDLLARGIDVQQVSLVINYDLPTQPENYLHRIGRSGRFGRKGVAINFVTLDDARMLSDIQKFYNVTVEELPSNVADLL

SEQ ID NO: 53468 - DNA, 1223 bp, Glycine max
  misc_feature (1)..(1223): Ceres Seq. ID no. 15176383
tctttgcagtttgcacacatggctctgtcgtcgccacttcagaacctctctgcactgatctctgccagcggcaatgccacaacagctacagcacggcctccgagagggcggccctgggcggttcacgcggcgtcgtcggacactaccaccgccgcgcaagcgcagttgggtaggtacgaagaagggaagctggagcgacccaagtgggttggggagacccctctttcacgtctcgttcaagctctcatctccttcaagcccttgttctctgtcctcaagcttggtgctagaagggctttgataagtacagctgagaagaacaatataccttggaggaaaatggcacaagagattttagagtcagaagtgtatagggagctggagagcattcaaaaccagtctttagtgtatcctgattattatttgaatccatttcatgcatatgaagagggaaatcttacatggctggcagcagcagaagcagaggctgctacaatgtcaatggccagacgagcacttcctgatgcttcttcaatacaggaagcaaatcagatactgcgtggcaattggcttcatgcaattgaacaacaccatatgcagtattcagaatcatgtgtgatcgatgacattctagatattggatgctctgtaggtataagcacaagatatcttgcagacaagttccccacagccaaagtcaccggacttgatctgtcaccctattttctagctgtggctcagcataaggaaaagagagcaatgcctagaaaatttcctataaaatggatacatgcaaatggggaagacacaggcttgccttctaaatcgtttgatcttgtctctattgcttttgtgcttcatgaatgtcctacaagagttatagtgaatttggtaagagaggcattccgtctccttcggcccggtggcacactagctttgacagatttttcgctgaagtcaaaggtccttcaggaattgtctccggttctgtttacattggttaagagcacggaaccctttctggatgagtactacttgactgatatggatgaaacacttagggaagctggttttgtgaacataacatcaattcttacggaccccagacacgtgacaattacagcaacagtgcctcaatgaaacatcacatcttcttgagatattttatttgtcaagatgcttaaaaaggattttatttattcataatgcatggttgttcctac

SEQ ID NO: 53469 - protein, 379 aa, Glycine max
  peptide (1)..(379): Ceres Seq. ID no. 15176384
SLQFAHMALSSPLQNLSALISASGNATTATARPPRGRPWAVHAASSDTTTAAQAQLGRYEEGKLERPKWVGETPLSRLVQALISFKPLFSVLKLGARRALISTAEKNNIPWRKMAQEILESEVYRELESIQNQSLVYPDYYLNPFHAYEEGNLTWLAAAEAEAATMSMARRALPDASSIQEANQILRGNWLHAIEQHHMQYSESCVIDDILDIGCSVGISTRYLADKFPTAKVTGLDLSPYFLAVAQHKEKRAMPRKFPIKWIHANGEDTGLPSKSFDLVSIAFVLHECPTRVIVNLVREAFRLLRPGGTLALTDFSLKSKVLQELSPVLFTLVKSTEPFLDEYYLTDMDETLREAGFVNITSILTDPRHVTITATVPQ

SEQ ID NO: 53470 - protein, 373 aa, Glycine max
  peptide (1)..(373): Ceres Seq. ID no. 15176385
MALSSPLQNLSALISASGNATTATARPPRGRPWAVHAASSDTTTAAQAQLGRYEEGKLERPKWVGETPLSRLVQALISFKPLFSVLKLGARRALISTAEKNNIPWRKMAQEILESEVYRELESIQNQSLVYPDYYLNPFHAYEEGNLTWLAAAEAEAATMSMARRALPDASSIQEANQILRGNWLHAIEQHHMQYSESCVIDDILDIGCSVGISTRYLADKFPTAKVTGLDLSPYFLAVAQHKEKRAMPRKFPIKWIHANGEDTGLPSKSFDLVSIAFVLHECPTRVIVNLVREAFRLLRPGGTLALTDFSLKSKVLQELSPVLFTLVKSTEPFLDEYYLTDMDETLREAGFVNITSILTDPRHVTITATVPQ

SEQ ID NO: 53471 - protein, 266 aa, Glycine max
  peptide (1)..(266): Ceres Seq. ID no. 15176386
MAQEILESEVYRELESIQNQSLVYPDYYLNPFHAYEEGNLTWLAAAEAEAATMSMARRALPDASSIQEANQILRGNWLHAIEQHHMQYSESCVIDDILDIGCSVGISTRYLADKFPTAKVTGLDLSPYFLAVAQHKEKRAMPRKFPIKWIHANGEDTGLPSKSFDLVSIAFVLHECPTRVIVNLVREAFRLLRPGGTLALTDFSLKSKVLQELSPVLFTLVKSTEPFLDEYYLTDMDETLREAGFVNITSILTDPRHVTITATVPQ

SEQ ID NO: 53472 - DNA, 987 bp, Glycine max
  misc_feature (1)..(987): Ceres Seq. ID no. 14304569
gcgaaattctcccatctgcttctcactgatctccattcccattccatggcttccactgaatcatcccctttcaagaaaattcagattcaaagggatgacactacatttgacgcatatgtggttggaaaagaggatgctcctggaattgttgtgattcaggagtggtggggtgtggattacgaaattaagaaccatgccgtgaagatttctcagcttggtagtgggtttaaagctcttattccagatttatacagaggaaaggttggtctggatgttgctgaagctcagcatttgatggatggtcttgattggcaaggtgctgtgaaggatattgctgcttcggttaactggcttaaagcaaatggctcaaagaaggctggtgtaactggattttgtatgggaggtgctctctctattgccagttctgtcttggttcaagaggttgacgcttctgtagcattctatggagttcctgcttctcaacttgctgaccctgcacaagccaaggctcctgttcaggctcattttggagagctggacaattttgttggcttttcagatgttacagcggccaaggcattggaagagaagctgaaggcatccggaattccacatgaggtacatatctatcctggcaatgcacatgcattcatgaacaggtcaactgaaggaatccagaggaggaagaacatgggaatgcctgatgaagatgaagctgcagttcagcttgcttggtctcgctttgagacatggatgacccgttatctgtctagttagataatttcctagctagctcaattccgaagtcacatgctgcatgtgtattccaccttttaagtggttatattgaacccgttttaatggccccacaaactgtggagaccctgctgcttgctacacttcatttatttcctgaagtttggatgcatgtgtgaaatttgagttggaaataatattgaaatatttgtggcttttcttcaattaagt

SEQ ID NO: 53473 - protein, 258 aa, Glycine max
  peptide (1)..(258): Ceres Seq. ID no. 14304570
AKFSHLLLTDLHSHSMASTESSPFKKIQIQRDDTTFDAYVVGKEDAPGIVVIQEWWGVDYEIKNHAVKISQLGSGFKALIPDLYRGKVGLDVAEAQHLMDGLDWQGAVKDIAASVNWLKANGSKKAGVTGFCMGGALSIASSVLVQEVDASVAFYGVPASQLADPAQAKAPVQAHFGELDNFVGFSDVTAAKALEEKLKASGIPHEVHIYPGNAHAFMNRSTEGIQRRKNMGMPDEDEAAVQLAWSRFETWMTRYLSS

SEQ ID NO: 53474 - protein, 243 aa, Glycine max
  peptide (1)..(243): Ceres Seq. ID no. 14304571
MASTESSPFKKIQIQRDDTTFDAYVVGKEDAPGIVVIQEWWGVDYEIKNHAVKISQLGSGFKALIPDLYRGKVGLDVAEAQHLMDGLDWQGAVKDIAASVNWLKANGSKKAGVTGFCMGGALSIASSVLVQEVDASVAFYGVPASQLADPAQAKAPVQAHFGELDNFVGFSDVTAAKALEEKLKASGIPHEVHIYPGNAHAFMNRSTEGIQRRKNMGMPDEDEAAVQLAWSRFETWMTRYLSS

SEQ ID NO: 53475 - protein, 160 aa, Glycine max
  peptide (1)..(160): Ceres Seq. ID no. 14304572
MDGLDWQGAVKDIAASVNWLKANGSKKAGVTGFCMGGALSIASSVLVQEVDASVAFYGVPASQLADPAQAKAPVQAHFGELDNFVGFSDVTAAKALEEKLKASGIPHEVHIYPGNAHAFMNRSTEGIQRRKNMGMPDEDEAAVQLAWSRFETWMTRYLSS

SEQ ID NO: 53476 - DNA, 1988 bp, Glycine max
  misc_feature (1)..(1988): Ceres Seq. ID no. 15226393
tcagctacgtaggccccccccccatacatcttttggcatccaaatcatctgaaatggctagtgctgatgacatcagtggtaaactgaaaagcagttcagacttggttctgtccaaacaagatgaaaaagtagaaaaatctgataaaaatgggctttctgatattgagcagctggttcaagggaagaaattctctagagttgaatttgatcgtttagtggcggtactaaattcaagggtgatggacctttctaatgttgaacaaggaaaggaaattacaaatttgagttctaggaaagatgatgaggggcttgcgatgacacgtggacttccgaaagtttcaaatgagcaaaggcttgaagagtcaactggggccatatggggaacctcaacacctcttggtctgtcaaagggtcaggatgaaattggtgcttcaccaatagagattgctagagcatatatggattcccgtgcattagaagcaggtccctgttctaagaacatgattcatactgttgaaagcactatgttgcatggtgatgaagctgcaataaaaccatatgatccatcaccatcaaagaaatcgtcaacatgttggccgggtgctgtggtgcaggatgcttacataacgccacaaagtcagagaaacagatatggacttcataacttcccccgtactccttattccagaactcttttaacaaagtccaagtccaagttgattcatatgaaaggagatagcagccagatttcatcaactcccgtccgtcaatcacatactactatgtatccggaggataaatctaaagctggagcatcagaaagtggatatggatctgttggacctattcgtcgaactaggcataaggttggtgcacaattgtcttcaagaagagtggcttattcatctgtgtatggccctttacagagagaaagttctggtgttattgaaggtttcactcctgttsaaaagagaacggaacctgttgggacaagctgcactcataagccactaggccttgaggtgagtgttccaacagtacacatgcatagcagtttgatggctatgaagattttagaccatattgatagaaacattcccacacctaaagagaaatctgctgagctcaagctggcaaccaaatggaagaaccctgaatcttctattgatttcagtactatctggtcaaatgaagataatggcttgcttaaattaaatgatgttagccctcataaatatgatgggcttgaaggaaagaaatctactctatggaatgaaggtaaggggaagtgccatattgatatgcaacctaaggaggagagtactgataaatctatcgatgtcagaaaagtaggaaatcgggcatctgatgtgaatgctaatagcagcatccctagacttggtaacaatgcaagcactacgcaaaattttggtggtcctcacattttttctatgaagtcttctaaagaggatgctatgaagacaactctcctaagtggtggtcatcctttaggggtaaatcaagaacagaagcttctcactaaccctgctaccattaaaccagctttacctcctatttcgatcaagaagcctgaatcaagatggacgttagcaactgacactggttccggatttacctttcctgtttcagcatccacttctgtattctctgagccaccaactccatccatcacgcctttgctttctgcccgggatcagcaccaattaaaagaaggatctactgaactgtcatacagttttggtttgaaaaagtccagtccagcagtagttttttccttcccttctactagcaatactgctattgagaatgaagttggagacataaagtttaactttggttcaactaagaagccaaggatatcgttctcatttggaaaaaatgctgtctgctcttaaaaataaaatgacaacaatgttccaaacgctatccaactttgtttagttctgattattgtatttttagccttt

SEQ ID NO: 53477 - protein, 637 aa, Glycine max
  peptide (1)..(637): Ceres Seq. ID no. 15226394
  misc_feature (322)..(322): Xaa is any aa, unknown or other
SYVGPPPIHLLASKSSEMASADDISGKLKSSSDLVLSKQDEKVEKSDKNGLSDIEQLVQGKKFSRVEFDRLVAVLNSRVMDLSNVEQGKEITNLSSRKDDEGLAMTRGLPKVSNEQRLEESTGAIWGTSTPLGLSKGQDEIGASPIEIARAYMDSRALEAGPCSKNMIHTVESTMLHGDEAAIKPYDPSPSKKSSTCWPGAVVQDAYITPQSQRNRYGLHNFPRTPYSRTLLTKSKSKLIHMKGDSSQISSTPVRQSHTTMYPEDKSKAGASESGYGSVGPIRRTRHKVGAQLSSRRVAYSSVYGPLQRESSGVIEGFTPVXKRTEPVGTSCTHKPLGLEVSVPTVHMHSSLMAMKILDHIDRNIPTPKEKSAELKLATKWKNPESSIDFSTIWSNEDNGLLKLNDVSPHKYDGLEGKKSTLWNEGKGKCHIDMQPKEESTDKSIDVRKVGNRASDVNANSSIPRLGNNASTTQNFGGPHIFSMKSSKEDAMKTTLLSGGHPLGVNQEQKLLTNPATIKPALPPISIKKPESRWTLATDTGSGFTFPVSASTSVFSEPPTPSITPLLSARDQHQLKEGSTELSYSFGLKKSSPAVVFSFPSTSNTAIENEVGDIKFNFGSTKKPRISFSFGKNAVCS

SEQ ID NO: 53478 - protein, 620 aa, Glycine max
  peptide (1)..(620): Ceres Seq. ID no. 15226395
  misc_feature (305)..(305): Xaa is any aa, unknown or other
MASADDISGKLKSSSDLVLSKQDEKVEKSDKNGLSDIEQLVQGKKFSRVEFDRLVAVLNSRVMDLSNVEQGKEITNLSSRKDDEGLAMTRGLPKVSNEQRLEESTGAIWGTSTPLGLSKGQDEIGASPIEIARAYMDSRALEAGPCSKNMIHTVESTMLHGDEAAIKPYDPSPSKKSSTCWPGAVVQDAYITPQSQRNRYGLHNFPRTPYSRTLLTKSKSKLIHMKGDSSQISSTPVRQSHTTMYPEDKSKAGASESGYGSVGPIRRTRHKVGAQLSSRRVAYSSVYGPLQRESSGVIEGFTPVXKRTEPVGTSCTHKPLGLEVSVPTVHMHSSLMAMKILDHIDRNIPTPKEKSAELKLATKWKNPESSIDFSTIWSNEDNGLLKLNDVSPHKYDGLEGKKSTLWNEGKGKCHIDMQPKEESTDKSIDVRKVGNRASDVNANSSIPRLGNNASTTQNFGGPHIFSMKSSKEDAMKTTLLSGGHPLGVNQEQKLLTNPATIKPALPPISIKKPESRWTLATDTGSGFTFPVSASTSVFSEPPTPSITPLLSARDQHQLKEGSTELSYSFGLKKSSPAVVFSFPSTSNTAIENEVGDIKFNFGSTKKPRISFSFGKNAVCS

SEQ ID NO: 53479 - protein, 558 aa, Glycine max
  peptide (1)..(558): Ceres Seq. ID no. 15226396
  misc_feature (243)..(243): Xaa is any aa, unknown or other
MDLSNVEQGKEITNLSSRKDDEGLAMTRGLPKVSNEQRLEESTGAIWGTSTPLGLSKGQDEIGASPIEIARAYMDSRALEAGPCSKNMIHTVESTMLHGDEAAIKPYDPSPSKKSSTCWPGAVVQDAYITPQSQRNRYGLHNFPRTPYSRTLLTKSKSKLIHMKGDSSQISSTPVRQSHTTMYPEDKSKAGASESGYGSVGPIRRTRHKVGAQLSSRRVAYSSVYGPLQRESSGVIEGFTPVXKRTEPVGTSCTHKPLGLEVSVPTVHMHSSLMAMKILDHIDRNIPTPKEKSAELKLATKWKNPESSIDFSTIWSNEDNGLLKLNDVSPHKYDGLEGKKSTLWNEGKGKCHIDMQPKEESTDKSIDVRKVGNRASDVNANSSIPRLGNNASTTQNFGGPHIFSMKSSKEDAMKTTLLSGGHPLGVNQEQKLLTNPATIKPALPPISIKKPESRWTLATDTGSGFTFPVSASTSVFSEPPTPSITPLLSARDQHQLKEGSTELSYSFGLKKSSPAVVFSFPSTSNTAIENEVGDIKFNFGSTKKPRISFSFGKNAVCS

SEQ ID NO: 53480 - DNA, 1249 bp, Glycine max
  misc_feature (1)..(1249): Ceres Seq. ID no. 14310896
gaaggaagaagagaaggagaatgacggaaagttgcatccgatccgtcgtagaagccattcactcctctcctttccaagccgttctccatctcgccggtggagcttctcaggtggtgggttcgttgctatcagttcccggtgcttcgaatactgtgctcgaagttgtggttccttactctaagatgtctctcattcagttactcggaaagattccatcccaattttgtggccaacagactgctgaagatatggctttattggcgtataatcgcgctcttaagctctccaagccaggatccccggctgttggagtgggtttcactggttctttggccagcagtcgtccaaaactcggggaacacagattttatatgtcaacaaggacagccgaccaactttggatatcaagtgtgaccttgactaaggggcttcgtactcgagaagaagaggatagagtttctagtcatcttttgatcaaggcaattggaaatgcatgcaaagttcccggagcatctgttttgttgttgagtgagtcagatgtatctgatgaatgtgaaacacaattcaatgaagatcaacagttagaacaacttataaatggacaaatatgctttaaaatttacccatttgaaaatgagatatcagccgaaaggaaaataataatgcctggttctttcaatccattacatgatgggcatctgaagcttatggatgttgctactcgcatttgtggtgatgggtatccttgctttgaaatatcggcagtcaatgcagacaaacctccattatcagtgtctcagatcaaagatcgcatcaagcaatttgaaaaagttggaaagacggtaattatatccaatcagccttatttttataagaaggctgaacttttcccaggcagtgcttttgtaattggggccgacacggcagtgaggcttattaaccctgaatactacgatggtgactacaacaagatgctgaagatacttgttggttgtaaagaaacaggatgcactttccttgtgggtggtcggaatgttgatggtgctttcaaggttcttgacgatattgatgttccaaaagaactaaaagacatgttcgtctccattccagctgaacagttccgcatggatatatcctccactgaaataagaaatagaagtgggatgtaaataatttcatggctaaaggtcaatgtttaatctaggatgaaatcactaacacttaaaaaaaaaagggtttatattttttg

SEQ ID NO: 53481 - protein, 388 aa, Glycine max
  peptide (1)..(388): Ceres Seq. ID no. 14310897
RKKRRRMTESCIRSVVEAIHSSPFQAVLHLAGGASQVVGSLLSVPGASNTVLEVVVPYSKMSLIQLLGKIPSQFCGQQTAEDMALLAYNRALKLSKPGSPAVGVGFTGSLASSRPKLGEHRFYMSTRTADQLWISSVTLTKGLRTREEEDRVSSHLLIKAIGNACKVPGASVLLLSESDVSDECETQFNEDQQLEQLINGQICFKIYPFENEISAERKIIMPGSFNPLHDGHLKLMDVATRICGDGYPCFEISAVNADKPPLSVSQIKDRIKQFEKVGKTVIISNQPYFYKKAELFPGSAFVIGADTAVRLINPEYYDGDYNKMLKILVGCKETGCTFLVGGRNVDGAFKVLDDIDVPKELKDMFVSIPAEQFRMDISSTEIRNRSGM

SEQ ID NO: 53482 - protein, 382 aa, Glycine max
  peptide (1)..(382): Ceres Seq. ID no. 14310898
MTESCIRSVVEAIHSSPFQAVLHLAGGASQVVGSLLSVPGASNTVLEVVVPYSKMSLIQLLGKIPSQFCGQQTAEDMALLAYNRALKLSKPGSPAVGVGFTGSLASSRPKLGEHRFYMSTRTADQLWISSVTLTKGLRTREEEDRVSSHLLIKAIGNACKVPGASVLLLSESDVSDECETQFNEDQQLEQLINGQICFKIYPFENEISAERKIIMPGSFNPLHDGHLKLMDVATRICGDGYPCFEISAVNADKPPLSVSQIKDRIKQFEKVGKTVIISNQPYFYKKAELFPGSAFVIGADTAVRLINPEYYDGDYNKMLKILVGCKETGCTFLVGGRNVDGAFKVLDDIDVPKELKDMFVSIPAEQFRMDISSTEIRNRSGM

SEQ ID NO: 53483 - protein, 328 aa, Glycine max
  peptide (1)..(328): Ceres Seq. ID no. 14310899
MSLIQLLGKIPSQFCGQQTAEDMALLAYNRALKLSKPGSPAVGVGFTGSLASSRPKLGEHRFYMSTRTADQLWISSVTLTKGLRTREEEDRVSSHLLIKAIGNACKVPGASVLLLSESDVSDECETQFNEDQQLEQLINGQICFKIYPFENEISAERKIIMPGSFNPLHDGHLKLMDVATRICGDGYPCFEISAVNADKPPLSVSQIKDRIKQFEKVGKTVIISNQPYFYKKAELFPGSAFVIGADTAVRLINPEYYDGDYNKMLKILVGCKETGCTFLVGGRNVDGAFKVLDDIDVPKELKDMFVSIPAEQFRMDISSTEIRNRSGM

SEQ ID NO: 53484 - DNA, 1433 bp, Glycine max
  misc_feature (1)..(1433): Ceres Seq. ID no. 14311059
acacagtagttacttcaaagtctaatgatagagttcagaagagagctagttctgttgaagaacctgacagactaggtaaacgacggaaaggggatgtggagctaagagattttgaaactgaactcagattctctgaaagagagaagatgatggatcctcgatttgctgatgacaaattgggaccagaggaacatggtctgtacagggcaagtgataagccattggaaaggacaaaagacaaaggcaacgaaagatatgaaagggatcacagggaaagaatggaccgtctggataagtctcgtggtgatgactttgttgcagaaaaacctagggataggtcaattgaaagatatggaagagaacgatctgttgagagaatgcaagagaggggtagtgataggagttttaatagactccctgagaaagccaaggatgaaagaaacaaggatgatagaaataaattacgatacaatgatgcatcagcagaaaaatctcatggtgatgatcgcttccatgggcaaagcttgcctccacctccccctttacctcctaatgtggttcctcaatctgtaggagctggtaggcgtgatgaagatgttgatagaaggtatggagctacaaggcactctcaaagactttctccaaggcatgaagaaaaagaacggagatggtctgaagagactgtggtttctcaggatgatgccaaacgccgaaaagaagacgattttcgagatcgaaaacgtgaggaaattaaggtggaagagagggagcgggaaagagagaaagcaaacattctaaaggaagagttggacttaaatgccgcatccaagagacgtaaactcaagagggagcatttaccaactgatgaacctggcgagtactctgcagtggcccatccaccttcttccgctggtactggcatgccgctggcatatgatggaagggacagaggagacagaaagggacccatcatgcagcatccaagttacatagatgaatcaagtctcaggattcacggtaaagaggcggccagcaagttgaatcgccgtgattcagatcccttgtatgaccgtgaatgggaggatgagaagagacaaagagctgatcagaagcgaaggcaccggaagtaacaaatcaaaaggggatttcaccagtaaacttttttgaaggttgtgtccgtttcatgcacgtgctataatgctaactttttgcgtgagttgaggtggtgggttcacaacacttttaactgtcagccccctcatttttctggcaacttgtgccaaatttcagcagttcaaattattagtcttctttctaaagtcagcatgaagaagttatgaaaattcttatacacttgtatatagtgttgtatattctggatagctgatgatcaaatatactctgaaaaatccgattatttcgtttgaactttc

SEQ ID NO: 53485 - protein, 375 aa, Glycine max
  peptide (1)..(375): Ceres Seq. ID no. 14311060
TVVTSKSNDRVQKRASSVEEPDRLGKRRKGDVELRDFETELRFSEREKMMDPRFADDKLGPEEHGLYRASDKPLERTKDKGNERYERDHRERMDRLDKSRGDDFVAEKPRDRSIERYGRERSVERMQERGSDRSFNRLPEKAKDERNKDDRNKLRYNDASAEKSHGDDRFHGQSLPPPPPLPPNVVPQSVGAGRRDEDVDRRYGATRHSQRLSPRHEEKERRWSEETVVSQDDAKRRKEDDFRDRKREEIKVEEREREREKANILKEELDLNAASKRRKLKREHLPTDEPGEYSAVAHPPSSAGTGMPLAYDGRDRGDRKGPIMQHPSYIDESSLRIHGKEAASKLNRRDSDPLYDREWEDEKRQRADQKRRHRK

SEQ ID NO: 53486 - protein, 327 aa, Glycine max
  peptide (1)..(327): Ceres Seq. ID no. 14311061
MMDPRFADDKLGPEEHGLYRASDKPLERTKDKGNERYERDHRERMDRLDKSRGDDFVAEKPRDRSIERYGRERSVERMQERGSDRSFNRLPEKAKDERNKDDRNKLRYNDASAEKSHGDDRFHGQSLPPPPPLPPNVVPQSVGAGRRDEDVDRRYGATRHSQRLSPRHEEKERRWSEETVVSQDDAKRRKEDDFRDRKREEIKVEEREREREKANILKEELDLNAASKRRKLKREHLPTDEPGEYSAVAHPPSSAGTGMPLAYDGRDRGDRKGPIMQHPSYIDESSLRIHGKEAASKLNRRDSDPLYDREWEDEKRQRADQKRRHRK

SEQ ID NO: 53487 - protein, 326 aa, Glycine max
  peptide (1)..(326): Ceres Seq. ID no. 14311062
MDPRFADDKLGPEEHGLYRASDKPLERTKDKGNERYERDHRERMDRLDKSRGDDFVAEKPRDRSIERYGRERSVERMQERGSDRSFNRLPEKAKDERNKDDRNKLRYNDASAEKSHGDDRFHGQSLPPPPPLPPNVVPQSVGAGRRDEDVDRRYGATRHSQRLSPRHEEKERRWSEETVVSQDDAKRRKEDDFRDRKREEIKVEEREREREKANILKEELDLNAASKRRKLKREHLPTDEPGEYSAVAHPPSSAGTGMPLAYDGRDRGDRKGPIMQHPSYIDESSLRIHGKEAASKLNRRDSDPLYDREWEDEKRQRADQKRRHRK

SEQ ID NO: 53488 - DNA, 1734 bp, Glycine max
  misc_feature (1)..(1734): Ceres Seq. ID no. 14315138
gaattttgcagttgcgtgcgtttctgttccatacaatttcgatttcaatggcgaggcctaatcaggaggcagtcgagacgttcgtcagcatcactggcttgacagaagcagtagcgctgcaaaaattagaggagcatggcggtaatctcaatgaagcagtcaatgcacattttagtgaaggagacagaaatctaacgaccggctctcgcaacagctctgccgtatttcctcaagatgatttcatggatatagatgatcagcatgatgcaggaattcccagaattccatcactacttccagctttagcagcaaatgttaatccattttctcttcttgatccaacaattgggagaggtatatttggtacacgttttgattcaacaatcgaggcaccatttgttacccatccaagagaggtaagggagattcctatagaggttaaggatggcagtcaatccactcctcaagctggccatgttccatccattgaagatgtcactggaactgtcgatgcccatggtccagatatccatgggactgtcataattgatgatgaagatgatgacgatattccacctgcacagattgcacatcaagatgagcaaacacaaaagatcttggctgatacttcactcaatagcagtgttagacctagtgctcctgaatctgagaatttgccagattacagcaatgacatagaagaagaaatgattcgtgcagccattgaggcttctaaacaggaggctgaggaaaattatagaaatcacaaacttgacaggcaaattgacttaagtgaatcaggatcacagccaaggcaatcatatttggaggatcctgagcttgcccatgcagtttcattgtccctgaagacagcagagcaagaaaaagcattgcgagtacacgggggagattctggatcaccaacagcagggccatctaagtcatcagaggctggactaggggaagtgacatcaaatggaagattacaggcaggaagcttgtcatttcatgatgaagctgaagatgttgaggagcagccactggttaggaatagatctagacatatgtcttcgggatccacaggattgggcaaagatgttgaacttgctgaggctagcacactaccaagcacagcaacagtgactgcaacacaggatagcagtaatcctcatcataatggaaattccttcccagatgagtggggtggcatttcttcagaggagcatgatgaagcagtaatgcttgaagcggcaatgtttggtggaattccagaagggactgggtatcactatggttatgcaccacatgagtttatgcaaaataggggtttcaatccccggccccaatatcgtcctccttcaccatcactggcagctcaacgcttgataagggaacagcaggatgatgaatatcttgcatcgttacaagcagacagagaaaaagaattgaaggccatggaggaagctgaggctgctcgtgaagaggaaagacagagagcagaagactctcgcaggaaattacaggaagaacaggaattggaaacaaaattagcagccaaagaagtctcactaccaccagaaccatcctcagatgatgataatgctgtaaacttgatggtaaaaatgccagatggcaatcgtcgtggacgtcgattcctaagatctgataggctacagtctctgtttgactacatagatattggtagggtggtgaaaccaggcagttacagactgg

SEQ ID NO: 53489 - protein, 577 aa, Glycine max
  peptide (1)..(577): Ceres Seq. ID no. 14315139
ILQLRAFLFHTISISMARPNQEAVETFVSITGLTEAVALQKLEEHGGNLNEAVNAHFSEGDRNLTTGSRNSSAVFPQDDFMDIDDQHDAGIPRIPSLLPALAANVNPFSLLDPTIGRGIFGTRFDSTIEAPFVTHPREVREIPIEVKDGSQSTPQAGHVPSIEDVTGTVDAHGPDIHGTVIIDDEDDDDIPPAQIAHQDEQTQKILADTSLNSSVRPSAPESENLPDYSNDIEEEMIRAAIEASKQEAEENYRNHKLDRQIDLSESGSQPRQSYLEDPELAHAVSLSLKTAEQEKALRVHGGDSGSPTAGPSKSSEAGLGEVTSNGRLQAGSLSFHDEAEDVEEQPLVRNRSRHMSSGSTGLGKDVELAEASTLPSTATVTATQDSSNPHHNGNSFPDEWGGISSEEHDEAVMLEAAMFGGIPEGTGYHYGYAPHEFMQNRGFNPRPQYRPPSPSLAAQRLIREQQDDEYLASLQADREKELKAMEEAEAAREEERQRAEDSRRKLQEEQELETKLAAKEVSLPPEPSSDDDNAVNLMVKMPDGNRRGRRFLRSDRLQSLFDYIDIGRVVKPGSYRL

SEQ ID NO: 53490 - protein, 562 aa, Glycine max
  peptide (1)..(562): Ceres Seq. ID no. 14315140
MARPNQEAVETFVSITGLTEAVALQKLEEHGGNLNEAVNAHFSEGDRNLTTGSRNSSAVFPQDDFMDIDDQHDAGIPRIPSLLPALAANVNPFSLLDPTIGRGIFGTRFDSTIEAPFVTHPREVREIPIEVKDGSQSTPQAGHVPSIEDVTGTVDAHGPDIHGTVIIDDEDDDDIPPAQIAHQDEQTQKILADTSLNSSVRPSAPESENLPDYSNDIEEEMIRAAIEASKQEAEENYRNHKLDRQIDLSESGSQPRQSYLEDPELAHAVSLSLKTAEQEKALRVHGGDSGSPTAGPSKSSEAGLGEVTSNGRLQAGSLSFHDEAEDVEEQPLVRNRSRHMSSGSTGLGKDVELAEASTLPSTATVTATQDSSNPHHNGNSFPDEWGGISSEEHDEAVMLEAAMFGGIPEGTGYHYGYAPHEFMQNRGFNPRPQYRPPSPSLAAQRLIREQQDDEYLASLQADREKELKAMEEAEAAREEERQRAEDSRRKLQEEQELETKLAAKEVSLPPEPSSDDDNAVNLMVKMPDGNRRGRRFLRSDRLQSLFDYIDIGRVVKPGSYRL

SEQ ID NO: 53491 - protein, 497 aa, Glycine max
  peptide (1)..(497): Ceres Seq. ID no. 14315141
MDIDDQHDAGIPRIPSLLPALAANVNPFSLLDPTIGRGIFGTRFDSTIEAPFVTHPREVREIPIEVKDGSQSTPQAGHVPSIEDVTGTVDAHGPDIHGTVIIDDEDDDDIPPAQIAHQDEQTQKILADTSLNSSVRPSAPESENLPDYSNDIEEEMIRAAIEASKQEAEENYRNHKLDRQIDLSESGSQPRQSYLEDPELAHAVSLSLKTAEQEKALRVHGGDSGSPTAGPSKSSEAGLGEVTSNGRLQAGSLSFHDEAEDVEEQPLVRNRSRHMSSGSTGLGKDVELAEASTLPSTATVTATQDSSNPHHNGNSFPDEWGGISSEEHDEAVMLEAAMFGGIPEGTGYHYGYAPHEFMQNRGFNPRPQYRPPSPSLAAQRLIREQQDDEYLASLQADREKELKAMEEAEAAREEERQRAEDSRRKLQEEQELETKLAAKEVSLPPEPSSDDDNAVNLMVKMPDGNRRGRRFLRSDRLQSLFDYIDIGRVVKPGSYRL

SEQ ID NO: 53492 - DNA, 2003 bp, Glycine max
  misc_feature (1)..(2003): Ceres Seq. ID no. 15225635
tcagctacgtaggcccccccccccaaaaaaaaaaaattctatcgaattggttccaactgcagttgttttgaccagggatgagtttgaaggagaatgtagctaagacaggcaacactgaggacaatgctagtcaaatgtggaccttatgcaaacatgctttctatgatttaactcatgtttctccggtggtgtttctgttcctgctgaaagaatgttattattatggcacatgtaaggcatcaacaaaattccgagcccttcaacatcaagtacatcttgttcttagtaatgatccaaaacccgaaccagcaacttttattgttcagtgcatgtatgtctctccattatttgaagatcatagtcaaggatttactcatctgataatatctgctcttcgccgattcctgaaaagatcaacaaccactacagaagactcattggaggtgaaagacctagttgcccatctacttgtagatattatttggggccagatcgatcatgatgaaaagattgtcctgaagctactcgagatttttgatgtaaaactaacaaatgttgagaaagcaatgtgtcaaattaaggaaaaacatgatttaagttgtggtacagcaaaagaatttgttgaacagtatattgttgagttggtaaaatcccagttgtacatgacagctgtcactttaatagagcaattctctgtctaccagtatggccagtcttttctccttgatatgatacagagtaatcaattcaaagccgcagagaagtgggcaacatttatggggaaacaaatgctatccacacttgtagaggagttcattgagaggaacatgctaaagaatgcccatgagattataaagaaaaataatctaaagcaggattttcctgatgtatacaaaaggtgtaaagaaagctcactaaaaaacttggcagaaaaaggatgctgggaggttgctgaggcaagaataaacaatgatagacagcttatggaatatctggtttatttggcaatggaagctggatacatggagaaagttgatgaactgtgtgatcggtactccctatccaggtttttggacatcaatgtacctgaaacaagtaatctgcaagggcattatttaaatcttgatgaattattggttgaaagcatcatttgggttgatgaagttgaaggtttgcttgatgcaacaaggcatattgagggttttaaagttataggtcttgactgtgaatggaaacccaattatataaaaggcagcaaaccaaacaaggtttctatcatgcagattgcttctgaagattcggcttttatctttgatctgataaagttacacaaagaagtgcctgacattttagataactgtctatctcgcattttgctgtcacctagaattctaaaacttggctataatttccaatgcgatgcaaagcaacttgcttattcgtatgaagagttgagatgtttcaagaactatgaaatgttgctggacatccagaatgtttttaaagaacctcggggtggtttggctgggcttacagagaaaatactgggagctagtttaaacaagacaagacgaaacagcaattgggagcaaagacctttaactccacatcaattagaatacgctgctctggatgctgttgtacttgttcacatattccgccatcttccttgtcaaggacataataaagataaatctgagtggaagtcttgcatcgtgtccctcaccgaaaacgccaagaaattcaagaaatgtgtaccaaagattgtagacacttgacaaggagaccagcaagcattgatttctgatgaattgagatcgaattttttaactgattgcatgtgtatatggaaaagttcctatagaaaaataagaaattttcaagaggtaaatgataattaatttcattgaatattttctttttctttttttgtatatgacatacaatttgaaatttggcattttgtacatgctatatttactagctgcaattacagttgtgtt

SEQ ID NO: 53493 - protein, 566 aa, Glycine max
  peptide (1)..(566): Ceres Seq. ID no. 15225636
MSLKENVAKTGNTEDNASQMWTLCKHAFYDLTHVSPVVFLFLLKECYYYGTCKASTKFRALQHQVHLVLSNDPKPEPATFIVQCMYVSPLFEDHSQGFTHLIISALRRFLKRSTTTTEDSLEVKDLVAHLLVDIIWGQIDHDEKIVLKLLEIFDVKLTNVEKAMCQIKEKHDLSCGTAKEFVEQYIVELVKSQLYMTAVTLIEQFSVYQYGQSFLLDMIQSNQFKAAEKWATFMGKQMLSTLVEEFIERNMLKNAHEIIKKNNLKQDFPDVYKRCKESSLKNLAEKGCWEVAEARINNDRQLMEYLVYLAMEAGYMEKVDELCDRYSLSRFLDINVPETSNLQGHYLNLDELLVESIIWVDEVEGLLDATRHIEGFKVIGLDCEWKPNYIKGSKPNKVSIMQIASEDSAFIFDLIKLHKEVPDILDNCLSRILLSPRILKLGYNFQCDAKQLAYSYEELRCFKNYEMLLDIQNVFKEPRGGLAGLTEKILGASLNKTRRNSNWEQRPLTPHQLEYAALDAVVLVHIFRHLPCQGHNKDKSEWKSCIVSLTENAKKFKKCVPKIVDT

SEQ ID NO: 53494 - protein, 547 aa, Glycine max
  peptide (1)..(547): Ceres Seq. ID no. 15225637
MWTLCKHAFYDLTHVSPVVFLFLLKECYYYGTCKASTKFRALQHQVHLVLSNDPKPEPATFIVQCMYVSPLFEDHSQGFTHLIISALRRFLKRSTTTTEDSLEVKDLVAHLLVDIIWGQIDHDEKIVLKLLEIFDVKLTNVEKAMCQIKEKHDLSCGTAKEFVEQYIVELVKSQLYMTAVTLIEQFSVYQYGQSFLLDMIQSNQFKAAEKWATFMGKQMLSTLVEEFIERNMLKNAHEIIKKNNLKQDFPDVYKRCKESSLKNLAEKGCWEVAEARINNDRQLMEYLVYLAMEAGYMEKVDELCDRYSLSRFLDINVPETSNLQGHYLNLDELLVESIIWVDEVEGLLDATRHIEGFKVIGLDCEWKPNYIKGSKPNKVSIMQIASEDSAFIFDLIKLHKEVPDILDNCLSRILLSPRILKLGYNFQCDAKQLAYSYEELRCFKNYEMLLDIQNVFKEPRGGLAGLTEKILGASLNKTRRNSNWEQRPLTPHQLEYAALDAVVLVHIFRHLPCQGHNKDKSEWKSCIVSLTENAKKFKKCVPKIVDT

SEQ ID NO: 53495 - protein, 482 aa, Glycine max
  peptide (1)..(482): Ceres Seq. ID no. 15225638
MYVSPLFEDHSQGFTHLIISALRRFLKRSTTTTEDSLEVKDLVAHLLVDIIWGQIDHDEKIVLKLLEIFDVKLTNVEKAMCQIKEKHDLSCGTAKEFVEQYIVELVKSQLYMTAVTLIEQFSVYQYGQSFLLDMIQSNQFKAAEKWATFMGKQMLSTLVEEFIERNMLKNAHEIIKKNNLKQDFPDVYKRCKESSLKNLAEKGCWEVAEARINNDRQLMEYLVYLAMEAGYMEKVDELCDRYSLSRFLDINVPETSNLQGHYLNLDELLVESIIWVDEVEGLLDATRHIEGFKVIGLDCEWKPNYIKGSKPNKVSIMQIASEDSAFIFDLIKLHKEVPDILDNCLSRILLSPRILKLGYNFQCDAKQLAYSYEELRCFKNYEMLLDIQNVFKEPRGGLAGLTEKILGASLNKTRRNSNWEQRPLTPHQLEYAALDAVVLVHIFRHLPCQGHNKDKSEWKSCIVSLTENAKKFKKCVPKIVDT

SEQ ID NO: 53496 - DNA, 1307 bp, Glycine max
  misc_feature (1)..(1307): Ceres Seq. ID no. 15169296
gacagacacagcatccaatatccatcgagagatgttggaggcgaagtgtctgaagaaagcagtggttccttccactctgattgaggacccttctcctggaagccttcagtgcacacgtcttgctctccgtgtttgcgaggacccaagttcttgttttgtctacatagcctccggtccccacatttataagctccacattgctctgggagaatcttcagtcagcgaaggaaaagatagcctattgatacctgaacacactgagattattgcctcttcgttactcaaccgatgccctcatcgttcagaaattcagagtattgctcttgctgaggtggagggctgtggctatatattgctgggaagtgtggattcacatggtcatctcattgtgtctaaactagatgcgtctggtgaagatgttgacaagctaacatattctgcattgcctcatgataatggtatcggggaaggaagttggtcaggactctgcttttgcccaaatcaatggtctatgacagttgttgctcgtagcttttgcaaaagcattgatgtttatgatcaagacatccacattcgctcattacgaccgctttggtaccctacttcgttaaacttcttgcaaaatggagtcaatggaaatcaaagtcctaccttagctattacggaaggaagccagctgacaacgtgggacttgagaatgaaagaaaatggtggttgtgtacatcggatttgtggcagccctggcgatatcttttatgctgtttgcagttcttccaatggtaatgttgctgtgggtggagctgatcgtactgtgactatttatgatcctcgcagatggtcggcattgtctagattggtgcactgttcaaaatatgagataacaggactggctttctcaacaattgaccctgactgtatctatattcaaggggttgattatgaggtcttttgtggacaatggaaagagaacaacaaaatattttcatttagaggagactcaaattggcttggctttagtaagtgctccgacaaagatgttttggctggatggtgtgattcaggcagcatatttatagctgatgttgcaagtgcaagttgataaagtggtgtctgtccagtaatttccccatctctgtagaaaattgtcacctcaatgtatgtaaccatggttgagtttcatgtttgaagggaaaaagaaaagtggtggatttattatgattaaacttcatatgcagtacatgttataatgcatttctaaccacagaatgtgacttaagattacggaatgcattatttttgtgcactgt

SEQ ID NO: 53497 - protein, 365 aa, Glycine max
  peptide (1)..(365): Ceres Seq. ID no. 15169297
TDTASNIHREMLEAKCLKKAVVPSTLIEDPSPGSLQCTRLALRVCEDPSSCFVYIASGPHIYKLHIALGESSVSEGKDSLLIPEHTEIIASSLLNRCPHRSEIQSIALAEVEGCGYILLGSVDSHGHLIVSKLDASGEDVDKLTYSALPHDNGIGEGSWSGLCFCPNQWSMTVVARSFCKSIDVYDQDIHIRSLRPLWYPTSLNFLQNGVNGNQSPTLAITEGSQLTTWDLRMKENGGCVHRICGSPGDIFYAVCSSSNGNVAVGGADRTVTIYDPRRWSALSRLVHCSKYEITGLAFSTIDPDCIYIQGVDYEVFCGQWKENNKIFSFRGDSNWLGFSKCSDKDVLAGWCDSGSIFIADVASAS

SEQ ID NO: 53498 - protein, 355 aa, Glycine max
  peptide (1)..(355): Ceres Seq. ID no. 15169298
MLEAKCLKKAVVPSTLIEDPSPGSLQCTRLALRVCEDPSSCFVYIASGPHIYKLHIALGESSVSEGKDSLLIPEHTEIIASSLLNRCPHRSEIQSIALAEVEGCGYILLGSVDSHGHLIVSKLDASGEDVDKLTYSALPHDNGIGEGSWSGLCFCPNQWSMTVVARSFCKSIDVYDQDIHIRSLRPLWYPTSLNFLQNGVNGNQSPTLAITEGSQLTTWDLRMKENGGCVHRICGSPGDIFYAVCSSSNGNVAVGGADRTVTIYDPRRWSALSRLVHCSKYEITGLAFSTIDPDCIYIQGVDYEVFCGQWKENNKIFSFRGDSNWLGFSKCSDKDVLAGWCDSGSIFIADVASAS

SEQ ID NO: 53499 - protein, 195 aa, Glycine max
  peptide (1)..(195): Ceres Seq. ID no. 15169299
MTVVARSFCKSIDVYDQDIHIRSLRPLWYPTSLNFLQNGVNGNQSPTLAITEGSQLTTWDLRMKENGGCVHRICGSPGDIFYAVCSSSNGNVAVGGADRTVTIYDPRRWSALSRLVHCSKYEITGLAFSTIDPDCIYIQGVDYEVFCGQWKENNKIFSFRGDSNWLGFSKCSDKDVLAGWCDSGSIFIADVASAS

SEQ ID NO: 53500 - DNA, 1056 bp, Glycine max
  misc_feature (1)..(1056): Ceres Seq. ID no. 14303877
tctcggaactttgaaaacgtggaagcacaccccagaccccacaccagtccccgtttgttccgctgcaaaacaaaaacaccgcgtcttccccgtgcggggaaaaagaaaagaaaagaaaagaaccctcaattttccgggaaaaccctccccacaatggtttcccgggaaaacaccaattggctcttcgattacggcttgatcgacgatattcccgttccggacgccaccttcggcgtcaattcctccgccttcacatggccccctaacgccttgaacgcttcctccaatgtcggcgttgaaattgatggctcgttgggggattctgacagtctcaaagagtctggctcaaagaaaagggttaggtctgagtcatgtgctgcttctggctccaaggcatgtcgggagaagttgagaagggataggcttaatgacaagtttgttgaattgggcgccattttggagcctggaaggcctgccaaaacagacaaggctgctatcctgattgatgctgtccgaatggtgacccagttacggggtgaagcccagaagttgaaagacactaatcagggtcttcaagaaaagattaaagagttaaaggctgagaagaacgaacttcgcgatgagaaacagaggctcaaggcagagaaggagaaactggagcagcagctgaaatctttgaatgcacagcctagtttcatgcctccccctgctgcaatgcctgctgcatttgcggcacaaggccaagcccatggcaacaagttggtaccttttattagttatcccggagttgcaatgtggcaattcatgccacctgctgcagtggatacctcacaggatcatgttctccgtccaccagttgcctaagctggcactgtacaattctctgggccagcattttggctcaaggttgtatccattttaccaataccttcttggctttgttagttctcttctaagtattctaactggacccagtggtgacttctgactatatctggcatatgatactattatgattaatgctggtagttgcatgtaaatcagtcaatgttaaat

SEQ ID NO: 53501 - protein, 287 aa, Glycine max
  peptide (1)..(287): Ceres Seq. ID no. 14303878
SRNFENVEAHPRPHTSPRLFRCKTKTPRLPRAGKKKRKEKNPQFSGKTLPTMVSRENTNWLFDYGLIDDIPVPDATFGVNSSAFTWPPNALNASSNVGVEIDGSLGDSDSLKESGSKKRVRSESCAASGSKACREKLRRDRLNDKFVELGAILEPGRPAKTDKAAILIDAVRMVTQLRGEAQKLKDTNQGLQEKIKELKAEKNELRDEKQRLKAEKEKLEQQLKSLNAQPSFMPPPAAMPAAFAAQGQAHGNKLVPFISYPGVAMWQFMPPAAVDTSQDHVLRPPVA

SEQ ID NO: 53502 - protein, 236 aa, Glycine max
  peptide (1)..(236): Ceres Seq. ID no. 14303879
MVSRENTNWLFDYGLIDDIPVPDATFGVNSSAFTWPPNALNASSNVGVEIDGSLGDSDSLKESGSKKRVRSESCAASGSKACREKLRRDRLNDKFVELGAILEPGRPAKTDKAAILIDAVRMVTQLRGEAQKLKDTNQGLQEKIKELKAEKNELRDEKQRLKAEKEKLEQQLKSLNAQPSFMPPPAAMPAAFAAQGQAHGNKLVPFISYPGVAMWQFMPPAAVDTSQDHVLRPPVA

SEQ ID NO: 53503 - DNA, 1875 bp, Glycine max
  misc_feature (1)..(1875): Ceres Seq. ID no. 14311313
gtgaaacttcccaaaaaatatacagcactatggaacaccaaaaagaggagcaactagaaccagtgagtcctgtgggacaatacttcaacagctctgtgctatgcatatacatcattggagttttagaattcgaagttccaatagatgacttgcaaacatatgctcttcttaaagatgttttccttcccatcaatccacgcttctcctccatcatggtccaagataaagatggagagaaaagatggaagcaagttgatgtaaacttgacggaccatgtcaacatccccacattccccgaaggaaaaacagcggaatcttatgataaatattttcatgattatttatcaagcatagcaatggagcaattaccacaaagcagaccattatgggatattcacataatcaattaccttacaagtgatgcatccagcactataatatttaagcttcaccatgcacttggagatggctattctctcatgggtgctcttctttcttgtcttcaacgagccgatgacccttctcttcccttgtcctttccttctctcaaacaatctaaacaagaaccttcttccactaaaagcttttgcagaaaattttcttggatgtgttcctctgccttcaacactgtctcagattttggatggagtgtattgaagagtagcatcattagtgatgataaaacaccgataaggtttggagacgaaggagccgactatcaaccaatttccatatcaagcatgacattctccattgaccacatcagggacatcaaatcaaggctcggagtgacaataaatgatgtggtcactggaattgtcttctatggaactagattatatatgcaagatatggactccaaatcaaagaccgcacactccacagcattggtattactgaatacgagaaacgttgaaggttaccaatcgatcaatgatatgctaaatactaaagccacgggtccatgggggaacagaattaccttcttgcatgttccaataccgaaattaaatgaaacaagaactacaaaccctcttgaatttatttgggacacacataacataatcaagaggaagaaacaatctctaggagttgtactcaccgggacacttttgaagatagagggcaaattgaggggacaagaggcagtagctaaacgcattcgtggcacattgacaaaatcaagtgcagtgatttcaaacttggctggaccaatacaacaaatggctttagctaaccatcctgtgaaaggcttgtatttcacattggccggtggacctgaaagtctagtcatttcagttatgagctatatgggagtcctaagtgttaccctcaaaacggaaaaagacttcatagacgaacataaattgaagttgtgcatgcaaagtgcatttgagataattctccaagcagctatggaaattcctcaggaaaccaaaccttagtatttggtttggatgattggaacagcttattacgaaaattagagagagagagagatatggagaatttaccatattatttctccggatttatcaacgccttaagtaattgcttgtctatagtatatttgtcgtatgtttggaaagatcaatacacgaggcccaccttattttggatctgtttaggcctattcttgtttggaagaatcttattgtctgatctcacttggtaatcatttcttgtttgtttcacaaactaaaaagtgtacaagagttgttatatttttaattatgtagtcttttgtaaaaattttgtacatcacatttcttatcctcttgtctccaacactccaacattaattaacaacaatattaaaaatttagctcaaatctcacaatgtagggggctaattcaatagaaggttttcaatcc

SEQ ID NO: 53504 - protein, 480 aa, Glycine max
  peptide (1)..(480): Ceres Seq. ID no. 14311314
ETSQKIYSTMEHQKEEQLEPVSPVGQYFNSSVLCIYIIGVLEFEVPIDDLQTYALLKDVFLPINPRFSSIMVQDKDGEKRWKQVDVNLTDHVNIPTFPEGKTAESYDKYFHDYLSSIAMEQLPQSRPLWDIHIINYLTSDASSTIIFKLHHALGDGYSLMGALLSCLQRADDPSLPLSFPSLKQSKQEPSSTKSFCRKFSWMCSSAFNTVSDFGWSVLKSSIISDDKTPIRFGDEGADYQPISISSMTFSIDHIRDIKSRLGVTINDVVTGIVFYGTRLYMQDMDSKSKTAHSTALVLLNTRNVEGYQSINDMLNTKATGPWGNRITFLHVPIPKLNETRTTNPLEFIWDTHNIIKRKKQSLGVVLTGTLLKIEGKLRGQEAVAKRIRGTLTKSSAVISNLAGPIQQMALANHPVKGLYFTLAGGPESLVISVMSYMGVLSVTLKTEKDFIDEHKLKLCMQSAFEIILQAAMEIPQETKP

SEQ ID NO: 53505 - protein, 471 aa, Glycine max
  peptide (1)..(471): Ceres Seq. ID no. 14311315
MEHQKEEQLEPVSPVGQYFNSSVLCIYIIGVLEFEVPIDDLQTYALLKDVFLPINPRFSSIMVQDKDGEKRWKQVDVNLTDHVNIPTFPEGKTAESYDKYFHDYLSSIAMEQLPQSRPLWDIHIINYLTSDASSTIIFKLHHALGDGYSLMGALLSCLQRADDPSLPLSFPSLKQSKQEPSSTKSFCRKFSWMCSSAFNTVSDFGWSVLKSSIISDDKTPIRFGDEGADYQPISISSMTFSIDHIRDIKSRLGVTINDVVTGIVFYGTRLYMQDMDSKSKTAHSTALVLLNTRNVEGYQSINDMLNTKATGPWGNRITFLHVPIPKLNETRTTNPLEFIWDTHNIIKRKKQSLGVVLTGTLLKIEGKLRGQEAVAKRIRGTLTKSSAVISNLAGPIQQMALANHPVKGLYFTLAGGPESLVISVMSYMGVLSVTLKTEKDFIDEHKLKLCMQSAFEIILQAAMEIPQETKP

SEQ ID NO: 53506 - protein, 410 aa, Glycine max
  peptide (1)..(410): Ceres Seq. ID no. 14311316
MVQDKDGEKRWKQVDVNLTDHVNIPTFPEGKTAESYDKYFHDYLSSIAMEQLPQSRPLWDIHIINYLTSDASSTIIFKLHHALGDGYSLMGALLSCLQRADDPSLPLSFPSLKQSKQEPSSTKSFCRKFSWMCSSAFNTVSDFGWSVLKSSIISDDKTPIRFGDEGADYQPISISSMTFSIDHIRDIKSRLGVTINDVVTGIVFYGTRLYMQDMDSKSKTAHSTALVLLNTRNVEGYQSINDMLNTKATGPWGNRITFLHVPIPKLNETRTTNPLEFIWDTHNIIKRKKQSLGVVLTGTLLKIEGKLRGQEAVAKRIRGTLTKSSAVISNLAGPIQQMALANHPVKGLYFTLAGGPESLVISVMSYMGVLSVTLKTEKDFIDEHKLKLCMQSAFEIILQAAMEIPQETKP

SEQ ID NO: 53507 - DNA, 1419 bp, Glycine max
  misc_feature (1)..(1419): Ceres Seq. ID no. 14304495
agtaattgaaacttgtctccatgaaaatggctatcaaagttcaagagataacaaaagcactttgataccagatggggtttcagatttgctgagtgtgaaggcaaggattagagcggttgaaaaatcaatggtggaagaaatcaagaagcttgtgaaggaagacaatttaaccactaaagctaatccaggagctctgacaaaggcaacaaatgtggaagtttcaccctatgtggagaattgcaacagaaaagaagacaaggtacccaaggatgagagcacacatgatgtcaactcgtggagaacaaaaactgaaaatgggtcattgatgaaagatattccacttgatcacatctcagacaattcagcctccaaaagttgcaggagagaaaatagtggtactgatgatcagatgcttgaattatgggaaactgccgagcaagattgctttgctagttccatgattagtgaagcaatgaaacaaagttctgttccaacagaggatgttattgcataccatcagtcagatcattcaggtaaattccaaaatacctcttcagaattggatgtggaaaaggaattgggtgttgacaggcttcagttgtcgagaagtataaaagagagaactcaagatggcaagaggagaaagatactggagaggctttcttctgatgcgcagaaactgaccattctcaagacagctgtgcaagatttgaaacagaaaatggagacgaagagaagcaagaagggagtcgagactgaatatgaaacagtcaaaagacaaatagacgaagttgagggagctgttgtcaaattagtagatactaatgatcaactgacaaaggatcttgaagagagcgccccatctctaaacaggcagacttcagccgagttggaaaagagtagacacatccagagaaaaagagtaaccgagcaggcgcgaaaaggttctgaacagataggaaggttgcagtttgaggtgcagaacatccaatacactttgctgaaattggctgatgaaaagagcaaagggaagagcagattcactggaaaaacagtggtcttgcttaaggactttattcacagtggcaagagaagtagcaaaaagcgcaacaaggggttctgtggatgctcaaggccttcaactaatgaggactaagtgagaaaatttagaatcattttgttgtaagtaccttctttaattggtatgtgtctaatcttagcataataattttaattttagctgttaaagatgctgttaggctttatctgatcacagtaacttatgtcagatttgtatgttctagctttcagaggacatgtactgagcgacattttcgctaaggagttgcgctgtcatgtttgacaatgtttaagctatgaaagcacagagcagagaataaagcttttcaccctttcttc

SEQ ID NO: 53508 - protein, 384 aa, Glycine max
  peptide (1)..(384): Ceres Seq. ID no. 14304496
VIETCLHENGYQSSRDNKSTLIPDGVSDLLSVKARIRAVEKSMVEEIKKLVKEDNLTTKANPGALTKATNVEVSPYVENCNRKEDKVPKDESTHDVNSWRTKTENGSLMKDIPLDHISDNSASKSCRRENSGTDDQMLELWETAEQDCFASSMISEAMKQSSVPTEDVIAYHQSDHSGKFQNTSSELDVEKELGVDRLQLSRSIKERTQDGKRRKILERLSSDAQKLTILKTAVQDLKQKMETKRSKKGVETEYETVKRQIDEVEGAVVKLVDTNDQLTKDLEESAPSLNRQTSAELEKSRHIQRKRVTEQARKGSEQIGRLQFEVQNIQYTLLKLADEKSKGKSRFTGKTVVLLKDFIHSGKRSSKKRNKGFCGCSRPSTNED

SEQ ID NO: 53509 - protein, 342 aa, Glycine max
  peptide (1)..(342): Ceres Seq. ID no. 14304497
MVEEIKKLVKEDNLTTKANPGALTKATNVEVSPYVENCNRKEDKVPKDESTHDVNSWRTKTENGSLMKDIPLDHISDNSASKSCRRENSGTDDQMLELWETAEQDCFASSMISEAMKQSSVPTEDVIAYHQSDHSGKFQNTSSELDVEKELGVDRLQLSRSIKERTQDGKRRKILERLSSDAQKLTILKTAVQDLKQKMETKRSKKGVETEYETVKRQIDEVEGAVVKLVDTNDQLTKDLEESAPSLNRQTSAELEKSRHIQRKRVTEQARKGSEQIGRLQFEVQNIQYTLLKLADEKSKGKSRFTGKTVVLLKDFIHSGKRSSKKRNKGFCGCSRPSTNED

SEQ ID NO: 53510 - protein, 276 aa, Glycine max
  peptide (1)..(276): Ceres Seq. ID no. 14304498
MKDIPLDHISDNSASKSCRRENSGTDDQMLELWETAEQDCFASSMISEAMKQSSVPTEDVIAYHQSDHSGKFQNTSSELDVEKELGVDRLQLSRSIKERTQDGKRRKILERLSSDAQKLTILKTAVQDLKQKMETKRSKKGVETEYETVKRQIDEVEGAVVKLVDTNDQLTKDLEESAPSLNRQTSAELEKSRHIQRKRVTEQARKGSEQIGRLQFEVQNIQYTLLKLADEKSKGKSRFTGKTVVLLKDFIHSGKRSSKKRNKGFCGCSRPSTNED

SEQ ID NO: 53511 - DNA, 1055 bp, Glycine max
  misc_feature (1)..(1055): Ceres Seq. ID no. 14303993
agaaacagaacagaagcatcaattatcagttatcagcatggtcaaaactgtagtttggtccacttttgtgagaccgcaatataaacctgcacatttcaatcactcaccccttccatttctgaagctcagtacacccaatttgagctttcgtgggaccaacacagtacataataagcgatccaattggccaaaacctttgtcactgcgctcaaaatctgttcttgctgttgctggggctgaccctttggaaatggcagaggattggaaccgcacagcccttcttgtgatcgacatgcagaaagattttatagaagatgggggtcccatgctagtaaaaggagggaaagacattgtcccaaatgttattaaggctgtcgatgttgctaggcagcgtggaattctcatagtttgggtagtacgggaacatgatcccttaggaagagatgttgaactctttcgtcggcatctatatgcagcagggaaagttggtccaacctctaaaggaagtgaaggtgcagaattagttgatggactggtaattaaagaaggggattataaacttgtgaaaaccaggtttagtgcattctttgctacacaccttcattcagtccttcaaggagcaggaattaatagtcttgtggtcactggtgttcaaactcctaactgtattaggcaaactgtctatgatgctgtagcattggactatcaacctgtaactgttattgttgatgctacagcagcagccacacctgatattcatctcgccaatgtgtttgacatggaaaatattggagttgcaaccccaacattacaagaatggagcgaacccaaagcttgatctatatgaactatgaagcatgctactttttgcacccagtggtgtactggtgttcaattccaagactcaagaaaggtttgaagtgaagcaaacgtatctatgtttactgcataataaaatgatttacatggctaagtttgtttattttggtattcacttcacttttgttgtgactactatgaacttattttttctagtccaatgcactccaatttag

SEQ ID NO: 53512 - protein, 278 aa, Glycine max
  peptide (1)..(278): Ceres Seq. ID no. 14303994
ETEQKHQLSVISMVKTVVWSTFVRPQYKPAHFNHSPLPFLKLSTPNLSFRGTNTVHNKRSNWPKPLSLRSKSVLAVAGADPLEMAEDWNRTALLVIDMQKDFIEDGGPMLVKGGKDIVPNVIKAVDVARQRGILIVWVVREHDPLGRDVELFRRHLYAAGKVGPTSKGSEGAELVDGLVIKEGDYKLVKTRFSAFFATHLHSVLQGAGINSLVVTGVQTPNCIRQTVYDAVALDYQPVTVIVDATAAATPDIHLANVFDMENIGVATPTLQEWSEPKA

SEQ ID NO: 53513 - protein, 266 aa, Glycine max
  peptide (1)..(266): Ceres Seq. ID no. 14303995
MVKTVVWSTFVRPQYKPAHFNHSPLPFLKLSTPNLSFRGTNTVHNKRSNWPKPLSLRSKSVLAVAGADPLEMAEDWNRTALLVIDMQKDFIEDGGPMLVKGGKDIVPNVIKAVDVARQRGILIVWVVREHDPLGRDVELFRRHLYAAGKVGPTSKGSEGAELVDGLVIKEGDYKLVKTRFSAFFATHLHSVLQGAGINSLVVTGVQTPNCIRQTVYDAVALDYQPVTVIVDATAAATPDIHLANVFDMENIGVATPTLQEWSEPKA

SEQ ID NO: 53514 - protein, 195 aa, Glycine max
  peptide (1)..(195): Ceres Seq. ID no. 14303996
MAEDWNRTALLVIDMQKDFIEDGGPMLVKGGKDIVPNVIKAVDVARQRGILIVWVVREHDPLGRDVELFRRHLYAAGKVGPTSKGSEGAELVDGLVIKEGDYKLVKTRFSAFFATHLHSVLQGAGINSLVVTGVQTPNCIRQTVYDAVALDYQPVTVIVDATAAATPDIHLANVFDMENIGVATPTLQEWSEPKA

SEQ ID NO: 53515 - DNA, 1642 bp, Glycine max
  misc_feature (1)..(1642): Ceres Seq. ID no. 14315606
tcctgcctcccaggtgaaaaagaaaacacactgacgaagacagttccttctagaattgatagtatgcctctacacattgcaatgctcccgtggctcgcagtgggtcatgtgaacccttatttggagctgtcaaagattcttgctcaaaagggacactttgttacctttataagcactccaaaaaacattgatggcatgcccaaaatcccggaaaccttacagccatccatcaaattggtgaggctacccttgccacacacagatcatcatcatcatctcccagaagatgctgagagcacaatggacattccctcaaacaaaagctattacctcaagctggcttacgaggctctccaaggccctgtatcggagttgctcaaaacttcaaagcccgattgggttttttacgatttcgcaaccgagtggttaccaccaatagccaagagcctcaacattccctgtgcacactacaacttaaccgcagcgtggaacaaagtgttcattgatccacccaaggattatcaactgaacaactcaattacgcttcaagacatgtgtctccctcccacgtggcttcctttcaccacaaccgttcatctcaggcctcacgaaatcagaagagcaacaagttctatcaaagattcggacacaggacgcatggcaaattttgatctcagaaaggcatattccagctgcgacatgtttcttctcagaacatgcagagaactcgaaggagaatggttggattatcttgctcacaagtacaaggttcctgtggttccggtagggttggttccaccatccattcagataagggatgttgaagaggaagacaataaccctgactgggtcaaaattaaggattggttggacaaacaagagtcatcatccgtggtttatatagggtttgggagcgagttgaggctgagtcagcaggacgtcaccgagttggctcatggtattgagctttctgggttgcgtttcttttgggctttgaggaacctgcagaaagaggatttgccacatgggtttgaggagagaaccaaggaacgtggcattgtttggaagagttgggcaccccagattaagatcttaggccatgcagctattggaggatgcatcactcactgtggtaccaattctctcgttgagatgcttaattttgggcatgtgcttgtgactcttccctatttgctagaccaagctttgttttcgagggtgctagaggaaaagaaagtgggtattgaggtgccaaggagcgagaaagatgggtcctttactcgagacgatgtggccaagacattaaagttggcaatagtagatgaggaagggagtgattataggaagaatgccaaagaaatgggcaaggttttcagttccacggatcttcatagtcgatacattgacgactgcattgttgctcttcaaaagtacaagactcctaattccaactgttaagcacggctattcatgccagcaaggattccactccagtttcttctctgtttttgttttgcaattaagtttttcttttatttctgcaaatgcttgaacttttatccttaaatatttccaatcttcaatcatcatcatgtgtacgtttagttttgtaataaagaaggttatgagtaattacctaccc

SEQ ID NO: 53516 - protein, 485 aa, Glycine max
  peptide (1)..(485): Ceres Seq. ID no. 14315607
SCLPGEKENTLTKTVPSRIDSMPLHIAMLPWLAVGHVNPYLELSKILAQKGHFVTFISTPKNIDGMPKIPETLQPSIKLVRLPLPHTDHHHHLPEDAESTMDIPSNKSYYLKLAYEALQGPVSELLKTSKPDWVFYDFATEWLPPIAKSLNIPCAHYNLTAAWNKVFIDPPKDYQLNNSITLQDMCLPPTWLPFTTTVHLRPHEIRRATSSIKDSDTGRMANFDLRKAYSSCDMFLLRTCRELEGEWLDYLAHKYKVPVVPVGLVPPSIQIRDVEEEDNNPDWVKIKDWLDKQESSSVVYIGFGSELRLSQQDVTELAHGIELSGLRFFWALRNLQKEDLPHGFEERTKERGIVWKSWAPQIKILGHAAIGGCITHCGTNSLVEMLNFGHVLVTLPYLLDQALFSRVLEEKKVGIEVPRSEKDGSFTRDDVAKTLKLAIVDEEGSDYRKNAKEMGKVFSSTDLHSRYIDDCIVALQKYKTPNSNC

SEQ ID NO: 53517 - protein, 464 aa, Glycine max
  peptide (1)..(464): Ceres Seq. ID no. 14315608
MPLHIAMLPWLAVGHVNPYLELSKILAQKGHFVTFISTPKNIDGMPKIPETLQPSIKLVRLPLPHTDHHHHLPEDAESTMDIPSNKSYYLKLAYEALQGPVSELLKTSKPDWVFYDFATEWLPPIAKSLNIPCAHYNLTAAWNKVFIDPPKDYQLNNSITLQDMCLPPTWLPFTTTVHLRPHEIRRATSSIKDSDTGRMANFDLRKAYSSCDMFLLRTCRELEGEWLDYLAHKYKVPVVPVGLVPPSIQIRDVEEEDNNPDWVKIKDWLDKQESSSVVYIGFGSELRLSQQDVTELAHGIELSGLRFFWALRNLQKEDLPHGFEERTKERGIVWKSWAPQIKILGHAAIGGCITHCGTNSLVEMLNFGHVLVTLPYLLDQALFSRVLEEKKVGIEVPRSEKDGSFTRDDVAKTLKLAIVDEEGSDYRKNAKEMGKVFSSTDLHSRYIDDCIVALQKYKTPNSNC

SEQ ID NO: 53518 - protein, 458 aa, Glycine max
  peptide (1)..(458): Ceres Seq. ID no. 14315609
MLPWLAVGHVNPYLELSKILAQKGHFVTFISTPKNIDGMPKIPETLQPSIKLVRLPLPHTDHHHHLPEDAESTMDIPSNKSYYLKLAYEALQGPVSELLKTSKPDWVFYDFATEWLPPIAKSLNIPCAHYNLTAAWNKVFIDPPKDYQLNNSITLQDMCLPPTWLPFTTTVHLRPHEIRRATSSIKDSDTGRMANFDLRKAYSSCDMFLLRTCRELEGEWLDYLAHKYKVPVVPVGLVPPSIQIRDVEEEDNNPDWVKIKDWLDKQESSSVVYIGFGSELRLSQQDVTELAHGIELSGLRFFWALRNLQKEDLPHGFEERTKERGIVWKSWAPQIKILGHAAIGGCITHCGTNSLVEMLNFGHVLVTLPYLLDQALFSRVLEEKKVGIEVPRSEKDGSFTRDDVAKTLKLAIVDEEGSDYRKNAKEMGKVFSSTDLHSRYIDDCIVALQKYKTPNSNC

SEQ ID NO: 53519 - DNA, 1371 bp, Glycine max
  misc_feature (1)..(1371): Ceres Seq. ID no. 14311005
ttaactctgcatctggccaaaatgtccaggagtcagttgactgagattatctctgagctgaagggaatggctacacagaacaaggaactggctcgtcagctgttgctttcaaggccacagttgcccaaggctctttttcaggctcagataatgctaggaatggtgacttcccaagtgttacaaatgccgaaccttaggctggtttcagatcaaacctcacagtctttaatgaatgaaggccagctgggtcagccatcattggttcaaactctgtcaggccttcctcctcctgggcagggcaagttgcagcctggtttgacaccttatgctcaagaaggccaagtcaacaccatacctcataatcctttggctcctaatcaattaactgcacatccaaagcctccagtgcagcctcggattccccttcagcaacatccaaacaatcttgtactgccaggaacattgtcagggcagtctaatttaatgcttccttctgcacgtcctccaggtttgggcagtttgtctgttaggcctctaattcaaccgggaacttcaactgctctgaaccagcaaatgcatccctctttgctacagcattctgtacatgttggaaactcaactgtaggacataatattcaaatgcattgcccctccatgtcatcagcaaattctcagttactgagtaaaggtgataaatcttctaaagttattgaggatttaaattgggccaagagagctaatacacattcaaaatcaaacattcctttgggagtagagaaaacaaacatggttcatgattcttcagaatcttttactcggccgtcaaaggtcatgaaattggatgagggaaggagtgcccctctttcttcaggaatttcagacatgcctttcaccgatggatcatctcatatcctgggaagaagttcattacctgtacatgcagctcctaaagcggaagggcaatactctgagcaacaattttctcagcttccacctgatgtggagtctgttttgctgcaacaagtattgaatctgacaccagaacaattgagttccttgccaccagatcagcaacaacaggtcattcagctccagcaggctctacggcgagatcagatacagccctcataacaaacagggaactcatcaacagttcaaatagcataaacttatttgtatactagcattttctgtagattagcatcagaatatccaaattctttcaaccactattgcttctttttgtaatttgttttctaattccttgtccaaatattcgatgtagcattgaggggctccagatgggcgtataaatcatttagaagagatgtacaataataattttgacgataaatttttttccgttgacac

SEQ ID NO: 53520 - protein, 376 aa, Glycine max
  peptide (1)..(376): Ceres Seq. ID no. 14311006
LTLHLAKMSRSQLTEIISELKGMATQNKELARQLLLSRPQLPKALFQAQIMLGMVTSQVLQMPNLRLVSDQTSQSLMNEGQLGQPSLVQTLSGLPPPGQGKLQPGLTPYAQEGQVNTIPHNPLAPNQLTAHPKPPVQPRIPLQQHPNNLVLPGTLSGQSNLMLPSARPPGLGSLSVRPLIQPGTSTALNQQMHPSLLQHSVHVGNSTVGHNIQMHCPSMSSANSQLLSKGDKSSKVIEDLNWAKRANTHSKSNIPLGVEKTNMVHDSSESFTRPSKVMKLDEGRSAPLSSGISDMPFTDGSSHILGRSSLPVHAAPKAEGQYSEQQFSQLPPDVESVLLQQVLNLTPEQLSSLPPDQQQQVIQLQQALRRDQIQPS

SEQ ID NO: 53521 - protein, 369 aa, Glycine max
  peptide (1)..(369): Ceres Seq. ID no. 14311007
MSRSQLTEIISELKGMATQNKELARQLLLSRPQLPKALFQAQIMLGMVTSQVLQMPNLRLVSDQTSQSLMNEGQLGQPSLVQTLSGLPPPGQGKLQPGLTPYAQEGQVNTIPHNPLAPNQLTAHPKPPVQPRIPLQQHPNNLVLPGTLSGQSNLMLPSARPPGLGSLSVRPLIQPGTSTALNQQMHPSLLQHSVHVGNSTVGHNIQMHCPSMSSANSQLLSKGDKSSKVIEDLNWAKRANTHSKSNIPLGVEKTNMVHDSSESFTRPSKVMKLDEGRSAPLSSGISDMPFTDGSSHILGRSSLPVHAAPKAEGQYSEQQFSQLPPDVESVLLQQVLNLTPEQLSSLPPDQQQQVIQLQQALRRDQIQPS

SEQ ID NO: 53522 - protein, 354 aa, Glycine max
  peptide (1)..(354): Ceres Seq. ID no. 14311008
MATQNKELARQLLLSRPQLPKALFQAQIMLGMVTSQVLQMPNLRLVSDQTSQSLMNEGQLGQPSLVQTLSGLPPPGQGKLQPGLTPYAQEGQVNTIPHNPLAPNQLTAHPKPPVQPRIPLQQHPNNLVLPGTLSGQSNLMLPSARPPGLGSLSVRPLIQPGTSTALNQQMHPSLLQHSVHVGNSTVGHNIQMHCPSMSSANSQLLSKGDKSSKVIEDLNWAKRANTHSKSNIPLGVEKTNMVHDSSESFTRPSKVMKLDEGRSAPLSSGISDMPFTDGSSHILGRSSLPVHAAPKAEGQYSEQQFSQLPPDVESVLLQQVLNLTPEQLSSLPPDQQQQVIQLQQALRRDQIQPS

SEQ ID NO: 53523 - protein, 300 aa, Glycine max
  peptide (1)..(300): Ceres Seq. ID no. 14311009
MNEGQLGQPSLVQTLSGLPPPGQGKLQPGLTPYAQEGQVNTIPHNPLAPNQLTAHPKPPVQPRIPLQQHPNNLVLPGTLSGQSNLMLPSARPPGLGSLSVRPLIQPGTSTALNQQMHPSLLQHSVHVGNSTVGHNIQMHCPSMSSANSQLLSKGDKSSKVIEDLNWAKRANTHSKSNIPLGVEKTNMVHDSSESFTRPSKVMKLDEGRSAPLSSGISDMPFTDGSSHILGRSSLPVHAAPKAEGQYSEQQFSQLPPDVESVLLQQVLNLTPEQLSSLPPDQQQQVIQLQQALRRDQIQPS

SEQ ID NO: 53524 - DNA, 1743 bp, Glycine max
  misc_feature (1)..(1743): Ceres Seq. ID no. 14301413
gattctccttgaaggcactgcagcataccacaaaaccccttgtccctctctcacgttaaacggcagagccactgcaacaagaagcagcagagttcgccgctgctccgcaaccttaccctatcaattttcgtccttgttttcgtaattgcagcgaagaatggggaagcgtaaggagcggattcagaacccggaacccttcgatccgtacggcgccgaccccgcgaaaacgaagaagcgctcgaaggcgccgaagcggcaccagcaggaggagcagttcatcgctcccaaactcagctccaagatcatgaagcaggcgctaatccagcagaaggaggaggagaaggaggaggcgcccgagaacaacgccgcaaatttattcgaagaggttccggatgtcgaggaagacggcggcgacgacatcgacgactttgccgggttctccgaaacgcagagtcagttcgccgaatatgatgaggaaattaatgaggaggatgagagactaatggaagcatttgcattgaaggagcctggtcagcagaaaacacttgctgacctcattgtccaaagaataaaagaaaaggatgcgtctgttgcttcagaaaatcgacccgttccaaaattggataactccataattgacatatacaagggggttgggactcatctcagcagatatacaataggcaaaatacccaaggcattcaaacacattccctctatgcaactttgggaggaggtcttgtatataaccgaacctgagaattggtctccaaatgctctttatcaagccactaggatttttgcttctaattttggtgcaaaaaaggcagagcgcttctacaagcttgtgttgcttccaagagtgagagaagatataaggaagaacaaacggctgcattttgctttatatcaaactctgaaaaaggctttgtacaaacctgctgcattctttaagggcatactgttttcactatgcgagtcacgcacttgcactcttagggaagcagtcatcataggaagcattatagaaaaggtttctattcctccacttcattcaagtgttgcgctattgaagctttctggaatggaatattgtggcaccacaagctatttcataaagcttcttctggagaaaaaatatgctttgccatatcgtgtggttgatgcagttgttgctcattttacaagatttctcaatgaaaccaggataatgcctgttatatggcaccagtcacttcttgcttttgtgcagaggtacaaaaatgagctgcagaaggaagataaggatagattaaggaatctactggaaaagcaaaaacataaattggttacacctgaaattagtagagagctagaccacagccgcaaccgaggtgaaaaggaggaagatcttatgtcaatttccagtccagtatatgtgataaacaagactattgaagaagatagatttgacattccagatgtaccaatggaggaggattaatttattgtggatttttcatcgctattcacttgggagggagaaaatgtttagagacatgtcctcgtttagtttcacaagggtgcagttttgagcgtcagcaatcttgtactgcaatgcatgggatttataattattatttggccattttatattttttcagtggttttttgacaaatgcaatctttttctgatgtattcttaccttaagtgccctaaaatacaattcaacttgctataatatttctagtgttttaaatgtg

SEQ ID NO: 53525 - protein, 441 aa, Glycine max
  peptide (1)..(441): Ceres Seq. ID no. 14301414
MGKRKERIQNPEPFDPYGADPAKTKKRSKAPKRHQQEEQFIAPKLSSKIMKQALIQQKEEEKEEAPENNAANLFEEVPDVEEDGGDDIDDFAGFSETQSQFAEYDEEINEEDERLMEAFALKEPGQQKTLADLIVQRIKEKDASVASENRPVPKLDNSIIDIYKGVGTHLSRYTIGKIPKAFKHIPSMQLWEEVLYITEPENWSPNALYQATRIFASNFGAKKAERFYKLVLLPRVREDIRKNKRLHFALYQTLKKALYKPAAFFKGILFSLCESRTCTLREAVIIGSIIEKVSIPPLHSSVALLKLSGMEYCGTTSYFIKLLLEKKYALPYRVVDAVVAHFTRFLNETRIMPVIWHQSLLAFVQRYKNELQKEDKDRLRNLLEKQKHKLVTPEISRELDHSRNRGEKEEDLMSISSPVYVINKTIEEDRFDIPDVPMEED

SEQ ID NO: 53526 - protein, 392 aa, Glycine max
  peptide (1)..(392): Ceres Seq. ID no. 14301415
MKQALIQQKEEEKEEAPENNAANLFEEVPDVEEDGGDDIDDFAGFSETQSQFAEYDEEINEEDERLMEAFALKEPGQQKTLADLIVQRIKEKDASVASENRPVPKLDNSIIDIYKGVGTHLSRYTIGKIPKAFKHIPSMQLWEEVLYITEPENWSPNALYQATRIFASNFGAKKAERFYKLVLLPRVREDIRKNKRLHFALYQTLKKALYKPAAFFKGILFSLCESRTCTLREAVIIGSIIEKVSIPPLHSSVALLKLSGMEYCGTTSYFIKLLLEKKYALPYRVVDAVVAHFTRFLNETRIMPVIWHQSLLAFVQRYKNELQKEDKDRLRNLLEKQKHKLVTPEISRELDHSRNRGEKEEDLMSISSPVYVINKTIEEDRFDIPDVPMEED

SEQ ID NO: 53527 - protein, 326 aa, Glycine max
  peptide (1)..(326): Ceres Seq. ID no. 14301416
MEAFALKEPGQQKTLADLIVQRIKEKDASVASENRPVPKLDNSIIDIYKGVGTHLSRYTIGKIPKAFKHIPSMQLWEEVLYITEPENWSPNALYQATRIFASNFGAKKAERFYKLVLLPRVREDIRKNKRLHFALYQTLKKALYKPAAFFKGILFSLCESRTCTLREAVIIGSIIEKVSIPPLHSSVALLKLSGMEYCGTTSYFIKLLLEKKYALPYRVVDAVVAHFTRFLNETRIMPVIWHQSLLAFVQRYKNELQKEDKDRLRNLLEKQKHKLVTPEISRELDHSRNRGEKEEDLMSISSPVYVINKTIEEDRFDIPDVPMEED

SEQ ID NO: 53528 - DNA, 1547 bp, Glycine max
  misc_feature (1)..(1547): Ceres Seq. ID no. 15174780
tcgaaaaagaaaaaaagagaagggggaaatctcttcttcaatggcggcagagtcatctcgcagtagcgctaaacgcccctttatggaagaagacgacaatgaattctccaaaaagccaccagaaaaaagggttaggtttccaaagggaaagaaagtgaagccaggagatgaagtggtggtggacaaagcaaatgttgaggagggtgaagttgacttggtgaatgctaaaactgccaccaatgctgcaaaagagcgggaaaaactcagaaggtttctaaagggaaagaaagtgaagccaggagatgaagtggtggtggacaaagcaaatgttgaggagggtgaagaagttgacttgatgaatcctaaaattgctgctgccaaagaacgggcaaaactcagaaatcaaattacttctgaactccttagtgagggcgctggaggtatcacaaacgatttatcggctgctgaagtgacatatgaggataacgagaattttgttgatgatgggattcaaattgagcctttcaacctagagaaagaaagggaagaaggttattttgatgctgcaggaaattttgttgaatatgtaagagagaatgagattaaggatgcatggcttgataatgttgaagttgatccaaaatatgctgcattaagctctgtagcaacaaatgatgaagatgagggccccccagacctttcttctaaagatattggaatcatgaagaggcgcattgcaaatgttcttgaacctggggaaacggtcttgcaagccttaagaaggttaaaaggtaacagtgatagaaaggcaaaaatgtctgctgagactaagattgtatttgaccagctaactgaggatgctatgaagctgatggagaatggtgaatacaatgtttatcatgaaaagcaagaggtttttgatcgtgaagcagaaggatatgagaagttagcccaggcaaattatgatatgtttgctgatgatgacgagcatgataccagtaagccatctacagatgaaaataatgcagtcagtcaatcttcttcagttgccataaattctggtcctgagggtggagcatcacaaaacgattatgtgtatgatgaatcttctgggtactattacagcagcactttgggctattattatgatccaaatacagggctttattgctcagcagcatcagggcaatggtactcatataatgaggagactagcgcatatgaagaagttcacgaggttgcatccaatgtgagttgagtgactagtttaaggggagaataggctatttagcatagccacaatcactgtctcagtggctcatgtacagaccgaagcactcttgatctttttgtacgttatgggggattttcttcttaggtgctactgctaacagttgtgtttttatctctttaaggttcctgttttatagttccttaaacttttcgcctaaaaattacttagaatgatcccttgaagttaggagctgtacaatgtttactcttatcaatttgtgagttatatgcagttttgccttcaaattgcaaat

SEQ ID NO: 53529 - protein, 418 aa, Glycine max
  peptide (1)..(418): Ceres Seq. ID no. 15174781
RKRKKEKGEISSSMAAESSRSSAKRPFMEEDDNEFSKKPPEKRVRFPKGKKVKPGDEVVVDKANVEEGEVDLVNAKTATNAAKEREKLRRFLKGKKVKPGDEVVVDKANVEEGEEVDLMNPKIAAAKERAKLRNQITSELLSEGAGGITNDLSAAEVTYEDNENFVDDGIQIEPFNLEKEREEGYFDAAGNFVEYVRENEIKDAWLDNVEVDPKYAALSSVATNDEDEGPPDLSSKDIGIMKRRIANVLEPGETVLQALRRLKGNSDRKAKMSAETKIVFDQLTEDAMKLMENGEYNVYHEKQEVFDREAEGYEKLAQANYDMFADDDEHDTSKPSTDENNAVSQSSSVAINSGPEGGASQNDYVYDESSGYYYSSTLGYYYDPNTGLYCSAASGQWYSYNEETSAYEEVHEVASNVS

SEQ ID NO: 53530 - protein, 405 aa, Glycine max
  peptide (1)..(405): Ceres Seq. ID no. 15174782
MAAESSRSSAKRPFMEEDDNEFSKKPPEKRVRFPKGKKVKPGDEVVVDKANVEEGEVDLVNAKTATNAAKEREKLRRFLKGKKVKPGDEVVVDKANVEEGEEVDLMNPKIAAAKERAKLRNQITSELLSEGAGGITNDLSAAEVTYEDNENFVDDGIQIEPFNLEKEREEGYFDAAGNFVEYVRENEIKDAWLDNVEVDPKYAALSSVATNDEDEGPPDLSSKDIGIMKRRIANVLEPGETVLQALRRLKGNSDRKAKMSAETKIVFDQLTEDAMKLMENGEYNVYHEKQEVFDREAEGYEKLAQANYDMFADDDEHDTSKPSTDENNAVSQSSSVAINSGPEGGASQNDYVYDESSGYYYSSTLGYYYDPNTGLYCSAASGQWYSYNEETSAYEEVHEVASNVS

SEQ ID NO: 53531 - protein, 391 aa, Glycine max
  peptide (1)..(391): Ceres Seq. ID no. 15174783
MEEDDNEFSKKPPEKRVRFPKGKKVKPGDEVVVDKANVEEGEVDLVNAKTATNAAKEREKLRRFLKGKKVKPGDEVVVDKANVEEGEEVDLMNPKIAAAKERAKLRNQITSELLSEGAGGITNDLSAAEVTYEDNENFVDDGIQIEPFNLEKEREEGYFDAAGNFVEYVRENEIKDAWLDNVEVDPKYAALSSVATNDEDEGPPDLSSKDIGIMKRRIANVLEPGETVLQALRRLKGNSDRKAKMSAETKIVFDQLTEDAMKLMENGEYNVYHEKQEVFDREAEGYEKLAQANYDMFADDDEHDTSKPSTDENNAVSQSSSVAINSGPEGGASQNDYVYDESSGYYYSSTLGYYYDPNTGLYCSAASGQWYSYNEETSAYEEVHEVASNVS

SEQ ID NO: 53532 - DNA, 821 bp, Glycine max
  misc_feature (1)..(821): Ceres Seq. ID no. 14310659
actcaagcacaacatctctatcgagtaaattaactatgaagcctaccctactattatccctttccttcctgcctctctttgctttcctggctctttcagaagatgttgaacaagttgtggacataagtggcaaccccattttcccaggtggcacatattacattatgccatcaacttggggcgctgccggtggtggattgaaactaggccggacaggaaactcaaactgcccagttactgttttgcaagattactcagaaatcttccgtggcacaccagtcaaattcagcatacctgggataagccctggaatcatctttacaggtactccacttgaaatcgagttcgcagagaaaccttattgtgctgaatcctccaaatgggtggcgtttgtggacaatgaaatccaaaaggcatgtgtgggtattggtggtcctgaaggtcatcctggtcaacaaacatttagtggcacatttagcattcagaaatataaatttggatacaaacttgtgttctgtatcactggctcaggcacttgtttagatattggaaggtttgatgccaaaaatggtgagggaggaagacgtttgaatctcactgagcatgaggccttcgacattgttttcatagaagcttctaaggttgatggaattatcaagtccgtagtttgaatcaaatcaaataatgtcaagggtagctagatagtgttgagttaatgcttaatcatatgtttgtcgttgtgatatgcattaagtactctgctcccggttgctaacaaaaccccaatgcaaaaataagtgataaaataatggttttgcttt

SEQ ID NO: 53533 - protein, 222 aa, Glycine max
  peptide (1)..(222): Ceres Seq. ID no. 14310660
SSTTSLSSKLTMKPTLLLSLSFLPLFAFLALSEDVEQVVDISGNPIFPGGTYYIMPSTWGAAGGGLKLGRTGNSNCPVTVLQDYSEIFRGTPVKFSIPGISPGIIFTGTPLEIEFAEKPYCAESSKWVAFVDNEIQKACVGIGGPEGHPGQQTFSGTFSIQKYKFGYKLVFCITGSGTCLDIGRFDAKNGEGGRRLNLTEHEAFDIVFIEASKVDGIIKSVV

SEQ ID NO: 53534 - protein, 211 aa, Glycine max
  peptide (1)..(211): Ceres Seq. ID no. 14310661
MKPTLLLSLSFLPLFAFLALSEDVEQVVDISGNPIFPGGTYYIMPSTWGAAGGGLKLGRTGNSNCPVTVLQDYSEIFRGTPVKFSIPGISPGIIFTGTPLEIEFAEKPYCAESSKWVAFVDNEIQKACVGIGGPEGHPGQQTFSGTFSIQKYKFGYKLVFCITGSGTCLDIGRFDAKNGEGGRRLNLTEHEAFDIVFIEASKVDGIIKSVV

SEQ ID NO: 53535 - protein, 168 aa, Glycine max
  peptide (1)..(168): Ceres Seq. ID no. 14310662
MPSTWGAAGGGLKLGRTGNSNCPVTVLQDYSEIFRGTPVKFSIPGISPGIIFTGTPLEIEFAEKPYCAESSKWVAFVDNEIQKACVGIGGPEGHPGQQTFSGTFSIQKYKFGYKLVFCITGSGTCLDIGRFDAKNGEGGRRLNLTEHEAFDIVFIEASKVDGIIKSVV

SEQ ID NO: 53536 - DNA, 1418 bp, Glycine max
  misc_feature (1)..(1418): Ceres Seq. ID no. 14303113
taattgttatttttatataccagtgactgtccctgtaactcttgacatgctcttgcacatggaccgcagtagtaaatcatgcacgaccttgtacgtgttgtagaggttcctggtgtatcgatggaactttgtggtgggactcatgtccgtaatacttctgaaattcgtggttttaaaattatctcagaacagggtattgcatctggaatcagacgtatcgaagctgtagctggggaagctttcattgaatatatcaatgcccgagacttttatctgaagcagctatgttccactctcaaagttaaaccagaagaagtgacaacaaggatagaaaacctattagaggagttacgggtagtgagaaatgaaaattctgctgtgcgtgcaaaagcagcaatctacaaagcctcggtcattgcaagcaaagcattgttggtgggaaattcaaaacagtacagggtactagttgagtgctttgatgatgttgatgctgagtcacttaaaagtgccgcagaatatttactggaaacactaacagatccagcagctgtgatactaggctcatgtccaggtgaagggaaggttagtctagttgctgcttttactccaggggtggttgatcaggggattcaggcaggaaagtttattggacaaatagcaaaattatgtggtggtggaggaggtggaaggccaaattttgctcaggctggtgggaggaagcctgaaaatttggcaagtgcccttgataaggctcggtcagagcttatagccactctatgtgaaaaagggaattgaatttaagtacacttagcagatagatctttttatgctaaagcagcagaaaatattgattctctgttgtcgaagaattcatcacaaaacaattcacaagcaaaaggggcggaagctgctgaagttttaacgagttttcttgcaattccagggggcatgtaattgaagtttcaaaatagtatagagcatttgttcgtgtgactttattctcctgacaacctggcctgcattcacacattccaacttgtaaattttgacatgcgcatctcagattggttgcaggatgtaagtgcaaacactatatatatacacctgaaagatagttgagagtgaatgacggcggtggattcactcctttctcttttgattgccttggaggaagttgggaccccatagaattaaaagtgatagaactgaaggttaaactgtttggtgaaagtaagtgaatgatgttatgtctagcaacttgacggtcaagaaaattgtcaattgttgtgggtgaaacgctacttaaaaagaaagaaaaaatccatgattatcccggatgtgaaattgtgttatagaattatgtcactaaacggtagatgagaaattgtcacgtcccaaaatatggcctattttatgtc

SEQ ID NO: 53537 - protein, 238 aa, Glycine max
  peptide (1)..(238): Ceres Seq. ID no. 14303114
MHDLVRVVEVPGVSMELCGGTHVRNTSEIRGFKIISEQGIASGIRRIEAVAGEAFIEYINARDFYLKQLCSTLKVKPEEVTTRIENLLEELRVVRNENSAVRAKAAIYKASVIASKALLVGNSKQYRVLVECFDDVDAESLKSAAEYLLETLTDPAAVILGSCPGEGKVSLVAAFTPGVVDQGIQAGKFIGQIAKLCGGGGGGRPNFAQAGGRKPENLASALDKARSELIATLCEKGN

SEQ ID NO: 53538 - protein, 224 aa, Glycine max
  peptide (1)..(224): Ceres Seq. ID no. 14303115
MELCGGTHVRNTSEIRGFKIISEQGIASGIRRIEAVAGEAFIEYINARDFYLKQLCSTLKVKPEEVTTRIENLLEELRVVRNENSAVRAKAAIYKASVIASKALLVGNSKQYRVLVECFDDVDAESLKSAAEYLLETLTDPAAVILGSCPGEGKVSLVAAFTPGVVDQGIQAGKFIGQIAKLCGGGGGGRPNFAQAGGRKPENLASALDKARSELIATLCEKGN

SEQ ID NO: 53539 - DNA, 1800 bp, Glycine max
  misc_feature (1)..(1800): Ceres Seq. ID no. 14316208
actcatataaataactcagggcggtggctatgtcaaactgagaactaagatcccgctggcggttggcgcaacctttcgatcttcatccaacggggcaacgttggatctgctgaactgaacttctttttatatgcactctgtgatttcactctgcttcgccatcctatgggggacaacaacagcaacaacgatgccttcatgcgcaaccaaaacgccgccgttcaggcccgcaccaaagcgcagaaccgctccaacgtccttcagctcaaactgattggacagagtcacccaaccggtctcacagcgaacctgttgaagctcttcgagcctaggcctccgttggagtacaagccacctccggagaaacgaaaatgcccaccgttatcagggatggcacaatttgtgagcaagtttgccgagcctggcgagccagaatacgctccacctgtcccagaaactgagactcctgcacaaaaaagagccagaatacacaagctaaggcttgagaagggagctgcaaaggctgctgaggagcttgagaaatatgatccacataatgacccaaatgtgtcgggagatccatacaagacattgtttgtggctaaactcagttacgagaccactgagagcagaatcaaaagggagtttgagtcatatggtccaatcaaacgggttcgattagttgctgacaaagatataaataagcccaggggttatgctttcattgagtatctgcatacaagagacatgaaagctgcttataaacaagctgatggtaggaaaattgatggtagaagggtgcttgtggatgttgagcgtgggaggactgttccaaattggagaccccgtcgcttaggtggtggacttggtaccactagagttggaggtgaagaagttaatcagcgacattctgggagggagcaacaacagtctcgttctgaagaaccgagagtgcgagaggaccgacacgctgatagagacagggaaatatcacgtgaaagaggtagggacaaagacagagaacgggagcgatcacgtgaacattctcatgaaagggtcagggatcgtgatcatagggaggataggcaccacagagaccgggataggaacagggacagagaccgagacagggaaagagatagagatcgtgggcgtgatcgagatagaacacgggaccgtgatcgtgagcgagggagggaccgtgatcgggatcgagaatatgatcgacatcgtgagagggatagagattatgaagttggtgaccctgatcgaggacgctcacgtgatagggagtctgattatgatcgtgttgaatctaaacatggggaaaggaatcatgactatgaacctgaggatgatcgtggtaggcataaccagtatgaacatggacgtaggcatgcagaccctgatcatgaccctgagcggtatgaccactacaatcatggagatgaccatggtgaccattacaatcagtatcgtgaccatgatgggatggaagatgactaccatgctggacgtgcaacatctgaatcgcatgaaaaggagagaagtcatgatgtggaccgtgaatatcaacgctcagagagatcacattcccgggagtatgattattaggacttgggcatagttcttctcaactttgttggtaagattttataatttggtatgtttacttttgaatcttgctcacctgccggtattggtagttgttgaatggattaaggcacagtgtgatcattaaaaagaaaactgtagctgctgctatccatatggcccatatttgaaagctgccttttgtcg

SEQ ID NO: 53540 - protein, 482 aa, Glycine max
  peptide (1)..(482): Ceres Seq. ID no. 14316209
MGDNNSNNDAFMRNQNAAVQARTKAQNRSNVLQLKLIGQSHPTGLTANLLKLFEPRPPLEYKPPPEKRKCPPLSGMAQFVSKFAEPGEPEYAPPVPETETPAQKRARIHKLRLEKGAAKAAEELEKYDPHNDPNVSGDPYKTLFVAKLSYETTESRIKREFESYGPIKRVRLVADKDINKPRGYAFIEYLHTRDMKAAYKQADGRKIDGRRVLVDVERGRTVPNWRPRRLGGGLGTTRVGGEEVNQRHSGREQQQSRSEEPRVREDRHADRDREISRERGRDKDRERERSREHSHERVRDRDHREDRHHRDRDRNRDRDRDRERDRDRGRDRDRTRDRDRERGRDRDRDREYDRHRERDRDYEVGDPDRGRSRDRESDYDRVESKHGERNHDYEPEDDRGRHNQYEHGRRHADPDHDPERYDHYNHGDDHGDHYNQYRDHDGMEDDYHAGRATSESHEKERSHDVDREYQRSERSHSREYDY

SEQ ID NO: 53541 - protein, 471 aa, Glycine max
  peptide (1)..(471): Ceres Seq. ID no. 14316210
MRNQNAAVQARTKAQNRSNVLQLKLIGQSHPTGLTANLLKLFEPRPPLEYKPPPEKRKCPPLSGMAQFVSKFAEPGEPEYAPPVPETETPAQKRARIHKLRLEKGAAKAAEELEKYDPHNDPNVSGDPYKTLFVAKLSYETTESRIKREFESYGPIKRVRLVADKDINKPRGYAFIEYLHTRDMKAAYKQADGRKIDGRRVLVDVERGRTVPNWRPRRLGGGLGTTRVGGEEVNQRHSGREQQQSRSEEPRVREDRHADRDREISRERGRDKDRERERSREHSHERVRDRDHREDRHHRDRDRNRDRDRDRERDRDRGRDRDRTRDRDRERGRDRDRDREYDRHRERDRDYEVGDPDRGRSRDRESDYDRVESKHGERNHDYEPEDDRGRHNQYEHGRRHADPDHDPERYDHYNHGDDHGDHYNQYRDHDGMEDDYHAGRATSESHEKERSHDVDREYQRSERSHSREYDY

SEQ ID NO: 53542 - protein, 407 aa, Glycine max
  peptide (1)..(407): Ceres Seq. ID no. 14316211
MAQFVSKFAEPGEPEYAPPVPETETPAQKRARIHKLRLEKGAAKAAEELEKYDPHNDPNVSGDPYKTLFVAKLSYETTESRIKREFESYGPIKRVRLVADKDINKPRGYAFIEYLHTRDMKAAYKQADGRKIDGRRVLVDVERGRTVPNWRPRRLGGGLGTTRVGGEEVNQRHSGREQQQSRSEEPRVREDRHADRDREISRERGRDKDRERERSREHSHERVRDRDHREDRHHRDRDRNRDRDRDRERDRDRGRDRDRTRDRDRERGRDRDRDREYDRHRERDRDYEVGDPDRGRSRDRESDYDRVESKHGERNHDYEPEDDRGRHNQYEHGRRHADPDHDPERYDHYNHGDDHGDHYNQYRDHDGMEDDYHAGRATSESHEKERSHDVDREYQRSERSHSREYDY

SEQ ID NO: 53543 - DNA, 1108 bp, Glycine max
  misc_feature (1)..(1108): Ceres Seq. ID no. 14316188
gttgacattacttgaaaaggtttgctcagattttcctacttttggcgattatgtgaaaaatacatggctgattcctcacaaggaaaaatttgttatggcatgggtagatcgagtgatgcatttgggtaacactacaatcgacaggtttgaaacagcacattggaggctggagaacttgcttcaagatagtgggggggatatgtgtagttgttgggatgctgtgaacaacatgattaaattgcaacacacacagattaaggtgtcgtttgagaaaagtataaacattgtggaatacaatgatccattctatagcaagctgcggggatttgtatcaaggaatgcattgagttatatagctgaccattatgaccgagttaagaccgttggtattgatattgatggttctttatgtggatgcacaattagaactacacatggtctaccttgtgcgtgtgaacttgctaagtatagtaggacgtggcacccaattcccttgcaagcaattcatgttcattggaggacattaaacttcagtgaccaagaaatgaacaatgaggggctcgagttagcgttgcaacgtgaagtggatgctttgcacaatcaatttcaggaacttgattatgctggaaaaattactttgaaggccaaattgcgtgaactagcatttcctgatgcaattttaatgtgtccgtctcctgaaaattactttgatgctccaaaggctctgggtttccgcgagagacaaatcaattgaatgtgatcctttatgtccggagcatgctgatgcataacattctgaccatgatagcatgttagctcacccttcatcttagaaatcagcccatgagagttttgcccaaattccggttgagattcatccttttattgaagacattgtagatgtgaaacagacgagaaatgtggttaattgtcttagatatattgtggtcttagtttctttatcttcacatggaagcattacgtttttccttcttggaggttaaccaacgttatgtcagtcaagtcacctacttaggtttgtgcataaatgtcactctgtacaactatgatatgtagtttgtttaaaatcaggtctttaatttaatct

SEQ ID NO: 53544 - protein, 250 aa, Glycine max
  peptide (1)..(250): Ceres Seq. ID no. 14316189
LTLLEKVCSDFPTFGDYVKNTWLIPHKEKFVMAWVDRVMHLGNTTIDRFETAHWRLENLLQDSGGDMCSCWDAVNNMIKLQHTQIKVSFEKSINIVEYNDPFYSKLRGFVSRNALSYIADHYDRVKTVGIDIDGSLCGCTIRTTHGLPCACELAKYSRTWHPIPLQAIHVHWRTLNFSDQEMNNEGLELALQREVDALHNQFQELDYAGKITLKAKLRELAFPDAILMCPSPENYFDAPKALGFRERQIN

SEQ ID NO: 53545 - protein, 219 aa, Glycine max
  peptide (1)..(219): Ceres Seq. ID no. 14316190
MAWVDRVMHLGNTTIDRFETAHWRLENLLQDSGGDMCSCWDAVNNMIKLQHTQIKVSFEKSINIVEYNDPFYSKLRGFVSRNALSYIADHYDRVKTVGIDIDGSLCGCTIRTTHGLPCACELAKYSRTWHPIPLQAIHVHWRTLNFSDQEMNNEGLELALQREVDALHNQFQELDYAGKITLKAKLRELAFPDAILMCPSPENYFDAPKALGFRERQIN

SEQ ID NO: 53546 - protein, 212 aa, Glycine max
  peptide (1)..(212): Ceres Seq. ID no. 14316191
MHLGNTTIDRFETAHWRLENLLQDSGGDMCSCWDAVNNMIKLQHTQIKVSFEKSINIVEYNDPFYSKLRGFVSRNALSYIADHYDRVKTVGIDIDGSLCGCTIRTTHGLPCACELAKYSRTWHPIPLQAIHVHWRTLNFSDQEMNNEGLELALQREVDALHNQFQELDYAGKITLKAKLRELAFPDAILMCPSPENYFDAPKALGFRERQIN

SEQ ID NO: 53547 - DNA, 1691 bp, Glycine max
  misc_feature (1)..(1691): Ceres Seq. ID no. 14304479
gaagattgtatttcttcttgcagaagtagagaaaagttgaagaaggaatctcctaagactgaaaaaaacccaatggatttgaattcctctccttccaacaacacaattgccgtgaatggaacaatccccgtcgcttccacgttcgcaaccgccaccgcgccgtcggataaccctccgccggcggacagctccggcgaccggaaacccatcgccctgtggccggggatgtaccattctccggtgaccaccgccctatgggaagctcgcagcaatattttcgagaggcttctggaccctcccagggacgctcctccgcagagtgaattgctcacgagaaccccctcgcagagcaggaccagcatcttgtacaacttctcctctgatttcgtgctcagagaacagtatagggatccctggaatgaggttcgaattgggaagttgctcgaagatcttgatgccctcgctggaactatttccgtcaagcattgttctgatgaagctagcacaacaaggccacttatagttgtcactgcttcagttgataagattgtactaaagaagccaattagtgttgacattgatctcaagatagttggttttgttatatgggttgggcactcttcaatagagattcaactggaggttactcagtccaatgaagagggcaatgattcagactcagtagcactgacagccaacttcatatttgttgctcgggactcaaaaactgggaaagctgctccggtgaatcgactttcaccagaaaatgctcatgaaaaacttctgtttgaacaagctgaggcaagaagtaatttgaggaaaacgaaaagaggaggggaaaagagggactttgagaatggggagaaaaataggcttcgggccctattggctgaaggaagaatcttctgtgacatgccagctttagcagaccgaaacagcattcttctaaaggataccagccttgagaatgccttaatatgccagccacagcaaaggaacatccatggtcgaatatttggaggtttcttgatgcatcgtgcatttgaattggctttctcaacagcatatgcctttgctggattagctccttgctttcttgaagttgatcatgttgatttcttaagacctgttgatgtaggggactttttgcgtctcaaatcttgtgttctgtacacggaggttcacgatccagatcagccacttattaacgttgaagttgttgctcatgttacacgacccgagctgcgtactagtgaggtatcaaatactttccacttctctttcactgtccgtccagaagccaaggcgatgaaaaatggatttaaacttcgcaatgtagtaccagcaacggaggaagaagcacgacgtatattagagcgcatagatgctgacaacttgaatgaattcttcagagcataagaagaaaaacatcaattagctgataaagtatttaaaatatccaccgctaattatgtgagcagaatttcaaagatgattaactctcttatataataaatttttctgcccaattttaagagggaactagtatgccttatatgtctagcatcattggacttgatagaaggcaactggtgtttagacaagtatatgaacctgaatctagtaggcacctgctgtgcaagttgtataaggaaaaacataggtaagccaatgaaagaaagtttacaatg

SEQ ID NO: 53548 - protein, 472 aa, Glycine max
  peptide (1)..(472): Ceres Seq. ID no. 14304480
EDCISSCRSREKLKKESPKTEKNPMDLNSSPSNNTIAVNGTIPVASTFATATAPSDNPPPADSSGDRKPIALWPGMYHSPVTTALWEARSNIFERLLDPPRDAPPQSELLTRTPSQSRTSILYNFSSDFVLREQYRDPWNEVRIGKLLEDLDALAGTISVKHCSDEASTTRPLIVVTASVDKIVLKKPISVDIDLKIVGFVIWVGHSSIEIQLEVTQSNEEGNDSDSVALTANFIFVARDSKTGKAAPVNRLSPENAHEKLLFEQAEARSNLRKTKRGGEKRDFENGEKNRLRALLAEGRIFCDMPALADRNSILLKDTSLENALICQPQQRNIHGRIFGGFLMHRAFELAFSTAYAFAGLAPCFLEVDHVDFLRPVDVGDFLRLKSCVLYTEVHDPDQPLINVEVVAHVTRPELRTSEVSNTFHFSFTVRPEAKAMKNGFKLRNVVPATEEEARRILERIDADNLNEFFRA

SEQ ID NO: 53549 - protein, 448 aa, Glycine max
  peptide (1)..(448): Ceres Seq. ID no. 14304481
MDLNSSPSNNTIAVNGTIPVASTFATATAPSDNPPPADSSGDRKPIALWPGMYHSPVTTALWEARSNIFERLLDPPRDAPPQSELLTRTPSQSRTSILYNFSSDFVLREQYRDPWNEVRIGKLLEDLDALAGTISVKHCSDEASTTRPLIVVTASVDKIVLKKPISVDIDLKIVGFVIWVGHSSIEIQLEVTQSNEEGNDSDSVALTANFIFVARDSKTGKAAPVNRLSPENAHEKLLFEQAEARSNLRKTKRGGEKRDFENGEKNRLRALLAEGRIFCDMPALADRNSILLKDTSLENALICQPQQRNIHGRIFGGFLMHRAFELAFSTAYAFAGLAPCFLEVDHVDFLRPVDVGDFLRLKSCVLYTEVHDPDQPLINVEVVAHVTRPELRTSEVSNTFHFSFTVRPEAKAMKNGFKLRNVVPATEEEARRILERIDADNLNEFFRA

SEQ ID NO: 53550 - protein, 397 aa, Glycine max
  peptide (1)..(397): Ceres Seq. ID no. 14304482
MYHSPVTTALWEARSNIFERLLDPPRDAPPQSELLTRTPSQSRTSILYNFSSDFVLREQYRDPWNEVRIGKLLEDLDALAGTISVKHCSDEASTTRPLIVVTASVDKIVLKKPISVDIDLKIVGFVIWVGHSSIEIQLEVTQSNEEGNDSDSVALTANFIFVARDSKTGKAAPVNRLSPENAHEKLLFEQAEARSNLRKTKRGGEKRDFENGEKNRLRALLAEGRIFCDMPALADRNSILLKDTSLENALICQPQQRNIHGRIFGGFLMHRAFELAFSTAYAFAGLAPCFLEVDHVDFLRPVDVGDFLRLKSCVLYTEVHDPDQPLINVEVVAHVTRPELRTSEVSNTFHFSFTVRPEAKAMKNGFKLRNVVPATEEEARRILERIDADNLNEFFRA

SEQ ID NO: 53551 - DNA, 920 bp, Glycine max
  misc_feature (1)..(920): Ceres Seq. ID no. 13593834
cccgtttcctacaagcatgcacttcctgcccaaattttgcatttgactggagcgtattgttagatatatatcttacctgcccctctactcagttctgggtttattacgcatgtttcatgtatccagccttcattggagcttgatcattatttgcatcccagacaaagaagatgaatcggggccaatcatacttcatttggattctttgggtcttcactctagtaaatcagtttttgataatattaaaagctatttgattgaagaaaagaactacatggatcgagaagacatggcttcagatgtttcaattgcggatagaatatggaagtgccttcctcgtagaatcgaatctcaaatcattcaggttccccaacagaagaatgactatgactgtggtctttttgtattgtacttcattgaacgtttcatggaggaggcaccggaaagactgaaaatgaaagatttagatatgtttggaaggcgatggttcaaacctcaagaggcgtccaatttgagagtgaaaatccgtaagttgcttgtagaaaaattacagaattcagtcacggataattgtaatttggaatcttctccttcatcatctgctggccctgcaactgattgtgttgagactgccagggattctcttactggccctgcaactgattgtgttgagaccaccgaggattctgtgacttaacatggcagaattgcaattgtcatttccttgaacgaacaatctgttgatattcgtatggttggtgccagttttttttttccttgtacagaagccagctattcagctggtaatttttggatagagttttcctatgacctggtaaatagtccatcagtctttaatccaagcaagggtggctaacagttggctgtgcagaaataacaaacaactctagttcctaacc

SEQ ID NO: 53552 - protein, 195 aa, Glycine max
  peptide (1)..(195): Ceres Seq. ID no. 13593835
MFHVSSLHWSLIIICIPDKEDESGPIILHLDSLGLHSSKSVFDNIKSYLIEEKNYMDREDMASDVSIADRIWKCLPRRIESQIIQVPQQKNDYDCGLFVLYFIERFMEEAPERLKMKDLDMFGRRWFKPQEASNLRVKIRKLLVEKLQNSVTDNCNLESSPSSSAGPATDCVETARDSLTGPATDCVETTEDSVT

SEQ ID NO: 53553 - protein, 140 aa, Glycine max
  peptide (1)..(140): Ceres Seq. ID no. 13593836
MDREDMASDVSIADRIWKCLPRRIESQIIQVPQQKNDYDCGLFVLYFIERFMEEAPERLKMKDLDMFGRRWFKPQEASNLRVKIRKLLVEKLQNSVTDNCNLESSPSSSAGPATDCVETARDSLTGPATDCVETTEDSVT

SEQ ID NO: 53554 - protein, 135 aa, Glycine max
  peptide (1)..(135): Ceres Seq. ID no. 13593837
MASDVSIADRIWKCLPRRIESQIIQVPQQKNDYDCGLFVLYFIERFMEEAPERLKMKDLDMFGRRWFKPQEASNLRVKIRKLLVEKLQNSVTDNCNLESSPSSSAGPATDCVETARDSLTGPATDCVETTEDSVT

SEQ ID NO: 53555 - DNA, 1129 bp, Glycine max
  misc_feature (1)..(1129): Ceres Seq. ID no. 14304457
tttgtgtgtattccttttcagggagttaagtggaagatggggttgtcaacagcaaggacaagcataggatcagtttgtgtttgtgccatctcaaagcctctccgccgtcactgccatttcctcccaacctctgtttctcctgtcttctcatgtcttcagaaaaagtgcaaattgaattttcaaaaaccagttcaagatgctgcagactcaaaaatatcatgtagcttagtgaatgtggaagatgggatagatgatgaagcatgtgaattagtcagtggagtggagctttcacttgaggagggtgatgaaaatatccgtgcttatctgttcaaggcagtaaaaaataacaatggaactggcctattgcttctttcagatgttttcgggtttgaggattctttcaccagagattttgcatatcgagtagcttgcaatggttacaacattctagttccagacttatttcgtggaaatccatggacaaaggaccagcaagatccagatgtgtttgaaaaatggattgctagacaaaacccagagaggatcgcagaagacattaccagatggacaaaatggctggttgatgaattcatggctgtaggaatttccaagaaacttggcattattggattctgctttggaggtggccaagtgttgaaggtgctggccaaagaccaaggtgcttgttttggcaccggagtctccttttatggtacaaggatagatccccttgctgcttctgatataaaagctcctgtcttgtttattttaggggacaatgacccactttgccaggtaagtgaaattgagaatgttgagaaaaaaattgctagcggctccaaagtagtcttattccctggtagaggtcacggatttgcccaccgacctggatctcctgaagaagatgtggatgctgaacaagcctatgtgattatgagagactggctatatgatcgtttggtcgtataaaattatatgtattgtatatatccaacacttgcgtcttaacatgtcaatagtgacctgtcaacattttgaatacattctcttttcagtcaaggaaattcccttgtactaacataattctagggccgttacttgatgatgcattatagtttaaattaggaac

SEQ ID NO: 53556 - protein, 322 aa, Glycine max
  peptide (1)..(322): Ceres Seq. ID no. 14304458
FVCIPFQGVKWKMGLSTARTSIGSVCVCAISKPLRRHCHFLPTSVSPVFSCLQKKCKLNFQKPVQDAADSKISCSLVNVEDGIDDEACELVSGVELSLEEGDENIRAYLFKAVKNNNGTGLLLLSDVFGFEDSFTRDFAYRVACNGYNILVPDLFRGNPWTKDQQDPDVFEKWIARQNPERIAEDITRWTKWLVDEFMAVGISKKLGIIGFCFGGGQVLKVLAKDQGACFGTGVSFYGTRIDPLAASDIKAPVLFILGDNDPLCQVSEIENVEKKIASGSKVVLFPGRGHGFAHRPGSPEEDVDAEQAYVIMRDWLYDRLVV

SEQ ID NO: 53557 - protein, 310 aa, Glycine max
  peptide (1)..(310): Ceres Seq. ID no. 14304459
MGLSTARTSIGSVCVCAISKPLRRHCHFLPTSVSPVFSCLQKKCKLNFQKPVQDAADSKISCSLVNVEDGIDDEACELVSGVELSLEEGDENIRAYLFKAVKNNNGTGLLLLSDVFGFEDSFTRDFAYRVACNGYNILVPDLFRGNPWTKDQQDPDVFEKWIARQNPERIAEDITRWTKWLVDEFMAVGISKKLGIIGFCFGGGQVLKVLAKDQGACFGTGVSFYGTRIDPLAASDIKAPVLFILGDNDPLCQVSEIENVEKKIASGSKVVLFPGRGHGFAHRPGSPEEDVDAEQAYVIMRDWLYDRLVV

SEQ ID NO: 53558 - DNA, 1198 bp, Glycine max
  misc_feature (1)..(1198): Ceres Seq. ID no. 15227099
cagctccgtaggccccccccccggagagatagaattagaattaaaaagcgtgaagghcagtgataggtttggtttggaaggaagaagaaaatgaaggccatagtgataacgaggccaggaggtcccgaagtgctccaacttgaggaagtggaagatccccaagtcggagacgacgagcttctcatcggagtccacgccacttcccttaacagagccgatacctttcagaggaaaggctcctaccctccccctaagggcgccagcccttacctcggtctcgaatgttccggaactgtcctttccctgggtaaaaacgtttccagctggaaaatcggtgatcaggtgtgtgctcttctcgccggaggcggatatgccgagaaagttgcagttccggtaggacaagttcttccggttccagccggtgtttctctcacggatgcagctagttttcctgaggttgcttgcactgtctggtcaactgttttcatgatgagtcgcttatctcaaggggaaaccttgttggttcatggaggttccagtgggattggtacatttgcaattcagatagccaagtatcgagggtcacgagtgtttgttactgcaggaagtgaggagaagctagctttttgcaagagtatcggagctgatgtgggcatcaattataaaacagaagactttgttgcgcgggtaaaggaagaaactggtggccaaggtgttgatgttattcttgattgtatgggagcatcctactatcaaagaaatcttgatagcttgaattttgatggaaggctttttattattggctttcaaggtggggttagtacacaagcagatctacgccctttacttgctaagcgtctcacagtacaaggagctggtttacgcaatagaagtctggaaaataaagctgtgattgttagtgaagtggagaagaatgtttggcctgcaattgccgaaggaaaggttaagcctgtggtctacaaatctttcccgctttctgaggcagcggaggctcaccagcttatggaaagcagccagcatattgggaagatattgcttttgccatgaaaattgtcgtaaatactgaagttcgtgacatacttctggatcctttgtgtttggacttgtttctttgttaagatctcaggattctaatatggttgcggattaaaataacagctaaaggaattgatatggc

SEQ ID NO: 53559 - protein, 325 aa, Glycine max
  peptide (1)..(325): Ceres Seq. ID no. 15227100
MKAIVITRPGGPEVLQLEEVEDPQVGDDELLIGVHATSLNRADTFQRKGSYPPPKGASPYLGLECSGTVLSLGKNVSSWKIGDQVCALLAGGGYAEKVAVPVGQVLPVPAGVSLTDAASFPEVACTVWSTVFMMSRLSQGETLLVHGGSSGIGTFAIQIAKYRGSRVFVTAGSEEKLAFCKSIGADVGINYKTEDFVARVKEETGGQGVDVILDCMGASYYQRNLDSLNFDGRLFIIGFQGGVSTQADLRPLLAKRLTVQGAGLRNRSLENKAVIVSEVEKNVWPAIAEGKVKPVVYKSFPLSEAAEAHQLMESSQHIGKILLLP

SEQ ID NO: 53560 - protein, 193 aa, Glycine max
  peptide (1)..(193): Ceres Seq. ID no. 15227101
MMSRLSQGETLLVHGGSSGIGTFAIQIAKYRGSRVFVTAGSEEKLAFCKSIGADVGINYKTEDFVARVKEETGGQGVDVILDCMGASYYQRNLDSLNFDGRLFIIGFQGGVSTQADLRPLLAKRLTVQGAGLRNRSLENKAVIVSEVEKNVWPAIAEGKVKPVVYKSFPLSEAAEAHQLMESSQHIGKILLLP

SEQ ID NO: 53561 - protein, 192 aa, Glycine max
  peptide (1)..(192): Ceres Seq. ID no. 15227102
MSRLSQGETLLVHGGSSGIGTFAIQIAKYRGSRVFVTAGSEEKLAFCKSIGADVGINYKTEDFVARVKEETGGQGVDVILDCMGASYYQRNLDSLNFDGRLFIIGFQGGVSTQADLRPLLAKRLTVQGAGLRNRSLENKAVIVSEVEKNVWPAIAEGKVKPVVYKSFPLSEAAEAHQLMESSQHIGKILLLP

SEQ ID NO: 53562 - DNA, 1218 bp, Glycine max
  misc_feature (1)..(1218): Ceres Seq. ID no. 14304791
actccctcacatcacaagaagcacaatttctctctttctttttgtgtccaaaatggctcctagttctactcacaatactgggttctatgtgcttatgctagttgggatagtgattagcactatggttgctacctgtgctggtagcttctaccaagactttgatctaacatggggtggtgaccgtgctaagatattcaatggtggccagcttctatctctttcccttgacaaagtctctggctctggcttcaaatcaaagaaagaatacctatttgggaggattgatatgcagctcaagctcgttgctggcaactctgctggcactgtcactgcttactacttgtcatcccaagggccaacacatgatgagattgatttcgagtttttgggaaacctaagtggggacccttatattctccacacaaacatcttcacgcaaggcaaaggtaacagggagcaacagttctatctctggttcgaccccaccagaaacttccacacttattctatcatttggaagccccagcacatcatattcttggttgataacacaccaataagggtattcaagaatgctgaatctcttggtgttccttttccaaagaaccagcccatgagaatctattctagcctctggaatgctgatgactgggccaccagaggaggattggtgaaaactgattggtccaaagcaccctttacagcatactaccgcaatttcaaagccactgagttctcactcaagtcttccatttcaaattctggtgctgaatatgaggcaaatgagcttgattcttatagcagaagaagactgagatgggttcagaagtacttcatgatctataactactgcagtgatctcaagcgattcccacaaggtcttcctgctgaatgtagacgctgaaggttccaagagatgaagagaatggccactttctgattggatttgaatcgtctatgtaaaatatgctatgtttattatgtcttagattctttattgacttctgtcttttttttcttcctttttttttagtttctattttatagttgctaatgtatatgtatattaaggggtcttaacaataaatcatattctttgtaccacttttcttgtcaatatgggcagttagtctcatcctagctcgtccacccggtgaaattgatcatgttggaatcaatttctatctgttcatataataaaaaggtgtagtcaagttt

SEQ ID NO: 53563 - protein, 300 aa, Glycine max
  peptide (1)..(300): Ceres Seq. ID no. 14304792
LPHITRSTISLFLFVSKMAPSSTHNTGFYVLMLVGIVISTMVATCAGSFYQDFDLTWGGDRAKIFNGGQLLSLSLDKVSGSGFKSKKEYLFGRIDMQLKLVAGNSAGTVTAYYLSSQGPTHDEIDFEFLGNLSGDPYILHTNIFTQGKGNREQQFYLWFDPTRNFHTYSIIWKPQHIIFLVDNTPIRVFKNAESLGVPFPKNQPMRIYSSLWNADDWATRGGLVKTDWSKAPFTAYYRNFKATEFSLKSSISNSGAEYEANELDSYSRRRLRWVQKYFMIYNYCSDLKRFPQGLPAECRR

SEQ ID NO: 53564 - protein, 283 aa, Glycine max
  peptide (1)..(283): Ceres Seq. ID no. 14304793
MAPSSTHNTGFYVLMLVGIVISTMVATCAGSFYQDFDLTWGGDRAKIFNGGQLLSLSLDKVSGSGFKSKKEYLFGRIDMQLKLVAGNSAGTVTAYYLSSQGPTHDEIDFEFLGNLSGDPYILHTNIFTQGKGNREQQFYLWFDPTRNFHTYSIIWKPQHIIFLVDNTPIRVFKNAESLGVPFPKNQPMRIYSSLWNADDWATRGGLVKTDWSKAPFTAYYRNFKATEFSLKSSISNSGAEYEANELDSYSRRRLRWVQKYFMIYNYCSDLKRFPQGLPAECRR

SEQ ID NO: 53565 - protein, 269 aa, Glycine max
  peptide (1)..(269): Ceres Seq. ID no. 14304794
MLVGIVISTMVATCAGSFYQDFDLTWGGDRAKIFNGGQLLSLSLDKVSGSGFKSKKEYLFGRIDMQLKLVAGNSAGTVTAYYLSSQGPTHDEIDFEFLGNLSGDPYILHTNIFTQGKGNREQQFYLWFDPTRNFHTYSIIWKPQHIIFLVDNTPIRVFKNAESLGVPFPKNQPMRIYSSLWNADDWATRGGLVKTDWSKAPFTAYYRNFKATEFSLKSSISNSGAEYEANELDSYSRRRLRWVQKYFMIYNYCSDLKRFPQGLPAECRR

SEQ ID NO: 53566 - DNA, 2065 bp, Glycine max
  misc_feature (1)..(2065): Ceres Seq. ID no. 14306904
gaacgaaacaaagtggacgaatcacaaccaaaaaacaaagaaacagaggcagagatatatgattatgaatttctcaacagaaccctctgcctcacgcttaccattctgatctccacttcttcgctgtttgtaacacgtttcatgcaatttaattcttcttcttcttgattttatgctgccctttttctcagacacccgttactgggaatttcaattttcattggttttgtcaaatcgattttcccaaaaccactcgccaattttattttatttttgctatgttttcgtcaattcttccttgtttgttgttaaagattgaatctttcctttcaattttgaaacttctgattatggggtatgtgtagttgcgacgaagtgaaatttcgttgctgcaaatagtgagaatttgctgtctttggtcagagttgctccgagtgatcgcttcccctggtgcgacgaagtgaaatttcgttgctgcaaatagtgagaatttgctgtctttggtcagagtggctccgagtgatcgcttcccctggtgcgacgaagtgaaatttcgttgctgcaaatagtgagaatttgctgtctttggtcagagtggctcagagtgatcgcttcccctggaatatttacaacttcaagaattggaagtagtgaatcccccaatagtggggcctcttcttcttttacccagcctatggaagatatgaatgaaaatgaagaaacagacttgctctcaatatcatggaatcaggactatgggtgctttgctgctggcacaagtcatgggtttcgtatctataattgtgagccttgcaaagaaactttcagacgtgatttaaaaagtggtggttttaaaattgtagagatgctgttccgatgcaatattctagcacttgttggtgctgtagctaattctcactatccaccaaataaagttttgatatgggatgatcatcagagcaggtgcattggtgaatttacatttaggtctgatgttcgtggagtgaaattaagacgcgatcgaattgtggttgttcttgagcacaagatatatgtttataacttcacagatttgaagcttcttcatcagattgagactctggcaaatcctagagggttgtgctgtctttcacactattcaaatacatttgttttggcttgtccaggtcttcacaagggacaggttcgagttgaacacttcggactgaacgtgacaaaattgatcaatgctcatgattctcaaattgcttgcttcactctgacattggatgggctccttcttgcaactgctagtgtaaagggcactttgattagaatcttcaatacaatggatgggtctcgtttacaagaagtaagaagaggggtagatagagctgaaatcaacagtatagctttgtctccaaatgtccagtggttagcagcatcaagtgacaaaggcactgttcatgtattcagcttgagagtgagagtgtttggggaggatagtgtgactcagccaaatgctgttcaagggcctgcactgtttcatcagaattcttcatcttctttagatcccttgatttctccaaatactggtgccaaccccaattcatcattatctttcatgagaggagttttaccaaaatattttagctcagaatggtcatttgcacagttccacttgcctgaatacactcctttcattgtggcatttggatctcagaactctgtgataattgttggtatggatgggagtttctacaaatgcagctttgatcaagtacatgggggagagatggtgcaacaggagtatgttcgtttcctaaaatttgaaaataggcccagataaaagcatttcaagttgctcaacatccttgccaagcagcaattatcctcaagccatgtaaatatgtgtccagcaccaggcaataaaactcttctcattttgtgtaaatacgattcccctgtattggaggatctggagacattttttttgtatatcttgtatattttgggggggaaattgaaagtaaaaaggagaaatatcgaagcaacagctgcatcacaaataaatcacttgctgaag

SEQ ID NO: 53567 - protein, 377 aa, Glycine max
  peptide (1)..(377): Ceres Seq. ID no. 14306905
MEDMNENEETDLLSISWNQDYGCFAAGTSHGFRIYNCEPCKETFRRDLKSGGFKIVEMLFRCNILALVGAVANSHYPPNKVLIWDDHQSRCIGEFTFRSDVRGVKLRRDRIVVVLEHKIYVYNFTDLKLLHQIETLANPRGLCCLSHYSNTFVLACPGLHKGQVRVEHFGLNVTKLINAHDSQIACFTLTLDGLLLATASVKGTLIRIFNTMDGSRLQEVRRGVDRAEINSIALSPNVQWLAASSDKGTVHVFSLRVRVFGEDSVTQPNAVQGPALFHQNSSSSLDPLISPNTGANPNSSLSFMRGVLPKYFSSEWSFAQFHLPEYTPFIVAFGSQNSVIIVGMDGSFYKCSFDQVHGGEMVQQEYVRFLKFENRPR

SEQ ID NO: 53568 - protein, 374 aa, Glycine max
  peptide (1)..(374): Ceres Seq. ID no. 14306906
MNENEETDLLSISWNQDYGCFAAGTSHGFRIYNCEPCKETFRRDLKSGGFKIVEMLFRCNILALVGAVANSHYPPNKVLIWDDHQSRCIGEFTFRSDVRGVKLRRDRIVVVLEHKIYVYNFTDLKLLHQIETLANPRGLCCLSHYSNTFVLACPGLHKGQVRVEHFGLNVTKLINAHDSQIACFTLTLDGLLLATASVKGTLIRIFNTMDGSRLQEVRRGVDRAEINSIALSPNVQWLAASSDKGTVHVFSLRVRVFGEDSVTQPNAVQGPALFHQNSSSSLDPLISPNTGANPNSSLSFMRGVLPKYFSSEWSFAQFHLPEYTPFIVAFGSQNSVIIVGMDGSFYKCSFDQVHGGEMVQQEYVRFLKFENRPR

SEQ ID NO: 53569 - protein, 320 aa, Glycine max
  peptide (1)..(320): Ceres Seq. ID no. 14306907
MLFRCNILALVGAVANSHYPPNKVLIWDDHQSRCIGEFTFRSDVRGVKLRRDRIVVVLEHKIYVYNFTDLKLLHQIETLANPRGLCCLSHYSNTFVLACPGLHKGQVRVEHFGLNVTKLINAHDSQIACFTLTLDGLLLATASVKGTLIRIFNTMDGSRLQEVRRGVDRAEINSIALSPNVQWLAASSDKGTVHVFSLRVRVFGEDSVTQPNAVQGPALFHQNSSSSLDPLISPNTGANPNSSLSFMRGVLPKYFSSEWSFAQFHLPEYTPFIVAFGSQNSVIIVGMDGSFYKCSFDQVHGGEMVQQEYVRFLKFENRPR

SEQ ID NO: 53570 - DNA, 1610 bp, Glycine max
  misc_feature (1)..(1610): Ceres Seq. ID no. 15174571
atctcttcctcttcaatttcgcatcttctccttctcattccaactccaaaatacacacacacgatggaaaccttcctcttcacctcagaatctgtaaacgagggccaccccgacaagatctgtgaccaggtttctgatgccatcctcgatgcttgcttggagcaagacccagagagcaaggttgcctgcgagacctgtacaaaaaccaacatggtcatggtctttggggagatcacaaccaaggccaaggtgaactacgagaaaatagtccgcgacacttgcagaggtattgggtttgtgtctgctgatgttggtctcgatgctgacaagtgcaatgttcttgtcaacattgagcaacagagccctgacattgcacagggagttcacggccacttgaccaagaagcccgaggaaatcggagccggtgaccaaggccacatgtttggttatgccacagacgaaacacccgaactaatgccactcactcatgtgcttgctaccaagcttggtgccaagctcactgaagtgagaaagaacaagacatgtccttggttgaggcctgatggcaaaacccaagtgactgttgagtacaggaatgatggtggggcaatggtccctatccgtgtgcacacagtcctcatctcaacccaacatgatgaaactgtgacaaatgatcaaattgcgaaagatttgaaagaacatgtgataaagcctgtgatcccagctgagtaccttgatgacaataccatcttccacctcaacccttctggtaggtttgtgattggaggacctcatggagatgcaggactcactgggaggaagatcatcattgatacctatggtgggtggggtgctcatggtggaggtgccttctctggcaaggatcctaccaaggttgataggagtggtgcatacattgttaggcaagcagcaaagagtgtggtggcttcagggctcgcgcgccgttgcattgtgcaggtttcctatgcaattggggtgcctgatccactgtctgtgtttgtggatacctacaaaactgggaagattccagacagtgatattctggctttgattaaggagcattttgacctcaggcctggaatgatttccatcaatcttgacctcatgagagggggaaacttcaggtaccagaagactgctgcttatggccattttggaagagatgatcctgatttcacatgggagacagtgaagatactcaagcccagtgcttgactgattcattggcattggtgttgtttcttaaggtggttatcatcgtaattggtaaccatctttctgattttgggttaggaaaataataataaaggagcttcggtgagtacatacttcatttaagattgtgtttctcggcttggatgaggaatgggagcggaaatgtgctgtgtcctaagtggaggcgtttgcacaataggagcatgcaagcagcattagctggctagctacctcttttggtttttgccttttctcttgaaattttctttgttgttcacctttttttatccctcgcctttctgatatttgattattttgcaaccaatcttgcgtggttggggtaaacttagaatgccatttgtttgattctttct

SEQ ID NO: 53571 - protein, 411 aa, Glycine max
  peptide (1)..(411): Ceres Seq. ID no. 15174572
ISSSSISHLLLLIPTPKYTHTMETFLFTSESVNEGHPDKICDQVSDAILDACLEQDPESKVACETCTKTNMVMVFGEITTKAKVNYEKIVRDTCRGIGFVSADVGLDADKCNVLVNIEQQSPDIAQGVHGHLTKKPEEIGAGDQGHMFGYATDETPELMPLTHVLATKLGAKLTEVRKNKTCPWLRPDGKTQVTVEYRNDGGAMVPIRVHTVLISTQHDETVTNDQIAKDLKEHVIKPVIPAEYLDDNTIFHLNPSGRFVIGGPHGDAGLTGRKIIIDTYGGWGAHGGGAFSGKDPTKVDRSGAYIVRQAAKSVVASGLARRCIVQVSYAIGVPDPLSVFVDTYKTGKIPDSDILALIKEHFDLRPGMISINLDLMRGGNFRYQKTAAYGHFGRDDPDFTWETVKILKPSA

SEQ ID NO: 53572 - protein, 390 aa, Glycine max
  peptide (1)..(390): Ceres Seq. ID no. 15174573
METFLFTSESVNEGHPDKICDQVSDAILDACLEQDPESKVACETCTKTNMVMVFGEITTKAKVNYEKIVRDTCRGIGFVSADVGLDADKCNVLVNIEQQSPDIAQGVHGHLTKKPEEIGAGDQGHMFGYATDETPELMPLTHVLATKLGAKLTEVRKNKTCPWLRPDGKTQVTVEYRNDGGAMVPIRVHTVLISTQHDETVTNDQIAKDLKEHVIKPVIPAEYLDDNTIFHLNPSGRFVIGGPHGDAGLTGRKIIIDTYGGWGAHGGGAFSGKDPTKVDRSGAYIVRQAAKSVVASGLARRCIVQVSYAIGVPDPLSVFVDTYKTGKIPDSDILALIKEHFDLRPGMISINLDLMRGGNFRYQKTAAYGHFGRDDPDFTWETVKILKPSA

SEQ ID NO: 53573 - protein, 341 aa, Glycine max
  peptide (1)..(341): Ceres Seq. ID no. 15174574
MVMVFGEITTKAKVNYEKIVRDTCRGIGFVSADVGLDADKCNVLVNIEQQSPDIAQGVHGHLTKKPEEIGAGDQGHMFGYATDETPELMPLTHVLATKLGAKLTEVRKNKTCPWLRPDGKTQVTVEYRNDGGAMVPIRVHTVLISTQHDETVTNDQIAKDLKEHVIKPVIPAEYLDDNTIFHLNPSGRFVIGGPHGDAGLTGRKIIIDTYGGWGAHGGGAFSGKDPTKVDRSGAYIVRQAAKSVVASGLARRCIVQVSYAIGVPDPLSVFVDTYKTGKIPDSDILALIKEHFDLRPGMISINLDLMRGGNFRYQKTAAYGHFGRDDPDFTWETVKILKPSA

SEQ ID NO: 53574 - DNA, 1480 bp, Glycine max
  misc_feature (1)..(1480): Ceres Seq. ID no. 15169376
gagaatttaaaccacactgaaaacaaggaatcacgtccagatagcagttcacctgcatcctatttgcattttgacatgtctgaacaattgtctggggaaacccctgtggttacaccacgttttcagaatataacttctagtaatgagaaagtaagtcccggtttaactcttgatcactcaagccaaaatgctgaggtaatgctttcttctgatgatagtttttccataaatcaaaggacttcatctgctggctccaggtgtgatgatagatcagtagatccctctgctgaaatcacagaagaagatatttcaaaggaaatgacttcgaccaagtctctccaacagccgctccccatttttggagaaaagtctgtttgtgaagaatttggtccagcaagcaagccaaataataggtttgataaagttagcccgccaaaactcatgtgcatctcaactggtgatgaccaattcatggtgaggggaagactgtcatcagtggatgaaactgctcctttgattatttctactaatatttcaagccagaaagttttgcaagaagagaaagcaacagttttacagaatccagcaccagaaaggccagctgttgggcatcttcctccagcttttgatgatgtcattcatgtcatacgccatagcagttatcgcgtggggagtgagcagccagtgaaggaatctctggagatgggagttcaaagtgtagatgttggtaagtttatcaacattgtaagggatgatttagaaatgagaaatgtgagcactcctttgactctgaaatcttcaaattgctctgaagctattggcttgaagtcaaatatttctgataatatggaaatcagaaacttaagtaatcctcctaacttaaaatcttcaagttgcaccgacttgatgaacatcaaatcaagtttttctgatcatcctgttgttaggcaacaagatgtggaaaacactgattctcttgtttcaaaatctgattcctccgagtataccaaacataagactcctacagctgcagagggaacacccccaaaggaaattttggatgttaaatcttccaggcagagagctgaagcacttgaaggactgctagaattatctgcagatttgctgcagcaaaatagattggaggaacttgcagttgttctgaagccctttggaaaagataaagtttccccaagggagacggccatttggttagccaagagtctaaaaggattgatgattgaggaaagtgggggacgcagttaatgggtgttttttttaatccatggtaagtttgctactttgcttctatttgatattttctattactttttccacttcattgcttctcaagtgccacttgaattgagagaacaaacaggctttatcgtttcttctttcattttttgtaattctttttatgctgatgtaaatagtaaccatacgaatgaataccatcaacttacgatcaattgtgtgg

SEQ ID NO: 53575 - protein, 421 aa, Glycine max
  peptide (1)..(421): Ceres Seq. ID no. 15169377
ENLNHTENKESRPDSSSPASYLHFDMSEQLSGETPVVTPRFQNITSSNEKVSPGLTLDHSSQNAEVMLSSDDSFSINQRTSSAGSRCDDRSVDPSAEITEEDISKEMTSTKSLQQPLPIFGEKSVCEEFGPASKPNNRFDKVSPPKLMCISTGDDQFMVRGRLSSVDETAPLIISTNISSQKVLQEEKATVLQNPAPERPAVGHLPPAFDDVIHVIRHSSYRVGSEQPVKESLEMGVQSVDVGKFINIVRDDLEMRNVSTPLTLKSSNCSEAIGLKSNISDNMEIRNLSNPPNLKSSSCTDLMNIKSSFSDHPVVRQQDVENTDSLVSKSDSSEYTKHKTPTAAEGTPPKEILDVKSSRQRAEALEGLLELSADLLQQNRLEELAVVLKPFGKDKVSPRETAIWLAKSLKGLMIEESGGRS

SEQ ID NO: 53576 - protein, 396 aa, Glycine max
  peptide (1)..(396): Ceres Seq. ID no. 15169378
MSEQLSGETPVVTPRFQNITSSNEKVSPGLTLDHSSQNAEVMLSSDDSFSINQRTSSAGSRCDDRSVDPSAEITEEDISKEMTSTKSLQQPLPIFGEKSVCEEFGPASKPNNRFDKVSPPKLMCISTGDDQFMVRGRLSSVDETAPLIISTNISSQKVLQEEKATVLQNPAPERPAVGHLPPAFDDVIHVIRHSSYRVGSEQPVKESLEMGVQSVDVGKFINIVRDDLEMRNVSTPLTLKSSNCSEAIGLKSNISDNMEIRNLSNPPNLKSSSCTDLMNIKSSFSDHPVVRQQDVENTDSLVSKSDSSEYTKHKTPTAAEGTPPKEILDVKSSRQRAEALEGLLELSADLLQQNRLEELAVVLKPFGKDKVSPRETAIWLAKSLKGLMIEESGGRS

SEQ ID NO: 53577 - protein, 355 aa, Glycine max
  peptide (1)..(355): Ceres Seq. ID no. 15169379
MLSSDDSFSINQRTSSAGSRCDDRSVDPSAEITEEDISKEMTSTKSLQQPLPIFGEKSVCEEFGPASKPNNRFDKVSPPKLMCISTGDDQFMVRGRLSSVDETAPLIISTNISSQKVLQEEKATVLQNPAPERPAVGHLPPAFDDVIHVIRHSSYRVGSEQPVKESLEMGVQSVDVGKFINIVRDDLEMRNVSTPLTLKSSNCSEAIGLKSNISDNMEIRNLSNPPNLKSSSCTDLMNIKSSFSDHPVVRQQDVENTDSLVSKSDSSEYTKHKTPTAAEGTPPKEILDVKSSRQRAEALEGLLELSADLLQQNRLEELAVVLKPFGKDKVSPRETAIWLAKSLKGLMIEESGGRS

SEQ ID NO: 53578 - DNA, 1710 bp, Glycine max
  misc_feature (1)..(1710): Ceres Seq. ID no. 15169326
aaggcaatggcaaagccaagaagatcaaagatgatgtctttgaaactccctttcctgttgaccttgttcctcgcactctcccaagctcaaccgcattccgatgatccaccgccgccaccctcctccaacgtctgcgtcatcggcgctggcatcggtggctcctccgtcgctcacttcctccgcaaatactcgccgtcctccactccctccaccaaaatccgagtgttcgagcgcaacggccgcgtcgggggacgcatcgccaccgtgacggtggcgggcgagaccttcgaggccggagcgtccattctccatccaaagaacctgcacacagtggattacgttaagatcctgaagctgaaggtcaaagagccgaccgcgtcggaggattccctctctctcggcatttgggatgggaacaagttcgttttcaaaacggtgtcgccgcttagttccactgttcccctcatcgataagcttctcaaacttccgtttgttaatactctcgtatcgttcgttaattccgcactcatgttcgttcgctacggcttctcgctctttaagatgcagaacttcgttgagattgctgtggataaattcgtaaagtactatgaagatcctggttcaagacctatttttgagactgtggatgagatgctgcagtgggctggtctgtataatcttactaccaggactttgcgggatgaattggtggatgctgggttgtctacctcgttgatcaatgaacttgttactgtcatcacacgcattaattatggccagagtgtctccatgagtgggttgggtggtgtggtttctctagcaggatcaggtggaggattatggtccatcgaaggaggcaactggcaaatggctgctggactgattaatcagtcagatgtggcattacacctgcatgaagaaataaaatctgttgctgaccttggagattactacgaactcaactcaacaaaaggaaacagttacagatgtgaagttgctgtggttgctacaccactggatgagttagatattcaatttattcctccaatttcaattcctgagagaaaattacagcacacatttacaacttttgtcaggggccttctaaaccctgcatattttggtctgaaggctgtgacaaaaattccagatcttgtgggcacaatagaggaccctgagcttccattttcatgcattgcagttctcaagaagcacaatgaaaaagaatctacttataaattattttctcgtcaaccaatggcagacacattactggatagcatcttcagtgtgaggaaggagaccattcggataaactgggctgcatatcctcattaccacgccccagaagtatttgcaccatttatattggacgggcgacatctatactacgttaatgcatttgaaaatgcagctagcaccatggagacaagtgctgtggcagctgagaatattgcccgactcatactgtcaagatattttggccaagtaattgtgcattcatctaatttgtctgcaagttctcaaggagagggtactcatttagatttgtgagacagtgatcgtaagatattgttagtttggatgatggtagattttatataaattgcatctgaattctgaaaatttggaaaatcatacaatgtataaacactgggtcaataaatgattactctctccacccataaagccgatacattgcctgtttac

SEQ ID NO: 53579 - protein, 517 aa, Glycine max
  peptide (1)..(517): Ceres Seq. ID no. 15169327
KAMAKPRRSKMMSLKLPFLLTLFLALSQAQPHSDDPPPPPSSNVCVIGAGIGGSSVAHFLRKYSPSSTPSTKIRVFERNGRVGGRIATVTVAGETFEAGASILHPKNLHTVDYVKILKLKVKEPTASEDSLSLGIWDGNKFVFKTVSPLSSTVPLIDKLLKLPFVNTLVSFVNSALMFVRYGFSLFKMQNFVEIAVDKFVKYYEDPGSRPIFETVDEMLQWAGLYNLTTRTLRDELVDAGLSTSLINELVTVITRINYGQSVSMSGLGGVVSLAGSGGGLWSIEGGNWQMAAGLINQSDVALHLHEEIKSVADLGDYYELNSTKGNSYRCEVAVVATPLDELDIQFIPPISIPERKLQHTFTTFVRGLLNPAYFGLKAVTKIPDLVGTIEDPELPFSCIAVLKKHNEKESTYKLFSRQPMADTLLDSIFSVRKETIRINWAAYPHYHAPEVFAPFILDGRHLYYVNAFENAASTMETSAVAAENIARLILSRYFGQVIVHSSNLSASSQGEGTHLDL

SEQ ID NO: 53580 - protein, 515 aa, Glycine max
  peptide (1)..(515): Ceres Seq. ID no. 15169328
MAKPRRSKMMSLKLPFLLTLFLALSQAQPHSDDPPPPPSSNVCVIGAGIGGSSVAHFLRKYSPSSTPSTKIRVFERNGRVGGRIATVTVAGETFEAGASILHPKNLHTVDYVKILKLKVKEPTASEDSLSLGIWDGNKFVFKTVSPLSSTVPLIDKLLKLPFVNTLVSFVNSALMFVRYGFSLFKMQNFVEIAVDKFVKYYEDPGSRPIFETVDEMLQWAGLYNLTTRTLRDELVDAGLSTSLINELVTVITRINYGQSVSMSGLGGVVSLAGSGGGLWSIEGGNWQMAAGLINQSDVALHLHEEIKSVADLGDYYELNSTKGNSYRCEVAVVATPLDELDIQFIPPISIPERKLQHTFTTFVRGLLNPAYFGLKAVTKIPDLVGTIEDPELPFSCIAVLKKHNEKESTYKLFSRQPMADTLLDSIFSVRKETIRINWAAYPHYHAPEVFAPFILDGRHLYYVNAFENAASTMETSAVAAENIARLILSRYFGQVIVHSSNLSASSQGEGTHLDL

SEQ ID NO: 53581 - protein, 507 aa, Glycine max
  peptide (1)..(507): Ceres Seq. ID no. 15169329
MMSLKLPFLLTLFLALSQAQPHSDDPPPPPSSNVCVIGAGIGGSSVAHFLRKYSPSSTPSTKIRVFERNGRVGGRIATVTVAGETFEAGASILHPKNLHTVDYVKILKLKVKEPTASEDSLSLGIWDGNKFVFKTVSPLSSTVPLIDKLLKLPFVNTLVSFVNSALMFVRYGFSLFKMQNFVEIAVDKFVKYYEDPGSRPIFETVDEMLQWAGLYNLTTRTLRDELVDAGLSTSLINELVTVITRINYGQSVSMSGLGGVVSLAGSGGGLWSIEGGNWQMAAGLINQSDVALHLHEEIKSVADLGDYYELNSTKGNSYRCEVAVVATPLDELDIQFIPPISIPERKLQHTFTTFVRGLLNPAYFGLKAVTKIPDLVGTIEDPELPFSCIAVLKKHNEKESTYKLFSRQPMADTLLDSIFSVRKETIRINWAAYPHYHAPEVFAPFILDGRHLYYVNAFENAASTMETSAVAAENIARLILSRYFGQVIVHSSNLSASSQGEGTHLDL

SEQ ID NO: 53582 - DNA, 1613 bp, Glycine max
  misc_feature (1)..(1613): Ceres Seq. ID no. 14310713
gtgttctcttcgaaagcggaatcaatcaatccctcatctcattgctgagatctgcaagctggctatggactacgaaccctacgacagtagcggaactgatgatgaccttccaccaacccatcaaaatagaatttccaggggaggaggaggacgtctcgctgggaatgggagatctgctgttggttcaattccttacccaaggatgtatggtgaaattgatatggagacccaaattcatcagcttgagcaagaagcatacagttcagttctaagagcctttaaagctcaagccgatgccattacttgggagaaagaaagtttgattacagagctgagaaaagaactgagattgtcaaatgaggagcacagagaacttctaggtcgagttaatgctgatgatgtgatacggaggataagggaatggagacaggcaggtggccatcagcctggtgtacttagcactggtcaaggacttcatgattcaattcccagtcccacagtctctgcttctcgcaaaaagcagaagattacaccatctgtaccaccatcacgatctttttgcggaccttctcctccatttcacccccaaacactgactgcgccccaccaaccatcttctgcagcaaaacgtggatctgctcgtgggtcaaagggaaagaagcacaaacctggtcaaatattacctggtgtatcttcaatgaagcagtatccttcgtcaggaccaggtggaaggaatcaggtacctaatagagctgccatgggtgagcatgccgagggagcatcatttgattcgttggttggtaggagagtgcggacaaagtggcctgacgacaataacttctatgaagctgttatcacgaactacaatccagctgatggacgacataatctggtctatgacatggggagtgcaaatgaaacatgggaatgggttaatctatcagagatatctcctgaagatattcagtgggtaggtgaggatcctggaatcaatcatcgtgggggttttgggggccctggtcatgggatgaataggtctgttggacgagatggtgttccaggagctggaagaggtagaggagcagcaaaggggcaatccagaaaagattttttgtcatcacagaatggcataggaaagaaggcgcctgatgatatacaaatacttcacacagacacactaatcaaggaggtggagaaggtattcagtgcaaatcaccctgatccccttgaagttgagaaagcaaagaaagtattgaaggatcatgagcaagctcttattgatgcaattgcaagacttaatgatctttctgatggtgaaagtgatggggctggggctgcccaccatttctcacatgctcaatcaatggatcgagagtgatgagcacctgttaatttgtacaatgagcagaggaggcattaagatagcataattctggaaaagggtgtatttctattgtattatcacataaagattattaccctctaacagtttatagctgtaggcatggttcttgtggattaggcattatgtaggatggcaaatattgtagtttggtaataattatttatttcagtttgaaagttgacctaggaccagctgatgatacttgtac

SEQ ID NO: 53583 - protein, 458 aa, Glycine max
  peptide (1)..(458): Ceres Seq. ID no. 14310714
CSLRKRNQSIPHLIAEICKLAMDYEPYDSSGTDDDLPPTHQNRISRGGGGRLAGNGRSAVGSIPYPRMYGEIDMETQIHQLEQEAYSSVLRAFKAQADAITWEKESLITELRKELRLSNEEHRELLGRVNADDVIRRIREWRQAGGHQPGVLSTGQGLHDSIPSPTVSASRKKQKITPSVPPSRSFCGPSPPFHPQTLTAPHQPSSAAKRGSARGSKGKKHKPGQILPGVSSMKQYPSSGPGGRNQVPNRAAMGEHAEGASFDSLVGRRVRTKWPDDNNFYEAVITNYNPADGRHNLVYDMGSANETWEWVNLSEISPEDIQWVGEDPGINHRGGFGGPGHGMNRSVGRDGVPGAGRGRGAAKGQSRKDFLSSQNGIGKKAPDDIQILHTDTLIKEVEKVFSANHPDPLEVEKAKKVLKDHEQALIDAIARLNDLSDGESDGAGAAHHFSHAQSMDRE

SEQ ID NO: 53584 - protein, 437 aa, Glycine max
  peptide (1)..(437): Ceres Seq. ID no. 14310715
MDYEPYDSSGTDDDLPPTHQNRISRGGGGRLAGNGRSAVGSIPYPRMYGEIDMETQIHQLEQEAYSSVLRAFKAQADAITWEKESLITELRKELRLSNEEHRELLGRVNADDVIRRIREWRQAGGHQPGVLSTGQGLHDSIPSPTVSASRKKQKITPSVPPSRSFCGPSPPFHPQTLTAPHQPSSAAKRGSARGSKGKKHKPGQILPGVSSMKQYPSSGPGGRNQVPNRAAMGEHAEGASFDSLVGRRVRTKWPDDNNFYEAVITNYNPADGRHNLVYDMGSANETWEWVNLSEISPEDIQWVGEDPGINHRGGFGGPGHGMNRSVGRDGVPGAGRGRGAAKGQSRKDFLSSQNGIGKKAPDDIQILHTDTLIKEVEKVFSANHPDPLEVEKAKKVLKDHEQALIDAIARLNDLSDGESDGAGAAHHFSHAQSMDRE

SEQ ID NO: 53585 - protein, 391 aa, Glycine max
  peptide (1)..(391): Ceres Seq. ID no. 14310716
MYGEIDMETQIHQLEQEAYSSVLRAFKAQADAITWEKESLITELRKELRLSNEEHRELLGRVNADDVIRRIREWRQAGGHQPGVLSTGQGLHDSIPSPTVSASRKKQKITPSVPPSRSFCGPSPPFHPQTLTAPHQPSSAAKRGSARGSKGKKHKPGQILPGVSSMKQYPSSGPGGRNQVPNRAAMGEHAEGASFDSLVGRRVRTKWPDDNNFYEAVITNYNPADGRHNLVYDMGSANETWEWVNLSEISPEDIQWVGEDPGINHRGGFGGPGHGMNRSVGRDGVPGAGRGRGAAKGQSRKDFLSSQNGIGKKAPDDIQILHTDTLIKEVEKVFSANHPDPLEVEKAKKVLKDHEQALIDAIARLNDLSDGESDGAGAAHHFSHAQSMDRE

SEQ ID NO: 53586 - DNA, 1065 bp, Glycine max
  misc_feature (1)..(1065): Ceres Seq. ID no. 14305022
gagaaatgggtctgctttctaacagagtggagagacatgagatcaagcctggcgatcacatctacacatacagagctgttttcacctattctcatcatggcatttttgttgggggaagcaaggttgtacatttcagacctgaaagaaacttaaagtcaatgactgagacatcatcaaactgggatgatccaacatcaaacccatgtccaacctttcctgattgtggattcagacaaccaaacagtggagtagtcctttcttgcttagactgcttccttcgaaatgggtctctttactgttttgagtatgaggtttcaccatctgttttcctcagcagaataaggggtggcacatgcactactgcatcagctgacccaccagagactgttattcatcgagctatgtatcttcttcaaaacggctttggaaattataatgtttttcagaacaattgtgaggattttgccttgtactgcaaaactggtcttttgatacaagacaagcaaggggttggaagaagtggccaagcttcttctgttattggtgctccattggctgcaatgatctcttctcctctcaagttgttaatgccaagtcctgttggtgttgctactgtaactgcaggaatgtactgcatgagcagatatgcaactgatattggtgtcagaagtgatgtgatcaaggtgccagtgggagacttggctgtgaaccttggatggatttgtcaagaggaggaggaggtagctgaacatgaaaatccagacagacagattaccaccagatgatctagcattgctcttcatccttactatgcacatgaaactgttgcatgtgtcactgttagttatacactagttcatagcagatatgtcttcattcatgttatatcttctgtgattggtgtctagttattcaagttgtgtctgggatgaaaatggaacaatattattacttatagtagtaactataatgtgatgtattcctttgagacaaattttcttctagttgcctataataatgcaacattctacccacaatagtgattgaaccatcttgttgtgcatc

SEQ ID NO: 53587 - protein, 260 aa, Glycine max
  peptide (1)..(260): Ceres Seq. ID no. 14305023
EMGLLSNRVERHEIKPGDHIYTYRAVFTYSHHGIFVGGSKVVHFRPERNLKSMTETSSNWDDPTSNPCPTFPDCGFRQPNSGVVLSCLDCFLRNGSLYCFEYEVSPSVFLSRIRGGTCTTASADPPETVIHRAMYLLQNGFGNYNVFQNNCEDFALYCKTGLLIQDKQGVGRSGQASSVIGAPLAAMISSPLKLLMPSPVGVATVTAGMYCMSRYATDIGVRSDVIKVPVGDLAVNLGWICQEEEEVAEHENPDRQITTR

SEQ ID NO: 53588 - protein, 259 aa, Glycine max
  peptide (1)..(259): Ceres Seq. ID no. 14305024
MGLLSNRVERHEIKPGDHIYTYRAVFTYSHHGIFVGGSKVVHFRPERNLKSMTETSSNWDDPTSNPCPTFPDCGFRQPNSGVVLSCLDCFLRNGSLYCFEYEVSPSVFLSRIRGGTCTTASADPPETVIHRAMYLLQNGFGNYNVFQNNCEDFALYCKTGLLIQDKQGVGRSGQASSVIGAPLAAMISSPLKLLMPSPVGVATVTAGMYCMSRYATDIGVRSDVIKVPVGDLAVNLGWICQEEEEVAEHENPDRQITTR

SEQ ID NO: 53589 - protein, 208 aa, Glycine max
  peptide (1)..(208): Ceres Seq. ID no. 14305025
MTETSSNWDDPTSNPCPTFPDCGFRQPNSGVVLSCLDCFLRNGSLYCFEYEVSPSVFLSRIRGGTCTTASADPPETVIHRAMYLLQNGFGNYNVFQNNCEDFALYCKTGLLIQDKQGVGRSGQASSVIGAPLAAMISSPLKLLMPSPVGVATVTAGMYCMSRYATDIGVRSDVIKVPVGDLAVNLGWICQEEEEVAEHENPDRQITTR

SEQ ID NO: 53590 - DNA, 1063 bp, Glycine max
  misc_feature (1)..(1063): Ceres Seq. ID no. 14304662
tctcgtcccgcaagtattcctccaatctccgtcgatcaccaccaccatgtcgtggctcctccgatccaccaagtctaagttcctctcttcctcttcctcttcttctctttctagaaccttcccctctctccctcgccctcagattggagccatctctcccctccccgatctcttccaccgcaacaccgccaccatgcctttcgcgaaggaaaacgcttccggtggaaacttgaccggtcttcccaaagttcccgcgaataagcttggcagtgattctgatgcgaccaattcttcgaggtacaaagcttctggactgaacaccaatgtgctggctggagctagatatgtctctagagtttgggctgcacagggtcaaatgccattgggagtcaatactgtgatggctagaagttttgagagaagtatggaagctggcacattgggaatgattggtcataaacgttttatgagtgacatcccaagtaaaaccagtgagacaaacccatctggttttcgtccgttatctcctcatcttcctctttatcagccccaactttcttcgaccctctcaattttcaatagaattgctggagctttcctagctggtgtcattttggttttttatatgatctatatgaagttgggtttggttagcctcacctatgactctttctaccagttcatattttattcatcgaaactcaacctacttgtcatggagatttctgccttagccgtgtcctatcatctgtatagtgcaattcgtcatttattcttatgatttgaatcagcaactgacgcctgaactttaggtttgaacctgaggtggaactttgcataattcgaccttggaggcatacttccatatgtctgtcagtcataaggaacttcatttagaaatgtgattttgcttaattgtagttatgtattatcggcttaataattacaattgtggcacaacttaaggagtattttgcacctgacattcggtcatgctttttgctgccctctcaaattgcatgcaagtaactgttgcatttaataaatgcatttgagttttggc

SEQ ID NO: 53591 - protein, 259 aa, Glycine max
  peptide (1)..(259): Ceres Seq. ID no. 14304663
LVPQVFLQSPSITTTMSWLLRSTKSKFLSSSSSSSLSRTFPSLPRPQIGAISPLPDLFHRNTATMPFAKENASGGNLTGLPKVPANKLGSDSDATNSSRYKASGLNTNVLAGARYVSRVWAAQGQMPLGVNTVMARSFERSMEAGTLGMIGHKRFMSDIPSKTSETNPSGFRPLSPHLPLYQPQLSSTLSIFNRIAGAFLAGVILVFYMIYMKLGLVSLTYDSFYQFIFYSSKLNLLVMEISALAVSYHLYSAIRHLFL

SEQ ID NO: 53592 - protein, 244 aa, Glycine max
  peptide (1)..(244): Ceres Seq. ID no. 14304664
MSWLLRSTKSKFLSSSSSSSLSRTFPSLPRPQIGAISPLPDLFHRNTATMPFAKENASGGNLTGLPKVPANKLGSDSDATNSSRYKASGLNTNVLAGARYVSRVWAAQGQMPLGVNTVMARSFERSMEAGTLGMIGHKRFMSDIPSKTSETNPSGFRPLSPHLPLYQPQLSSTLSIFNRIAGAFLAGVILVFYMIYMKLGLVSLTYDSFYQFIFYSSKLNLLVMEISALAVSYHLYSAIRHLFL

SEQ ID NO: 53593 - protein, 195 aa, Glycine max
  peptide (1)..(195): Ceres Seq. ID no. 14304665
MPFAKENASGGNLTGLPKVPANKLGSDSDATNSSRYKASGLNTNVLAGARYVSRVWAAQGQMPLGVNTVMARSFERSMEAGTLGMIGHKRFMSDIPSKTSETNPSGFRPLSPHLPLYQPQLSSTLSIFNRIAGAFLAGVILVFYMIYMKLGLVSLTYDSFYQFIFYSSKLNLLVMEISALAVSYHLYSAIRHLFL

SEQ ID NO: 53594 - DNA, 1651 bp, Glycine max
  misc_feature (1)..(1651): Ceres Seq. ID no. 14303137
aatgcatctagagctagagacttggacaattttggttgctattgtgtgcatcttggtctttgttctgaaggagattgttatgggagggaagagctcaaaagggagtggtaggaggtatgattttggtgcttcttcatcttcacgggataataactatggtggataccatccacaatcaccatacccttcttatcaaacacctcagcacccgcgtgcatcagctccattttatgactatggacagccaaaaaggaagttggataagaagtattccaggatagctgataattaccgttctttggatgaggttacagctgcacttgcaaatgctgggctggaatcttctaatctcattgttggcattgatttcaccaagagcaatgagtggacagggaagaggtcattcaatcgaaaaagtttacatgacattagaagtggtcaaaacccttatgaacaagcaatttctattatcgggaaaactttatctgctttcgatgaagataacttgattccttgttttggatttggagatgcatctacacacgatcaagatgtatttagtttctattcagaagagaggttctgcaatgggtttgaggaagttctgacacgatacagacaaattattccttccctaaaactcgcaggacccacttcgtttgcccctattattgaaatggctatgactattgttgagcaaagtggtggccaatatcatgtcttgctaataattgcagatggacaggtgactagaagcgttgatacacaaaatggcaacttaagtccgcaagagcagaacacaatagatgcaatagtaaaagccagtgagtatccactgtcaatagttttggtgggagttggagatggaccatgggaaatgatgagggaatttgatgataacatcccttctcgggcatttgacaattttcagtttgtgaattttactgaaataatgacaaggaatgtagattcaaccagaaaagagacagattttgccctttcagctttgatggagataccttctcaatacaaggcaaccctagagcttggcatattgggttcacggagggggcattcaccagatagggttgctctacccccacctctttatagtagaacctcttccagcatcagcacaaaatctacaaggtctaacagttttcagcagaggacacctacacatactagctatgatagcagtgttcacacagagacatcatcaagttctttatatgataataaggtttgccccatttgtcttaccaatgcaaaggatatggcctttggttgtgggcatcagacttgttgcgagtgtggagaggacctccaattctgtcccatttgccggagcacaatccatactagaataaggctttactagttagctttgatgcagaagtcctgtcaatgaaaatttcgtcatttccagaataaggggctgcaaaaggatgtgcagagttggtctggctcttttcacagatggtttcttgtccataaaaactgcatttgcaatttcgaggcgaaacttgtattcccagttacacttaggaagagctctttacagaaagaattggccttccccgttgtatatatgtagttcatgtgtctcggaaggcgtcatgtttttaaatgaactgcttgcattaaaatt

SEQ ID NO: 53595 - protein, 459 aa, Glycine max
  peptide (1)..(459): Ceres Seq. ID no. 14303138
MHLELETWTILVAIVCILVFVLKEIVMGGKSSKGSGRRYDFGASSSSRDNNYGGYHPQSPYPSYQTPQHPRASAPFYDYGQPKRKLDKKYSRIADNYRSLDEVTAALANAGLESSNLIVGIDFTKSNEWTGKRSFNRKSLHDIRSGQNPYEQAISIIGKTLSAFDEDNLIPCFGFGDASTHDQDVFSFYSEERFCNGFEEVLTRYRQIIPSLKLAGPTSFAPIIEMAMTIVEQSGGQYHVLLIIADGQVTRSVDTQNGNLSPQEQNTIDAIVKASEYPLSIVLVGVGDGPWEMMREFDDNIPSRAFDNFQFVNFTEIMTRNVDSTRKETDFALSALMEIPSQYKATLELGILGSRRGHSPDRVALPPPLYSRTSSSISTKSTRSNSFQQRTPTHTSYDSSVHTETSSSSLYDNKVCPICLTNAKDMAFGCGHQTCCECGEDLQFCPICRSTIHTRIRLY

SEQ ID NO: 53596 - protein, 433 aa, Glycine max
  peptide (1)..(433): Ceres Seq. ID no. 14303139
MGGKSSKGSGRRYDFGASSSSRDNNYGGYHPQSPYPSYQTPQHPRASAPFYDYGQPKRKLDKKYSRIADNYRSLDEVTAALANAGLESSNLIVGIDFTKSNEWTGKRSFNRKSLHDIRSGQNPYEQAISIIGKTLSAFDEDNLIPCFGFGDASTHDQDVFSFYSEERFCNGFEEVLTRYRQIIPSLKLAGPTSFAPIIEMAMTIVEQSGGQYHVLLIIADGQVTRSVDTQNGNLSPQEQNTIDAIVKASEYPLSIVLVGVGDGPWEMMREFDDNIPSRAFDNFQFVNFTEIMTRNVDSTRKETDFALSALMEIPSQYKATLELGILGSRRGHSPDRVALPPPLYSRTSSSISTKSTRSNSFQQRTPTHTSYDSSVHTETSSSSLYDNKVCPICLTNAKDMAFGCGHQTCCECGEDLQFCPICRSTIHTRIRLY

SEQ ID NO: 53597 - protein, 234 aa, Glycine max
  peptide (1)..(234): Ceres Seq. ID no. 14303140
MAMTIVEQSGGQYHVLLIIADGQVTRSVDTQNGNLSPQEQNTIDAIVKASEYPLSIVLVGVGDGPWEMMREFDDNIPSRAFDNFQFVNFTEIMTRNVDSTRKETDFALSALMEIPSQYKATLELGILGSRRGHSPDRVALPPPLYSRTSSSISTKSTRSNSFQQRTPTHTSYDSSVHTETSSSSLYDNKVCPICLTNAKDMAFGCGHQTCCECGEDLQFCPICRSTIHTRIRLY

SEQ ID NO: 53598 - DNA, 1255 bp, Glycine max
  misc_feature (1)..(1255): Ceres Seq. ID no. 14304898
gaatggtcaatctcacactaactcactggatcgggataagctcctcactgggattgacctagagccaccagatttctcatttcatcaaagtgaccaccaccaccaccacacttataccatgtcatataatcatcatcatagtaataacaatgattttcccactacaagcaccatgggaagtagtagcttatcctatgatgaagatgcaagctttgatgagaggcatggcaaaatgctcaagtgtaatagctcaaactccatcaatatttctcaagatgttgccaattcacacataccctcctcctcttcagcaccttccaaatctaccttcattttgtcctttgaaaactcaactgttgaacctgccctccatgatagagtacctaattattataataattcccctaataagcattttgaggccacatgttcttcccttttgagctcagaaataacactcatcagcagtgaccatgtcatcactaaaccaaaagcaaagcaaggggccaagaagtatagaacctcatcagagatcaaagatcacataatggctgagaggaaaaggagacaagacctcactgagaggttcattgcactttctgccaccatacccggattgaagaagacagacaaggcctatatacttcaagaagctatcacatatatgaaacaacttcaggagagagtgaaagtgctagagaatgagaacaagaggaaaacaacatattcaaaaatattcatcaagaaatcacaagtgtgctcaagagaagaagccacatcatcatgtgaaacaaactctaattatagatccacgccaccaccactacctcaagttgaagcaagaatgttggaaaaggaagttctcattggaatccactgccagaaacaaaaggatattgtgctcaaaatcatggccttgcttcaaaatctccatctctctcttgctagtagtagtgtattgccatttgggacttctacagtaaaagttacaatcattgcccagatgggcgacaaatacggtatgacagtgaatgatctagtaaaaagactgaggcaagatctcttgaagtcacatgacattcaagagtcacattccaaagagtgccaaatatgatatgcaattgtttatggagagtgaggtttgcagaaattttagttttgcccttcttaaatttcaataagaaaaaaatgatgaggatttgtttgtaatgaaattgaacctcataatgtattaaaaatatgcacagcacttatc

SEQ ID NO: 53599 - protein, 370 aa, Glycine max
  peptide (1)..(370): Ceres Seq. ID no. 14304899
NGQSHTNSLDRDKLLTGIDLEPPDFSFHQSDHHHHHTYTMSYNHHHSNNNDFPTTSTMGSSSLSYDEDASFDERHGKMLKCNSSNSINISQDVANSHIPSSSSAPSKSTFILSFENSTVEPALHDRVPNYYNNSPNKHFEATCSSLLSSEITLISSDHVITKPKAKQGAKKYRTSSEIKDHIMAERKRRQDLTERFIALSATIPGLKKTDKAYILQEAITYMKQLQERVKVLENENKRKTTYSKIFIKKSQVCSREEATSSCETNSNYRSTPPPLPQVEARMLEKEVLIGIHCQKQKDIVLKIMALLQNLHLSLASSSVLPFGTSTVKVTIIAQMGDKYGMTVNDLVKRLRQDLLKSHDIQESHSKECQI

SEQ ID NO: 53600 - protein, 331 aa, Glycine max
  peptide (1)..(331): Ceres Seq. ID no. 14304900
MSYNHHHSNNNDFPTTSTMGSSSLSYDEDASFDERHGKMLKCNSSNSINISQDVANSHIPSSSSAPSKSTFILSFENSTVEPALHDRVPNYYNNSPNKHFEATCSSLLSSEITLISSDHVITKPKAKQGAKKYRTSSEIKDHIMAERKRRQDLTERFIALSATIPGLKKTDKAYILQEAITYMKQLQERVKVLENENKRKTTYSKIFIKKSQVCSREEATSSCETNSNYRSTPPPLPQVEARMLEKEVLIGIHCQKQKDIVLKIMALLQNLHLSLASSSVLPFGTSTVKVTIIAQMGDKYGMTVNDLVKRLRQDLLKSHDIQESHSKECQI

SEQ ID NO: 53601 - protein, 313 aa, Glycine max
  peptide (1)..(313): Ceres Seq. ID no. 14304901
MGSSSLSYDEDASFDERHGKMLKCNSSNSINISQDVANSHIPSSSSAPSKSTFILSFENSTVEPALHDRVPNYYNNSPNKHFEATCSSLLSSEITLISSDHVITKPKAKQGAKKYRTSSEIKDHIMAERKRRQDLTERFIALSATIPGLKKTDKAYILQEAITYMKQLQERVKVLENENKRKTTYSKIFIKKSQVCSREEATSSCETNSNYRSTPPPLPQVEARMLEKEVLIGIHCQKQKDIVLKIMALLQNLHLSLASSSVLPFGTSTVKVTIIAQMGDKYGMTVNDLVKRLRQDLLKSHDIQESHSKECQI

SEQ ID NO: 53602 - DNA, 1309 bp, Glycine max
  misc_feature (1)..(1309): Ceres Seq. ID no. 14310864
tcaacctcacttgatcaattctccaaatacctaatatggagtttcacattcttcccatcattacttttctcatgcttgttgtggcaactaatgctgatgctgcattacctcctgcattttactggaagtccaagcttcctaccacaccaatgccgaaagccatcactgatttgctacaacctgattggaaggaagagaaagacacctctgtggatgtagggaaaggtggagtaaatgttggtgtagaaaagggaaaccaaggaccaggagatggcactgatgttaatgttggtggtggagacggtggagtgaatgtgcacacaggaccaaagggtaagccagttcacgttggagtgggcccacattctccatttgattacaactatgcagccagcgagacccaattacatgatgaccccaatgtggcactcttcttcttggaaaaggacttgcaccacggaacaaaattgaaccttcacttcactatctactacacctcaaatgttgatgccacgttcttgcctcgatcagtttctgattccatacccttttcgtcaaacaaggtgaatgatgtattaaacaagttttcaatcaaggacgggtcagatgaggctaaaactgtgaagaacactattaatgagtgtgaaggacctagcattaagggagaggaaaagcgttgcgtgacttcacttgagtccatggttgatttcgccactaccaagctcgggagcaacaatgttgatgctgtttccacagaagtgacaaaaaaagataatgagttacaacagtatacaatggcaccaggggttaagaggttgggtgaggacaaggctagtgttgtgtgtcacaaggagaattacccttatgcagtgttttattgccacaaatcagaaaccacaaaagcctattctgtcccattggagggtgctgatggaagcagggtcaaagcagttgcagtgtgccatactgacacatcaaagtggaatcccaagcatttggcgtttcaagtgcttaaggttcagccaggaactgttcctgtctgccacttcctgcctcaggatcatgttgtctttgttcccaagtagaaacacacacgagtcccatttctgatgttggtgaataatttggcagttttaatagcatgaaatgagcttttaaaactgaatgcgtagtatttgcattatgttatcctacgttgtcagcatgtttgcttttacaggtttactgttatctcaatatatgtatatgtactagtgatgtattaaatgtgctaatatgtgatatatatatatatatagctttttcattc

SEQ ID NO: 53603 - protein, 349 aa, Glycine max
  peptide (1)..(349): Ceres Seq. ID no. 14310865
MEFHILPIITFLMLVVATNADAALPPAFYWKSKLPTTPMPKAITDLLQPDWKEEKDTSVDVGKGGVNVGVEKGNQGPGDGTDVNVGGGDGGVNVHTGPKGKPVHVGVGPHSPFDYNYAASETQLHDDPNVALFFLEKDLHHGTKLNLHFTIYYTSNVDATFLPRSVSDSIPFSSNKVNDVLNKFSIKDGSDEAKTVKNTINECEGPSIKGEEKRCVTSLESMVDFATTKLGSNNVDAVSTEVTKKDNELQQYTMAPGVKRLGEDKASVVCHKENYPYAVFYCHKSETTKAYSVPLEGADGSRVKAVAVCHTDTSKWNPKHLAFQVLKVQPGTVPVCHFLPQDHVVFVPK

SEQ ID NO: 53604 - protein, 337 aa, Glycine max
  peptide (1)..(337): Ceres Seq. ID no. 14310866
MLVVATNADAALPPAFYWKSKLPTTPMPKAITDLLQPDWKEEKDTSVDVGKGGVNVGVEKGNQGPGDGTDVNVGGGDGGVNVHTGPKGKPVHVGVGPHSPFDYNYAASETQLHDDPNVALFFLEKDLHHGTKLNLHFTIYYTSNVDATFLPRSVSDSIPFSSNKVNDVLNKFSIKDGSDEAKTVKNTINECEGPSIKGEEKRCVTSLESMVDFATTKLGSNNVDAVSTEVTKKDNELQQYTMAPGVKRLGEDKASVVCHKENYPYAVFYCHKSETTKAYSVPLEGADGSRVKAVAVCHTDTSKWNPKHLAFQVLKVQPGTVPVCHFLPQDHVVFVPK

SEQ ID NO: 53605 - protein, 311 aa, Glycine max
  peptide (1)..(311): Ceres Seq. ID no. 14310867
MPKAITDLLQPDWKEEKDTSVDVGKGGVNVGVEKGNQGPGDGTDVNVGGGDGGVNVHTGPKGKPVHVGVGPHSPFDYNYAASETQLHDDPNVALFFLEKDLHHGTKLNLHFTIYYTSNVDATFLPRSVSDSIPFSSNKVNDVLNKFSIKDGSDEAKTVKNTINECEGPSIKGEEKRCVTSLESMVDFATTKLGSNNVDAVSTEVTKKDNELQQYTMAPGVKRLGEDKASVVCHKENYPYAVFYCHKSETTKAYSVPLEGADGSRVKAVAVCHTDTSKWNPKHLAFQVLKVQPGTVPVCHFLPQDHVVFVPK

SEQ ID NO: 53606 - DNA, 1230 bp, Glycine max
  misc_feature (1)..(1230): Ceres Seq. ID no. 14311014
aagagaagaagatggatagtgaaattgaaaagaagaagaacctgttttcggaactaaccgacgacatcgttctgaacatcttctacaaactcgaagacgatcctcgccactgggctcgcttagcctgtgtctgcaccaaattctcttccctcgttagggatttctgttggaagaccaaatgctccctcaccatcccccaagacctcctctccgccgccgcctccgacccccctctctccctccacaaactctccttctgctgccccggcctccgccacgccggcctcctgttcgacacctccgatttcggcctcgaacgcgacctcggccccggcaacttcaacgtcatcaccgatgattctccttcgaacaccactccaccaccaccaccaccaccaccacaacaacaacaacaacaacctcctcaatccgatgattgttcttcctcttgttggtccctttacgatgacctctactacgacacgctctacgtcccaaccgagtccgagtcgccgcgattaacggaatccgttagcgtaagagcgggcgtggatgtggcttcgatcagcgcgtgcagcaagaagcgcaagctctcccgcgcgtggagctcacacctggcttcgggaagctggacactaagccgtgaacaaggaagcaagctcctggcgcgtaagttccggtacgattgcttgtacgtgtgcgagtggccagggtgcgtgcacaaggaggagaagcgcaagtactgcctcttcagaggggttttcaagaacttcaggcgaactatggtttggaggactattcaggatgggaagaagaggaagatggatctgccttgcgccttctgcgcgtgtgagttcacgtgggatctgcactcttccttttgcttgaggcctggctttggcttccatgacgatggggagcctatggttagggcttatgtttgtgagaatggacatgtctctggtgcctggaccgatcttcccatctacacttgaactctctactgcattttatgcctaatttatgtcattttcattttcgcaatcttagtttctcctttaaataactcctgagaaggccgctatacgctgttttcacattccattccattatttcaactattacttaagattggaaatctgctttgtgaaattccgatcgcagtgtgattgcagtggaaaagcctttttaggtttttcttttatgagattcaaaacccattcgcgtttg

SEQ ID NO: 53607 - protein, 330 aa, Glycine max
  peptide (1)..(330): Ceres Seq. ID no. 14311015
EKKMDSEIEKKKNLFSELTDDIVLNIFYKLEDDPRHWARLACVCTKFSSLVRDFCWKTKCSLTIPQDLLSAAASDPPLSLHKLSFCCPGLRHAGLLFDTSDFGLERDLGPGNFNVITDDSPSNTTPPPPPPPPQQQQQQPPQSDDCSSSCWSLYDDLYYDTLYVPTESESPRLTESVSVRAGVDVASISACSKKRKLSRAWSSHLASGSWTLSREQGSKLLARKFRYDCLYVCEWPGCVHKEEKRKYCLFRGVFKNFRRTMVWRTIQDGKKRKMDLPCAFCACEFTWDLHSSFCLRPGFGFHDDGEPMVRAYVCENGHVSGAWTDLPIYT

SEQ ID NO: 53608 - protein, 327 aa, Glycine max
  peptide (1)..(327): Ceres Seq. ID no. 14311016
MDSEIEKKKNLFSELTDDIVLNIFYKLEDDPRHWARLACVCTKFSSLVRDFCWKTKCSLTIPQDLLSAAASDPPLSLHKLSFCCPGLRHAGLLFDTSDFGLERDLGPGNFNVITDDSPSNTTPPPPPPPPQQQQQQPPQSDDCSSSCWSLYDDLYYDTLYVPTESESPRLTESVSVRAGVDVASISACSKKRKLSRAWSSHLASGSWTLSREQGSKLLARKFRYDCLYVCEWPGCVHKEEKRKYCLFRGVFKNFRRTMVWRTIQDGKKRKMDLPCAFCACEFTWDLHSSFCLRPGFGFHDDGEPMVRAYVCENGHVSGAWTDLPIYT

SEQ ID NO: 53609 - DNA, 1099 bp, Glycine max
  misc_feature (1)..(1099): Ceres Seq. ID no. 14304460
agataaaggaattgaaatcgaggctgctgcaagaagagaacacagcaggaagcggtgtttcggtgaaggaagaagagataacaacgatgcctgcagactcagaagagaaaacgatggaacaaagtaagagtgacccaccttctgaaacctcgaacattaatcctagttcggagtcgtcggaggaggaccacttgaattacgaatgtttcaacaacaacagcgacgactgtgtcgtcggaggatccgccgcagcatcgctcttgcaagtggacttcatgaaagacggttcttccgacagcgacggatcaagcgcgatcttgaacgaagacaccatgtacttgccgtcttcgatgaactgttttcagttccagaaaccgtatcatcacgcgcagtacgtgaagacggaggagcacaatttcttgagcgccgatgaggcctgcaatttcttctccgatgaacaagcaccgaccctgcaatggtactgtccagaacagtggagctgagatagaagaaacatgggaaaattggaaaccgctttcagaaatttttgtttaatatgttgcacggttgtgttgaacacagctcattgaggtaaaagttgtaaaaaaaggttgccacttgccaacagaggctgcttgaaggtagaaaatgaaacactgtgcagaagatagagttacgaaagagagaacagagatcaatggctgcatggcgtggggtcggagatgaaggatgacgattaaggttaattattactctcgatcgtgggtaatatcaataattattcaatcgtaaagcaaaccatgctgtaaaaaacaaatttcaattcaagtatagaataacgatgtagtactttatcaaacagaaaacgaaaaaaaaaattataaatctgttaaacaatatccttttgcctcactgaactcagtttactagtgtttatgattgattatccttttcctgtaaaagtatttttttttcaccaacaattgctactaaactgaatttgagttggaggcaacatatgagttgttttttaatgttcatttccattgacattgtttattcattagtcgtgtcaagtaaaaatatttttgttattagt

SEQ ID NO: 53610 - protein, 166 aa, Glycine max
  peptide (1)..(166): Ceres Seq. ID no. 14304461
IKELKSRLLQEENTAGSGVSVKEEEITTMPADSEEKTMEQSKSDPPSETSNINPSSESSEEDHLNYECFNNNSDDCVVGGSAAASLLQVDFMKDGSSDSDGSSAILNEDTMYLPSSMNCFQFQKPYHHAQYVKTEEHNFLSADEACNFFSDEQAPTLQWYCPEQWS

SEQ ID NO: 53611 - protein, 138 aa, Glycine max
  peptide (1)..(138): Ceres Seq. ID no. 14304462
MPADSEEKTMEQSKSDPPSETSNINPSSESSEEDHLNYECFNNNSDDCVVGGSAAASLLQVDFMKDGSSDSDGSSAILNEDTMYLPSSMNCFQFQKPYHHAQYVKTEEHNFLSADEACNFFSDEQAPTLQWYCPEQWS

SEQ ID NO: 53612 - protein, 129 aa, Glycine max
  peptide (1)..(129): Ceres Seq. ID no. 14304463
MEQSKSDPPSETSNINPSSESSEEDHLNYECFNNNSDDCVVGGSAAASLLQVDFMKDGSSDSDGSSAILNEDTMYLPSSMNCFQFQKPYHHAQYVKTEEHNFLSADEACNFFSDEQAPTLQWYCPEQWS

SEQ ID NO: 53613 - DNA, 1633 bp, Glycine max
  misc_feature (1)..(1633): Ceres Seq. ID no. 14310834
gggagaggtgaattcgcagacgaacattccgctcccatcgcatctgtaacaatggaagcgcgccatgcaactcttggtcgacgaacgttggaggaaattcggcaaaagagggccgcggagagattgagtaaaacctcttcgggaccagatctcacgcaggttcccagcacctccgagattgcgggaatgagcaagtccgagagcgcaaataagctctctgagacagatcttagtgctctattgtctcaattgaaaggactgcaaaagaagaacacggagttggaggaagaaaacacaaaaattagtttaaagcttcaaacgatggaaattgataatgagacaatgcacaagcaattaaatgatgtggaacaaaatacagtgccatctctaaggaaagctctgagggatgtcgcaatggagaaagatgctgcagttgttgcacgggaggacctttcagcacagcttcgtaccctgaagaaacgtcttaaggaagcagaagatgagcaatatcgtgccgaggaagatgcagcagcgttgagagcagaattgaactcaattcagcaacaagcaatgactaatacagttagcacaatttcatcatttggtaatccacccgatcattttcaaattcaaagattacaaaaggagctagatgatttaaaactggaactgcagcgagaatcacttttgaggcaccaggagcaggaacaattagcaaaagagcaagcctgcattgcctcactgatatctgaaaagcaggagttggaagagaaactcatgtccatatctagagagcctgcagaagcctcagataaagctgctcacaaagcattttctttggaagacaagcagaaacttgataggcagttgtatgatatggctatagccattgagaggttggaaagcagtaggcagaaacttctaatggagattgactcacaatctacagaaatagagaggctttttgaggaaaattctagtctctcaaattcataccaagaggcaattggagcagcagcgagatgggaaaaccaggtgatggattgtcttaagcaaaatgaagagcttcgtgggattctagataatttgagaatggaacaggctaggggtttgccagactcttctaaaaatggggcacatgagattgcttccttggcatctatgaagggccaacttgtgacagaacagagcagagcagaggcgctatctgcagaagtcatgcagctttctgctcaacttgaacaagtcaaacaagcatatgatggtcttgcacgcttctataggccagtgctgcgcaacattgaaagcaatctcataaaaatgaagcaagacaactcgttggctgtacgatgatggtaatgagcagtttcatgatgatattccggttgtaattgtgaagcccttctttgaagacatttccaatgcccacagaattgtttttaaccatttgatgttattagtttggtaaaagtggaacgagatggctcagtaactggtggtaatggttcttcattcttgagctgttttgttttgtggtaatactctgcataagaagcccttgttatacccaaacgtgaatttgtaaaacttgtcattctttatactaatattaatttgtaaacaagcacaaccg

SEQ ID NO: 53614 - protein, 450 aa, Glycine max
  peptide (1)..(450): Ceres Seq. ID no. 14310835
GRGEFADEHSAPIASVTMEARHATLGRRTLEEIRQKRAAERLSKTSSGPDLTQVPSTSEIAGMSKSESANKLSETDLSALLSQLKGLQKKNTELEEENTKISLKLQTMEIDNETMHKQLNDVEQNTVPSLRKALRDVAMEKDAAVVAREDLSAQLRTLKKRLKEAEDEQYRAEEDAAALRAELNSIQQQAMTNTVSTISSFGNPPDHFQIQRLQKELDDLKLELQRESLLRHQEQEQLAKEQACIASLISEKQELEEKLMSISREPAEASDKAAHKAFSLEDKQKLDRQLYDMAIAIERLESSRQKLLMEIDSQSTEIERLFEENSSLSNSYQEAIGAAARWENQVMDCLKQNEELRGILDNLRMEQARGLPDSSKNGAHEIASLASMKGQLVTEQSRAEALSAEVMQLSAQLEQVKQAYDGLARFYRPVLRNIESNLIKMKQDNSLAVR

SEQ ID NO: 53615 - protein, 433 aa, Glycine max
  peptide (1)..(433): Ceres Seq. ID no. 14310836
MEARHATLGRRTLEEIRQKRAAERLSKTSSGPDLTQVPSTSEIAGMSKSESANKLSETDLSALLSQLKGLQKKNTELEEENTKISLKLQTMEIDNETMHKQLNDVEQNTVPSLRKALRDVAMEKDAAVVAREDLSAQLRTLKKRLKEAEDEQYRAEEDAAALRAELNSIQQQAMTNTVSTISSFGNPPDHFQIQRLQKELDDLKLELQRESLLRHQEQEQLAKEQACIASLISEKQELEEKLMSISREPAEASDKAAHKAFSLEDKQKLDRQLYDMAIAIERLESSRQKLLMEIDSQSTEIERLFEENSSLSNSYQEAIGAAARWENQVMDCLKQNEELRGILDNLRMEQARGLPDSSKNGAHEIASLASMKGQLVTEQSRAEALSAEVMQLSAQLEQVKQAYDGLARFYRPVLRNIESNLIKMKQDNSLAVR

SEQ ID NO: 53616 - protein, 388 aa, Glycine max
  peptide (1)..(388): Ceres Seq. ID no. 14310837
MSKSESANKLSETDLSALLSQLKGLQKKNTELEEENTKISLKLQTMEIDNETMHKQLNDVEQNTVPSLRKALRDVAMEKDAAVVAREDLSAQLRTLKKRLKEAEDEQYRAEEDAAALRAELNSIQQQAMTNTVSTISSFGNPPDHFQIQRLQKELDDLKLELQRESLLRHQEQEQLAKEQACIASLISEKQELEEKLMSISREPAEASDKAAHKAFSLEDKQKLDRQLYDMAIAIERLESSRQKLLMEIDSQSTEIERLFEENSSLSNSYQEAIGAAARWENQVMDCLKQNEELRGILDNLRMEQARGLPDSSKNGAHEIASLASMKGQLVTEQSRAEALSAEVMQLSAQLEQVKQAYDGLARFYRPVLRNIESNLIKMKQDNSLAVR

SEQ ID NO: 53617 - DNA, 542 bp, Glycine max
  misc_feature (1)..(542): Ceres Seq. ID no. 12581561
gcacaggacccttgggttgtgttccatcagaattggcccaacgtggtagaaatggacaatgtgctcctgaactacaacaagctgcagcactcttcaacccacaactcgaacaaatgttacttcaactcaaccgcaaaattgcaactgacgttttcattgctgcaaacactggaaaagctcacaacgacttcgttactaacgcccaacaatttggatttgttacatcacaagtagcttgttgtgggcaaggaccttacaatggtattgggctatgcacagcactctccaacctttgctccaacagagaccaatatgcattttgggatgcattccatccatctgaaaaggccaataggcttattgtggaggaaattatgtcaggttctaaagcctacatgaacccaatgaaccttagcaccatcctagctttggactcaaacacatgaagataacacaaatctaatatatcctagcacttgtattggccttccatgctagnttcaaagacatctctcttttctanatttttagtattgtaattg

SEQ ID NO: 53618 - protein, 147 aa, Glycine max
  peptide (1)..(147): Ceres Seq. ID no. 12581562
TGPLGCVPSELAQRGRNGQCAPELQQAAALFNPQLEQMLLQLNRKIATDVFIAANTGKAHNDFVTNAQQFGFVTSQVACCGQGPYNGIGLCTALSNLCSNRDQYAFWDAFHPSEKANRLIVEEIMSGSKAYMNPMNLSTILALDSNT

SEQ ID NO: 53619 - protein, 110 aa, Glycine max
  peptide (1)..(110): Ceres Seq. ID no. 12581563
MLLQLNRKIATDVFIAANTGKAHNDFVTNAQQFGFVTSQVACCGQGPYNGIGLCTALSNLCSNRDQYAFWDAFHPSEKANRLIVEEIMSGSKAYMNPMNLSTILALDSNT

SEQ ID NO: 53620 - protein, 77 aa, Glycine max
  peptide (1)..(77): Ceres Seq. ID no. 12581564
AQDPWVVFHQNWPNVVEMDNVLLNYNKLQHSSTHNSNKCYFNSTAKLQLTFSLLQTLEKLTTTSLLTPNNLDLLHHK

SEQ ID NO: 53621 - DNA, 1512 bp, Glycine max
  misc_feature (1)..(1512): Ceres Seq. ID no. 14304273
gatcagtaaacaatcacacacgccgcccctcttacagaacggagatcaggtgtggtcggcggcggcacgagggaggttggaaagtgtccgacacggcggatttcgcttgggcttcagtgtcgcagcacccaaacgctccaaccgcgactctaaaacgcaacgtgaccgaggtcttcgtcgggcctccgctccggccgctatttactactgtggctgtataaacattctagttatggaagattctgatcaaccagccaaatctgctgaaaaccagcaaactgaacaagtgtgtagttttttcagaaagccagttaataaaaagaatataaggaaacgaactattgttaatgaagataatgaggaggactcaaacaatgaaacttctctgttgcatattcagaagaagaccttaaagcctgataataagttgtacttttccactggttcttcaaaaagctctgcatctgctgaacccagtgaagaaccaggaaaaccagtctttcagttcgagtcttcaaaagagattcaagttcagcatgatagcaaagcaactgcaacactagagaccgagactgagttttcaaaagatgctcgtgccatccgtgaaagagctcttaagcaagcagaggagagtctgaaagggaaaagcccaagttctaagaatgaaaaattatataagggaatgaacagttacaaagactacaaggctggctttcgtagggagcaaacaattgctagtgaaaaagctggcgggtcacatggtcctcttagggcttcagctcatataagagtttcagcgaggtttgattatcagcctgacatatgtaaggattataaggaaactggttactgtggatatggtgattcatgtaagtttatgcatgatcgaggggactacaagtctgggtggcagatggagaaggaatgggaagaagctgagaaagcaaggaagatgagattggctgcaggagaggatgcagatgaggagggtgctaatttgactgatgaagatgatgaggattctttaccatttgcctgtttcatttgtagaaacacttttgtggatcctgtagtaaccaagtgcaagcactacttctgcgagcattgtgcattgaagcatcatgcaaagaataagaagtgttttgtctgcaaccagccaactcttggcatttttaacgttgctcatgagatacgcaggaagatggccgaggataaatcataaaaatgtctctctaggatccatggatctctttacttcatggaagttatcttttctcccccattttagtttcatgttaaagattgatgctatgtaatgagttgaaaacataccagaagtttgcacagtggaattagttgattcattttgttgtatttctttgccttatagattccagaatatctaatggtgagagacatttatgatatacccgtttgtatatagggtcatactgtggttctttttacagtagtttgttaccaaataaattttgaatagagcgacctttactc

SEQ ID NO: 53622 - protein, 406 aa, Glycine max
  peptide (1)..(406): Ceres Seq. ID no. 14304274
ISKQSHTPPLLQNGDQVWSAAARGRLESVRHGGFRLGFSVAAPKRSNRDSKTQRDRGLRRASAPAAIYYCGCINILVMEDSDQPAKSAENQQTEQVCSFFRKPVNKKNIRKRTIVNEDNEEDSNNETSLLHIQKKTLKPDNKLYFSTGSSKSSASAEPSEEPGKPVFQFESSKEIQVQHDSKATATLETETEFSKDARAIRERALKQAEESLKGKSPSSKNEKLYKGMNSYKDYKAGFRREQTIASEKAGGSHGPLRASAHIRVSARFDYQPDICKDYKETGYCGYGDSCKFMHDRGDYKSGWQMEKEWEEAEKARKMRLAAGEDADEEGANLTDEDDEDSLPFACFICRNTFVDPVVTKCKHYFCEHCALKHHAKNKKCFVCNQPTLGIFNVAHEIRRKMAEDKS

SEQ ID NO: 53623 - protein, 329 aa, Glycine max
  peptide (1)..(329): Ceres Seq. ID no. 14304275
MEDSDQPAKSAENQQTEQVCSFFRKPVNKKNIRKRTIVNEDNEEDSNNETSLLHIQKKTLKPDNKLYFSTGSSKSSASAEPSEEPGKPVFQFESSKEIQVQHDSKATATLETETEFSKDARAIRERALKQAEESLKGKSPSSKNEKLYKGMNSYKDYKAGFRREQTIASEKAGGSHGPLRASAHIRVSARFDYQPDICKDYKETGYCGYGDSCKFMHDRGDYKSGWQMEKEWEEAEKARKMRLAAGEDADEEGANLTDEDDEDSLPFACFICRNTFVDPVVTKCKHYFCEHCALKHHAKNKKCFVCNQPTLGIFNVAHEIRRKMAEDKS

SEQ ID NO: 53624 - DNA, 1110 bp, Glycine max
  misc_feature (1)..(1110): Ceres Seq. ID no. 15174890
atttcatcaggggcaaagagatcgaggaaggtgataatggaattttggccagaatttcttgctagtagtacgggtaaagagtttgtggctggaggatttggaggcactgctggtataatctcaggttacccattagacacgctccgtgtgatgcaacaaagctccaacaatggctctgctgccttcaccatcctcagaaatttggtggccaaggaaggaccaactgctctgtaccgtggcatggctgcacctttggcctctgttacatttcagaacgctatggttttccaaatttacgcagttctctctagggcatttagcacgtccgtttctgtcaacgaccctccttcctacaagggtgttgctttaggaggattttgctctggcgctttgcagagcatgctgctctcccctgttgagttagttaaaattcgccttcagcttcagaacacaggacaatccacagaaccacaaaagggtcccataaaggtcgccaacaacatatggaaaagagagggtcttcgtggcatttatcgaggacttggcatcactatgctaagagatgcacctgcacatggcctctacttttggacatatgaatatgcgagggagaaacttcacccaggttgtagaagaagttgtcaagagaccttgaatactatgttggtatcaggaggattggctggggttgtgagttgggtttttagctaccctttggacgttataaagacaagattgcaggctcagacactttcttcgcggaaatacaaaggcattttggattgtcttcggaagagcgttgaagaggaaggatacgttgtgctatggcggggtttaggaactgcggttgctagagcctttgttgtgaatggtgctatattttctgcttatgagatcactcttaggtgtctgtttgacaaataaataatacctgcattcaaatgtagggagcaatcaagggctgcaaatcaggttttgagggatacgtgacaatgggataccacattcccagttgcatgtgttttcgaaattgtcattcagatatggtatttgataacttgatgtaattgccaaatgccaaacatattcattcacattcaaaaaaaaaag

SEQ ID NO: 53625 - protein, 307 aa, Glycine max
  peptide (1)..(307): Ceres Seq. ID no. 15174891
ISSGAKRSRKVIMEFWPEFLASSTGKEFVAGGFGGTAGIISGYPLDTLRVMQQSSNNGSAAFTILRNLVAKEGPTALYRGMAAPLASVTFQNAMVFQIYAVLSRAFSTSVSVNDPPSYKGVALGGFCSGALQSMLLSPVELVKIRLQLQNTGQSTEPQKGPIKVANNIWKREGLRGIYRGLGITMLRDAPAHGLYFWTYEYAREKLHPGCRRSCQETLNTMLVSGGLAGVVSWVFSYPLDVIKTRLQAQTLSSRKYKGILDCLRKSVEEEGYVVLWRGLGTAVARAFVVNGAIFSAYEITLRCLFDK

SEQ ID NO: 53626 - protein, 295 aa, Glycine max
  peptide (1)..(295): Ceres Seq. ID no. 15174892
MEFWPEFLASSTGKEFVAGGFGGTAGIISGYPLDTLRVMQQSSNNGSAAFTILRNLVAKEGPTALYRGMAAPLASVTFQNAMVFQIYAVLSRAFSTSVSVNDPPSYKGVALGGFCSGALQSMLLSPVELVKIRLQLQNTGQSTEPQKGPIKVANNIWKREGLRGIYRGLGITMLRDAPAHGLYFWTYEYAREKLHPGCRRSCQETLNTMLVSGGLAGVVSWVFSYPLDVIKTRLQAQTLSSRKYKGILDCLRKSVEEEGYVVLWRGLGTAVARAFVVNGAIFSAYEITLRCLFDK

SEQ ID NO: 53627 - protein, 257 aa, Glycine max
  peptide (1)..(257): Ceres Seq. ID no. 15174893
MQQSSNNGSAAFTILRNLVAKEGPTALYRGMAAPLASVTFQNAMVFQIYAVLSRAFSTSVSVNDPPSYKGVALGGFCSGALQSMLLSPVELVKIRLQLQNTGQSTEPQKGPIKVANNIWKREGLRGIYRGLGITMLRDAPAHGLYFWTYEYAREKLHPGCRRSCQETLNTMLVSGGLAGVVSWVFSYPLDVIKTRLQAQTLSSRKYKGILDCLRKSVEEEGYVVLWRGLGTAVARAFVVNGAIFSAYEITLRCLFDK

SEQ ID NO: 53628 - DNA, 1245 bp, Glycine max
  misc_feature (1)..(1245): Ceres Seq. ID no. 14306439
gattggacacgtgtgccaactctctctctctctctctctctctcatacattcccattgaggagaggttggggtgcgcaacacaacaccgcaccaaaactctcgttccctgccacaaccggaaacagaagccacgacacacaacacaaaacacaaagcattggtattcggtacgtaacatactctgtttcctctgacttcgaggttttccttcgctttggttcagaccaagcgatctctgtggctacaaacttggaaccatttttatgttttttttcccctgagccttcggttcccatgttcttcgctccaccgcatgttgtaacttgtaaccgcaattccattcctctattctttctcttacccttgagtcacgcacccaccctttttgcctctcacgtagttattgttgtgtgcatgctggtcctacttgattggtgatttttgtagaaactttgatcgatcgatctcttcatcgtcatgacagcttctgcttcaaattcgttgataaccgttaaccctgatgaacttcgcttccaatttgagttggagaagcaaacatattgcgatcttaaagttctgaataacacagagaactacgttgcctttaaggtcaaaaccacttcaccaaagaagtactttgtacgacctaataccggtgttgtacatccatgggacctatgtatcatcagagtcaccctccaggctcaacaagaataccctccagacatgcaatgcaaagacaagtttctcttgcagagtacaatagtgaatccaaacactgatgttgacgatcttccgccagatacttttaataaggatggcgaaaagtcgatagaggatatgaaactaagagtggtatatatctctcctatgtcaccccaaggaagcacagaagatgacacagtgaagaattcaactcaaaaacttgatgctaattctagtgaaaccgtgcagcgcctgaaggaggaaagagatgcctacgtcttacaatcacggcaactgcagcaggaactggacattctgaaaagaagaaatcgtagaggcgattcaggcttttccttcacttttgccgtgtttgtgggtctcattggattattgtgtggtttgcttttaaaactttcattgtcttcaccacctacagaatgatttcacactgatcaaaacctttgcatgcagacccttccgtgctattaagtgtaaagaattattttttctattgaatgggatttttattcattttgcac

SEQ ID NO: 53629 - protein, 222 aa, Glycine max
  peptide (1)..(222): Ceres Seq. ID no. 14306440
MTASASNSLITVNPDELRFQFELEKQTYCDLKVLNNTENYVAFKVKTTSPKKYFVRPNTGVVHPWDLCIIRVTLQAQQEYPPDMQCKDKFLLQSTIVNPNTDVDDLPPDTFNKDGEKSIEDMKLRVVYISPMSPQGSTEDDTVKNSTQKLDANSSETVQRLKEERDAYVLQSRQLQQELDILKRRNRRGDSGFSFTFAVFVGLIGLLCGLLLKLSLSSPPTE

SEQ ID NO: 53630 - protein, 145 aa, Glycine max
  peptide (1)..(145): Ceres Seq. ID no. 14306441
IGHVCQLSLSLSLSHTFPLRRGWGAQHNTAPKLSFPATTGNRSHDTQHKTQSIGIRYVTYSVSSDFEVFLRFGSDQAISVATNLEPFLCFFSPEPSVPMFFAPPHVVTCNRNSIPLFFLLPLSHAPTLFASHVVIVVCMLVLLDW

SEQ ID NO: 53631 - protein, 139 aa, Glycine max
  peptide (1)..(139): Ceres Seq. ID no. 14306442
MQCKDKFLLQSTIVNPNTDVDDLPPDTFNKDGEKSIEDMKLRVVYISPMSPQGSTEDDTVKNSTQKLDANSSETVQRLKEERDAYVLQSRQLQQELDILKRRNRRGDSGFSFTFAVFVGLIGLLCGLLLKLSLSSPPTE

SEQ ID NO: 53632 - DNA, 1330 bp, Glycine max
  misc_feature (1)..(1330): Ceres Seq. ID no. 14303870
agtggacctatcaaacaacaagttcaatggccccataccagccaagtttggtagttcttcaaatttacaactcctcaatgtgtctttcaacaatatctctggttcaataccaacagcaaagtcattcaaattgatgggaagaagtgcatttgttggaaattcagagctatgtggagcaccattgcaaccatgtcctgattcagttggaatattgggaagcaaaggcacgtggaaggttacacgtattgtgcttctctctgtagggttgttaatagtccttctgggacttgtttttggaattctttacttgagaaggggaatcaaaagtcaatggaagatggtctcattcgctggtctacctcaattcacagcaaacgatattttgacaagcctcagtgccacaacaaaacctacagatattcaatcaccatcagttacaaagactgttctgcctacaggaataacagttttggtcaagaagattgaattggaagcaagaagcataaaggttgtgtcagaatttataatgaggctaggaaatgcaaggcacaagaacttaatcagattgttggggttctgccacaaccagcacctagtctatcttttgtatgattacttgcccaatgggaatttggctgagaaaatggaaatgaaatgggattgggcagcaaaattcagaacagtggttggaattgcaaggggactttgcttccttcaccatgaatgttacccagctataccccatggagacttgaggcctagcaacattgtattcgatgaaaatatggaaccccatttggcagaatttgggttcaaacatgtgtcgaggtggagcaaaggctcatcacccaccacaactaagtgggaaacagaatacaatgaagccacaaaagaggaactgagcatggatatctacaaatttggggagatgattctggaaattttaaccagggaaaggttggcaaattcaggagccagcatacacagcaaaccatgggaggttctcttaagagaaatttacaatgagaatggagcaagttcggcaagttcattgcaagagattaaacttgttcttgaggtagcaatgctttgcacccgaagcaggtcatctgaccggccatccatggaagatgttcttaagcttctgtcagggttaaaacatctagaggatggcagaacttcgaaagaagggcaataaaatgttcatttgcatcactgcgttgaaaaccattagaaacatatagtaattgcttagataacaagtttgcacgtatgtaattaaaggagtttgcagcttgtataatagatatttccattgtttcagtgtgcc

SEQ ID NO: 53633 - protein, 398 aa, Glycine max
  peptide (1)..(398): Ceres Seq. ID no. 14303871
VDLSNNKFNGPIPAKFGSSSNLQLLNVSFNNISGSIPTAKSFKLMGRSAFVGNSELCGAPLQPCPDSVGILGSKGTWKVTRIVLLSVGLLIVLLGLVFGILYLRRGIKSQWKMVSFAGLPQFTANDILTSLSATTKPTDIQSPSVTKTVLPTGITVLVKKIELEARSIKVVSEFIMRLGNARHKNLIRLLGFCHNQHLVYLLYDYLPNGNLAEKMEMKWDWAAKFRTVVGIARGLCFLHHECYPAIPHGDLRPSNIVFDENMEPHLAEFGFKHVSRWSKGSSPTTTKWETEYNEATKEELSMDIYKFGEMILEILTRERLANSGASIHSKPWEVLLREIYNENGASSASSLQEIKLVLEVAMLCTRSRSSDRPSMEDVLKLLSGLKHLEDGRTSKEGQ

SEQ ID NO: 53634 - protein, 354 aa, Glycine max
  peptide (1)..(354): Ceres Seq. ID no. 14303872
MGRSAFVGNSELCGAPLQPCPDSVGILGSKGTWKVTRIVLLSVGLLIVLLGLVFGILYLRRGIKSQWKMVSFAGLPQFTANDILTSLSATTKPTDIQSPSVTKTVLPTGITVLVKKIELEARSIKVVSEFIMRLGNARHKNLIRLLGFCHNQHLVYLLYDYLPNGNLAEKMEMKWDWAAKFRTVVGIARGLCFLHHECYPAIPHGDLRPSNIVFDENMEPHLAEFGFKHVSRWSKGSSPTTTKWETEYNEATKEELSMDIYKFGEMILEILTRERLANSGASIHSKPWEVLLREIYNENGASSASSLQEIKLVLEVAMLCTRSRSSDRPSMEDVLKLLSGLKHLEDGRTSKEGQ

SEQ ID NO: 53635 - protein, 286 aa, Glycine max
  peptide (1)..(286): Ceres Seq. ID no. 14303873
MVSFAGLPQFTANDILTSLSATTKPTDIQSPSVTKTVLPTGITVLVKKIELEARSIKVVSEFIMRLGNARHKNLIRLLGFCHNQHLVYLLYDYLPNGNLAEKMEMKWDWAAKFRTVVGIARGLCFLHHECYPAIPHGDLRPSNIVFDENMEPHLAEFGFKHVSRWSKGSSPTTTKWETEYNEATKEELSMDIYKFGEMILEILTRERLANSGASIHSKPWEVLLREIYNENGASSASSLQEIKLVLEVAMLCTRSRSSDRPSMEDVLKLLSGLKHLEDGRTSKEGQ

SEQ ID NO: 53636 - DNA, 1081 bp, Glycine max
  misc_feature (1)..(1081): Ceres Seq. ID no. 15169849
gagagagaggtatataagaggttagggtttggggttttttgggtgccattgttgctgtcatcatccgcagctgctgttattcgcaccgcaaacaaacagtgagccatggccgtcggaaagaacaagcgcatctccaaagggaaaaagggtggcaagaagaaggcagctgatccctttgccaagaaggattggtatgacattaaggccccttctctttttcaagtgaaaaatgttggcaaaaccctcgtctctcgtacgcagggtaccaagattgcttctgaaggacttaaacatagagtgtttgaggtctccttggctgatcttcaaggggatgaggatcatgcattcaagaagattaggttgagagctgaagatgtgcaagggaagaatgtcctgacaaatttctggggaatggatttcacaactgacaagctgaggtcattggtgcgaaaatggcaaactctaattgaagcccatgtggatgtgaagacaactgataactacacattgaggatgttttgcattggatttaccaagagaagagctaaccaagtgaagagaacctgctatgcacaatcaagccagattagacagattcgtaggaagatgagggagatcatgaccacccaggcaacatcctgtgatttgaaggagttggtccgcaagtttattcttgagattattggaaaagagattgagaaggcgacatctagtatttaccctctgcagaaagtgtttgttcgtaaagtcaagatcctgaaagcccctaagtttgatcttgggaaactgatggaggttcatggagattactcagaggatgttggtgccaaggtagacagacctgctgatgaaatagtggcagaggaacccactgaaattgttggagcttgatttcatgatgcattcagtttgttttaggttttctttttcttacgttatcattgaaaattaagttacaaacttctgtccaatgtttctgtgtaagccgagtgacacagttttgtttagacaatcagaagacatttttggcgcgtaatatatctgggttttgttcagaacccaaaatcagatttgcttgctt

SEQ ID NO: 53637 - protein, 261 aa, Glycine max
  peptide (1)..(261): Ceres Seq. ID no. 15169850
MAVGKNKRISKGKKGGKKKAADPFAKKDWYDIKAPSLFQVKNVGKTLVSRTQGTKIASEGLKHRVFEVSLADLQGDEDHAFKKIRLRAEDVQGKNVLTNFWGMDFTTDKLRSLVRKWQTLIEAHVDVKTTDNYTLRMFCIGFTKRRANQVKRTCYAQSSQIRQIRRKMREIMTTQATSCDLKELVRKFILEIIGKEIEKATSSIYPLQKVFVRKVKILKAPKFDLGKLMEVHGDYSEDVGAKVDRPADEIVAEEPTEIVGA

SEQ ID NO: 53638 - protein, 159 aa, Glycine max
  peptide (1)..(159): Ceres Seq. ID no. 15169851
MDFTTDKLRSLVRKWQTLIEAHVDVKTTDNYTLRMFCIGFTKRRANQVKRTCYAQSSQIRQIRRKMREIMTTQATSCDLKELVRKFILEIIGKEIEKATSSIYPLQKVFVRKVKILKAPKFDLGKLMEVHGDYSEDVGAKVDRPADEIVAEEPTEIVGA

SEQ ID NO: 53639 - DNA, 1657 bp, Glycine max
  misc_feature (1)..(1657): Ceres Seq. ID no. 14311203
gagaaatggaagcaccatgggccacaacaagttcaagcatagtttttgtgatagtgatacttgctctaacatcatgggcatggaggatgttgaattggctatggataaggccaaagaggctagagaggctcctaagggaacaaggccttcaaggaaacccctacaggatattggttggggacttaaaggagattgtgaagttgcaaatggaagcaagatccaaacccatgaatctctcccatgatattgtgccacgtgtgtttgcacatctgcatcagagtgtcctcaaacatggcaagaattcttttatttggtttggaccaaaaccaagggtgaccctcacagatcctgagctgatcaaagatgtacttaacaagatcagtgatttccgaaagcctgaagcaaatccacttgccaaattactagctactggtcttgtaaactatgatggagaaaaatggaacaagcacagaagattaattaatcctgcattcagtttagaaaaattgaagattatgttaccaatattcttcaaaagttgcaatgatctaattatcaagtgggagggaatgttgtcttatgatggatcatgtgaaatggatgtttggcctttccttcaaaatttagctagtgatgttattgcgagaacagcatttggaagtagttttgaagaaggaaaaagaatatttcaacttcaaaaagagctagcggaacttacaatgaaagttatcatgaaagtttacatccctggatggagatttgtacctactgcaaccaatcggagaatgaaggaaattgatagatatataaaagcttcacttacagacatgattaagaagagagagaaagcaccaaagacaggtgaagctactagggatgacttgttaggtatacttctggagtcaaatcacaaggaaatacaagaacacagaaacaatgagaatgttggaatgaatctcaatgatgtaatcgaggaatgcaagttattctactttgcagggcaagagaccacttcagttttacttgtttggacaatggtgttgttaagtaggtaccctgattggcaatcacgtgcaagggaggaagtcttacaagtctttggcaaacaagcaccaaattttgatgggctaagtcaccttaagattgtcaccatgattttgtatgaggttcttagattatacccaccaggaattggccttactagaagtgttcacagagatatgaaactgggaaacctaacattacctgctggagtgcaagtttccttaccaataattatggttcaccatgaccgtgaactctggggtgatgatgcaaaagagttcaatcctgagagattttcagaaggggtttcaaaagcgacaaatggcagagtttcattttttccatttggatggggtcctagaatatgcatcggacaaaacttttccttgttggaggcaaagatggctttgtcgatgatcttacagcatttctcatttgaactttctccagcttatactcatgctccgtttacagtgattactcttcagccccaatatggcgctcatgtcattttacgtaaagttgaaatgtaaaatataataataacccttattttgatttgcatttcgcactgcaaagtttataatgcaataatagtagaagactaattgtc

SEQ ID NO: 53640 - protein, 524 aa, Glycine max
  peptide (1)..(524): Ceres Seq. ID no. 14311204
EMEAPWATTSSSIVFVIVILALTSWAWRMLNWLWIRPKRLERLLREQGLQGNPYRILVGDLKEIVKLQMEARSKPMNLSHDIVPRVFAHLHQSVLKHGKNSFIWFGPKPRVTLTDPELIKDVLNKISDFRKPEANPLAKLLATGLVNYDGEKWNKHRRLINPAFSLEKLKIMLPIFFKSCNDLIIKWEGMLSYDGSCEMDVWPFLQNLASDVIARTAFGSSFEEGKRIFQLQKELAELTMKVIMKVYIPGWRFVPTATNRRMKEIDRYIKASLTDMIKKREKAPKTGEATRDDLLGILLESNHKEIQEHRNNENVGMNLNDVIEECKLFYFAGQETTSVLLVWTMVLLSRYPDWQSRAREEVLQVFGKQAPNFDGLSHLKIVTMILYEVLRLYPPGIGLTRSVHRDMKLGNLTLPAGVQVSLPIIMVHHDRELWGDDAKEFNPERFSEGVSKATNGRVSFFPFGWGPRICIGQNFSLLEAKMALSMILQHFSFELSPAYTHAPFTVITLQPQYGAHVILRKVEM

SEQ ID NO: 53641 - protein, 523 aa, Glycine max
  peptide (1)..(523): Ceres Seq. ID no. 14311205
MEAPWATTSSSIVFVIVILALTSWAWRMLNWLWIRPKRLERLLREQGLQGNPYRILVGDLKEIVKLQMEARSKPMNLSHDIVPRVFAHLHQSVLKHGKNSFIWFGPKPRVTLTDPELIKDVLNKISDFRKPEANPLAKLLATGLVNYDGEKWNKHRRLINPAFSLEKLKIMLPIFFKSCNDLIIKWEGMLSYDGSCEMDVWPFLQNLASDVIARTAFGSSFEEGKRIFQLQKELAELTMKVIMKVYIPGWRFVPTATNRRMKEIDRYIKASLTDMIKKREKAPKTGEATRDDLLGILLESNHKEIQEHRNNENVGMNLNDVIEECKLFYFAGQETTSVLLVWTMVLLSRYPDWQSRAREEVLQVFGKQAPNFDGLSHLKIVTMILYEVLRLYPPGIGLTRSVHRDMKLGNLTLPAGVQVSLPIIMVHHDRELWGDDAKEFNPERFSEGVSKATNGRVSFFPFGWGPRICIGQNFSLLEAKMALSMILQHFSFELSPAYTHAPFTVITLQPQYGAHVILRKVEM

SEQ ID NO: 53642 - protein, 496 aa, Glycine max
  peptide (1)..(496): Ceres Seq. ID no. 14311206
MLNWLWIRPKRLERLLREQGLQGNPYRILVGDLKEIVKLQMEARSKPMNLSHDIVPRVFAHLHQSVLKHGKNSFIWFGPKPRVTLTDPELIKDVLNKISDFRKPEANPLAKLLATGLVNYDGEKWNKHRRLINPAFSLEKLKIMLPIFFKSCNDLIIKWEGMLSYDGSCEMDVWPFLQNLASDVIARTAFGSSFEEGKRIFQLQKELAELTMKVIMKVYIPGWRFVPTATNRRMKEIDRYIKASLTDMIKKREKAPKTGEATRDDLLGILLESNHKEIQEHRNNENVGMNLNDVIEECKLFYFAGQETTSVLLVWTMVLLSRYPDWQSRAREEVLQVFGKQAPNFDGLSHLKIVTMILYEVLRLYPPGIGLTRSVHRDMKLGNLTLPAGVQVSLPIIMVHHDRELWGDDAKEFNPERFSEGVSKATNGRVSFFPFGWGPRICIGQNFSLLEAKMALSMILQHFSFELSPAYTHAPFTVITLQPQYGAHVILRKVEM

SEQ ID NO: 53643 - DNA, 1197 bp, Glycine max
  misc_feature (1)..(1197): Ceres Seq. ID no. 14311044
gctgtgaagtgtgaattaaaatatattcaattttgcgtttctctgcctaaaaggattgaaagatgggtcaagcattcggttgctaccaagtcgatcagtcaaatgtggctatcaaggagcattttggaaaatttgatgatgtcctagagcctggatgtcactgcctgccttggtgtcttgggtaccagattgctggtagtctgtcgctgcgagtgcagcaacttgatgttcgatgtgagacgaaaaccaaggacaatgtctttgtcaatgtggttgcatctgtgcaataccgagctgtgtctgagaaagcatctgatgcattctataggcttaccaacactagggagcagatccaatcatatgtttttgatgtcatcagggccagtgtaccaaagttggagttggattctgtctttgagcagaaaaatgatatagcaaaggctgtggaggaggagcttgagaaggccatgtcaacctatggatttgagatagttcagactctcattgttgatatagagcctgatgttaatgtcaagagagcaatgaacgagataaacgcagctgctagattgaggttggctgcaaatgagaaggctgaagctgagaaaatactgcagatcaagaaagcggagggagaagcagaatccaaatatctgtcaggactcggtatcgctcgtcaacgtcaggccattgtggatggactgagggacagcgtgcttgctttctctgagaacgtgcccgggacatcagctaaagatgtcatggacatggtgctggtgactcaatactttgacaccatgaaagagataggagcatcgtcaaggtcctcgtctgtgttcatacctcacggtcctggggcagttaaagacattgccgtgcaaattcgggatggtctccttcaggccactgcctcacagaattaagctttcttggagttgtaaataacaaatagtatgtgtgtcaggtttttttcaggaaatgcttcttttgtttgaacttataaagtctgcatctttactcttcttatatttgatagattcatagcagtgtctattttatgtgtaagtactgatgtgcagttttgaatacttgtttaaggatagtcttaatgtcaagttgcttgtgaatcattaaggaatttgttatgtaagaattacttcccaaaagatgtgtttttcttttagtgtcctatcttgt

SEQ ID NO: 53644 - protein, 286 aa, Glycine max
  peptide (1)..(286): Ceres Seq. ID no. 14311045
MGQAFGCYQVDQSNVAIKEHFGKFDDVLEPGCHCLPWCLGYQIAGSLSLRVQQLDVRCETKTKDNVFVNVVASVQYRAVSEKASDAFYRLTNTREQIQSYVFDVIRASVPKLELDSVFEQKNDIAKAVEEELEKAMSTYGFEIVQTLIVDIEPDVNVKRAMNEINAAARLRLAANEKAEAEKILQIKKAEGEAESKYLSGLGIARQRQAIVDGLRDSVLAFSENVPGTSAKDVMDMVLVTQYFDTMKEIGASSRSSSVFIPHGPGAVKDIAVQIRDGLLQATASQN

SEQ ID NO: 53645 - protein, 151 aa, Glycine max
  peptide (1)..(151): Ceres Seq. ID no. 14311046
MSTYGFEIVQTLIVDIEPDVNVKRAMNEINAAARLRLAANEKAEAEKILQIKKAEGEAESKYLSGLGIARQRQAIVDGLRDSVLAFSENVPGTSAKDVMDMVLVTQYFDTMKEIGASSRSSSVFIPHGPGAVKDIAVQIRDGLLQATASQN

SEQ ID NO: 53646 - DNA, 1741 bp, Glycine max
  misc_feature (1)..(1741): Ceres Seq. ID no. 15174599
gaaaaagtcttcacttcactatgaccaacagcttacccacagcccatctcatgggtcataattgctctatatgattgttttttctcttcttatatgaaatggctcgcattagattccactcacaccattttgcctgttttgtctgagaagccactttggtttctttgcctttctcaatacattttattttccaatggaggtaggaagtgttcttaactttcttgaggacaagaccattttaattgttggagccactggctttctcgccaaaatttttctggagaagatattgagggttcaaccaaatgttaagaagctttttcttcttttaagagcttcggatgccaaatcagctaattatcgcttgcaaaatgagatcatagcgaaggacttatttattgtgctaaaggagaaattgggtgcaaattttaagtcctttatttcggaaaaagtgactctggtgccgggggacatttcttacgaggacttgggcctgaaggattccattctaagggaagagatttgcaaccagacagatgttattgtcaatttggcagcaacaactaactttgatgaaaggtacgatatagcgttgggtctaaatatttttggagttaagcatgtgatgaactttgctaaacaatgtaccaaactcaaagttgttcttcatgtatcaacagcttatgtatgtggtgagagaggtggactaatactagaggaaccttataactttggtgattcactaaatggagtgtctggactagacatcgatgcagaaaggacaatagtgtgtgacaaattggatgaactacgagagcaaggggccacagagcgtgaaattaaaatagctatgaagaacctcggtattagcagggcaaaggtgtatggatggccaaacacatacgtatttacgaaggcagtaggagagatgcttgtggagcaattaaaaggaagactatccgttgttattatgcgtccgaccatcgttacaagcactttaagagaacctttccctggttgggttgagggtgtaagaaccattgacagtttagccgttacttatgggaaaggaaaattaacatgcttccttggaaatatcaacggagttgtggatgcggtaccagctgacatggtggtgaatgcaatgctagtggccatggtggctcatgcaaatcaacctagtgatatcatctatcatgtgggttcctctcttagaaatccactcacatacttaaatctccaagactatggattaaaatatttcacggcaaaaccatggataaacaaggatggaacaccggtcaaggttggcagagtaactgtattgactgacatggatagcttccagagatatatgttcattcgttacctgcttccattaaagggacttgagctggccaatactgcactttgccagtattttcggggaacttatcttgagctccacaggaagatccaggttgtgatgcggatggttgaactttacaggccttacatgttcttcaatggcgtatttgatgatataaacacagagaagttgcgaatagcagcaaaacaaagtggaacagagacagatttgttttactttgatacgaaagaggttaattgggaggattactttatgaagacccatctccccggtattgtcaagcacgttttcaagtgatgataaatgctatacttttaagtgatttgtgaaactagtaactctattaatatcttgtttagacaacctgaaagg

SEQ ID NO: 53647 - protein, 490 aa, Glycine max
  peptide (1)..(490): Ceres Seq. ID no. 15174600
MEVGSVLNFLEDKTILIVGATGFLAKIFLEKILRVQPNVKKLFLLLRASDAKSANYRLQNEIIAKDLFIVLKEKLGANFKSFISEKVTLVPGDISYEDLGLKDSILREEICNQTDVIVNLAATTNFDERYDIALGLNIFGVKHVMNFAKQCTKLKVVLHVSTAYVCGERGGLILEEPYNFGDSLNGVSGLDIDAERTIVCDKLDELREQGATEREIKIAMKNLGISRAKVYGWPNTYVFTKAVGEMLVEQLKGRLSVVIMRPTIVTSTLREPFPGWVEGVRTIDSLAVTYGKGKLTCFLGNINGVVDAVPADMVVNAMLVAMVAHANQPSDIIYHVGSSLRNPLTYLNLQDYGLKYFTAKPWINKDGTPVKVGRVTVLTDMDSFQRYMFIRYLLPLKGLELANTALCQYFRGTYLELHRKIQVVMRMVELYRPYMFFNGVFDDINTEKLRIAAKQSGTETDLFYFDTKEVNWEDYFMKTHLPGIVKHVFK

SEQ ID NO: 53648 - protein, 346 aa, Glycine max
  peptide (1)..(346): Ceres Seq. ID no. 15174601
MNFAKQCTKLKVVLHVSTAYVCGERGGLILEEPYNFGDSLNGVSGLDIDAERTIVCDKLDELREQGATEREIKIAMKNLGISRAKVYGWPNTYVFTKAVGEMLVEQLKGRLSVVIMRPTIVTSTLREPFPGWVEGVRTIDSLAVTYGKGKLTCFLGNINGVVDAVPADMVVNAMLVAMVAHANQPSDIIYHVGSSLRNPLTYLNLQDYGLKYFTAKPWINKDGTPVKVGRVTVLTDMDSFQRYMFIRYLLPLKGLELANTALCQYFRGTYLELHRKIQVVMRMVELYRPYMFFNGVFDDINTEKLRIAAKQSGTETDLFYFDTKEVNWEDYFMKTHLPGIVKHVFK

SEQ ID NO: 53649 - protein, 271 aa, Glycine max
  peptide (1)..(271): Ceres Seq. ID no. 15174602
MKNLGISRAKVYGWPNTYVFTKAVGEMLVEQLKGRLSVVIMRPTIVTSTLREPFPGWVEGVRTIDSLAVTYGKGKLTCFLGNINGVVDAVPADMVVNAMLVAMVAHANQPSDIIYHVGSSLRNPLTYLNLQDYGLKYFTAKPWINKDGTPVKVGRVTVLTDMDSFQRYMFIRYLLPLKGLELANTALCQYFRGTYLELHRKIQVVMRMVELYRPYMFFNGVFDDINTEKLRIAAKQSGTETDLFYFDTKEVNWEDYFMKTHLPGIVKHVFK

SEQ ID NO: 53650 - DNA, 1595 bp, Glycine max
  misc_feature (1)..(1595): Ceres Seq. ID no. 15174917
gaattgacaaatttggccttttcaaaaactgataaaaaaaaaaacttatatttatatattcaacttctcttttattcgatttttcttcctgtctctttctttattttccattgatcataactattaatttcacctatataccctaaaaaggatgtgtatggttaatattttcatatgttataacttttttaaacacaattaataatcagtcacttaaaacttcttcatttgatattatatgcattcatcccaacagaatgtgcatttcttaattctgggatgctaatttattgaaaaggtcattcttaaataaataaatgtattaaaagttttacataaccagtaatcaaaaataaactaaagacatgttaaagtctgatattgattaaaaataatacacaaataaattatataaataaaaaataatcattatcttacaaattaattttatagggatgagttaaatttaaatcagtttttttgacatttgatgttatacattttgattatattacatcagatagtctaatgaatccacatgggaaaaaagatagtgtatgtttgctcatagtggtctttcaagaagattagtatttaataatagtatgttataaagaaataggtattaaaatggcaaaaacacaagatatataaggttgattcactgttgacatccttttagtaattaattgttgtatgcatggttatccatacatcatcttcatggatttgactgttcttcctttctttgtgtaccttgaaatcagcatgctcaaaacacttgaaaggtaccagaaatgcagttatggtgctgtggaagttaccaaacctgccaaagagctcgagagcagctatcgtgaatacttgaagctgaaagcaagatttgaatcacttcaaaggactcaaagaaaccttctaggggaagacctgggcccactgaataccaaagaacttgagcatcttgaacggcaattggattcatctctaaagcaagtgaggtccacaaagacacaattcatgctggaccagttatctgatcttcaaactaaggagcagatgttggtagaagcaaacagatccttgacagtgaagctggaagaaatcaattcaagaaaccactacaggcaatcatgggaagctggtgatcaaagtatgccatacggtggtggtccacagaattctcactctcatcagggcttcttccagccattggaatgcaaccctacattgcagattggtcctgattacaggtacaatgatgtagcttcagatcagataactgccacaactcaacctcaacaagtgagtggctttattccagggtggatgctgtgaaattaggctcagtattcagttggagacataaaagcaaacaccttacaaaagggcaaagccaaaaatgcatcttggtgttggcaaggtgtaaatgtaaccctgcttctattattattttggtataagaaacagatgtgttgtgacttgttcaaacttgtgagaacctttttagccatagacatatggcaatttataacattcggaatcttttgaaggatccttttttattattaaaatatccgagcgaccggtttcaattt

SEQ ID NO: 53651 - protein, 212 aa, Glycine max
  peptide (1)..(212): Ceres Seq. ID no. 15174918
MHGYPYIIFMDLTVLPFFVYLEISMLKTLERYQKCSYGAVEVTKPAKELESSYREYLKLKARFESLQRTQRNLLGEDLGPLNTKELEHLERQLDSSLKQVRSTKTQFMLDQLSDLQTKEQMLVEANRSLTVKLEEINSRNHYRQSWEAGDQSMPYGGGPQNSHSHQGFFQPLECNPTLQIGPDYRYNDVASDQITATTQPQQVSGFIPGWML

SEQ ID NO: 53652 - protein, 203 aa, Glycine max
  peptide (1)..(203): Ceres Seq. ID no. 15174919
MDLTVLPFFVYLEISMLKTLERYQKCSYGAVEVTKPAKELESSYREYLKLKARFESLQRTQRNLLGEDLGPLNTKELEHLERQLDSSLKQVRSTKTQFMLDQLSDLQTKEQMLVEANRSLTVKLEEINSRNHYRQSWEAGDQSMPYGGGPQNSHSHQGFFQPLECNPTLQIGPDYRYNDVASDQITATTQPQQVSGFIPGWML

SEQ ID NO: 53653 - protein, 188 aa, Glycine max
  peptide (1)..(188): Ceres Seq. ID no. 15174920
MLKTLERYQKCSYGAVEVTKPAKELESSYREYLKLKARFESLQRTQRNLLGEDLGPLNTKELEHLERQLDSSLKQVRSTKTQFMLDQLSDLQTKEQMLVEANRSLTVKLEEINSRNHYRQSWEAGDQSMPYGGGPQNSHSHQGFFQPLECNPTLQIGPDYRYNDVASDQITATTQPQQVSGFIPGWML

SEQ ID NO: 53654 - DNA, 1684 bp, Glycine max
  misc_feature (1)..(1684): Ceres Seq. ID no. 15225215
ccgggccccccctsgagtcagcthcgtaggccccccccccaagaaaatctatnacaaatagttttggcccgaccttaaataaagctcaagacatgtactattaaatcatacattatacttctttctatgccaactaaatcaagcacaaaggaatcaccccaaccagaaccgatccctgaaggtaacggttacaaactctacaagtatcgttatgttaccggagttatttttgctttagcagcaatccaaaatattctcatgtggcttatattctctccgatccaactccagttaactcatatttatgacctatctttggtcgttgtgaactttgcaacaatcctcatttctaatgtctcttatattcctgcttattttgttgcttcttacttcattgatacttatggactcagatttggcataattacaggcggtatccttaccacaataggcctttggataagatgtctctgtaaagaaggattcatctatctttttattggacagtgctttgctgggattgctcaacctttcttctacagcgttcctcaaaaaatctccaatgtttggtttggagctgaagaaagaactatggctacttctgtgattgctatttctctcactcttggcaatgcccttggagcttttctcccgcaattttttatcaatcttaaagaaagcgatacaggtatactacttgatcaaatacaaaatatgatgttttggactgctgttattggaagcattttcctggcaatcacaattctcatgttcaaagcaaaaccgccaacaccgccaagcaaagcagctgcagcacaaaagcacaattttcgtctgtcattaaaattacttatcaaagataaaaataccatgctattcttaatctcaagtgctgccgtagctggctcatttatcacttttccttctgttattcaagctactgctgatccttatggaatcaattcagatcaaattggaaacatcatgtttgctgcaatcttatttggattcttgggagctgtaattggaggcttctacgtcaatagaacgaaaaaatataaaaaatcagtcttgttctgctctacatcctctctcgcgcttcttgttgtcgtttatttttgcgctaccacagaaaatgtctttatttttggtgcagcctcttgcgtattcgcgacatttattagtccactcttgccattgtctatggaaactctagttgaatactcgttccctgttgctgaagctacttcaggaggtttctggtttgtgtttaatcaattcttgtcgactgttgaatctttgggtgttgatgctatctttagcaaagaaccaacaaaatcagaaggaagaatcgcgtttattattatgattgtgtatcaagccgtcgcagtgcttttaatggcgtttgttaaagaaaatctccagcggaccaaattcgaaaaagaaggtttgctggttttggatgaaattctcgatccaaataagaaaaacaaggaacagtccatacatcaacattctgttgatcgacaatattatccatagttccatacgtattttattttaaagaactttctgatgataaaaataagcctaaaatatgtttaaataagattgagttcatttgagaatatattattaataatctaaaacctctagtaaaaagtaatgaaattatagtcttaac

SEQ ID NO: 53655 - protein, 471 aa, Glycine max
  peptide (1)..(471): Ceres Seq. ID no. 15225216
MPTKSSTKESPQPEPIPEGNGYKLYKYRYVTGVIFALAAIQNILMWLIFSPIQLQLTHIYDLSLVVVNFATILISNVSYIPAYFVASYFIDTYGLRFGIITGGILTTIGLWIRCLCKEGFIYLFIGQCFAGIAQPFFYSVPQKISNVWFGAEERTMATSVIAISLTLGNALGAFLPQFFINLKESDTGILLDQIQNMMFWTAVIGSIFLAITILMFKAKPPTPPSKAAAAQKHNFRLSLKLLIKDKNTMLFLISSAAVAGSFITFPSVIQATADPYGINSDQIGNIMFAAILFGFLGAVIGGFYVNRTKKYKKSVLFCSTSSLALLVVVYFCATTENVFIFGAASCVFATFISPLLPLSMETLVEYSFPVAEATSGGFWFVFNQFLSTVESLGVDAIFSKEPTKSEGRIAFIIMIVYQAVAVLLMAFVKENLQRTKFEKEGLLVLDEILDPNKKNKEQSIHQHSVDRQYYP

SEQ ID NO: 53656 - protein, 427 aa, Glycine max
  peptide (1)..(427): Ceres Seq. ID no. 15225217
MWLIFSPIQLQLTHIYDLSLVVVNFATILISNVSYIPAYFVASYFIDTYGLRFGIITGGILTTIGLWIRCLCKEGFIYLFIGQCFAGIAQPFFYSVPQKISNVWFGAEERTMATSVIAISLTLGNALGAFLPQFFINLKESDTGILLDQIQNMMFWTAVIGSIFLAITILMFKAKPPTPPSKAAAAQKHNFRLSLKLLIKDKNTMLFLISSAAVAGSFITFPSVIQATADPYGINSDQIGNIMFAAILFGFLGAVIGGFYVNRTKKYKKSVLFCSTSSLALLVVVYFCATTENVFIFGAASCVFATFISPLLPLSMETLVEYSFPVAEATSGGFWFVFNQFLSTVESLGVDAIFSKEPTKSEGRIAFIIMIVYQAVAVLLMAFVKENLQRTKFEKEGLLVLDEILDPNKKNKEQSIHQHSVDRQYYP

SEQ ID NO: 53657 - protein, 316 aa, Glycine max
  peptide (1)..(316): Ceres Seq. ID no. 15225218
MATSVIAISLTLGNALGAFLPQFFINLKESDTGILLDQIQNMMFWTAVIGSIFLAITILMFKAKPPTPPSKAAAAQKHNFRLSLKLLIKDKNTMLFLISSAAVAGSFITFPSVIQATADPYGINSDQIGNIMFAAILFGFLGAVIGGFYVNRTKKYKKSVLFCSTSSLALLVVVYFCATTENVFIFGAASCVFATFISPLLPLSMETLVEYSFPVAEATSGGFWFVFNQFLSTVESLGVDAIFSKEPTKSEGRIAFIIMIVYQAVAVLLMAFVKENLQRTKFEKEGLLVLDEILDPNKKNKEQSIHQHSVDRQYYP

SEQ ID NO: 53658 - DNA, 1278 bp, Glycine max
  misc_feature (1)..(1278): Ceres Seq. ID no. 14306443
ataactgagaacatggccgaaagctcttcggctacgcctccaccaccgaagcccgtggtggttagggtcaaacgcaagccctcgcaatctccacttgatgctttctggctcgaaattaacgagaggccgttgaagcgtcctctcttggattttggaaatttatcaatctcctccaattctgctcaaaaggtggaattttataacaagaaggtttttgtgcaacatgtggagacaataagcagctctgaggtcacctttgatatcgtgcaatcctttgtggatcttggttccagtggtgcatctgattccaagtcaaaaattaaggaaagaaagaaattcttcaacagggacaataagcaagatcagctattgtctaaagctaaacaagaaaaggagtctttggcaaaagatgctcgctttgaacaaatatggaaaaacaggaagggaaacaaagggacagcacatgataaagcattacaagaaatgtgccacttgtatgacattgttcgcattgacaatgaagaaaaaaataaggaagtgcaacaggaagaaatgtcattggaggatcaacgacttttgtctagttacctccctttactgagagagtttattcctaatgcggctgcagaggttgaaactgatttgattgctcagttggttggtcattccaaagaagaaaattatgtgtacgacctctacaccgtgaaagatgagatggatataaacattgatgattcttcgtgttcatatccactagttcaagttgatgaggaggaggactattatgatgggacacagcattcagattatgaatctgatgactcaaatgctgaaaacaatccactgaatgattatccagatgaggtttctgaagaggatgaagaggatgaaaattctgagaatgaatcagaacgtgaggatggcaacacgagcagtgaatcatcagatgagaatatagaacatggtttttctgaagatgatgctgatccattatatgatgaggattttgatgaatatgaaggtgctcatagtgatgatgttgagcatatggatgatgaaaattggaggtggtcgtaccgatgaagttggctttagttttattttgcaaaatgtaaatctgatggggtaaaaatgttgtaggaacaaaatcaaacctaccatgccggagccatccaactagacaggcttttttgctattataagggatgctttaaggcattttttatggacctattagttttatgttgaaatttgagctagaatgcttacaaaaatggc

SEQ ID NO: 53659 - protein, 360 aa, Glycine max
  peptide (1)..(360): Ceres Seq. ID no. 14306444
ITENMAESSSATPPPPKPVVVRVKRKPSQSPLDAFWLEINERPLKRPLLDFGNLSISSNSAQKVEFYNKKVFVQHVETISSSEVTFDIVQSFVDLGSSGASDSKSKIKERKKFFNRDNKQDQLLSKAKQEKESLAKDARFEQIWKNRKGNKGTAHDKALQEMCHLYDIVRIDNEEKNKEVQQEEMSLEDQRLLSSYLPLLREFIPNAAAEVETDLIAQLVGHSKEENYVYDLYTVKDEMDINIDDSSCSYPLVQVDEEEDYYDGTQHSDYESDDSNAENNPLNDYPDEVSEEDEEDENSENESEREDGNTSSESSDENIEHGFSEDDADPLYDEDFDEYEGAHSDDVEHMDDENWRWSYR

SEQ ID NO: 53660 - protein, 356 aa, Glycine max
  peptide (1)..(356): Ceres Seq. ID no. 14306445
MAESSSATPPPPKPVVVRVKRKPSQSPLDAFWLEINERPLKRPLLDFGNLSISSNSAQKVEFYNKKVFVQHVETISSSEVTFDIVQSFVDLGSSGASDSKSKIKERKKFFNRDNKQDQLLSKAKQEKESLAKDARFEQIWKNRKGNKGTAHDKALQEMCHLYDIVRIDNEEKNKEVQQEEMSLEDQRLLSSYLPLLREFIPNAAAEVETDLIAQLVGHSKEENYVYDLYTVKDEMDINIDDSSCSYPLVQVDEEEDYYDGTQHSDYESDDSNAENNPLNDYPDEVSEEDEEDENSENESEREDGNTSSESSDENIEHGFSEDDADPLYDEDFDEYEGAHSDDVEHMDDENWRWSYR

SEQ ID NO: 53661 - protein, 199 aa, Glycine max
  peptide (1)..(199): Ceres Seq. ID no. 14306446
MCHLYDIVRIDNEEKNKEVQQEEMSLEDQRLLSSYLPLLREFIPNAAAEVETDLIAQLVGHSKEENYVYDLYTVKDEMDINIDDSSCSYPLVQVDEEEDYYDGTQHSDYESDDSNAENNPLNDYPDEVSEEDEEDENSENESEREDGNTSSESSDENIEHGFSEDDADPLYDEDFDEYEGAHSDDVEHMDDENWRWSYR

SEQ ID NO: 53662 - DNA, 1174 bp, Glycine max
  misc_feature (1)..(1174): Ceres Seq. ID no. 14310620
aaccaatttccatttcttcatcaggcataattacatagagataatttatctctatattctcacgttgcttataaataaaattgtctccagtctctacaatatgagatagtgaatattgtccttggaaatcttagttaatctgtggatgaacaaatactcgacacagtagcaccaaacaagtactattgtataattcataggttaatgtcatgccttcaggtttgaatttggttttccctcctatttgctcttttaaaaaataaaataaaataagaaagagcatagaatagtcaaatgatcaaatacagtggtgagtaagtgcattttattagtttgattttatgtttgttataacagcatatctcagcatcaaaaggatatgtagatatttcttcctatcttgttgagcaaggtgtaaatatcaactgtgcagataaatttggcaccactcccttgcttgaagccatcaagaatggacacgaagaagtagcatctatacttgttaacgcaggagctatctttaccattgatgatgttggcaattttctctgcatgactgttgccaagaaggagttggaccttttaaaaagggttctgggttgtggagttaatccaaatgccaaaaattatgatcaacgtacacctcttcacatagctgcctctgaaggtttgtttacaatggcggaagtacttctagaagcaggagcgagtgttttatctaaggacagatggggaaatacacctcttcatgaagctcataccggtggggatagaaatatgatcaaaatgcttgaagtggcaaaagcttctcagttggttgagttgtccaataatattcatgaaactcaagcaacaccaacagatgaaattccgaaaaagagatgtatagtatttcctttccacccatgggatgatcagaaagcggatagaaaagagggagtggtcctaacggttccacaaagcattgaagagcttataaaggaggcgacaaaacatttggaaattccaaacgcttcctgtattttgtcagaacaatgtggcaaaattgtttatgtaggcacgattaacaatgatgagaagctatttctagtgagtgaagcacagaatgaatgaggtgaaatgttcagcagtcccaaccccactagcgggttaatatactttttctttcctcccc

SEQ ID NO: 53663 - protein, 186 aa, Glycine max
  peptide (1)..(186): Ceres Seq. ID no. 14310621
MTVAKKELDLLKRVLGCGVNPNAKNYDQRTPLHIAASEGLFTMAEVLLEAGASVLSKDRWGNTPLHEAHTGGDRNMIKMLEVAKASQLVELSNNIHETQATPTDEIPKKRCIVFPFHPWDDQKADRKEGVVLTVPQSIEELIKEATKHLEIPNASCILSEQCGKIVYVGTINNDEKLFLVSEAQNE

SEQ ID NO: 53664 - protein, 144 aa, Glycine max
  peptide (1)..(144): Ceres Seq. ID no. 14310622
MAEVLLEAGASVLSKDRWGNTPLHEAHTGGDRNMIKMLEVAKASQLVELSNNIHETQATPTDEIPKKRCIVFPFHPWDDQKADRKEGVVLTVPQSIEELIKEATKHLEIPNASCILSEQCGKIVYVGTINNDEKLFLVSEAQNE

SEQ ID NO: 53665 - protein, 111 aa, Glycine max
  peptide (1)..(111): Ceres Seq. ID no. 14310623
MIKMLEVAKASQLVELSNNIHETQATPTDEIPKKRCIVFPFHPWDDQKADRKEGVVLTVPQSIEELIKEATKHLEIPNASCILSEQCGKIVYVGTINNDEKLFLVSEAQNE

SEQ ID NO: 53666 - DNA, 1986 bp, Glycine max
  misc_feature (1)..(1986): Ceres Seq. ID no. 14310841
aaaaagaaaaggaagggcgaagttgaaaaaccaaaacccttggcgagtgaagccctagactcactagactacacacttcgcaatggcggttgttgctcaaacccctgacatcgccggcgagcggcagtccggccaagacgttcgcacccaaaacgttgtggcatgccaagccgttgccaacatcgtcaaaagctctttaggccccgttggcctcgacaagatgctcgtcgacgacattggcgacgtcaccatcaccaacgacggcgccacgattctcaagatgctggaagtggagcatcctgctgccaaggttttggttgaactcgccgagcttcaggatcgagaagtcggagacggcactacttctgtcgtcattgtagctgctgagcttctcaaaagggcaaatgaccttgtcaggaacaagattcatcctacctcgattatcagtggatatagacttgctatgcgagaggcttgtaaatatgtagaagaaaaactagctgtcaaggttgaaaagctgggaaaggattcactaattaactgtgccaagaccagtatgtcctcaaagttgatagctggtgatagtgacttctttgccattttggttgtagatgcagtgcaagctgtaaagatgaccaatgctcgaggtgaagttaaatacccaatcaagggaatcaatatcttgaaagctcatggaaaaagtgctagagacagctttctgatgaatggttatgctctaaatactggccgtgctgctcaaggaatgcctcttagggttgcccctgcaagaattgcctgtcttgatttcaatcttcagaagacaaaaatgcagttgggtgttcaagttttagttactgatcctagggagctagagaaaattcgtcaaagagaggctgatatgactaaggaacgtattgaaaaactgctgaaggctggagctaatgttattctgacaactaaaggaattgatgacatggctcttaagtactttgttgaggctggggcaattgctgtaagacgtgtgcggaaagaggacatgcgccatgttgccaaggctactggtgcaacattggtctcaacatttgctgatatggaaggggaggaaacatttgaaccatcttttcttggatatgctgatgaggttgttgaggagcgaatttctgatgatgctgtagttatgatcaaagggaccaaaactacaagcgcagtcactttgattctaagaggtgcaaatgaccatatgcttgatgagatggacagagctctgcatgatgcattgtcaattgtcaagagaactcttgaatcaaatacggtggtagctggtggaggtgctgttgaggcagcattatcagtttatttagagtaccttgctacaactttaggatctcgggagcagttggctatagcagaatttgctgagtctctgttaattattccaaaggtgctttctgttaatgctgctaaggatgccactgagctggtcgcaaaattacgggcctaccaccattcagcacaaactaaagccgataagaaacatttatcaagtatgggtttggacctttctgaagggaaaatcagaaacaacttggaggctggagtcattgagcctgcaatgagcaaagtaaaaattattcagtttgcaactgaagctgccattactatccttcgaattgatgacatgatcaagcttatcaaggatgaaagtcaaaatgaggattaaagtataactgaatctaggaggcatctactccccagtgcttacaaaagggagggttgtgctagtgtgcatttgaagagggtatctgcatttaatcttcaatgcccttgttcttgaaggaaaactgctctaattatttttctgaaagtagctttattatatttacatctttgcattttatattccaacaatttttaggcaaacatttttggtcatgcattggctggttgcatgtttgtacatttctttgaggcagtgtttgatttgtg

SEQ ID NO: 53667 - protein, 545 aa, Glycine max
  peptide (1)..(545): Ceres Seq. ID no. 14310842
MAVVAQTPDIAGERQSGQDVRTQNVVACQAVANIVKSSLGPVGLDKMLVDDIGDVTITNDGATILKMLEVEHPAAKVLVELAELQDREVGDGTTSVVIVAAELLKRANDLVRNKIHPTSIISGYRLAMREACKYVEEKLAVKVEKLGKDSLINCAKTSMSSKLIAGDSDFFAILVVDAVQAVKMTNARGEVKYPIKGINILKAHGKSARDSFLMNGYALNTGRAAQGMPLRVAPARIACLDFNLQKTKMQLGVQVLVTDPRELEKIRQREADMTKERIEKLLKAGANVILTTKGIDDMALKYFVEAGAIAVRRVRKEDMRHVAKATGATLVSTFADMEGEETFEPSFLGYADEVVEERISDDAVVMIKGTKTTSAVTLILRGANDHMLDEMDRALHDALSIVKRTLESNTVVAGGGAVEAALSVYLEYLATTLGSREQLAIAEFAESLLIIPKVLSVNAAKDATELVAKLRAYHHSAQTKADKKHLSSMGLDLSEGKIRNNLEAGVIEPAMSKVKIIQFATEAAITILRIDDMIKLIKDESQNED

SEQ ID NO: 53668 - protein, 499 aa, Glycine max
  peptide (1)..(499): Ceres Seq. ID no. 14310843
MLVDDIGDVTITNDGATILKMLEVEHPAAKVLVELAELQDREVGDGTTSVVIVAAELLKRANDLVRNKIHPTSIISGYRLAMREACKYVEEKLAVKVEKLGKDSLINCAKTSMSSKLIAGDSDFFAILVVDAVQAVKMTNARGEVKYPIKGINILKAHGKSARDSFLMNGYALNTGRAAQGMPLRVAPARIACLDFNLQKTKMQLGVQVLVTDPRELEKIRQREADMTKERIEKLLKAGANVILTTKGIDDMALKYFVEAGAIAVRRVRKEDMRHVAKATGATLVSTFADMEGEETFEPSFLGYADEVVEERISDDAVVMIKGTKTTSAVTLILRGANDHMLDEMDRALHDALSIVKRTLESNTVVAGGGAVEAALSVYLEYLATTLGSREQLAIAEFAESLLIIPKVLSVNAAKDATELVAKLRAYHHSAQTKADKKHLSSMGLDLSEGKIRNNLEAGVIEPAMSKVKIIQFATEAAITILRIDDMIKLIKDESQNED

SEQ ID NO: 53669 - protein, 479 aa, Glycine max
  peptide (1)..(479): Ceres Seq. ID no. 14310844
MLEVEHPAAKVLVELAELQDREVGDGTTSVVIVAAELLKRANDLVRNKIHPTSIISGYRLAMREACKYVEEKLAVKVEKLGKDSLINCAKTSMSSKLIAGDSDFFAILVVDAVQAVKMTNARGEVKYPIKGINILKAHGKSARDSFLMNGYALNTGRAAQGMPLRVAPARIACLDFNLQKTKMQLGVQVLVTDPRELEKIRQREADMTKERIEKLLKAGANVILTTKGIDDMALKYFVEAGAIAVRRVRKEDMRHVAKATGATLVSTFADMEGEETFEPSFLGYADEVVEERISDDAVVMIKGTKTTSAVTLILRGANDHMLDEMDRALHDALSIVKRTLESNTVVAGGGAVEAALSVYLEYLATTLGSREQLAIAEFAESLLIIPKVLSVNAAKDATELVAKLRAYHHSAQTKADKKHLSSMGLDLSEGKIRNNLEAGVIEPAMSKVKIIQFATEAAITILRIDDMIKLIKDESQNED

SEQ ID NO: 53670 - DNA, 1514 bp, Glycine max
  misc_feature (1)..(1514): Ceres Seq. ID no. 14304471
aattcccatctacagttagccccaaatctggggttagggtttcctctgcgtcgatggcttcgaattcgatcgacggcgacgccgttacggggtcgggactgtgcataaacgacgtgttaagggacgacgagctgcgttccattctggggcgagtggagagcgagaaggacaaggaaacgttcgggttggtctgcaagcgatggcttcggttgcagagcacggaaaggaagaaactcgccgcacgtgcgggtccccacatgctccgaaaaatggccgataggttcacacgcttagtcgaactggacctcgctcagtccgtctctcgttccttctatcccggcgtcaccgattccgatctcgccgtcatcgccactgccttcacttgcttgaagatcctcaatttgcataattgtaaaggaattacagatgctggaatgaaggctattggtgaacatctttccttattacagtcgttggatgtgtcttactgtagaaagctgactgacaagggattatcagctgttgccaaaggctgttgtgacttaaggatattgcatatggcgggttgcagatttgttactgatggtgtattagaagctctctccaaaaattgcggtaacttagaggagttgggattgcatggctgcacaagcattactgacaatggactgataaaccttgcaagtggatgtcgacggatcaggtttttagacataaataaatgtagtaatgccactgatgttggggtttctagtgtttctagggcttgttcatcttctctcaagacattgaaattgttagattgctataaaattggggatgaaaccatattatccctcgccgaattctgtggtaatctggagactttaatcattggtggttgccgggatgtctctgctgatgcgataaggtcgctggctgctgcatgtggaagcagccttaaaaacttgaggatggattggtgtttaaacatttctgattcttcattgagctgtgttttaagtcaatgcagaaaccttgaggcactggacattggttgctgtgaagagttgactgatgctgcttttcagctattaagcaatgaggagcctggattgagtttgaagattttgaagattagtaattgtccaaagatcacagtggcaggtataggcatcattgtgggtaaatgcacgtctctgcaatacttggatgtgaggtcatgcccgcatattacaaaggctggcctagatgaggctggtttccattttcctgaatgctgcaagattaattttaatggtagcgttaatgagcctgttgtgcttctttgatactctaattattttaaaagattggcttcatagttaaatgttcctatataaactttattgataaggcgtgcctttgtatatttgatgagaatgtggtctgttctggtgatgttagttttcttgtgcaactcacgtatcatgtatgtcagtaaatgacattggatgtatcatattttattgatcagttcagctgtaaatttgaag

SEQ ID NO: 53671 - protein, 435 aa, Glycine max
  peptide (1)..(435): Ceres Seq. ID no. 14304472
FPSTVSPKSGVRVSSASMASNSIDGDAVTGSGLCINDVLRDDELRSILGRVESEKDKETFGLVCKRWLRLQSTERKKLAARAGPHMLRKMADRFTRLVELDLAQSVSRSFYPGVTDSDLAVIATAFTCLKILNLHNCKGITDAGMKAIGEHLSLLQSLDVSYCRKLTDKGLSAVAKGCCDLRILHMAGCRFVTDGVLEALSKNCGNLEELGLHGCTSITDNGLINLASGCRRIRFLDINKCSNATDVGVSSVSRACSSSLKTLKLLDCYKIGDETILSLAEFCGNLETLIIGGCRDVSADAIRSLAAACGSSLKNLRMDWCLNISDSSLSCVLSQCRNLEALDIGCCEELTDAAFQLLSNEEPGLSLKILKISNCPKITVAGIGIIVGKCTSLQYLDVRSCPHITKAGLDEAGFHFPECCKINFNGSVNEPVVLL

SEQ ID NO: 53672 - protein, 418 aa, Glycine max
  peptide (1)..(418): Ceres Seq. ID no. 14304473
MASNSIDGDAVTGSGLCINDVLRDDELRSILGRVESEKDKETFGLVCKRWLRLQSTERKKLAARAGPHMLRKMADRFTRLVELDLAQSVSRSFYPGVTDSDLAVIATAFTCLKILNLHNCKGITDAGMKAIGEHLSLLQSLDVSYCRKLTDKGLSAVAKGCCDLRILHMAGCRFVTDGVLEALSKNCGNLEELGLHGCTSITDNGLINLASGCRRIRFLDINKCSNATDVGVSSVSRACSSSLKTLKLLDCYKIGDETILSLAEFCGNLETLIIGGCRDVSADAIRSLAAACGSSLKNLRMDWCLNISDSSLSCVLSQCRNLEALDIGCCEELTDAAFQLLSNEEPGLSLKILKISNCPKITVAGIGIIVGKCTSLQYLDVRSCPHITKAGLDEAGFHFPECCKINFNGSVNEPVVLL

SEQ ID NO: 53673 - protein, 350 aa, Glycine max
  peptide (1)..(350): Ceres Seq. ID no. 14304474
MLRKMADRFTRLVELDLAQSVSRSFYPGVTDSDLAVIATAFTCLKILNLHNCKGITDAGMKAIGEHLSLLQSLDVSYCRKLTDKGLSAVAKGCCDLRILHMAGCRFVTDGVLEALSKNCGNLEELGLHGCTSITDNGLINLASGCRRIRFLDINKCSNATDVGVSSVSRACSSSLKTLKLLDCYKIGDETILSLAEFCGNLETLIIGGCRDVSADAIRSLAAACGSSLKNLRMDWCLNISDSSLSCVLSQCRNLEALDIGCCEELTDAAFQLLSNEEPGLSLKILKISNCPKITVAGIGIIVGKCTSLQYLDVRSCPHITKAGLDEAGFHFPECCKINFNGSVNEPVVLL

SEQ ID NO: 53674 - DNA, 1497 bp, Glycine max
  misc_feature (1)..(1497): Ceres Seq. ID no. 13637562
atttcttatagaaaagccaaactcgcttgaactttagacactattctgattctgtccatccatccttcagattctgtgaagaacaatgttaatggcaactctgtattaaaattcttcattttctaaattctactgtctctgttactttttaattccaaccctatcctcttctctaatgctctttctttgtaactaacatagtggcttgcaagcagttcgtcctcctccattaacgtccacttccgacccaccacctctttttgatggcaccaccaggttgtacatcagttattcctgtccctatgcacaacgagtatggataactaggaactacaaggggcttcaagacaagatcaaattggtccctattgatcttcaagacaggccagcttggtataaggagaaagtctaccctgaaaataaggtgccatccttggagcacaatggcaaggtattgggagaaagtcttgatttgatcaaatatgtagatgtcaactttgaagggacacctttggttcccagtgatcctgccaagaaagagtttggtgagcacttgatatcccatgttgatacattcaacaaagacctgaactcttcattgaaaggagatcctgtacagcaagccagtccttcttttgaatacttggagaatgctcttggtaaatttgatgatgggccattcttgcttggtcaattcagtttggtggatattgcctatattccatttattgaaagatatcaaattgtctttgccgagctgttcaaacaagacatcgcagaaggaaggcctaaacttgcagcatggattgaggaggtgaacaagattgatgcttatacacagacaaaaaacgatcctcaagaaatcgctgataaatacaagaaacgtttactgtctcaacagtgatccttggattgttgcaggcttcctctaagatatatagactgtggcaacaaaacgtcctttgcattcatgggatgcatctcttcagtcaaataattatgttcacttttcagcttgcttttttggatgacattataatgtttatgtactagcttgtgatcgctgatcattatggtatagttatcctaccagtactatgttagtatttagctttgatatctctcaagtgtccctgacctcatacatgtcagcaaaggtttattgcatggaaattatacatggttgtgaaaaaaacgttgtgccggaaaaaaaaaaaaaaaaaaaaaaaaaaaaaaaaaaaaaaaaaaaaaaaaaaaaaaaaaaaaaaaaaaaaaaaaaaaaaaaaaaaaaaaaaaaaaaatttccccccccccgggaaacccccaagttttaaaggggcccccaccgggggggagttccagtttttgttccctttaaaggggggtaaatttcgagtttggggaaatcatggccaaaaatttttcctggggaaaaatttaacccccttaaaattccccaaaaaaaaaaaccccaaactaaaaggggaaaagcctggg

SEQ ID NO: 53675 - protein, 106 aa, Glycine max
  peptide (1)..(106): Ceres Seq. ID no. 13637563
MVVKKTLCRKKKKKKKKKKKKKKKKKKKKKKKKKKKKKKKNFPPPGKPPSFKGAPTGGEFQFLFPLKGGKFRVWGNHGQKFFLGKNLTPLKFPKKKNPKLKGEKPG

SEQ ID NO: 53676 - protein, 78 aa, Glycine max
  peptide (1)..(78): Ceres Seq. ID no. 13637564
MLVFSFDISQVSLTSYMSAKVYCMEIIHGCEKNVVPEKKKKKKKKKKKKKKKKKKKKKKKKKKKKKKKFPPPRETPKF

SEQ ID NO: 53677 - protein, 62 aa, Glycine max
  peptide (1)..(62): Ceres Seq. ID no. 13637565
MSAKVYCMEIIHGCEKNVVPEKKKKKKKKKKKKKKKKKKKKKKKKKKKKKKKFPPPRETPKF

SEQ ID NO: 53678 - DNA, 1409 bp, Glycine max
  misc_feature (1)..(1409): Ceres Seq. ID no. 15176737
atagagacaatttctgaaaccttaaaccttagaataatgtcttggctccttataattctgtttctcagcctcacacatggtagtttttcagagactagccacgacaagaagcttccttatgctgttgtggttggcactgtctactgtgacacatgttctcaacaggaattctccattggaagtcatttcatttcaggtgcctcagtagttgcagaatgcaaagatggaaattcaatacaaagtttcaagaaagaagtgaagacaaatgaacatggggaattcaaagtgcagctaccattcagagtgaggaaacatgttaggagaatcaagggatgcactttcaagttgttaagtagcagtgaacctcattgttctgtggcctcagtttccacttcttcagtgagtctcaaaacaagaaagcaaggagaacacacattctcagcagggttgttctcattcaaaccattacaaaagcccaacgtttgtaaccaaaatcaaaatgaattttctccaaatacatacccatcgaaacctaccccagataagactacagtgttcaaaaccaatccaacaaccaaaagttcagacaaatctaaatcagctaacaaaaatttagctgaagatttcttttttccaccaaacccatttttcccaccaccattggtccccaacccatttcagcctcctcccctaattccaaatccctttcagccacctcctctgattccaaatccactgcaaccaccaagcccaccactcattccaaacccattccaaccaccaagcccaccaccactcatccctaacccattccagccccctccaagcccaccaactctctttcctaatcctttccagccccctccaagcccaccaccacttatccctaacccattccagcctcctccaagcccaccaccatctttgtttccccctttcccaccaatagtaataccaggtttgaccccatcaccaccaccacctccaccaccaaaaccaattttccctcctttgcctcctctattcccacctctgttccctccacctcacacccctggcacaccccctgcttctgcttctaagaaccacccttatccttgattagttagaataccaactagttagtataattttctcaataaatatttacagaaaaagaaaataaaaagaatcaaagaggtgattttaccttatgaattcattattattttcttctttctaaaaatatttattaagaaaatgatcctgattagttttgtatcgtgtacaacttatttactttcattataagtcttgatatatacggtatgatataaatagctaaacatgaggatggatatgtcgctaatacattattgcagtattagtaattagtaataaatatgaggatatggacatcttagagtttc

SEQ ID NO: 53679 - protein, 366 aa, Glycine max
  peptide (1)..(366): Ceres Seq. ID no. 15176738
IETISETLNLRIMSWLLIILFLSLTHGSFSETSHDKKLPYAVVVGTVYCDTCSQQEFSIGSHFISGASVVAECKDGNSIQSFKKEVKTNEHGEFKVQLPFRVRKHVRRIKGCTFKLLSSSEPHCSVASVSTSSVSLKTRKQGEHTFSAGLFSFKPLQKPNVCNQNQNEFSPNTYPSKPTPDKTTVFKTNPTTKSSDKSKSANKNLAEDFFFPPNPFFPPPLVPNPFQPPPLIPNPFQPPPLIPNPLQPPSPPLIPNPFQPPSPPPLIPNPFQPPPSPPTLFPNPFQPPPSPPPLIPNPFQPPPSPPPSLFPPFPPIVIPGLTPSPPPPPPPKPIFPPLPPLFPPLFPPPHTPGTPPASASKNHPYP

SEQ ID NO: 53680 - protein, 354 aa, Glycine max
  peptide (1)..(354): Ceres Seq. ID no. 15176739
MSWLLIILFLSLTHGSFSETSHDKKLPYAVVVGTVYCDTCSQQEFSIGSHFISGASVVAECKDGNSIQSFKKEVKTNEHGEFKVQLPFRVRKHVRRIKGCTFKLLSSSEPHCSVASVSTSSVSLKTRKQGEHTFSAGLFSFKPLQKPNVCNQNQNEFSPNTYPSKPTPDKTTVFKTNPTTKSSDKSKSANKNLAEDFFFPPNPFFPPPLVPNPFQPPPLIPNPFQPPPLIPNPLQPPSPPLIPNPFQPPSPPPLIPNPFQPPPSPPTLFPNPFQPPPSPPPLIPNPFQPPPSPPPSLFPPFPPIVIPGLTPSPPPPPPPKPIFPPLPPLFPPLFPPPHTPGTPPASASKNHPYP

SEQ ID NO: 53681 - DNA, 1692 bp, Glycine max
  misc_feature (1)..(1692): Ceres Seq. ID no. 14310655
gattacgccgatggccggttattcctccggcgccggcgaagacgaaagcgaaaaccgtcgtggcgaggccgttactgatgaaaccaccgactacatctccgatctccctaacgagtgcctggcttcggtgtttcagtttcttagctccgccgatcggaaccgctgctcgctcgtttgccggcggtggctccagatcgaaggacagagtcgtcacaggctttctctgaacgcggatgaggatctgtttccagcgattccgtcgctgttctctcggttcgattcggtgacgaagctcgcgttgaagtgcgaccgcagatccgtgagcataagcgacgacgcgctcgtgctgatctcgcagcggtgccctaacctcacgcgcctcaagctccgcgcgtgccgcgccctcaccgacgctggaatggaagcgttcgcgaagaactgcaagggattgaagaagctctcctgcggatcgtgcacgttcggatccaaaggcatgaacgcggtgctcgacaactgcgccgcgctggaggagctctcagtcaagcgcctccgcggaatcaccgacgcggcggcggcggagccgatcggtcccggcgtggctgcggcgtcgctgaaaatcgtttgcctgaaggagctctacaacggacagtgtttcggaacgctgattctcggggctaagaatctgaaaaccttgaagcttttccggtgctccggggattgggaccggctctttcagttaatggcagatcgagtcacgaacatggtcgaagttcacctcgagaggcttcagattagcgacgttggattgcaagcgatcgcgaatttttcgagtttggagattttgcatctcgttaagactcctgaatgttctgatattggacttgttgctattgcagacaggtgcaagcttttgcggaagcttcacattgatggatggaaggcaaatcgaattggcgacgaagggttgatagctgttgcaaaaggttgccctaatttgcttgaattagtgctaattggggtaaaccctactaaggcgagtttggaaatgttggcatctaattgccggaatcttgagcggttggctttgtgtggaagtgattcggttggtgatactgagatatcttgcattgctgcaaagtgtgtggctttgaagaaactgtgtattaagagttgtcctgtttcggatcaagggatggaggcattggcaaatgggtgtccgaatttggtgaaagttaaggttaagaagtgtaagggggttacccctgagggtggtgattggttgaggaggactagagggtcagttgctgttaatttagatactggtgaggcagagcttcaggaagcgagtgctagtgatggaggggcacaggacaatgttgtagagtttcctcagatgcctgcccaaatcgtggccgcagcagcatctgcatcaagcagcaccactcggtctagttcgttcaagttgagattagggcttttgtctgggaggagtttagtggctagcacttttaagagatggtcaggtggtagcactagtgcacgccatggttagggatagcagggccaaagcaaacctgagtctttggccatttttcattgttttgggttgttgtatcatttgatttttatatttcttgtacttaaatttgaaatttatgccgtgtgatttttattgcctttggaattgaagct

SEQ ID NO: 53682 - protein, 516 aa, Glycine max
  peptide (1)..(516): Ceres Seq. ID no. 14310656
ITPMAGYSSGAGEDESENRRGEAVTDETTDYISDLPNECLASVFQFLSSADRNRCSLVCRRWLQIEGQSRHRLSLNADEDLFPAIPSLFSRFDSVTKLALKCDRRSVSISDDALVLISQRCPNLTRLKLRACRALTDAGMEAFAKNCKGLKKLSCGSCTFGSKGMNAVLDNCAALEELSVKRLRGITDAAAAEPIGPGVAAASLKIVCLKELYNGQCFGTLILGAKNLKTLKLFRCSGDWDRLFQLMADRVTNMVEVHLERLQISDVGLQAIANFSSLEILHLVKTPECSDIGLVAIADRCKLLRKLHIDGWKANRIGDEGLIAVAKGCPNLLELVLIGVNPTKASLEMLASNCRNLERLALCGSDSVGDTEISCIAAKCVALKKLCIKSCPVSDQGMEALANGCPNLVKVKVKKCKGVTPEGGDWLRRTRGSVAVNLDTGEAELQEASASDGGAQDNVVEFPQMPAQIVAAAASASSSTTRSSSFKLRLGLLSGRSLVASTFKRWSGGSTSARHG

SEQ ID NO: 53683 - protein, 513 aa, Glycine max
  peptide (1)..(513): Ceres Seq. ID no. 14310657
MAGYSSGAGEDESENRRGEAVTDETTDYISDLPNECLASVFQFLSSADRNRCSLVCRRWLQIEGQSRHRLSLNADEDLFPAIPSLFSRFDSVTKLALKCDRRSVSISDDALVLISQRCPNLTRLKLRACRALTDAGMEAFAKNCKGLKKLSCGSCTFGSKGMNAVLDNCAALEELSVKRLRGITDAAAAEPIGPGVAAASLKIVCLKELYNGQCFGTLILGAKNLKTLKLFRCSGDWDRLFQLMADRVTNMVEVHLERLQISDVGLQAIANFSSLEILHLVKTPECSDIGLVAIADRCKLLRKLHIDGWKANRIGDEGLIAVAKGCPNLLELVLIGVNPTKASLEMLASNCRNLERLALCGSDSVGDTEISCIAAKCVALKKLCIKSCPVSDQGMEALANGCPNLVKVKVKKCKGVTPEGGDWLRRTRGSVAVNLDTGEAELQEASASDGGAQDNVVEFPQMPAQIVAAAASASSSTTRSSSFKLRLGLLSGRSLVASTFKRWSGGSTSARHG

SEQ ID NO: 53684 - protein, 377 aa, Glycine max
  peptide (1)..(377): Ceres Seq. ID no. 14310658
MEAFAKNCKGLKKLSCGSCTFGSKGMNAVLDNCAALEELSVKRLRGITDAAAAEPIGPGVAAASLKIVCLKELYNGQCFGTLILGAKNLKTLKLFRCSGDWDRLFQLMADRVTNMVEVHLERLQISDVGLQAIANFSSLEILHLVKTPECSDIGLVAIADRCKLLRKLHIDGWKANRIGDEGLIAVAKGCPNLLELVLIGVNPTKASLEMLASNCRNLERLALCGSDSVGDTEISCIAAKCVALKKLCIKSCPVSDQGMEALANGCPNLVKVKVKKCKGVTPEGGDWLRRTRGSVAVNLDTGEAELQEASASDGGAQDNVVEFPQMPAQIVAAAASASSSTTRSSSFKLRLGLLSGRSLVASTFKRWSGGSTSARHG

SEQ ID NO: 53685 - DNA, 1429 bp, Glycine max
  misc_feature (1)..(1429): Ceres Seq. ID no. 14303884
ctacgtaggccccccccccccccaaacaaacactatccctggcagtaccaatccatctctttcctctctggcccatgacgacgtcgtccggttccgtgaagaacgcgatgcccccaggcctccaagaacccaacatcaatgccgaaccctcttcctccgccgacgattgctccaactccaacacgaagcccatcgtgttggtcaccaacagtgacggcattgagtctccgggcctcgttcacctcgtcgaagccctcgtgctccagggcctctgcgacgtccatgtctgcgttcctcaatcggacaaatcggcttcggcccactctgtcactcgcggagtaaccgttgaagctttttcggcacaaattaatggcgccaccgcctttgaagtttcaggaactcctgtggattgtgtttcactagcgttatctggggccttgttttcatggtcaaaacctatgctggttattagtggaattaaccggggatcaagctgtggtcatcacatgttctactcaggtgttgttgctggagcaagagaggcgttgttatgtggtgtaccttcattgtcaatatcattaaattggaagaaggatgaaagtcaagagactgatttcaaggatgcagtagtactctgtttacctttaataattgctgctatcagggatgttgtaaacggaactttcaccaaaagttgctttctgaatatagaaattcctacatcgcctttaacctgtaagggcttcaaattaaccaagcaaagtatgtggagatccactctaaactggcaggcagtttcaactagccggtatcctcctggtcatttcttggccagtaaacaaggctttggtcttcagtttgcacagattggccgagatgcctctgctgctggtgcagctcgcagattaactacacagaaaaagaatttggagattgttgaatcaattggagctgctggaaaacctgattccaacagggtgaagaagtacttcaggctagagttttcggagaagcagctggaagatatagatgacgatctagattacagggcacttgaaagtggatttgttgcagttactcctctctctctatctcctcatactgagaccaatattcaaatggcagcttctgattggatttcatctgtgtttcctggtgaacaatagcctcaaacagagttcagcttcagcgtgattatgtacatttgagatttctgattcttttctattttcttcttgaaagcaaaggtggagcagaagcgtctgtcacacccattctatagttgatatcatcaatctgtactctatgtttgtatgtgtgtgtaagatattttgtattcccctcttcattgtttcatttcttttggtcgctagttatttctgatgttatttgcttcctgtaatctcctaggcatattttaaaaatgcca

SEQ ID NO: 53686 - protein, 363 aa, Glycine max
  peptide (1)..(363): Ceres Seq. ID no. 14303885
MTTSSGSVKNAMPPGLQEPNINAEPSSSADDCSNSNTKPIVLVTNSDGIESPGLVHLVEALVLQGLCDVHVCVPQSDKSASAHSVTRGVTVEAFSAQINGATAFEVSGTPVDCVSLALSGALFSWSKPMLVISGINRGSSCGHHMFYSGVVAGAREALLCGVPSLSISLNWKKDESQETDFKDAVVLCLPLIIAAIRDVVNGTFTKSCFLNIEIPTSPLTCKGFKLTKQSMWRSTLNWQAVSTSRYPPGHFLASKQGFGLQFAQIGRDASAAGAARRLTTQKKNLEIVESIGAAGKPDSNRVKKYFRLEFSEKQLEDIDDDLDYRALESGFVAVTPLSLSPHTETNIQMAASDWISSVFPGEQ

SEQ ID NO: 53687 - protein, 352 aa, Glycine max
  peptide (1)..(352): Ceres Seq. ID no. 14303886
MPPGLQEPNINAEPSSSADDCSNSNTKPIVLVTNSDGIESPGLVHLVEALVLQGLCDVHVCVPQSDKSASAHSVTRGVTVEAFSAQINGATAFEVSGTPVDCVSLALSGALFSWSKPMLVISGINRGSSCGHHMFYSGVVAGAREALLCGVPSLSISLNWKKDESQETDFKDAVVLCLPLIIAAIRDVVNGTFTKSCFLNIEIPTSPLTCKGFKLTKQSMWRSTLNWQAVSTSRYPPGHFLASKQGFGLQFAQIGRDASAAGAARRLTTQKKNLEIVESIGAAGKPDSNRVKKYFRLEFSEKQLEDIDDDLDYRALESGFVAVTPLSLSPHTETNIQMAASDWISSVFPGEQ

SEQ ID NO: 53688 - protein, 235 aa, Glycine max
  peptide (1)..(235): Ceres Seq. ID no. 14303887
MLVISGINRGSSCGHHMFYSGVVAGAREALLCGVPSLSISLNWKKDESQETDFKDAVVLCLPLIIAAIRDVVNGTFTKSCFLNIEIPTSPLTCKGFKLTKQSMWRSTLNWQAVSTSRYPPGHFLASKQGFGLQFAQIGRDASAAGAARRLTTQKKNLEIVESIGAAGKPDSNRVKKYFRLEFSEKQLEDIDDDLDYRALESGFVAVTPLSLSPHTETNIQMAASDWISSVFPGEQ

SEQ ID NO: 53689 - DNA, 1323 bp, Glycine max
  misc_feature (1)..(1323): Ceres Seq. ID no. 14303866
acacacactctctcccttgtttctctctcttcggtcagaaacatgaatttggaaacgcaaccaggaacggcgtcgtattggtgctacagctgcacccgtttcgtgcacctctctgtccaaagcaccatcgcctgcccccactgtcaaagcggtttcgtcgaagagatccgtgccggcgccggagccgaagcctcgccacgccatcgactaagtcctttccccgatgatcctcttttgctccggcgacagggcttccgccgccgtaggagagaagcttccggcaaccgctccccgttcaaccccgttatcgtcctccgcggccccggcgacgactccgccgccgccgaccacgacggcgtcagcacgttcgagctcttctacgacgacggcgacggcaccggcctccgccctcttcctcccaccatgtcggagttgctcctcggctctggctttgacaaacttctcgaacagttcgcgcagatcgagatgaacggattcgggcggccggagaatccgccggcgtcaaaggcggcgatcgagtccatgccgacggtcgagatcggagaaacgcacgtggaaaccgaagcgcactgcgccgtgtgcaaagaagcgtttgagctgcacgcggaggcgcgtgagttaccgtgcaagcacatctaccactccgattgcatcctcccgtggctctcgatgcggaattcgtgcccggtgtgccgccacgagcttccttccgatttggaaactagggttcccagccagatcgacgaggagacgatagggttaacgatttggaggcttcccggcggcggattcgccgtggggagattctccggcggccggagaacaggcgagagtcatttcccggtggtgtacacggagatggacggtggactgaacacgaacggtggtgctcctaggagaatttctcgttctgttagaagcaatagggttagggaaagtcgagggtttggtagagttattagcaatttcttttcattctttggaagaattggttctagaaactcttcttctggacatgggtctgtaagtagaagccgtagtcacgtgagttcaatcttcaatagaagctcgcggagacatagcaggacttgggttatggatgattaattggtgaatggtgatggcaattttgcaaagaatagtaatactttcttttttttcagctttgggttatgagattcatttcatactgtaaatagcatgtaactagcaactatagaagcaagttttttagttttccctctctgggaatctttaatatggtttgattcaacatcaatggaaggaagagtgctatttttt

SEQ ID NO: 53690 - protein, 375 aa, Glycine max
  peptide (1)..(375): Ceres Seq. ID no. 14303867
THTLSLVSLSSVRNMNLETQPGTASYWCYSCTRFVHLSVQSTIACPHCQSGFVEEIRAGAGAEASPRHRLSPFPDDPLLLRRQGFRRRRREASGNRSPFNPVIVLRGPGDDSAAADHDGVSTFELFYDDGDGTGLRPLPPTMSELLLGSGFDKLLEQFAQIEMNGFGRPENPPASKAAIESMPTVEIGETHVETEAHCAVCKEAFELHAEARELPCKHIYHSDCILPWLSMRNSCPVCRHELPSDLETRVPSQIDEETIGLTIWRLPGGGFAVGRFSGGRRTGESHFPVVYTEMDGGLNTNGGAPRRISRSVRSNRVRESRGFGRVISNFFSFFGRIGSRNSSSGHGSVSRSRSHVSSIFNRSSRRHSRTWVMDD

SEQ ID NO: 53691 - protein, 361 aa, Glycine max
  peptide (1)..(361): Ceres Seq. ID no. 14303868
MNLETQPGTASYWCYSCTRFVHLSVQSTIACPHCQSGFVEEIRAGAGAEASPRHRLSPFPDDPLLLRRQGFRRRRREASGNRSPFNPVIVLRGPGDDSAAADHDGVSTFELFYDDGDGTGLRPLPPTMSELLLGSGFDKLLEQFAQIEMNGFGRPENPPASKAAIESMPTVEIGETHVETEAHCAVCKEAFELHAEARELPCKHIYHSDCILPWLSMRNSCPVCRHELPSDLETRVPSQIDEETIGLTIWRLPGGGFAVGRFSGGRRTGESHFPVVYTEMDGGLNTNGGAPRRISRSVRSNRVRESRGFGRVISNFFSFFGRIGSRNSSSGHGSVSRSRSHVSSIFNRSSRRHSRTWVMDD

SEQ ID NO: 53692 - protein, 234 aa, Glycine max
  peptide (1)..(234): Ceres Seq. ID no. 14303869
MSELLLGSGFDKLLEQFAQIEMNGFGRPENPPASKAAIESMPTVEIGETHVETEAHCAVCKEAFELHAEARELPCKHIYHSDCILPWLSMRNSCPVCRHELPSDLETRVPSQIDEETIGLTIWRLPGGGFAVGRFSGGRRTGESHFPVVYTEMDGGLNTNGGAPRRISRSVRSNRVRESRGFGRVISNFFSFFGRIGSRNSSSGHGSVSRSRSHVSSIFNRSSRRHSRTWVMDD

SEQ ID NO: 53693 - DNA, 1561 bp, Glycine max
  misc_feature (1)..(1561): Ceres Seq. ID no. 15174583
aggtcatggatgtgttgttgttgttattattatgtgttctcttggttggtttgccaaacctggctatagtagagagtcgcagggctcccgttctggactactttgagtattgtgctatgagctgcagagcttacagtgcctcgttggaagaatttggaggggttggtgatggaacaactttgaacactaaagcctttcaggctgccatagagaatctgagtcagtatgcagcaagtggtggttctcaactttatgttcccccaggaaaatggttaactggcagcttcaatctcaccagccatttcactttattcctacacaaggatgctgtaattcttgcctctcaggatgagaatgactggccagtgattgatcccttgccatcttatggtagagggagggacacacaaggtggaaggtttagcagcctgatttttggaaccaacctcactgatgtaatcataactggggacaatggcacaatagatggacaaggtgatctgtggtggcaaaaattccacaagggtgagctcaagtacacccgtccttacctggttgaaattatgtactcagataatgttcagatatccaatctcactttggttaattctccatcatggaatgtccatcctatatacagcagcaacgttgttgttcaaggaatcacaattcttgctcctgtgacatccccaaatacagatggaatcaacccggattcttgcacagacacacgaattgaggactgttacattgtatccggggatgactgtgttgctgtgaagagtggttgggatgagtatggtatagcttatggaatgccaacaaagcagcttgtaatcagaagactcacttgtatttctccattcagtgctgcgattgctttagggagtgaaatgtctggtgggattcaggatatgagggctgaggacattgtagccatcaatacagaatcaggggtcaggatcaaaactgctgtaggaagaggaggctatgtcaaggacatatttgttagaagaatgaccatgaaaaccatgaaatgggcattttggatgacaggaaattacgggtctcatgctgatgacaactatgatcctaatgcacttcctgtgattcagaacattaattatcgcgatatggttgctgagaatgtcactatggctgcaaggttggagggtatatctggggaccccttcacaggtatatgcatatccaatgtaaccattcaactggcaaagaaggctaaaaaagttccatggacttgcactgatattgctgggatttcaagtgatgtgactcctgcgccttgtgatctgttgcctgaccaaggagaagagaagattggggcatgcaccttcccagaagaaagtttgcccatcgaagatatcaaggttcaaacgtgcacttacagaaggaacttatgatgatagtgtaaaaggaatgactaagttcaagggaacaatccaaagcaatgtaatacttcaaaaattgtatttaaaatagtgtacttgtaaagactctgaacaaggcaatgacaacaatgatacagaaatgagtctataac

SEQ ID NO: 53694 - protein, 472 aa, Glycine max
  peptide (1)..(472): Ceres Seq. ID no. 15174584
VMDVLLLLLLCVLLVGLPNLAIVESRRAPVLDYFEYCAMSCRAYSASLEEFGGVGDGTTLNTKAFQAAIENLSQYAASGGSQLYVPPGKWLTGSFNLTSHFTLFLHKDAVILASQDENDWPVIDPLPSYGRGRDTQGGRFSSLIFGTNLTDVIITGDNGTIDGQGDLWWQKFHKGELKYTRPYLVEIMYSDNVQISNLTLVNSPSWNVHPIYSSNVVVQGITILAPVTSPNTDGINPDSCTDTRIEDCYIVSGDDCVAVKSGWDEYGIAYGMPTKQLVIRRLTCISPFSAAIALGSEMSGGIQDMRAEDIVAINTESGVRIKTAVGRGGYVKDIFVRRMTMKTMKWAFWMTGNYGSHADDNYDPNALPVIQNINYRDMVAENVTMAARLEGISGDPFTGICISNVTIQLAKKAKKVPWTCTDIAGISSDVTPAPCDLLPDQGEEKIGACTFPEESLPIEDIKVQTCTYRRNL

SEQ ID NO: 53695 - protein, 471 aa, Glycine max
  peptide (1)..(471): Ceres Seq. ID no. 15174585
MDVLLLLLLCVLLVGLPNLAIVESRRAPVLDYFEYCAMSCRAYSASLEEFGGVGDGTTLNTKAFQAAIENLSQYAASGGSQLYVPPGKWLTGSFNLTSHFTLFLHKDAVILASQDENDWPVIDPLPSYGRGRDTQGGRFSSLIFGTNLTDVIITGDNGTIDGQGDLWWQKFHKGELKYTRPYLVEIMYSDNVQISNLTLVNSPSWNVHPIYSSNVVVQGITILAPVTSPNTDGINPDSCTDTRIEDCYIVSGDDCVAVKSGWDEYGIAYGMPTKQLVIRRLTCISPFSAAIALGSEMSGGIQDMRAEDIVAINTESGVRIKTAVGRGGYVKDIFVRRMTMKTMKWAFWMTGNYGSHADDNYDPNALPVIQNINYRDMVAENVTMAARLEGISGDPFTGICISNVTIQLAKKAKKVPWTCTDIAGISSDVTPAPCDLLPDQGEEKIGACTFPEESLPIEDIKVQTCTYRRNL

SEQ ID NO: 53696 - protein, 434 aa, Glycine max
  peptide (1)..(434): Ceres Seq. ID no. 15174586
MSCRAYSASLEEFGGVGDGTTLNTKAFQAAIENLSQYAASGGSQLYVPPGKWLTGSFNLTSHFTLFLHKDAVILASQDENDWPVIDPLPSYGRGRDTQGGRFSSLIFGTNLTDVIITGDNGTIDGQGDLWWQKFHKGELKYTRPYLVEIMYSDNVQISNLTLVNSPSWNVHPIYSSNVVVQGITILAPVTSPNTDGINPDSCTDTRIEDCYIVSGDDCVAVKSGWDEYGIAYGMPTKQLVIRRLTCISPFSAAIALGSEMSGGIQDMRAEDIVAINTESGVRIKTAVGRGGYVKDIFVRRMTMKTMKWAFWMTGNYGSHADDNYDPNALPVIQNINYRDMVAENVTMAARLEGISGDPFTGICISNVTIQLAKKAKKVPWTCTDIAGISSDVTPAPCDLLPDQGEEKIGACTFPEESLPIEDIKVQTCTYRRNL

SEQ ID NO: 53697 - DNA, 1575 bp, Glycine max
  misc_feature (1)..(1575): Ceres Seq. ID no. 15176440
gatacacaagaatctcacccccacagtttctggcaccaacatggatcaagagaccgaaccacaacctctgacctcaaagatctcaacagttgtaccagcaaccccgcgaggcgacgaggacggcgcgtaccacctcagcaacatggacctgctcatgaagctgcactacatcagagccgtttatttcttcatcaacgacgcagcgcaagggctctcgatttatgacctcaagaaacccatgttcccgctcctcgaccaggtcgtgcaactctcgggtcggatccgggtttctgaatcgggtcggcccttcttgaagtgcaacgatgctggtgttcgcatcgctgagtaccaccacgaccacacccttggggagtggtttcagaaaaatgggtgctcccttcaaggtctcgtccatgatcatgttcttggccctgaccttggcttctctcctttggtttttgtcaagttcacttggttcaaatgtggagggctctctctaggactcagctggtcccatgttctaggagacgctttttcagccttcagcttcatcaccaagtggagtcaaatactggcgggtcacgcgccgccaaaaatccttccaatgtcaccaactctcaaagaaatccaaaccccacacaataataattcggttaatgcgaataatgggaatcacttttctgtcaaaacagccacaaccatagaagaactttggctcgctacaaacggcataaaaatggttactcacactttccacgtcactgccaaacaacttaaccgtttggtgtcatccacgttcttttcatgtgaccaaaacaaagccaccaaaacctcgtatttcgagattctttcggcgttggtgtggaaacacattgctggcatgagggaagacaccgagccaaaggttgtaacaatttgcacacgtggcatggctaatatcgaattccccaccaatggtttggtgttgagcgttgttgaagccaacgtggcagttggacaatctgacgtgtccgatttggcgaagctgattggcgaggaaaaaagggttgagaatgttgttgtggaaaagttagtggaagagagccaagggaaaggggattttgtggtttatggggcgaatttgacgtttgtggatttggaagaaggtgacatgtacgaggttgtgctgaatggacacaaaccggtcgtgacgaattgcagcatccatggagtgggtgatcaaggtgttgttttggtgcttccgggacttgaagatgaagaaaatgggaggaatattggaagaatggtgactgtttctttgcctgaaaaagaagttgaccagctcaaagagaagctgagaggagaatggggtcctgagtcacttccattctgatagtccaaagcgtatcaactcactgctttcataagtgcaattacgagaaaattaatagctagttaagattgtgaggcatgcaaaatgataataacattattgataaaatgttataagttgattttgtaaagtgtacttttatccctttaaataaattttatggagtgcatgtttgatttgatgttagagaattgattttaaat

SEQ ID NO: 53698 - protein, 456 aa, Glycine max
  peptide (1)..(456): Ceres Seq. ID no. 15176441
IHKNLTPTVSGTNMDQETEPQPLTSKISTVVPATPRGDEDGAYHLSNMDLLMKLHYIRAVYFFINDAAQGLSIYDLKKPMFPLLDQVVQLSGRIRVSESGRPFLKCNDAGVRIAEYHHDHTLGEWFQKNGCSLQGLVHDHVLGPDLGFSPLVFVKFTWFKCGGLSLGLSWSHVLGDAFSAFSFITKWSQILAGHAPPKILPMSPTLKEIQTPHNNNSVNANNGNHFSVKTATTIEELWLATNGIKMVTHTFHVTAKQLNRLVSSTFFSCDQNKATKTSYFEILSALVWKHIAGMREDTEPKVVTICTRGMANIEFPTNGLVLSVVEANVAVGQSDVSDLAKLIGEEKRVENVVVEKLVEESQGKGDFVVYGANLTFVDLEEGDMYEVVLNGHKPVVTNCSIHGVGDQGVVLVLPGLEDEENGRNIGRMVTVSLPEKEVDQLKEKLRGEWGPESLPF

SEQ ID NO: 53699 - protein, 443 aa, Glycine max
  peptide (1)..(443): Ceres Seq. ID no. 15176442
MDQETEPQPLTSKISTVVPATPRGDEDGAYHLSNMDLLMKLHYIRAVYFFINDAAQGLSIYDLKKPMFPLLDQVVQLSGRIRVSESGRPFLKCNDAGVRIAEYHHDHTLGEWFQKNGCSLQGLVHDHVLGPDLGFSPLVFVKFTWFKCGGLSLGLSWSHVLGDAFSAFSFITKWSQILAGHAPPKILPMSPTLKEIQTPHNNNSVNANNGNHFSVKTATTIEELWLATNGIKMVTHTFHVTAKQLNRLVSSTFFSCDQNKATKTSYFEILSALVWKHIAGMREDTEPKVVTICTRGMANIEFPTNGLVLSVVEANVAVGQSDVSDLAKLIGEEKRVENVVVEKLVEESQGKGDFVVYGANLTFVDLEEGDMYEVVLNGHKPVVTNCSIHGVGDQGVVLVLPGLEDEENGRNIGRMVTVSLPEKEVDQLKEKLRGEWGPESLPF

SEQ ID NO: 53700 - protein, 409 aa, Glycine max
  peptide (1)..(409): Ceres Seq. ID no. 15176443
MDLLMKLHYIRAVYFFINDAAQGLSIYDLKKPMFPLLDQVVQLSGRIRVSESGRPFLKCNDAGVRIAEYHHDHTLGEWFQKNGCSLQGLVHDHVLGPDLGFSPLVFVKFTWFKCGGLSLGLSWSHVLGDAFSAFSFITKWSQILAGHAPPKILPMSPTLKEIQTPHNNNSVNANNGNHFSVKTATTIEELWLATNGIKMVTHTFHVTAKQLNRLVSSTFFSCDQNKATKTSYFEILSALVWKHIAGMREDTEPKVVTICTRGMANIEFPTNGLVLSVVEANVAVGQSDVSDLAKLIGEEKRVENVVVEKLVEESQGKGDFVVYGANLTFVDLEEGDMYEVVLNGHKPVVTNCSIHGVGDQGVVLVLPGLEDEENGRNIGRMVTVSLPEKEVDQLKEKLRGEWGPESLPF

SEQ ID NO: 53701 - DNA, 1748 bp, Glycine max
  misc_feature (1)..(1748): Ceres Seq. ID no. 14304910
aataaaaaaacaaagcacacgctccacattggcatcgacttaatgcgtggtttccctcgccggagatcggtggaaaaccggtcatcttcccggcggagaccctccatcttctacggcgccggcaattcggaatctatggacgccgacgacttcgccgacgtctttggtggcccaccgcgaactctccttgcgcacaaattctcgagctctggttctttttacgaggaagttttccgaccaccagagttcacgttcccggcacctaaggatggccggagcttgccggtgttcaggattccggcgaggaatgagggattttacagcgacatattcaggtcggacgatgaccggagatcgagagagcggtcaaggtcactgtcgaaagagaattcgtcgtcggcgatgagttcggaggagttaagccctcgccggccggcgattggagatgacgtggcactttctggttttgcttcaaagctaaggccaatcaatattccatggagatggaatccatccactgtgatgcctgaggctgaggaatacacaagtaaacttggggtgcccctttttgcatgcaaggatcagtcatttgaaattcagcatcaggacaatgaatacaaggagaacttcagaagcccccatttaggatcctcaagaagagcctcatccccagaaaccattagtcttgaatccaattcatatcaaagcaccaaagtgttcactgatgactgggagctcaattccccattttctgtcgtctcttcgctttatcaagaacctgaggcaaaattttctgtgcatgatcgtgtgctttcagaccaaattatagaagatgatgatgacgacgacgacgacgatattatgagctcctatgtcattgaactcaactccaacctcagaagggaagagtgtggagaatcagccattgatgaagcaattgcatgggccaaagagaagtttcaatcgcaaagctctgatgaagaatcaagcataagaaacgatggcaaagagcaaactgttggaataggaggctctgatgcaagtgaataccatgacaatggaattggaatagttcaaactcaggagaagcaacagacagaaacagagaagttagacagagatataagattgtggtcatctggcaaggaaacagatattaggctactactttcaacattacatcatattctaaggcctgagagtggctggtatgctattcctcctaagagtctattagaaagctcacaggtgaagaaggcttatcagaaagcaaggttatgcctgcacccagacaaactgcagcaaagaggagcaacactccttcagaagtatgtagcagagaaggctttctcaattcttcaggatgcatgggctgcattcatttccatagatgtttccttctagccagtggatgactctaatcttgataactcagttttgtcttgagatttgtggacaaacaccaagcttgacattcgaaatgtcgggagtgtttgttgttgacaagcagcatatatagctaaatacatgaaacttgaacacatcagctcttttgtacaaatagtttactgatggatctgctgttctatttatgtttgtatcataacttcataagctgtttgttgcttaggtaggtattgtttctgatgtagttaacagaaggtaatttgattggccttagtatttgatttgtatatgatatgaaatggaaacaagagttagtttgtatgtgattcatatggaaaccc

SEQ ID NO: 53702 - protein, 467 aa, Glycine max
  peptide (1)..(467): Ceres Seq. ID no. 14304911
NKKTKHTLHIGIDLMRGFPRRRSVENRSSSRRRPSIFYGAGNSESMDADDFADVFGGPPRTLLAHKFSSSGSFYEEVFRPPEFTFPAPKDGRSLPVFRIPARNEGFYSDIFRSDDDRRSRERSRSLSKENSSSAMSSEELSPRRPAIGDDVALSGFASKLRPINIPWRWNPSTVMPEAEEYTSKLGVPLFACKDQSFEIQHQDNEYKENFRSPHLGSSRRASSPETISLESNSYQSTKVFTDDWELNSPFSVVSSLYQEPEAKFSVHDRVLSDQIIEDDDDDDDDDIMSSYVIELNSNLRREECGESAIDEAIAWAKEKFQSQSSDEESSIRNDGKEQTVGIGGSDASEYHDNGIGIVQTQEKQQTETEKLDRDIRLWSSGKETDIRLLLSTLHHILRPESGWYAIPPKSLLESSQVKKAYQKARLCLHPDKLQQRGATLLQKYVAEKAFSILQDAWAAFISIDVSF

SEQ ID NO: 53703 - protein, 453 aa, Glycine max
  peptide (1)..(453): Ceres Seq. ID no. 14304912
MRGFPRRRSVENRSSSRRRPSIFYGAGNSESMDADDFADVFGGPPRTLLAHKFSSSGSFYEEVFRPPEFTFPAPKDGRSLPVFRIPARNEGFYSDIFRSDDDRRSRERSRSLSKENSSSAMSSEELSPRRPAIGDDVALSGFASKLRPINIPWRWNPSTVMPEAEEYTSKLGVPLFACKDQSFEIQHQDNEYKENFRSPHLGSSRRASSPETISLESNSYQSTKVFTDDWELNSPFSVVSSLYQEPEAKFSVHDRVLSDQIIEDDDDDDDDDIMSSYVIELNSNLRREECGESAIDEAIAWAKEKFQSQSSDEESSIRNDGKEQTVGIGGSDASEYHDNGIGIVQTQEKQQTETEKLDRDIRLWSSGKETDIRLLLSTLHHILRPESGWYAIPPKSLLESSQVKKAYQKARLCLHPDKLQQRGATLLQKYVAEKAFSILQDAWAAFISIDVSF

SEQ ID NO: 53704 - protein, 422 aa, Glycine max
  peptide (1)..(422): Ceres Seq. ID no. 14304913
MDADDFADVFGGPPRTLLAHKFSSSGSFYEEVFRPPEFTFPAPKDGRSLPVFRIPARNEGFYSDIFRSDDDRRSRERSRSLSKENSSSAMSSEELSPRRPAIGDDVALSGFASKLRPINIPWRWNPSTVMPEAEEYTSKLGVPLFACKDQSFEIQHQDNEYKENFRSPHLGSSRRASSPETISLESNSYQSTKVFTDDWELNSPFSVVSSLYQEPEAKFSVHDRVLSDQIIEDDDDDDDDDIMSSYVIELNSNLRREECGESAIDEAIAWAKEKFQSQSSDEESSIRNDGKEQTVGIGGSDASEYHDNGIGIVQTQEKQQTETEKLDRDIRLWSSGKETDIRLLLSTLHHILRPESGWYAIPPKSLLESSQVKKAYQKARLCLHPDKLQQRGATLLQKYVAEKAFSILQDAWAAFISIDVSF

SEQ ID NO: 53705 - DNA, 1495 bp, Glycine max
  misc_feature (1)..(1495): Ceres Seq. ID no. 14311055
ggagaaaccattgattcaagttaacaacagagaagtagctatgccgaagccttgtgacttgaaaatcaacattgatggtcagcagatattccttttgaaagagaaggttatatcaaaatactgtggagggttgaagaagatcttgaatcaccaaaagagaagatgtcatgtgaaggagttggggattagaatcaatgatttccctggaggaccaaaagggtttgagctagtttcaatgttctgttacaacaatggaaaaatccaaatcactgtggctaatgtgtctctcctccactgttgtgctgtttatcttggaatgactgaggaggcattcagcaacaatctcttgcaacaaacagaaacttttcttgagagaatctattactggaaatggaatgacatacttgcaagtctcaagagttgccagctgttttatacatatgcagatggctatggtctcttggagaagatcattagtgccttagcaaagtttgtccagaattcagattcaaacctcctcacttcctcgccttcggcatcatcatggtcatcttcaccagaaagcaactttgccaagagattctctttctcatccaagaaaactaccccagaaaaaatcaagtcatgtttgccgcgcaaggcatggtggtttgatgatttggcaactttaccaccaacgatcattgagaaactcttccagactattggagcatacaaagctgataacaaggatttaatcctcacaagatttctgttgcattatctgaaaatagctactcaaaccaaaatggttaattgcagaaacagcaatgagtatgctgctcttgcagaaacagctgcttatggggtcatatctgttggtaaagagacattttcttgcagaggccttttttgggtactaaggattgtatctaagtttgggttgagtagagactgcagaactgaattggagaaattgattggtggaatgcttgagcaagctacactggatgatcttctagtctctgggcatgacatgggagtttattatgatgttaatttggtgataagattggttagattatttgttgatatcaatggttctgatggactgtctttacagaaagtgaaaagggttggtagattaattgacaagtatttgagagagatatctcctgaccagaacctcaagatctctaaatttcttggagtagcagaatgcttgccagactctgcaagggattgctatgatggggtctacaaggccattgacatctatcttgaggtgaataacacatacccttcttccattgcttttcatatgaatcatcttcctaaagaaaaggaaatggaaaagagcaaatagattacaggacttgttttgcttgagagagcaattttttgtttttagtttagtttttttttatgaataattacaaaaatgttactttgttttgattttgttttctgacactaaaaatttgtaaaaaaaacaataaagaacactgtttatttt

SEQ ID NO: 53706 - protein, 447 aa, Glycine max
  peptide (1)..(447): Ceres Seq. ID no. 14311056
EKPLIQVNNREVAMPKPCDLKINIDGQQIFLLKEKVISKYCGGLKKILNHQKRRCHVKELGIRINDFPGGPKGFELVSMFCYNNGKIQITVANVSLLHCCAVYLGMTEEAFSNNLLQQTETFLERIYYWKWNDILASLKSCQLFYTYADGYGLLEKIISALAKFVQNSDSNLLTSSPSASSWSSSPESNFAKRFSFSSKKTTPEKIKSCLPRKAWWFDDLATLPPTIIEKLFQTIGAYKADNKDLILTRFLLHYLKIATQTKMVNCRNSNEYAALAETAAYGVISVGKETFSCRGLFWVLRIVSKFGLSRDCRTELEKLIGGMLEQATLDDLLVSGHDMGVYYDVNLVIRLVRLFVDINGSDGLSLQKVKRVGRLIDKYLREISPDQNLKISKFLGVAECLPDSARDCYDGVYKAIDIYLEVNNTYPSSIAFHMNHLPKEKEMEKSK

SEQ ID NO: 53707 - protein, 434 aa, Glycine max
  peptide (1)..(434): Ceres Seq. ID no. 14311057
MPKPCDLKINIDGQQIFLLKEKVISKYCGGLKKILNHQKRRCHVKELGIRINDFPGGPKGFELVSMFCYNNGKIQITVANVSLLHCCAVYLGMTEEAFSNNLLQQTETFLERIYYWKWNDILASLKSCQLFYTYADGYGLLEKIISALAKFVQNSDSNLLTSSPSASSWSSSPESNFAKRFSFSSKKTTPEKIKSCLPRKAWWFDDLATLPPTIIEKLFQTIGAYKADNKDLILTRFLLHYLKIATQTKMVNCRNSNEYAALAETAAYGVISVGKETFSCRGLFWVLRIVSKFGLSRDCRTELEKLIGGMLEQATLDDLLVSGHDMGVYYDVNLVIRLVRLFVDINGSDGLSLQKVKRVGRLIDKYLREISPDQNLKISKFLGVAECLPDSARDCYDGVYKAIDIYLEVNNTYPSSIAFHMNHLPKEKEMEKSK

SEQ ID NO: 53708 - protein, 369 aa, Glycine max
  peptide (1)..(369): Ceres Seq. ID no. 14311058
MFCYNNGKIQITVANVSLLHCCAVYLGMTEEAFSNNLLQQTETFLERIYYWKWNDILASLKSCQLFYTYADGYGLLEKIISALAKFVQNSDSNLLTSSPSASSWSSSPESNFAKRFSFSSKKTTPEKIKSCLPRKAWWFDDLATLPPTIIEKLFQTIGAYKADNKDLILTRFLLHYLKIATQTKMVNCRNSNEYAALAETAAYGVISVGKETFSCRGLFWVLRIVSKFGLSRDCRTELEKLIGGMLEQATLDDLLVSGHDMGVYYDVNLVIRLVRLFVDINGSDGLSLQKVKRVGRLIDKYLREISPDQNLKISKFLGVAECLPDSARDCYDGVYKAIDIYLEVNNTYPSSIAFHMNHLPKEKEMEKSK

SEQ ID NO: 53709 - DNA, 2167 bp, Glycine max
  misc_feature (1)..(2167): Ceres Seq. ID no. 14303959
aaattgcatcgtcgagccgaaacattcattcttcttgggaaattgctgttgcaactactaaatatgatgctgggagttcattgatacaaagtgatttggcatgctcatcaagtaaagttgggattcaatcacaacgagtggtacctgttgaaacagaagaacaagcatctgcctcttctccctctctttataatacatttggaagcaaatcagaggtgcccaaaaatgcttcctcccctaaaaagttgggaaataaagcatatatgtcaaatactgggaagaaaggtaggttgcaaacagtatcgtcatctacttctgtaaatgacaacagagttaacaaaccgccatgccatgcccctcgcactgttaaatcggtcatcaagaacaagaatctgagtaagaagaaacaaaaggaggattcaggttctgctttgcatggtcctacacccaatgaagtcaataagccagttcctggtacacctcggctaatttgtgagagatgtaggtgtgctttggaaaatacttgcgaagaaaaaaaccaagatattgtggcattggactctatcagtcctggagatggagtaaacttgagtaatgtacactctggttcaaataaacctggtttggtgtcaagtagtgttaataaaagcaaaacaggtgcaaaagtgaagaacaccaagttgaaagagcaaattgatttttcacaaagttcaaagagtagtcaaggtgagtacagtagtagtacaagtaccagtgatgagagcaacgtaagtggttcaagtcgtagcactaggcctcacatgtcaaaggatgtcaggtgggcagccatacgacatgctcaaatgcagcatggagtcttgggcttgagacacttcaatcttttaaagaaacttggttgtggagacattgggactgtatatcttgcggaactaattggcactagctgcctgtttgctattaaggtcatggacaatgaatttttggaaagaagagagaagatgcctagggctcaaactgagagagaaatattaaggatcctggatcacccttttcttcccacaatgtatgcacaatttacatcagataatctatcgtgtctggtcatggagtattgtccaggtggagatcttcatgttctacggcagaagcagcttggtagatatttctcggagccagcagcaaggttttatgttgctgaagttctccttgctttggagtacttgcacatgcttggagttgtttaccgtgatttgaaacccgaaaacattcttgttcgggaagatggccacattatgctcacagattttgatctgtccctgaggtgtgctgttaacccaacgcttctgaaatcatcttctgatgttgaccctgcaaaaatttcaggtctaagtgcacaagcaagttgcattgagccattttgcattgaaccatcttgtcaagttccatgcttcagcccaagattgctacccgctgctgcaaaagcaaggaaactaaaagttgatcttgcagcccaggtcagatcattgccacagcttgtggctgagcccactgatgcaagatcaaactcatttgttggcacacatgaatacttggctcctgagatcatcaaagaagagggacatggagctgcagttgactggtggacatttggtgtttttctctatgaacttttgtacggtagaacaccctttaaaggttcaaacaatgaagaaacattggccaacgtagtgttgcagggtcttcgattccccaagcacccaaatgttagtttccaagcaaaggatctgattagagggttgttggttaaagagcccgaaaaccgtttgggttcagagaaaggagctgctgagattaaacagcaccccttcttcgagggccttaactgggccttaattcgttgcgctgtccctccagaacttccagacttttatgattttggagtttcagacatggtgaacccacagggcaagggtgctaagtacttggagtgtaaagtaggagagcatgtagaattcgagttgttttaaagacattgctgtctatcaagaatggcattcatgttatggactcccatatttatggctccatatcggtgtcgagatgtaacttatacagttatatgtaagcctaaagccgaatagtctatgttgcaaattagttttgtatc

SEQ ID NO: 53710 - protein, 674 aa, Glycine max
  peptide (1)..(674): Ceres Seq. ID no. 14303960
IASSSRNIHSSWEIAVATTKYDAGSSLIQSDLACSSSKVGIQSQRVVPVETEEQASASSPSLYNTFGSKSEVPKNASSPKKLGNKAYMSNTGKKGRLQTVSSSTSVNDNRVNKPPCHAPRTVKSVIKNKNLSKKKQKEDSGSALHGPTPNEVNKPVPGTPRLICERCRCALENTCEEKNQDIVALDSISPGDGVNLSNVHSGSNKPGLVSSSVNKSKTGAKVKNTKLKEQIDFSQSSKSSQGEYSSSTSTSDESNVSGSSRSTRPHMSKDVRWAAIRHAQMQHGVLGLRHFNLLKKLGCGDIGTVYLAELIGTSCLFAIKVMDNEFLERREKMPRAQTEREILRILDHPFLPTMYAQFTSDNLSCLVMEYCPGGDLHVLRQKQLGRYFSEPAARFYVAEVLLALEYLHMLGVVYRDLKPENILVREDGHIMLTDFDLSLRCAVNPTLLKSSSDVDPAKISGLSAQASCIEPFCIEPSCQVPCFSPRLLPAAAKARKLKVDLAAQVRSLPQLVAEPTDARSNSFVGTHEYLAPEIIKEEGHGAAVDWWTFGVFLYELLYGRTPFKGSNNEETLANVVLQGLRFPKHPNVSFQAKDLIRGLLVKEPENRLGSEKGAAEIKQHPFFEGLNWALIRCAVPPELPDFYDFGVSDMVNPQGKGAKYLECKVGEHVEFELF

SEQ ID NO: 53711 - protein, 587 aa, Glycine max
  peptide (1)..(587): Ceres Seq. ID no. 14303961
MSNTGKKGRLQTVSSSTSVNDNRVNKPPCHAPRTVKSVIKNKNLSKKKQKEDSGSALHGPTPNEVNKPVPGTPRLICERCRCALENTCEEKNQDIVALDSISPGDGVNLSNVHSGSNKPGLVSSSVNKSKTGAKVKNTKLKEQIDFSQSSKSSQGEYSSSTSTSDESNVSGSSRSTRPHMSKDVRWAAIRHAQMQHGVLGLRHFNLLKKLGCGDIGTVYLAELIGTSCLFAIKVMDNEFLERREKMPRAQTEREILRILDHPFLPTMYAQFTSDNLSCLVMEYCPGGDLHVLRQKQLGRYFSEPAARFYVAEVLLALEYLHMLGVVYRDLKPENILVREDGHIMLTDFDLSLRCAVNPTLLKSSSDVDPAKISGLSAQASCIEPFCIEPSCQVPCFSPRLLPAAAKARKLKVDLAAQVRSLPQLVAEPTDARSNSFVGTHEYLAPEIIKEEGHGAAVDWWTFGVFLYELLYGRTPFKGSNNEETLANVVLQGLRFPKHPNVSFQAKDLIRGLLVKEPENRLGSEKGAAEIKQHPFFEGLNWALIRCAVPPELPDFYDFGVSDMVNPQGKGAKYLECKVGEHVEFELF

SEQ ID NO: 53712 - protein, 408 aa, Glycine max
  peptide (1)..(408): Ceres Seq. ID no. 14303962
MSKDVRWAAIRHAQMQHGVLGLRHFNLLKKLGCGDIGTVYLAELIGTSCLFAIKVMDNEFLERREKMPRAQTEREILRILDHPFLPTMYAQFTSDNLSCLVMEYCPGGDLHVLRQKQLGRYFSEPAARFYVAEVLLALEYLHMLGVVYRDLKPENILVREDGHIMLTDFDLSLRCAVNPTLLKSSSDVDPAKISGLSAQASCIEPFCIEPSCQVPCFSPRLLPAAAKARKLKVDLAAQVRSLPQLVAEPTDARSNSFVGTHEYLAPEIIKEEGHGAAVDWWTFGVFLYELLYGRTPFKGSNNEETLANVVLQGLRFPKHPNVSFQAKDLIRGLLVKEPENRLGSEKGAAEIKQHPFFEGLNWALIRCAVPPELPDFYDFGVSDMVNPQGKGAKYLECKVGEHVEFELF

SEQ ID NO: 53713 - DNA, 777 bp, Glycine max
  misc_feature (1)..(777): Ceres Seq. ID no. 13493393
aattttcttttattgttgttgacatcttaatatctttgtctttcgttctcccttctattacctaatcaaggagcaatgatgaattcctcacctcctccagcaaaaagactttcgaagtatgctcctctgattcatgttatgaaggtacgaccagatagaataaatcttataattggttctggtgggaaaaaagtgaagagcattattgaggaatctggagtagacactattgatacagaagatgatggcactgtgaaaatatttgcaaaagacttgcctagtttagagaagtctaaagctattattaatagtttgacgatggttccaactattggtgatatatataggagctgtgaaatcaaatcaatagcctcatatggagtttttgtagagatagcacctggacgagagggactgtgtcatatcagtgaactgagttcaggttggctacccaaggcagaagatgttttcaaagtgggagatcgcattgatgtaaagcttatagagataaatgaaaagggacagctgcgccttagtcaccgagcactgcttcctgatacagaagcttcaccgaaggatggtttagtggaagaaaagactgaacagtctaaggataagtctagcactcccaatgtcacagcctcttctaaaaggagttcagaggatgattctgtgcttccttctaaaaagtttgtcaggagattggtcagctcttccctggataagcctttcactaacaaagacaagacaaagaagagtagcaacaaagcagttggt

SEQ ID NO: 53714 - protein, 234 aa, Glycine max
  peptide (1)..(234): Ceres Seq. ID no. 13493394
MMNSSPPPAKRLSKYAPLIHVMKVRPDRINLIIGSGGKKVKSIIEESGVDTIDTEDDGTVKIFAKDLPSLEKSKAIINSLTMVPTIGDIYRSCEIKSIASYGVFVEIAPGREGLCHISELSSGWLPKAEDVFKVGDRIDVKLIEINEKGQLRLSHRALLPDTEASPKDGLVEEKTEQSKDKSSTPNVTASSKRSSEDDSVLPSKKFVRRLVSSSLDKPFTNKDKTKKSSNKAVG

SEQ ID NO: 53715 - protein, 233 aa, Glycine max
  peptide (1)..(233): Ceres Seq. ID no. 13493395
MNSSPPPAKRLSKYAPLIHVMKVRPDRINLIIGSGGKKVKSIIEESGVDTIDTEDDGTVKIFAKDLPSLEKSKAIINSLTMVPTIGDIYRSCEIKSIASYGVFVEIAPGREGLCHISELSSGWLPKAEDVFKVGDRIDVKLIEINEKGQLRLSHRALLPDTEASPKDGLVEEKTEQSKDKSSTPNVTASSKRSSEDDSVLPSKKFVRRLVSSSLDKPFTNKDKTKKSSNKAVG

SEQ ID NO: 53716 - protein, 213 aa, Glycine max
  peptide (1)..(213): Ceres Seq. ID no. 13493396
MKVRPDRINLIIGSGGKKVKSIIEESGVDTIDTEDDGTVKIFAKDLPSLEKSKAIINSLTMVPTIGDIYRSCEIKSIASYGVFVEIAPGREGLCHISELSSGWLPKAEDVFKVGDRIDVKLIEINEKGQLRLSHRALLPDTEASPKDGLVEEKTEQSKDKSSTPNVTASSKRSSEDDSVLPSKKFVRRLVSSSLDKPFTNKDKTKKSSNKAVG

SEQ ID NO: 53717 - DNA, 1352 bp, Glycine max
  misc_feature (1)..(1352): Ceres Seq. ID no. 14311001
ttttttttagtttttcgatggacccgaagttcatcggaaagccgctggcgatggtggacctggaccgggaccggatgtcggagcgtgggtcccaccaccggcgttcccactccgacacctccttccgcttccctgccaacttcgacgagcttctcctcttcgacccctccgacctcgacatctccggcctcccgtcgccgctccctctgccgtcgcagggcgccggcggcgtggttccgatgtccgtcgtctccgaggagtctggcggacggccgaggccgtccggggcttccgccggcgggcacctgcggagtctgtcggtggattctgacttcttcgatgggctcgggtccggcgtcggcggcgatgagagaggtgccgggaatggcggcggcgagcggcacagcaactcgatggaggggtcgtcgacgacgtcgtttgaggcggactcggcgacgatgatggatggcatgaagaaagctacggcccctgataaacttgctgagcttgctcttacggatcccaaaatagctaagaggatgcttgctaacaggcaatctgctgcaagatctaaggagaggaagattcgttacacaagtgagttggagaagaaggtgcagactcttcagactgaagcaactaacctttctgcacagcttaccatgcttcagagagacactacagatttgactgcacagaataaggagctcaaactgcgcttacaggcttttgagcaagaagcacagcttagagaagatctcaatgaggcattgaagaaagaactgcagcgccttagggtacaaagtgcttgctggggtgctatgactggtggtaacccttcttttggtgggatattcaaccagttggcttcccagttagccatgcaacagttgtctaattctgtgccccatcagcaccagacacaacaccagccacaggttggcatgcctcctcccccctctggacagaagcaccctaagttcatggacttcaatcagcagaagtagctaataatagttgtagcagtaaatgattgattacatgcaatattcatcacaagtaacatcctgtgcatatgaatgtataactaactggtgagacttgtgaaggatatattgtgcagttcagtgtctttagtcatgtgttgtttatctttagttctaggatatgtgtactttctgcagttctaggtgagaagcatagcctttgaaatgtaagcgtcatagctcttgggtgaatgagggtaacataaaggtgtagaaagactagttgataatagtatagatggtgaatgaagtttattaactagcttctggacttaaatagcatgctatatatgttaaaagttaaag

SEQ ID NO: 53718 - protein, 334 aa, Glycine max
  peptide (1)..(334): Ceres Seq. ID no. 14311002
FFSFSMDPKFIGKPLAMVDLDRDRMSERGSHHRRSHSDTSFRFPANFDELLLFDPSDLDISGLPSPLPLPSQGAGGVVPMSVVSEESGGRPRPSGASAGGHLRSLSVDSDFFDGLGSGVGGDERGAGNGGGERHSNSMEGSSTTSFEADSATMMDGMKKATAPDKLAELALTDPKIAKRMLANRQSAARSKERKIRYTSELEKKVQTLQTEATNLSAQLTMLQRDTTDLTAQNKELKLRLQAFEQEAQLREDLNEALKKELQRLRVQSACWGAMTGGNPSFGGIFNQLASQLAMQQLSNSVPHQHQTQHQPQVGMPPPPSGQKHPKFMDFNQQK

SEQ ID NO: 53719 - protein, 329 aa, Glycine max
  peptide (1)..(329): Ceres Seq. ID no. 14311003
MDPKFIGKPLAMVDLDRDRMSERGSHHRRSHSDTSFRFPANFDELLLFDPSDLDISGLPSPLPLPSQGAGGVVPMSVVSEESGGRPRPSGASAGGHLRSLSVDSDFFDGLGSGVGGDERGAGNGGGERHSNSMEGSSTTSFEADSATMMDGMKKATAPDKLAELALTDPKIAKRMLANRQSAARSKERKIRYTSELEKKVQTLQTEATNLSAQLTMLQRDTTDLTAQNKELKLRLQAFEQEAQLREDLNEALKKELQRLRVQSACWGAMTGGNPSFGGIFNQLASQLAMQQLSNSVPHQHQTQHQPQVGMPPPPSGQKHPKFMDFNQQK

SEQ ID NO: 53720 - protein, 318 aa, Glycine max
  peptide (1)..(318): Ceres Seq. ID no. 14311004
MVDLDRDRMSERGSHHRRSHSDTSFRFPANFDELLLFDPSDLDISGLPSPLPLPSQGAGGVVPMSVVSEESGGRPRPSGASAGGHLRSLSVDSDFFDGLGSGVGGDERGAGNGGGERHSNSMEGSSTTSFEADSATMMDGMKKATAPDKLAELALTDPKIAKRMLANRQSAARSKERKIRYTSELEKKVQTLQTEATNLSAQLTMLQRDTTDLTAQNKELKLRLQAFEQEAQLREDLNEALKKELQRLRVQSACWGAMTGGNPSFGGIFNQLASQLAMQQLSNSVPHQHQTQHQPQVGMPPPPSGQKHPKFMDFNQQK

SEQ ID NO: 53721 - DNA, 1326 bp, Glycine max
  misc_feature (1)..(1326): Ceres Seq. ID no. 15170406
gtgagtttttattttcattcattttcaggtttagagagaccctaacacacttagcgtgatcaagatcaacaatggcggaaaacccttccgaaacggtgttgtccagttcccaacctcctcctcctcctccttcttcttcttcttcttcttctcagaaatcgccccaagattcgccgcaggtccctgcattgtcgaattttatgccctttccgagtggatattattatcaaatgattcctggtatgtaccctgcgctagttccagggttgactttgccgcaacatgaggagcatgggaaccgcggagctggcatatatgctgttcccgttaacccgtatgacagacaagttactggacttccatacaacacactgattccgctgacttaccgcacacccaccagcaggccaagttctgaagctactgttgccagtgaaaatcagggacaagcaggacagcaacctcaacagcagcagcctgcacctcaaagacaagttgttgttaggagatttcaaattgcatttcaaattgatttgttgcttatgttgaagctggcagctgtgatctttttgtttaaccaagatggatcaaggcagaggcttattgtccttgtgttctttgctgctcttgtatatttgtaccaaactggagctttgacaccgattataagatggctttcacgaggtatgcagagagcagcagcacctcctcatccaccaagacctgcagccagggctgaaaatgttcctgctcccaggccggagggtgacaatgctgctccagcagagggtcaacctgaagccgagaatgggaaccagcccgctaatgatgcagaccaggcagtcgagaatgaaaatgttgcagaacatggcaatgtcaatggtggtaatcagtggtggggcattgtgaaggagatccagatgattgtctttggatttatcacttcccttctccccgggttccacaaccatatggattgaactatattttgtagcttacaaggtttgtggatctgatatatggtctatatgggaccatgcctgagacatgggacggggtgttctgaaataaaaatgtatagcatcagaagttccaagcgtcataactaatacatacatagttaggtgcaactataatccagcggaagatatggtgcaactatagggtgccggttttgtatcattacttggattgttgataaaacactttttttttggattccagagcccaggtttctacatagcaggggctttagattattttaaaaaaaaaaaaaaaaaaaaaaaaaaaaaaaaaaaaaaaaaaaaaaaaaaaaaaaaaaaaaag

SEQ ID NO: 53722 - protein, 302 aa, Glycine max
  peptide (1)..(302): Ceres Seq. ID no. 15170407
MAENPSETVLSSSQPPPPPPSSSSSSSQKSPQDSPQVPALSNFMPFPSGYYYQMIPGMYPALVPGLTLPQHEEHGNRGAGIYAVPVNPYDRQVTGLPYNTLIPLTYRTPTSRPSSEATVASENQGQAGQQPQQQQPAPQRQVVVRRFQIAFQIDLLLMLKLAAVIFLFNQDGSRQRLIVLVFFAALVYLYQTGALTPIIRWLSRGMQRAAAPPHPPRPAARAENVPAPRPEGDNAAPAEGQPEAENGNQPANDADQAVENENVAEHGNVNGGNQWWGIVKEIQMIVFGFITSLLPGFHNHMD

SEQ ID NO: 53723 - protein, 259 aa, Glycine max
  peptide (1)..(259): Ceres Seq. ID no. 15170408
MPFPSGYYYQMIPGMYPALVPGLTLPQHEEHGNRGAGIYAVPVNPYDRQVTGLPYNTLIPLTYRTPTSRPSSEATVASENQGQAGQQPQQQQPAPQRQVVVRRFQIAFQIDLLLMLKLAAVIFLFNQDGSRQRLIVLVFFAALVYLYQTGALTPIIRWLSRGMQRAAAPPHPPRPAARAENVPAPRPEGDNAAPAEGQPEAENGNQPANDADQAVENENVAEHGNVNGGNQWWGIVKEIQMIVFGFITSLLPGFHNHMD

SEQ ID NO: 53724 - protein, 249 aa, Glycine max
  peptide (1)..(249): Ceres Seq. ID no. 15170409
MIPGMYPALVPGLTLPQHEEHGNRGAGIYAVPVNPYDRQVTGLPYNTLIPLTYRTPTSRPSSEATVASENQGQAGQQPQQQQPAPQRQVVVRRFQIAFQIDLLLMLKLAAVIFLFNQDGSRQRLIVLVFFAALVYLYQTGALTPIIRWLSRGMQRAAAPPHPPRPAARAENVPAPRPEGDNAAPAEGQPEAENGNQPANDADQAVENENVAEHGNVNGGNQWWGIVKEIQMIVFGFITSLLPGFHNHMD

SEQ ID NO: 53725 - DNA, 768 bp, Glycine max
  misc_feature (1)..(768): Ceres Seq. ID no. 14304183
gaattccatggcgacgagtgggtcagagacaaagcaagtgatggtgattggaatcgacgacagtgatttcagcacgtacgctctccaatggactctggatcacttgctatcccctgcaaatgttcctaagttcaagatttttcttgtttatgccaagccttctgttgcctctgctgtcggttttgttggccctggagccgctgaggtgttacctgttgttgaggccgatttgagaaaaacagctgccaaaatcactgaacgtgctacagaactatgcaagaagaaatccgtaaatgacgtagcagtggaagtgctagaaggtgatcctagaaatgttctttgcgaggcagtggaaaagcaccaagcttcaatgttggttgtgggtagtcatggttatgggactttaaaaagagcggttttaggtagtgtaagtgactattgtgctcatcatgctcactgcactgtcatgatcgtgaagaaaccaaagcacaaacactgatctcaatcgttggctccgattaaatagcagtgcacataaatcttttcagcaacagggaaaataaatgttcttaagaattcataatattgttttctgcatgcctagctgactttgtggtttaaggttcatttacttttttattttcaaagttacaacccacaaataatgtatgtaagcacaatactttttccttcacggccactggtggtgcttggtttattttgttcaagagcaatttatttaaataaatgtcactgttgtgtgtgtat

SEQ ID NO: 53726 - protein, 165 aa, Glycine max
  peptide (1)..(165): Ceres Seq. ID no. 14304184
NSMATSGSETKQVMVIGIDDSDFSTYALQWTLDHLLSPANVPKFKIFLVYAKPSVASAVGFVGPGAAEVLPVVEADLRKTAAKITERATELCKKKSVNDVAVEVLEGDPRNVLCEAVEKHQASMLVVGSHGYGTLKRAVLGSVSDYCAHHAHCTVMIVKKPKHKH

SEQ ID NO: 53727 - protein, 163 aa, Glycine max
  peptide (1)..(163): Ceres Seq. ID no. 14304185
MATSGSETKQVMVIGIDDSDFSTYALQWTLDHLLSPANVPKFKIFLVYAKPSVASAVGFVGPGAAEVLPVVEADLRKTAAKITERATELCKKKSVNDVAVEVLEGDPRNVLCEAVEKHQASMLVVGSHGYGTLKRAVLGSVSDYCAHHAHCTVMIVKKPKHKH

SEQ ID NO: 53728 - protein, 152 aa, Glycine max
  peptide (1)..(152): Ceres Seq. ID no. 14304186
MVIGIDDSDFSTYALQWTLDHLLSPANVPKFKIFLVYAKPSVASAVGFVGPGAAEVLPVVEADLRKTAAKITERATELCKKKSVNDVAVEVLEGDPRNVLCEAVEKHQASMLVVGSHGYGTLKRAVLGSVSDYCAHHAHCTVMIVKKPKHKH

SEQ ID NO: 53729 - DNA, 1710 bp, Glycine max
  misc_feature (1)..(1710): Ceres Seq. ID no. 14311131
tgtttttgggtcggccctacttttcagaaccttaggcccactttggcaactacttattctatgctatgctctattattttttttttaatttacgctatatttggctcacttattactctataaaaaatattcgggtactaaaatgttaaatgatacatgacacatagtgagagataaaagaaaaacaatataaatattattagagtatgatgtgattaaaattgaaaaaaaattatcaatgttaattaagataactttcacctaacaactcttgttaaaaataattttatattatttctcagattttcttatgatgtcacatcaagattactgagacgaaaagaatgagagtgagtgtttcgtggttttttttttttacttcacaattgatgcatgaatgatgctcaccaatgatattttttttttcaccttttgttgagtttcatgaataattgagaatcgaccgggtttggttcgaacaaaaccaagtcatgtcaattcagattgaaatttggaaggaagaaaagaaaaatgagccgacttgaccgagctctccttcatccaatttggtttaggttcatgcttgaatctaacccaaataggtccatttctttgtcatatcactattgatgttgtgttctctaaaaattaccgtcaaaagtaccaactgaagagaaaccttcattgttgaaaaaaaaaggcaacttccaatgaagaatggaagttgcccttaggtatttgtaaaaataggttattagaaaaccgttgctattaattaaattatatacatcaccgaaacttaatcttattgtacgttatgcatgctttcagctgtggttggagacggattcatagcaaagggtataacctttgaaaattctgctgggccaagcaaacaccaagccgtggccctaaggagtggttctgatttctcagccttctataaatgcagcttcgttgcctaccaagatactctctatgtccactccctgcgccaattctaccgcgattgtgacgtttatggcacagtcgacttcatcttcggcaatgcagcaacagtgctccagaactgcaacttgtacgcacgcaagcccaatgaaaaccaaaggaacttgttcactgcacaaggaagagaagaccctaaccaaaacaccggcatttccatcttgaactgcaaggttgcagcagctgctgatttaatcccggtcaaatctcagttcaagaactacttgggtcgtccttggaagaagtattcgagaactgtttatcttaattcttacatggaggatctgatagaccccaaagggtggttggagtggaatggcacgtttgcattggatacgttgtattatggagagtacaacaataggggtcccggttcaaacacaagtgcaagagttacgtggcctggttatagggttatcaagaacgccactgaggcaaaccagttcacagttcgcaatttcattcaagggaatgaatggttgagttccaccgacattccattcttctctgatttcagttgaatacgttatggttattagtggcttcatgctcttttggtatccccatttaataaagtattagatgtttgttgtggaaatagaattcaaggaatgttattgttccttgcgacaaaagcactaactaaaataaaaaagtattttatattaattttttatcgataaatattaatttattaattttatt

SEQ ID NO: 53730 - protein, 234 aa, Glycine max
  peptide (1)..(234): Ceres Seq. ID no. 14311132
MLSAVVGDGFIAKGITFENSAGPSKHQAVALRSGSDFSAFYKCSFVAYQDTLYVHSLRQFYRDCDVYGTVDFIFGNAATVLQNCNLYARKPNENQRNLFTAQGREDPNQNTGISILNCKVAAAADLIPVKSQFKNYLGRPWKKYSRTVYLNSYMEDLIDPKGWLEWNGTFALDTLYYGEYNNRGPGSNTSARVTWPGYRVIKNATEANQFTVRNFIQGNEWLSSTDIPFFSDFS

SEQ ID NO: 53731 - DNA, 1867 bp, Glycine max
  misc_feature (1)..(1867): Ceres Seq. ID no. 14311305
aactgttttgagtttccaaccttaaaagactctcttttctctctctgaactctgaagcaaaacaacattaccagagtggttcttgtaattcagtgctgctagaagatggaaactagtgaatggcatatcgagcgaagatctagcttcggctctgaatcccccttagcaagagaggcaggaaatgtgcctgaaactgggtcactctctattgtggtgcttggtgcttctggtgatcttgctaagaagaagacatttcctgcacttttccacctatacctgcagggattcttaccaccagatgaagttcatatttttggctatgcaaggacaaaaatctctgatgatgaattgagaaaccggttgcgcggctatcttgttccaaagaaaggtgcttccccccaacagttggaggatgtagagaagtttttacagctgatcaaatatgtaagcggctcttatgattctgaggatggcttccgcctgttggataaagagatttcagagcatgaatatttgaaaaacagtgttgagggtttatctcggaggcttttctatcttgctcttccaccttcagtatatccatcagtttgcaagatgatcaagacttgttgcatgaataaatctgatcttggtggatggacacgtgttgttgttgagaaaccttttggtaaggatctagaatctgcagaggaactcagtactgagattggaaagttgtttgaggaaccacagatttatcgtattgatcactacttgggaaaggaactagtgcagaacttgttggtacttcgctttgcaaatcggtttttcttgccactttggaaccgcgacaacattgacaacgtacagatagttttcagagaggattttggaactgatggccgtggtggatattttgaccagtatggaattattcgagatattattcaaaaccatctgctgcaggttctttgcttggttgctatggaaaaaccagtttctctcaggcctgagcacattcgggatgagaaagtgaaggttcttgaatcagtgctccctattaatgatgatgaggttgttcttggacaatatgaaggctataaagatgacccaaccgtacctgatgagtctaacaccccaacatttgcaactgttgttctgcgaatacacaatgaaagatgggaaggtgttcctttcatactaaaagcagggaaggcactaaattctagaaaggcagagataagggttcaattcaaggatgtccctggtgatattttcaagtgtaaaaagcaggggagaaatgagtgtgttatccgcctacagccttcagaagctatttacatgaagcttacggtcaagcaacctggactggagatgtctacggttcaaagtgagcttgacttgtcatatggacaacggtatcaaggagtaaccattcctgaggcttatgaacgcctaattcttgacacaattagaggtgatcagcaacattttgttcgcagagatgagttgaaggcatcctggcagatcttcaccccacttctgcacagaattgatgaaggggaattcaagccactcccctacaaaccaggaagcagaggtcctgcagaagcagatcagttacttgaaaaagctggctatgttcaaacacacggctacatatggatccctcctaccttgtagagtgatctaatgtaataagatgaggaatttttagctgctaatgaatacacaataagcttgtgaggcttcttccctttgaagcactcccacggatgtgtatcaagcatttggaacaatataagagactaagagtgtttggcacggtttgtgtaactgatttgcctttaaatgcaaaataaatggaaaatgaagtccatttactagc

SEQ ID NO: 53732 - protein, 518 aa, Glycine max
  peptide (1)..(518): Ceres Seq. ID no. 14311306
METSEWHIERRSSFGSESPLAREAGNVPETGSLSIVVLGASGDLAKKKTFPALFHLYLQGFLPPDEVHIFGYARTKISDDELRNRLRGYLVPKKGASPQQLEDVEKFLQLIKYVSGSYDSEDGFRLLDKEISEHEYLKNSVEGLSRRLFYLALPPSVYPSVCKMIKTCCMNKSDLGGWTRVVVEKPFGKDLESAEELSTEIGKLFEEPQIYRIDHYLGKELVQNLLVLRFANRFFLPLWNRDNIDNVQIVFREDFGTDGRGGYFDQYGIIRDIIQNHLLQVLCLVAMEKPVSLRPEHIRDEKVKVLESVLPINDDEVVLGQYEGYKDDPTVPDESNTPTFATVVLRIHNERWEGVPFILKAGKALNSRKAEIRVQFKDVPGDIFKCKKQGRNECVIRLQPSEAIYMKLTVKQPGLEMSTVQSELDLSYGQRYQGVTIPEAYERLILDTIRGDQQHFVRRDELKASWQIFTPLLHRIDEGEFKPLPYKPGSRGPAEADQLLEKAGYVQTHGYIWIPPTL

SEQ ID NO: 53733 - protein, 355 aa, Glycine max
  peptide (1)..(355): Ceres Seq. ID no. 14311307
MIKTCCMNKSDLGGWTRVVVEKPFGKDLESAEELSTEIGKLFEEPQIYRIDHYLGKELVQNLLVLRFANRFFLPLWNRDNIDNVQIVFREDFGTDGRGGYFDQYGIIRDIIQNHLLQVLCLVAMEKPVSLRPEHIRDEKVKVLESVLPINDDEVVLGQYEGYKDDPTVPDESNTPTFATVVLRIHNERWEGVPFILKAGKALNSRKAEIRVQFKDVPGDIFKCKKQGRNECVIRLQPSEAIYMKLTVKQPGLEMSTVQSELDLSYGQRYQGVTIPEAYERLILDTIRGDQQHFVRRDELKASWQIFTPLLHRIDEGEFKPLPYKPGSRGPAEADQLLEKAGYVQTHGYIWIPPTL

SEQ ID NO: 53734 - protein, 349 aa, Glycine max
  peptide (1)..(349): Ceres Seq. ID no. 14311308
MNKSDLGGWTRVVVEKPFGKDLESAEELSTEIGKLFEEPQIYRIDHYLGKELVQNLLVLRFANRFFLPLWNRDNIDNVQIVFREDFGTDGRGGYFDQYGIIRDIIQNHLLQVLCLVAMEKPVSLRPEHIRDEKVKVLESVLPINDDEVVLGQYEGYKDDPTVPDESNTPTFATVVLRIHNERWEGVPFILKAGKALNSRKAEIRVQFKDVPGDIFKCKKQGRNECVIRLQPSEAIYMKLTVKQPGLEMSTVQSELDLSYGQRYQGVTIPEAYERLILDTIRGDQQHFVRRDELKASWQIFTPLLHRIDEGEFKPLPYKPGSRGPAEADQLLEKAGYVQTHGYIWIPPTL

SEQ ID NO: 53735 - DNA, 1536 bp, Glycine max
  misc_feature (1)..(1536): Ceres Seq. ID no. 15175476
aaattaaggcagagaatgcttcattgccaattactgcagagacatcctctggaacttcagggattcctgcccacgaatgtaaatcaggaccttgttctaagcggcataacaggaaagaaatagcagcacttagacagagattccttcatatggagaaaacttacaggtcttgtggaaaaggaagttttaaatcaggaggtaagtctggaacattacctgcaaaggatacaatatctacttctcggatggtgaatgcaaacacttcaacacctggcaatatgtccaaaccaaaatctgagctaagcttttctgtcaagattcttgattactgtgctgatattccttttgatgaggctttgggtaagtatgtcccacgggatgagaaggataggctaattttgaagttaataactcgagtgcaagaattgcagaatgagctacatggctggaacaactggacaaatcagaaggttatgcaggttaccaataggcttggcaaactacaggctgagtttaaaactctgaggaaggagaagcaagatgctgaactgttgaaaaaagataagaaaattgtggaggagaatgctgtgaagaggatatctgaaatggagaatgccatggaaaatactaaaaagcaaattgagagtgctgcttctgctactcttgtgttagaggcagaaaattccttgttaaagaaggagttggatgctgctaagttgtgggttgtaaagtcaatgacaagccatcaacaagcactggagagagagcagatggctcttaaacaggcccagatattggaaagccagaacagtttgcttcgagatgagcttgagagagagaagcacaaattatttaatctgcaacaggagctacacaaagagacaaatcttcaagccaaggttgagggtagattggctaaagagagagctgcaaaagaaaagctccttgcacaggctgcatccattaaaaaggagagagagcaacttgaacagcacatgaaatctgaggaggatatggctagaaagaaggcagctactgatctgcagaaatatgtggaagatattggaaagctagagaaggagttggttgacttgaaactaaaatctgattctgaaaaaatagcagcacttcgtaggtgtgttgatgtaaggaatgatagtttctcaagaaccaagagtgctccaaacatgaagggaaacaagaaatctgatacgtcacaaacattggtgagctaccaagacaaattggctgctggaagtttgaggcgtgagcaggagtgtgtcatgtgcctatcagaggagatgtcagtagtttttctgccatgtgcacatcaggttgtgtgtcctgaatgcaatgagctccatgagaaacaagggatgaaggaatgcccttcatgtagggccccaatccaacgtaggattcatgctagatttgctcggcattagagagtatagactttcctgaatgaatgggaatcgtgaagaaatacattatgtccccccccccctccccccccaaaaaaaaacaataggaaac

SEQ ID NO: 53736 - protein, 480 aa, Glycine max
  peptide (1)..(480): Ceres Seq. ID no. 15175477
IKAENASLPITAETSSGTSGIPAHECKSGPCSKRHNRKEIAALRQRFLHMEKTYRSCGKGSFKSGGKSGTLPAKDTISTSRMVNANTSTPGNMSKPKSELSFSVKILDYCADIPFDEALGKYVPRDEKDRLILKLITRVQELQNELHGWNNWTNQKVMQVTNRLGKLQAEFKTLRKEKQDAELLKKDKKIVEENAVKRISEMENAMENTKKQIESAASATLVLEAENSLLKKELDAAKLWVVKSMTSHQQALEREQMALKQAQILESQNSLLRDELEREKHKLFNLQQELHKETNLQAKVEGRLAKERAAKEKLLAQAASIKKEREQLEQHMKSEEDMARKKAATDLQKYVEDIGKLEKELVDLKLKSDSEKIAALRRCVDVRNDSFSRTKSAPNMKGNKKSDTSQTLVSYQDKLAAGSLRREQECVMCLSEEMSVVFLPCAHQVVCPECNELHEKQGMKECPSCRAPIQRRIHARFARH

SEQ ID NO: 53737 - protein, 431 aa, Glycine max
  peptide (1)..(431): Ceres Seq. ID no. 15175478
MEKTYRSCGKGSFKSGGKSGTLPAKDTISTSRMVNANTSTPGNMSKPKSELSFSVKILDYCADIPFDEALGKYVPRDEKDRLILKLITRVQELQNELHGWNNWTNQKVMQVTNRLGKLQAEFKTLRKEKQDAELLKKDKKIVEENAVKRISEMENAMENTKKQIESAASATLVLEAENSLLKKELDAAKLWVVKSMTSHQQALEREQMALKQAQILESQNSLLRDELEREKHKLFNLQQELHKETNLQAKVEGRLAKERAAKEKLLAQAASIKKEREQLEQHMKSEEDMARKKAATDLQKYVEDIGKLEKELVDLKLKSDSEKIAALRRCVDVRNDSFSRTKSAPNMKGNKKSDTSQTLVSYQDKLAAGSLRREQECVMCLSEEMSVVFLPCAHQVVCPECNELHEKQGMKECPSCRAPIQRRIHARFARH

SEQ ID NO: 53738 - protein, 399 aa, Glycine max
  peptide (1)..(399): Ceres Seq. ID no. 15175479
MVNANTSTPGNMSKPKSELSFSVKILDYCADIPFDEALGKYVPRDEKDRLILKLITRVQELQNELHGWNNWTNQKVMQVTNRLGKLQAEFKTLRKEKQDAELLKKDKKIVEENAVKRISEMENAMENTKKQIESAASATLVLEAENSLLKKELDAAKLWVVKSMTSHQQALEREQMALKQAQILESQNSLLRDELEREKHKLFNLQQELHKETNLQAKVEGRLAKERAAKEKLLAQAASIKKEREQLEQHMKSEEDMARKKAATDLQKYVEDIGKLEKELVDLKLKSDSEKIAALRRCVDVRNDSFSRTKSAPNMKGNKKSDTSQTLVSYQDKLAAGSLRREQECVMCLSEEMSVVFLPCAHQVVCPECNELHEKQGMKECPSCRAPIQRRIHARFARH

SEQ ID NO: 53739 - DNA, 1393 bp, Glycine max
  misc_feature (1)..(1393): Ceres Seq. ID no. 15169358
aaatataaactaggaatagctattttgttggaaggaggtaaaggaagttcgtgacaaaagcggcaatggaaggagaagagggttcccagcagccacagttggtgctcggggacaagctattccttcttcgacaacccgatgttcaagacattgacaaggttcgctacaaggaggatgttttcactcacatcaaccaaaacgatatggtccccttgtatgaaaccctagtggccgattccgtgttggacttggatcgtgccctcttggactctatgcgcgctaaaattcacgatgagctcgccaacctcgacgaaaagattgctgatgctgaggaaaacttaggagagagtgaagttcgtgaggctcacttggcaaaatccttgtttttcatccggattatggacaaggagaaagccttggaacatctcaaggtaacagaaaccaagacagttgctgttggccagaaaatggacttggtgttttatacattgcagcttggtttctttgacatggattttgatctcatttccaagagcattgacaaagccaaaaacttgtttgaagaaggtggtgattgggaaaggaagaataggctgaaagtgtacgaaggactgtactgcatgtccactcgaaatttcgagaaggctgccaagttgtttttggattccatttcaacctttaccacctatgaactttttccctatgacacctttatattttatacagttttgaccagcattatatcattggatagagtttccctaaagcaaaaggtagtggatgctccagagatcttgacagtgattggcaaaatcccttatctttcagagtttttgaactccttatatgattgtcaatacaagtcttttttctcagcatttgctggcctgacggagcaaattaagttggaccgctatctgcatccacacttccgatattacatgagggaggtcagaaccgttgtttattcccaatttttggaatcttacaagagtgtgacaattgaagccatggcaaaagcctttggagtgacagaggatttcattgatgtggagctatcacgctttattgcagcagggaagcttcattgtaagattgataaagttgaaggtgttcttgaaactaatcgccctgatgctaagaatgctctttaccaagcaactattaagcaaggggacttcctattgaatcggatccagaaattgtcacgtgtgatagatctttaggtcattttttgcattttagactaaaagtttattggaaaggcagagataacgacaatttcacggtattttactacgagggtgaggcacggcatttctgtagtccatttgatgtgcaaatatgattaattaaatttgtcaaatccaaatatgtcaatcagttttcaatt

SEQ ID NO: 53740 - protein, 386 aa, Glycine max
  peptide (1)..(386): Ceres Seq. ID no. 15169359
MEGEEGSQQPQLVLGDKLFLLRQPDVQDIDKVRYKEDVFTHINQNDMVPLYETLVADSVLDLDRALLDSMRAKIHDELANLDEKIADAEENLGESEVREAHLAKSLFFIRIMDKEKALEHLKVTETKTVAVGQKMDLVFYTLQLGFFDMDFDLISKSIDKAKNLFEEGGDWERKNRLKVYEGLYCMSTRNFEKAAKLFLDSISTFTTYELFPYDTFIFYTVLTSIISLDRVSLKQKVVDAPEILTVIGKIPYLSEFLNSLYDCQYKSFFSAFAGLTEQIKLDRYLHPHFRYYMREVRTVVYSQFLESYKSVTIEAMAKAFGVTEDFIDVELSRFIAAGKLHCKIDKVEGVLETNRPDAKNALYQATIKQGDFLLNRIQKLSRVIDL

SEQ ID NO: 53741 - protein, 340 aa, Glycine max
  peptide (1)..(340): Ceres Seq. ID no. 15169360
MVPLYETLVADSVLDLDRALLDSMRAKIHDELANLDEKIADAEENLGESEVREAHLAKSLFFIRIMDKEKALEHLKVTETKTVAVGQKMDLVFYTLQLGFFDMDFDLISKSIDKAKNLFEEGGDWERKNRLKVYEGLYCMSTRNFEKAAKLFLDSISTFTTYELFPYDTFIFYTVLTSIISLDRVSLKQKVVDAPEILTVIGKIPYLSEFLNSLYDCQYKSFFSAFAGLTEQIKLDRYLHPHFRYYMREVRTVVYSQFLESYKSVTIEAMAKAFGVTEDFIDVELSRFIAAGKLHCKIDKVEGVLETNRPDAKNALYQATIKQGDFLLNRIQKLSRVIDL

SEQ ID NO: 53742 - protein, 317 aa, Glycine max
  peptide (1)..(317): Ceres Seq. ID no. 15169361
MRAKIHDELANLDEKIADAEENLGESEVREAHLAKSLFFIRIMDKEKALEHLKVTETKTVAVGQKMDLVFYTLQLGFFDMDFDLISKSIDKAKNLFEEGGDWERKNRLKVYEGLYCMSTRNFEKAAKLFLDSISTFTTYELFPYDTFIFYTVLTSIISLDRVSLKQKVVDAPEILTVIGKIPYLSEFLNSLYDCQYKSFFSAFAGLTEQIKLDRYLHPHFRYYMREVRTVVYSQFLESYKSVTIEAMAKAFGVTEDFIDVELSRFIAAGKLHCKIDKVEGVLETNRPDAKNALYQATIKQGDFLLNRIQKLSRVIDL

SEQ ID NO: 53743 - DNA, 1640 bp, Glycine max
  misc_feature (1)..(1640): Ceres Seq. ID no. 13579556
caactgccaccaacccttcgccgcacggtgggcgtggtgctttgccttctgaaggtggtagcccttcagacttgctcttcttagctggtggtggttctgctgtcttctagcttcttcttaactcttttttctttttactacttttaagctaccttgttttcaaaataacaaaaacaaacactttcttacttcataagatcaccttttcttcatcttctacttctccttcactaaaatgatgctcaaaatcaagagggttcccactgtcgtttccaacttccaaaaagacgacgctgcagactctcctcgtcccgtcggaggttgtggtcggaattgcctcaaagcttgttgcattccagatgcaaagctgcctttgtatggtttcaagaaggctaatattgggaaggatttggccctgcatgcatgcgccggggagcctcccctcgcattcctcgactctcttcttcttggagagtgggaagatcgcatgcagagaggactttttcgctatgatgttaccgcctgtgaaaccaaggtgattcctggtgaatatggtttcgttgcccagcttaacgagggtcgtcacctcaagaagaggccaactgagttccgagttgataaggtccttcaaccctttgatgaaaacaaattcaactttaccaaagtcgggcaagaagaggtcctcttccaatttgaagctagcgaggatggacaagtccagttctttccaaatgctccagttgatgttgacaattctcccagctttgttgccatcaatgtcagtcctattgagtatgggcatgttttgctgattccgcgcatatttgagtgtttgcctcaaaggattgaccgtgagagcttcctccttgcacttcagatggcagtggaagccgataatccttattttcgattgggttacaacagcttgggtgcttttgcaactatcaaccattcttcacttccaggcttattatttggctctgcccttcccaattgagaaggcccccactaagagaattgcaagtgtaaatggtggggtgaagatatctgaactgttgaagtatccggttagaggctttgtctttgagggcggcgaaatgctggaagatctatcmaacgttgtttcagatgcatgtatatgtcttcagaacaacaacatacctttcaatgttythatctctghctgtggaaascaagtgtatrcactgttaccacagtgttatgcagagaaacaagctcttggagaagtgaatgctgagcttcttgacacccaagtgaatcctgctgtgtgggaaattagtggrcacatggttttaaagaggaggaaggattatgatgaggcgtctgaaggcaatgcttggaggcttcttgctgaggtgtccctttctcaagagaggtttcaagaagtcaatgatcttgtttttgaagccattggctgtggtgaattggaggatgtcaatgttcaaagtgtcaaaaaagaagttgatgcagtcagcacaagcgaacaccctactgtggtggtggtggctggttcacaagaatgtgtggttctacagtaacaaggctcttgtattttgaacaaattcagaaaatctgcagtgttttaagaataattgctgaaatgtgtcaccgtttaagtc

SEQ ID NO: 53744 - protein, 253 aa, Glycine max
  peptide (1)..(253): Ceres Seq. ID no. 15222687
MMLKIKRVPTVVSNFQKDDAADSPRPVGGCGRNCLKACCIPDAKLPLYGFKKANIGKDLALHACAGEPPLAFLDSLLLGEWEDRMQRGLFRYDVTACETKVIPGEYGFVAQLNEGRHLKKRPTEFRVDKVLQPFDENKFNFTKVGQEEVLFQFEASEDGQVQFFPNAPVDVDNSPSFVAINVSPIEYGHVLLIPRIFECLPQRIDRESFLLALQMAVEADNPYFRLGYNSLGAFATINHSSLPGLLFGSALPN

SEQ ID NO: 53745 - protein, 252 aa, Glycine max
  peptide (1)..(252): Ceres Seq. ID no. 15222688
MLKIKRVPTVVSNFQKDDAADSPRPVGGCGRNCLKACCIPDAKLPLYGFKKANIGKDLALHACAGEPPLAFLDSLLLGEWEDRMQRGLFRYDVTACETKVIPGEYGFVAQLNEGRHLKKRPTEFRVDKVLQPFDENKFNFTKVGQEEVLFQFEASEDGQVQFFPNAPVDVDNSPSFVAINVSPIEYGHVLLIPRIFECLPQRIDRESFLLALQMAVEADNPYFRLGYNSLGAFATINHSSLPGLLFGSALPN

SEQ ID NO: 53746 - protein, 169 aa, Glycine max
  peptide (1)..(169): Ceres Seq. ID no. 15222689
MQRGLFRYDVTACETKVIPGEYGFVAQLNEGRHLKKRPTEFRVDKVLQPFDENKFNFTKVGQEEVLFQFEASEDGQVQFFPNAPVDVDNSPSFVAINVSPIEYGHVLLIPRIFECLPQRIDRESFLLALQMAVEADNPYFRLGYNSLGAFATINHSSLPGLLFGSALPN

SEQ ID NO: 53747 - DNA, 1849 bp, Glycine max
  misc_feature (1)..(1849): Ceres Seq. ID no. 14304678
gttgttacttagtgcaggtaagttaagaaaatggtatccatttcccaagcacaccattgacttggtacagtttcgagggcgcatcatcatcaccgattcaccgatgggtgacgcgaacttcgccttctttgttctctttcttcttcccgtgtttcttctggcggtgctctacttcctggtccgtccgcgtcccgtgaagatcccgattaagaaccggcacgttttcatcacgggcggatccagcggtatcgggctggcgctggcgcaccgcgcggcggcggagggtgcgcgcgtctcgatcctcgcccggtcaccggacaagctagaggaggcgcgcaacgcgatccgcctcgccacagggatggaggtggcggcattcgcggcagacgtgcgggacttcgaggcggtgaagcgcgcggtcgacgatgcgggccccatcgacgtgctgctgctgaaccacggcgtcttcgtggcgctggagctggataagatggaactgagtgaggtcaagttcaccatggacgtaaatctcatgggaacgttgaatctcatcaaggccgcgctgcctgcaatgaagaaccgcaacgatccgctgcccgcttccattgctcttgtttcctcacaggccggtcaggtgggaatttatggttatgtagcttattcggcaagtaaatttggtcttcgtggtttagcagaatcattgcaacaagaggttatagaagataacattcatgtttctatgatattccctccagatacggatactcctgggttagcagaagaaaacaagagaagaccggagctcaccaaaatcattacagcctcctctggttctatgaaagctgatgaagttgctcagaaagctttggatggtataaaatgtggcgattttattgtttcttgcaatttcgagggaattgcactatccctagcaactgcaggtttatcccctcagaggtctttcttaatggcgtttcttgaggttgttgctgctggaatcctacggattgttgcactaggtatgcagtggacttggtatagaagtatagagaaatatcacagccaaaggaagggtaagtgttgcacaaaattatatatctatgaagggatgaggaaatcatctcttattttgtcttaatttaattctcatttggccaataacttgttaagattaacaaaaaagtgttacttattctatctatctattggttcctatagtttacccagtttccaaattagtctctagaatttaaaagtttcacattagacccatagaattaccaaatgtttctgattggctcccaattgtgaccaaatgtacggcatctgttaattagagccgacatgggaaatggtgaggttgtggcaaccacttttgcttgcttggactagagaggtggccaaattaatccatttctctcccgggatagtgaaaatcaaatcacatgacagtgtagggcacatgaaatgggttgatttggttaccttatgatacacacaagcaaaatcattgccacatcaattcaccatatgcttatcatagcactaactaacagatgcccagcagttggtaaaggtattggttttggaccaaattagaaacatttagcaattccaaggatccatttagaaacttttaagcaacaggaactaatttaaacttgggttaaactatggaccaataaaatatttaaagtataaaaccattaacaagcttcaaagtggttactaagagtttgcattggatattagtcattaacaatttgtttagcaatttgcatgaaccatgcccatttatgttcctgggctgtagaagtcataatgtaatactaaggcagtctttctaatc

SEQ ID NO: 53748 - protein, 378 aa, Glycine max
  peptide (1)..(378): Ceres Seq. ID no. 14304679
LLLSAGKLRKWYPFPKHTIDLVQFRGRIIITDSPMGDANFAFFVLFLLPVFLLAVLYFLVRPRPVKIPIKNRHVFITGGSSGIGLALAHRAAAEGARVSILARSPDKLEEARNAIRLATGMEVAAFAADVRDFEAVKRAVDDAGPIDVLLLNHGVFVALELDKMELSEVKFTMDVNLMGTLNLIKAALPAMKNRNDPLPASIALVSSQAGQVGIYGYVAYSASKFGLRGLAESLQQEVIEDNIHVSMIFPPDTDTPGLAEENKRRPELTKIITASSGSMKADEVAQKALDGIKCGDFIVSCNFEGIALSLATAGLSPQRSFLMAFLEVVAAGILRIVALGMQWTWYRSIEKYHSQRKGKCCTKLYIYEGMRKSSLILS

SEQ ID NO: 53749 - protein, 344 aa, Glycine max
  peptide (1)..(344): Ceres Seq. ID no. 14304680
MGDANFAFFVLFLLPVFLLAVLYFLVRPRPVKIPIKNRHVFITGGSSGIGLALAHRAAAEGARVSILARSPDKLEEARNAIRLATGMEVAAFAADVRDFEAVKRAVDDAGPIDVLLLNHGVFVALELDKMELSEVKFTMDVNLMGTLNLIKAALPAMKNRNDPLPASIALVSSQAGQVGIYGYVAYSASKFGLRGLAESLQQEVIEDNIHVSMIFPPDTDTPGLAEENKRRPELTKIITASSGSMKADEVAQKALDGIKCGDFIVSCNFEGIALSLATAGLSPQRSFLMAFLEVVAAGILRIVALGMQWTWYRSIEKYHSQRKGKCCTKLYIYEGMRKSSLILS

SEQ ID NO: 53750 - protein, 258 aa, Glycine max
  peptide (1)..(258): Ceres Seq. ID no. 14304681
MEVAAFAADVRDFEAVKRAVDDAGPIDVLLLNHGVFVALELDKMELSEVKFTMDVNLMGTLNLIKAALPAMKNRNDPLPASIALVSSQAGQVGIYGYVAYSASKFGLRGLAESLQQEVIEDNIHVSMIFPPDTDTPGLAEENKRRPELTKIITASSGSMKADEVAQKALDGIKCGDFIVSCNFEGIALSLATAGLSPQRSFLMAFLEVVAAGILRIVALGMQWTWYRSIEKYHSQRKGKCCTKLYIYEGMRKSSLILS

SEQ ID NO: 53751 - DNA, 1370 bp, Glycine max
  misc_feature (1)..(1370): Ceres Seq. ID no. 15175900
gaaggtaagatcgatagcagaaaaggaaaaaatgacgatggacgatgatagctccatatatgtagggggtcttccctacgacgccaccgaagaaaccattcgcaccgtcttcaatttgtatggcgctatccttgatgttaagataatcaacgacccacgcaccaggggcaagtgctattgttttgttactttcacaaatcctaggtctgcaattgatgccatcaacgacatgaatggcagaaccattgacggccgtgtggttaaagttaacggggtgaggactcgtgggggcaggtcaaattttggcagagaacgttattactatcataatgatgagaggaatggagattgggatcgcagtagggatcgagaccgagattatgatcatgatagtaatgatagggatggatataggaatcggagcagtgattggggtcgagaccgtgacaggtctcgagatcgtgatcaggacagggatagaaggtttgagcatatgcatgattatgatcaagccagagaagctatgctagaaaatgactggatccgagaggatgatagagttgaaaatgaacaagaacatagcaggggacatggtggagatgttgatagagatcacaacatagatttgaatgtagacaggaaaatggataggaccagtgatcctgatagaagttttggtgaggatagaaaagatcagtcaaggagaaacaatgacttgaatgttacaaatcaacatatcatggatctttcatcagattcagctggtactcacaatgagcagttagaagctcaattagagaggtcaactcaacagcttgatcaactaaaaaaggaggtttctcagatggaagagggattggaagagaaaagactccatgttaaggaattacaaaagcaatctaagaaactggaggatgcagtgatcaatgcaaagaaaaactcttcatatcgtcagatgcagttgatgaagctgcataaaggttttctgcaagtgaaagattgcacagaaaaactaaaaactagtgaaaaagaacttcaggctctaattgatacagcaatgtcagagattgactgtgatggattaaaggatggacaactaacaaatggaagtcttgatggtagattgtaatatatctttcggaggttcagattgtgtcattgatgcttaaaatgtgtttagcacagaataccctaatgttatatggagaagaaaaaaaggctggataattattctcttttattattccgctccagtctctactaaataacattaatagagttttgtttatacttttaagttgttggtaaacttggtcattgtaacttcctttgttataaattttcactagagaaaaccagctgacttcttg
